United States Patent Application Publication US 2007/0054278 A1 - sequence listing, part 113

SEQ ID NO: 114079 - DNA, 201 bp, Homo sapiens
ttctgctgacataattggaatatctgaatccatatgataaggagtcctgtttcaagtaatttaggcagactatgtacttcagaaaacaagactgagccatraaaagggaggaggaggcacacagaccctgagatctttggtgagtgtgtctcaggcggatccgaagctgacaaaccatgtgagtgtgtatggccatgaaaa

SEQ ID NO: 114080 - DNA, 201 bp, Homo sapiens; identical to SEQ ID NO: 19097

SEQ ID NO: 114081 - DNA, 201 bp, Homo sapiens
gtttcaaaaaaaaaaaaaagagtttgttgctcccaccgagttctggagaacgccagcagctcgctgcttaaaattaaaccacagggttccatgatgggtcracttgatgggaaagtcatcatcctgacagccgctgctcaggggattggccaagcagctgccttagcttttgtaagagaaggtgccaaagtcatagccaca

SEQ ID NO: 114082 - DNA, 201 bp, Homo sapiens
aaataaaaatattgaactcacagcaagagaatagtttttaaaataaatctcaatttgtaagcatctgtgttagtcactttgggctgctataacaaattacyatagatggagtgtcatagacaacaaacatttatttttcagtctggaggctaggaagtgcaagatcaaggtgccagcagatatggtatctggttagggccc

SEQ ID NO: 114083 - DNA, 201 bp, Homo sapiens; identical to SEQ ID NO: 19100

SEQ ID NO: 114084 - DNA, 201 bp, Homo sapiens
gtaatttaggcagactatgtacttcagaaaacaagactgagccataaaaagggaggaggaggcacacagaccctgagatctttggtgagtgtgtctcaggyggatccgaagctgacaaaccatgtgagtgtgtatggccatgaaaactttgaattatctgccagacagagtaagtgccctaaaaccaagatacattttaaa

SEQ ID NO: 114085 - DNA, 201 bp, Homo sapiens; identical to SEQ ID NO: 19101

SEQ ID NO: 114086 - DNA, 201 bp, Homo sapiens
aatattattagaaagttcatttaaataaacctcctatatgaaaaaaagacctctttccaatttgttgaaataagagagtcataatatttatttcatcaagsgggtgtgaggcttagtcaggattcatttacttcattactctttctagggcacttgaaaatttatataatcccatttgtagtttgtaagaccagacttcat

SEQ ID NO: 114087 - DNA, 201 bp, Homo sapiens; identical to SEQ ID NO: 19102

SEQ ID NO: 114088 - DNA, 201 bp, Homo sapiens
cagaatcatcaccaagtcaaggcctccttttctagcacctcattttattcctaaattaaaacagtgataactgtcagaggcatttgaaccagagtgactcygtcttgaaaacaagctgtaaaaataaggctgagacctattggtctgtattcccaggaggttaggcattccaagtcacagcatgagataggaggtcagaaa

SEQ ID NO: 114089 - DNA, 201 bp, Homo sapiens
tctgttcacactaaggcaggggttgtacccagaagaccttgggaagctccaaccccatggctttgctagtctcaccctcacagcagctcttacgggttagycttgctgcttcagctgtccgaggctggggctgcacattggttgctctgcagttctggagtctcaagtgaccctgccatgacacctatactaggtgtagag

SEQ ID NO: 114090 - DNA, 201 bp, Homo sapiens
agacaaatgggggctgaacttgtcttcttataaagaacctactcctgcaataacaaacccacttctcttgataatggcattaatcattcatgagggcaggsccctcatgggctgatcacctcttacaggtcctaccttttaatagtttataatggccattaagtaaactactacttaagtatgctgttttggagacacatt

SEQ ID NO: 114091 - DNA, 201 bp, Homo sapiens
aacttaaagctgtgactagaaaagcaattgtcctcgttgggttcccaagggtagcccaatgggttgatattgtgctggtttatcccaggggacacttaccctgggaaaggagaagaccttgcaggaaatggcctgaagccacctaaagaaagaaagacccagggttagcctaaagtccaagggaaattgaaccaacataaa

SEQ ID NO: 114092 - DNA, 201 bp, Homo sapiens
tgaacatgtttcaaatgctgaattaatgttaatgaatttaagtagctacatatggctagtggctaccattttctatagcagagctttttttttttttttttaataatttcaactttcattttggatgcagggagtacatgcgcagttttttttgtttgtttgtttttgtttttgagatagggtctcaccctgtcacccagg

SEQ ID NO: 114093 - DNA, 201 bp, Homo sapiens
aaacaaatatgtaactacaaagtacatgaaaaaaacagactgctggctgggcatggtggctcacgcctgtaatcccagcactttgggaggctgaggttggygaatcacctgaggtcaggagttcgagaccaggttggccaacatggtgaaaccccatctctactaaaaatacaaaaattagccaggtgtggtggcgtgcac

SEQ ID NO: 114094 - DNA, 201 bp, Homo sapiens
gtgatgaatatgttagcttgctcgtggtaatcattccacagtgtatacagagatgaaaacatcttgttgtacaccttgaatatatacaattttttttttttgtcattctgtgactcctacaccttcttactccctttgtgaccttgggtggactcagcatggtgaccaaagactttcatgatctgaagtgggtgtgccctc

SEQ ID NO: 114095 - DNA, 201 bp, Homo sapiens
aacagtaactacgtgaagtgatgaatatgttagcttgctcgtggtaatcattccacagtgtatacagagatgaaaacatcttgttgtacaccttgaatatrtacaattttttttttttgtcattctgtgactcctacaccttcttactccctttgtgaccttgggtggactcagcatggtgaccaaagactttcatgatct

SEQ ID NO: 114096 - DNA, 201 bp, Homo sapiens
catcctttgacaactggtctggatcaccttctttggctgcatatttttcaaaaatcctcttcagttcctcaggagactttttagtactcattctggtgtcytataaattgggaagaaaataaacttaccaaaaagctgaagtacagttttgtgctgagggttgtctgcaggattttagtgccattgggccatttccttggc

SEQ ID NO: 114097 - DNA, 201 bp, Homo sapiens
cagatcagtctgacactggagtctgagctcttaaacattttagcatgcctgtgaatcctagagaaatttggtttatcatgatgaagtttgttgcatgataragttgaggtctttggaaacccagggcaacagacctaggcactttgcttgcagaaggtatctacagctttctgtatagtgacaacaataaaaagcctagaa

SEQ ID NO: 114098 - DNA, 201 bp, Homo sapiens
tacgtcgtaattgcctaacaggaaaataataggacattttttccctttagcattggaatggaatctagattttttaaaatactatattcccctctctaacwtggaggaatgatagctagcaaacagtgattatttgttttggaaactcagtattgtggaataacagaggcgtagttatcttatatagcttgagtatattct

SEQ ID NO: 114099 - DNA, 201 bp, Homo sapiens
aaacaacgttgggatttctgtttttgttttatgagacagtgtctcactgtgtcgcccaggctggagtgcagtggtgtgatcatagctcactgcagccttgrtctcctgggctcaagtgatcctccaacctcagcctcctgagtagctgggattgtaggcatgccccaccacgcctggctaatttttgtatttttttgtaga

SEQ ID NO: 114100 - DNA, 201 bp, Homo sapiens
tttaggcctgtctccagatctggtgagttgaggacagtgggtaagtctatcctgaaggtctctgggagcaggaccttcacttcttttttttttttttttttaatttgagacggagtcttgctctgtcacccaggctggagtgcagtggtgcagtcttggctcattgcaacctccgcctcctgggttcaagcgattctcctg

SEQ ID NO: 114101 - DNA, 201 bp, Homo sapiens
gctactcaggaggctgaggcaggagaatggcgtgcacccaggaggcggagcttgcagtgagccgacatcgcgccattgcactccagcctgggcaacagagygagactccatctcaaaaataaataaataaataaataaaaataaaaaaagaaaaagaaaaaagactttcattaaagacaaaggcaaaaacaactttgcaca

SEQ ID NO: 114102 - DNA, 201 bp, Homo sapiens
agtcccagctactcaggaggctgaggcaggagaatggcgtgcacccaggaggcggagcttgcagtgagccgacatcgcgccattgcactccagcctgggcracagagcgagactccatctcaaaaataaataaataaataaataaaaataaaaaaagaaaaagaaaaaagactttcattaaagacaaaggcaaaaacaact

SEQ ID NO: 114103 - DNA, 201 bp, Homo sapiens
gtggtggtgggcgcctatagtcccagctactcaggaggctgaggcaggagaatggcgtgcacccaggaggcggagcttgcagtgagccgacatcgcgccaytgcactccagcctgggcaacagagcgagactccatctcaaaaataaataaataaataaataaaaataaaaaaagaaaaagaaaaaagactttcattaaag

SEQ ID NO: 114104 - DNA, 201 bp, Homo sapiens
ctaggcaggtcaatcacttgaggtcaggagttcgagactagactggccaacaagttgaaaccccatctctactaaaaatacaaaaaattagctgggcgtgstggtgcatgcttgtaatcccagctgctagggaggctgacacaggaaaattgcttgaacccaggaggcgttggttgcagtgagctgagatcgtgccattgc

SEQ ID NO: 114105 - DNA, 201 bp, Homo sapiens
atcatacagtatttgtccttttatgagtggcttatttcacttaacatattgtcctcaaggttcatccatattgtagcatgggacaggatttccttcctttygaatgcagaataatattccattgtgtggatggatatgcacattttgtttatccattcatccctcagtgaacatttgggttgcttccaccttttaacttgt

SEQ ID NO: 114106 - DNA, 201 bp, Homo sapiens
ggattgcttgagcccagggagttgaggctgcagtgagccatgattgtaccaccgcactccagtctgggcaatagagtgagaccctgtctcaaaaaaaaaamaaaaacaaaagaaaagaaaaagaaaaagaactgcatgttgaatgaactccacggatgaggcagtgagctgctcccatcctaggcagagttgaaggacatc

SEQ ID NO: 114107 - DNA, 201 bp, Homo sapiens
actgtataatccaatggtttttagcatattcacggatctgtgccactctcattacaagcaattttgggccattttcattactccaaaaagaaaccccacaygccttagctgacacccccaagcctcctatctccaccagccccaggcaaccattagtctaccttctgtcttcatagatttgcctgtttgaatcatttaata

SEQ ID NO: 114108 - DNA, 201 bp, Homo sapiens
tcacagcaagaaacaacatagatggcttctgtctttgtggtcacaagtgagtgggcaagattggcattagacagacaatcacacctactcctgggtggacrtgcagtgatctgcttgtggagactgatcagctgctgataaagtcaatgtgagggcctcttctgtgccggggcctgggatgggcacagtctctgaccttgg

SEQ ID NO: 114109 - DNA, 201 bp, Homo sapiens
atggggtttcaccgtgttagccgggatagtcttgatctcctgacctcgtgatctgcccgcctcggcctcccaaagtgctgggattacaggcgtgagccacygcgcccggcccaattcactgatttttttagtgcattcacagaattgtgcaaccatcaccgcaattttaggatattttcatcacctcctgtagaaaccctg

SEQ ID NO: 114110 - DNA, 201 bp, Homo sapiens
aaccaccgtgccacatgcccctcccaggagaagggcttctctgaggacaaccattgtatgttaacattaggaccacaggtagtatcacacttaagtgttasgtttacatctggaggtataagaaggttctttttctgaggtgtaagaaagttcttttcctgatgaaaatgatataggcctttgtctgttttgcactgctat

SEQ ID NO: 114111 - DNA, 201 bp, Homo sapiens
taaagagagtgatataaatggtgctcaggaaaagggtgaggtttggcagaaatcttttcttcagattataactctgggttctctgaagtctaaaaatgatsaaattgaattttggcatcttggaaaatagtctgatggagagccccctgcctgatgcctcagagtcattgccgaagtctgaactactttgaaaaatgtgat

SEQ ID NO: 114112 - DNA, 201 bp, Homo sapiens
atgtctgtttgcctggtcttagtgactcacaaatgaacttccgagtaggagggcagttatgcacctcagaagcgtatttctctgttccctggcagccccartgtggggagatggctcgccatttgatatttgctgatctttccactccccataaggttaattctaatttctgtggaactttttcataaattagcatattat

SEQ ID NO: 114113 - DNA, 201 bp, Homo sapiens
tcatttttagtcctctgatagatagatagtgatccaggcacttgcctccacaaagcatcatggatgtgcttgtgaagctgcttactctaatattaatctcrctcttgtatctttacagggaaactttatggtgatgttccttttatagaagaaagacacagacatcggttcgaggtacggctttcatgctgaattactggg

SEQ ID NO: 114114 - DNA, 201 bp, Homo sapiens
aaaactgaaaattcaatattaagtaagtttcccatattgtttattttacaagatgttggatgtggctcatgtgactgcaggtgcccagcactctgggtggwggagactccccctgccccttccagcatcctcggagggccctgattctctctcttcccatctcccctgccctcactgaccctctgctctgggcattcttct

SEQ ID NO: 114115 - DNA, 201 bp, Homo sapiens
gagacagagtctcgctctgttgcccaggctggagtgcagtgagccactgcacctggcaagacttttttttttagagtaattttaggctcacagcaaaactmagtggaaagtacagagttcccatacaccctctcccccactgctatgcccagcctccctgactattaacatcctgcacctgcagagtggtacatttgttat

SEQ ID NO: 114116 - DNA, 201 bp, Homo sapiens
tgcccttcacttctttatctttatcatcatctaagtcctttctcattctcaaacggctcctgtgacaatgaggtttttctatctgggagccggaaaaggcktattcccttagcctcaagtgttgcttcaatctgttcttccctaggctctcatttgatgggccacattgatagttgggcaagtgtgatgtcctgtcattta

SEQ ID NO: 114117 - DNA, 201 bp, Homo sapiens
ctggaatgcagtggtgtgatctcagctcactgcaacctccgcctcccggcttcaagtgattctcctgcctcagcctcccatgcagctcatgtagctgggamcacaggcacacgccaccacgcccggctactttttatatttttagtagagacattgtttcgccacgctgaccaggatggtcttgaactcctgacctcaggt

SEQ ID NO: 114118 - DNA, 201 bp, Homo sapiens
gctcttgtcacccagactggagtgcaatggtgcgatctcagctcactgcaacctcctccacccaggttcaagcaattatcctgcctgagcctcctgagtasctgggattacaagtgcccacaaccacgcccggctaatttttgtatttttagtagagatgggatttcaccatgttcgccaggctggtcttaaactgctgac

SEQ ID NO: 114119 - DNA, 201 bp, Homo sapiens
acctgttgtgcttttatttcaatgttcaatttatggaaaacctgaatacacctttaactttagccaatgtccacacgcataatttctttttttttttttttgagacggagtctcgccttgttgcccaggctggagtgcagtggcgcaatctctgctcactgcaagctctgcctcctgggttcatgtcattctcctgcctca

SEQ ID NO: 114120 - DNA, 201 bp, Homo sapiens
aggaccaacctctggttatatccccatgtgcggaaggggtgagggaggtctatggggccttttttataggggcactaatcctattcctatgtgctctgccytcttgacctaatcatccctcaaagaccccacctacctcctaataccattcctttgggagttgggatttcaacataggaattttgggggaacacagacatt

SEQ ID NO: 114121 - DNA, 201 bp, Homo sapiens
ctattgtccaggctggaatgcagtggtgtgatctcagctcactgcaacctccgcctcccggcttcaagtgattctcctgcctcagcctcccatgcagctcrtgtagctgggaccacaggcacacgccaccacgcccggctactttttatatttttagtagagacattgtttcgccacgctgaccaggatggtcttgaactc

SEQ ID NO: 114122 - DNA, 201 bp, Homo sapiens
gtgatcattcgaaaaacttgtgagaacactcgacttactcttgttcagttggaaatacttcaaactttttgtaactgccatgatttaaaattgccaaggarattgatttctactggaaagagttccatgaaataagtaggacatttccaagggacattgatctaatgctgattgtaactcacaggaaggggttccaggtgg

SEQ ID NO: 114123 - DNA, 201 bp, Homo sapiens
ggttgcagtgagcccagatcgtgtcattgcactccagcctggtgacagagcgcgactccaactcaaaacaacaacaacaacaacaaagtaggaagaattakgtgtccccttggtattaagttgcatttttacaaaaggtctctaaaatatccaaggtgctttaaaaaggtatcttgtgtttttgaaaaaacagaaaatgag

SEQ ID NO: 114124 - DNA, 201 bp, Homo sapiens
ggacaagcctagggctctgttttgaaggaggactcgtgggaatcaatgccaagtaggcaatgaacagtgtcactatgaccaaggaacataatttggtacaygtaggacatttttggtcttatttccattgggaacgggcccaactggtgggataaaaattattgagctgctttggctaagtggcaatgagaaggtgcaaga

SEQ ID NO: 114125 - DNA, 201 bp, Homo sapiens
ttgatcacctggcctgccttcagctagaatcctatcaaggcaatttagccagaagctccttatcctggatatttccttggtaattttccatccactggccscccccatcctgctctatggtcataaacccccacttatcctttctggagttgagcccaatctctctccccatggcaagaacacgtttcagtggtccctgta

SEQ ID NO: 114126 - DNA, 201 bp, Homo sapiens
tttcctggttcatataggggtggagtggataccaggacaagcctagggctctgttttgaaggaggactcgtgggaatcaatgccaagtaggcaatgaacartgtcactatgaccaaggaacataatttggtacatgtaggacatttttggtcttatttccattgggaacgggcccaactggtgggataaaaattattgagc

SEQ ID NO: 114127 - DNA, 201 bp, Homo sapiens
ttctcctgtttgtctgctttaatcgcatcgtgattgttctcatttcagatcatccttattttgttggtgtccagttccatcctgagttttcttctaggccratgaagccttcccctccgtatctggggctgttacttgcagcaactgggaacctgaatgcctacttgcaacagggttgcaaactgtcttccaggtaaccag

SEQ ID NO: 114128 - DNA, 201 bp, Homo sapiens
ggactacaggcgcctgccaccacgcccggctaattttttgtatttttagtagagacggggtttcaccgtgttagccaggatggtctcgatctcctgacctygtgatctgcccaccttggcctcccaaagtgctgggattacaggtgtgagccaccatgcccggcctgcgtaatttcttttataagattaatccttcacaaa

SEQ ID NO: 114129 - DNA, 201 bp, Homo sapiens
ggagtgcagtggcgcaatctctgctcactgcaagctctgcctcctgggttcatgtcattctcctgcctcagcctcccgagtagctgggactacaggcgccygccaccacgcccggctaattttttgtatttttagtagagacggggtttcaccgtgttagccaggatggtctcgatctcctgacctcgtgatctgcccacc

SEQ ID NO: 114130 - DNA, 201 bp, Homo sapiens
ttaccttaagaaagtagacatttgcattcaatcatcatttccttattactgtagtagtagctttggatctttgctggtaagtgatgggaatttgtgatttygaattccatactagattttagatcatttgataaagcacctcattgaaagctttaaagttatatttacttccccctcttaaacttattatattttattatc

SEQ ID NO: 114131 - DNA, 201 bp, Homo sapiens
ctttttttttttttttgagacggagtctcgccttgttgcccaggctggagtgcagtggcgcaatctctgctcactgcaagctctgcctcctgggttcatgycattctcctgcctcagcctcccgagtagctgggactacaggcgcctgccaccacgcccggctaattttttgtatttttagtagagacggggtttcaccgt

SEQ ID NO: 114132 - DNA, 201 bp, Homo sapiens
tcccggtacagtttatggcattgcaaatgcagagtggttaagtctaaaatttgaaagagctgaaagaaatggggagaagttttcaggggctagaaaaatgrcttttgctttcttgtctcttatcaaagcattgatatggaaaaacagcttctggctcctggtgtgattagattaggaagtttaaaaattaaaaccaaaacc

SEQ ID NO: 114133 - DNA, 201 bp, Homo sapiens
tcatccatattgtagcatgggacaggatttccttcctttcgaatgcagaataatattccattgtgtggatggatatgcacattttgtttatccattcatcyctcagtgaacatttgggttgcttccaccttttaacttgtgtagcttttttggggggatattttggctctcaaaaggacaaaggaaaaaattaggttcagt

SEQ ID NO: 114134 - DNA, 201 bp, Homo sapiens
attaggttcagttgctaggattactcacatgagggtaggcatgggcaggaccattaaacaggtaaaaatatattatgtatgaggcagtatcttacccagtmgcaaattagagaaagagatggtataatttggaaaggtggtttttgtttctgataacccttttatccacatttttggtgtctttctgcctgcattgggagt

SEQ ID NO: 114135 - DNA, 201 bp, Homo sapiens
tccttttatagaagaaagacacagacatcggttcgaggtacggctttcatgctgaattactggggaatatggatgcttagtgtgaggaacccagtgattayaagctgagcctctggaaaaggtgtctagcctggtggtattcacagggctcagagaggaccaaatttcccacagtctcccacttccagaggagatgggcgg

SEQ ID NO: 114136 - DNA, 201 bp, Homo sapiens
ttacagtgagccatgattgcaccactcactgcattccagcctgggtgacagtaagactatgtctaaaaaaaaaaaaaaaaaaaattaattctggttgaatrcactgtctgctttactagttttaaatatttctctttccttatccataattttattgcctttcagattatatctgggtgttggcacccagccactattctg

SEQ ID NO: 114137 - DNA, 201 bp, Homo sapiens; identical to SEQ ID NO: 19105

SEQ ID NO: 114138 - DNA, 201 bp, Homo sapiens
agggaaagtgtgttgattctcctggaagatgcagagatgaatcttacatatgcaaagttaaagtacaagaatgacagctttttttttctctctctttttamaaagtgaaagcaagtttattaggaaagtaaaggaattaaagaatggctactccacaagcagagcagccctgagggctgctggttgccccttttatggtta

SEQ ID NO: 114139 - DNA, 201 bp, Homo sapiens
gagggccctcttttgggtgcagaggaccaacctctggttatatccccatgtgcggaaggggtgagggaggtctatggggccttttttataggggcactaakcctattcctatgtgctctgccttcttgacctaatcatccctcaaagaccccacctacctcctaataccattcctttgggagttgggatttcaacatagga

SEQ ID NO: 114140 - DNA, 201 bp, Homo sapiens
atgtaagaatagctcatgtttatgagattgggatagcttttcaatttttacttttaatgcttttaactttttctctgatatacttgaatttttatctgtayctgcttgtgtaaaacaacgttgggatttctgtttttgttttatgagacagtgtctcactgtgtcgcccaggctggagtgcagtggtgtgatcatagctca

SEQ ID NO: 114141 - DNA, 201 bp, Homo sapiens
ggatgatctcagctggagagccttacttatgtctgcaaagaccctttttccaaacaaggtcacattcacaggttttggggacaaatttctttgggggggggccaccattcaactcactacagcctttttatttttaatttttatgggtacatagtaggtgtatatatttgtagggtacatgagatatttggtacaggcata

SEQ ID NO: 114142 - DNA, 201 bp, Homo sapiens
attaccttaagaaagtagacatttgcattcaatcatcatttccttattactgtagtagtagctttggatctttgctggtaagtgatgggaatttgtgattwtgaattccatactagattttagatcatttgataaagcacctcattgaaagctttaaagttatatttacttccccctcttaaacttattatattttattat

SEQ ID NO: 114143 - DNA, 201 bp, Homo sapiens
ctcctggcttctggtggctgccagcaatcagtggtgttccttggcttgtggccacatcactccaatcttgtcctccatcttttatttccttatttattttwttttttttgagatggagtctcactctgtcacccaggctggagtgcagtggtgcaaccagggcttaatgcaaccttgaacttctgggctcaagtgatcctc

SEQ ID NO: 114144 - DNA, 201 bp, Homo sapiens
gtgtgtctatgtcatgcctgtatttgaacatgatcgttggaaagactgatcaaatgttatagtttagggaccatgcttacccaatgatcattcctttaaaygtaaagcttgaaatttgggaaatgacatttttacaagatggcaaaactggacttgttttgttttctaaggtgattgatatgcccgagcacaaccctggca

SEQ ID NO: 114145 - DNA, 201 bp, Homo sapiens
taatattttaactctttttattggaaatagctctaaattatactctatgcgtttatgctttttttctttttcttttctttcttttttttttttttttttttgacacagggtgttgctctgttgcccaggctggagtgcagtggtgcaatctcagctcactgcagcctcgacctcctgggctcaagcgatcctcctgcctca

SEQ ID NO: 114146 - DNA, 201 bp, Homo sapiens
ttgaagacagaatttcagtagattaaaaaaaaaccacaatagaatattataaatagaattttctgatgcattttcttggatataattgaattgttaatatytccaccaaaaaggagatggtgatagaatatggcttacaaatacatcttttaccagctttttaacaaaaatatgtccatctttgaaaaatctactggaagc

SEQ ID NO: 114147 - DNA, 201 bp, Homo sapiens
atccaggaggcggaggttgcagtgagctgagatcacgccactgcactccagcctggttgacagcgaaactctgtctcaaaaaaaaacattgaaaaaaaaaattgaaaaaaaaagtattgtgatatcaatttgcttttttccttaaaattaattttctagaccacagttatgtaccttagaatggataaataaattaggata

SEQ ID NO: 114148 - DNA, 201 bp, Homo sapiens
aacgcccattgagatggccgtgaaggagaagatttctatgttttgtcacgtgaaccctgaacaggttggtgctgctctttagattttattgtctggcaggyacttctgctgatgccagtgttttgtacctcttcaatgatcatattacttttcacggcatttatgcaagcactggggaaccctgatccaaccatgattccc

SEQ ID NO: 114149 - DNA, 201 bp, Homo sapiens
tctggatctagggaggtgctgtggtccttaaaacacagagccaaaagccaaactgcagctgaaaagaattacagcatttcgctaatgtaatcagggatacrcagctgtgttcactgttctctagtcctttcatgttgctagaggggagaaaagatagtttttcctctacccatcataggttcatggccaaggccctgataa

SEQ ID NO: 114150 - DNA, 201 bp, Homo sapiens
agtggagaaatatggctgacaggtaagcgaaaggaattacttgtataatctttaataatttttgagtttgggggtagaactaagacctacttgaaagggtragcgtgtgtatttggcattttgcgtgtgcacattttggtctggatatgtctaaagatggagcatactgttgcggtgctttgctgtattatttgaagattt

SEQ ID NO: 114151 - DNA, 201 bp, Homo sapiens
ggtcaacaaactatattctaaatttggcccacagcctgtttttatgaataaagctttattggaacacagccacaccaatttgtttacatattgtctatggytgcttttgtggtccaacgtcagagtttcagaccctacggcctagaagctttactatctgaaagaggctagaatctttactatgtgaccctttacagaaaa

SEQ ID NO: 114152 - DNA, 201 bp, Homo sapiens
tgcaaagtttaaaaagccaacagttctgaaaagcctataatgacaaagtcattaatcctcactccctctgtaccactctttagcttcttctagctctttckctgtgtttgtctccatgttgctaaataatctcatagtattctttgaggactttttagacttctcccgctttgttgaaggagtttttaatgctcttaggca

SEQ ID NO: 114153 - DNA, 201 bp, Homo sapiens
atatacaccttatatacatagcctaaaggtaatttgatacaatattttaaataattttgtgcatgaaacaaagtttcgactgcattttgactgtgatttcwggcatgagatcagttatggaattttccacttctagcgtcatgttggcattcagaaattttgaaattttggagcattttggattttcagattagggatgct

SEQ ID NO: 114154 - DNA, 201 bp, Homo sapiens
cttctgaaatgtggcctgacttaaggggaagaaaccccacctgcatgtgtcctccctcaagcgacggtccctataaggctctaccggagtcctctcccctycctccctcccctcccaccatcagtcccattaagtgggctctgcggatggccacttactttgagtaaactggggaattcagcctgaatcaatagcttcagt

SEQ ID NO: 114155 - DNA, 201 bp, Homo sapiens
atggggactgcctgtgagggtaagatggaatcttcgaggattgttcatttctctcatggacaagctgtcatcttggtatagaggcgggtattataggactygcctcacaggatcttgcccctttgagatactcccatttgactggcacagttagcaggacacgcatgacagcccatgacagagttagtgtttggggaaaat

SEQ ID NO: 114156 - DNA, 201 bp, Homo sapiens
gaagtcatataattggttctgaaaatagagcttgagcatagtcactagtgattggaccaagcattgcacgaatggctgaatacactagtttaaaaaaaaaatggatagtcaagtttaccctcattttgtattgatttcagtggtattcttgtgcctggaggctttggaatcagaggaacattgggaaaactccaggcgatt

SEQ ID NO: 114157 - DNA, 201 bp, Homo sapiens
ttttaggagagactctaagttgggcctctaacccaatcccatcctttacctgggtatatgcaccccatttacccaaagtcagccaattggtgcacacagaygattttcctttgggtctggggtctcttcagtattgttctttccgtgtttcactagaaagatgttactggaggctgggcatggtggctcacgcctgtaatc

SEQ ID NO: 114158 - DNA, 201 bp, Homo sapiens
tgaggttaggagttcaagagtagcctggtcaacatggtgaaacccctgtctctactaaaaatacaaaaattagctggctgtggtggcagatgcgtgtaatmtcagctactcgggaggctgaggcaggagaattgctggaacccgggaggtggaggttgcagtgagccaagatcatgccaccgcactccagcctcagtgaca

SEQ ID NO: 114159 - DNA, 201 bp, Homo sapiens
gagtctcgccttgttgcccaggctggagtgcagtggcgcaatctctgctcactgcaagctctgcctcctgggttcatgtcattctcctgcctcagcctccygagtagctgggactacaggcgcctgccaccacgcccggctaattttttgtatttttagtagagacggggtttcaccgtgttagccaggatggtctcgatc

SEQ ID NO: 114160 - DNA, 201 bp, Homo sapiens
cgcataatttctttttttttttttttgagacggagtctcgccttgttgcccaggctggagtgcagtggcgcaatctctgctcactgcaagctctgcctccygggttcatgtcattctcctgcctcagcctcccgagtagctgggactacaggcgcctgccaccacgcccggctaattttttgtatttttagtagagacggg

SEQ ID NO: 114161 - DNA, 201 bp, Homo sapiens
aagtttattaggaaagtaaaggaattaaagaatggctactccacaagcagagcagccctgagggctgctggttgccccttttatggttatttcttggttayatgctaaagaagggatgaattatacgtgcctcccccttttagaccttatagggtaacttcctgatgttgccatggcatttgtaaactgtcatggcactgg

SEQ ID NO: 114162 - DNA, 201 bp, Homo sapiens
taacttgaaaggtaagttcgaggtttgctaatgaccatttatttaaaaaattttctctcttcaaatatttttcagcactattggtgaattactgaactctkttcttaatcttcagatgctgattccacagagtttaggccaaatgccccagttcctctggtaagtggcttgtttatctttctgggtccagtcattgtcact

SEQ ID NO: 114163 - DNA, 201 bp, Homo sapiens
actcagtattgtggaataacagaggcgtagttatcttatatagcttgagtatattcttccatataagaacggaagtagtacatgtttagagtaaaacattyaaacaaagcataagccaggcgaagtagttcacgcctgtaatcccagccctttgggaggctgagccaggtgggttgcttgagctcaggagttgaagaccag

SEQ ID NO: 114164 - DNA, 201 bp, Homo sapiens
tcccgggttcacgccattctcctgcctcagcctcccgagtagctgggactacaggcgcccgccaccacacccggctaattttttgtatttttagtagagtyggggtttcaccgtgttagccaggatgatctcgatctcctgacctcgtgatccgcccaccttggcctcccaacgtgctgggattacaggcgtgagccaccg

SEQ ID NO: 114165 - DNA, 201 bp, Homo sapiens
tgtgtaagctgttttctacatgtaggtttaaggcacatttctgaaagtaggctttgcacattcagatgaatgagcatgcttgtcatgctcgtttaagtacrtcgtaattgcctaacaggaaaataataggacattttttccctttagcattggaatggaatctagattttttaaaatactatattcccctctctaacatgg

SEQ ID NO: 114166 - DNA, 201 bp, Homo sapiens
ctcccgggttcacgccattctcctgcctcagcctcccgagtagctgggactacaggcgcccgccaccacacccggctaattttttgtatttttagtagagwtggggtttcaccgtgttagccaggatgatctcgatctcctgacctcgtgatccgcccaccttggcctcccaacgtgctgggattacaggcgtgagccacc

SEQ ID NO: 114167 - DNA, 201 bp, Homo sapiens
cactcagttcttttgaatccacagttctctccattacatttgaaccggttccctgtttaatgtctgtttgcctggtcttagtgactcacaaatgaacttcygagtaggagggcagttatgcacctcagaagcgtatttctctgttccctggcagccccagtgtggggagatggctcgccatttgatatttgctgatctttc

SEQ ID NO: 114168 - DNA, 201 bp, Homo sapiens
ggtttcaccacgttggccaggctggtctcgaactcctgatctcaggtgatctgcccgtcttggcctctcaaagtgctgggattactggcatgagccactgygcctggcctgtgtaagctgttttctacatgtaggtttaaggcacatttctgaaagtaggctttgcacattcagatgaatgagcatgcttgtcatgctcgt

SEQ ID NO: 114169 - DNA, 201 bp, Homo sapiens
cgcgatcttggctcgttgcaagctccgcctcccgggttcacgccattctcctgcctcagcctcccgagtagctgggactacaggcgcccgccaccacaccyggctaattttttgtatttttagtagagttggggtttcaccgtgttagccaggatgatctcgatctcctgacctcgtgatccgcccaccttggcctcccaa

SEQ ID NO: 114170 - DNA, 201 bp, Homo sapiens
attaatattcacttagcatgtttagagtaaaatcttccttttctagtctatcagcatagggtttctccaattgttccctttcctcaaaaaaaaaaaaaaaagtaaaatttcacctgttagggaattcagactttttttttttttttttttgagacagagtcttgctctgtcgcccaggctggagtgcagtggcgcgatctt

SEQ ID NO: 114171 - DNA, 201 bp, Homo sapiens
agccctcattgccaagtcaatcctaagccaaaagaacaaagctggaggcatcacactacctgacttcaaactatactgcaaggctacagtaaccaaaacarcatggtactggtaccaaaacagagatatagatcaatggaacagaacagagccctcagaaataacaccgcatatctgcaactatctgatctttgacaaacc

SEQ ID NO: 114172 - DNA, 201 bp, Homo sapiens
attacatttattgatttgcgtatattgaatcagccttgcatcccagggatgaagcccacttgatcatggtggataagctttttgatgtgctgctggattcrgtttgctagtattttactgaggatttttgcatcaatgttcatcaaggatattggtctaaaattctcttttttggttgtgtctctgcccggctttggtatc

SEQ ID NO: 114173 - DNA, 201 bp, Homo sapiens
aggtgtgagccaccgcgccaggccattttggtttttaaataccaaaaatttgaaatgaactagggctcctggaagtaatggttgattccaggactggggcrggaaaagtacaagatgagcctggaacatattgctgtatttaaagcaaggaacagctgaaaatgaaaggggtatgagttttccaaggtcaaagaagccagc

SEQ ID NO: 114174 - DNA, 201 bp, Homo sapiens
gccttcagtttcacagacttagtggaactttcttcctctcacttcagtgagattgtcgtatacatttgtgatacagttattaattgttttgtcaatctcaygagattgtcgtatacatttgtgatacagttaattcttttgtcaatctcatgagattgtcgtatacatttgtgatacagttaattgttttgtcacatttca

SEQ ID NO: 114175 - DNA, 201 bp, Homo sapiens
ccgggggccataggggaagggagtggacgctaatgcaccgacagctacacgacaaaggcctgacgccagagcaaccctcaagtgactgagtgtccttggcrcttcacctgcgtgatctcctcccaacagagccggaggctgctacctgcatttcacaggtgagaaaaccaaggcacacgaggccatgccctccccagtagc

SEQ ID NO: 114176 - DNA, 201 bp, Homo sapiens
aaatatttcacgtgtggaggctggcgcagagcccctcctccaggcagcctccccagctctctacgggcaggactggggctgtgcagtgctcccctttcccracccctctgcaatggctgctctggccgagctgtcccatctggctccatggctgtctccaccatgaggccgagtctgggctctctagagggcagtaggcat

SEQ ID NO: 114177 - DNA, 201 bp, Homo sapiens
ggtgcagccagtgctgtagccagatcctgccgggcactgctcacaggcacacgtggctcgacacatgaggcgggagagctcaaacctcacctagggcaagyccgtgcctgctgcaagccggtggttccctcccacccagctgcccacacagctttgcctcagcagaagtgcacttgactgggctctgcccccttctgcgtg

SEQ ID NO: 114178 - DNA, 201 bp, Homo sapiens
gccggctggtccacagggtgtttctgaggcttggcctcttctggctctgtgatctttttttggagacagagcctggctctgtcgcccaggctggagtgcartagtgtggttatcgctcgctgcagcctccaactcctgggctcaagcaatgctcccacctcagcctcccgagcagctgggactacaggcacgcaccaccat

SEQ ID NO: 114179 - DNA, 201 bp, Homo sapiens; identical to SEQ ID NO: 19110

SEQ ID NO: 114180 - DNA, 201 bp, Homo sapiens
ctttgtcccagttttggccactgggagctctttcagttgattcctgtctccctttgtcacagttccatcatttcggggatctattgatccatttaactatyggtcggttgatggatcacacttcgttacttcctgatgcgataagacactccacgcccactgtgtttatttcctgccagggaatgtatttcacaaatattt

SEQ ID NO: 114181 - DNA, 201 bp, Homo sapiens
tcctgtctccctttgtcacagttccatcatttcggggatctattgatccatttaactatcggtcggttgatggatcacacttcgttacttcctgatgcgayaagacactccacgcccactgtgtttatttcctgccagggaatgtatttcacaaatatttcacgtgtggaggctggcgcagagcccctcctccaggcagcc

SEQ ID NO: 114182 - DNA, 201 bp, Homo sapiens
cactgaataataatgacgacgactgctctcctttgtgggacccctcccctacgctggcaggtgttgggcctgggcagggccgtaaagcagctccccaaggkgcttcaaacctaggcttcagaatctgctctccatcattgggttgcaccccagcatgagctatgtgggccagtgggggagtttcccggtcccccctctgtg

SEQ ID NO: 114183 - DNA, 201 bp, Homo sapiens
gtgtcggtggagaaggaaaatgcctccccacagtctggcaggtggggaggtgcctgctcggtaactcagccccatgccctcgctggaaggtgcacagagcrtgcccagctaagcccttccagatgcagatggggagactgaggctgggattttaaatgcagcctcttgacacagctcagccccgggaggggacctgacggg

SEQ ID NO: 114184 - DNA, 201 bp, Homo sapiens
ggtggttccctcccacccagctgcccacacagctttgcctcagcagaagtgcacttgactgggctctgcccccttctgcgtgtctggcagaggtgaacccsgctcggaatacatggggctgttggctcccacctggcttgggcagcccggccccctgtcactggcacttggtttgttagtcattcagcaaacgcttgcaga

SEQ ID NO: 114185 - DNA, 201 bp, Homo sapiens
ttccctcccacccagctgcccacacagctttgcctcagcagaagtgcacttgactgggctctgcccccttctgcgtgtctggcagaggtgaacccggctcrgaatacatggggctgttggctcccacctggcttgggcagcccggccccctgtcactggcacttggtttgttagtcattcagcaaacgcttgcagagtgtg

SEQ ID NO: 114186 - DNA, 201 bp, Homo sapiens
ctacctcctggacttaagggagcctcccacctcagtctcccaactagctgggactgcaggtgtgtgccaccatgcccggctaatttttcgtagagacaagstctcactacattgctcaggctggtctcaaactcttgggctcaagcaatcctcttccctcagcctcccaaagtgctgggattacaggcgtgagccaccgtg

SEQ ID NO: 114187 - DNA, 201 bp, Homo sapiens
ctctcacttcagtgagattgtcgtatacatttgtgatacagttattaattgttttgtcaatctcacgagattgtcgtatacatttgtgatacagttaattsttttgtcaatctcatgagattgtcgtatacatttgtgatacagttaattgttttgtcacatttcacattcatcctgggagtcccctgtctgcctaggttt

SEQ ID NO: 114188 - DNA, 201 bp, Homo sapiens
atggaacccactgtcttctgtctttgctggcagctgccaccgtgggcacccacagcacactcctcagacatccatccacaaatcccagccaggccaggccyttctgtaatcccgtcctgacttcatagatgtctccgaggctcaggtggggcagctgcccagggtcacacactgggggtttggtggaggtgggatgcaaac

SEQ ID NO: 114189 - DNA, 201 bp, Homo sapiens
tgcagtcagcgctggcagggtctgtggtctcatctgaaagttcactgggggaggatccacctctgaacctgctcatgcatgagcctcatttgtgagatgarcaaactgagtcttagagaggttaagggtctcactccagaaaatacagctggaaggatcagggccaggtgaattcatcagcctgtgcggagacgggctcca

SEQ ID NO: 114190 - DNA, 201 bp, Homo sapiens
gacacaccacagacaggtattgcaaacttgtcgggggagcctaaaggactgcaaacttgtgggaggagtcggggcccccgtgtcaggggctgctgaagacygaggccctaggagccccctgtgcaaggtgtgctgtccttgggctgggccagggactctgggcccctgaagagggacacctcttttgtctataaactttct

SEQ ID NO: 114191 - DNA, 201 bp, Homo sapiens
caaaagaaggtgaattggctttatttatttctagaaaagtcttatagagtaagacaatacataggtaagtcgtgtttctctctctctctctttttttttttgtttgtttgttttagacagagtatcactctgtcgcccaggctggagtgcagtggtgcaatctcagctcactgcaacctccgcctcccgggttcaagcgat

SEQ ID NO: 114192 - DNA, 201 bp, Homo sapiens
cagcttcctgtgtccagtggcagagacacctgagccccagtgcagggcctcaccttgatacaatcaactcgtgacctggtcatcacaagcatggtgccacrggcatggccgaagacacccccagggaggcaagtatgatggtggagtccaggctgaggggccagagtgcctgggccgtccccacgttcatcccactcccca

SEQ ID NO: 114193 - DNA, 201 bp, Homo sapiens
aatacgtctcagggatctttccttgttggcactcagagaaagccttgcttctgtatcacagctgctggctacctgttgtgtggctgcagtgtggtttatckgacacccaggttacctccaaggcattgctgttagaaataagctgtatggacaaccacgtaccctgctgtttcagaagtcgacagtcatctgcagggtgaa

SEQ ID NO: 114194 - DNA, 201 bp, Homo sapiens
gctcctgcctgagaatctgcctgcttcactggactgtggacttctctgctctgcagagaggagtcttatacaggggaagaaacttggcccaggcttctcaktccgggaagcactagggggaaagctagagttttccaaggcaccagcgtaaagggcaggatttccttcacccctcctggtgcccctggctggaggcttcag

SEQ ID NO: 114195 - DNA, 201 bp, Homo sapiens
ggctgaagggaaggaaaaaatcaagagatgtttcgctcacattagcctcctgccctgaggattctgagctcatcccagctgctgtgagggagccgtgggayggcatgcaggggttcttgctgatgctgagttatctgacctactctccaaatagccaactatctgctttcttgcacagaaggaaagggaagtgggaggaga

SEQ ID NO: 114196 - DNA, 201 bp, Homo sapiens
cttgctctggcctcagggtatactgcttatcccagagagaaacaacggaaccagccactggctgctgcggggcctctgcttctgctgcttggggtctgggwccagcagtgtccatcgttatgtgggatcttccagcctatcgtgggcggcctccacgcagggggccatgcctgcccttcaaggccacctttcacccttcac

SEQ ID NO: 114197 - DNA, 201 bp, Homo sapiens
cttcaggcaagactcaggaagaaaggtatctccgccttgtgtgagggagcctccttagcatccgcctcgctgaaagatggaggagaaatatgtccagtacygaatgttcccaaggccccccattcctcacacaatgcaggctggcaaaaagtcttgcaggccatgatcaggacttatttactaatgaaaattgatagtatt

SEQ ID NO: 114198 - DNA, 201 bp, Homo sapiens
gcaaacttgtgggaggagtcggggcccccgtgtcaggggctgctgaagactgaggccctaggagccccctgtgcaaggtgtgctgtccttgggctgggccrgggactctgggcccctgaagagggacacctcttttgtctataaactttctcagaaacaccatcctccatacacttgcaccaacaaatggcttttattatc

SEQ ID NO: 114199 - DNA, 201 bp, Homo sapiens
tgtggggctccttttgccttcagtttcacagacttagtggaactttcttcctctcacttcagtgagattgtcgtatacatttgtgatacagttattaattsttttgtcaatctcacgagattgtcgtatacatttgtgatacagttaattcttttgtcaatctcatgagattgtcgtatacatttgtgatacagttaattg

SEQ ID NO: 114200 - DNA, 201 bp, Homo sapiens; identical to SEQ ID NO: 19111

SEQ ID NO: 114201 - DNA, 201 bp, Homo sapiens; identical to SEQ ID NO: 19112

SEQ ID NO: 114202 - DNA, 201 bp, Homo sapiens; identical to SEQ ID NO: 19113

SEQ ID NO: 114203 - DNA, 201 bp, Homo sapiens; identical to SEQ ID NO: 19114

SEQ ID NO: 114204 - DNA, 201 bp, Homo sapiens; identical to SEQ ID NO: 19115

SEQ ID NO: 114205 - DNA, 201 bp, Homo sapiens; identical to SEQ ID NO: 19116

SEQ ID NO: 114206 - DNA, 201 bp, Homo sapiens; identical to SEQ ID NO: 19117

SEQ ID NO: 114207 - DNA, 201 bp, Homo sapiens; identical to SEQ ID NO: 19118

SEQ ID NO: 114208 - DNA, 201 bp, Homo sapiens; identical to SEQ ID NO: 19119

SEQ ID NO: 114209 - DNA, 201 bp, Homo sapiens; identical to SEQ ID NO: 19120

SEQ ID NO: 114210 - DNA, 201 bp, Homo sapiens; identical to SEQ ID NO: 19121

SEQ ID NO: 114211 - DNA, 201 bp, Homo sapiens; identical to SEQ ID NO: 19122

SEQ ID NO: 114212 - DNA, 201 bp, Homo sapiens
tgggatgcactgggctaggacctgggcacctggcaaacagccctgacatttgggagtctgcggtctgtctgatgggggaggtttgtctgatgggggaggtytgtctgatgggggagacagcagtaactaggagaatggtggaactagaacagcagtgagtatggtggctgtgagtaggggggctgatgactgagaggagct

SEQ ID NO: 114213 - DNA, 201 bp, Homo sapiens
gcgtctgccgctgtccacttgagccaggtttgctcttgcagggttcctttgtctgagtcactgcccatggtcattgactactttgaccccctctgcttgasacccttggtaggtggggtctgctctgtccactcccgacagactgcttgtgtttccctggcaggaatacctggaagcaattcaccatctccatgaggagtg

SEQ ID NO: 114214 - DNA, 201 bp, Homo sapiens
atgagttacttctaggatgctccttggtctttggtataggtagacccagaaggctgtttctggcccctcccactagtgccatgaccccctttccctcccasgtgcagtcattgtgagcagagtctaggttcaagctgtccttgctttattgtcttctacaagcctcatttttgttttctgtgaaaaatgttaggacttacc

SEQ ID NO: 114215 - DNA, 201 bp, Homo sapiens
caccctcacaagaatagtccctctgaagtaggtaccatttttaccacagttttagatgaggaaaccatggcctaatgaggttaagtggcttgtccagggtygctaggccagtgtatgatacagccagatcccagcccggatacagccagatcccagcccaggctgtctggttccaggggccacacccttgtttgattctgt

SEQ ID NO: 114216 - DNA, 201 bp, Homo sapiens
tgtctgaaaacacacaggatgttggagagattggcagtcatcctaaaaggtacaaacaggaccagagggaaagaatgcctccaaaccagtgagacagggavcgtactaaagaaacagggactatcagcagccagtgcacccagtgcagtgatcagaggcaggaaacggaggcaggtggcctgccaaggcctagccctgtcc

SEQ ID NO: 114217 - DNA, 201 bp, Homo sapiens
agggtccagtgagttacacagcatggtacaaggctaaagggaagggtggagagttgggcgagtcagacgcacagtgtgcgtcgcatttgttgtgtttttcrctaaaagcttccctcatgagagcagactctgtgatgtatacctagttaggggcttctggtggcctgtcagtgccaagggctcaggcatggggccctccat

SEQ ID NO: 114218 - DNA, 201 bp, Homo sapiens
aaggctaaagggaagggtggagagttgggcgagtcagacgcacagtgtgcgtcgcatttgttgtgtttttcactaaaagcttccctcatgagagcagactstgtgatgtatacctagttaggggcttctggtggcctgtcagtgccaagggctcaggcatggggccctccatccctgtgctcagagactgccgatttctag

SEQ ID NO: 114219 - DNA, 201 bp, Homo sapiens
ctgtaggatttccttcccactcctccagcctcccacgcagcttctccaggttttctgggagtcctggccgtcccacaggttggtctgccctggcctctgtrctgcagtctgctcaggccccgctgctgttctccgtccactctcccgctcctctgtcaaatactcttctcttctgaggacatgggggtggtctcagagact

SEQ ID NO: 114220 - DNA, 201 bp, Homo sapiens
gttgcagtgagctgagatcacgccattgcattgcatcctgagcagcaggagtgaaaccctgtctcaaaaaaagaaaaaaacccacaaaaaataaaaaggayattttatttcacataacatatgccaaatgtgatcatgtcaacatttaatcaatataaaaatcatcaatgagctattttgcattctatcttgttatactaa

SEQ ID NO: 114221 - DNA, 201 bp, Homo sapiens
acctcaagtgatccacccacctcagcctcccaaagtgctgggattacaggcgtgagccaccgtgcccggtcccctttgctgatcttgttttgtgtcctttyggtgtaatccatcttagctgtgagtatgactgcgtgttgtgtcctgtgagttctcatgaatcatcaaacctggggaggagggggggcttggggactcttg

SEQ ID NO: 114222 - DNA, 201 bp, Homo sapiens
cctaaagagacatgagaagaatttcttctctgtgcattcgggagaagatggaataccagtcatcttctttggatataacaaagaaacctctgtaacattcwtattctctagaagccaaggaggaacccaggcttagttattaagtaagacagctagagttgcaggtgttagggatcataagtgacgtttcacgggacagaa

SEQ ID NO: 114223 - DNA, 201 bp, Homo sapiens
aatgaaagtcgaggcggagggtcagtggtcaagccaagagctggccctccctgcttcctgctcgagctgtgcagaccttcctcccgcctttgcctgtgtgmctgctttgcttccaagccatgagcagagtcctgagagccacgtattcttttaacctcagtttaccttcggaccaatcctgagacttgttaccagaggtta

SEQ ID NO: 114224 - DNA, 201 bp, Homo sapiens
agacaggatttcgtcatgttggccaggctggtcttgaactcctggccttgagtgatctgcctgcctcaacctcccaaagtgctgggattacaggcatgagycactgtgcctggctggtattttatattctttgtagcatcgcaaatgggattcctttcttgatttctttctcaggttgttcactgttggtgtatatacatg

SEQ ID NO: 114225 - DNA, 201 bp, Homo sapiens
tgaacgacttgaacgcatgttccttggtgattttattttattttttgaatttccaaagaaaagtaatttattttttgcagttagggcagctgagaagtccrgggttgaaggggtgcatctgctgagggctttcttgctagtggggactcttcagagtccccaggtggtacagggtgtcacatggtgagggagttgagcatg

SEQ ID NO: 114226 - DNA, 201 bp, Homo sapiens
ttaaaccactaatttttcaaaatgaaatagaaacttgtttattcgattgacagatatggagtacccgctgttgtatcagttatccattgccatagcaatgyggtgtaacaaacagccacgaatcctcatggcagacagctatctgcattcattgcccagtcagccagggtggtcaccaggcagctctgcttaccttggcta

SEQ ID NO: 114227 - DNA, 201 bp, Homo sapiens
gcagagctgttcggatgtcaacgctggaggcccttcctcccactctcatctgcagctgtcttcctaaatgccaccctgtctcccagccctccccgaccacsctgtctagatagggcaagctccttgttagtctttgtttcgtttttggttttggtttttgttttttgaggcagggtctggctctatcacccaagctggagt

SEQ ID NO: 114228 - DNA, 201 bp, Homo sapiens
cagggctgggcccctgcctgaaggaactgaggccctgctgctgcaaaagtggcagtaaatgggagaagccaggtgtgggtcctgcctttttttttttttttagtatttattgatcattcttgggtgtttctcggagagggggatttggcagggtcataggacaatagtggagggaaggtcagcagataaacatgtgaacaa

SEQ ID NO: 114229 - DNA, 201 bp, Homo sapiens
ggcctcagacttttcttgtgggctgcagcttgccctctgagcaggtggcattcctgaccttacggccccattttcacctgacaacctgggtttccaggtgyccactgctaggtttatccagccctctgcggtcctcagctcctgctccttagcacctcagccagagggaggacaggcaggacagaggagagcgagagcaga

SEQ ID NO: 114230 - DNA, 201 bp, Homo sapiens
ccaccagggattcgagagggctgtgttaattgctggagaggaagattccagttacacagtatccttaaagacgggaacttctttttcttttttttgagacrgagttttgctgttattgcccaggctggagtgcagtggtgcaatctcggctcactgcagcctccacctcccgggttcaagcgattctcctgcctcagcctc

SEQ ID NO: 114231 - DNA, 201 bp, Homo sapiens
ggcccggcctcaccagccgcagcatcttcacgtggcctttcacactgaagcagaaggggcgatgttttattttcggctgcacgttatccatcgcgtctgcmgacccagcagcagcactttccctcaactcttctcagctggctgcctgagtaggttctgcgaagcgatagcaaccgccaccgcggcggagcaccgccctcc

SEQ ID NO: 114232 - DNA, 201 bp, Homo sapiens
tttggctgggtcctttgcccatacctagaataaggtgtcttggttcccacctgcagggagttcagccaggtactgggaaccacacggtggcatgtggggcrtcagctcctgcctgggagctcgtgtttcctcatttcctgggatgctctaggaaaaggcttcccaaaatgccatgatggggagcccttcacaaggtgggag

SEQ ID NO: 114233 - DNA, 201 bp, Homo sapiens
gaagactctagacccgggtctcagttttcaccatttgggatagtagttcctctgatgtgaccttcctccttccgtggatgacacagagcctcatttcacckttgtttggtgactcaggtcatcagaaggaatgtcattgtctggtctgggctgtcacacagtgatgcccttaggaatgctgaggtgtgtggaactgtctgc

SEQ ID NO: 114234 - DNA, 201 bp, Homo sapiens
gctcaagcgatcctcctgcctcagcttcccaaagtactgggattacaggcatgagcctgattacagctctgctcggcctcgtggctctttttgaagcaagwaatctggaatggaatgaccagaggttaaggggagaggatagagtgtggcatttggtgggcctgggttctatcctggctctgaagtttgctctgtttgtga

SEQ ID NO: 114235 - DNA, 201 bp, Homo sapiens
tcagcttaggaaattgcacttatataagttgcctgaggtcacacagctagtaaatggacttggaagcctgtgctgccctgtgattttttttttttttttttgagatggagtctcagtctgtccctaggctggagtgcagtggcgcgatctcggctcactgcaacctctgtctcccaggttcaagcgattctcctgcctcac

SEQ ID NO: 114236 - DNA, 201 bp, Homo sapiens
gagggattttggtttacatgtgaaagtcttggactgaaccaattatgctggttacatgagccctttccgtagccattattccctgacattcccctgggtgyttgagttctggctctaatatgcattcgtcttttgccagatctgtgtcgagggcaatattgcaagtgggaagacgacatgcctggaattcttctccaacgc

SEQ ID NO: 114237 - DNA, 201 bp, Homo sapiens
ctgtccacttgagccaggtttgctcttgcagggttcctttgtctgagtcactgcccatggtcattgactactttgaccccctctgcttgacacccttggtrggtggggtctgctctgtccactcccgacagactgcttgtgtttccctggcaggaatacctggaagcaattcaccatctccatgaggagtggctcatcaaa

SEQ ID NO: 114238 - DNA, 201 bp, Homo sapiens
ctgtgatcatgctgggtttatctccagccccaaccctgcctgtgtaggtttcttgagctgtccttcagtgccttgtgagaccagggtcctcctgcagatgycactttgatggaaagtgctgtgttttcccttctgcagggcctgatgtaccacgatgcctctcgctggggtcttacgctacagacttatgtgcagctcacc

SEQ ID NO: 114239 - DNA, 201 bp, Homo sapiens
catgctgggtttatctccagccccaaccctgcctgtgtaggtttcttgagctgtccttcagtgccttgtgagaccagggtcctcctgcagatgccactttkatggaaagtgctgtgttttcccttctgcagggcctgatgtaccacgatgcctctcgctggggtcttacgctacagacttatgtgcagctcaccatgctgg

SEQ ID NO: 114240 - DNA, 201 bp, Homo sapiens
aagtgctgtgttttcccttctgcagggcctgatgtaccacgatgcctctcgctggggtcttacgctacagacttatgtgcagctcaccatgctggacaggmatactcgtcctcaggtaggtttcagatgctcagtttcagccttcttaaacgttttcttcagacttggggtatgtgattgccaggaagggaaactttacaa

SEQ ID NO: 114241 - DNA, 201 bp, Homo sapiens
actttgaccccctctgcttgacacccttggtaggtggggtctgctctgtccactcccgacagactgcttgtgtttccctggcaggaatacctggaagcaawtcaccatctccatgaggagtggctcatcaaaggcagccttttccccatggcagcccctgttctggtaagtaagactcccttacagggtacgagactgttc

SEQ ID NO: 114242 - DNA, 201 bp, Homo sapiens
tttatagtcattttctttccttcttcccttcctttcctgtttttacttctgctagaaatatatgcatggccaggtgtggtggctgatgcctgtaatcccakcactttaggaggctgaagggggaggatcacctgagcccagtagtttaagagtagcctggccaacatgacaaaaccacatgtctacaaaaaatacaaaact

SEQ ID NO: 114243 - DNA, 201 bp, Homo sapiens
cagaggagagttatttaaaagtgagtttaaaaactgatttcctttcttttgtagataaagaacaggaaaaagagaaaaaatcagtggtaagtccctctttyatgtgtactctctaggataatttggttttttgaagaggagagagaaaaaagcagagtaaaaagcaaaaatacattccatagtaaaaagcaaaaatacaag

SEQ ID NO: 114244 - DNA, 201 bp, Homo sapiens
ccataggctcctattatagctgttaccatactgtcctataattgtttcagtgtctgcctttgtccaccctgctgtcagagccctgtgatcatgctgggttyatctccagccccaaccctgcctgtgtaggtttcttgagctgtccttcagtgccttgtgagaccagggtcctcctgcagatgccactttgatggaaagtgc

SEQ ID NO: 114245 - DNA, 201 bp, Homo sapiens
gtgtggggccaaggtctctggcttctgtggttctcttctgacctgcctctagtgcccccacctgcaaacctcagccagccaggtggtgcccctgccaccawtctgagctcacatctttatgacctgaccactgctgggcttaatgccgtttaactcagttcttctcaaagtgtggtccctggaccagcagcggaagcatca

SEQ ID NO: 114246 - DNA, 201 bp, Homo sapiens
ataagttgcctgaggtcacacagctagtaaatggacttggaagcctgtgctgccctgtgattttttttttttttttttgagatggagtctcagtctgtccmtaggctggagtgcagtggcgcgatctcggctcactgcaacctctgtctcccaggttcaagcgattctcctgcctcactctcctgactagctgggactaca

SEQ ID NO: 114247 - DNA, 201 bp, Homo sapiens
gtggagaaatgtccgtggccacaatcctctggtgagtgggttgttggttgcatgaacccccggcttccccttaagcacctgagaatgatggtgcctctgcytgagccctgcctgcccaggcattctctgcgctcttaactgagttggagaagaccagggagggacaagcagaaaatggtggcatgttggtgttctgaggtc

SEQ ID NO: 114248 - DNA, 201 bp, Homo sapiens
gtcctgtgagctcctgtgtgggatgcactgggctaggacctgggcacctggcaaacagccctgacatttgggagtctgcggtctgtctgatgggggaggtytgtctgatgggggaggtctgtctgatgggggagacagcagtaactaggagaatggtggaactagaacagcagtgagtatggtggctgtgagtaggggggc

SEQ ID NO: 114249 - DNA, 201 bp, Homo sapiens
ggaagggggtggcttggcaagtggtggcaggagtaccgtggctgggatctgcagagggtagacagtgcgggcaggcccccagcgtactcagggtggtggaragctcttgggaagtagtgaaaccacatagagaggattgaaatgcttgagatttgtggaagtttgttgaaattaggagaaggatatgccagcgggtgccat

SEQ ID NO: 114250 - DNA, 201 bp, Homo sapiens; identical to SEQ ID NO: 19128

SEQ ID NO: 114251 - DNA, 201 bp, Homo sapiens
gctagagttgcaggtgttagggatcataagtgacgtttcacgggacagaatcacagcctcagaagtcttagtgtccttggtacagatagccttttcaatgrgagtttcctaataaaaaatacaatagaagtagccatttttatataagtttccactctagaccaaaagaaagatcgatacttttgtgaaaaatctcaattc

SEQ ID NO: 114252 - DNA, 201 bp, Homo sapiens
tctgtgcccttccctgccccctgctgcctgcttccatctgtctgtctccagctgtgaaaggaggatgctgctgaggtcagtgcagccttgtgacccatgtrtctaatttccaggtgattgaggctgaccaccacatggagaggatgttagaactctttgaacaaaatcgggatcgaatattaactccagagaatcggaagc

SEQ ID NO: 114253 - DNA, 201 bp, Homo sapiens
tataatatttttagacatcactttaaaaagaaatgtaaagactccctttgcttgcttcctgttcccccttccatttcaggggaactttgtgagattcttcstgcgttgcctgctgtaaaccggagggcagattggctgagctcattcagggcctgacattcaccagctcttcaggatttcatgctggggataggaacaagt

SEQ ID NO: 114254 - DNA, 201 bp, Homo sapiens
ctatgcgcccacctactcccggcccctcggcttccggaacccgcccgagcccgaagcgcctcttccgaggcgcgggatttcctccccggctgcggctgggrcgggggcggccatcggccgttacccgggcgcgagaccgcagcgagcgctgggggcgctcggctttggttctgggatggagagagggcctttaaagagcag

SEQ ID NO: 114255 - DNA, 201 bp, Homo sapiens
tgaaatgcgaccgggtctctttaagggccaggcgccgggatccaggcggcgcccaacggctggactagcagtcgtccgcgccgactcgcacaagaaggaascccgggcctctggatccgctcgcccggctatgctgctgtggccgctgcggggctgggccgcccgggcgctgcgctgctttgggccgggaagtcgcgggag

SEQ ID NO: 114256 - DNA, 201 bp, Homo sapiens
tgctgagatgaaatgcgaccgggtctctttaagggccaggcgccgggatccaggcggcgcccaacggctggactagcagtcgtccgcgccgactcgcacargaaggaaccccgggcctctggatccgctcgcccggctatgctgctgtggccgctgcggggctgggccgcccgggcgctgcgctgctttgggccgggaagt

SEQ ID NO: 114257 - DNA, 201 bp, Homo sapiens
gtttggagcatttaggattttggatttttcaattagggatgctcaaactgtttgtatttgtaaaataagtgtaacttatagcatatcttaatttggactastcatatttcaaggtcttaatagttgcctgtggctcatggccactgtattggacagtgcaagtgttgactgcctcaaagtctggttaggaaaagagtctac

SEQ ID NO: 114258 - DNA, 201 bp, Homo sapiens
ggtggagagctcttgggaagtagtgaaaccacatagagaggattgaaatgcttgagatttgtggaagtttgttgaaattaggagaaggatatgccagcggrtgccatagaaggggagggaaatgcaaagttgagctggatggtaattaatgtatttttgtttgtttatacatttaagagacggcgtcttgctgtgttgccc

SEQ ID NO: 114259 - DNA, 201 bp, Homo sapiens
ctgaaagcgatttggctctaaccttcctttttatctgcctgcaaccttctgtgcccttccctgccccctgctgcctgcttccatctgtctgtctccagctrtgaaaggaggatgctgctgaggtcagtgcagccttgtgacccatgtgtctaatttccaggtgattgaggctgaccaccacatggagaggatgttagaact

SEQ ID NO: 114260 - DNA, 201 bp, Homo sapiens
aaatacattccatagtaaaaagcaaaaatacaagaggatctccagggagaaggaagtctgtcaccctcctagaaggccacctctgttaccaatttcttgtrtctttccccagagtctgcacagataggagcacacaagtatttgtatccttcaggtagatttgggctgttaaagcttaagggatgattgtgaaaggatttg

SEQ ID NO: 114261 - DNA, 201 bp, Homo sapiens
acactgggggtccacgaagctgcagctgcagcccagggtggcacatcggcgagacggtggtgcgcgcctccaatctcggagggcgcccaaaatggaaaatrtttttaggccagggagtgagcataaacattagtgtttttgtggtcatgtagcaaattagggcagaggagagttatttaaaagtgagtttaaaaactgatt

SEQ ID NO: 114262 - DNA, 201 bp, Homo sapiens
gctctcttggcctcagggaaggatgcaagaaattgtactgatgtaacagcaggattcatgtggatcaagaccttggttttgcccccttggggtcagggcargggtgagacccccatgcccactgttgagttgtgtgcttggatttgccaagcttggatttgcttggtattgctctccgtgcattctgtagaaataaaggca

SEQ ID NO: 114263 - DNA, 201 bp, Homo sapiens
aggtcagggtggaagggggacacagcctgagcctggtggcagatgtggcttctcctcccggcaggggagtgaggaggtcctcctgcttcactctctctgcmgccttgattctcatattcagcaaagtccccaggcagggggagtaacagacatttctcaaggcctcctggctgtctccttttcccctgagttagtgattct

SEQ ID NO: 114264 - DNA, 201 bp, Homo sapiens
ctggccctccctgcttcctgctcgagctgtgcagaccttcctcccgcctttgcctgtgtgcctgctttgcttccaagccatgagcagagtcctgagagccrcgtattcttttaacctcagtttaccttcggaccaatcctgagacttgttaccagaggttaaagaagagatgcagggaagaggagaaggtcattccgctgg

SEQ ID NO: 114265 - DNA, 201 bp, Homo sapiens
tggaagcaattcaccatctccatgaggagtggctcatcaaaggcagccttttccccatggcagcccctgttctggtaagtaagactcccttacagggtacragactgttctagaaagaggagtgacccggggaatgtcagccaccttgcagacaggggagggcacagtcctttagagtttgacaacttagaagaaggaagg

SEQ ID NO: 114266 - DNA, 201 bp, Homo sapiens
cccgggaggcggagcttgtagtgagcctagatcaagccactgcactccagcctgggggacagagtgagactccgtctcaaaaataaataaataaataaatwaattaattaattaattttaaaaaaagattaaccaggtgtggtggcccacatctgtggtcccagctactcaggaggctgaggcaggggattgcttaagcct

SEQ ID NO: 114267 - DNA, 201 bp, Homo sapiens; identical to SEQ ID NO: 19139

SEQ ID NO: 114268 - DNA, 201 bp, Homo sapiens
cgggcgtggtggcaggtgcctgtagtcccagctactctggaggctgaggcaggagaatggcgtgaacccgggaggtggagcttgcagtgagccgagatcgygccactgcactccagcctgggtgacagagcgagactccatctcaaaaaaaaaaaaacaaaaaaaaaaaaaaaagaggaagaaagggcagacttgatagct

SEQ ID NO: 114269 - DNA, 201 bp, Homo sapiens; identical to SEQ ID NO: 19140

SEQ ID NO: 114270 - DNA, 201 bp, Homo sapiens; identical to SEQ ID NO: 19141

SEQ ID NO: 114271 - DNA, 201 bp, Homo sapiens
tgaacccgggaggcggagcttgtagtgagcctagatcaagccactgcactccagcctgggggacagagtgagactccgtctcaaaaataaataaataaatwaattaattaattaattaattttaaaaaaagattaaccaggtgtggtggcccacatctgtggtcccagctactcaggaggctgaggcaggggattgcttaa

SEQ ID NO: 114272 - DNA, 201 bp, Homo sapiens; identical to SEQ ID NO: 19142

SEQ ID NO: 114273 - DNA, 201 bp, Homo sapiens; identical to SEQ ID NO: 19143

SEQ ID NO: 114274 - DNA, 201 bp, Homo sapiens
ctgccatttaccccacagtgagaatgactctttgattccaccctatcagaggcaggaacctgaaagcagaaatgactaagacatgattcctgtcttccaaraacattcgatctggtccagtgaatccagtccctaatggctaataacagtgcaaggatttcccatttacaaagcactttctcatataccattctgtgcgtc

SEQ ID NO: 114275 - DNA, 201 bp, Homo sapiens; identical to SEQ ID NO: 19144

SEQ ID NO: 114276 - DNA, 201 bp, Homo sapiens; identical to SEQ ID NO: 19145

SEQ ID NO: 114277 - DNA, 201 bp, Homo sapiens
gccgagatctcaccactgcactccagcctgggagacagagcgagactctgtcacgcacacacaaaaaaggctccaaaacccaaatgtcattcaccacctgstggctggtgcctaaagtctacacagttagagtgtaggttttggttcaagtcctgctcccctactcactagcagtgcagtttgaggtaagtctcttaactt

SEQ ID NO: 114278 - DNA, 201 bp, Homo sapiens
gtgctgagattacaggctcacagccaccactactggcctattttgcaattttaaatgtatctctggtgggaaataggactgtaagccaagcctcttcactrtaagattaaggttctgtccacaataccacccagaaaatgagaatgttgtatggaatgtttcagagaacacggaagccacagctactgcacatgtctagga

SEQ ID NO: 114279 - DNA, 201 bp, Homo sapiens
catcacctgtctggaatcagctaaccgaaacacagaatgaagctaaccagaacataaaatgaagctaaccagaacatagaatgagaacttggaacaagacmtattctctcaggagggactgtccccagtcaggagtcattaggaagtccaacacagagtatctggccagttgagtgagtggaatgtggtatcagagtagac

SEQ ID NO: 114280 - DNA, 201 bp, Homo sapiens
atagaatgagaacttggaacaagacatattctctcaggagggactgtccccagtcaggagtcattaggaagtccaacacagagtatctggccagttgagtkagtggaatgtggtatcagagtagacataggtttcaggaagtcaagaatgccagactgcatggagaaatctaataacctgtgactgttctggcctctggac

SEQ ID NO: 114281 - DNA, 201 bp, Homo sapiens
gattaggctagatatgggtaaatgattcttttcttaggtaaaaaattgggggaagacatagcttgaaggtgatagtgtctctcacaataaagaaaaaagayatgcaaagtttggaaccaggcttgatgggtaggggaaaagagagagaacaatgtttcttttcttatgctttcttgtttatgattttaagagcaaattaat

SEQ ID NO: 114282 - DNA, 201 bp, Homo sapiens
gccatccagtccagcgcactgtatgaggaccactacctcctgggtacttctctcaccaggccctgcatcgcccacaaaaaagtggaaaccgtccagcgggwgggggccaagtgtgtgtcccacagccccacaagaaaggggaacgatcaggtccagtttgagctcatctgctactcgctggccccccagatgaaggtccct

SEQ ID NO: 114283 - DNA, 201 bp, Homo sapiens; identical to SEQ ID NO: 19148

SEQ ID NO: 114284 - DNA, 201 bp, Homo sapiens
gcgtttcattctatctctgtctctaacacacacacttgtcctttaaagtaaatttcccacttaatcttttctgtactgatctgttaaatatttgaactcarttgttgaagtgattatttgaaatttgcatctggtatttaagatctccaactgaataaataccatgctgttaatcaaacaaattcattgtgaaaaggtaaa

SEQ ID NO: 114285 - DNA, 201 bp, Homo sapiens
gctgtcacttataagtgaacatgcagtgtttagctttctgttcctgttaattcacttaggatgatggcctccagctgcatctatgttgctccaaaggacaygatcgcattctttttttatggctgcatagtaggaatctgtatttttaacaagatctcttggtgatgcttacacaaggctaaggtgggatgccattcccta

SEQ ID NO: 114286 - DNA, 201 bp, Homo sapiens
cttgaggaagtgacaaccaagctgagacctgaaagacaagaagcatttagacatatgaaagggttgggtagggagaaaggaagaataatcaagtagggaayatcaggttgtgtgaagattcagattccatagaggatatggcagatcaaggatctgaaagaatgtcaatttgacaggagcagaatgaaaaaagtaaaagca

SEQ ID NO: 114287 - DNA, 201 bp, Homo sapiens
aaatttcccacttaatcttttctgtactgatctgttaaatatttgaactcaattgttgaagtgattatttgaaatttgcatctggtatttaagatctccarctgaataaataccatgctgttaatcaaacaaattcattgtgaaaaggtaaaaacatgctctgtattaatttcagtaactatttcaggcattcgccaacaa

SEQ ID NO: 114288 - DNA, 201 bp, Homo sapiens
aagaattggccgctagggaggaagacagagtttggggtgttgaggatagctatccaggctggtgtggtgcttctgtccactgagggtgggaataacggatygatacaggtttggggaaaaagatcccaagtttgattttgaatctgctgagtttaaagactttgatatgtctaagaagagatatataattatcaatttcta

SEQ ID NO: 114289 - DNA, 201 bp, Homo sapiens; identical to SEQ ID NO: 19147

SEQ ID NO: 114290 - DNA, 201 bp, Homo sapiens
atttagacatcaaggtcttcaccacagaccgggaagtgcacaaaaccaatcaaggcctgggcttgaaatttgctgagctgatatacaccagtttctgacayagccctgagtgtgaatttgtccgcccctgcatcgccaagtcccaggagccggcagaagggaaagtgcaggtgccggtcctcaagggccaggtgtacatcc

SEQ ID NO: 114291 - DNA, 201 bp, Homo sapiens
gctgggagtccccactgtctctctacaatgaggagctgatgagcgtgaacgtgcagggtgattatgagccgattgatgacaccgggttcatcaacatcaaytccctcagactgaaggaataccattgtctccagagtaagttcactgccagatagacccctgtaccatgaggagctggggcctcctcaatttgcagatccc

SEQ ID NO: 114292 - DNA, 201 bp, Homo sapiens
ttcctcacgtttttcagacaagtgttcacttaccctggggcctcaatagtcttacttctagtactatcagaaaatttagtcacaaacccagtgtaagttaycaggctaattcttgcatatagcagtaaacacatggagtttacagtgtaatgaaaaaggcaagcattaaacaggtgaattaaacagtgatgagtgctatga

SEQ ID NO: 114293 - DNA, 201 bp, Homo sapiens
ttcatttctcacaacactgagaggtgaataatattattgttatgcccacttgacaaatgaagaaactgaaccttgaaattcagtggcttgcctgaggtcakccagcaaataagtggggaagtagggcttccaacccaggaaatctgaggccagattccacactggtacctagcactgaccttagaatgagtgccccagatg

SEQ ID NO: 114294 - DNA, 201 bp, Homo sapiens
ttgcatgatccatgtgtctgccacaccataaggtctgaaatggttaaaatttactggcgtttcattctatctctgtctctaacacacacacttgtcctttaaagtaaatttcccacttaatcttttctgtactgatctgttaaatatttgaactcaattgttgaagtgattatttgaaatttgcatctggtatttaagatc

SEQ ID NO: 114295 - DNA, 201 bp, Homo sapiens
ctaacattggacagtcaacctctgaatcccccacacttatctgagcacgttcaactttaccatcttcttctctctgctaagctgaaatcagtgtattgatrtcttggtgggagagtggaactagagttgctaaactattccctggatggaaaactgaagagagaaggtgtcttcttgttcctatgagtcaggatatttaag

SEQ ID NO: 114296 - DNA, 201 bp, Homo sapiens
tgcatgatccatgtgtctgccacaccataaggtctgaaatggttaaaatttactggcgtttcattctatctctgtctctaacacacacacttgtcctttaaagtaaatttcccacttaatcttttctgtactgatctgttaaatatttgaactcaattgttgaagtgattatttgaaatttgcatctggtatttaagatct

SEQ ID NO: 114297 - DNA, 201 bp, Homo sapiens
ctgaatcccccacacttatctgagcacgttcaactttaccatcttcttctctctgctaagctgaaatcagtgtattgatgtcttggtgggagagtggaacwagagttgctaaactattccctggatggaaaactgaagagagaaggtgtcttcttgttcctatgagtcaggatatttaagtcaaactctgctaaatattcc

SEQ ID NO: 114298 - DNA, 201 bp, Homo sapiens
gcatgatccatgtgtctgccacaccataaggtctgaaatggttaaaatttactggcgtttcattctatctctgtctctaacacacacacttgtcctttaaagtaaatttcccacttaatcttttctgtactgatctgttaaatatttgaactcaattgttgaagtgattatttgaaatttgcatctggtatttaagatctc

SEQ ID NO: 114299 - DNA, 201 bp, Homo sapiens
catgatccatgtgtctgccacaccataaggtctgaaatggttaaaatttactggcgtttcattctatctctgtctctaacacacacacttgtcctttaaagtaaatttcccacttaatcttttctgtactgatctgttaaatatttgaactcaattgttgaagtgattatttgaaatttgcatctggtatttaagatctcc

SEQ ID NO: 114300 - DNA, 201 bp, Homo sapiens
acaaaactgtcattagagaagcagggactggctcaattgcccaggctgatgtgcagtagtgcaatcatagctcactgcagcctgaactcctaaactcctgygctcaagaggtccttccacctcagccttccgagcagctaggactacaagtgctcaccataacactcagctaattttttttttttttttttttttttttgt

SEQ ID NO: 114301 - DNA, 201 bp, Homo sapiens
agtgttctttatttccccattgcattgcactaaaatattccaatgcaatctgtgttttgttttgttttttcttttttaattttttttattttttgagacgsagtcttgttctggttgccccggctggagtgcagtggcatgatctcagcttactgcaacctccgcctcccgggttcaagcaattcttttgcctcagcctcc

SEQ ID NO: 114302 - DNA, 201 bp, Homo sapiens
tgcatacatgagacattttgcattgcatagaatttccgagggttcacagatactttgaagcccaaaagtgatccacagaccccagattgagaactcctccrctatgccatgcttaagcttatttctgtgtatcttctttctgaggagcaggcagatgggtcatctttacaatgtgaagttcttggcatttttattttgttt

SEQ ID NO: 114303 - DNA, 201 bp, Homo sapiens
tttcattgatacttttgtatttccccagttctacctcccctcccctagactggttggctgtcctggaatttcccttccttctttcaattgcccaaacactwagtgggaggaggcaaactcatatcaaatagcagattgactacatctgtgctggatcatgcagacagttcaagagtcccaagtaacttagcagcttcatct

SEQ ID NO: 114304 - DNA, 201 bp, Homo sapiens
tctagtcctttacaacaacatccttctctagaggtaggagagacaatttaatattttgttttactctttagaaattaaaactcgggttacatggaaatgtkctcttctctgaataggtaacattgttaaacaagttttgagtgtccttccatctttttctttttatgaatactcctgtacataatttttaaaaacataagt

SEQ ID NO: 114305 - DNA, 201 bp, Homo sapiens
aaacaatatagaaagatataaaatggaaagtaaataaaaataaaaatctctcatcaaactcttcatcacccccaacagaaataaccccaaagataaagctyccttttttatctttcctgatagtttcagtgcatttgcaaacaaatatattgactctttttttcacaaatagaattttagtgtaaatatttcacaaccttc

SEQ ID NO: 114306 - DNA, 201 bp, Homo sapiens
ggtcattggtgctgtttctccttgttgcccaaaccagacccgtctttaataaagttgttctccacccatttctgcatagtttgagaaactcttcagctgtmgatcaaagacacttgaaatattcagctactgttcttacttcctatttattcaccagggaagcctgaagccagaatgccagacagcgcagacactattcca

SEQ ID NO: 114307 - DNA, 201 bp, Homo sapiens
gattaagaaaacgtggcacatatacaccatggaatactatgcagccataaaaaaggatgagttcatgtcctttgtagggacatggatgaagctggaaaccrtcattcttagcaaactattggaaggacagaaaaccaaacaccacatgttctcacttataggtgggaattgaacaatgagaacacttggatacaggaaggg

SEQ ID NO: 114308 - DNA, 201 bp, Homo sapiens
tattatttatttcctttgaccacccacaattatcatcagtgtcatcctcatcatcacaattaagattactaccacattaggctacataaactttttttttctctctctctttgttttataatttcaattttattttagattcaaggggtacatgtgcaggttttacatgggtatattgtctgatgctgaggtttggggaac

SEQ ID NO: 114309 - DNA, 201 bp, Homo sapiens
tttcctttgaccacccacaattatcatcagtgtcatcctcatcatcacaattaagattactaccacattaggctacataaactttttttttctctctctctttgttttataatttcaattttattttagattcaaggggtacatgtgcaggttttacatgggtatattgtctgatgctgaggtttggggaacaactgatgc

SEQ ID NO: 114310 - DNA, 201 bp, Homo sapiens
ttcctttgaccacccacaattatcatcagtgtcatcctcatcatcacaattaagattactaccacattaggctacataaactttttttttctctctctctttgttttataatttcaattttattttagattcaaggggtacatgtgcaggttttacatgggtatattgtctgatgctgaggtttggggaacaactgatgcc

SEQ ID NO: 114311 - DNA, 201 bp, Homo sapiens
agaactttgcaataggcatttttgttttaacttcatttctggtgcagttttattttcctacccttgtctttctattttctctttcatctgctttagacttmaactgtgttttatgtattgctgtaagcctctttaaaccctttctaaaacaaagcagggaatacataaacaaatagttttttgttttttgtttttttttct

SEQ ID NO: 114312 - DNA, 201 bp, Homo sapiens
ctttatcatctactaagtacatgtccctagtacataatagactagtagttagattatcaatgaacaataaatattggctttccttttttttaaattttaattttttttttttttttttttgagaggtggcctcactttgtcacccaggccagaatgcagtagcgcaatcttggctcactgcagccctgatatcctgggctc

SEQ ID NO: 114313 - DNA, 201 bp, Homo sapiens
attgaggggaaaaaagcattaaagtttgtggcccttataatcaagtactttacagtctactgatgggagaaaaggaaaacaaaacaaaacaaaaaaccactgtgagatatagatatgtcttttctttctctagcagataagtacctgaggctcaaggaggttaagcaacttttgcaaattcactttccaatatagtgtctt

SEQ ID NO: 114314 - DNA, 201 bp, Homo sapiens
ttgaggggaaaaaagcattaaagtttgtggcccttataatcaagtactttacagtctactgatgggagaaaaggaaaacaaaacaaaacaaaaaaccactgtgagatatagatatgtcttttctttctctagcagataagtacctgaggctcaaggaggttaagcaacttttgcaaattcactttccaatatagtgtcttt

SEQ ID NO: 114315 - DNA, 201 bp, Homo sapiens
atacttttttattatttatttcctttgaccacccacaattatcatcagtgtcatcctcatcatcacaattaagattactaccacattaggctacataaactttttttttctctctctctttgttttataatttcaattttattttagattcaaggggtacatgtgcaggttttacatgggtatattgtctgatgctgaggt

SEQ ID NO: 114316 - DNA, 201 bp, Homo sapiens; identical to SEQ ID NO: 19153

SEQ ID NO: 114317 - DNA, 201 bp, Homo sapiens
ggcttggaagcaaaacttcaggggaaaaagacaacatatggaattgaccacaattgaatttacaagtgaagtggctttacagaggaatcaggggatgtttytgagagaggaaattcattaaattctaacttgaatattttctgtttgcctttaagtcagagcaaaggctttgagtcccagcttcccagtttgtgaccttga

SEQ ID NO: 114318 - DNA, 201 bp, Homo sapiens
tattccaaagaaggctacagatagatacattttttccattggaattaggcaatggagttaaacagaagttacaatatggttgaaataaatgtatttttttwaaaaaagatttctctttccttaattattaaaaaatatacaattttgtagaaaattttaaacaaagtataaagaaaaaaataaaaatcattcataatccta

SEQ ID NO: 114319 - DNA, 201 bp, Homo sapiens
agtgctgggattgcaggcatgaggcactgagcccagccaatattggctttccttagatatggttcatggtatgattagaaacaaaaagaattagcagtcamaacacctagtttctagttctattctgccacaatgtaaccttaggcaaagttggtttttgtatttgtcacctataatgatgagtttgtgattagactaatg

SEQ ID NO: 114320 - DNA, 201 bp, Homo sapiens
tgagaggtggcctcactttgtcacccaggccagaatgcagtagcgcaatcttggctcactgcagccctgatatcctgggctcaagcgatcctcccgcctcrtcctcccaggtagctgagactacaggcacatgcccccactcatggctagttttttatttttgtagagacagggtcttgttatgttgtccaggctggtctt

SEQ ID NO: 114321 - DNA, 201 bp, Homo sapiens
ttcatgaccagtccgggctacatagcaagacccccatctctatgttaaaaaaaaaaaaactttaaaaaaaattactacagctttatatataagatatatgktggcacctgctgtagtcccaggtacatgagaggctgaggtgggaggatcacatgagcctgggaagtagaggctgcagtgagccatgatcacaccactgca

SEQ ID NO: 114322 - DNA, 201 bp, Homo sapiens
tagtagttagattatcaatgaacaataaatattggctttccttttttttaaattttaattttttttttttttttttttgagaggtggcctcactttgtcayccaggccagaatgcagtagcgcaatcttggctcactgcagccctgatatcctgggctcaagcgatcctcccgcctcgtcctcccaggtagctgagactac

SEQ ID NO: 114323 - DNA, 201 bp, Homo sapiens
ccttgcttgcctccctttctttttttcttcttttaaatcagcttcctcaggttgatctgcctctcattccttaggcatctgtttcctatgtgttctttctmctttttttcattgatacttttgtatttccccagttctacctcccctcccctagactggttggctgtcctggaatttcccttccttctttcaattgcccaa

SEQ ID NO: 114324 - DNA, 201 bp, Homo sapiens
taaattatacttttttattatttatttcctttgaccacccacaattatcatcagtgtcatcctcatcatcacaattaagattactaccacattaggctacrtaaactttttttttctctctctctttgttttataatttcaattttattttagattcaaggggtacatgtgcaggttttacatgggtatattgtctgatgc

SEQ ID NO: 114325 - DNA, 201 bp, Homo sapiens
gctaacacgtaactgaccaatatggtttggttgtgtccccacccgaatctcatcttgaattgtagttcccataatccccacgtgttgtgggagggacccaktgagaggtcattgaatcatgaggtggttaccctgtgctgctgttctcgtgatagtgagtgagttctcatgagatctgatggttttataagggcttttccc

SEQ ID NO: 114326 - DNA, 201 bp, Homo sapiens
tttatgtaggcagtgacagcatttaccctgctcactactctataactaggatctgatcttatggctaacacgtaactgaccaatatggtttggttgtgtcmccacccgaatctcatcttgaattgtagttcccataatccccacgtgttgtgggagggacccagtgagaggtcattgaatcatgaggtggttaccctgtgc

SEQ ID NO: 114327 - DNA, 201 bp, Homo sapiens
agccttgtggtcagctagtgaaggaagctttatgtaggcagtgacagcatttaccctgctcactactctataactaggatctgatcttatggctaacacgwaactgaccaatatggtttggttgtgtccccacccgaatctcatcttgaattgtagttcccataatccccacgtgttgtgggagggacccagtgagaggtc

SEQ ID NO: 114328 - DNA, 201 bp, Homo sapiens
tgtgttctgtgagccttgtggtcagctagtgaaggaagctttatgtaggcagtgacagcatttaccctgctcactactctataactaggatctgatcttayggctaacacgtaactgaccaatatggtttggttgtgtccccacccgaatctcatcttgaattgtagttcccataatccccacgtgttgtgggagggaccc

SEQ ID NO: 114329 - DNA, 201 bp, Homo sapiens
tgtttttaaatgagtaaaataaaatatataggattacacaggaaaccaattaaatactgctaccaagctatttaaaaatctatgatataatatgctttttwaattaaacccttaaatggatctagaggtaggtaaatgtctaacagcagatattttgaagttgcaatgaatgtaaatggcactttgagctatctacaactg

SEQ ID NO: 114330 - DNA, 201 bp, Homo sapiens
taaatgacctgtgttcagattacctggtaccatacaaaattgttctctggcaacaatattatagtatattgtatatgactatagtcgtgatttttagctcrtcttttcctcttaccaaaaatttaaagcacatgttgcataaatcttatgagtacttaatatttaatatggagaccaacaggccttttgtttcctctcaca

SEQ ID NO: 114331 - DNA, 201 bp, Homo sapiens
ttatttaaaaaaatactgtcatagggatgctaccttcttttcttttttgttagtaactatttgtgggatgtctttggtgtgtcaggctctgagcaatgccrttttctcttggcttctttgcagtctctgtgtgaggcttacagtcatttttcacgtttgactcttcagaaggaagacagggcttctggttctacatctgga

SEQ ID NO: 114332 - DNA, 201 bp, Homo sapiens
tttggttttgacaacctagaaataaccttgaagaaatcctatggagaagtcttaaagaggaagattggattttgtagactcaaagaatgtgtcatggtttggcttaatctaagccatttttattcttcttttcttgtgtttgggtctattatctgtctgtagaatttatacagtgagactgctggggaaagtcttatgtct

SEQ ID NO: 114333 - DNA, 201 bp, Homo sapiens
actgcagcctgaactcctaaactcctgcgctcaagaggtccttccacctcagccttccgagcagctaggactacaagtgctcaccataacactcagctaattttttttttttttttttttttttttgtagagacagagtcttgctatgttgcccaggctggtctcaaactgctggcctcaagcagtcctcccacgtcagcc

SEQ ID NO: 114334 - DNA, 201 bp, Homo sapiens
ctgcagcctgaactcctaaactcctgcgctcaagaggtccttccacctcagccttccgagcagctaggactacaagtgctcaccataacactcagctaattttttttttttttttttttttttttgtagagacagagtcttgctatgttgcccaggctggtctcaaactgctggcctcaagcagtcctcccacgtcagcct

SEQ ID NO: 114335 - DNA, 201 bp, Homo sapiens
tgcagcctgaactcctaaactcctgcgctcaagaggtccttccacctcagccttccgagcagctaggactacaagtgctcaccataacactcagctaattttttttttttttttttttttttttgtagagacagagtcttgctatgttgcccaggctggtctcaaactgctggcctcaagcagtcctcccacgtcagcctc

SEQ ID NO: 114336 - DNA, 201 bp, Homo sapiens
tcatacaggcctgggttcaaatcccacccagggcactggctaaatggttctatgagctacttttctgtagaacagacccctagaaatagaactatttgctcaaacagtgtgattcttttaaatgttaactttaatagatattgccaaattgtcctccagaattatctcattatttttatatgcacaaccacaacctataag

SEQ ID NO: 114337 - DNA, 201 bp, Homo sapiens
catacaggcctgggttcaaatcccacccagggcactggctaaatggttctatgagctacttttctgtagaacagacccctagaaatagaactatttgctcaaacagtgtgattcttttaaatgttaactttaatagatattgccaaattgtcctccagaattatctcattatttttatatgcacaaccacaacctataaga

SEQ ID NO: 114338 - DNA, 201 bp, Homo sapiens
tacaggcctgggttcaaatcccacccagggcactggctaaatggttctatgagctacttttctgtagaacagacccctagaaatagaactatttgctcaaacagtgtgattcttttaaatgttaactttaatagatattgccaaattgtcctccagaattatctcattatttttatatgcacaaccacaacctataagaga

SEQ ID NO: 114339 - DNA, 201 bp, Homo sapiens
gtgaatggcctagggtagttaggtgactgtgttccatatggtcattcaggggcaaatgctgatgaagcaacacagctgtcttcatctaagactagaactcygcttgttgccatttcccagcaggaaggggttgaaagaaaatttatgtagatttttttttctacccagtagttgcatatatattgtattctcacatcctat

SEQ ID NO: 114340 - DNA, 201 bp, Homo sapiens
aaagcaaagtctccttccatactcactgacctccccactctccacgaccccaatcttctgctctcaaagtaactactcttcagtttatgtctagattgtttatatatatacacacacacacacacacacacacacacatatgtggataatatgtaattcccctaattttataccttagaattataccacatgtatattctg

SEQ ID NO: 114341 - DNA, 201 bp, Homo sapiens
aagcaaagtctccttccatactcactgacctccccactctccacgaccccaatcttctgctctcaaagtaactactcttcagtttatgtctagattgtttatatatatacacacacacacacacacacacacacacatatgtggataatatgtaattcccctaattttataccttagaattataccacatgtatattctgc

SEQ ID NO: 114342 - DNA, 201 bp, Homo sapiens
tgtgttttttgttgttgttttgcaaggatgtgttcttggagatttttataatctagaattcacctatttcaagatttctctccagcccccatagtaataamtctgaagtaggagggatgaggtctccaaacacataaatctacagccattttagcttgggggcatgttatagttacaaagatcttatagccatatcaatag

SEQ ID NO: 114343 - DNA, 201 bp, Homo sapiens
aggttcctgatggtttttatgtgaaagacagtgagcagctggttattaccactgaggcaataaagagatactgtgggctttagcagaaacaccagtatatrtatttagtttttaaaataaggttttaaaaggaatgttttatttaattgcctacacagaatgaataaagtgatatttatagtaggactctgggtttgttta

SEQ ID NO: 114344 - DNA, 201 bp, Homo sapiens
atacaggcctgggttcaaatcccacccagggcactggctaaatggttctatgagctacttttctgtagaacagacccctagaaatagaactatttgctcaracagtgtgattcttttaaatgttaactttaatagatattgccaaattgtcctccagaattatctcattatttttatatgcacaaccacaacctataagag

SEQ ID NO: 114345 - DNA, 201 bp, Homo sapiens
tcctgccataattgctaaatgacctgtgttcagattacctggtaccatacaaaattgttctctggcaacaatattatagtatattgtatatgactatagtygtgatttttagctcgtcttttcctcttaccaaaaatttaaagcacatgttgcataaatcttatgagtacttaatatttaatatggagaccaacaggcctt

SEQ ID NO: 114346 - DNA, 201 bp, Homo sapiens
ggaaaaacacactaatatgaatttaactcagttgaaggtaaaatatttatttttacatatagacagtaatctattatgctttgcaatgacatagtttttcyataagagtaccacacgtagaacaaaatatggatgccagtgtagctattctgggtttttaaatactccctacaactagagaaagctcctgtttccagcgat

SEQ ID NO: 114347 - DNA, 201 bp, Homo sapiens
gttctccaaccttcctattccaatacatactgtcatggatgggtacactaaaatctcagaattcactgctatatcactcatccatgtaaccaaaaaccacrtgtacccccaaaagctattgaaataagataaatacattcttatttaaaaaaatactgtcatagggatgctaccttcttttcttttttgttagtaactatt

SEQ ID NO: 114348 - DNA, 201 bp, Homo sapiens
gttcctggtgtcaaggtacacagccatggatgaatcatgaggcttgagtgcatcagagacctaagcgtgggcaggaacccccagagtacccatgtgaatgytctgcttgctgcctcgcaccttttatgacaattcccacaagaagctatgtggtctgtttctacttctgaaggagcagcctttttcccttttttttttttt

SEQ ID NO: 114349 - DNA, 201 bp, Homo sapiens
agcactttcatagacaacggtaagagccaatgggctaccaacatttagtaacgtgtgatggttcacaaatgactgtgaaaaatagatttggatcatatttmtaggaagagaagaacaattaactcatgagtgatttctgtattcttcattacaaagaacttgttcatttgcctcttcagctggcagtaagttatgctacat

SEQ ID NO: 114350 - DNA, 201 bp, Homo sapiens
cattcatgagttggatgactttgtatatgatctgtcctgctctccatttcaaaggcaagaccaccaaaattcacaagcttattatgttgtcactaatgtgyaagccaccagtttttctgcaagttggaagttttctcaacagtcaaatattcccccttctcactaatcttaaggttttaaagttatagctgcaaatctaaa

SEQ ID NO: 114351 - DNA, 201 bp, Homo sapiens
tgggtgctttatatatatcatatcatattgtgtctgctttaataaatcatagttattgactacatatcatacaggatgtgtgccttctgtgggtcagaaartaagttcactatttagtccttttcaaaaattccttcccgatctatcttatagacagaaactaagcttttatacacccaagatttggcagattaacatctg

SEQ ID NO: 114352 - DNA, 201 bp, Homo sapiens
aaggaattggtatgtatatgaaaatgcttgttgggcacattgcattttttggccattaacattaaaacactcattaatggcattttagcatgaaattactscttttcagtggataaatcacattagatcaacaaaaacctctttggtcaacctcttgatctgatgaaccctgtatttattcttctttcctaccctcactgt

SEQ ID NO: 114353 - DNA, 201 bp, Homo sapiens
ttcaaaagggaaatattggtgggttttgcttttcaacaagaacttaatataactagttgtgttttatagagataagcctggaaggggggattggaggagarcaatggttctctgtacattagaatctcctggagggctggtgtctgagtggcaccaccaaagattctgattcagctgttctggatcagaatctacagctca

SEQ ID NO: 114354 - DNA, 201 bp, Homo sapiens
acccaaacttagacatatggccacatctgtcagccagaaagggtgggcaatgttatctatagctgtgttgctacgtgcctattgctaaaaaggctaaaaasgaagaaggggaacatggatgctggtgaacacttggccacctctgacacagataattgctaaagtaataagaagagatggaaattaaatgtgctaagctag

SEQ ID NO: 114355 - DNA, 201 bp, Homo sapiens
gtgatttctgtattcttcattacaaagaacttgttcatttgcctcttcagctggcagtaagttatgctacattttgaaattcctaacaggtaacacctgamagaatgtttagatttcataatcttttcatatacctacgatcatcacatttaaaaaagaactgtatttttgaattaaagtagaaacagattatgcatgaat

SEQ ID NO: 114356 - DNA, 201 bp, Homo sapiens
tatgagcatgaaggggcccatgccaaatgtatagtgcagcaggagcaaaggggctaaggtgggaagttggaagactagcaaatgggccaatttgaagggarcataaagtcaggagatgagaatagtagggtggtgggaaggataggttttgaggccattaaatataagttgaaaaatggggccccactttcataggcccaa

SEQ ID NO: 114357 - DNA, 201 bp, Homo sapiens
tgatggttgcatgctagtaatcccacagaattagagccactcaagttgagagtgagtcattacacttcaagaacataaagctggttgaaaatgtggctaaragagaatcatgtgtacccccacccccagttcagtgtgtattagcctactgcttcttttagtttaaacttgatgaatatttttaatttctaatgaaatttc

SEQ ID NO: 114358 - DNA, 201 bp, Homo sapiens
taggcctcatgcaaaagagttccagaaagactgagcacctgctatgtgtaatgttctctcttaggcttctatagtagagtacgacccttatggagtttgayacaggggaagagagaattaaaatacagtaaatgtataaattaggatgttctaaggacagacacaaatgaaccgcataggcttaaagaggaaagattccat

SEQ ID NO: 114359 - DNA, 201 bp, Homo sapiens
acattatactattttaaatacagcatctactcatctttctattactattcaacttgaagcaaatattcttgccattattatttattttcaaatattatacyaaccttgcccttttgctttctttcttttttcccctgaatagccaatcataagtggaaagtcattgagtttatttacacccttcattttgccttgattctt

SEQ ID NO: 114360 - DNA, 201 bp, Homo sapiens
aggctctgagcaatgccattttctcttggcttctttgcagtctctgtgtgaggcttacagtcatttttcacgtttgactcttcagaaggaagacagggctwctggttctacatctggaactcttttcccacaacaccaacactgagaaatgtgacatggtgctgtgtttacatttgcataggaacttgcattataagtttt

SEQ ID NO: 114361 - DNA, 201 bp, Homo sapiens
cttattaggtgtttaatgtgtacaaaccagtgagatttgttccaacacactataaactttcaaggagagaggctgtgtcttcttcatgtttatatctgctrcaacactgagttcatggcttttcacacataattgctcaacagagcaggtgccatggaaagtcaattcaatgagtaaaattacctcaaaatagtctgttaa

SEQ ID NO: 114362 - DNA, 201 bp, Homo sapiens
aggtcttgccacctcctcattgaacagaactgtgaactaaagccaggagaatgaagtcagtcgtccgtgaccacatggttaagcagcagcaatgctaggawcagggccgcgtgcccagctcacagagggagagtttttctgctcactgtacctcctataaaatcatcataagccctagagagagactttcatgtgtttctt

SEQ ID NO: 114363 - DNA, 201 bp, Homo sapiens
gatttttagctcgtcttttcctcttaccaaaaatttaaagcacatgttgcataaatcttatgagtacttaatatttaatatggagaccaacaggccttttrtttcctctcacatgctatttttctttttcagtgtgaatgacatcacagctgttggaccggcacatttctatgccacaaatgaccactacttctctgatcc

SEQ ID NO: 114364 - DNA, 201 bp, Homo sapiens
actttagagacaaagaggaaataagggttgggacaggaaggtcttgccacctcctcattgaacagaactgtgaactaaagccaggagaatgaagtcagtcrtccgtgaccacatggttaagcagcagcaatgctaggatcagggccgcgtgcccagctcacagagggagagtttttctgctcactgtacctcctataaaat

SEQ ID NO: 114365 - DNA, 201 bp, Homo sapiens
aaacagggcttattgatgattgagtgacatgcatgtacggtggtcttatattcatactttgtatcccctgaataggttctccgcatccagaacattctatstgagaagcctacagtgactacagtttatgccaacaatgggtctgttctccaaggaagttctgtagcctcagtgtatgatgggaagctgctcataggcact

SEQ ID NO: 114366 - DNA, 201 bp, Homo sapiens
ttagaaggtggaagcagggcgatgtgtaatttcctcacatgcatagaggcaggaaggttacctctaaattatttaatcaagtttctcatgtcatttagatwttgacaatttctcatttggaaggtacttgagctggatacactggtggataatttatctattgatccttcctcgggggacatctgggtaggctgtcatcct

SEQ ID NO: 114367 - DNA, 201 bp, Homo sapiens
taagagtaccacacgtagaacaaaatatggatgccagtgtagctattctgggtttttaaatactccctacaactagagaaagctcctgtttccagcgatcwcaagaactgaccatgattacatgcagcagcaggttgagagtgatattcatcagatttagggcccattccatgaagtattgatggcagtggaagaattcca

SEQ ID NO: 114368 - DNA, 201 bp, Homo sapiens
ggcttttcacacataattgctcaacagagcaggtgccatggaaagtcaattcaatgagtaaaattacctcaaaatagtctgttaattcactcacctttgawgtagacagattattctgcattgatacttatctcttactcttaaaattcgctatgtattaataaatattttattgaatattaaggaatgatcactatttta

SEQ ID NO: 114369 - DNA, 201 bp, Homo sapiens
ctgctgcaacactgagttcatggcttttcacacataattgctcaacagagcaggtgccatggaaagtcaattcaatgagtaaaattacctcaaaatagtcygttaattcactcacctttgaagtagacagattattctgcattgatacttatctcttactcttaaaattcgctatgtattaataaatattttattgaatat

SEQ ID NO: 114370 - DNA, 201 bp, Homo sapiens
ctcttttcccacaacaccaacactgagaaatgtgacatggtgctgtgtttacatttgcataggaacttgcattataagttttatttgttgagttattggctttttttttttaataacccacatcagtatatagaactttgcaataggcatttttgttttaacttcatttctggtgcagttttattttcctacccttgtctt

SEQ ID NO: 114371 - DNA, 201 bp, Homo sapiens
agcttcttccaaggtacttcctcattttgttccttctctaatttatccccagcatttgcaaacaatccctatggtgggttgtcctgtcatcttttataagygctaatgtatatattagctaatatgtaagagctaaagagcttatatttccttatttataaatgtgtgtgtatagtttccttataaaccagggcaagcatg

SEQ ID NO: 114372 - DNA, 201 bp, Homo sapiens
aggaaagacagagaatgatctgttaggtcgtctaacagcttatacattcaacctttccttgcctgtggtatttaaatgtcagtgcctgcccagaggtcccrtagttatgtcttgtaaattaactctgttctttcaattctttagatgacacagtttatctctttgttgtaaaccacccagaattcaagaatacagtggaaa

SEQ ID NO: 114373 - DNA, 201 bp, Homo sapiens
taaatcttatgagtacttaatatttaatatggagaccaacaggccttttgtttcctctcacatgctatttttctttttcagtgtgaatgacatcacagctsttggaccggcacatttctatgccacaaatgaccactacttctctgatcctttcttaaagtatttagaaacatacttgaacttacactgggcaaatgttgt

SEQ ID NO: 114374 - DNA, 201 bp, Homo sapiens
ggcaacaatattatagtatattgtatatgactatagtcgtgatttttagctcgtcttttcctcttaccaaaaatttaaagcacatgttgcataaatcttaygagtacttaatatttaatatggagaccaacaggccttttgtttcctctcacatgctatttttctttttcagtgtgaatgacatcacagctgttggaccgg

SEQ ID NO: 114375 - DNA, 201 bp, Homo sapiens
ttcaccattcctatccagcctgtaggcaggtcctgttggttctacctgtgcctccttcctctacccccaaactcctttccctttgagtgagacctgcctartttaggttgtcatcctctctgactagcatatgagactttcttccaatttgttttctgtctacttggatttttttcactcttgccaattttgtctgtctat

SEQ ID NO: 114376 - DNA, 201 bp, Homo sapiens
cccaagctaacaaaaaaataacaataatgaaaagggagaatcagcttttactcctctttcaccattcctatccagcctgtaggcaggtcctgttggttctmcctgtgcctccttcctctacccccaaactcctttccctttgagtgagacctgcctaatttaggttgtcatcctctctgactagcatatgagactttcttc

SEQ ID NO: 114377 - DNA, 201 bp, Homo sapiens
ttttataaatataaattttaaagtgtgatcatactgatgcatacatattgaagtatcaggtatttccttttaaataaatgtattatttttattggctatayattattccattataaggatgatcttaaactaatttaaccaattctctattgatggatatgtgtataggggtggggagttctacataaaaaatattttata

SEQ ID NO: 114378 - DNA, 201 bp, Homo sapiens
taactctgttctttcaattctttagatgacacagtttatctctttgttgtaaaccacccagaattcaagaatacagtggaaatttttaaatttgaagaagsagaaaattctctgttgcatctgaaaacagtcaaacatgagcttcttccaaggtacttcctcattttgttccttctctaatttatccccagcatttgcaaa

SEQ ID NO: 114379 - DNA, 201 bp, Homo sapiens
ttaggtcaggcgtggtggctcacgcctataatcccagcactttgggaggccgaggcaggcggatcacgaggtcaggagttcgagaccagcctgaccaacaygggataaccctgtctctactaaaaatacaaaaattagccgggcatggtggcacatgcctgtagtcccagctacctgggaggctgaggcaggagaattgct

SEQ ID NO: 114380 - DNA, 201 bp, Homo sapiens; identical to SEQ ID NO: 19160

SEQ ID NO: 114381 - DNA, 201 bp, Homo sapiens
tctgttccttacattcgcatttacctatggaaagtaaattaaaaatggtgttagttattagaaaagcaaagaaagaaaaaataagagatcagcaagtgtawccagataacacatcccttaagccttgagtgatgcatacagtgtaatctgtaagtaccaaggaaccacgaaagtcattcaaaagaagtagagtctctttct

SEQ ID NO: 114382 - DNA, 201 bp, Homo sapiens
gtgtgtgcaggactgctactgcctaagggaaaattacaaagctgcctaggcagcctgatttatgaggcattgaaaggcacatctgaccaaaaatatccccmccactggcctgccaccagtgcctgaaatacctatgattagaatcacccattaaaatgttttctgcaggccgggcatggtggctcacgtctgtaatcccag

SEQ ID NO: 114383 - DNA, 201 bp, Homo sapiens
acatggtgaaactccatctctactaaaaatacaaaaatgagccgggcgtggtggcgggcgcctgtaataccagctacctgggaggctgaggcaggagaatygcttgaacccagggggtggaggttgcagtgagctgaggttgctccactgcactccagcctgggtgacagagtgagactatctcaaaaaaaaaaaaaaaaa

SEQ ID NO: 114384 - DNA, 201 bp, Homo sapiens
tgctctgttacccaggctggagtgtagtggcataatcctggctcactgcagcctcaatctcctgggtttaggtaatcctccctcctcagcctcccaagtasttggtactacagttgtgcgccaccactcccagctaattttttcatattttttgtcgagatggggtttcatcatgttgcccaggctggtctcgagctcctg

SEQ ID NO: 114385 - DNA, 201 bp, Homo sapiens
atagtttaaattatatattgccactattacatgtgagagatttgccaggccctatggaagactttcaaaatgcctttgtgcatagtttattttatgtatgdatgtatgtatgtatgtatgtatgtatgtatgtatatatttatttatttatttatctatcgagatggagtctcattctgtcactcaagctggagtgcagtg

SEQ ID NO: 114386 - DNA, 201 bp, Homo sapiens
gcatgcaccaccatgcctggctaatttttgttatttttagtagagacagggttttaccatgttggccaggctggtctcgaactcctgacctcaggtgatcygcctgcctcggcctcccaaagtgctgggattataggcatgagccactgtgcccagcctaaggaggatttttataaaagtgaaacaagcatttgggaaaac

SEQ ID NO: 114387 - DNA, 201 bp, Homo sapiens
aagaatgaatgaatatgcagggatacccaataggattgtttcttttccaaagtagccaaggaagcaggttggcgtgtaaggtttcagttttcttatcagcyttctttggccttggctgttgaacttgtaaaaatggaaaaacaaagtaaaatgaaagagtgtctggttttgctttggcaagttccagtcttttcttcaaag

SEQ ID NO: 114388 - DNA, 201 bp, Homo sapiens
tttactcatttaatattctcataggtagaaatctgggaagattatagagataaaagagtgagcagccaggtgtggtgactcatgcttgtaatcccagcactttgggaggtcgatatgggtggactgcttgagcccaggagtctaagaccaggctaggtaacgtagtaagacattgtctctacaaaaaagattaaaaattgt

SEQ ID NO: 114389 - DNA, 201 bp, Homo sapiens
gaatgaactgactttgaactaaattatcatattctttgctcttaatagtcaatgccattccctctaaactgcctttcctttattgagcgctgtacatttcaagttttcttctattgtttagccaagttagaaagtagagagggaagtgtacatataattttagataagattcatgaggtttttaccacttatttacttttt

SEQ ID NO: 114390 - DNA, 201 bp, Homo sapiens
aaacgtagtgggtaaggggacctcctaactttctcaaatatacaatgcaatacattaaattataggccaatatcagttataaacatcaatatgaaaatccyaagcaagcaaataaataaatgaaagataaaaaccctagcagatcaaattcagcaacgtatgaataaaaatacatcacagcaaataaaacttatcctaaga

SEQ ID NO: 114391 - DNA, 201 bp, Homo sapiens
ttactcatttaatattctcataggtagaaatctgggaagattatagagataaaagagtgagcagccaggtgtggtgactcatgcttgtaatcccagcactttgggaggtcgatatgggtggactgcttgagcccaggagtctaagaccaggctaggtaacgtagtaagacattgtctctacaaaaaagattaaaaattgtc

SEQ ID NO: 114392 - DNA, 201 bp, Homo sapiens
ggagtgtagtggcataatcctggctcactgcagcctcaatctcctgggtttaggtaatcctccctcctcagcctcccaagtagttggtactacagttgtgygccaccactcccagctaattttttcatattttttgtcgagatggggtttcatcatgttgcccaggctggtctcgagctcctgaactcaagccatctgccc

SEQ ID NO: 114393 - DNA, 201 bp, Homo sapiens
tgaataataatgaaaaactgtgattttttgactatcacatacattgtgttaaaaaacaggtaaatataatgactattactgttaagaaagacaaggaggaraactgtttcaatgttcaggtttaaatactaagcacaaaaatataacaaattctgtgtctacaataatttttgaagtgtatacaagtgcattgcaaatgag

SEQ ID NO: 114394 - DNA, 201 bp, Homo sapiens
caagagaaggctctttaacaaacaccttttctgatagtagggttagggattccttaaaacgtcattcattactttaagtagcatcaaacgtaagtaacatmgctgaagctggaaggcgtccttgttagaggtactgcccttaatggattactgctaaatgtcatgctgctattaaaatattcttaatagttaagaatttca

SEQ ID NO: 114395 - DNA, 201 bp, Homo sapiens
atttcagaatcagtcccatagaaaacagatatcagtgtaggggttttcatttctcttcatgaaataaaactgtatttaaacatgggtccagaagagataarttagataagacccatgcattcaaacatttctatatgttttggcactttaaaaaattccagtttcctgtctgaggtcttcttgctctaaagtttgtgtttt

SEQ ID NO: 114396 - DNA, 201 bp, Homo sapiens
atgcaaaacaatgttcttttatacctcttattagcatttatattttattttcctatctctagggttttgacatctactttgctacacgtctgagaacacgragtttattttgtatccatagaaaaagaagatacaatactttagtgctagttttggtgttctaaaatatatgactgatgaatgagtaaatgtatgcatgaa

SEQ ID NO: 114397 - DNA, 201 bp, Homo sapiens
attagcatttatattttattttcctatctctagggttttgacatctactttgctacacgtctgagaacacgaagtttattttgtatccatagaaaaagaaratacaatactttagtgctagttttggtgttctaaaatatatgactgatgaatgagtaaatgtatgcatgaattaagaatgaatgaatatgcagggatacc

SEQ ID NO: 114398 - DNA, 201 bp, Homo sapiens
gtatacagagagggtggggaagagacccaggtggacagctggtctcagtgcctcacaagtaagacatcatctccctccccctaccatttaccgagcatcamatatgtgctagataatgtgctgcatgcttttcaaacatctcattccacgaggaaggtggcatgatccctattttacagatgaggaaacaaatttggagag

SEQ ID NO: 114399 - DNA, 201 bp, Homo sapiens
caaagctgagacttcacgcatacatattctcctttctggttgcatcttcacctagtttctccaagtattcagagttaaatagcacaacttcttttatatgktcacttttgtccacatgtagtggcagtgctgctgcttcagtaggctttctcacacacccttttccttctttcaacagcagtcaccaaacgttcacaacac

SEQ ID NO: 114400 - DNA, 201 bp, Homo sapiens
aatgtgctgcatgcttttcaaacatctcattccacgaggaaggtggcatgatccctattttacagatgaggaaacaaatttggagaggttaagtctcccacccaataagccagaaatcaaactcacataggtctgagtccaaagcctgtgctctcaactataatgaaatgctgccttaaactgatttctactcagtattac

SEQ ID NO: 114401 - DNA, 201 bp, Homo sapiens
accataaagataagcaagatacaattcttgccttaaggcttgcaattcagtaaggtgaagaaaccaagtgtacaaaaagtgataaagtgataagtggtctsggagaggtacaatatacttgggtggaagagtcacatgtgtctgggaagatgggaaaaaacttcttggatcaagaaggatttaaaaggatcccaatagttt

SEQ ID NO: 114402 - DNA, 201 bp, Homo sapiens
cccagctacctgggaggctgaggcaggagaattgcttgaacctgggaggtggaggttgtgggcgtggtggcatatgcctgtaatcccagctattcaggtgrttgaggtatgagaatcgcttgaacccagaaggtggaggttgcagtgagtctagattgtgccactgcactctaggctgggcaacaaagcgagactctgtct

SEQ ID NO: 114403 - DNA, 201 bp, Homo sapiens
gcccagcctgtacatagtttatatgtagcaggggaccccaaacccctggccgtggactggtactggtttgtggcctgttaggaaccgggtcacacagcagraggtgagcagcttgagagagagctgattttcatctgaatttacagccacttcccatcactcaaattaccgcctgagctccgcctcctgttagatgagcag

SEQ ID NO: 114404 - DNA, 201 bp, Homo sapiens
ctattcaggtggttgaggtatgagaatcgcttgaacccagaaggtggaggttgcagtgagtctagattgtgccactgcactctaggctgggcaacaaagcragactctgtctaaaaaaaaaaaaaaaagtctcagacactaggcaagaatgtgttggcaagatatgatatcttaatatatttaatagtaaatataaagcca

SEQ ID NO: 114405 - DNA, 201 bp, Homo sapiens
ccatcactcaaattaccgcctgagctccgcctcctgttagatgagcagcggcattagatgctcataaaagtgcccaccctactgtgaactgtgcatgtgagggctctaggttgtgctctccttatgagaatctaatgcctgatggtctgaggtggaacagcttcatcctgaaaccatcccctgcccctgccatccatggaa

SEQ ID NO: 114406 - DNA, 201 bp, Homo sapiens
ttatgagaatctaatgcctgatggtctgaggtggaacagcttcatcctgaaaccatcccctgcccctgccatccatggaaaaattgtcttccatgaaaccrctccctggtgcccaaaaggttggggaccacagatatatagcattctcatactcatttatatattcgtttcctctctagactgtgtcccttcaagacaatg

SEQ ID NO: 114407 - DNA, 201 bp, Homo sapiens; identical to SEQ ID NO: 19161

SEQ ID NO: 114408 - DNA, 201 bp, Homo sapiens; identical to SEQ ID NO: 19159

SEQ ID NO: 114409 - DNA, 201 bp, Homo sapiens
tgataaaaacaatactgaataaaaccataaattatgaagcagcatcacaccaaaaacaaatatgcaaaacaatgttcttttatacctcttattagcatttrtattttattttcctatctctagggttttgacatctactttgctacacgtctgagaacacgaagtttattttgtatccatagaaaaagaagatacaatact

SEQ ID NO: 114410 - DNA, 201 bp, Homo sapiens
ggtctcgagctcctgaactcaagccatctgcccacctcggcctcccaaagtgctgggattacaggtgtgagccaccacgcctgcctgactccagcagtttyatatattcagggttggaataaggagtaagaaacattaatagctgccatttagtaagcatttactatgcttagtgcatgtatgctttacatgtatgatctc

SEQ ID NO: 114411 - DNA, 201 bp, Homo sapiens
ggagaatggcatgaacccgggaggcggagcttgcagtgagccgagatcgcgccactgcactccagcctgggggacagagcgagactccagcctgggggatrgagcgagactccctctcaaaaaacaaaacaaacaaaacaaaacaaaacaaaaatttctactctttttgaagtgggtattcgttattttaaataaagtgaa

SEQ ID NO: 114412 - DNA, 201 bp, Homo sapiens
atttatgtatttttaatttcttttgagatagggtcttgctctgtttgcccaggctggagtgcagtggctcaatcatggctcactgcagttttgacctcccyggctcaagtgatcctcctacctcagccttccaagtagttgggactacaggaatttgccaccacacccagctaattatttaaaaaattttttgtggatact

SEQ ID NO: 114413 - DNA, 201 bp, Homo sapiens
gaccagaacactgtgtttagtgttattatgtaagactaatgctttgtgctttcatttatacacaatgtcatcagtcaggcctcccattttcttaaaaattytctgaacttagtgtgaataggttctcagaagcattcaaggatttcagactcaccatatgaatatttcattccacagaatgccttggcatttcctaatgtc

SEQ ID NO: 114414 - DNA, 201 bp, Homo sapiens
attaatgtaacaatgagtttatatggggaaggaataaactcatataaacaatgagtttatatggggaagaacataaataatgcacctgtttcatcagtgcygctaagacacagatgacaatcacacaagcagggagatgcagaggattttttgaattatgatttgttttattagaacctgctaagtattatgttaccatta

SEQ ID NO: 114415 - DNA, 201 bp, Homo sapiens
gctctaaaatcctacagtttttgttttgtttatttctgctgtttctaatttgaaaccagaaatatcatttcatgaaaaacaagatgatgagaacttgagarctgttttctctccaagagaaacagatgcttttcaagcaatagtcgaaatgaattcaatattatttccacagatggaattttgcatttgaacttcctttgg

SEQ ID NO: 114416 - DNA, 201 bp, Homo sapiens
tctttaattcttagtatccccccctttttttttttcatttttctcctttttgcctttgttagatgcccaggcatgccacagtaccaagcgttatcagtacyagctcacattcctttgcttatttggaaagaagactaactttctagctcattacagacaccctttcccctttctctccactttcttttacgtgcccactct

SEQ ID NO: 114417 - DNA, 201 bp, Homo sapiens; identical to SEQ ID NO: 19162

SEQ ID NO: 114418 - DNA, 201 bp, Homo sapiens; identical to SEQ ID NO: 19163

SEQ ID NO: 114419 - DNA, 201 bp, Homo sapiens; identical to SEQ ID NO: 19164

SEQ ID NO: 114420 - DNA, 201 bp, Homo sapiens
taattcttagtatccccccctttttttttttcatttttctcctttttgcctttgttagatgcccaggcatgccacagtaccaagcgttatcagtaccagcycacattcctttgcttatttggaaagaagactaactttctagctcattacagacaccctttcccctttctctccactttcttttacgtgcccactctatct

SEQ ID NO: 114421 - DNA, 201 bp, Homo sapiens
tttccttaggattttgagcattattcctaacacccgcaaggggaagggaaactttcttggtcagcattgattattattattttttttagatacagtcttgytctgttacccaggctggagtgcagtggcacaatcatggctcactgcagcctcaacctcctgggctcaggtgattgcccccacctcagcctcccaagcagc

SEQ ID NO: 114422 - DNA, 201 bp, Homo sapiens
taacacccgcaaggggaagggaaactttcttggtcagcattgattattattattttttttagatacagtcttgttctgttacccaggctggagtgcagtgscacaatcatggctcactgcagcctcaacctcctgggctcaggtgattgcccccacctcagcctcccaagcagctagaactacaggcatgcaccactatgc

SEQ ID NO: 114423 - DNA, 201 bp, Homo sapiens; identical to SEQ ID NO: 19167

SEQ ID NO: 114424 - DNA, 201 bp, Homo sapiens
tttttttgtagagacacggttcttgctatgtgctcaggctggtctcaaactcctggcctcaagcagtccttccacttcggcctaccaaagcgttaccagcrtaagccaccacgcccatcacattgatttttatggggccggggacctacatggagccttgctttcctgattgagttttttgttcctctccctgcccagggg

SEQ ID NO: 114425 - DNA, 201 bp, Homo sapiens
ccttgctttcctgattgagttttttgttcctctccctgcccaggggtggagggtgagaggctgggggtgaagggacaggcaggtgcaattccattttaccrctgggcggagcaagactcatgagacatcaaaggcagagagattcaaattctgactgaagaataactgcttcaactaatctgggaacactacactctgttt

SEQ ID NO: 114426 - DNA, 201 bp, Homo sapiens; identical to SEQ ID NO: 19169

SEQ ID NO: 114427 - DNA, 201 bp, Homo sapiens; identical to SEQ ID NO: 19168

SEQ ID NO: 114428 - DNA, 201 bp, Homo sapiens
gagagccctgggctctgcatggaacacatcgcctctactcacatttcactagctacatgacccagcctaggtgcaagaggagacgggaagtatagtctgtsacaggacagttcaacactgtggaagaccctcggttttgctggcagttcgccccagctctgccgcccatggcacgtccgtggagatatgccaacaggagac

SEQ ID NO: 114429 - DNA, 201 bp, Homo sapiens
agacagcctttgtggcaatttcagtgttttctcagtgtatcattcagtactgtgtgttgagccgctgctctgtagcaggcatacctctaggctcggggacrtagcagtgaatggaacagaaaaataagttcctgtgctcatggagcttgcattttactggggggagacagacaaacatataagcctgtaaagatagtattt

SEQ ID NO: 114430 - DNA, 201 bp, Homo sapiens; identical to SEQ ID NO: 19166

SEQ ID NO: 114431 - DNA, 201 bp, Homo sapiens
ttgagccgctgctctgtagcaggcatacctctaggctcggggacatagcagtgaatggaacagaaaaataagttcctgtgctcatggagcttgcattttaytggggggagacagacaaacatataagcctgtaaagatagtatttgggatgtgagatagagaaggagtaaagcagggtagcggggatagagagtgttgggg

SEQ ID NO: 114432 - DNA, 201 bp, Homo sapiens
ctgactcagcttccccctgtgggatatgatgaggtttctcttcaaataatctgatcaatcttttattctttaattcttagtatccccccctttttttttttcatttttctcctttttgcctttgttagatgcccaggcatgccacagtaccaagcgttatcagtaccagctcacattcctttgcttatttggaaagaagac

SEQ ID NO: 114433 - DNA, 201 bp, Homo sapiens
ggcagatctgctgactcagcttccccctgtgggatatgatgaggtttctcttcaaataatctgatcaatcttttattctttaattcttagtatcccccccyttttttttttcatttttctcctttttgcctttgttagatgcccaggcatgccacagtaccaagcgttatcagtaccagctcacattcctttgcttatttg

SEQ ID NO: 114434 - DNA, 201 bp, Homo sapiens; identical to SEQ ID NO: 19165

SEQ ID NO: 114435 - DNA, 201 bp, Homo sapiens
ttgcgccctttcccccgcagaaggggtgaggtgggcgccgctgcagttcccgcggatagagagggtccggtccttcccgctgtgggtgaactgtaaaaaaytgcctgtattcaggaggatatgcaaagctaggtttgtggaagtctggggtgaggctcctatactttcttgctgtgtgtcctcggtgagtccctgaacctc

SEQ ID NO: 114436 - DNA, 201 bp, Homo sapiens
agggtggtgttggtatttcccttccatttaccacccacgttcctcccttgacctctgtccaaactcctcctcatctctccaaaagaaggagctcccaaggytgcacgtggctctgccttcaattactgtttatttcatttgcatgtggcttttctccttgaccttaacatgaggaggggagccacagccagggcagcgtag

SEQ ID NO: 114437 - DNA, 201 bp, Homo sapiens; identical to SEQ ID NO: 19170

SEQ ID NO: 114438 - DNA, 201 bp, Homo sapiens
gtatttttttagtaaggacggggttttaccatgttggccaggctggtctcaaactcctgacctcagatgatcctcccgcctaggcctcccacagtggctgsgattacatgcgtgagccaccgcacctggccctgaaaacttatttatttgtcccagtgtatgtcttgccttggagggcttgaggaagccacaccccaatgg

SEQ ID NO: 114439 - DNA, 201 bp, Homo sapiens
cggcacatgtatacgtatgtaactaacccgcacaatgtgcgcatgtaccctaaaacttaaagtataataaaaaaaataaattaaaaaaaaaaaaaaaaaaagaacccagccaacccgcagagggtggggagggggcaagctgtgaggagagcggacccaagaaccatgtctacgcgtgagtcctttaaccccgaaagttac

SEQ ID NO: 114440 - DNA, 201 bp, Homo sapiens
ttaaattgaaatgtatatactttaaattgtcttaaaactaaagaataaaccagcccccggcccagctgacgggagcgcagagtcccggctccgcagggtcrcgccgagccaaacgagccccagcagcgcccaggtgtgagcccgcgtcctcgctgtggccgctactgcgggccgcggcgtttttattcaggcaatgcttaa

SEQ ID NO: 114441 - DNA, 201 bp, Homo sapiens
aaacaccgcgtattctcactcataggtgggaattgaacaatgagatcacatggacacaggaaggggaacatcacactctggggactgttgtggggtggggkgaggggggagggatagcattgggagatatacctaatgctagatgaggagttagtgggtgcagcacaccagcacggcacatgtatacgtatgtaactaacc

SEQ ID NO: 114442 - DNA, 201 bp, Homo sapiens; identical to SEQ ID NO: 19172

SEQ ID NO: 114443 - DNA, 201 bp, Homo sapiens; identical to SEQ ID NO: 19173

SEQ ID NO: 114444 - DNA, 201 bp, Homo sapiens
tgggaggattgtttgaacctgggagtgtgaggccagcctgggcaacatggcaaggtctcatctcttaaaaaaaaaatacatgtgtgatgggcttttctttkgcttttcagtctcttctcggcaaagtgaaagaagcggtgaaggtggccattgatgcagaatatcgccacattgactgtgcctatttctatgagaatcaac

SEQ ID NO: 114445 - DNA, 201 bp, Homo sapiens
ctcaggaccctgtgatgattgcattaactgcacaaattgtttgtagagcatgtgtgtttgaacaatatcaaatatgggcaccttaagaacaggataacagmgatgttcagggaacaagggagataaccttaaagtctggctgcctgtgggccgggcagcacagagccatatttctcttctttcaaaagaaaataggagaaa

SEQ ID NO: 114446 - DNA, 201 bp, Homo sapiens
aattgtgtgaacttgggaggtggaggttgcattgagccaagattgcaccattgcactccagcccaggcgtcagtgcaagacaccatcttgaagaaaaaaaraaaaaagaaaaaagaaaatcagggagcctgagtgccctgcttctcagatcaaacccatgacctgtttcacatcatttcatattgaaaatgaattaaggga

SEQ ID NO: 114447 - DNA, 201 bp, Homo sapiens
tctgggcaggatctagaacatgtaatagatggctactaaatacatgttgcattggaggctgctgctaacatatatgatatctttgggcaagtttggaaaaygcccaataaaggctaaaaattatacaaagattcccttccttgcatgtccatgcagcttctgtaccaggaagcatggctggatatgcaaacagtgggtcag

SEQ ID NO: 114448 - DNA, 201 bp, Homo sapiens
agaagttggccaatatcttctccagaaaaccacaccctggagatctaatctttatccagtgatactgaaatgaaagtttgcccttgggtgtgtataggatrtaggtgtgtgaggttaatgtccatggtgataatggtggcttctggaatgtactaacagaggatcttaaagtcaatccagtagtttctaaaaatataggga

SEQ ID NO: 114449 - DNA, 201 bp, Homo sapiens
atcactgatgggcacccaggccctggactgaaatttcctgtgaatgcttcagctaactctgttgcggtggatcctttagcaatttctgccccagggaagaytaaggcaagccagggtccctgtagtccctctagagctgcccataaggtattcctttctatgataggccatggaggagctggtggacgaggggctggtgaa

SEQ ID NO: 114450 - DNA, 201 bp, Homo sapiens
gaacaaacctggactgaaatataaaccagtgactaaccaggtaaattctattcagtttaagggtaagggtcctgccctattacttcttaaacattgcgggrggaatgttcaatgctatgccctgagtcttatctcaggggtcagtgatcaggacactttggggaggtgtgaggctgatctcatgggtgatttagcaagaat

SEQ ID NO: 114451 - DNA, 201 bp, Homo sapiens
taaaaaaggaagatcacagggttgtctctaaggtgaagggagagaaagaggtgggggtctggcacaagtctaatagctgtgaagggctcagtaattattarcgattgtacctgaagccacagtgagctgcagagatgttttattcttcctttccataaaaggaggggtccttgtagctgagtggaaacatgatgtcccctt

SEQ ID NO: 114452 - DNA, 201 bp, Homo sapiens
aaactttcatatttccatggtgtatggaactataattttttatgtgtttctttacgtgtaaggtgagagtggcaagaacataaaatctttacctgttagtyttagattttcttgggctggggaggggcagtagggctggaaccaatcactgatgggcacccaggccctggactgaaatttcctgtgaatgcttcagctaac

SEQ ID NO: 114453 - DNA, 201 bp, Homo sapiens
tgactaaccaggtaaattctattcagtttaagggtaagggtcctgccctattacttcttaaacattgcggggggaatgttcaatgctatgccctgagtctyatctcaggggtcagtgatcaggacactttggggaggtgtgaggctgatctcatgggtgatttagcaagaatctcagtgcgcacttgtttggcctttgctt

SEQ ID NO: 114454 - DNA, 201 bp, Homo sapiens
aacacaagagctgtcactgaagcaaagatagcttctgtctcacagcttcctgtcaagccctacagcccagtggcaaagcatggctttggagtctagggatrtgggtgcagatgccaactctacctctgatcagccttatgacccccaagctactttcttcattcctaaaaaaggaagatcacagggttgtctctaaggtga

SEQ ID NO: 114455 - DNA, 201 bp, Homo sapiens
cttcttaaacattgcggggggaatgttcaatgctatgccctgagtcttatctcaggggtcagtgatcaggacactttggggaggtgtgaggctgatctcaygggtgatttagcaagaatctcagtgcgcacttgtttggcctttgcttggtggactttttttgtgtgtagaactccctaggaacaatgcaaaacagagccg

SEQ ID NO: 114456 - DNA, 201 bp, Homo sapiens
tgatccgtttccatatccagaggaatgtgacagtgatccccaagtctatgacaccagcacacattgttgagaacattcaggtaagtttccggctggtcggscctggtattcctcagtggagtgggggacaggcagaccttctcactaggcttctcacctcatccctgcactgtctttggccccctccttccccaccaccct

SEQ ID NO: 114457 - DNA, 201 bp, Homo sapiens
gggggaatgttcaatgctatgccctgagtcttatctcaggggtcagtgatcaggacactttggggaggtgtgaggctgatctcatgggtgatttagcaagwatctcagtgcgcacttgtttggcctttgcttggtggactttttttgtgtgtagaactccctaggaacaatgcaaaacagagccggctttccccgtgatga

SEQ ID NO: 114458 - DNA, 201 bp, Homo sapiens
tcaatgctatgccctgagtcttatctcaggggtcagtgatcaggacactttggggaggtgtgaggctgatctcatgggtgatttagcaagaatctcagtgsgcacttgtttggcctttgcttggtggactttttttgtgtgtagaactccctaggaacaatgcaaaacagagccggctttccccgtgatgaggattgtttg

SEQ ID NO: 114459 - DNA, 201 bp, Homo sapiens
ccgcaccaaccatggccacgtttgtggagctcagtacaaaagccaagatgcccattgtgggcctgggcacttggagggtaaatatgcaaatctttgcacamctttcttctctggagggctgtttgggtgttttctctttctacattcagccagaaaagcctggaggtcgggtaggggtttggagaggtgaatttcagtcct

SEQ ID NO: 114460 - DNA, 201 bp, Homo sapiens
tgctatgccctgagtcttatctcaggggtcagtgatcaggacactttggggaggtgtgaggctgatctcatgggtgatttagcaagaatctcagtgcgcasttgtttggcctttgcttggtggactttttttgtgtgtagaactccctaggaacaatgcaaaacagagccggctttccccgtgatgaggattgtttgctgt

SEQ ID NO: 114461 - DNA, 201 bp, Homo sapiens
gctatgccctgagtcttatctcaggggtcagtgatcaggacactttggggaggtgtgaggctgatctcatgggtgatttagcaagaatctcagtgcgcacktgtttggcctttgcttggtggactttttttgtgtgtagaactccctaggaacaatgcaaaacagagccggctttccccgtgatgaggattgtttgctgtt

SEQ ID NO: 114462 - DNA, 201 bp, Homo sapiens
tttcattctgtatttacagactggggatgactttttccccaaagatgataaaggtaatatgatcagtggaaaaggaacgttcttggatgcctgggaggtargttccagctttgtctaagtgtgctgggagagaaatcctcagttatccatgagattcccattgatatgaaagaggccatgtgcctgatgctttctaatttc

SEQ ID NO: 114463 - DNA, 201 bp, Homo sapiens
ctatggccagtttgtgctgtgaatgtgagctccctccctgctagaatggccggcagtctccagccacagcagtaacagccttaccgataatgtattggaaytctttcctttctaggtctttgactttaaattgagtgatgaggagatggcaaccatactcagcttcaacagaaactggagggcctttgacttcaaggagta

SEQ ID NO: 114464 - DNA, 201 bp, Homo sapiens
ctaatagctgtgaagggctcagtaattattagcgattgtacctgaagccacagtgagctgcagagatgttttattcttcctttccataaaaggaggggtcyttgtagctgagtggaaacatgatgtcccctttctgcacaggttctgatccgtttccatatccagaggaatgtgacagtgatccccaagtctatgacacca

SEQ ID NO: 114465 - DNA, 201 bp, Homo sapiens
tatgttttcttaatgaacatgaggatgactgctaaagaaaacatttgaaaggcatgaaaagatatcattgatcaagttcagaggctctgatttgaaacgarcatgcttgaatacgtaagcattggatgtttatgtagacccacaaccagttcagtagaaacctcattgactaccctgaagcagaggggaggaaaaaagtat

SEQ ID NO: 114466 - DNA, 201 bp, Homo sapiens
ctatgttttcttaatgaacatgaggatgactgctaaagaaaacatttgaaaggcatgaaaagatatcattgatcaagttcagaggctctgatttgaaacgwgcatgcttgaatacgtaagcattggatgtttatgtagacccacaaccagttcagtagaaacctcattgactaccctgaagcagaggggaggaaaaaagta

SEQ ID NO: 114467 - DNA, 201 bp, Homo sapiens
agtgacaccatcttggctcactacaacctccctctaccaagtaaaaaccattctcctgccttggccttccaagtagctgggactacatgtgcatgccaccrcacatggataatttttatatttttagtagagatgaggtttcaccatgttggccaggctggtctcaaactcctgacctcaagggatccacccgtctcagcc

SEQ ID NO: 114468 - DNA, 201 bp, Homo sapiens
gtggctcatgcctgtaatcccagcactttgggagatccagacgagaggactgcttaagcccaggagttggagaccagactgggcaacatagcaagacccartttctacaaataatcaataaattagctgtgcatggtggcatgcagctgtagtcccagccacttgggaggctgaggtggagattgagtgttgagcctgaga

SEQ ID NO: 114469 - DNA, 201 bp, Homo sapiens
tcatacccagatttgaactaatagaaaatactgattcagatactgcaacccatttcactgtgcatgtcattaagaagttagcacaggtactagatatacaytgggaataccatactccttggcatccatcctccacaggaagagtagagtggatgaatcagactctaataaaccacttaacttagttttagaaactcgatt

SEQ ID NO: 114470 - DNA, 201 bp, Homo sapiens
gaggctgaggtggagattgagtgttgagcctgagaggtcaaggctgcagtgagcagtgattgtgccactgcactccagtctgggcaacagagtgagatccygtgtaagagaaagaaagaaagagaaaaaatgcagagtctcaggcttcacccaggctacctaacgggcatctgcactttaacaagttccctaggtggttcc

SEQ ID NO: 114471 - DNA, 201 bp, Homo sapiens
gaaaggacccaagcttccaggtcctcctgcctgtctcccagatggagaggctctgatgatcagtcttgagaccctcattggagtggtgtccttctgtacayggtagccatggtgattattcacatcagcatctttctgcccctagggccaaacctgaggacccttccctgctggaggatcccaagattaaggagattgctg

SEQ ID NO: 114472 - DNA, 201 bp, Homo sapiens
caaggtttccccagagtcttggctgtgggtttgttgtgggctgggtggttgtggagaggatgcagagccagaagtccctggcaccactttgcagatcaccrtgtgggacttgggctagcagcatccctatgacctgggagcttgttagacatgcagaactggctgggtgtggtggctcatgcctgtaatcccagcactttg

SEQ ID NO: 114473 - DNA, 201 bp, Homo sapiens
cccatgacctgtttcacatcatttcatattgaaaatgaattaagggatgaatgttttctctggccattttttattataccattatgtccttttgcaaatgstaatagagaacgaattggagaaataagatataaatgaacagtggcatataactccaagagttaatcatgttatcttggcagctgtctgtgtaggggtgca

SEQ ID NO: 114474 - DNA, 201 bp, Homo sapiens
tctgatgatcagtcttgagaccctcattggagtggtgtccttctgtacacggtagccatggtgattattcacatcagcatctttctgcccctagggccaarcctgaggacccttccctgctggaggatcccaagattaaggagattgctgcaaagcacaaaaaaaccacagcccaggtaccatatttttatttttcttgtt

SEQ ID NO: 114475 - DNA, 201 bp, Homo sapiens
ttttttccaaaatgatcattgtataatggacggcctgtactgagcctgtgtgtcaggtaatgtggttaacttaacattcattacagcatgtcatcaccacmaaggcctcttgtggctggtgctatttttttttccattttgccgacaaggtttagagagattgaatcacctgcttagacccacacacccagtaagtgttgg

SEQ ID NO: 114476 - DNA, 201 bp, Homo sapiens
atgtagttgcgagtttgtattgtgttttacacgggaaaatatattaagcctcacctttctgaaatgcttagaattgacatgattcaattaaatgtagtttkttctgtgtattgtttgttcaaaagcattaatccacaagcacagcattctttttttgatacagattctcactctgtcacacaagctagggtgcagtgacac

SEQ ID NO: 114477 - DNA, 201 bp, Homo sapiens
gatcagtcttgagaccctcattggagtggtgtccttctgtacacggtagccatggtgattattcacatcagcatctttctgcccctagggccaaacctgargacccttccctgctggaggatcccaagattaaggagattgctgcaaagcacaaaaaaaccacagcccaggtaccatatttttatttttcttgttatccaa

SEQ ID NO: 114478 - DNA, 201 bp, Homo sapiens
aaaatgatcattgtataatggacggcctgtactgagcctgtgtgtcaggtaatgtggttaacttaacattcattacagcatgtcatcaccacaaaggcctyttgtggctggtgctatttttttttccattttgccgacaaggtttagagagattgaatcacctgcttagacccacacacccagtaagtgttggaatctgga

SEQ ID NO: 114479 - DNA, 201 bp, Homo sapiens
gtccatgcagcttctgtaccaggaagcatggctggatatgcaaacagtgggtcaggttttagccccacacaactccgtggccgggtgcccctgctagggcrtaatttatatgcatgaccttcttgcaaaccaagccatggttggtgtgggagacagtgactcaggacccacaggtgaggcttctccgtatgctgcagcctc

SEQ ID NO: 114480 - DNA, 201 bp, Homo sapiens
ttcacatcagcatctttctgcccctagggccaaacctgaggacccttccctgctggaggatcccaagattaaggagattgctgcaaagcacaaaaaaaccrcagcccaggtaccatatttttatttttcttgttatccaaccactcatgcttccagtctcatgtttcatttctcgtgttgtcctcaactgactccttaaag

SEQ ID NO: 114481 - DNA, 201 bp, Homo sapiens
tgaggttctcagccagggggtattttggaaaacagtaggagcacttttctattatcacatgtgattttctttattcagtctagtaaaagttgaggtatacmatgttataaaaaaagaaaaggatgttgggtgtgagggtgttgagaatcactggatctatattatatgcaagttgctgaaaaaaaaaaacaaaacactagt

SEQ ID NO: 114482 - DNA, 201 bp, Homo sapiens
acccttccctgctggaggatcccaagattaaggagattgctgcaaagcacaaaaaaaccacagcccaggtaccatatttttatttttcttgttatccaacmactcatgcttccagtctcatgtttcatttctcgtgttgtcctcaactgactccttaaaggggaagaacacaggagctgaagccctctaaagtatttcctt

SEQ ID NO: 114483 - DNA, 201 bp, Homo sapiens
aggaattcagggacccccaacagagagactggctgaagccatggcagaagaacataaattgtgaagatttcatggacatttcttaattccccacattaatrtttttataatttcttacgcctgtctttactgcaatctctgaacataaattgtgaagatttcatgaacatttatcacttccccaatcagtacttttgtgat

SEQ ID NO: 114484 - DNA, 201 bp, Homo sapiens
ttagtgcctgtgagcctggtctccctccccccagaacactgagcactacaaatactgtggtctttgtgtaggacctaatttagagaaaaatttgtatcccktggacagaatgggaaaaactcctatggccagtttgtgctgtgaatgtgagctccctccctgctagaatggccggcagtctccagccacagcagtaacagc

SEQ ID NO: 114485 - DNA, 201 bp, Homo sapiens
aagcacccttcttgtgttcttgcagggaggaggctgagagaccacaaataccacagagtccaccagagaagaataccttctcagcgagagttgttgctttkatggaacacagtttctttttttttttctctctctctgtagattctctcatttggaggactttcccttcgatgcagaatattgaggttgaatctcctggtg

SEQ ID NO: 114486 - DNA, 201 bp, Homo sapiens
ctccccccagaacactgagcactacaaatactgtggtctttgtgtaggacctaatttagagaaaaatttgtatcccttggacagaatgggaaaaactcctrtggccagtttgtgctgtgaatgtgagctccctccctgctagaatggccggcagtctccagccacagcagtaacagccttaccgataatgtattggaattc

SEQ ID NO: 114487 - DNA, 201 bp, Homo sapiens
tgggaaaaactcctatggccagtttgtgctgtgaatgtgagctccctccctgctagaatggccggcagtctccagccacagcagtaacagccttaccgatratgtattggaattctttcctttctaggtctttgactttaaattgagtgatgaggagatggcaaccatactcagcttcaacagaaactggagggcctttga

SEQ ID NO: 114488 - DNA, 201 bp, Homo sapiens
aagaataccttctcagcgagagttgttgctttgatggaacacagtttctttttttttttctctctctctgtagattctctcatttggaggactttcccttygatgcagaatattgaggttgaatctcctggtgagattacacaggggattctctttcttcgctgaagtgtgactgtctccactcaagaactattttagcca

SEQ ID NO: 114489 - DNA, 201 bp, Homo sapiens
tctctctctgtagattctctcatttggaggactttcccttcgatgcagaatattgaggttgaatctcctggtgagattacacaggggattctctttcttcrctgaagtgtgactgtctccactcaagaactattttagccaagcttatctgagatcacagtgaactttgtcctgttgtagaccagaatggaggtgctgttt

SEQ ID NO: 114490 - DNA, 201 bp, Homo sapiens
agttggtttctttacctataaagtaggatgataatactaatcgcagctaacatccattgaaccttagcttagaatgtgccagggtcctgagcccttttccrgtggtattatctcatttaatactcataacaatccccaagctgtcaattctgctgttgtttcctacctcatgatgttgtgagagtggattgggacaagact

SEQ ID NO: 114491 - DNA, 201 bp, Homo sapiens
agtgttttcctgtgggtgaattcactgaatcctcaaaataacccctttggggtaggtacttttaacatcttcttattcacatttcctggaagaggaaataragatgcagggagggaggaggaccttgctcaaggccacccaggtagtaagtgactgaaccaagtttcaaaggcaggcaggctctgggatccagctcacagc

SEQ ID NO: 114492 - DNA, 201 bp, Homo sapiens
ttttcatgataaaactttcatatttccatggtgtatggaactataattttttatgtgtttctttacgtgtaaggtgagagtggcaagaacataaaatcttyacctgttagttttagattttcttgggctggggaggggcagtagggctggaaccaatcactgatgggcacccaggccctggactgaaatttcctgtgaatg

SEQ ID NO: 114493 - DNA, 201 bp, Homo sapiens
atggagaggctctgatgatcagtcttgagaccctcattggagtggtgtccttctgtacacggtagccatggtgattattcacatcagcatctttctgcccstagggccaaacctgaggacccttccctgctggaggatcccaagattaaggagattgctgcaaagcacaaaaaaaccacagcccaggtaccatatttttat

SEQ ID NO: 114494 - DNA, 201 bp, Homo sapiens
acacttatagagtactaggagagttgaaaaagtcaactgcttttaaaacttaagacatgtcattgaggtgctgagccctggcgatcttccacactgcatcrtggatcttaatcagctttgttatagatggcctgagccaggttagatgaggatgcaaatcaaaaagcagggacaatgagtataatgtggcccttccttttc

SEQ ID NO: 114495 - DNA, 201 bp, Homo sapiens
gcttcagggttgcagaagagggagctagggccagtccacagcactgagaaagattgggtgatgctagcgctgaaaaaatgtggcccaggcaaacatcagckgggggcagaggggtcagggtggaacgtgcaggctgcagagcatccatgggactggagaagaaggagcctccaaattgggggaggccagcgtttctctctg

SEQ ID NO: 114496 - DNA, 201 bp, Homo sapiens; identical to SEQ ID NO: 19186

SEQ ID NO: 114497 - DNA, 201 bp, Homo sapiens; identical to SEQ ID NO: 19187

SEQ ID NO: 114498 - DNA, 201 bp, Homo sapiens; identical to SEQ ID NO: 19188

SEQ ID NO: 114499 - DNA, 201 bp, Homo sapiens
atccatgggactggagaagaaggagcctccaaattgggggaggccagcgtttctctctggaatacaatggaatcttttatgatgccagtgtcaggcactgkcctgagttcccttatgctccaagacaacaaggctctgtcacccatggccctggatgtcggggatacaatttggttcatgatttattcaaactgatgtttc

SEQ ID NO: 114500 - DNA, 201 bp, Homo sapiens; identical to SEQ ID NO: 19184

SEQ ID NO: 114501 - DNA, 201 bp, Homo sapiens; identical to SEQ ID NO: 19185

SEQ ID NO: 114502 - DNA, 201 bp, Homo sapiens; identical to SEQ ID NO: 19189

SEQ ID NO: 114503 - DNA, 201 bp, Homo sapiens
agagtgggaataaaacgctcgtggaaaagggtacacgtgagtgtctcattacacgaaaaacctcaggaagtaggatggacgtctttctggctgacctgaarcagaaagtgtaaaccaggcaagccataggtgggagctggagttctttttctaagagggctcttttccttctctctccttttctcaattaggcttttctgg

SEQ ID NO: 114504 - DNA, 201 bp, Homo sapiens; identical to SEQ ID NO: 19190

SEQ ID NO: 114505 - DNA, 201 bp, Homo sapiens; identical to SEQ ID NO: 19198

SEQ ID NO: 114506 - DNA, 201 bp, Homo sapiens; identical to SEQ ID NO: 19199

SEQ ID NO: 114507 - DNA, 201 bp, Homo sapiens; identical to SEQ ID NO: 19200

SEQ ID NO: 114508 - DNA, 201 bp, Homo sapiens
tggtcagatagagggtaaatatttcaggagggaagagggaagaaactttctgatatgacagccatcaaatgcatgagtacttgtgaaagaaaatgggataygccaatcaaaggagaggtcatatttctgtttcctgggcttcaggttcttcatagaattgtgagactatgtgagaaagaagattttaaagggagctgtaaa

SEQ ID NO: 114509 - DNA, 201 bp, Homo sapiens
gtttcttcatgtccctgtcccatgacttcacctctcacttcttgatgaatcagaaatgctcacattttggcccttgtccagactccttaaaaaccctatcyccaaacccaaaaccaaattgtaggttacctcccatctactcatttggctgccctatgaaaattaaactctctctttttcaatccctgttttcttaatata

SEQ ID NO: 114510 - DNA, 201 bp, Homo sapiens; identical to SEQ ID NO: 19201

SEQ ID NO: 114511 - DNA, 201 bp, Homo sapiens
gcacttggccaaaaacactttttttaaagttggtatataactttacctctggctattcagcaagttactcattatgtaatactcctgtgtgcatgtgtaartaaactttgaattttctcctgttaatctttttctaattcacaagctcctttaccaccatctttaaaacctaaaatgatagaggaaaagtttttctccaaa

SEQ ID NO: 114512 - DNA, 201 bp, Homo sapiens
ctttattgccctgtgttcacagcaataaaaccacttcctgctgcattctaatgagtgtgtgtttgagatccgctttcaaagcattgttgaccggtactcaraggaacactgttttgactttaagtccctagaaaacttttgaggcctccctggggccccacttccttgcccacaagaaaggacagcgtttgggactttgga

SEQ ID NO: 114513 - DNA, 201 bp, Homo sapiens
catagctttcatcaaattctcaaagaaatccaaatctcagcaaagtgtgagaactgagtccggtttccccagctcctccaggcctctgactctccgccccmtccccactgacccctgcccacagcctctgctgagaacttccagggctgtgggaaacacaccatggctgaccaagaattctcaccctgcctcttgtcctca

SEQ ID NO: 114514 - DNA, 201 bp, Homo sapiens
ccaaggagctgctgaccctcagccaggtgaggacagagggggcagttttgggggcaggcttgcccttcgaacggagagatgaacaaatcctacccctctgytatttatttgaatttggaacatagaaaagaggaggattgaggtacttggtaacagctgtaaaaaaataagtagggatatagaacccttgtaggtaattta

SEQ ID NO: 114515 - DNA, 201 bp, Homo sapiens
cctgcctgtactgacaatgaaggagcttccaaagctgctcctcactcttggtgtttgtcttcattcagcacctcaaggttgggcttctagactccagaggrgcaaaataccaatgcagccaagctcacaggactgatctctttgtgaccaggaatcttgattccattccacagccacagactgacaaactcccatctccag

SEQ ID NO: 114516 - DNA, 201 bp, Homo sapiens
cccttcccaggcaagtttgctgataactttttctgagggttttctcctctccttctccaaggtgcctccagaactcagagtggctgctcttagatcaacayatgctcaaggtgcattacccgaaattcggagtgtcagaagactgcctctacctgaacatctatgcgcctgcccacgccgatacaggctccaagctccccg

SEQ ID NO: 114517 - DNA, 201 bp, Homo sapiens
catcgtggagggaaggagttgggccttaaagaatgaaaaggattggtatagaggcagggaaaaagacaggtaggacattccaggctgtgagtgggcctggkgcttgggcagggctgacaagctgagaatctgatctggagtcctgcctgtactgacaatgaaggagcttccaaagctgctcctcactcttggtgtttgtct

SEQ ID NO: 114518 - DNA, 201 bp, Homo sapiens
gagtgagttctacaaatatggaggttcagtgacaaggaaagcagatgttcagcaatgggccaggcatggaaggtggggaacatcgagcttataggagattrgatgaggaaggggtttctgggggctgcaatgccctgaaaggacatcgtggagggaaggagttgggccttaaagaatgaaaaggattggtatagaggcagg

SEQ ID NO: 114519 - DNA, 201 bp, Homo sapiens
agttcacatgaagccccttgcttaccccaccacgatgcaagcgcctggaggacttcggggttggcatttaattacctctgtggtttataggcggacacaamctttctctggaaaatgccctcccttccatttttagaagccaggatgaaaaagtgccatgacagttgcttgatgagggcttctctttgtactgaaacctac

SEQ ID NO: 114520 - DNA, 201 bp, Homo sapiens
atgtaaggccgggcatggtggctcacacctgtaatcccagcactttgggagtctgaggcgggaggattgcttgagtccaggagttccagaccagtttgggmaacatagtaagaccccctctctacaaaataataataataataacaaacaaaattagccaagcatggtggcacacacctgtagtcccagctactcaggagg

SEQ ID NO: 114521 - DNA, 201 bp, Homo sapiens
atccaggcatgtccaaggcactgtgtctcagggagacacctacagtctcctacaacccctacagtcctgaccacttcatctaccaccatttttccctttgyatttggccagtggttctcaaacttaaacatgcatcaggatcacctggaggaccagctacaagaaggttcctgggctatacaccccaaccccagagtttct

SEQ ID NO: 114522 - DNA, 201 bp, Homo sapiens
aatgaggaagggggaagtgagctgtctctgagctgtcccacccctgggtctatacatccaagacttgataggtggggacacagagccagccccctgctccrcgctgcatgcatgcctgaccttccctgaccttttgtcagatgctggtgcacctgtctacttctatgagtttcggcaccggcctcagtgctttgaagacac

SEQ ID NO: 114523 - DNA, 201 bp, Homo sapiens
aaaaaaacaaaacacttaaaataatgtattcaagcaggtgtgagaaacaattttatacattaatagagaagtctatcaacatttaaaatgcatgtaaggcygggcatggtggctcacacctgtaatcccagcactttgggagtctgaggcgggaggattgcttgagtccaggagttccagaccagtttgggaaacatagta

SEQ ID NO: 114524 - DNA, 201 bp, Homo sapiens
atcctccacatccctacagaggaggaaactgaggctccaagagaccaactagcttaggtaagataatagctaagggctggaggcagcactggtaccaggarcagggctggtttcatggatgttctgcccgtgtagtcacagaggaccttgttgctcagaagggtcctacatttggtttagtgctccgctgttaccatcttg

SEQ ID NO: 114525 - DNA, 201 bp, Homo sapiens
atttttcatcaatcaaggttgaaaaaaacaaaacacttaaaataatgtattcaagcaggtgtgagaaacaattttatacattaatagagaagtctatcaayatttaaaatgcatgtaaggccgggcatggtggctcacacctgtaatcccagcactttgggagtctgaggcgggaggattgcttgagtccaggagttccag

SEQ ID NO: 114526 - DNA, 201 bp, Homo sapiens
acaaagccatcatggagagtggggtggccatcatcccttacctggaggcccatgattatgagaagagtgaggacgtacgtatactgttaacaccttgccascttcctctcctcagttagcagagaatgtggtcaggcaccttctcaccatgtgtttggctttccttagtgaccatgcccaaggcacctcatgctggcccaa

SEQ ID NO: 114527 - DNA, 201 bp, Homo sapiens
ggaccttgttgctcagaagggtcctacatttggtttagtgctccgctgttaccatcttgaaattcttaatgattttttgaacaagcagtttatgtttttamtttgcactgagctccacgatgatgcagccagttctgcccagaagtgactcattctgagacatgagagagaagcctgtggtcaggagcatgggatttggat

SEQ ID NO: 114528 - DNA, 201 bp, Homo sapiens
atgcatgcctgaccttccctgaccttttgtcagatgctggtgcacctgtctacttctatgagtttcggcaccggcctcagtgctttgaagacacgaagccrgcttttgtcaaagccgaccacgctgatgaagtccgctttgtgttcggtggtgccttcctgaagggggacattgttatgttcggtaagggactggccactt

SEQ ID NO: 114529 - DNA, 201 bp, Homo sapiens
atatgagcactgctgtagcaggaaattccagcctcaaatgaggaagggggaagtgagctgtctctgagctgtcccacccctgggtctatacatccaagacktgataggtggggacacagagccagccccctgctccgcgctgcatgcatgcctgaccttccctgaccttttgtcagatgctggtgcacctgtctacttcta

SEQ ID NO: 114530 - DNA, 201 bp, Homo sapiens
gacacagaaagtagaattgtgttttccagaagctgagaagtggggccaatggggagtggctgctaaatgggtctgaggtttctgtttggggtgatgaaaakgttctggacctaaatagtggtgatagttgcacaacatcctaaatgtactaaaaaccgctgaattatatactttaaaatggttcaaggggcagatttcact

SEQ ID NO: 114531 - DNA, 201 bp, Homo sapiens
tgatcccatttatacgaaatgttcagattaggcaaagccatagacacagaaagtagaattgtgttttccagaagctgagaagtggggccaatggggagtgkctgctaaatgggtctgaggtttctgtttggggtgatgaaaaggttctggacctaaatagtggtgatagttgcacaacatcctaaatgtactaaaaaccgc

SEQ ID NO: 114532 - DNA, 201 bp, Homo sapiens
ctagcaaatccagtcctagggatatactcaagataattgaaaactgatgttcaaacaaaaattgtatatgaatgttcatagcactcttgttcattataggycaaaatggttaaaacccaaatgttcatcaactgatgaatcgataaacaaaattcagtatatacttacaatggattatcattttgccataaaaagaaatga

SEQ ID NO: 114533 - DNA, 201 bp, Homo sapiens
aggtgaggggaacaactgagcagaaggacatttcaagtagagtgggaagtaggctgtgcgggaaagtgcaagaggaatggaagggcatgtgtttctcctasgcacagtagcatgctaggggctgctttttaaacagtaagtagttctctgatgcagaagtcatagtcttaccccagaaccctaggattttgcacgctgact

SEQ ID NO: 114534 - DNA, 201 bp, Homo sapiens
tgcaatgtggggtggacagagatgacaagacacttcaatacagtacacaggaagcacagggatgtccaaggctctgtggtgcccacaggaggggacaggcrgctctcttggggagaaggatttggaggattaatggagcttgtctggtgatggaaggggtgggtggagaaactgggaagaaccaagaggaccaactgggag

SEQ ID NO: 114535 - DNA, 201 bp, Homo sapiens
acattcatattgttgtacaaccatcaccgctatacatcttcagaacgtttttatcatcccaaactgaaaatcagtacctattaaaaataactccccacccytccttcccccagaccccaataaccaccattctactttctgtctctatgactgactttttagttactttagtgactttagttactcaatgtaagttgaatc

SEQ ID NO: 114536 - DNA, 201 bp, Homo sapiens
gggatccctgcaatttacgaacccgcagcctgcatcgccctgggataacttgcgagaagccacctcctaccctaatttgtaagaccaggttcgggcccacrggtggtttgtgactctgggagtggcaggaattcaggtcatgcagcccagtgtgaaagaagagggattggcatggatgggggaggagggagagagagggct

SEQ ID NO: 114537 - DNA, 201 bp, Homo sapiens
ggatggattcagggcaagcaagtcactgtgctgggaagccctgtgcctgtgaacgtgttcctcggagtcccctttgctgctcccccgctgggatccctgcratttacgaacccgcagcctgcatcgccctgggataacttgcgagaagccacctcctaccctaatttgtaagaccaggttcgggcccacgggtggtttgtg

SEQ ID NO: 114538 - DNA, 201 bp, Homo sapiens
tggcaggaattcaggtcatgcagcccagtgtgaaagaagagggattggcatggatgggggaggagggagagagagggcttgagactcgggcgagtggtttrgtaatcccctgactcctaaactggctgatggccaggtcactggaggcatctttaaaaatatacagattctccaagctcccttctgaactttctgaatcag

SEQ ID NO: 114539 - DNA, 201 bp, Homo sapiens
cagcctcccgaataactgggactacaggcgcctgccaccgtgtccagctaatttttttgtattttttttttttttttttttagcagagacagagtttcacyatattagtcaggatggtctcgatctcctgacatcatgatctgcccgcctcggcctcccaaagtgctgggattacaggcatgagccaccgtgcctggcctg

SEQ ID NO: 114540 - DNA, 201 bp, Homo sapiens
gtcaagccattctcctgcctcagcctcccgaataactgggactacaggcgcctgccaccgtgtccagctaatttttttgtattttttttttttttttttttagcagagacagagtttcactatattagtcaggatggtctcgatctcctgacatcatgatctgcccgcctcggcctcccaaagtgctgggattacaggcat

SEQ ID NO: 114541 - DNA, 201 bp, Homo sapiens
ctgcaagctccgcctcccggggtcaagccattctcctgcctcagcctcccgaataactgggactacaggcgcctgccaccgtgtccagctaatttttttgkattttttttttttttttttttagcagagacagagtttcactatattagtcaggatggtctcgatctcctgacatcatgatctgcccgcctcggcctccca

SEQ ID NO: 114542 - DNA, 201 bp, Homo sapiens
gtgctcgaggctgagatagtaaccactaaggtataatgcttctcaggataaacagagatggagaaatggggaccagggtgggagccacagtagaatggaggtaaaattggcagggcttgactcttgagcaggggcctgggagagagaaggtggagtgagagccagctcagtggtcatagacagtggaggggacccagggga

SEQ ID NO: 114543 - DNA, 201 bp, Homo sapiens
acttttctcttcacatctcatataatcctccacatccctacagaggaggaaactgaggctccaagagaccaactagcttaggtaagataatagctaagggstggaggcagcactggtaccaggaacagggctggtttcatggatgttctgcccgtgtagtcacagaggaccttgttgctcagaagggtcctacatttggtt

SEQ ID NO: 114544 - DNA, 201 bp, Homo sapiens
catttccaggtgtgcctggatggaaacatgccatggggacctgcgtcattcacctgcctttcagagtttggggatgttgatcagttgtttctgtttcttcyccttcttcaggaccatgtataaaattctcatctccctataattttctgggcgccatccccaaggattttttctttctagaaatgtcttccccaacatctt

SEQ ID NO: 114545 - DNA, 201 bp, Homo sapiens
gtaagcagtcggtggtgtctacctgagcctcaccccagggcttctcgaacgctcacctgagaatcatcactctatcacagtggcttccctcctccaatcasgcctaacatgtactgggctttcactgaaccagccatggggctgtgcacttgccatgcattatttcaactcaccctcaaaataatccttcaaggaaggttc

SEQ ID NO: 114546 - DNA, 201 bp, Homo sapiens
ggcataaacacctgtcaggagaagacgtgcagcaatattgcacactattctattaagaattgattgcgtacacagtatggtagaagcattcacatttacakccttgcttaatcttacggtgtatcatgctctgtgctggtgctctgaggtacagaggtgactaaaacagagtcttaggcttttagctgctcacagttgagc

SEQ ID NO: 114547 - DNA, 201 bp, Homo sapiens
ttatgatgcaaatgacaccttctctaaagtgttacccttctgcagtgcactacctgtgcaactgtcctcagcaaagatagagtaatctgcaggaactgagwggtggctgccccctttgcagaggcctaagttctcaacgtgccacagtccacaccatacccctttgtgctgtgcctggtctattttactcactgatattac

SEQ ID NO: 114548 - DNA, 201 bp, Homo sapiens
tttgtaacccacccagcagccgaaccagaccttgactgatttgtggctatcagtcatttttgttcccacacatttattcattttatttatcccactattcmgatgtttctctgtggatgcattaatgtgggtgttggggtgtttcccccaccctgagcctgtgtcataacacgcagcataggtgctgcattatctacctac

SEQ ID NO: 114549 - DNA, 201 bp, Homo sapiens
tgcccctacgatccaatcacctcccatcaggccccacctccaacattagagattacaattcaacatgagatttggtgggggacacaggtcgaaactatatmaatagtcccacaaacccaatccacaatccccgacctggaagagctccaaaaacccagaggctttttgtaacccacccagcagccgaaccagaccttgact

SEQ ID NO: 114550 - DNA, 201 bp, Homo sapiens
tttaggctctgcctttttaatttaatttaatctaatttaatttttgagtcggagtctctctctgttgctgaggctggagtgcagtggtggatcttggctcrctgcaacctccacctcctgggtccaagtgattctcctgtctcagcctatcgagtagctgggattacaggcacccaccaccatgcccagctaatttttttt

SEQ ID NO: 114551 - DNA, 201 bp, Homo sapiens
aacatctcctggctagtaaggagacaggggtgtataatttttatgcatttaggctctgcctttttaatttaatttaatctaatttaatttttgagtcggartctctctctgttgctgaggctggagtgcagtggtggatcttggctcactgcaacctccacctcctgggtccaagtgattctcctgtctcagcctatcgag

SEQ ID NO: 114552 - DNA, 201 bp, Homo sapiens
tctaacatctcctggctagtaaggagacaggggtgtataatttttatgcatttaggctctgcctttttaatttaatttaatctaatttaatttttgagtcrgagtctctctctgttgctgaggctggagtgcagtggtggatcttggctcactgcaacctccacctcctgggtccaagtgattctcctgtctcagcctatc

SEQ ID NO: 114553 - DNA, 201 bp, Homo sapiens
gggtgtgtgttagaaagaagaaggcaggtgctagtgatgacaatcaccactgtaactactgtaaccagttccccagtgccttccagtgccaagcacaggcygtccaagcaacaacttgaaaacaggcatgattttccctattttaaagaaactgaggctcagagcagctaaagtggctttctaacatctcctggctagtaa

SEQ ID NO: 114554 - DNA, 201 bp, Homo sapiens
ttaatttgacctccagggcaatgttttgaagtgggactagggatttttgtcctcatgttgcagacgaggccactgaatcgcagttcatggcttaagtaagkcctttcagtgatttctgggtgtgtgttagaaagaagaaggcaggtgctagtgatgacaatcaccactgtaactactgtaaccagttccccagtgccttcc

SEQ ID NO: 114555 - DNA, 201 bp, Homo sapiens
gggtgcccagctgcagatagggagccccactgggaggcactgtcttgatgcaggccatggggtcattcaaccacaaaagcaatagctaacatgtatataaygtgaatatgacatgcttattttctgcctggcactgtcaatcttcacaaccatgtggagtgggcactatcattatccccattttagacatgagaagcattg

SEQ ID NO: 114556 - DNA, 201 bp, Homo sapiens
tgatcataggtagatgaagctacagcaggagatggatgcgggaaggcaaggacaggcctgatagggaaaggccttgaatgccaggccatacatggagtttkggctttatccaacacagattgaggaccaggagtacctttcacagagtagtgtaccaggaacctcactctggagcagagtggaggctgagccaggggtgcc

SEQ ID NO: 114557 - DNA, 201 bp, Homo sapiens
tggggccatgtagccccactgtgtgccctggaagaacaggacactgtttgtgtaagcagtcggtggtgtctacctgagcctcaccccagggcttctcgaaygctcacctgagaatcatcactctatcacagtggcttccctcctccaatcacgcctaacatgtactgggctttcactgaaccagccatggggctgtgcact

SEQ ID NO: 114558 - DNA, 201 bp, Homo sapiens
actggccctaattacttaggtaatttttgcagctgtagcagataaatcccaaaatgttggtggcttgaaacaataaaaatctctttctcacttgggtaaartttaattgagcatccctgatcggcagacattcttcctcatggtcaaccagggatctggctcatcacatcttgagctctgatgtggattctttagggcctc

SEQ ID NO: 114559 - DNA, 201 bp, Homo sapiens
ttaatcccatcccgggaaacatgcaattgtgcaggggcagcagcatgggggtgtgggatcccaaaactgcagctttctagctcttgggcaagagggtttarcctctctgtgcctgaattaaagagttgatgtatccgttggtttcctgacagcaggctcacaggtttagtggaagggagctggcatgagctgctgctgtgg

SEQ ID NO: 114560 - DNA, 201 bp, Homo sapiens
ttctctcattaatcccatcccgggaaacatgcaattgtgcaggggcagcagcatgggggtgtgggatcccaaaactgcagctttctagctcttgggcaagrgggtttaacctctctgtgcctgaattaaagagttgatgtatccgttggtttcctgacagcaggctcacaggtttagtggaagggagctggcatgagctgc

SEQ ID NO: 114561 - DNA, 201 bp, Homo sapiens
gggagtagaatgtgccccagggtgacgtgcactgcatgcatgctttcggtctagacatttctttggttctatggcatttccacttgtttcatttgttctcycattaatcccatcccgggaaacatgcaattgtgcaggggcagcagcatgggggtgtgggatcccaaaactgcagctttctagctcttgggcaagagggtt

SEQ ID NO: 114562 - DNA, 201 bp, Homo sapiens
atcacttgaacctgggagtcggaggttgcagtgaggtgagatcacgccagtgcactccagcctggccacagagcgagactccatctcaaaaaaaaaaaaaagaaataaaaagaaataaaaaaatattaagcaacttgtccgaggttacctaggtagaaagtgaaggagctagaaatcacatgcctgaacatttgacatcaa

SEQ ID NO: 114563 - DNA, 201 bp, Homo sapiens
atatatttatatatgattgcatataaatgtttttgtatattacatgctcatagaacaacaaatggcagtttgataagtgacaagtcctatatatgagatcwattttaataaaaagagcaatatgtagaatacgtgtccagtctcctgccagatgtgtagaaaggtgtccgcttataccctggtacctgcagagcctgtctt

SEQ ID NO: 114564 - DNA, 201 bp, Homo sapiens
actccctaaactggaaaaagtcaacaacatatgtatcaaaaggttaaattccttgatgtctgaagagctcctaaaattaataagaaaagaataacctaatkgaaaactgggtaacagatagaaacagatagttcacggaaaagaaaacacaagtggcttctaaacatacgaacatccactcaacctccctcataacaagaa

SEQ ID NO: 114565 - DNA, 201 bp, Homo sapiens
ctgaggccctgctgaggtgcctgaggacaaaaccctccaaggagctgctgaccctcagccaggtgaggacagagggggcagttttgggggcaggcttgccmttcgaacggagagatgaacaaatcctacccctctgttatttatttgaatttggaacatagaaaagaggaggattgaggtacttggtaacagctgtaaaaa

SEQ ID NO: 114566 - DNA, 201 bp, Homo sapiens
tgggtcttctgtgttctctctccagatactgtctcccatggccaaaggcttattccacaaagccatcatggagagtggggtggccatcatcccttacctgraggcccatgattatgagaagagtgaggacgtacgtatactgttaacaccttgccaccttcctctcctcagttagcagagaatgtggtcaggcaccttctc

SEQ ID NO: 114567 - DNA, 201 bp, Homo sapiens
gcataaaccacctgcaaaattcactgtcctcaaattgcagtttcagtttctttacagtgggcgcaaacttaaagatgcctgcaaagcagtctgactttagsgcatttgggatttgtatacttttcctgcaaatattttactcctttcttgtccacacacaatttgacagcaatataaatagagagatgtttatctatatat

SEQ ID NO: 114568 - DNA, 201 bp, Homo sapiens
ttgagatttgggtggggacacagccaaaccatataacaggccactgtttttcttggtagatattattattattcccatttagcagatgagaaaataaggcrcagacaagtttagccccctcacccaagtacatggcagagcttccagggactgatatattgagctgggcccatagtgtttgtttttactttttaagtgcat

SEQ ID NO: 114569 - DNA, 201 bp, Homo sapiens
catttgattgttgccttcatgttgaacaaaccctttaatacacattgtctttttcaagcctcacaacacattatgagttaggggctcagtctcatttcacrtacaggacagctgtcactgggaaagtttaaataaatcacctaaggtcacatagtgagtaataatttgaggaaaaatcccttatatttgtagaggagaaac

SEQ ID NO: 114570 - DNA, 201 bp, Homo sapiens
tgggtaaaagacttgaactttgagagaaagtcccaacaaagtagatcttggctgaatatagaggacttcttttgagaagcagaactactgccttctcagaygtgagctcttcatcactagggatatgagcactgctgtagcaggaaattccagcctcaaatgaggaagggggaagtgagctgtctctgagctgtcccaccc

SEQ ID NO: 114571 - DNA, 201 bp, Homo sapiens
gcctcccaaagtgctgggattacaggcatgagccaccgtgcctggcctgttaattgttattgtgactactattaatttagtttcatggaaaattctgtgcycaggaaacttcttgctttctagtacagatcacctctcaggaatggattcatggattccagacaagcctgggcaacacaggattcatggattgggattcat

SEQ ID NO: 114572 - DNA, 201 bp, Homo sapiens
atagcccagtgaggctggtggccacggaaatccatattgtctactgagcggctgccttctctgcctctgttctatcatggaaagtgcatttccaggtgtgyctggatggaaacatgccatggggacctgcgtcattcacctgcctttcagagtttggggatgttgatcagttgtttctgtttcttccccttcttcaggacc

SEQ ID NO: 114573 - DNA, 201 bp, Homo sapiens
gctaatttttttgtattttttttttttttttttttagcagagacagagtttcactatattagtcaggatggtctcgatctcctgacatcatgatctgcccrcctcggcctcccaaagtgctgggattacaggcatgagccaccgtgcctggcctgttaattgttattgtgactactattaatttagtttcatggaaaattc

SEQ ID NO: 114574 - DNA, 201 bp, Homo sapiens
gatcacagctcgatatcacagaggtgagtatctgagcatcccgctccaggaccatagcccagtgaggctggtggccacggaaatccatattgtctactgascggctgccttctctgcctctgttctatcatggaaagtgcatttccaggtgtgcctggatggaaacatgccatggggacctgcgtcattcacctgcctttc

SEQ ID NO: 114575 - DNA, 201 bp, Homo sapiens
gaaaaaagttgtggccgttcctcaaaaaggtaaacgtagagtttccatataacctagcaaatccagtcctagggatatactcaagataattgaaaactgaygttcaaacaaaaattgtatatgaatgttcatagcactcttgttcattataggccaaaatggttaaaacccaaatgttcatcaactgatgaatcgataaac

SEQ ID NO: 114576 - DNA, 201 bp, Homo sapiens
tcaagccattctcctgcctcagcctcccgaataactgggactacaggcgcctgccaccgtgtccagctaatttttttgtattttttttttttttttttttagcagagacagagtttcactatattagtcaggatggtctcgatctcctgacatcatgatctgcccgcctcggcctcccaaagtgctgggattacaggcatg

SEQ ID NO: 114577 - DNA, 201 bp, Homo sapiens
tctcctgcctcagcctcccgaataactgggactacaggcgcctgccaccgtgtccagctaatttttttgtattttttttttttttttttttagcagagacrgagtttcactatattagtcaggatggtctcgatctcctgacatcatgatctgcccgcctcggcctcccaaagtgctgggattacaggcatgagccaccgt

SEQ ID NO: 114578 - DNA, 201 bp, Homo sapiens
ctttagttactcaatgtaagttgaatcattcaatatttgtccttttgtctggcttatttcacgtagcataaggtctcaggattcctatatgctgtactatrcatcagaatttcctccttttttaaggctgactaatgttccattgtatgtatatatcacattttgtgtatccatttattcattaatggacatttgcgttgt

SEQ ID NO: 114579 - DNA, 201 bp, Homo sapiens
ttgctttggcttcccaaagtgctgggattacaggcgtgagccactatgcctggcctgacagcaatatttttttagccatcctttatcaagaattttttttycagacataatttgattttctttgtacacatacagttcatttgttctcatgatatttcattgattgtgtaattacaataacaagtgaaattgacaaaacag

SEQ ID NO: 114580 - DNA, 201 bp, Homo sapiens
ctcaccaaaatcacaattccataaatgtcattacttggaattcttctaggtaaaattttaaaaggagtttattggaattaaattttaagaaaaaaaaaaaagaagccagcaatcatgcaggtgctgcacagatatgccagcagtggtgctggagggtgtggagtgacagaagtgtaggaacccctgggaagatgagtttgt

SEQ ID NO: 114581 - DNA, 201 bp, Homo sapiens
tgacatatttggtgcctaaaataaaccaatcagatgaggttatcaatagaaaaaaattacagggaagattacacacaggagttatcactaaaatatttagytagaaacattacacaatgcaggctcttaacttattcacactggcctcttgacaaagaggacagaacgttccatatagagtgtatttgtgcactgtgggtt

SEQ ID NO: 114582 - DNA, 201 bp, Homo sapiens
tcccggttgctctgagcctcagtatctgcatgtataaaatgggtacagtgacttggtaggcttgtaagtttacagtgggaggaggggtgtgaaaaggattmatcaaatacaaggcacccggggcttcccgagcctcacccagagcagcagcattttgtgattatctccttcagaaggagccacggaggaggagaagttact

SEQ ID NO: 114583 - DNA, 201 bp, Homo sapiens
cattcggaagccacagttccttggacaggtcccggttgctctgagcctcagtatctgcatgtataaaatgggtacagtgacttggtaggcttgtaagtttmcagtgggaggaggggtgtgaaaaggattaatcaaatacaaggcacccggggcttcccgagcctcacccagagcagcagcattttgtgattatctccttca

SEQ ID NO: 114584 - DNA, 201 bp, Homo sapiens
gatgtgtgttcagcttccaccattcggaagccacagttccttggacaggtcccggttgctctgagcctcagtatctgcatgtataaaatgggtacagtgayttggtaggcttgtaagtttacagtgggaggaggggtgtgaaaaggattaatcaaatacaaggcacccggggcttcccgagcctcacccagagcagcagca

SEQ ID NO: 114585 - DNA, 201 bp, Homo sapiens
gcaagcgagctggggccatgtagccccactgtgtgccctggaagaacaggacactgtttgtgtaagcagtcggtggtgtctacctgagcctcaccccaggkcttctcgaacgctcacctgagaatcatcactctatcacagtggcttccctcctccaatcacgcctaacatgtactgggctttcactgaaccagccatggg

SEQ ID NO: 114586 - DNA, 201 bp, Homo sapiens
ataaaaaaaaatgtgtgtagtcttagccaggtgtggtggctcatgcctataatgccatcactttgggaggctgaggcaggaagaattgcttgagcccaggmgttggaagctgcggtgagctatgatcatgccactgcactccagcctgggtgacagagtgagaccccatctttataaaaataaataacatagattaaaatg

SEQ ID NO: 114587 - DNA, 201 bp, Homo sapiens
cacccagataataagtggccaggctgtgaatcctgtgctcgaggctgagatagtaaccactaaggtataatgcttctcaggataaacagagatggagaaayggggaccagggtgggagccacagtagaatggaggtaaaattggcagggcttgactcttgagcaggggcctgggagagagaaggtggagtgagagccagct

SEQ ID NO: 114588 - DNA, 201 bp, Homo sapiens
aggaggctgaggtgggaggatcacttgagcccgagttcgaggctgcagtgagctgtgatcatggccctaaactccagtctgggcaacagagtgagactccygtctcaaaaattgtttttatttttacaaaataaaaaaaaatgtgtgtagtcttagccaggtgtggtggctcatgcctataatgccatcactttgggaggc

SEQ ID NO: 114589 - DNA, 201 bp, Homo sapiens
atggtggcacacacctgtagtcccagctactcaggaggctgaggtgggaggatcacttgagcccgagttcgaggctgcagtgagctgtgatcatggccctraactccagtctgggcaacagagtgagactcccgtctcaaaaattgtttttatttttacaaaataaaaaaaaatgtgtgtagtcttagccaggtgtggtgg

SEQ ID NO: 114590 - DNA, 201 bp, Homo sapiens
aataataataacaaacaaaattagccaagcatggtggcacacacctgtagtcccagctactcaggaggctgaggtgggaggatcacttgagcccgagttcraggctgcagtgagctgtgatcatggccctaaactccagtctgggcaacagagtgagactcccgtctcaaaaattgtttttatttttacaaaataaaaaaa

SEQ ID NO: 114591 - DNA, 201 bp, Homo sapiens
aaataataataataataacaaacaaaattagccaagcatggtggcacacacctgtagtcccagctactcaggaggctgaggtgggaggatcacttgagccygagttcgaggctgcagtgagctgtgatcatggccctaaactccagtctgggcaacagagtgagactcccgtctcaaaaattgtttttatttttacaaaat

SEQ ID NO: 114592 - DNA, 201 bp, Homo sapiens
ccattggcagaactcagtcacatggccacatccagctgcaagcgagctggggccatgtagccccactgtgtgccctggaagaacaggacactgtttgtgtragcagtcggtggtgtctacctgagcctcaccccagggcttctcgaacgctcacctgagaatcatcactctatcacagtggcttccctcctccaatcacgc

SEQ ID NO: 114593 - DNA, 201 bp, Homo sapiens
cctcagtggctttcttctctttacctgccccgaaggctgtaatctctaatatgaccttaagaaagagaatggaagggatttgttattaaatatataaataragataatgccatttgaatgttttatgttccctgatcccaatttttctaatcaataaaaattttactcttccctcttttttttgggacagagtcttgctct

SEQ ID NO: 114594 - DNA, 201 bp, Homo sapiens
tacattcatattgttgtacaaccatcaccgctatacatcttcagaacgtttttatcatcccaaactgaaaatcagtacctattaaaaataactccccaccmttccttcccccagaccccaataaccaccattctactttctgtctctatgactgactttttagttactttagtgactttagttactcaatgtaagttgaat

SEQ ID NO: 114595 - DNA, 201 bp, Homo sapiens
ctgggtgcaggagtctccctgccagtctatcctgggtggttccaggtagagaggcctggaaatgttcctttgcgcatctggggacagaatagggagccgcrggggcaaagcccttgttattcgactatgtcctgccctctacagtttggggaattgttgggccagcttgggtcgttatgtgtgtctatattatggtggtgg

SEQ ID NO: 114596 - DNA, 201 bp, Homo sapiens
aaaaaatatccaggcatgtccaaggcactgtgtctcagggagacacctacagtctcctacaacccctacagtcctgaccacttcatctaccaccatttttycctttgcatttggccagtggttctcaaacttaaacatgcatcaggatcacctggaggaccagctacaagaaggttcctgggctatacaccccaaccccag

SEQ ID NO: 114597 - DNA, 201 bp, Homo sapiens
ggcaagggcccggcttgagcaaagcctgggtgcaggagtctccctgccagtctatcctgggtggttccaggtagagaggcctggaaatgttcctttgcgcrtctggggacagaatagggagccgcaggggcaaagcccttgttattcgactatgtcctgccctctacagtttggggaattgttgggccagcttgggtcgtt

SEQ ID NO: 114598 - DNA, 201 bp, Homo sapiens
  misc_feature (1)...(201): n = A,T,C or G
cctacgctactctactgggaatgaatacccagggcattatgttaagaaagattcagaggctgtttccagctcagtgggaaataatgctgtgactgattcangttgtctggcatgggattataaggggcatctatcccacgatatttgtcatctgtctcttgtcttaattatctactagatagtgatgccctagagaccagg

SEQ ID NO: 114599 - DNA, 201 bp, Homo sapiens
ctgtgagtgggcctggggcttgggcagggctgacaagctgagaatctgatctggagtcctgcctgtactgacaatgaaggagcttccaaagctgctcctcvctcttggtgtttgtcttcattcagcacctcaaggttgggcttctagactccagaggggcaaaataccaatgcagccaagctcacaggactgatctctttg

SEQ ID NO: 114600 - DNA, 201 bp, Homo sapiens
gaggcaagggcccggcttgagcaaagcctgggtgcaggagtctccctgccagtctatcctgggtggttccaggtagagaggcctggaaatgttcctttgckcatctggggacagaatagggagccgcaggggcaaagcccttgttattcgactatgtcctgccctctacagtttggggaattgttgggccagcttgggtcg

SEQ ID NO: 114601 - DNA, 201 bp, Homo sapiens
tctgtgctggtgctctgaggtacagaggtgactaaaacagagtcttaggcttttagctgctcacagttgagctggggatgatgataatgcacacgcacaasctcaggacaagttctggaaaagaatgcaaagtaggtgggtgtttccgaagaagaggtatggtagaactggagaaatctcagaaggcttctgggaggaggt

SEQ ID NO: 114602 - DNA, 201 bp, Homo sapiens
aaagtgccatgacagttgcttgatgagggcttctctttgtactgaaacctacaggtttggccacttcagggcactcaagcaatctaaatatttttttttttaatatactagaaccattttcttccttttctttgaccactggtcttaccctccctccccttcccagaaatcccatgaggccacaacctgaggctttaagag

SEQ ID NO: 114603 - DNA, 201 bp, Homo sapiens
tccaagacttgataggtggggacacagagccagccccctgctccgcgctgcatgcatgcctgaccttccctgaccttttgtcagatgctggtgcacctgtytacttctatgagtttcggcaccggcctcagtgctttgaagacacgaagccggcttttgtcaaagccgaccacgctgatgaagtccgctttgtgttcggtg

SEQ ID NO: 114604 - DNA, 201 bp, Homo sapiens
gtctatttttggcagatgctggaatgaagactagcattcttgcttcctggtgtcctggtcaaccctgcacagggctgacctcagtgggggtcatcaccacmgagccctcactgggaatagaccatcccacccctgcaaagtcttttcacacactgtagggtactctagagacaagtaccctacagtgtgtggggtacttag

SEQ ID NO: 114605 - DNA, 201 bp, Homo sapiens
tttgacgaactctggactagtaacagcaacaaaaacacaaagcgctctacgggtgtgagttaaaagaaagatgaccaggttaacctgccaggaaactaaarcagtgggctccccaggtctttactaaccttagtaaaggaattagagaaattctaattagagaaaaatcttacttaaagaaaaaccttacaagaggaatta

SEQ ID NO: 114606 - DNA, 201 bp, Homo sapiens
cctggggctcacaggggctgcctgcctggtgcgcgcccctgtgttgactctgagctccactcccacaggacttggccaatgccttccagcaggaagcccakacctcagggaaggaacgccttcttctgagtgcagcggttccagctgggcagacctatgtggatgctggatacgaggtggacaaaatcgcccagtgagtct

SEQ ID NO: 114607 - DNA, 201 bp, Homo sapiens
aggagtcatgagacttgggtcgcagcacctctgctctgccctcttagcagccatgctgatggggacgggccccaagctcgtgagcctcaacttgcttcccrggaaaagaaggcttagaagatgatggtcctgcccactcagtgttctgaggatcccatgtctggcctctgaaaatgctttcccaactgccagactccatcc

SEQ ID NO: 114608 - DNA, 201 bp, Homo sapiens
ctcctgggtgacctctggttagagacagtgaccactccggggccacgtgtatgcccaaggtcagccctccatgctctcgggttctagttgaggcctgcctragcggtctcttcccaaaactctcctatagacactttgcacccctcctcttcctcgtcccatccctgtccatgtgggcattggagggggtacagacagacc

SEQ ID NO: 114609 - DNA, 201 bp, Homo sapiens
tagtaataatagtaggactttgtgtggactaagggttaatatatgtgaagcacctagaacagaacttcttccttgcagtgttcctccgagtgttttacatrtattaactttagcccacactggggtcctgtgacacacattgtggaaggtccaatggtctccccgtttcacacaggaggaagctgagtcgcacagcgagta

SEQ ID NO: 114610 - DNA, 201 bp, Homo sapiens
gggagccctgccgtagacaaggagcgcttcacaaccctggtacaggtatggctgggcggggcggggatcaccagtctgtgcagggacccagagctggagcmcccacagcacatgtgggggctgctctgcccccagagccagctgcttcacgtatctgcatggcacagatcagccctgtggccagctctcagacttctacaa

SEQ ID NO: 114611 - DNA, 201 bp, Homo sapiens; identical to SEQ ID NO: 19211

SEQ ID NO: 114612 - DNA, 201 bp, Homo sapiens
agccctcccagtgcccctcctagcccagacacagagacgcactgtcctgagtgttttcttgcctgcttctgagtaagagtggcctcctgtctggtccaagrccggcccttactccccttcatcacctcacaggttcacagatatggtagccacggccaacaaccgtcagacctttgtcaactcggccatcaggtttctgcg

SEQ ID NO: 114613 - DNA, 201 bp, Homo sapiens
tccttttcttttcaaacctccattctgagggtgtcaactagttctggtttggggtgggacaattcaagggcttggaggaagcctctggagggaattttggraaaggctcctagggtgtccatgtgcccctggtgatgtcgatgttcgggggtagaaagtgctctggatggtcccctttcctcaacccggaccataactcac

SEQ ID NO: 114614 - DNA, 201 bp, Homo sapiens
ggataggtggtgatgtcttttactgctaaggggaagaacacggtgggacgtgggaaggaacagttaacaaacattaattgaagaccccctgtatgcttggygctgagggacacatagagaggtgtggagagaggccccactctgcctggctatggacagtccagctacagagatgagatgctcacatgaagcaagagaaaa

SEQ ID NO: 114615 - DNA, 201 bp, Homo sapiens
ccttagtaaaggaattagagaaattctaattagagaaaaatcttacttaaagaaaaaccttacaagaggaattagagaaactaattccttttcttttcaamcctccattctgagggtgtcaactagttctggtttggggtgggacaattcaagggcttggaggaagcctctggagggaattttgggaaaggctcctagggt

SEQ ID NO: 114616 - DNA, 201 bp, Homo sapiens
tactacctattgactcagaaaagacaaaatgacaaaaaattgctctacatttagtagcactctggaaagtatttctattttattaaataccatacaaattytacagacatatgaagaggagaaatacacatggtgagacatatagctttcttcagcccattggcaatatctggtgcatgtccaaattacagaccttttgct

SEQ ID NO: 114617 - DNA, 201 bp, Homo sapiens
atgttttctgagctcagaaatggggtaccttgtcccagaaagagtgtttattccacttctgagtacaaaaggtaatctgtgagattgagcctggatgccaragtattggcatttgggggacattttttaaatgatttatggagaaaatggaatggagtatttgaaacttggtgttttctagaaaatccagaatatagggct

SEQ ID NO: 114618 - DNA, 201 bp, Homo sapiens
agtaggaaaacccataaccaccctgggtattgtgagggtcagggggtgcctgagagaacagaggtttccttctcccaccgtttctgagtaaggatgccaaktgcagagaattctggccatgtaaattccatctcatccatgccatcttgaatttatccttaagcccaggtgcctcaagctgagtccagaattctaggtcac

SEQ ID NO: 114619 - DNA, 201 bp, Homo sapiens
agccctggtcagggaatcaggccaggctgaggtgtggtcaggggaaaggggaggggagctgaactctgagggctgaatttccttctgggttcttggcaccycagctggagggcagcacagtgagctttgctccaggctgtttcagatccagtcttgccagaagcataggtctaaacacagcagagggctcagacctctcca

SEQ ID NO: 114620 - DNA, 201 bp, Homo sapiens
  misc_feature (1)...(201): n = A,T,C or G
gggtgccctgggagctggcagagtaaatcctgctgtgtctcctgtctttcccaggaatcccaagctgaagaccctgttagccatcggaggctggaatttcngcactcagaagttagttgactgtggtcacctgtgtggtaaagctcctggatgggaacctggtgcactggccagagggagccctggtcagggaatcaggcc

SEQ ID NO: 114621 - DNA, 201 bp, Homo sapiens
gggggctgctctgcccccagagccagctgcttcacgtatctgcatggcacagatcagccctgtggccagctctcagacttctacaagtgaacatctacctggggctcacaggggctgcctgcctggtgcgcgcccctgtgttgactctgagctccactcccacaggacttggccaatgccttccagcaggaagcccagacc

SEQ ID NO: 114622 - DNA, 201 bp, Homo sapiens
atgactgatgtccaagcagcatgaggactcagcatccaggctcccagcccaaggctgtctccagaatctacagccactcacaggcctgaggctgctggagmaaaaagggccctgtccagaagaggtagccaggctctggggtggccgggtcaggcttccccgggctcctccactgcatcccctccctgcacaggtcagcta

SEQ ID NO: 114623 - DNA, 201 bp, Homo sapiens
agggaaggcttttctcaacaggctgaagatgacttgactttcctctctctgtcctgaaagcccagagtcaatgaggcccctgcactgggtctttgtgtctytcccatgttcttaggtccctcctgttggccttatccaagaagcgcccactgccaagaacctcttctccaacctcatattgtctgtcctgcaagagggcag

SEQ ID NO: 114624 - DNA, 201 bp, Homo sapiens
gtggggtacttagagacaagatgccttctcctagataaaattagctctattagaatctcagcagtgatattgataaacgtagattatctacaagggataayaagcaaatgcaaatggctttaatgcaagactaaagaaacataaacccaggcctgtaactggggcctcctctctgctacttatctgtttgcattttaacga

SEQ ID NO: 114625 - DNA, 201 bp, Homo sapiens
gggtcaaaagatcaacccagttggtgcagtggctcacgcctgtaatcccagcactttgggaggctgaggcgggcagatcacgaggtcaggagttcaagatyagccttaccaacatggtgaaaccttgtctctactaaaaacacaaaaattagctgggcatggtggcaggcacctgtaatcccagctactcaggaagctgag

SEQ ID NO: 114626 - DNA, 201 bp, Homo sapiens
tgcaaatggctttaatgcaagactaaagaaacataaacccaggcctgtaactggggcctcctctctgctacttatctgtttgcattttaacgaagtattckgaggtattccaaaccgtttttgaaagttctgcctgccttccttctgcagatgagcatgccatgtctaattccctctaggcctcatgttggggctgcctgg

SEQ ID NO: 114627 - DNA, 201 bp, Homo sapiens
ctgacagctatcccttttctttactccaacgggccaggctctgctgcaaaactggtctgctacttcaccaactgggcccagtacagacagggggaggctcrcttcctgcccaaggacttggaccccagcctttgcacccacctcatctacgccttcgctggcatgaccaaccaccagctgagcaccactgagtggaatgac

SEQ ID NO: 114628 - DNA, 201 bp, Homo sapiens
aagcaagagaaaaaggtgtgataccaaccatcaagatgcagtcccatgagatctggctggcgtcctcccacctacaaagccctctcacacattatctattygatccacatcattaccaaataagataggtagtattatccccattttacagatgagaaaaccaaggcttggagaggctgtgactagccccagctcagccag

SEQ ID NO: 114629 - DNA, 201 bp, Homo sapiens
ctcctccccagtgctgccttctgctcccacaggtctgctcctggaagggggccaccaaacagagaatccaggatcagaaggtgccctacatcttccgggayaaccagtgggtgggctttgatgatgtggagagcttcaaaaccaaggtgaggcccagctctgctggcagaggggtggtcctagtgaacaagtcctgtcaat

SEQ ID NO: 114630 - DNA, 201 bp, Homo sapiens
tcttggcttaaggaatgaggcttcattattcattaatttatcatacttgtaccgggtaccttctcccgtcacaggcctgggggtgttacaccaagtaatayataatcaggggaaggccttattcaaaggtgggtaaggaagcctttgttctatctgagcatcaggtgtcattctagacactggggatacagagataaataa

SEQ ID NO: 114631 - DNA, 201 bp, Homo sapiens
gttctatctgagcatcaggtgtcattctagacactggggatacagagataaataaagcagacccaattccctgcttttgtactcagggtaaaactaagacracaatcatgataacgatgatgaccacagcgaccctttattgcgttgtgctgaccttttacatgcattataacctttaattctcacaatgccctaagagat

SEQ ID NO: 114632 - DNA, 201 bp, Homo sapiens
gtgttacaccaagtaatatataatcaggggaaggccttattcaaaggtgggtaaggaagcctttgttctatctgagcatcaggtgtcattctagacactgrggatacagagataaataaagcagacccaattccctgcttttgtactcagggtaaaactaagacgacaatcatgataacgatgatgaccacagcgaccctt

SEQ ID NO: 114633 - DNA, 201 bp, Homo sapiens
cttctactcaccacacagtgtgcccggggacaggttctaaccagatgggtgacttttcccaacttgcacaaaagtgctataacagatcaggagaagccccsacttctgccttcagaaagcacccatctgatcaaagataagttgtatagatggacaaaaagaaatatatttaaataaatgtagtgaaagctgttctttacc

SEQ ID NO: 114634 - DNA, 201 bp, Homo sapiens
gttcagtgaggttaaataagctgctgggtaaggcagggatctgtgtctgccttgttcactgatgtgtctgaagcaccatggacagcgcctggcacacagtsggccatcagtacacatttgttcagtgaatggttgtctgcgtccgaagcccacgctctctggttatcatgccatgcagcttcttcactggggtcacgggtc

SEQ ID NO: 114635 - DNA, 201 bp, Homo sapiens
ttaaaatgctttttacttttggagagcccacatctctgtatgtcagctggagtgggacatctttgattttctggctctttcatgaataaagagcacctctytgagccagtgagccaggcacccacatttcacactgagcctggcctctccatccctgtctggaagactgtgtgagttttggaggaagctgtatccctgtgc

SEQ ID NO: 114636 - DNA, 201 bp, Homo sapiens
ctccatgctctcgggttctagttgaggcctgcctgagcggtctcttcccaaaactctcctatagacactttgcacccctcctcttcctcgtcccatccctrtccatgtgggcattggagggggtacagacagaccctgctggggcaaagggaagtcccaggttctagacaccagccacaggcacgctccagtccaaactca

SEQ ID NO: 114637 - DNA, 201 bp, Homo sapiens
tatatttattcttaagagacagaatcttgttctgtcaccaaggagggtatgcagtggcatgatcatagctcactgcagcttcatcctcccaggcttaagckatcctcctgccccagcctcctgagtaactgggatcactatgaccagctaattttttttaagtttgtagagatggagtcttgctatattgcccaggatggt

SEQ ID NO: 114638 - DNA, 201 bp, Homo sapiens
catagtacagaaattcataacaatatttgatatgcgacagcatgacatgatagaaaaagagcttcctggctccttcctacatggcctgggggatgagttakctggtttcatcccctccttcctttcttttcctttggggagttcaccaattctcctgtatcattgcaggctacaccccagccccactagcaagctgcactc

SEQ ID NO: 114639 - DNA, 201 bp, Homo sapiens
gaagagagtggtgcagcagccagcctcaacgtggtacgtgtggcaggagggctgaggcaggactcccctgtccagcaggccctgtttggtggcttcttttsagccccgaggccctcatgggaaaaaagacacagggcactgagaaacaagaagcttttttgtttctttgcttgcttgttttgttctattttcctggtccgt

SEQ ID NO: 114640 - DNA, 201 bp, Homo sapiens
tttattttctccatagtacagaaattcataacaatatttgatatgcgacagcatgacatgatagaaaaagagcttcctggctccttcctacatggcctggkggatgagttatctggtttcatcccctccttcctttcttttcctttggggagttcaccaattctcctgtatcattgcaggctacaccccagccccactagc

SEQ ID NO: 114641 - DNA, 201 bp, Homo sapiens
agtgaagccattgtcttcaagaaaatgggttttctggatccttgcttctcaaagtacagcatgtggactcgcagccctcattaaaaccaggtgctcattaraattatggactctcaggccccaccccaggccttctgaagaaccttcattttagtgagattcccaggtgatctgtgtgcacactgaagtgggagaaaccct

SEQ ID NO: 114642 - DNA, 201 bp, Homo sapiens
gtgtgttttacagtacagtactgcctctcattattggcttaggtgtctctctgcaccagtctcagactccaagttgctgcaggtaaggaacctaagtctcmtctggttcagcatccccagccccttagctctgcgaggacaacacacttgcttctggtctgttgaactgatcagatgtggagcttgagagaggcaggaggg

SEQ ID NO: 114643 - DNA, 201 bp, Homo sapiens
ggaactcattcttaaggtgaaaatgcctctgagtgggtagtgaagccattgtcttcaagaaaatgggttttctggatccttgcttctcaaagtacagcatrtggactcgcagccctcattaaaaccaggtgctcattagaattatggactctcaggccccaccccaggccttctgaagaaccttcattttagtgagattcc

SEQ ID NO: 114644 - DNA, 201 bp, Homo sapiens
gctgtgctctctgagggaagagaggccaagggcagactgagctttcccatgggtagagcaggtgttcatctacaaggcatttggaaagtcccatccttacrccagaacaaaagcagaaaattccctgcttttgtactcagggtaaaactaagacacatccagaaaggctttgctcagtgtccactgctgccctgttccaga

SEQ ID NO: 114645 - DNA, 201 bp, Homo sapiens
tgaagggatgggcacagtgccctcctgggtcccttctgaaaggagaaagcttgatttgtatgaaatcagccctccctgaccacctcctgtgcttccgtaarctgtggggcctgggaaggtgagaatggcagcataaccctggccttctctcttgtgttgctccaggtttcatggtcctgctgatgatcccatggggtaagt

SEQ ID NO: 114646 - DNA, 201 bp, Homo sapiens
tgagaaacaagaagcttttttgtttctttgcttgcttgttttgttctattttcctggtccgtgcccctgctgaggggaaacctcacttctgtggagcatcytggctgatggtagaggcagcaaatcagtttgatgacaaacaagtgaccaatggggaagcccactttgagcttgagtctccagccagcaggcctgctgctt

SEQ ID NO: 114647 - DNA, 201 bp, Homo sapiens
tctgtcctcttcctcgggaactcattcttaaggtgaaaatgcctctgagtgggtagtgaagccattgtcttcaagaaaatgggttttctggatccttgctyctcaaagtacagcatgtggactcgcagccctcattaaaaccaggtgctcattagaattatggactctcaggccccaccccaggccttctgaagaaccttc

SEQ ID NO: 114648 - DNA, 201 bp, Homo sapiens
gccaatggttgctgcctgtgtgctctgcctgtgggtttgggatctcttcgggggagccttggttgaatcttcactgtcttcccaggtcttccatacttgcsttcaggcaccccagagcttgaagttccaaaaccaggtcagccctctgaacctgagcatggccccagccctggacaagacacgttctgccagggcaaagct

SEQ ID NO: 114649 - DNA, 201 bp, Homo sapiens
ggggccatggtctgggcactggacttagatgactttgccggcttctcctgcaaccagggccgataccccctcatccagacgctacggcaggaactgagtargtaaggggcccagggccagtggtggaatttggaggtggggtacaaacacagctccatgcatccaatgaactgtaggtcccgggtccttctgaggaaatga

SEQ ID NO: 114650 - DNA, 201 bp, Homo sapiens
tggggtacaaacacagctccatgcatccaatgaactgtaggtcccgggtccttctgaggaaatgactttgccccaatactgtaatttcccaagcttcatgyacccgcaggagctaaggaaactgtcaaaacaattttcctttttgcggtctttctcttcctggttgtagcaatgcctgcccagggttgttgtaaccgtggc

SEQ ID NO: 114651 - DNA, 201 bp, Homo sapiens
ccccagacttagataatcagaaccaggctgagggctgagaaaattaaccctgccctcttccaccaggatgctgctgtgcaacagtggctgcagaaggggasccctgccagcaagctgatccttggcatgcctacctacggacgctccttcacactggcctcctcatcagacaccagagtgggggccccagccacagggtct

SEQ ID NO: 114652 - DNA, 201 bp, Homo sapiens
ttcagggccacttcccgctttcctctgtttggcaacactaagagtcaccctctgattgttccagaaaagcaagaattgctaaaggccattgtgtcaagttygcccaattcatgctgcttgacatcttacccctccccaccctgctcccatcccccccacccagtgcccctgattgcaacactcctggctggggtgggacag

SEQ ID NO: 114653 - DNA, 201 bp, Homo sapiens
tttgtttgtttgttttttgagacagagtctcgctctgtcacccaggccagagtgcagtggcgcaatctctgctcactgcaagctccgcctcccgggttcaygccattctccttcttttcatgtttttattcgttggtttgaatttgagagtccccattccctattccctagcccacaggctatatactattgcctaaagaa

SEQ ID NO: 114654 - DNA, 201 bp, Homo sapiens
catatttctctttactattcctaaatgtacttatcaacaaattggacaaatctgagttgcactgaagtatctcagtgccctggtgaagcagaggttctcawtctcaaagtattgtatttttaattgcatatatgtgttcattggctataaattcaatcactcctagtttatcagagtaggagcaaataaatgagatgagtt

SEQ ID NO: 114655 - DNA, 201 bp, Homo sapiens
atcagacttttattccagccctttttatgtctctttgtcttccagaagtaaaaccacttttccctgacttcttaattcttattagtgatactacatttttyttaataaacctaggcctaaaaccagaccagatatcttccattatttttctcacaaccttacccaatctggtcatttctcaaaatctttgagaagaatttc

SEQ ID NO: 114656 - DNA, 201 bp, Homo sapiens
tccttttaggcctttaataagaagaattgaagactcaagttgaaacagaaagatgtttcaaatgttttgtttttaaccaagtgtaaatgtagctatcccayacaaaaaagcaaaacgagtgtttgtttcctttgccaatgttgtttatctccttataaatctgttcacttaaaacacatctattttcagtttcttctaacc

SEQ ID NO: 114657 - DNA, 201 bp, Homo sapiens
gggaggctgaggcgggtggatcacttgaggccaggagttcaagaccagtctggccaacatggcaaaaccccgtctctactaaaaatataacaattagccgsgcgtgctggcgggcccctgtaatcccagctattcaggaggctgaggcaggagaacccaggaggcagaggttgcactgagccaagatcaggccagtacact

SEQ ID NO: 114658 - DNA, 201 bp, Homo sapiens
ttttgtttgaaaatcaggacagaaagagcagggtctgagaacgtaaagattttgcttaaataattgggcagtacagttagtagaagttcattatttcagawttaaattaggtcctatctttggatgattattttctttagttctaaaagtcaaggtttcactctacttatttatttttattattgagatgcagaagaattg

SEQ ID NO: 114659 - DNA, 201 bp, Homo sapiens
ctcaccactgcactccagcctggtgacagggagagactccatctcaaaaagaaagaaaaaaaatctatggtaagaactaatcttctgtccatgaacttttraagaaggaaaagaaattcatgctagtttttctgtcacacctcaaactccaggttttggccacacagtgtgtgaaaactgctgagttaaaatttatcatag

SEQ ID NO: 114660 - DNA, 201 bp, Homo sapiens
ttttgattcttatcaaattatatgtaagctattattaaactaacataaaaacatgtattcaccttttaaataagcttgtattgaaatagtttacagttacrgtgtagttaaacttattgttcacatgttgtttgtttctcatttttcgtttctgtagacaacaaacttatactatttttaaaagtagagtttgcttctttc

SEQ ID NO: 114661 - DNA, 201 bp, Homo sapiens
cttttaagatatatatatactttagagcaggggtctgcaaattacagtccatgggctaaatcctaccctctggctgtttgtgtaagtttttattgaaaccrtgcccacttatttatatagctgctttcacactacagtagcagagctgaatagttgcaacagggaccatagggcctgcaaagcctaaaatatatactatat

SEQ ID NO: 114662 - DNA, 201 bp, Homo sapiens
tcaaaatgctcttcataaactagtgcttcctgggcttcatagcattagtgtactgcatgaagtctagggacaggaagatggtgggtgatgtgaccggggcrcaggcctgtgcctccaccaccaagtgcttgaacatctgtaccctgttcctcgacatccctgtggtcattgcactcatcatgcttttcaccactagctcag

SEQ ID NO: 114663 - DNA, 201 bp, Homo sapiens
tgtccataagttggacctggtgacgtcaaagaatacatggaggagatgttattacaatgtcctaggtacaggaagctccaagaaatgtatccaaacccacwaaagaaggcaagattcaaaagaaaaagggtacattaagcagattaaggagatttcaacgtgaagcttagactgggaaataaatgcaccagtctgtgtctg

SEQ ID NO: 114664 - DNA, 201 bp, Homo sapiens
attgtgtgaagagcaaagcgaacacaaatcatatctcatttatggactgacttgcattcagatgaaagagtacagctcagagctttttgttgtttgttttctaaaatatgctatcagtgacatgggttggtggtatttatcaagtacttgtgactagaatggtcagaggggaaagaaggcaagaactaagttgttgctgtg

SEQ ID NO: 114665 - DNA, 201 bp, Homo sapiens
ttttatgtcagtagtagcatgggcttggtggaaagaaccttggattagaagcgggggaaaaaaagaagcagaaaacctgggttatttctagtctctttctkccactcactaattgtatgactttgagaaaatcatttcacctcacttttaaaacatgaggagattgatttagatgacctcttctaactcctgactttgaag

SEQ ID NO: 114666 - DNA, 201 bp, Homo sapiens
ttttttttttggctggtttatataactatcaggacaagttaagtagaactagctagtaacttttcgtggacagaaatctaggtccaggattgtaggttggyagtatcaatgtgttgtgatttaaagaatcttggaaattctttctgaccagaaatatttcaaatgccagatgccactaagcctaaaattctattatttaga

SEQ ID NO: 114667 - DNA, 201 bp, Homo sapiens
tagaataccggaaatccccaattttcttataaccttatgtgcctagggagttattttcattggttttaggtgtcttggacatgaactataaattaaaatgrtttatcagaagtcactttaaggttctttgggcacttaatatctgtgcttatttttctatgtgtgtaaatgcagtgtgcttcattgctccttccctgcttt

SEQ ID NO: 114668 - DNA, 201 bp, Homo sapiens
taaaaagtcaacccaatgagttcttctaatttttaatctggtattaacactaatggtgtccttgggctaatcattttcatgtgactttcttctgtgaaatractgaacctattctctgagattattatgaagaaattagatactaaatgtgaaaacacatttgagctttgggctacaaagactctgcatgaaaaaggacat

SEQ ID NO: 114669 - DNA, 201 bp, Homo sapiens
tacagtcgtgagccatcacgcccagcctgtgttcagtttcttgattgaggaatgtcctcagagtagaaccgggcttgaagttagacaggtttggtgggttaagtcactaagaggttatgttttgggccttcatggggtaagatcagcattaatatcagccaggtttttcatctccaaagtgggtaggtgcagaacagtgtg

SEQ ID NO: 114670 - DNA, 201 bp, Homo sapiens
acagtcgtgagccatcacgcccagcctgtgttcagtttcttgattgaggaatgtcctcagagtagaaccgggcttgaagttagacaggtttggtgggttaagtcactaagaggttatgttttgggccttcatggggtaagatcagcattaatatcagccaggtttttcatctccaaagtgggtaggtgcagaacagtgtgt

SEQ ID NO: 114671 - DNA, 201 bp, Homo sapiens
ttgaaaagagccattttatgtggaagattagtctccttgttgcagattctttgctgttagtggtggtagctattttacctatttttcgttactaaagtaartcacacaaaagtttttgttttcatgaaattttccagaccttatgcacatattctctcagttcctgtttcggaaactgcttaccctggacagactcaatac

SEQ ID NO: 114672 - DNA, 201 bp, Homo sapiens
tacacctaggttgtgaaagaagaccaagggttctcttaatgctctaccaaaatgtaaaaccaccattcctctgtagttatgtctagaatttgaggaatgtsatagctgtgcttatttctcccttgtaaaacaagaggaatcacctctttggggtctgttaggacccattgctttaagagtcatgaggctgggcgtggtggc

SEQ ID NO: 114673 - DNA, 201 bp, Homo sapiens
tccaatactactttatttattttgttccagtttggccactgggagctctttcagttggctcctatgccttttgacatactcccatttttttagtttttggttttttttccccccccacccagcactttcttacttcctggcactacaagatgctccaggctcatcttgtatattacttattcaagtcctattatcaaccat

SEQ ID NO: 114674 - DNA, 201 bp, Homo sapiens
gtatgtttgtcttgtattttgctgccttgctgaacttgtttatcagttctagtggtttcttaatggattcgttaggatttctgtatacaaaattatgtcaygcaaaaagagattctgattttttcacttttaaccctaacggagctttttcagctttattgctttcttacttcctggcagcttgtattactgtcctactac

SEQ ID NO: 114675 - DNA, 201 bp, Homo sapiens
ctactttatttattttgttccagtttggccactgggagctctttcagttggctcctatgccttttgacatactcccatttttttagtttttggtttttttyccccccccacccagcactttcttacttcctggcactacaagatgctccaggctcatcttgtatattacttattcaagtcctattatcaaccatttttttt

SEQ ID NO: 114676 - DNA, 201 bp, Homo sapiens
attggagagagatccaaggagtgttggaagaaatatagaagaaccattgtactgttattaagctcactttgacatagctaattcaggttaacctcctcctycttaatactttttactatggttttgaaatttttcctttggaacacatcttcctgtttcattaggaacttgttggggaagcacggtggctcatgcctataa

SEQ ID NO: 114677 - DNA, 201 bp, Homo sapiens
gtctgtgtttataatttcatttgtttgtattacagtcatagaattttatgcagtttcatatgtgattttgtctaaaaatctaagtagatcctattataacytttgaggtataatttacatacatttaattcttttaaacatacagttctgtaagttttacagatgcatacaattttgtaaaaccacatcgagatacagagg

SEQ ID NO: 114678 - DNA, 201 bp, Homo sapiens
tgcacatccttaagtttattcagccagcatccttgtactgttaatgctgctgtttcctgctgttgaaacatgagccctatgaagtaggtagttgtatcttyttttttacaggtgaagaaacagatacagaaaagacacgcagtgaattaactctcagaacttagccttgagcctggatattctgaatttgtatactgggtt

SEQ ID NO: 114679 - DNA, 201 bp, Homo sapiens
ttaaacttttaactttgtagcactatcacttggtgcagctgtgccacttaccattctgtaaccgtggtcttctgttcaaagctttatctgtatattgtctrttttaagcggacatctagtggggcctggttctcaaaagtggtgtctttcaagtttttgcagctccattgtcaaaacaggagtgaaggctgtccaaaaaca

SEQ ID NO: 114680 - DNA, 201 bp, Homo sapiens
tctttacatattatgttaacagtgcacatccttaagtttattcagccagcatccttgtactgttaatgctgctgtttcctgctgttgaaacatgagccctrtgaagtaggtagttgtatcttcttttttacaggtgaagaaacagatacagaaaagacacgcagtgaattaactctcagaacttagccttgagcctggata

SEQ ID NO: 114681 - DNA, 201 bp, Homo sapiens
aaggtaacagagcactgttgcacagaatggtgactgtaataaataatatagcattgtatatttcagaattgctaaaagcatagaacttaagtgttttcackttttttttttttttttcacaaaaaagcaaaaggtgttttatatatcaaaacatcacattgtaccccataaacatataataaaaagtggcagagcaatgtt

SEQ ID NO: 114682 - DNA, 201 bp, Homo sapiens
attgaatattatttttattcacacacacacacacacacacacacacacacacacacacacacacgatgatctgtatttttttaaaagtgcctggctttttmgtcatagctgtatgtggggtagggcaggcagtggttgtatacatttttaggcgagtttgccttgggttctatggtggttataagagcctaaaaaaattac

SEQ ID NO: 114683 - DNA, 201 bp, Homo sapiens
ttatatattacagtgattttccagcagatggcagtcaaatgtcttgaggaagaggcagctttatcttatttacacaggaaccctggtgctaagtcactctrttgggcaaggggaaagaacaagaaggttaatagagcaggatgaagaagaaagccaaagttaggaccttgtttaactgaagaaggtggcagaagcagggag

SEQ ID NO: 114684 - DNA, 201 bp, Homo sapiens
ttttacttggcctttttactaatgctggcttaaggcaaattgcaaaccttttactaccgatgtttctcagatggcaaaaccatatattaagaaagcaatamgggatcaaattcctcccccgttagaaaaattatcttatggaagttaattactttggagttacttggagataagtcactattttttataaaatggcccctc

SEQ ID NO: 114685 - DNA, 201 bp, Homo sapiens
actaaaatttaacaattacatagcgctttgtttttcataagcagttcactcttttcctgtttaaatttcatctttacatattatgttaacagtgcacatcsttaagtttattcagccagcatccttgtactgttaatgctgctgtttcctgctgttgaaacatgagccctatgaagtaggtagttgtatcttcttttttac

SEQ ID NO: 114686 - DNA, 201 bp, Homo sapiens
catacagtaaactacacagatttaaattgtacagtttagtaagttttgccatatatgtgcctatgaaaccaaaagttttatcccaatattttaagaaacctttttttttttttgagacagagtcttgctctgttgcccagtctggaatgcagtggtatgatctcagctcactgcaacctctgtctcccagattcaagcgat

SEQ ID NO: 114687 - DNA, 201 bp, Homo sapiens
tctgggtgtggtggtgggtgcttgtagtcccagctacttgggaggctgaggcaggagaatggtgtgaacccaggaggcggagcttgcagtgagtcgagatygcgccactgcactccagcctgggcgacagagcgagactctgtctcaaaaaataataatcttttattaggagatttttattattttgatttactaagctcc

SEQ ID NO: 114688 - DNA, 201 bp, Homo sapiens
gtctggagtgcagtggcatgatctcagctcactgcaacctccgcttcccaggttcaagcgattctcctgcctcggactcctgagtagctgggattacaggmgcgtgccaccacacccggttaattttttgtgtttttagtagagatggggtttcaccatgttagcgaggatggtctctatctcctgaccttgtgatccacc

SEQ ID NO: 114689 - DNA, 201 bp, Homo sapiens
aacctgattattacttcagagaaaggtaagaaattgaagcactttaaaaccaaaatttctgctgactataaatggttgtcacagggcattatttccttatygatttatgcccagatcttaatataaaaaggtgattgaatgacgacatggagagatcagtgccactgaaagaaaagttgagtgtttactcatagttcccct

SEQ ID NO: 114690 - DNA, 201 bp, Homo sapiens
aagttgagcagacagtacagagagttcccatatatccctcctcctgcacagtttcccattattaacatcttacgttagtatattacacttgttacaattartgaaccagtattagtatgttattattaactaagtccgttgtttattcagatttcctgtgtttttatatgatgtccttgttctgttccgggattccatcca

SEQ ID NO: 114691 - DNA, 201 bp, Homo sapiens
ccattgagtttttaatgtggtaagacaaaggtctagtcatatttttaaaagacttatgtaagtgttgacatactgttgaaatatgggtattgttagttackccttacctatttaaggtaatgagaattgtgaggctgacctgctaacaagtcatctatctcttctgccctgcttcatttccttgtcattctcttgaacttc

SEQ ID NO: 114692 - DNA, 201 bp, Homo sapiens
actaggaagacattagcaactggtaaaaagaccttttgaaacatttgaaatgtgatccctatccctggtgggactttaattatcagggaaatggtagggtkaaaaattatcttgagcagtgtgtttaggatttacactactggaacaaatagctgaattatagatactatatgtaccaggaaaaattatgccattgagttt

SEQ ID NO: 114693 - DNA, 201 bp, Homo sapiens
tgattactttgtcattattcttctagccctctcagttgaggtaagtataaaactaggaagacattagcaactggtaaaaagaccttttgaaacatttgaartgtgatccctatccctggtgggactttaattatcagggaaatggtagggttaaaaattatcttgagcagtgtgtttaggatttacactactggaacaaat

SEQ ID NO: 114694 - DNA, 201 bp, Homo sapiens
agaggatttataagattcataagagaaattatatctattttatatgcagatggaaacgatccactagatgaggaaaaataataacggtgcttattgtgtgmtaggcaacgccaaggcactaggaatacagcagtgacaaaagtcctctgtcctcatggaacttaccttcgatcagtggtgctaagataactggattatcca

SEQ ID NO: 114695 - DNA, 201 bp, Homo sapiens
tggtaacaaaagcaagagatactttatggggctgttataaaaaggaaactgtctttcttttccctggttatatctgtttttaccttttgaattttcattarttaaaaaataaactaattaaaaagtcaacccaatgagttcttctaatttttaatctggtattaacactaatggtgtccttgggctaatcattttcatgtg

SEQ ID NO: 114696 - DNA, 201 bp, Homo sapiens
tttgttgggatgtttttaattatgcattcaatctccttactctagttatagctcttaccggattttgtattccttcttgagacagttttggtactttatgstatgtatttctaggaatttgaccatttcacctgggttatccaatctcttggtatacaactgtgcatagtattctcttgtaatccttatttctataaaact

SEQ ID NO: 114697 - DNA, 201 bp, Homo sapiens
gtcatcacggtcttccctttttatccttcctgtcagtaaagaaacatcttaccattttaaaacataaacactgctcccccgacccccccctgcccctccgsccttggctccacatctcttactagttatggaccttctctttgttctgtgacatatcagaacttctgcaagagttgccctcacttgctttttcacctccca

SEQ ID NO: 114698 - DNA, 201 bp, Homo sapiens
aggggatgttgctataacataatattctaggaccattgggttttaggaactggtccagtggatactggatcatagcaatatcaccaacttctaaaatatargatctacaaatagtcttcaacagtgggtataacagtgaacctcatacttaaccaggtacatgtagaagtcaaactagttattgatgtcaggaaaattctg

SEQ ID NO: 114699 - DNA, 201 bp, Homo sapiens
cagagtatgggcactggatctcaggggagataaaaaacaagtttggccttgagtttggctctgtaattaatggatgtcaaacagacaaatacagaatctawgaaaacacaatacttattaatgtttaaaatagaacaggaagagtaatgacacattttgaggtaaaaaaaaaaagcttttcacaggctgtagtggagatct

SEQ ID NO: 114700 - DNA, 201 bp, Homo sapiens
ttcttctaaatgtagaaattatttgtgtactttttattctcctagattgaaaagccaagaagacagagaattttaaagatggaaacaacaaagggtgcttrttttcacagaatagatgtagaaaggaatgtctttaaatgtttcccttaaagaaggttttcttgcagcttacagaatttatgtcaagaaatagtagattct

SEQ ID NO: 114701 - DNA, 201 bp, Homo sapiens
ctttctcccaaaatattcattattaattttgtctaattttcattaagaaatttgtaggtattggagtaaacctttgttcacttctttttttttttttgagrcagagtctcgctgtctcgcaggctctatatatttatatatatatatagagagagagagagagagaggatggcttgcttccctctctacctaactgcatgt

SEQ ID NO: 114702 - DNA, 201 bp, Homo sapiens
gggagttggagaccagcctgaccaacatggagaaaccccgtctctactaaaaatacaaaagtagccgggtgtggtggcgcatgcctgtatcccagctactygggaggccgaggtatgagaatcgcttgaacctgtgaggcggaggttgcagtgagccgagactgtgccattgtactccagcctgagcaacaagagtgagac

SEQ ID NO: 114703 - DNA, 201 bp, Homo sapiens
ttttatcctttgacaggtttatgagttagtcattgtttgctccctaataatagatgatcgggaaatgttgaattggtttggtttatattataaacattgtkttatttatcataattcttgcagatattgcctgaatttataatattttaatcttagatttgtttttttcattgcatgaaagtttattttacataattggat

SEQ ID NO: 114704 - DNA, 201 bp, Homo sapiens
ggtggctcacgcctgtaatcctagcactttgggaggccgaggcaggcggatcacctgaggttgggagttggagaccagcctgaccaacatggagaaacccmgtctctactaaaaatacaaaagtagccgggtgtggtggcgcatgcctgtatcccagctactcgggaggccgaggtatgagaatcgcttgaacctgtgagg

SEQ ID NO: 114705 - DNA, 201 bp, Homo sapiens
ttttaaataagcttgtattgaaatagtttacagttacagtgtagttaaacttattgttcacatgttgtttgtttctcatttttcgtttctgtagacaacamacttatactatttttaaaagtagagtttgcttctttcccccctgtatgtaattcttgggtgagcacctaagaaaaattattcagattaggctgtggccaa

SEQ ID NO: 114706 - DNA, 201 bp, Homo sapiens
aggttgtgaaagaagaccaagggttctcttaatgctctaccaaaatgtaaaaccaccattcctctgtagttatgtctagaatttgaggaatgtgatagctrtgcttatttctcccttgtaaaacaagaggaatcacctctttggggtctgttaggacccattgctttaagagtcatgaggctgggcgtggtggctcacgcc

SEQ ID NO: 114707 - DNA, 201 bp, Homo sapiens
gataactgtgtgtatatgtgtttgggaaaggggatttcccccctcctctcttcctcttctaccccctctttcccttccttccttctcctcttccctccctytctcctttccctcccaccctctttttttttcttcttcttctctctctttttttttttttttaaatagattgggtctcttgctgtgttgtccaggctggtc

SEQ ID NO: 114708 - DNA, 201 bp, Homo sapiens
attctcctgcctcagtcccctgagtggctgggactacaggtgcccgtcaccatgcccagctaatttttagtagagatggggattcaccacgttagccaggwtggtcttgatcccctgacctcatgatccacctgccttggcctcccaaagtgctgcgattacaggcgtgagccactgcgcctggcaaaaaaaaattttata

SEQ ID NO: 114709 - DNA, 201 bp, Homo sapiens
taatagctagaacaggtaatctctcaaaagcacaaagtaccactgaaacctatttaaaatttctcacatttctaaagtgtgcaatgtacaaggtccttatrcatatgattatttgatcattataacagccctatgaggcagggatagatagggttaccatgtaccttggggagaggtgtgttgaggaaagagtatgggcaa

SEQ ID NO: 114710 - DNA, 201 bp, Homo sapiens
ataattttgaaatttgaagattagaaccaggactgtgactaccaagtcaagctgattttttcttattgtcttctaggacccaacagtagtgattggctcargtttaacaatggaagaaatgatttttgaagtggctgatactcatctatttttcaatgacttagaggtaagcattttaaattgtttctgtgcttcactgag

SEQ ID NO: 114711 - DNA, 201 bp, Homo sapiens
agctgtagtcctaactacttggaaggttaaggtgggagggtcacttgagccagaagttcaatgctgcagtgagctatgtgatcttgccactgtgctataayctaggtgacagaatgagaccctatgtcttaaataaaataacaggtattgaccaaaaaattagctgggtatgatggcaggcgcctgtagtcccagctactt

SEQ ID NO: 114712 - DNA, 201 bp, Homo sapiens
gagctcaggagttcaagaccaccctgggcatcacggtgaaacccagtctctactaaaattagctgggcatggtggcgggcacctgtagtcctggctacttrggaggctgaggcacgagaattgcttgcgcctgggaggcggaggttgcagtgagccaagatcacgccactgcactccagtctgggcaacagagaaagactc

SEQ ID NO: 114713 - DNA, 201 bp, Homo sapiens
gaatggtctttgttctaagattggtacatccttttatgagatgatgaaaataaatggtggtagttttttgttttgttttgttttgttttgtttgaggcggrgttttgcttttgttgcccaggctggagtgcaatggcacgatcttggctcaccgcaacctccgcctcccgggttcaagcaattctcctgcctcagccgccc

SEQ ID NO: 114714 - DNA, 201 bp, Homo sapiens
aaaataaaatttatggctgccatattacagaaagatcctgcttttatttttaagcatgcaaaatctcaatagtattcaaaattgtgtggctcttgaatcaraccaaagtttctattttttcactgtcagcattcacaggtagagaagtgtaaagtcttaggaaatactatttctattctcaatttaaaattttctcagaat

SEQ ID NO: 114715 - DNA, 201 bp, Homo sapiens
ttgaggccaggagtctgggaccatcctggccaacatggcaaaaccccatcgctacaaaaattaaccaggtgtggtggcgcacacctgtaatcccagctacytgggaggctgaggcatgagaattgcttaaactggggaggtggaagttgcggtgagccgagattacgccgctgtgctccagcctgggtgacagagcaagat

SEQ ID NO: 114716 - DNA, 201 bp, Homo sapiens
taaaacgtgaaaaatgtataactaaaaataaatgcacatattaatatttaaagtgcataattaagaaaacctattggtgttttgtttttcttgtataccartaattaagccactactgttgacactatttggctttctgttttaacattgaatgagtgaaagtacttcttatatttatgaatttgctgctaaaatcttggc

SEQ ID NO: 114717 - DNA, 201 bp, Homo sapiens
aatttgtaggtattggagtaaacctttgttcacttctttttttttttttgagacagagtctcgctgtctcgcaggctctatatatttatatatatatatakagagagagagagagagaggatggcttgcttccctctctacctaactgcatgttgaaaaataagcatttgttaatcttaaacatctgtcacatgagtcata

SEQ ID NO: 114718 - DNA, 201 bp, Homo sapiens
ctcttatctttcccactattattggttttaaagaatggtgtagacaggttttccttaaatggcctctgttgttctcctttctcccaaaatattcattattwattttgtctaattttcattaagaaatttgtaggtattggagtaaacctttgttcacttctttttttttttttgagacagagtctcgctgtctcgcaggct

SEQ ID NO: 114719 - DNA, 201 bp, Homo sapiens
caagcattctgcagttgacagcagcccatcctccctgggggagttagggaaattatctcaaaaacctaatctgcttctggcttgattaactctaagcagarccttttctttagtttgtacttcagtggtaccataatgagaagagactgcctttgtttgctcataaaaatgttttgaatgagtagatctgacttctgtagt

SEQ ID NO: 114720 - DNA, 201 bp, Homo sapiens
tgcaggtatttatgaagtgcttactgtgctcttgacatttttctaagcagtggatagatgttgcacacgtaatcctcacaacaacccaaacctcattttasagagggagagcctgaggcacagaaaagctaagtagcttatccatagtcacagtattagcaaataattaaggcaggacattagctgggcattctgactcca

SEQ ID NO: 114721 - DNA, 201 bp, Homo sapiens
tcttcatttcccactttcgttttcagtttgtctgtttcattcagtggtcaggagatggtcaacaagcccaaacagagaggtaatagcaaaaccaagcaaasaaaaaacataaactttgctatttgtattagtttcttgtggctgccataacaaattaccccaaacagactttgaggcttaaaacaacagaaatttattctt

SEQ ID NO: 114722 - DNA, 201 bp, Homo sapiens
gatgacctcttctaactcctgactttgaagttagaaatttcagtcattctcggttttgataccacactaccagcgtctgttttgtctataaaaatttattgggcacaacctacgtaaggatactggactagatcagagagatgcaaaggagatgtgagatgtggctcctgccccaagagacctgcattgtaataggactta

SEQ ID NO: 114723 - DNA, 201 bp, Homo sapiens
aaataatagatatttaaattatttttacctctcttattctatcgtcattccaatttttaattccctctaaatatagtctatgtagtatccttttaaaaagyagatggtgtctgcaatggatcattttacacaaaagcttactctaaaatgagtaggcactgaacatgcaaaatagtgttagtgatcaaccatatcattgat

SEQ ID NO: 114724 - DNA, 201 bp, Homo sapiens
gaaacagggtcagcagacatactctactatttttataccactacctgctcttaacacttagtgagcacttactatgtgccaggcactatttaaagcacttyacttgtgttaactcatactcatacttgggaggcctggggaaaaaaaatgagaatggtaaaggataaagaagaagacttgccatcttctcgtatgttctca

SEQ ID NO: 114725 - DNA, 201 bp, Homo sapiens
tgaaatttttttggagaggcagagtttcaccatgttgcccaggctgatctcaaactcctggactcaagcaatctgcctgcctcgggctctcaaagtgctgrgattaaaggtgtgagccaccacccacaggcggctgatgtagttttgaaaatttaagaaacaaagtatacctccaacaagtccttgtcacttgtaccttgt

SEQ ID NO: 114726 - DNA, 201 bp, Homo sapiens
aggttgaggttggaggattgcttgagcccaagattttgaggttacagtgagctgtgatcacatcactgcgctccacaaggcaacagagtgagactctcttaaaaaaaaaaaagaaattacaacttaaacagttaatttccaaggtcatttttttttaagtcaagaagtcctatacatgctctcaagagtagcgagtgttaa

SEQ ID NO: 114727 - DNA, 201 bp, Homo sapiens
accccgtctctaccaaaaaaaaaaatacaaaattagccaggcatggtggcaggcgcctataatcccagctacttgggaggctgaggcaggagaatcgcttraacccaggaggcggaggttgcagtgagccgagaccacgctattgcactccagcctgggcaacaagagcgaaactccgtctcaaaacaaacaaacaaaaaa

SEQ ID NO: 114728 - DNA, 201 bp, Homo sapiens
tccacctgggactacaggcatgtgccaccacacacagctaatttttgtatttttagtagagacagagttttaccatgtgggccaggctggtcttgaactcmtgacctcaagtaatccacccacctcggcctaccaaagtgctgggattacaggtgtgagccaccacgcctggccgagattctatttctggtaaactagtat

SEQ ID NO: 114729 - DNA, 201 bp, Homo sapiens
gactacaggcatgtgccaccacacacagctaatttttgtatttttagtagagacagagttttaccatgtgggccaggctggtcttgaactcctgacctcargtaatccacccacctcggcctaccaaagtgctgggattacaggtgtgagccaccacgcctggccgagattctatttctggtaaactagtatttttttcta

SEQ ID NO: 114730 - DNA, 201 bp, Homo sapiens
tacaggcatgtgccaccacacacagctaatttttgtatttttagtagagacagagttttaccatgtgggccaggctggtcttgaactcctgacctcaagtratccacccacctcggcctaccaaagtgctgggattacaggtgtgagccaccacgcctggccgagattctatttctggtaaactagtatttttttctatta

SEQ ID NO: 114731 - DNA, 201 bp, Homo sapiens
agtttgagaccagcctgaccaacatggtgaaaccccgtttctactaaaaatacaaaaattagttgggagtagtgtcaggcacctgtaatcccagctactcsgggaggctgaggcacgagaatcgcctgaaccagggaggcagaggttgcagtgagccaagatcataccactgcactccagccggggtgacagagtgagagt

SEQ ID NO: 114732 - DNA, 201 bp, Homo sapiens
gccgcggtttcctccgctcgattggttctactgtgggtctggactgatctccatgtcctgttgtggggcttttacagcctttgggtgagtctcagctgccracagggtctgagcgcagccgggcgagcacagcgtgaagggggatgggtctagagttctgcctcggtccttgtgggtgggagtctcttcgcctgtcccttg

SEQ ID NO: 114733 - DNA, 201 bp, Homo sapiens
ttttttgagatgggagtcttaactcttgttgcccaggctggagtgcggtggtgcgatcttggctcactgcaatctccacctcccgggttcaagcgattctyctgcctcagcctcccaagtagctgggattacaggtgcctaccaccacgctaattttttttatttttagtagagacggagtttcaccatgtaggccaggct

SEQ ID NO: 114734 - DNA, 201 bp, Homo sapiens
aggttttgtgaactatattatattagtccacttggtttgccctaacagaatactatagattgggtggctaaaataacatgtattttctcacagttatggarattgaaagtctaagatctcttttaaatgagtactaacttctattttaggtataattgcttctgaataattgtatgttgtatagttctacctctagtgttt

SEQ ID NO: 114735 - DNA, 201 bp, Homo sapiens
gcagtaaattagaaaatgttccctgaggaagcccaaatgttagactttagtattaggcaaagactttaaatcagccatttaaaatatgttcaaagggcctrgtatggtggcttgcacttactgaggagggacaattgccactgcactccagcctgggtgacagagcaagacctcatttctttaaaaaaaaaaaaaaaagaa

SEQ ID NO: 114736 - DNA, 201 bp, Homo sapiens
tcctcacaacaacccaaacctcattttacagagggagagcctgaggcacagaaaagctaagtagcttatccatagtcacagtattagcaaataattaaggyaggacattagctgggcattctgactccagagcatgagtacaatatttatgcttttcagtattgaggtcatagtatcaatatcaactctcccataattgag

SEQ ID NO: 114737 - DNA, 201 bp, Homo sapiens
ggtgaaataacatgactgaagagtaattagggtttgcgacagtggattacatttatgtattgtcccaattcgtttcctgtaatcacaaagggggaaagggygtagaaatatcaacagttccttgcctatcctagctggtagagtgaaacagggtcagcagacatactctactatttttataccactacctgctcttaacac

SEQ ID NO: 114738 - DNA, 201 bp, Homo sapiens
agtacaatatttatgcttttcagtattgaggtcatagtatcaatatcaactctcccataattgagaacctttgctaacaaatatctaaattcacttctccyccctttttgtggttaatctattggcccattttattgttcattagcacagggtagaaattaaggcagaagttaaccattaagttatcaatttttgccattt

SEQ ID NO: 114739 - DNA, 201 bp, Homo sapiens
aaagaatttgtagatatattttgaagctaccacagtgacctatgaacataaaccagccagcagatcacttaaggaaatatctgccattatcttaccattgwtagcattttagcctatttcctttcattattttttcatgtttctcctttttacatagttgcaatcactgtgtgtgtaagtgtactcacaaaattttatatt

SEQ ID NO: 114740 - DNA, 201 bp, Homo sapiens
tccatcattcatcttcaacagttatcaacttatagacaattttgtttcagctatacatcatctagctccctccccagattccaggcattgttctctaaaakataagtatggtacttattaacataaccacaatggcattatcccatctttaaaagttcaatattaataatgtcttaattttgtattatcaagtaccaaaat

SEQ ID NO: 114741 - DNA, 201 bp, Homo sapiens
ttatcaaggctacaggcccaacttttaaaatctctcttaggaaccacttgttatttgggccgtaatcttaatagttttaatggtttgctatttgggaaaasttaagtggagctagttagtgaattgactttcattcaagaccagatttctttcctttttatctttggtgtaagatatttatttattttatttttctttaac

SEQ ID NO: 114742 - DNA, 201 bp, Homo sapiens
cactattttggctaggctggtctcaaactcctgagctcatgcgatcctcccacctcgtcctcccaaagtgctgggattacaggcgtaagccactgttccckgccaggaaactatttttaaagaaaacttgattgttttaggtagataatcaggttgttttttgtttgttttgttttgagacagggtctcgctttgtcaccc

SEQ ID NO: 114743 - DNA, 201 bp, Homo sapiens
agtatttgtccttttgtgattcatcatgatgtctttaaggtctatccatttgtagcatgtgtcagaatttcctctttttaaggctcaataatactccattktatgtctgttccgcattttctttatccattcatctgttgtttgtgttgttaatagttctgttgaatgagaaggaggtatttgttgtgccactttatggac

SEQ ID NO: 114744 - DNA, 201 bp, Homo sapiens
tgccatcattatcagtgtcaatggaatttttttagctgcgtatttgaactgtcatacctagtttttttacagctttattagggagtaattgacatacagtraactacacagatttaaattgtacagtttagtaagttttgccatatatgtgcctatgaaaccaaaagttttatcccaatattttaagaaaccttttttttt

SEQ ID NO: 114745 - DNA, 201 bp, Homo sapiens
ataaagttaattggttcacttttaatcagatatttacagcgttcataccagaagtagtaatcatgagagtcaagccttcatagcagctattccagatgaartcatgggggtcaagaggacaatagctggaaaagtctttgagagttcatcagagtatcacatcagttcctcacgtctgtctgtgatttgccaaacttaaag

SEQ ID NO: 114746 - DNA, 201 bp, Homo sapiens
tttttcagagatgataaacactggtttagcaatcatgtttgttaagttacaggtctatgggataaagcttctgtgaatctggagggttagaacttatttaraataattgaggtgcttgcttataaatatgggaataaactctttttgaaaaatttaggtatgctattgtttacattttgtagattactcttcttgatagag

SEQ ID NO: 114747 - DNA, 201 bp, Homo sapiens
catcatgatgtctttaaggtctatccatttgtagcatgtgtcagaatttcctctttttaaggctcaataatactccattgtatgtctgttccgcattttckttatccattcatctgttgtttgtgttgttaatagttctgttgaatgagaaggaggtatttgttgtgccactttatggacttggatgttgttgggtttttt

SEQ ID NO: 114748 - DNA, 201 bp, Homo sapiens
gtttataagatactgctactagttttggttctgttttttgcaagactattttttcagttcctatctgtcccaaaatgctttatatgtcacataattttttkggggggaatgaattcaatttgtgtgtcatcattttgagttgcattcagaggagattcttaaagtttgggactattggtctctgtagattagatcctttca

SEQ ID NO: 114749 - DNA, 201 bp, Homo sapiens
catgatctcagctcactgcaacctccgcttcccaggttcaagcgattctcctgcctcggactcctgagtagctgggattacaggcgcgtgccaccacaccyggttaattttttgtgtttttagtagagatggggtttcaccatgttagcgaggatggtctctatctcctgaccttgtgatccacctgcttcagtctctcaa

SEQ ID NO: 114750 - DNA, 201 bp, Homo sapiens
tatagaagtttaaaatttttgtgtaatcatatctattttctcctttatggcttttggatttaatgtcatgcttaatcaggatttgcccacctcaaggtttygttttttgtttttgcttcaaatgctttaatgtaatttttgtttcaaatttagaaatgtttttttaaattgcctttgtttctttattttctcctttttggt

SEQ ID NO: 114751 - DNA, 201 bp, Homo sapiens
aatgaagtagtggctctagagttatatggacttcagaggatttataagattcataagagaaattatatctattttatatgcagatggaaacgatccactaratgaggaaaaataataacggtgcttattgtgtgctaggcaacgccaaggcactaggaatacagcagtgacaaaagtcctctgtcctcatggaacttacct

SEQ ID NO: 114752 - DNA, 201 bp, Homo sapiens
ctgtcagtaggacatggtaaggtggacttagaatcccatttttccttttttgtttgaaaatcaggacagaaagagcagggtctgagaacgtaaagattttscttaaataattgggcagtacagttagtagaagttcattatttcagaattaaattaggtcctatctttggatgattattttctttagttctaaaagtcaag

SEQ ID NO: 114753 - DNA, 201 bp, Homo sapiens
tgcttggtagatatgactttagatacattttctccctttctatttatgaatatatactctgcactgggttggcacggtaataaattaaaaatgaaggagcrtaaagaagcataattcttccttgaaagtaaataaatttttggccaggcgcagtggctcacgcctgtaatcccagcactttgggagaccaaggtggacgga

SEQ ID NO: 114754 - DNA, 201 bp, Homo sapiens
tgtaatcccactttgggaggccaaggcgggcggatcacttgagaccaggagttcgagaccagcctggccaacatggtgaaaccctgtttctactaaaaatrcaaaaattagccaggcatggtggtggacacctgtagtcccagctacttcagaggctgaggcatgagaatcgcttgaacccaggaggcggaggttgcagtg

SEQ ID NO: 114755 - DNA, 201 bp, Homo sapiens
gtattggaagcaggctgtgagtcattggtaggctgaatgtatacctgatgctgagaacggaacagaaaagtatcaagaactaaaagactctttctgactcrtactctaccctccctgtagctttaacccacttgccacagggagcttcagcatgttataatattttgtaaaagttggaggactccagttttagtcttgcgc

SEQ ID NO: 114756 - DNA, 201 bp, Homo sapiens
catgatgttatatcataagatcaaagtaatgtaacataggatagagatgtaatgaaagaaaaggaataagtagcctaaggtaataatattaggaatgtaattttttttttttttttgagatgggagtcttaactcttgttgcccaggctggagtgcggtggtgcgatcttggctcactgcaatctccacctcccgggttca

SEQ ID NO: 114757 - DNA, 201 bp, Homo sapiens
ggggtcttgcagtgtatcccccccttggaaggggagactactgtatacaattcagtggaattaagtacatttacaatgatctgcagtcatcatcactattrtctagtctctttatttaaggtattttcacttcaacctgcaacattattgctgttactcttggacaaattgtttaaatctctgaatcccagtttccttgtt

SEQ ID NO: 114758 - DNA, 201 bp, Homo sapiens
ctcctcctgcacagtttcccattattaacatcttacgttagtatattacacttgttacaattagtgaaccagtattagtatgttattattaactaagtccrttgtttattcagatttcctgtgtttttatatgatgtccttgttctgttccgggattccatccaggataccaaattacatttagttatgtctccttaggct

SEQ ID NO: 114759 - DNA, 201 bp, Homo sapiens
gaagcagagaattgcttgaacctgggaggcggaggttgcagtaagctgagattgcaccactacactacagcctgggcgacagagcaagactccatctcagaaaaaaaaaaaaaaaaaggacaactggtcttatcttgacaccaagaaccacacttccaaatccttgttcactcacgccaacactggcctcccgacaaatta

SEQ ID NO: 114760 - DNA, 201 bp, Homo sapiens
gaaatttgtaggtattggagtaaacctttgttcacttctttttttttttttgagacagagtctcgctgtctcgcaggctctatatatttatatatatatakagagagagagagagagagaggatggcttgcttccctctctacctaactgcatgttgaaaaataagcatttgttaatcttaaacatctgtcacatgagtca

SEQ ID NO: 114761 - DNA, 201 bp, Homo sapiens
tggaaaagcaaattatgtacactatgtataacacagtccttggctggcagtggctcatgcctgtaatcccaacactttaaaaagccaaggtggaggattgmttgaggccaggagttcaagactggcctgggcgacatagcaagaccccacctctacaaaaaattagtcaagtatggtggcacacacccatagtctcagcta

SEQ ID NO: 114762 - DNA, 201 bp, Homo sapiens
taattaatggatgtcaaacagacaaatacagaatctatgaaaacacaatacttattaatgtttaaaatagaacaggaagagtaatgacacattttgaggtaaaaaaaaaaagcttttcacaggctgtagtggagatctaaaatatgagtggaaagaatggtcccatcccaagttgatgataaagccaatatttttaatcct

SEQ ID NO: 114763 - DNA, 201 bp, Homo sapiens
atgtcaaacagacaaatacagaatctatgaaaacacaatacttattaatgtttaaaatagaacaggaagagtaatgacacattttgaggtaaaaaaaaaawgcttttcacaggctgtagtggagatctaaaatatgagtggaaagaatggtcccatcccaagttgatgataaagccaatatttttaatcctagagatgtta

SEQ ID NO: 114764 - DNA, 201 bp, Homo sapiens
taatcccagcactttgggagaccaaggtggacggatcacttgaggccaggagttcgaaaccatcctggccaatgtggtgaaacccggtctctcctaaaaayagaaaaaatagcaaaattagctgggcatggtggtgtgcacctgtggtccctgctactcgagaggctgaggcacaagaactgcttgaacccgggagacaga

SEQ ID NO: 114765 - DNA, 201 bp, Homo sapiens
aagaactgcttgaacccgggagacagaggtttcagtgagccgagattacgccatggcactccagcctgggtgacagaacaagaccctgtctcaaaaaaaawaataataataataataataataataaataaaaagtaaatttaaaaatgttgctccaggaccttttttttaaatccttttttcttttggagttgattaact

SEQ ID NO: 114766 - DNA, 201 bp, Homo sapiens
catctcaaaaaaaaaagaaagagcggtagaatgctgagggtactagccctggcccgagctctcttcaagtagttgttaaaaatcaacaataaggatatcaygaagatttactttgcctcttacttatatagcctaggaggaaatgggtttgaactcatcactttttagcaatgcagcaaatcaatcaggggctaatgtatt

SEQ ID NO: 114767 - DNA, 201 bp, Homo sapiens
tatatatatatatatatatattttggaatagtcaatgcttcccagatgttcatctaattggtttataccaaaaggttgaattgttatattgatagtaaggkggaaaataggtggactttctgttttctaattaacttaaaaatacaagtgcatattcttttacaaagtgtatggcttaagctctaaactaccctgttgata

SEQ ID NO: 114768 - DNA, 201 bp, Homo sapiens
tacaaaccctattgtgaactgcacatgcaagggatctagttgcatgttccttatgaaaatctaactaatgcctgatgatctgaggtggaacaatttcatcycgaaacctctcgccccccacccaggtccatggaaaaattgtcctctacgaaactggtccctggtgctgaaaaggttgaggactgctggcctagaggtatt

SEQ ID NO: 114769 - DNA, 201 bp, Homo sapiens
ccacttgtgtgtcatcacggtcttccctttttatccttcctgtcagtaaagaaacatcttaccattttaaaacataaacactgctcccccgacccccccctgcccctccgcccttggctccacatctcttactagttatggaccttctctttgttctgtgacatatcagaacttctgcaagagttgccctcacttgctttt

SEQ ID NO: 114770 - DNA, 201 bp, Homo sapiens
caaaaagaacaaagcaggaggtaccactctacctgacttcaaaatatactaaaacactatagtatctataacagcctggtattgatgtaaaaacagactawaaatagaacaaaatgaaacaaaataaagagcccagaattaatgccatgtatatccaactggtctttgacacgagtgccaagaacgcacactggggaagaa

SEQ ID NO: 114771 - DNA, 201 bp, Homo sapiens
aaaataaaaaataaaaataaaaaagtaaaagagctcaaacaaacaaactaatattgtacttcaagagtggtgtgcgtctaactgagttgctgaagcaaggmcagtattctcccatggctattgaagaacaagtggctgttatctatgtgggtgtaaggaggtatcttgataaattggagcccagcaaggttacaaagtttg

SEQ ID NO: 114772 - DNA, 201 bp, Homo sapiens
ggttccataatggcaaaaaaaaaaaaactagaaaattaagatcaatgaaaccaagcccaacattagtagaggaagaatataatacatatcaaagcagaaaygaacaaaaaaaagaaaaaaatacaatagattaatgaaataaataattcattttctaaaagaaaaaagaaaactttagctggaagctagactaagaaaaaa

SEQ ID NO: 114773 - DNA, 201 bp, Homo sapiens
ccttaagctcaccttctttacttgtatcaaatgatgactggtatactggtctcccatccctttgcttgtggcaggagatggcttaaataaataacttaaayttaaaaaaataaaataaaataatgctttgtctttaactcagaagtttcgcttctacgaatttatccttagtaaatgatcatggcaaagatttagcttaaa

SEQ ID NO: 114774 - DNA, 201 bp, Homo sapiens; identical to SEQ ID NO: 19223

SEQ ID NO: 114775 - DNA, 201 bp, Homo sapiens; identical to SEQ ID NO: 19224

SEQ ID NO: 114776 - DNA, 201 bp, Homo sapiens; identical to SEQ ID NO: 19225

SEQ ID NO: 114777 - DNA, 201 bp, Homo sapiens
gcacatggaccagaaaaagtatatgggaccttaagctcaccttctttacttgtatcaaatgatgactggtatactggtctcccatccctttgcttgtggcrggagatggcttaaataaataacttaaacttaaaaaaataaaataaaataatgctttgtctttaactcagaagtttcgcttctacgaatttatccttagta

SEQ ID NO: 114778 - DNA, 201 bp, Homo sapiens
atgttacccagatggagctcagagaggctggatgggccaggctgctcagggccgcccggctaaagaaacccagaaagcccccgatatgtgtcagtgacacrgatgtggccttcaggagggggtgggcgggtgcacggccgcgtttggaggcagctccctgtctctccttcctgtatgttcgtctggggtttgggtggggaa

SEQ ID NO: 114779 - DNA, 201 bp, Homo sapiens
tttttttttagtggattccttaggatttcctatatacaagatactgttttggcaaatagggatgtttttatttcttcttttctgatctggatgccttttayttttcttttcctgcctaattgccctggctagagcctccagtgcaatgttgaatagagtggcaagaatggacccccctgtcttgttcctgatctttcatca

SEQ ID NO: 114780 - DNA, 201 bp, Homo sapiens
cagctcctcctccagcctcctgggccctggctgggctctcagacccaccaggcaaccctgcggcctcctttgtgcctctgttttgcctggacctcatgggrgccccctgcccgcgtccacaacacacgggcactcagtgcagggctctccgagggcagggccaggcctgaccccatcacagcctcagcgggaccccgctct

SEQ ID NO: 114781 - DNA, 201 bp, Homo sapiens
ccctcccaggggccgctccctccccagtcatgtaggggcaccccaggactccccagcactggaacctaggcagcagacagcaatgtgtggagagcgaggcyggagtcccatgtccctgtgggggatgagagcctcagctgggccctctgtccacaacgcccactcactgagggccactggggtggggtggctctgggggag

SEQ ID NO: 114782 - DNA, 201 bp, Homo sapiens
gcctccacgcagccgagtgctagcctgttgtgcaggtgtgcgggacacaccctcccaaagacaccagctgtcctcggcggagcagggtgtgcctaggccckgctcagtgcctctgggagcctctgtgtccgcctcagcccacagacattattgaccgtgttcccaccgttgcaagggccgtggagggacgagatgaagctt

SEQ ID NO: 114783 - DNA, 201 bp, Homo sapiens
ggactgtggggaggctggcgaggccagctgtgcagctcccccttggcctctccgtgcagtgcttctcactcccaggcatgggacaggacccctggagcaarggtcttatgacccacagtcagacaaggtaggcggagaacatctttatggccagctcctccccagaaaagtggggaaggcttgagttgtatttctaggtct

SEQ ID NO: 114784 - DNA, 201 bp, Homo sapiens
gtcacggttctggaagctggaggtcaaaatgagggtgtctgtacctgacactctgcagaggacccttccttgctcttccagctgctggtggtggccgggartcttggccttcctcggcatgcagctgcgtcactgcagtctctgcctgtgtcacaaggccttctccaggtgttctcttttttgttttgttttgttttgaga

SEQ ID NO: 114785 - DNA, 201 bp, Homo sapiens
gctcagagactcctggttgctcccctcaggccagagccagaacacgcgtgggtcgtccttcatcatacacatgggagacacgcacagcgagggggcgtccygggagaccaggcagcctgagccgtccctgggtgcggggcctgtctgggctccgggctgcgcgtgagggtcccagggctgaccgggcaccagggggcttcc

SEQ ID NO: 114786 - DNA, 201 bp, Homo sapiens
agccacacccctggcctgccacctctcacattcagctgctggagggcatcctttgttggggagagtgcagatttaagcttcattcagtagtgggttggtgyctcggcgccccctccactcacctgctctgtgatcttggccacagaactgttggtgccacttgaacttgatctataagagaatcacgccctcctcataggg

SEQ ID NO: 114787 - DNA, 201 bp, Homo sapiens
ggtgtgagagcagagcttggagtgtctgtgctgtccgtggagatgggggcacatgtttggacatgggtgggggaccctggggggcagaccgcagccctgcrcttctcttcctgccaggaatgatgctgggtggtggctgtgggcaggagctggcccactggatcatccatgggcgcccggagaaggacatgcatggctatg

SEQ ID NO: 114788 - DNA, 201 bp, Homo sapiens
ggcgagggtttggcgttgtggtggttcccatggactgggcgaggctcatagcacccgacagtggatggggtgtgctgagagggtcgggggagggtaggggmcagagacagcttccgcgtgcatgatgaagagtggagggtgctggccgcagctgccgggaaagggactgggatgcggtggaatcatgcagtccccagcctg

SEQ ID NO: 114789 - DNA, 201 bp, Homo sapiens
gcagcttcggggagaggatgggaaaggagaggaggagaggcagggaggggtgggggggagatgagtctccagcctgaaggtcgccgaggtgagcacttgaygtagcagggctgtgtcctggtgatatcctgtcagcctgggattctgccgagacctctggctggagtgcccagactctgccatggggtccgctttccctgg

SEQ ID NO: 114790 - DNA, 201 bp, Homo sapiens
ccacggctgtgcatagcctcagtgtggggcaagtggcaactctcagcaaccacggggttacgcttatctgggtgtaggaggtgcgggtactgctggagcgkggtaggggggacacggctgctgtctctgcaagaggaagaggataaccagcctgagagcaagagtgtgagtggggggtgaggtgggggtggggttgtcgct

SEQ ID NO: 114791 - DNA, 201 bp, Homo sapiens
gctccatcctccatccctaattcctcccaaggcctgcctttgaggtgcctttccagggaagaagcaaggcagagttggcctaggtccctgcagctgccccytcctgtgtatgtcaagattcaagcgaagctagggggtgttacttacaaagccagtccagatcccagcgtgcctctggtaccggaggcacaggaaaagggc

SEQ ID NO: 114792 - DNA, 201 bp, Homo sapiens
tctctctctgccttccagaacatgcccaatgtccgtgatcatgatgcctctgtctacctccgcctccaaggggatgccttgtctgtgggtggctatgaggycaaccccatcttttgggaggaggtaagatgccagggccctgggataatgggagggagttggggctgcatctcagcatggagagggcctctttcaggaagt

SEQ ID NO: 114793 - DNA, 201 bp, Homo sapiens
gcttcaacagcgcaggtgagtccgggcagcagccctcctggcccccaagagggaggtcctgtcattcccagagctctgggggaggcgggcgcaggagcacygtggcccccgacagtggtggggacaggagaggctggggagtccagccccttctgcttcccagagagtgcacctgtgccagggtccagtccagcagcagtc

SEQ ID NO: 114794 - DNA, 201 bp, Homo sapiens
atgagacccagtgcaagccacttcctcgtctctaatgcagggtgacggggaggggctgtggaggttctgggagcagggagggcatttgtactggtgaggcrcccagcatggggtctgcacatggaaacgctaagtcatccccagccgaggcatggactggggtgctggtggccagagccggtgacggcagcctatcccgat

SEQ ID NO: 114795 - DNA, 201 bp, Homo sapiens
aggtttatttctcgactctcaattctaatccattgatctgtaggtctatccttacttagtacctcactgtcttgattatgtagctttgcagtaagtttggwatcaagaagtgtgaatcctccaactttgtttttccttttcaaaattgttttgggtattcttggtcccttgcatctctgtatgaactttagggtcagctat

SEQ ID NO: 114796 - DNA, 201 bp, Homo sapiens
ggtgtgagccctcccctcacccattatcaggggcatgggagacagccctgtaacaaaagactggttcacaagagaaaagcacaccagatagatttaatcaragctttatgtgacatgggagccatcagaaagggggacccagagacccagggaagacggttcctatgcttaaggtcggtgaagaatggggagccgtgtgga

SEQ ID NO: 114797 - DNA, 201 bp, Homo sapiens
atgcttaaggtcggtgaagaatggggagccgtgtggacaggtgttggacggcaggggatgcctgtggggatggactgtggggaggctggcgaggccagctstgcagctcccccttggcctctccgtgcagtgcttctcactcccaggcatgggacaggacccctggagcaaaggtcttatgacccacagtcagacaaggta

SEQ ID NO: 114798 - DNA, 201 bp, Homo sapiens
agctgcctcccctctcctggggctggccctttcctggccctggcagcctccccaagcctaggcagtggctgcctgggtcagcctctacctgtgtggcctargagccaggccaggccaggtgcttgctgagctgacccaaaggctctgcttccgggatgacatcccccagaggaacaggccaggccaaacacagcgtggggg

SEQ ID NO: 114799 - DNA, 201 bp, Homo sapiens
acggcccatccctgggggaaggctgaggatgaggggaggtcagagcccgggttccgctccaaattgtttctcgtggctgcagctggggaatgcacgcaacrgcaccaccctgtcccgaggagagagaacctggctgcgctccctgtcccgaggagagagaacccagcacccctccctgtcccctgtgtgcttcccccgccc

SEQ ID NO: 114800 - DNA, 201 bp, Homo sapiens
atgctgacaacggtggggccagcagggcttcggccctggctggtggggcactgtggggtgggctcttccagtgtggagatgaccttgggcaggggctgcargttccattcaccctgcaaggaagggggcaggaggtaaactgaggctggaggggcaagatgggtggctgcttccccagccacttcccagccacctcttgga

SEQ ID NO: 114801 - DNA, 201 bp, Homo sapiens
ccagggggccctctcctgggcgcatggcacctgtgcagcccatttctgtctgctcaggaagctccctgggcgtggcagcctcgtgcagcaggacgctgtcyaccctgatcagacacagccacacacattggggcctgggggctccagctggcaggtgagggctcaggtctcacgtgtggttcatctttcttcttgggtggc

SEQ ID NO: 114802 - DNA, 201 bp, Homo sapiens
gcgtcctcacgtggagaacagaaactagggtgacaccaaagatgtttacgaaacctccttccagcctcgtcctaatctgatggacaggtgggacccaaacrgtgactccaggctgaggatgcaggaggtgccctcaacatcaccccagcccttccattcagggacccctttgcatagctgccgccgtgataacccattgca

SEQ ID NO: 114803 - DNA, 201 bp, Homo sapiens
gtgggccggatggctggagtcaaggtcccgctggtggccatgcaccatgcctatgtcgtcaccgagcgcatcgaggggattcaggtaggtggacagccccrggttccgtgtcagtctgtggggggcacagagacctggctctgaatcccagcttgaacccaggtggtgtgacccttgtgggtcccctcactgccccaagcc

SEQ ID NO: 114804 - DNA, 201 bp, Homo sapiens
gcctcctgccctctcttctctcctgtcctcaactcctccctccagggatggtggctgggagcttcctgccactttgttactgacccccctctttccatccrttcatcatgcaaccctcccttactcattcctctctctgtccagccctccatctctccatccgtctctccatccatctactcccgtatctatccatgcctt

SEQ ID NO: 114805 - DNA, 201 bp, Homo sapiens
ggggagtcccgtgggattttagaagcagttcctctcaattccaggtcattgagaactgcccagtgaccggcattcgtgtgtggacggatgattttggggtrcggcgggtcgcgggtgtggagactcagcatggttccatccagacaccctgcgtggtcaactgtgcaggtgcgagtggcatttctcctgactcctgtgtgg

SEQ ID NO: 114806 - DNA, 201 bp, Homo sapiens
gaaactgaggcagcacagacccggctggggcctcagcacagacccggcttccttctccctctcgcaggctccaccgtgtacacgtgcatgctcaaccaccrtgggggcaccgagagtgacctgactgtcagccgcctggcacccagccaccaggcctccccgctggcccccgcctttgaaggtatgggatgcctctgtgca

SEQ ID NO: 114807 - DNA, 201 bp, Homo sapiens
gggatggtttcatccccgaggcccagctccggtgagtagtgcctgctgggctgtgctgctgggaggccctgccctgacaacccccttgcccctccgtgtgycccgtccttgcccctccgtgtgccctgcctccccaggtggttccactgtcgtgatcagttattctgcacacgggaagccgagccctgccgacttgccccc

SEQ ID NO: 114808 - DNA, 201 bp, Homo sapiens
gagtggggcggtgctgctggagcgggagcggctgacctccgggaccacctggcacacggcaggtagggaccgggggccaggtaggggcagggaaggatagsacatagcgaggggccacagcccattgctagctgggacagttcttggttcacaacaaccagcctggggaagagaccctggggaagggtgcatggccagttt

SEQ ID NO: 114809 - DNA, 201 bp, Homo sapiens
tacctccccttgtggccccgacccccacttctacccagagcttggcgctccctgtcttttctgtgggctggcagagacctatcctcaccaaggttgccccygggcactgacagagcctgctgcataccaggcccttaatacatacacacagaatgaatgaatgaatgaatgagtgaatgaatgaatgaatgagtgaatgaa

SEQ ID NO: 114810 - DNA, 201 bp, Homo sapiens
cggatggctggagtcaaggtcccgctggtggccatgcaccatgcctatgtcgtcaccgagcgcatcgaggggattcaggtaggtggacagccccgggttcygtgtcagtctgtggggggcacagagacctggctctgaatcccagcttgaacccaggtggtgtgacccttgtgggtcccctcactgccccaagcctcagtc

SEQ ID NO: 114811 - DNA, 201 bp, Homo sapiens
ttttttgtgtgtttttatatattgaccttgtatcctgcaacctcgttgaactattttattagttctaacagttttttttcttttttttcttttttttttttagtggattccttaggatttcctatatacaagatactgttttggcaaatagggatgtttttatttcttcttttctgatctggatgccttttatttttcttt

SEQ ID NO: 114812 - DNA, 201 bp, Homo sapiens
ggcaggtgtcagacaagtttgccttcggcctctttgacctggactgggaggtgttcacccagcacattgaaggcgccatcaacagggtccccgtgctggakaagacaggaatcaagtccacggtctgcggccctggtgagtgacagcctcggagctggggtgggcgtccatgggtcctttggtctgatgactgttagtagt

SEQ ID NO: 114813 - DNA, 201 bp, Homo sapiens; identical to SEQ ID NO: 19306

SEQ ID NO: 114814 - DNA, 201 bp, Homo sapiens
caccatgcctatgtcgtcaccgagcgcatcgaggggattcaggtaggtggacagccccgggttccgtgtcagtctgtggggggcacagagacctggctctraatcccagcttgaacccaggtggtgtgacccttgtgggtcccctcactgccccaagcctcagtcacctcatctgtgaaatggggattgtaacatggggta

SEQ ID NO: 114815 - DNA, 201 bp, Homo sapiens
gaggggggtactccatgcagagatgccagcaaagcctgactcccttacaacctcacactggctcccacttgtgtgtgaagaggaggtgaggcttgggcggrcggggctggcagccctgggaggttaagaattgcccacacctgcattcacagctgtgccgtgtcggcagttaggagggcaggtggcggggtggggggttgt

SEQ ID NO: 114816 - DNA, 201 bp, Homo sapiens
tccatgcagagatgccagcaaagcctgactcccttacaacctcacactggctcccacttgtgtgtgaagaggaggtgaggcttgggcggacggggctggcrgccctgggaggttaagaattgcccacacctgcattcacagctgtgccgtgtcggcagttaggagggcaggtggcggggtggggggttgtctgcaggagca

SEQ ID NO: 114817 - DNA, 201 bp, Homo sapiens
tgactcccttacaacctcacactggctcccacttgtgtgtgaagaggaggtgaggcttgggcggacggggctggcagccctgggaggttaagaattgcccrcacctgcattcacagctgtgccgtgtcggcagttaggagggcaggtggcggggtggggggttgtctgcaggagcagcggccagggaggggcatggggctg

SEQ ID NO: 114818 - DNA, 201 bp, Homo sapiens
gaatctgacataggagcagagccaaggcctgagcccagagtctcagagcccagggacagcttaggaggcatccacgagggggttccttcctggggcctctrggccagtcgcaagtccggcttgggtagggtctgaccctgcggtcgtccgttgccttgaagggccccgcttgggttcatgctgtgctgtcagtgccttgag

SEQ ID NO: 114819 - DNA, 201 bp, Homo sapiens
ggttcatgctgtgctgtcagtgccttgagactcttcatggtctttgagcaaggtccccactgggtcccgcactgggttctgtagccagttctgaagggaakaaaccgttcatttccaccatctccccgaaagcttgctctagtggtggaacatctgttcaaggcgtcggaagagggggctcctgcaggaaggaggaggcgt

SEQ ID NO: 114820 - DNA, 201 bp, Homo sapiens
cagcgcgggaggctgctgagggttttggttggcagccccggtggcatcagcaaaggtacagcagaaaccgacaaaggggagccctgtcctgaaggacagtratgcctggtggggctggagaagccatggagagctcaggaggcagatggtccctgtggtgtgctggtaacagcttaacaaccagctctctggggcagaggg

SEQ ID NO: 114821 - DNA, 201 bp, Homo sapiens
cagccaggcagccccggctgtcccgttcaatcgtacactgacaaagcggccaggaatgagacccagtgcaagccacttcctcgtctctaatgcagggtgayggggaggggctgtggaggttctgggagcagggagggcatttgtactggtgaggcgcccagcatggggtctgcacatggaaacgctaagtcatccccagcc

SEQ ID NO: 114822 - DNA, 201 bp, Homo sapiens
gtggggaatcagcatttctccttgccaggcacggccaatggcctttggcctccaggaaagagcagggaagtcccaggcccccgtgacttagggagcgcctsggagggcaggcagagctctcattccaggatggtggagctcaccaaggtcagggtgggagccgcaggcctggcccctggccatgttgcctggaggtcccat

SEQ ID NO: 114823 - DNA, 201 bp, Homo sapiens
cagtctcctgctcattggtgtaaaatcactggtgttgtaaaaagcacatcacggctgcataaaatactgctcattgctcggtttccaaccatcactgcgcrtgggtttcagcacaggggctgagtgcagacctcgcttctagcagtttccaaccatcactgcgcatgggtttcagcacaggggctgagtgcagacctcgct

SEQ ID NO: 114824 - DNA, 201 bp, Homo sapiens
ccacgcccacccggaagcaactgcctacagccagggcaggcaggcgcttcttggtcccccactcaaagcccctggtaccaacacttcccatgtgccagccrtgctcttccagaacgcacccaacagcccactgcagataaggaaatcgaggccaaagagagaggccatctggccaggtcacatgttgttaaaggcagaaag

SEQ ID NO: 114825 - DNA, 201 bp, Homo sapiens
ttgggcggttccccagcgtgttgggcacccagcttgggcgtcaggcagctcccctgggtgttgggcacccagcttaggcattgggaagctcccccttcacragcccctccctgacgcccccacctgagggtgcagagggctgcagtgctgatgggcagtctgctcgggggggcggtcgccccagggaacctcctggagttg

SEQ ID NO: 114826 - DNA, 201 bp, Homo sapiens
gaaatacaatagttttttgtgtgtttttatatattgaccttgtatcctgcaacctcgttgaactattttattagttctaacagttttttttcttttttttyttttttttttttagtggattccttaggatttcctatatacaagatactgttttggcaaatagggatgtttttatttcttcttttctgatctggatgcctt

SEQ ID NO: 114827 - DNA, 201 bp, Homo sapiens
gttcttgaggaagaagcacaccccaaaggcccccgtggcattcccacctgtctggaacttttcagatcaagaaggagtgcctggcctgcagaggggccgcygctgtgtttgacatgtcctacttcgggaagttctacctggtggggctggatgcaaggaaggctgccgactggctcttctccgcagatgtcagccgacccc

SEQ ID NO: 114828 - DNA, 201 bp, Homo sapiens
ttgaccttgtatcctgcaacctcgttgaactattttattagttctaacagttttttttcttttttttcttttttttttttagtggattccttaggatttcmtatatacaagatactgttttggcaaatagggatgtttttatttcttcttttctgatctggatgccttttatttttcttttcctgcctaattgccctggct

SEQ ID NO: 114829 - DNA, 201 bp, Homo sapiens
ctgtgcttgggaagcatgtgtcacagtgtgcacctgagctgagaagggcttggtgcgggctggaagagagggaggggaggctcagtacaggtgtgttggamacagcccccgttctccacgttcttgaggaagaagcacaccccaaaggcccccgtggcattcccacctgtctggaacttttcagatcaagaaggagtgcct

SEQ ID NO: 114830 - DNA, 201 bp, Homo sapiens
gctggatgcaaggaaggctgccgactggctcttctccgcagatgtcagccgacccccaggtatggagcctgaggttggggggcatgttcctgtcactccawgggcacagcctcaggcactgagatgagctggcaagccaccctgtcccctcgggcaccctgagcacactgctccttgccctcacctggctttgagctcccc

SEQ ID NO: 114831 - DNA, 201 bp, Homo sapiens
tgtgattgtgccactgcaagccgccctgggagacagggtgaccttgtctcaagccaaaatgaaacaaaacaaaccaaaaccaatatccttgcgtggctggragagacggtgtcgtgcagcccagaactggccatcgctgtggtcatggttagcaccaggggctttgtgtgctttcttgctggttcctcacagtggcccgtg

SEQ ID NO: 114832 - DNA, 201 bp, Homo sapiens
cctcatggatccatgagctcgttccttcgctcgttccctcaacagtcatcacgtgagcctgcactgtgtggaagcaccaggtagccagggtcgggaggagktgaaggaggccggtggggcttcagggaccccacagtgggctgtatgtccagacgggggcaggaagggccccgtaacacctggagggggacatgcaagggg

SEQ ID NO: 114833 - DNA, 201 bp, Homo sapiens
agctggcaagccaccctgtcccctcgggcaccctgagcacactgctccttgccctcacctggctttgagctccccccgtccggccccctttgccccatccsaggccccaggccctcattactttcctccacctctccctcctgccttccttctcctccctacctctgccttcctctctactcttccagaaaggatgtgtgg

SEQ ID NO: 114834 - DNA, 201 bp, Homo sapiens
ggaaggccatgtgaagccgccgagccgggatgagcaaggcttcctggaggagagggccggcctgagcttggaaggatggggaggagccactggctacaagsgtgtagaggtgagaaccagtgtgacctgcccatcgctggtcgtctctgggtcattcagctgaaatggcatctctgagctgagaggagtgttgcctgtaag

SEQ ID NO: 114835 - DNA, 201 bp, Homo sapiens
ccgaggggtccctggctcctccggaaacaccctccatgacaaggttaaggcttatccatgcgtgcattccttctataaacacctgccgggctgtgttcccyacccatgagaaaccaggaccggggaagaccctcggctgctggctcatgcacacagccacagaagagtcttgggcaaaaggacggctgagcaggtgtgcac

SEQ ID NO: 114836 - DNA, 201 bp, Homo sapiens
tgtgcaccttggaaagacccctctgactgtgcttcggaggctgggagaagggactgggggtgggggacagggaggaaggacatcatgttagcagccaccartggagcacctgtgacttgccaagcctgagccaacatctcccatccccacggtagccctttgaggtggtcataattgttcttatttttactgatgcagaaa

SEQ ID NO: 114837 - DNA, 201 bp, Homo sapiens
ttgcgtgggtctggcagcgagaaacacaggcccggaagaatcccaggggcacagataaccccaggcgtctctctgtctctctctatctttctcttcctctygttttaattagcctggggagccggtactccccacgaagccctattttggggaagatgtgcaggcaaggacatcttggatctggtctgtcggctggatggg

SEQ ID NO: 114838 - DNA, 201 bp, Homo sapiens
tggagtgaagtgcagccccggggagaagcagatagagccccaggggccggggcagcgtgcagggtaggagcacacagccgtgactcactgcccccaccccscagcttgcgtgggtctggcagcgagaaacacaggcccggaagaatcccaggggcacagataaccccaggcgtctctctgtctctctctatctttctcttc

SEQ ID NO: 114839 - DNA, 201 bp, Homo sapiens
ggatgtggattgtggattgtggacctggtccagatgctctgttcctcctggcctgtgggcttcaagggcattctatggttagataaccactctggcctcasttccccatctaagaatcgcgagtcccgttagagctatctccaagtctggcctcccccaggggtcctgctagccctagcgttaccccgttggaaggtggct

SEQ ID NO: 114840 - DNA, 201 bp, Homo sapiens
gttgttcagagcttctttcctgccctccctgggcctagaaatagttccagccctcccaaggtgctccctgggccatccccaaacccagcccaggttacctycccaatccccccttttttaaaggtcttgctgtgttgcccaggctgcagagcagtggtgcgattttggctccctgcagcctctacctcctgggctcaagcc

SEQ ID NO: 114841 - DNA, 201 bp, Homo sapiens
tcggagctggggtgggcgtccatgggtcctttggtctgatgactgttagtagtgatgccccgtgagaccagcctgtgtcacacaggggacccagggctgtycccggtccctctcgctgcttggctccagcagccctgggtactaggtgtggcctttattcccctctacgggcgagaggcctgggcttcacaagggccatca

SEQ ID NO: 114842 - DNA, 201 bp, Homo sapiens
ggggtcctacaacgagaaggaccatctcgagcccgtgaccctgggtggaggtgctggcccaccacggggcatggggaaccaagtccccacccagttctggmtgatgccaaggcctctctctctgccttccagaacatgcccaatgtccgtgatcatgatgcctctgtctacctccgcctccaaggggatgccttgtctgtg

SEQ ID NO: 114843 - DNA, 201 bp, Homo sapiens
ccctgggtccccctagctgggcaaggcgtatggtgtggaatcccatgtgctgagcccggcagagaccaagactctgtacccgctgatgaatgtggacgacytctacgggaccctgtatgtgccgcacgacggtaccatggaccccgctggcacctgtaccaccctcgccagggcagcttctgcccgaggagcacaggtact

SEQ ID NO: 114844 - DNA, 201 bp, Homo sapiens
gctggcacctgtaccaccctcgccagggcagcttctgcccgaggagcacaggtactgatggccgcctggctctgggtcccctgttcccagcccactcctcytgccttagaaccctgagagcagaagggaagagaacaagagccattctctgactgctgtgtgactttgggccagtgaggacctctctgagccttctggtcc

SEQ ID NO: 114845 - DNA, 201 bp, Homo sapiens
ctacagatgggggttctcagggccaaggcagatcagggcaggtggtaattctacagatgatggttatcggggccagggcagatggggcaggtgctattctrtagctgggggttctcaggatgagggcagataggggaaggtgataattctacagatgggggttctcagggtgagggcagatggggcaggcggtaagtctat

SEQ ID NO: 114846 - DNA, 201 bp, Homo sapiens
cctggcggccaggtctgcgtgtgtctggaggacgactgtggccctcaggagcttgaagttgctgggtggccggtgggtccagatcccatgagatgaggccrgggactcgaggagcgtgtggaggacggagcggccaggaatcctgtcctcagtgacctctgcctcctcttgagggccctggggaggtgtgggccaggagag

SEQ ID NO: 114847 - DNA, 201 bp, Homo sapiens
cagcactgagcgcagccccactggcttctcgtccctctccctccttgtcctcccggcagctctctggagtggccagtgtgggcctggcggccaggtctgcrtgtgtctggagtggccagtgtgggcctggcggccaggtctgcgtgtgtctggaggacgactgtggccctcaggagcttgaagttgctgggtggccggtgg

SEQ ID NO: 114848 - DNA, 201 bp, Homo sapiens
ggtgagctggggctaaccatcttcacctagagaccctgatgcccagcactgagcgcagccccactggcttctcgtccctctccctccttgtcctcccggcrgctctctggagtggccagtgtgggcctggcggccaggtctgcgtgtgtctggagtggccagtgtgggcctggcggccaggtctgcgtgtgtctggaggac

SEQ ID NO: 114849 - DNA, 201 bp, Homo sapiens
cacccgggcccatggcagcgcacctggaagcggacggctgaggacttgttgcagtgcatggagatgggcgcgaagctgtacagggccttcagtacgtcgcrgttgaaggagttccagggaacagaggtgaactgctgagacacggacgcctgagggcaggtgcagacatcctcgttgttgaacctggtggggacaaggaac

SEQ ID NO: 114850 - DNA, 201 bp, Homo sapiens
agagggttccccccacaagtcaagtgaaagaacttgcccaactttcaagttctccaagtcaaggcatgggtgggtctagttttctggcgctgtggtcatcyggtttccctgacagtgtcgcaggggacctgctgctggcagaaatagtgtccccagctcccctctgggaggaggggttggttggagtggggtgggaagcac

SEQ ID NO: 114851 - DNA, 201 bp, Homo sapiens
agggcagccacagcaaaaggccacaagtggagaggtttcagcagaacttttttttccccacatttctggagactgggaggtccaagatcaaggtgtcagaygatgggttcctggagagggctctcctggcttgtagtcggccaccttctcactgtcctcatgcagcggggagagggccctggcgtcgcttcctcctcctat

SEQ ID NO: 114852 - DNA, 201 bp, Homo sapiens
cccacccacccacccacccaacagctcatgcgtccccatcttcatgagtgttctgggctgccagaacagaggatcacaaacctggtggcttaaaacaacamcaatttattgtcacggttctggaagctggaggtcaaaatgagggtgtctgtacctgacactctgcagaggacccttccttgctcttccagctgctggtgg

SEQ ID NO: 114853 - DNA, 201 bp, Homo sapiens
tggcctgcagaggggccgccgctgtgtttgacatgtcctacttcgggaagttctacctggtggggctggatgcaaggaaggctgccgactggctcttctcygcagatgtcagccgacccccaggtatggagcctgaggttggggggcatgttcctgtcactccatgggcacagcctcaggcactgagatgagctggcaagc

SEQ ID NO: 114854 - DNA, 201 bp, Homo sapiens
gtggacctggtccagatgctctgttcctcctggcctgtgggcttcaagggcattctatggttagataaccactctggcctcagttccccatctaagaatcrcgagtcccgttagagctatctccaagtctggcctcccccaggggtcctgctagccctagcgttaccccgttggaaggtggctgtcttatgtatatttgga

SEQ ID NO: 114855 - DNA, 201 bp, Homo sapiens
ctacctcctccaagtctgcagcctgagcgtctcacacccatgtcaggcagaggactttggggccgaggtgcccagttggagggttaggtcagggaacagarcggggtggtgtctgggaagagcactttctgcagtgggctgggaggaggccggaatctgctccaatccggctctgccttgggcaagttactctactcttct

SEQ ID NO: 114856 - DNA, 201 bp, Homo sapiens
tccccgtgctggagaagacaggaatcaagtccacggtctgcggccctggtgagtgacagcctcggagctggggtgggcgtccatgggtcctttggtctgaygactgttagtagtgatgccccgtgagaccagcctgtgtcacacaggggacccagggctgtccccggtccctctcgctgcttggctccagcagccctgggt

SEQ ID NO: 114857 - DNA, 201 bp, Homo sapiens
ttccaaaaagagagggtcctcaggccaatttggagggagatagccatggtcatagtagtggcgcttgcctaagtgtgggggactcagcgggcctcagcccygccccacatgatctcattccacagagggatcctctctcatcacaacctatagtccaggagtctgagccccagcgaaggccaccagtggcaggcggctctg

SEQ ID NO: 114858 - DNA, 201 bp, Homo sapiens
accaaacttgccttcctaggataaattccagttggccatggtgttttgttttgttttgttttgttttgtgtttttgagacagagtgagactctgttgcccrggctggagtgcagtggtgtgatcttggcttactgcaaccttcgcttcctgggttcaagcaaattctcctgcctccactcctgagtagctgggattacagg

SEQ ID NO: 114859 - DNA, 201 bp, Homo sapiens
aacaccatagggcccttatttccctgggtactcagcacagcccccagcgtgtcccctctgcaccccacccagctctgattctctccccagctccctgtttygctgaggcctggagcccccatggcctcactgagccgagccctacgtgtggctgctgcccaccctcgccagagccctacccggggcatggggccatgcaac

SEQ ID NO: 114860 - DNA, 201 bp, Homo sapiens
cctgagccaggtatttataggcgatcagttgggttccagccaaccagatgcaggcgaggaatgcgtgtgcctgcgcagtcagcggaacctctgggttgaargcagttgtgagggccgatgaggacaagggccagagctgcagacccgggccccgggtgcgagagcgggcgcctgccgctgcccaaagaccctcctcaccac

SEQ ID NO: 114861 - DNA, 201 bp, Homo sapiens
tgttgccaaggctggtctcgaactcctgacctcaaatgaccctcccgccttggcctcccaaagtgctgggattacaggcatgagccaccacgtccagtctrgccatggtgtatcatctctcttatatattgctggattcagtttgctattgttttgttgggggtatttgcatgtgtatatataactgtcactatttttccc

SEQ ID NO: 114862 - DNA, 201 bp, Homo sapiens
gtgatgtttcccacggcgtggccttggtgcaggcctctgtccagactcagggcttggtgggcactcttgggcccttccatatgaatgcgtgattttcaatyggaggactcttcttgggctgttgcttggacatttttctcgactccatttttctctgtcttctctttctggaaccgctgtaaaatggatgttgaactttca

SEQ ID NO: 114863 - DNA, 201 bp, Homo sapiens
ggagcacccaccctgttggtcccagacccctgccaagcagcctggctggtggcacccagggcacacaggctaatgccgtcctcagcccagccgtcactgaygtggggcttccaaaccccttcagtgtgccagagtggacggccgccaccagcaggaccagccaccggcccccaagggctgtagcactaatgcaatgttctg

SEQ ID NO: 114864 - DNA, 201 bp, Homo sapiens
gtcaagtgaaagaacttgcccaactttcaagttctccaagtcaaggcatgggtgggtctagttttctggcgctgtggtcatccggtttccctgacagtgtygcaggggacctgctgctggcagaaatagtgtccccagctcccctctgggaggaggggttggttggagtggggtgggaagcacccccggggagtcccgtgg

SEQ ID NO: 114865 - DNA, 201 bp, Homo sapiens
tgatcttggccacagaactgttggtgccacttgaacttgatctataagagaatcacgccctcctcatagggcatgacaggcttagcacggggcttggcacrcagtaggtgctccaaaaatgggggcctttgctatgtcactctctgagctgcccaagggcgggacctccctcacattcatcttggtccagttatttcctgc

SEQ ID NO: 114866 - DNA, 201 bp, Homo sapiens
ctccccggcaaggggggaggctcctcctgtgtctcgtcctcatggcggtggcctctccgacccacacagcagggcctgtggcccgggccactccccgtgcrttgtggggtggctgtcgaggcaggacggcttggagggagcccggcctccgggtctctccagcccactctgctcccggctgctgctgctggtggacagcct

SEQ ID NO: 114867 - DNA, 201 bp, Homo sapiens
ctgtggtggaggctggtgggaatgggtaccagtgctgtgtggcccagggagggaggcctcctgcacctgcccactgaccgacacttgccacctaagtggcytgaatggaatgggacaggcaaggtggggggtcctctcatccttggggaccaatggcatcccacagaactccctccagggcctggaagggtctgacctcca

SEQ ID NO: 114868 - DNA, 201 bp, Homo sapiens
agtcctgctgtgaaacctgggacccagaccctcgggagcaggggacgcgaggccttaaggccagctgaggggtagcatttgatccagatttacagaaatcsaaatccccttcccggggctgcgtctcaccagtcccctctggtgcacccaccttccatccccatggcaacccacagcccaggccaggctccagagctccag

SEQ ID NO: 114869 - DNA, 201 bp, Homo sapiens
ctctacctccccttgtggccccgacccccacttctacccagagcttggcgctccctgtcttttctgtgggctggcagagacctatcctcaccaaggttgcycccgggcactgacagagcctgctgcataccaggcccttaatacatacacacagaatgaatgaatgaatgaatgagtgaatgaatgaatgaatgagtgaat

SEQ ID NO: 114870 - DNA, 201 bp, Homo sapiens
ccactcctggttttgatgttttctattcatcccttttactcactcgaagcccgagccctgctgtccaggccaggtgctgggctggctctggggaccagcgwagtcctagtaggccagccctatctgcgtggagccacggttgggtgtgcatcatgcagccccccattctcctccaggccgctgtggacgcgtccccaccct

SEQ ID NO: 114871 - DNA, 201 bp, Homo sapiens
gcaggggccctcccaaatatacggggctcgcttctggaaacagcaaagtccactcctggttttgatgttttctattcatcccttttactcactcgaagccygagccctgctgtccaggccaggtgctgggctggctctggggaccagcgtagtcctagtaggccagccctatctgcgtggagccacggttgggtgtgcatc

SEQ ID NO: 114872 - DNA, 201 bp, Homo sapiens
aacattgtcgattcacctcactcctctcacccctggaggatgtgggtttccaggctgacagttatgttcgaagctctgtgcttggaagatactgttctacrgtagattagcatctactagagccacgccaaggggtggtttcagggtttcaggcctctctctctgtcttatgtatttgcgatggagtctcactctgttgcc

SEQ ID NO: 114873 - DNA, 201 bp, Homo sapiens
gtccaggccaactggctgggaacagcgcctggccactgggaagacgggcaacaggcagccctgtgggtcctgagcccttgcccccagccagggccaagcargaaggggactctgttcccagcagggtccacgctatcacaaaggacccctgccccaaccctttatttgcagagctacatctgataataacagacatgtcac

SEQ ID NO: 114874 - DNA, 201 bp, Homo sapiens
ggctggagtgcagtggcacgatctcggctcactgcaagcaccacgttctgggttcacgcattctcctgcctcagcctcccgaatagctgggactacaggcrcccgccaccacgcccagctaattttttgtatttttagtagagacgaggtttcaccatattagtcaggatggtcttgatttcctgacctcgtgatctgcct

SEQ ID NO: 114875 - DNA, 201 bp, Homo sapiens
tcattcccctcttgtccaggccaactggctgggaacagcgcctggccactgggaagacgggcaacaggcagccctgtgggtcctgagcccttgcccccagycagggccaagcaggaaggggactctgttcccagcagggtccacgctatcacaaaggacccctgccccaaccctttatttgcagagctacatctgataata

SEQ ID NO: 114876 - DNA, 201 bp, Homo sapiens
ttgccttgctcagtctccctctcctccagccccagctaagtctcacccctcctccatccactctgcgtcctccagggttggttggaatctcccatcctctrctgctgcctctgcctgttctctcatctttgtcggttatatgttttgcttccctcccttcctcccttgctctcttcctcgatccattccttcttccttctt

SEQ ID NO: 114877 - DNA, 201 bp, Homo sapiens
ggctccagacatccgcctgccttggcctcccaaagtactgggattacaggcgtgagccactgcacccggcctcagctcactctttctgccccatcgtcacyttctctggagccttccttgtctctcacccagatggctgctccggcctctgccctctgccctgataacccaggccctccacgtagggccctgcccctctag

SEQ ID NO: 114878 - DNA, 201 bp, Homo sapiens
cttccttgtctctcacccagatggctgctccggcctctgccctctgccctgataacccaggccctccacgtagggccctgcccctctagcctgcctcctcyaccctcccctgcagtggccctgccaccttctgcccctcaaggagccctgcctctcctggccaggctcttagcccaggctccccgtggctctctgccccct

SEQ ID NO: 114879 - DNA, 201 bp, Homo sapiens
cctcatctagagtctaacatggtgtggtgctggggtgccaacagtagcagctggcacctcagtgacgcgtggccctcagttcatcgtattttctttacgasaccgtctgttttttgcttatttaagtatttgctccctccctccgtcagctcctcgagggctgggacatgtcctgctcagcgctgcctcccagggccaagc

SEQ ID NO: 114880 - DNA, 201 bp, Homo sapiens
ttaatactagtggatgtaaactcaaatagccccctgtgctggtagaggctgggctcggtggctcatgcctgcaaccctagcactttgggaggccgaggtgrtaagatcgcttgagtccgggagtttgagaccagcctgagcaacatagcgagatcctatctctaaaaaaacaacaaaaaaatttttcaattagctcagcac

SEQ ID NO: 114881 - DNA, 201 bp, Homo sapiens
atctagagtctaacatggtgtggtgctggggtgccaacagtagcagctggcacctcagtgacgcgtggccctcagttcatcgtattttctttacgagaccrtctgttttttgcttatttaagtatttgctccctccctccgtcagctcctcgagggctgggacatgtcctgctcagcgctgcctcccagggccaagcccag

SEQ ID NO: 114882 - DNA, 201 bp, Homo sapiens
ccaggggctttgtgtgctttcttgctggttcctcacagtggcccgtggcatcacagatgagggactggggcttggtagggttcaggggtaagtacagggcstgggactagaaccggggcctctgactgggaagctcgtggacccctggaactgggcttcccctgaggttgctgagcccatagcctgggtcagagcccttca

SEQ ID NO: 114883 - DNA, 201 bp, Homo sapiens
cagctgccattgtgggcgtgggaggaggggctgctggggtgggagcacagccagtccccaaacagcaccccacatgtcccccaccaactctagaaagcctstatcctgggggccagagcccgtcccttctgagatggtggtagtgtccggagccagcactccatgggacctggccccaggcaggaggctccctcagagacc

SEQ ID NO: 114884 - DNA, 201 bp, Homo sapiens
gagtatgtgcactgcaaaagggactccaggcctctctctccttctttcagaatccttcacgcccgaccacaagcccctgatgggggaggcacctgagctcygagggttcttcctgggctgtggcttcaacagcgcaggtgagtccgggcagcagccctcctggcccccaagagggaggtcctgtcattcccagagctctgg

SEQ ID NO: 114885 - DNA, 201 bp, Homo sapiens
gggactggaggtcctgggggacaaatctgggttctgttagcagataaacaatctggcgatgactgtcagggaggaggcggccagaaactagggagatcccrgcggctctgctctcacctcccctctccagaggctgcacaggggcaggaagcagggccggctgtgtctagcttgcttcctgcctctgtggtgcaaagctgc

SEQ ID NO: 114886 - DNA, 201 bp, Homo sapiens
ggctgcgggttctcccaccttgctgaggcttggcataggtgctgcttctgtctggtttggctacaggacggggagacgaccaggtgggaacacgtcccctyccatttgaggcccagcagccttgcccccacccgcacggccactccagcaagctgctgggacttgttctcagacaggcggctccagctgcctcccctctcc

SEQ ID NO: 114887 - DNA, 201 bp, Homo sapiens
cccatttgaggcccagcagccttgcccccacccgcacggccactccagcaagctgctgggacttgttctcagacaggcggctccagctgcctcccctctcytggggctggccctttcctggccctggcagcctccccaagcctaggcagtggctgcctgggtcagcctctacctgtgtggcctaggagccaggccaggcca

SEQ ID NO: 114888 - DNA, 201 bp, Homo sapiens
ttcactgagaggtgggtggattttgtgccctcgattgccatcccctcagaatcccaggcaggcagggaggacatgtccatgtcattgatgaatgctgtggycttgggcgtgcctcctccttcttggggcctcgggggtggaggggagggcaagtgctgttgggacagaccctcagcgggccatctggaaccagatgctgcc

SEQ ID NO: 114889 - DNA, 201 bp, Homo sapiens
tgccccctcagaacaaggatgctgggtctgtgggcaggtctcgtgagctgcggcacgaagctcatctggctgggacatggtggtcagcggcatctcagagkaccgttggggacattcatagcctgccaatgagttagcgaaaacccctctaatcccatcccagagaaaccagggttgacagttgagtgtgttgcccgccat

SEQ ID NO: 114890 - DNA, 201 bp, Homo sapiens
gctgggtaagagtctggtggagtccccctttctaggtgacctttgtctttgctgttgatttggacgcggttcctgcccatgccctcctccttgtctggcccttgcaggaggaccctctcttaggctctgccctgcacgctgccttgagatggggtggctcctctgcccaccttctcttccccctgataactgcctgtgtgt

SEQ ID NO: 114891 - DNA, 201 bp, Homo sapiens
tgctcctcatttgccttccaccatgattgtgaggcctccccagccatgtggaactgtgagtccattaaacctctttcctgtataaattacccagtcttggktatgtctttattagcagcgtgagaacacactaatacaccatcttcttgtattcctgatgttcttgttgtggtttgtggttatttatttatgagacagagt

SEQ ID NO: 114892 - DNA, 201 bp, Homo sapiens
gcaagtgtctccatccctcaacacaaccccctccctgccctgctgtgccactaccaccgccttctctgggcactcctgcctcccaggtcccatccccaccscgcaggacctggggtctgccccagcacagacctgtggggcagcagggctgcttggcccctcaggagcatcttgagctccgaaagggctctcaaggctggc

SEQ ID NO: 114893 - DNA, 201 bp, Homo sapiens
gtttgggaggggcctgcccaggaggaggtgctggctccaggcttgggggttgggtgccccgtctcgaggctgcctgccgataccctgcggccactgctgtrgcatccacgatgcctctccctcctcctggctctctgtctgggagcgcaagtgtctccatccctcaacacaaccccctccctgccctgctgtgccactacc

SEQ ID NO: 114894 - DNA, 201 bp, Homo sapiens
gggggcaacccctcttgtctgggtttgggaggggcctgcccaggaggaggtgctggctccaggcttgggggttgggtgccccgtctcgaggctgcctgccrataccctgcggccactgctgtagcatccacgatgcctctccctcctcctggctctctgtctgggagcgcaagtgtctccatccctcaacacaaccccctc

SEQ ID NO: 114895 - DNA, 201 bp, Homo sapiens
ggtggaaagagaggaagaggttactaggcagcatgtgatggctggtcctctgggtgcacatgcggtagctgtacatgtttgttcatacgtcacatgtctcwttcgcatctttttttttttttttttgagacggagtttcactcttgttgcccaggctggagtgcaatggcacaatctcggcttactgcagcctccacctcc

SEQ ID NO: 114896 - DNA, 201 bp, Homo sapiens
ctgtggggtgggctcttccagtgtggagatgaccttgggcaggggctgcaggttccattcaccctgcaaggaagggggcaggaggtaaactgaggctggargggcaagatgggtggctgcttccccagccacttcccagccacctcttggattcttgccctcaaactcagcttgtctcaaactgaactcactctgctcccc

SEQ ID NO: 114897 - DNA, 201 bp, Homo sapiens
ggtagtgtccggagccagcactccatgggacctggccccaggcaggaggctccctcagagaccaggatcggggcccagattctagttctgggccagcacgwccctcttctgggctttgtttccttgttggaaaacaggcatcttggcatctgctttgacttctcgaggctgagatgaggatggtaaacacagcagcccctg

SEQ ID NO: 114898 - DNA, 201 bp, Homo sapiens
caggggaggtgggacatgagcgtcaactggcgtgcgcgatcgtggggacacaggaaataggcggcggggaggtgctacacgcataaggaggcccagctgcygggaaacacgccgcgcaccggccgtggcagttatccatggtgtacctcccagcaccgtcagctcacgtagggccactgggactctcagtcaagcactagt

SEQ ID NO: 114899 - DNA, 201 bp, Homo sapiens
cgtcaactggcgtgcgcgatcgtggggacacaggaaataggcggcggggaggtgctacacgcataaggaggcccagctgctgggaaacacgccgcgcaccrgccgtggcagttatccatggtgtacctcccagcaccgtcagctcacgtagggccactgggactctcagtcaagcactagtgttttactaaacttaacgat

SEQ ID NO: 114900 - DNA, 201 bp, Homo sapiens
cgttcccagtgctgtgcttctcgtcctctccctcactagcgctcgagagactctggagtgaactctggacatgctgcctgggagcctgctgggtgctggaytggggtcccaggatggaagatgtggctccttccctcgatgggctcagaccccgagtgaggttggggcccaggaagggacctgcagccacagcccagcctg

SEQ ID NO: 114901 - DNA, 201 bp, Homo sapiens
ccaggatggaagatgtggctccttccctcgatgggctcagaccccgagtgaggttggggcccaggaagggacctgcagccacagcccagcctgtactggaragaggtcctaggcagggtgaggggtgaccccaggccaacgggttctcatggaaccgagagtcccgcaaagatggccacagagaactgagtgttggcaaga

SEQ ID NO: 114902 - DNA, 201 bp, Homo sapiens
tgctgacaacggtggggccagcagggcttcggccctggctggtggggcactgtggggtgggctcttccagtgtggagatgaccttgggcaggggctgcagrttccattcaccctgcaaggaagggggcaggaggtaaactgaggctggaggggcaagatgggtggctgcttccccagccacttcccagccacctcttggat

SEQ ID NO: 114903 - DNA, 201 bp, Homo sapiens
cctatcccgatggccttctgccagtcagggccatctcttgcagagcacaggacagtggtgcaggcgctccccggcaaggggggaggctcctcctgtgtctygtcctcatggcggtggcctctccgacccacacagcagggcctgtggcccgggccactccccgtgcgttgtggggtggctgtcgaggcaggacggcttgga

SEQ ID NO: 114904 - DNA, 201 bp, Homo sapiens
ccaacgggttctcatggaaccgagagtcccgcaaagatggccacagagaactgagtgttggcaagaaccagacagggtggggcaaggccccgagtgtctcracctcttggctagaaaaaaagtgtggcccgtgttggggggctctgccctgggactgaccccaggggcctgtggacgagccgggagcccacatcagctgcc

SEQ ID NO: 114905 - DNA, 201 bp, Homo sapiens
aggacagtggtgcaggcgctccccggcaaggggggaggctcctcctgtgtctcgtcctcatggcggtggcctctccgacccacacagcagggcctgtggcycgggccactccccgtgcgttgtggggtggctgtcgaggcaggacggcttggagggagcccggcctccgggtctctccagcccactctgctcccggctgct

SEQ ID NO: 114906 - DNA, 201 bp, Homo sapiens
tggtctccagggtcagagaagggctccttgtcggcaggacaacggccacaagacagcgggaccccaccaggcagaacccagccaggtcgccgtcagctggytctggcagcacacgtggaggggctcagagagcacgggcaggagccagcggggaggcccccatgaggaagtggcgctgagcagggcctagaggagggaggg

SEQ ID NO: 114907 - DNA, 201 bp, Homo sapiens
gaggctcctcctgtgtctcgtcctcatggcggtggcctctccgacccacacagcagggcctgtggcccgggccactccccgtgcgttgtggggtggctgtygaggcaggacggcttggagggagcccggcctccgggtctctccagcccactctgctcccggctgctgctgctggtggacagcctccctggggaggcagta

SEQ ID NO: 114908 - DNA, 201 bp, Homo sapiens
tcggtgcgcccctcgcctctgctgacctagtcctttcctggcctgatgaggacattacgcccactgtggagaagaatgtctgaccccacggagacagtgasactgaggccccccagctgccacccctccatggcacccgacacagtgaagcctcctctggctgactcagagcccgtctgggcctgcgcccctgcactctcc

SEQ ID NO: 114909 - DNA, 201 bp, Homo sapiens
tgctgggaaagccgggggctgacagggaggtttgtgcgtgggaggcggctgcagggccctgatgcagctgggcccgggtctcactccagccagcagttccrcactgtctgattcgggacgggtggctggtctgaggagaccagggaacaagccgcggggcactgattgctctgcccactcaggggcagcagaggcctaggc

SEQ ID NO: 114910 - DNA, 201 bp, Homo sapiens
aagccgggggctgacagggaggtttgtgcgtgggaggcggctgcagggccctgatgcagctgggcccgggtctcactccagccagcagttccgcactgtckgattcgggacgggtggctggtctgaggagaccagggaacaagccgcggggcactgattgctctgcccactcaggggcagcagaggcctaggccgcaggtg

SEQ ID NO: 114911 - DNA, 201 bp, Homo sapiens
ctttattctccgaatgtcgtgactgttcccctgttcctttgaacgttccccgagaaccacttggaacgccctcagctgcgtctccagtgccctgctcatgygtttcacaccgggtccacctctctgctttggaagtggccccgggaggaacttcccttgaacaccgtcctcccagtagatgctgactgttggtctgagaga

SEQ ID NO: 114912 - DNA, 201 bp, Homo sapiens
gcctaggccgcaggtgcagccacagagctccgtagctccatgagaaatagcatggggcccgccgggttcgtgctggacaccaccgggggctgccgtggccrcacactgtgtccccagcctcgaaggaacaaacccaaaactatcgcagccacatcatctccggtcccaggcgctggattgggcagccgctccccagacaca

SEQ ID NO: 114913 - DNA, 201 bp, Homo sapiens
gaagtggccccgggaggaacttcccttgaacaccgtcctcccagtagatgctgactgttggtctgagagagggtagagctgggcccaccaggtcggaggtrtgtgcggttcatggtcccgggtcactctgtggtgtgttcttctctgtccttccgtatttctgcgcccctcgcttgcccagtgctaccctaggtctcaggc

SEQ ID NO: 114914 - DNA, 201 bp, Homo sapiens
gggtggggtggctctgggggagaaagctgagttcacccaagggtggggcgaatggagagtcaggggcccgctcaatgctgagccacaaaggggactctggwgcaggggaccggggtccaggcttaccctgggtcctaggctagcccttccctgacgggccatccccaaagcagtgacccgtccccctgtctgcggcaggcg

SEQ ID NO: 114915 - DNA, 201 bp, Homo sapiens
tccgagagcgaagccatgagtcctacgccaagaactactccgtcgtcttcccccacgatgagccgctggccgggcgcaacatgaggagagacccgctgcaygaggtaacgcccctacagctcctgctggggactggcagcgagggtctgggacgtcctcagggcagcggagtgacagaaatgcaaggtgtaccccaaccgc

SEQ ID NO: 114916 - DNA, 201 bp, Homo sapiens
cactctgtggtgtgttcttctctgtccttccgtatttctgcgcccctcgcttgcccagtgctaccctaggtctcaggcggagtgggagagaagcacaatgytttctaggctggggtccctgcgtgtgggatgggggggaggggaaacacaggggaggtgggacatgagcgtcaactggcgtgcgcgatcgtggggacacag

SEQ ID NO: 114917 - DNA, 201 bp, Homo sapiens
tcagccacagacactggggggtttgggaccaaagcatccatgttacccaaggctcggtggagctcaggccagaagcctggcttcccatcctgcccggtccytctgcgggtcgcctctctgggcctcagtgtccccacctgtagcacggagtctagcacaatgtctaaaattctttccgggcctttccataagtctgtccag

SEQ ID NO: 114918 - DNA, 201 bp, Homo sapiens
agcgaaggccaccagtggcaggcggctctgctggcttcaggaatcattcccctcttgtccaggccaactggctgggaacagcgcctggccactgggaagaygggcaacaggcagccctgtgggtcctgagcccttgcccccagccagggccaagcaggaaggggactctgttcccagcagggtccacgctatcacaaagga

SEQ ID NO: 114919 - DNA, 201 bp, Homo sapiens
ctctgtctgggtctgagaacattgtcgattcacctcactcctctcacccctggaggatgtgggtttccaggctgacagttatgttcgaagctctgtgcttsgaagatactgttctacagtagattagcatctactagagccacgccaaggggtggtttcagggtttcaggcctctctctctgtcttatgtatttgcgatgg

SEQ ID NO: 114920 - DNA, 201 bp, Homo sapiens
gcttcattcctgtagcatgttttcaaggttcatcctgtgataaaatgtgtccaaatttcgttgctttttatggctgaataatattccatggtgtatgcagwccatgctttgttgatccactcatcagctgagggccacgggggttctctcccctggttagtggttgcgcatagagctcagtgaacatgcgtgaacggaatt

SEQ ID NO: 114921 - DNA, 201 bp, Homo sapiens
ggactaaaggtgcccatcaccacagccagctaatttttgtatttttagtagagatggggtttcgctgtgttggccaggctggtctcaaactcctggcctcragtgatccgcccaactcggcctcccaaagtgctgggattgcaggcgtgagccactgcgcccggactctttctgtgatttccatgcagggattcactggta

SEQ ID NO: 114922 - DNA, 201 bp, Homo sapiens
ggcttcattcctgtagcatgttttcaaggttcatcctgtgataaaatgtgtccaaatttcgttgctttttatggctgaataatattccatggtgtatgcaraccatgctttgttgatccactcatcagctgagggccacgggggttctctcccctggttagtggttgcgcatagagctcagtgaacatgcgtgaacggaat

SEQ ID NO: 114923 - DNA, 201 bp, Homo sapiens
gcggcctctgccctccttcccacaggcgtatcccagcgggagctgtacagggagggcctttccactcagagcagtggtggaatcagctcctccgctgtctrggatcctgcagtcagcctagctctccccattccttttgtgagctctctggtcccagggctgagcactcaggccttcccatgggagtcagtgggttcaacg

SEQ ID NO: 114924 - DNA, 201 bp, Homo sapiens
agttactaggaacttctatgtgccacctgacaacgatcccctggtgcagatattctcattccaatgaacaggactcctgggatcctggcggagagggaggragcatctgccagaatgtcccttctggtctctgcacatcccctttcctgctcccagagacaggacaggggtcgtatctccctgtgctcatctccagttctg

SEQ ID NO: 114925 - DNA, 201 bp, Homo sapiens
gttttgcaattcttttgtcaaatttgttcctaagcatatttattatttttgatgatattgtaaatgaaattatttcttaacttccttttcagattattcartgctagagtatagaaatatattagttttttggctgagcccagtggctcatgcctataatcccagcactttgggaagctgaggtgggtggattgcttgagg

SEQ ID NO: 114926 - DNA, 201 bp, Homo sapiens
caggctcgctccaccacatccggctaattttttgatttttttgtagagatgccgtctcgctatgttgctcaggctggtcctgagctcctgggctccagacmtccgcctgccttggcctcccaaagtactgggattacaggcgtgagccactgcacccggcctcagctcactctttctgccccatcgtcaccttctctggag

SEQ ID NO: 114927 - DNA, 201 bp, Homo sapiens
tcctgggctccagacatccgcctgccttggcctcccaaagtactgggattacaggcgtgagccactgcacccggcctcagctcactctttctgccccatcrtcaccttctctggagccttccttgtctctcacccagatggctgctccggcctctgccctctgccctgataacccaggccctccacgtagggccctgcccc

SEQ ID NO: 114928 - DNA, 201 bp, Homo sapiens
gacaggaatcaagtccacggtctgcggccctggtgagtgacagcctcggagctggggtgggcgtccatgggtcctttggtctgatgactgttagtagtgaygccccgtgagaccagcctgtgtcacacaggggacccagggctgtccccggtccctctcgctgcttggctccagcagccctgggtactaggtgtggccttt

SEQ ID NO: 114929 - DNA, 201 bp, Homo sapiens
tccccgtggctctctgccccctcagctcctagcgtgggggccctgattgctctccagggagcgggacggcacttgctcctgatctgcatgcagaggatgaycccccagacttggagccatccccgtatcatcgttcacgaacgaagtgccctggggtccctcagaccagggccggccgcttcctcatctagagtctaacat

SEQ ID NO: 114930 - DNA, 201 bp, Homo sapiens
ccttggtgttctgggggaactgctcccagcagtggtaacagcaggtgcaaaggccccgtggcaggccagtgcgtatgtctgaggcacgcattgaggctggratggagcaggccaggagccgggctcagagggcagcagggtgagatactggaggcccagcagctgctcctctgagggaggggtgctgagcagaggaggaac

SEQ ID NO: 114931 - DNA, 201 bp, Homo sapiens
gaatgcgtgtgcctgcgcagtcagcggaacctctgggttgaaagcagttgtgagggccgatgaggacaagggccagagctgcagacccgggccccgggtgygagagcgggcgcctgccgctgcccaaagaccctcctcaccaccagacgaattgggcgcgattcccagctgagcactgctgctgttgtgcagtgattgttc

SEQ ID NO: 114932 - DNA, 201 bp, Homo sapiens
tgaaagcagttgtgagggccgatgaggacaagggccagagctgcagacccgggccccgggtgcgagagcgggcgcctgccgctgcccaaagaccctcctcrccaccagacgaattgggcgcgattcccagctgagcactgctgctgttgtgcagtgattgttctccgagaggctgggatctgacccaggctgccacgatcc

SEQ ID NO: 114933 - DNA, 201 bp, Homo sapiens
tctcgaggctgcctgccgataccctgcggccactgctgtagcatccacgatgcctctccctcctcctggctctctgtctgggagcgcaagtgtctccatcmctcaacacaaccccctccctgccctgctgtgccactaccaccgccttctctgggcactcctgcctcccaggtcccatccccaccccgcaggacctggggt

SEQ ID NO: 114934 - DNA, 201 bp, Homo sapiens
ccccaaatatcttgcctcgaggccagcaagattccccgtgggtcagtgctctcccggcgtgtctcccagagctccgctcggccagacacggtgttcccagrgcccctgccgaggacgggccccgccgcgaagcagcatgctgggctgggagcactccgtggggcacggtgatcaagtgattttctctgaaaattaatttca

SEQ ID NO: 114935 - DNA, 201 bp, Homo sapiens
caccgagagtgacctgactgtcagccgcctggcacccagccaccaggcctccccgctggcccccgcctttgaaggtatgggatgcctctgtgcacacggcrctgtgactgcggcctgctctgtggactggtggttgtggacagggcaggatggacgggatgggctgctgacggcagctctgtcattagctgttgtgcccgc

SEQ ID NO: 114936 - DNA, 201 bp, Homo sapiens
atgctgggctgggagcactccgtggggcacggtgatcaagtgattttctctgaaaattaatttcagctcaaaaggaaattgaatctcttttcctgacagcragaagtcctagtcgcggcgctgttaggatttgattagctcaggatggagcagtcctgcacccacacacgttagataactatgacatgccagtcagagacc

SEQ ID NO: 114937 - DNA, 201 bp, Homo sapiens
gtagtaacccggcacccccatgtgttgggcacagtgctcagggccaagaacattagggaataaagtggaaatggctccctcccacccgggggcttctgttstagtggaggagcaggaacgcacacccaggaaccgccccctgccaactgctggcagcagcgccaacagggcaggggtcctgggggcggggtcttggtgggt

SEQ ID NO: 114938 - DNA, 201 bp, Homo sapiens
gatacccgatatcatgggcaggttccctgatgcagcacagagagactggtggccgcaggctggggcaccgtgttccctgtcacgggtcgagctgttgccaygatagtgtgaagggcctgggccccaaggggaagttggagcgagggtgtttgtggagtgggtggtgggaagcttcgacccccacccgggtttgctgcttct

SEQ ID NO: 114939 - DNA, 201 bp, Homo sapiens
acacccaggaaccgccccctgccaactgctggcagcagcgccaacagggcaggggtcctgggggcggggtcttggtgggtgtatgcagccacgtattgggrgagcagccagaacacggcgtacattggagaggggctcctgcctgtagagcctgctgcggaggctcttctgccctggtgagcttcgactcacccattcagt

SEQ ID NO: 114940 - DNA, 201 bp, Homo sapiens
ggtggaggggagggcaagtgctgttgggacagaccctcagcgggccatctggaaccagatgctgcccccgaggccctctcagccctgcgctcggggcctcrttccagtcagagggggtggcccctgggtagggcccttccaaacccgagagtgggttttcttttttttcccaaaccaaatttatttttaaagaaacctccc

SEQ ID NO: 114941 - DNA, 201 bp, Homo sapiens
gctggagtgcagtggtgtgatctctgctcactgcaagctctgcctcctgggttcatgccattctcctgcctcagcctcccgagtagctgggactacaggtkcctgctaccacgcctggctaattttttgtattttttagtagagacagggtttcaccacgttagcaaggatggtctcgatctcctgaccttgtgatccacc

SEQ ID NO: 114942 - DNA, 201 bp, Homo sapiens
cgaccgggatggtttcatccccgaggcccagctccggtgagtagtgcctgctgggctgtgctgctgggaggccctgccctgacaacccccttgcccctccrtgtgccccgtccttgcccctccgtgtgccctgcctccccaggtggttccactgtcgtgatcagttattctgcacacgggaagccgagccctgccgacttg

SEQ ID NO: 114943 - DNA, 201 bp, Homo sapiens
ctgcttgctttctaaacggtcttgtttggtttggcttgtttattggttaaatcagtggttcctctctgcaatattatgatgatgtaaacactgcttttttktttgtttgttttgttttgttttttttgagacagagtttcactttgttgcccacactggagtacagtggcacagtgtcagctcactgcaacctccgcctcc

SEQ ID NO: 114944 - DNA, 201 bp, Homo sapiens
cggggtcctacaacgagaaggaccatctcgagcccgtgaccctgggtggaggtgctggcccaccacggggcatggggaaccaagtccccacccagttctgratgatgccaaggcctctctctctgccttccagaacatgcccaatgtccgtgatcatgatgcctctgtctacctccgcctccaaggggatgccttgtctgt

SEQ ID NO: 114945 - DNA, 201 bp, Homo sapiens
ggggaggtgtgggccaggagagcagaggttctgggcccttagtgtcaatgttacagtttttgctgacctgggaggctgtccctcaaagtggccagggccaygcgctcccaggtggccccagcctgggacacagtgccctccccatttcctggccagcaagacgggtggggatacagccactggccacggccagctccccct

SEQ ID NO: 114946 - DNA, 201 bp, Homo sapiens
gaccgggatggtttcatccccgaggcccagctccggtgagtagtgcctgctgggctgtgctgctgggaggccctgccctgacaacccccttgcccctccgygtgccccgtccttgcccctccgtgtgccctgcctccccaggtggttccactgtcgtgatcagttattctgcacacgggaagccgagccctgccgacttgc

SEQ ID NO: 114947 - DNA, 201 bp, Homo sapiens
gagtagtagtgctagcagaggtaaggatataactactactactactactactactattattattattattattattattattattattattattattattwgagacagggtctcactctgtttcccaggctggagtgcagtggcatgatcatagctcactgcagccttgacctcctgggctcaagcgatcctcccacctcc

SEQ ID NO: 114948 - DNA, 201 bp, Homo sapiens
ccagggctgagcactcaggccttcccatgggagtcagtgggttcaacggtttgcctgaaggtgaggacgcagactccagttactgggtgtggacgtgccaygcacccgaaccaagtgtgtgaggaaaatcacacctcctgtgcaagaagccccccatgctgtctgtggcctccacgcagccgagtgctagcctgttgtgca

SEQ ID NO: 114949 - DNA, 201 bp, Homo sapiens
ctccggtgagtagtgcctgctgggctgtgctgctgggaggccctgccctgacaacccccttgcccctccgtgtgccccgtccttgcccctccgtgtgcccygcctccccaggtggttccactgtcgtgatcagttattctgcacacgggaagccgagccctgccgacttgcccccaaggctcagtgcattctttgtgccgt

SEQ ID NO: 114950 - DNA, 201 bp, Homo sapiens
ctgtcctgctctatggaactctggggctggctttgtttttagagtagtagtgctagcagaggtaaggatataactactactactactactactactattaytattattattattattattattattattattattattatttgagacagggtctcactctgtttcccaggctggagtgcagtggcatgatcatagctcact

SEQ ID NO: 114951 - DNA, 201 bp, Homo sapiens
ctgagcactcaggccttcccatgggagtcagtgggttcaacggtttgcctgaaggtgaggacgcagactccagttactgggtgtggacgtgccatgcaccygaaccaagtgtgtgaggaaaatcacacctcctgtgcaagaagccccccatgctgtctgtggcctccacgcagccgagtgctagcctgttgtgcaggtgtg

SEQ ID NO: 114952 - DNA, 201 bp, Homo sapiens
cttgtcctcccggcagctctctggagtggccagtgtgggcctggcggccaggtctgcgtgtgtctggagtggccagtgtgggcctggcggccaggtctgcrtgtgtctggaggacgactgtggccctcaggagcttgaagttgctgggtggccggtgggtccagatcccatgagatgaggccggggactcgaggagcgtgt

SEQ ID NO: 114953 - DNA, 201 bp, Homo sapiens
ccgtgtgccccgtccttgcccctccgtgtgccctgcctccccaggtggttccactgtcgtgatcagttattctgcacacgggaagccgagccctgccgacytgcccccaaggctcagtgcattctttgtgccgttcacgcaattcccactcctcgtcctccccactacccgtccgctgtggccaggccttccatggcctaa

SEQ ID NO: 114954 - DNA, 201 bp, Homo sapiens
cactgtcctgctctatggaactctggggctggctttgtttttagagtagtagtgctagcagaggtaaggatataactactactactactactactactattattattattattattattattattattattattattattatttgagacagggtctcactctgtttcccaggctggagtgcagtggcatgatcatagctca

SEQ ID NO: 114955 - DNA, 201 bp, Homo sapiens
gaaggtgaggacgcagactccagttactgggtgtggacgtgccatgcacccgaaccaagtgtgtgaggaaaatcacacctcctgtgcaagaagccccccaygctgtctgtggcctccacgcagccgagtgctagcctgttgtgcaggtgtgcgggacacaccctcccaaagacaccagctgtcctcggcggagcagggtgt

SEQ ID NO: 114956 - DNA, 201 bp, Homo sapiens
agacgaccttagcgcacagatttactgtcacctgggctgagtggccggctctgtggggtcattcccatgctcatgttcttggagtccgtggggtccatcgrggacagactgggggtgagctggggctaaccatcttcacctagagaccctgatgcccagcactgagcgcagccccactggcttctcgtccctctccctcct

SEQ ID NO: 114957 - DNA, 201 bp, Homo sapiens
cccactgtgttccagtcagatctggccctggaagcccctctcccctgtccctgggcgaggagaggagagtcaggaacacaccccaggtcccaagatgggcrgattttgcacccccacccgggagccagcctgggtgtccaggacaccttggcagggctgcagtgggtgggatgtccctgctggggaggggggtactccatg

SEQ ID NO: 114958 - DNA, 201 bp, Homo sapiens
cccactgtcctgctctatggaactctggggctggctttgtttttagagtagtagtgctagcagaggtaaggatataactactactactactactactactattattattattattattattattattattattattattattatttgagacagggtctcactctgtttcccaggctggagtgcagtggcatgatcatagct

SEQ ID NO: 114959 - DNA, 201 bp, Homo sapiens
acccgaaccaagtgtgtgaggaaaatcacacctcctgtgcaagaagccccccatgctgtctgtggcctccacgcagccgagtgctagcctgttgtgcaggygtgcgggacacaccctcccaaagacaccagctgtcctcggcggagcagggtgtgcctaggcccggctcagtgcctctgggagcctctgtgtccgcctcag

SEQ ID NO: 114960 - DNA, 201 bp, Homo sapiens
gtctctgccgacagccagtggcccagggccccactccttaggaagacagacgaccttagcgcacagatttactgtcacctgggctgagtggccggctctgyggggtcattcccatgctcatgttcttggagtccgtggggtccatcggggacagactgggggtgagctggggctaaccatcttcacctagagaccctgatg

SEQ ID NO: 114961 - DNA, 201 bp, Homo sapiens
tccccactgtcctgctctatggaactctggggctggctttgtttttagagtagtagtgctagcagaggtaaggatataactactactactactactactactattattattattattattattattattattattattattattatttgagacagggtctcactctgtttcccaggctggagtgcagtggcatgatcatag

SEQ ID NO: 114962 - DNA, 201 bp, Homo sapiens
caagaagccccccatgctgtctgtggcctccacgcagccgagtgctagcctgttgtgcaggtgtgcgggacacaccctcccaaagacaccagctgtcctcrgcggagcagggtgtgcctaggcccggctcagtgcctctgggagcctctgtgtccgcctcagcccacagacattattgaccgtgttcccaccgttgcaagg

SEQ ID NO: 114963 - DNA, 201 bp, Homo sapiens
ccgagagcgaagccatgagtcctacgccaagaactactccgtcgtcttcccccacgatgagccgctggccgggcgcaacatgaggagagacccgctgcacraggtaacgcccctacagctcctgctggggactggcagcgagggtctgggacgtcctcagggcagcggagtgacagaaatgcaaggtgtaccccaaccgca

SEQ ID NO: 114964 - DNA, 201 bp, Homo sapiens
caaaatagaaccaagctgttgttattttgtgattttttttttttaccaagcagtagactgcaaacatctttctgttaatcaaatatcttgcttttttttawaaaaaaaaaagtcagctactttttcacgttatgaaaagagggttccccccacaagtcaagtgaaagaacttgcccaactttcaagttctccaagtcaagg

SEQ ID NO: 114965 - DNA, 201 bp, Homo sapiens
acagcatggaggagggggaggagtaggtcccccctcagcctttgcccccaccaatgctgacaacggtggggccagcagggcttcggccctggctggtgggrcactgtggggtgggctcttccagtgtggagatgaccttgggcaggggctgcaggttccattcaccctgcaaggaagggggcaggaggtaaactgaggctg

SEQ ID NO: 114966 - DNA, 201 bp, Homo sapiens
caagccaaggggtgccgggaggtgctcgggaggtgctcgggaggaggctccctcgagagtggaagggtcgtctccggagcctgcagaggaagcgtggctcrcccacatggtgattttggattttgagcctccagaaccgagagagagtttactgttattgttttaagccaccagttgtggtcgtttgttatgacaggtagg

SEQ ID NO: 114967 - DNA, 201 bp, Homo sapiens
tcgctcacggaccacccccgctggatccgagagcgaagccatgagtcctacgccaagaactactccgtcgtcttcccccacgatgagccgctggccgggcrcaacatgaggagagacccgctgcacgaggtaacgcccctacagctcctgctggggactggcagcgagggtctgggacgtcctcagggcagcggagtgaca

SEQ ID NO: 114968 - DNA, 201 bp, Homo sapiens
gcaaaatagaaccaagctgttgttattttgtgattttttttttttaccaagcagtagactgcaaacatctttctgttaatcaaatatcttgcttttttttwaaaaaaaaaaagtcagctactttttcacgttatgaaaagagggttccccccacaagtcaagtgaaagaacttgcccaactttcaagttctccaagtcaag

SEQ ID NO: 114969 - DNA, 201 bp, Homo sapiens
agttgtggtcgtttgttatgacaggtaggaaactaacccagtcctggagaagacctgaggtctgcagatagcaaacctgccatctccccttcccaaaggtraccccctacttctcctcaaagatttccagagcagctggagggagcagctctccttggaagaccccatttcttgatggcaatctggctgggacccagggcc

SEQ ID NO: 114970 - DNA, 201 bp, Homo sapiens
gccagacgacagccccctggaggcaggcctggccttcacctgcaagctcaagtcgccggtgcccttcctggggagggaggccctggagcagcagcgggccrcaggcctccgccggcgcctggtgtgcttcaccatggaggagtgagtatcccgctgttccacgcccacccggaagcaactgcctacagccagggcaggcag

SEQ ID NO: 114971 - DNA, 201 bp, Homo sapiens
ttgtctcaactccgcacatcattgtagaacaatttttttgtttgtttgtttgagacagtatctcgctctgtcgcccaggctgtagtgcagtggcatgatcwctgctcactgcaagctctgcctcccgggttcatgccattctcctgcctcagcctcctgagtagctgggactacaggcacccgccaccactcccgtctaat

SEQ ID NO: 114972 - DNA, 201 bp, Homo sapiens
gaccagagcaaggatgaaggctcagagcgggctttgggcggttccccagcgtgttgggcacccagcttgggcgtcaggcagctcccctgggtgttgggcamccagcttaggcattgggaagctcccccttcacgagcccctccctgacgcccccacctgagggtgcagagggctgcagtgctgatgggcagtctgctcggg

SEQ ID NO: 114973 - DNA, 201 bp, Homo sapiens
ttttgtacttttagtagagatggggtttcaccatgttggccaggctggtcttgaactctcctgacctcgtgatctgcctgcctcggcctcccaaagtgctsggattacaagcgtgaggatcccaacatgctgggattcaaaccaggccagtgtaaggttgcgcacctggggcccctcccaggccagcagggcccgtgggga

SEQ ID NO: 114974 - DNA, 201 bp, Homo sapiens
caggtctcaaaagagaaaggtgcagccaagcccaggccacccctctgtggcaggtctaggccgagggccttgggagggtgaacccagggagcctgacctcycagtcactgcaacacgacctcccatcccgttctggttcagtctccccacagccctgtgatagggggagaggggctcggctggggccgtcatccccactca

SEQ ID NO: 114975 - DNA, 201 bp, Homo sapiens
tgggagcctttgttggctcaacagacatttatcaagcacctgcacttgctgggctctgaccctgtgctgggcggggggaagtggagtgagaaaactggtcyctgccctctcaaggtccagtgggcaggagtgacaagtctctggcagggacacagcaggacgctggtgcactgggggagccgcagcatggtctccagggtc

SEQ ID NO: 114976 - DNA, 201 bp, Homo sapiens
ggagggagggggttgggtggaggggcccctgcagaccctgcctgatcactgctctcttggaagacctcaccccaagagtatgtgcactgcaaaagggactscaggcctctctctccttctttcagaatccttcacgcccgaccacaagcccctgatgggggaggcacctgagctccgagggttcttcctgggctgtggctt

SEQ ID NO: 114977 - DNA, 201 bp, Homo sapiens
gggcaggagctggcccactggatcatccatgggcgcccggagaaggacatgcatggctatgacatcaggtaagtgcccattgggacctaagggcagggccygccactcaggacaggtggcgtggggtaaacagcgagggctactgagaaaggagccttgcctgaaatccaggtggcttcctggaaggggcagcagtgaggg

SEQ ID NO: 114978 - DNA, 201 bp, Homo sapiens
agtgggatggcatcaccccacctcacagatggggagactgaggcctgggggcaggagggagcggggctgagctgggaaaactgtgctgagtgtgtatgccrcggcttgcagccaggcagccccggctgtcccgttcaatcgtacactgacaaagcggccaggaatgagacccagtgcaagccacttcctcgtctctaatgc

SEQ ID NO: 114979 - DNA, 201 bp, Homo sapiens
ggctgtcccgttcaatcgtacactgacaaagcggccaggaatgagacccagtgcaagccacttcctcgtctctaatgcagggtgacggggaggggctgtgraggttctgggagcagggagggcatttgtactggtgaggcgcccagcatggggtctgcacatggaaacgctaagtcatccccagccgaggcatggactggg

SEQ ID NO: 114980 - DNA, 201 bp, Homo sapiens
atggaaacgctaagtcatccccagccgaggcatggactggggtgctggtggccagagccggtgacggcagcctatcccgatggccttctgccagtcagggycatctcttgcagagcacaggacagtggtgcaggcgctccccggcaaggggggaggctcctcctgtgtctcgtcctcatggcggtggcctctccgacccac

SEQ ID NO: 114981 - DNA, 201 bp, Homo sapiens
ggctgactcagagcccgtctgggcctgcgcccctgcactctcccaagcgaggaatgtcccggaaatgataaaactgtaaaggacttcaaggaagggccaaytcaggcccctcctgctgcaaacagcaaaatggaggtgacttgcctgaagtcacccggcttttgaaccagagccaggtagggacccagctccctccccagg

SEQ ID NO: 114982 - DNA, 201 bp, Homo sapiens
cctgctgcaaacagcaaaatggaggtgacttgcctgaagtcacccggcttttgaaccagagccaggtagggacccagctccctccccaggagggacagtcytcatgccctggcctcccttggggattccagctctggaacccaccaaccagggttctgtgtggcctctctgtgcctctgtatcctcggctgcaaaatggag

SEQ ID NO: 114983 - DNA, 201 bp, Homo sapiens
gaatcagccctgacaggtgtcactgaggatagaaacgcctctgatgtggctgctgaggcagccttgagtgatgagtgaggttctagcaggtggagcgtgasggggaggcggggtgctgggaaagccgggggctgacagggaggtttgtgcgtgggaggcggctgcagggccctgatgcagctgggcccgggtctcactcca

SEQ ID NO: 114984 - DNA, 201 bp, Homo sapiens
catctgtccatccatcctccatccacaaagtaatttatgccacagacatttatggagtcttctccggtaccaggcacggagctaggagccccagaatgaayggggggcatgaatcctgtccctagaaacttctcagcatggtggtggatgggtgggaggggccagtgccaaggcatttcaagaagaaagaagcttccttcc

SEQ ID NO: 114985 - DNA, 201 bp, Homo sapiens
atgagattggttttgagccccgagctcctccataggctatctaaaattagaaccccgttgacaaggcaatctttgtcaggggcctacggcttgcaccaggraagcagggaaatgtcaacagtatattttctgtgtcaattttgagttttttaggaggcctgggcaaatggcaacttagagcaaatttgcgctatttccaaa

SEQ ID NO: 114986 - DNA, 201 bp, Homo sapiens
ccagaaacggccccagttcaggtgtcggggaaccccttgaggactggcttgtctctttgccttcattctctgttgtgcttatggtgtcaagaggaagaagrgagggagcagcctggctggggcctgcctggggccctgagaggtctctcgtccaagggtgcttccaatagccctgtggggccagatgttgtgggtctgccc

SEQ ID NO: 114987 - DNA, 201 bp, Homo sapiens
cctgcagctgccccctcctgtgtatgtcaagattcaagcgaagctagggggtgttacttacaaagccagtccagatcccagcgtgcctctggtaccggaggcacaggaaaagggccatcagccccagcagctctgagacctggtaggagaaaagtggagatctggggcttcgcacaaagcccctcatgttcctctgacacc

SEQ ID NO: 114988 - DNA, 201 bp, Homo sapiens
gtcagtgggttcaacggtttgcctgaaggtgaggacgcagactccagttactgggtgtggacgtgccatgcacccgaaccaagtgtgtgaggaaaatcacrcctcctgtgcaagaagccccccatgctgtctgtggcctccacgcagccgagtgctagcctgttgtgcaggtgtgcgggacacaccctcccaaagacacca

SEQ ID NO: 114989 - DNA, 201 bp, Homo sapiens
cctcccaaagacaccagctgtcctcggcggagcagggtgtgcctaggcccggctcagtgcctctgggagcctctgtgtccgcctcagcccacagacattaytgaccgtgttcccaccgttgcaagggccgtggagggacgagatgaagcttagcccagagcacccgataatcggcactgtcacttctgcagggcttgggcc

SEQ ID NO: 114990 - DNA, 201 bp, Homo sapiens
gggagctgcacattccaaaggcgtcctgcgtgcctgtgtaccgggctgtgatggccgcgggtgccaagcacggcctcatcaacgcagggtaccgcgccatygactccctgagcattgagaaaggtgagtgcagggtctggacagcatggggcgggggcgggcgcagtggggggcagtgacgctcgagacacctggaggccg

SEQ ID NO: 114991 - DNA, 201 bp, Homo sapiens
cacatcagctgcccctgctctacccactacccaccagcattctccccatccctgtgggccccatcctgacacctcccagcccccgtggcaggaccagggcrgcagatgtccccggtgctgagggcaggcttccatccccacacagccccagccaggagctcgtctctgccgacagccagtggcccagggccccactcctta

SEQ ID NO: 114992 - DNA, 201 bp, Homo sapiens
cctgtggacgagccgggagcccacatcagctgcccctgctctacccactacccaccagcattctccccatccctgtgggccccatcctgacacctcccagyccccgtggcaggaccagggcggcagatgtccccggtgctgagggcaggcttccatccccacacagccccagccaggagctcgtctctgccgacagccagt

SEQ ID NO: 114993 - DNA, 201 bp, Homo sapiens
taggctggggtccctgcgtgtgggatgggggggaggggaaacacaggggaggtgggacatgagcgtcaactggcgtgcgcgatcgtggggacacaggaaayaggcggcggggaggtgctacacgcataaggaggcccagctgctgggaaacacgccgcgcaccggccgtggcagttatccatggtgtacctcccagcaccg

SEQ ID NO: 114994 - DNA, 201 bp, Homo sapiens; identical to SEQ ID NO: 19249

SEQ ID NO: 114995 - DNA, 201 bp, Homo sapiens
ggggagggaggccctggagcagcagcgggccgcaggcctccgccggcgcctggtgtgcttcaccatggaggagtgagtatcccgctgttccacgcccaccyggaagcaactgcctacagccagggcaggcaggcgcttcttggtcccccactcaaagcccctggtaccaacacttcccatgtgccagccgtgctcttccag

SEQ ID NO: 114996 - DNA, 201 bp, Homo sapiens
cagtaatgctcgcctttctccggagtcagggatgggtccataaccaacgtgaccagggaagccgaggttccgaggttaaacggcatccagacaggcagccsgggaaccagtcgatgcacccagagcggccggtgcacgtctcctgccccctccatcagggctgtccagagcatttgcaccatggaaatgggcaaatgctac

SEQ ID NO: 114997 - DNA, 201 bp, Homo sapiens
taccaggcccttaatacatacacacagaatgaatgaatgaatgaatgagtgaatgaatgaatgaatgagtgaatgaatgaatgagtgaatgaatgagtgartgaatgaatgagtgaatgaatgaatgagtgaatgaatgaatgagtgaatgaatgaatgaatgagtgaatgaatgaatgccatggggaagtggcaagagga

SEQ ID NO: 114998 - DNA, 201 bp, Homo sapiens
tgcataccaggcccttaatacatacacacagaatgaatgaatgaatgaatgagtgaatgaatgaatgaatgagtgaatgaatgaatgagtgaatgaatgartgaatgaatgaatgagtgaatgaatgaatgagtgaatgaatgaatgagtgaatgaatgaatgaatgagtgaatgaatgaatgccatggggaagtggcaag

SEQ ID NO: 114999 - DNA, 201 bp, Homo sapiens
gcagcgcacctggaagcggacggctgaggacttgttgcagtgcatggagatgggcgcgaagctgtacagggccttcagtacgtcgcggttgaaggagttcsagggaacagaggtgaactgctgagacacggacgcctgagggcaggtgcagacatcctcgttgttgaacctggtggggacaaggaacagccaggctgggga

SEQ ID NO: 115000 - DNA, 201 bp, Homo sapiens
tgcctgggggcgacctgacctcctgctctccccactgagagtggctttgagcatgctgctggagcccggcgcacgtgatccctgggctactgggagagttkggattccaggaacccgagtcccacttgggttgcagggcagtctgagaagatcaggccctgatcagaggccctcccgtggtgcccacgggggtctgaagca

SEQ ID NO: 115001 - DNA, 201 bp, Homo sapiens
tccccagctccctgttttgctgaggcctggagcccccatggcctcactgagccgagccctacgtgtggctgctgcccaccctcgccagagccctacccggkgcatggggccatgcaacctgtccagcgcagctggccccacagccgagaagagtgtgccatatcagcggaccctgaaggagggacagggcacctcggtggt

SEQ ID NO: 115002 - DNA, 201 bp, Homo sapiens
tcaccaaggttgcccccgggcactgacagagcctgctgcataccaggcccttaatacatacacacagaatgaatgaatgaatgaatgagtgaatgaatgartgaatgagtgaatgaatgaatgagtgaatgaatgagtgaatgaatgaatgagtgaatgaatgaatgagtgaatgaatgaatgagtgaatgaatgaatgaa

SEQ ID NO: 115003 - DNA, 201 bp, Homo sapiens
tacatgtagtaaagtcctttgaataaagtatgtattgtactataaaaaaaatgaacctggccgggcgcagtggctcaagtctgtaatcccagcactttggraggctgaggtgggcagatcacttgaggtcaggagttcgagaccagcctggccaacatgatgaaaccccatctctattaaaaatacaaaattagccgggca

SEQ ID NO: 115004 - DNA, 201 bp, Homo sapiens
tggcagagacctatcctcaccaaggttgcccccgggcactgacagagcctgctgcataccaggcccttaatacatacacacagaatgaatgaatgaatgartgagtgaatgaatgaatgaatgagtgaatgaatgaatgagtgaatgaatgagtgaatgaatgaatgagtgaatgaatgaatgagtgaatgaatgaatgag

SEQ ID NO: 115005 - DNA, 201 bp, Homo sapiens
gtcgccggtgcccttcctggggagggaggccctggagcagcagcgggccgcaggcctccgccggcgcctggtgtgcttcaccatggaggagtgagtatccygctgttccacgcccacccggaagcaactgcctacagccagggcaggcaggcgcttcttggtcccccactcaaagcccctggtaccaacacttcccatgtg

SEQ ID NO: 115006 - DNA, 201 bp, Homo sapiens
ggcagatcacttgaggtcaggagttcgagaccagcctggccaacatgatgaaaccccatctctattaaaaatacaaaattagccgggcatggtggtgggtkcctgtaatcccagctactccggaggctgaggcaggagaatcgtttgaacctgggaggcggaggttgtagtgagtctagattgtgccactgcaccaaaaaa

SEQ ID NO: 115007 - DNA, 201 bp, Homo sapiens
cccaggaggcagaggttgcagtgagccaagatcatgccactgcactccagcctggaagacagagtgggactctttctcaaaacaaacaaacaaacaaacaacaacaacaacaacaaaacagaatttaaacatgagacacacagcaaaagagctgcaacatagagcaatttattgcaaaagaaaaagaacattttgaaagtt

SEQ ID NO: 115008 - DNA, 201 bp, Homo sapiens
tgaccttggataaggatcctctcttggagcctcagtttcctcatttataaaatgtggacactcacctaccatgcagggctgtcatacaggccactgcacaragtgagtcttaatatgtggggattgtgatggcatggctcccacggtgggcagggcctcctgacacagccctggggccatggtcctgggggccacagccct

SEQ ID NO: 115009 - DNA, 201 bp, Homo sapiens
tcagtttcctcatttataaaatgtggacactcacctaccatgcagggctgtcatacaggccactgcacagagtgagtcttaatatgtggggattgtgatgrcatggctcccacggtgggcagggcctcctgacacagccctggggccatggtcctgggggccacagccctggggcccagccaaaccggagtttatgggctc

SEQ ID NO: 115010 - DNA, 201 bp, Homo sapiens
gggaaacctgctcattgatgggaaaggctccgagatggggaaggcgtttctgcctcgtaggtatctgttagcaaggccagatgcccgctttgagttgtgcmtgcccgtggacatctgaaggccaccagctctccatgctgcctgcctgcggggggcagctcagagctctcagccctgcaggtgcacacatggctcagaagc

SEQ ID NO: 115011 - DNA, 201 bp, Homo sapiens
tgcagcaaaagtgccaggcgtcaccagctgtgccaggctggaggtgacaccctcctcctgcctaagagcacctgcacctggggctgactggctcccgagcrcttgctggggagcccgagccagggtgtgggatggggagcatgcagaggccaagctgtctagaaggctgttccagccgcccctgccccgagggattcgagc

SEQ ID NO: 115012 - DNA, 201 bp, Homo sapiens; identical to SEQ ID NO: 19235

SEQ ID NO: 115013 - DNA, 201 bp, Homo sapiens; identical to SEQ ID NO: 19237

SEQ ID NO: 115014 - DNA, 201 bp, Homo sapiens; identical to SEQ ID NO: 19238

SEQ ID NO: 115015 - DNA, 201 bp, Homo sapiens
ctgcttctggggacatggaggatatcaaaggggtgatctgtctctggaaaatgatggtggcagcttcggggagaggatgggaaaggagaggaggagaggcrgggaggggtgggggggagatgagtctccagcctgaaggtcgccgaggtgagcacttgacgtagcagggctgtgtcctggtgatatcctgtcagcctggga

SEQ ID NO: 115016 - DNA, 201 bp, Homo sapiens
gaaggtcgccgaggtgagcacttgacgtagcagggctgtgtcctggtgatatcctgtcagcctgggattctgccgagacctctggctggagtgcccagacyctgccatggggtccgctttccctggcaccccacgctgagtcctaggccagttgctcccctctcaggctgcaagggaccgagctgttgctgtccgtccaag

SEQ ID NO: 115017 - DNA, 201 bp, Homo sapiens
tgagcacttgacgtagcagggctgtgtcctggtgatatcctgtcagcctgggattctgccgagacctctggctggagtgcccagactctgccatggggtcygctttccctggcaccccacgctgagtcctaggccagttgctcccctctcaggctgcaagggaccgagctgttgctgtccgtccaagcatatgcactgtgg

SEQ ID NO: 115018 - DNA, 201 bp, Homo sapiens
ggtgatatcctgtcagcctgggattctgccgagacctctggctggagtgcccagactctgccatggggtccgctttccctggcaccccacgctgagtcctrggccagttgctcccctctcaggctgcaagggaccgagctgttgctgtccgtccaagcatatgcactgtggtgctcaggggcacacggtagacgcgtgctt

SEQ ID NO: 115019 - DNA, 201 bp, Homo sapiens
gcacacagtaggtgctccaaaaatgggggcctttgctatgtcactctctgagctgcccaagggcgggacctccctcacattcatcttggtccagttatttyctgctcaacaacctctccaggccccccaggtcctgcagagaaagaccttgcagagaaagacacccatggttgaatatcagggtatcccctgatattcgtc

SEQ ID NO: 115020 - DNA, 201 bp, Homo sapiens
gtgcccagactctgccatggggtccgctttccctggcaccccacgctgagtcctaggccagttgctcccctctcaggctgcaagggaccgagctgttgctktccgtccaagcatatgcactgtggtgctcaggggcacacggtagacgcgtgcttgctgaggaagggatagaatcggagagggtcgagtgctttaacacta

SEQ ID NO: 115021 - DNA, 201 bp, Homo sapiens
gcaatcccaaatctgatttctgcctcgatggagtttcctattctggacgtttagtataaatggaatcacatgatgtctggcttctttttacggttttgtcygtgtagtacatgtatcagtatttcattcttttttgcagctgaataatactccattgtatggatacaatgcactttatccgttcacccactggtggacatt

SEQ ID NO: 115022 - DNA, 201 bp, Homo sapiens; identical to SEQ ID NO: 19311

SEQ ID NO: 115023 - DNA, 201 bp, Homo sapiens
ggagacccttgggccaccctctctgtccccacctcccaggccctgaaatcctgctctaagtccaggtgcctctcttccaggggacggttactacctggccrtgggcggggccgtggcccagcacaactggtcccacatcaccaccgtgctgcaggaccagaagtcccagtgccagctcatcgacagctccgaggacctggg

SEQ ID NO: 115024 - DNA, 201 bp, Homo sapiens; identical to SEQ ID NO: 19312

SEQ ID NO: 115025 - DNA, 201 bp, Homo sapiens
atagcaaaagccaccagtgtgaggtcactgactgtggagttgggaagaggtttatccctgggctcctgagagctgatgcgagccggctcccacaagccacygctccaactcttgctcttgccttctcactggccccctagctgggctgtcatagcctcttccctgacgtttcgccagccacacccctggcctgccacctct

SEQ ID NO: 115026 - DNA, 201 bp, Homo sapiens
agaggaggaagcagggtggggagaagttattgtccgctcagcagccagcagaccagctgtccttgctccccaaatatcttgcctcgaggccagcaagattycccgtgggtcagtgctctcccggcgtgtctcccagagctccgctcggccagacacggtgttcccagggcccctgccgaggacgggccccgccgcgaagca

SEQ ID NO: 115027 - DNA, 201 bp, Homo sapiens
ctctctgctggctggctggctgtctaggcctatgtgtcaccacctggcacttgctctcattgtcttgtgcgagtgcttttgccagcagtttggagtgcagrcccatcacccctcactggggccccccatgaggcctgcctgactgcatgccccacccgggcccatggcagcgcacctggaagcggacggctgaggacttgt

SEQ ID NO: 115028 - DNA, 201 bp, Homo sapiens
tcttccctgacgtttcgccagccacacccctggcctgccacctctcacattcagctgctggagggcatcctttgttggggagagtgcagatttaagcttcmttcagtagtgggttggtgtctcggcgccccctccactcacctgctctgtgatcttggccacagaactgttggtgccacttgaacttgatctataagagaa

SEQ ID NO: 115029 - DNA, 201 bp, Homo sapiens
tggccacggccagctccccctgtagggggcctcacaggcaggtgggagatgggagttgagtcagccacagacactggggggtttgggaccaaagcatccaygttacccaaggctcggtggagctcaggccagaagcctggcttcccatcctgcccggtccttctgcgggtcgcctctctgggcctcagtgtccccacctgt

SEQ ID NO: 115030 - DNA, 201 bp, Homo sapiens
gaaatagcatggggcccgccgggttcgtgctggacaccaccgggggctgccgtggccacacactgtgtccccagcctcgaaggaacaaacccaaaactatygcagccacatcatctccggtcccaggcgctggattgggcagccgctccccagacacagctgggattttcccccagagactctgtacctcttgggtccctg

SEQ ID NO: 115031 - DNA, 201 bp, Homo sapiens
gcctcatcaacgcagggtaccgcgccattgactccctgagcattgagaaaggtgagtgcagggtctggacagcatggggcgggggcgggcgcagtgggggscagtgacgctcgagacacctggaggccgagaagctgtttaccttccctgtgttgtcacccggcttccttctttccacaccatgatttcctcccctacacc

SEQ ID NO: 115032 - DNA, 201 bp, Homo sapiens
gcaagttactctactcttctgtacagcactgaggccaccatagccagctcctctctcgggccgtggctaccaaagcagcagctgaggcccctctggcctcygaagagttggaaacctggagaggcctggggatgtggattgtggattgtggacctggtccagatgctctgttcctcctggcctgtgggcttcaagggcatt

SEQ ID NO: 115033 - DNA, 201 bp, Homo sapiens
agacgggtggggatacagccactggccacggccagctccccctgtagggggcctcacaggcaggtgggagatgggagttgagtcagccacagacactgggkggtttgggaccaaagcatccatgttacccaaggctcggtggagctcaggccagaagcctggcttcccatcctgcccggtccttctgcgggtcgcctctct

SEQ ID NO: 115034 - DNA, 201 bp, Homo sapiens
aagtctgtcaccgctctggttccctttcctgcaaaatgggtcataaccatccctactgcctcaggctgtgctgcaggaaggacagagtgatgcagctgggmgtggtgcccggcatacagcaggtgctcatgaggtggtagctgtgtgatgacaaggacaaggacagagggttgtgaagtcgtcaccagctggcgcttcgga

SEQ ID NO: 115035 - DNA, 201 bp, Homo sapiens
atagcgagatcctatctctaaaaaaacaacaaaaaaatttttcaattagctcagcacggtggtgcacacctgtagtcgcagctacttgggagcccaaggcyggaggatcgcttgagcccaggaggtcaaggctgcagcgagctgtgattgtgccactgcaagccgccctgggagacagggtgaccttgtctcaagccaaaa

SEQ ID NO: 115036 - DNA, 201 bp, Homo sapiens
ttgagaagcaggtccttctcctaacccccatggctcagaggatactctgcaaggcgtggccctgggggacccagggagggacagatacggttcctgggcaytgtgaaggcacaggcccctgagagggcatttgttttctcagccgggagacccttgggccaccctctctgtccccacctcccaggccctgaaatcctgctc

SEQ ID NO: 115037 - DNA, 201 bp, Homo sapiens
agggctcaggtctcacgtgtggttcatctttcttcttgggtggctggagggctgtgtggccccaaggacctcccttttctgaggatctgtcccaggcctgkgtcctagagagctctgcccacagcttcctttgtggctagggctcatctcttccctctctgagctatcattaaagcaggtggctcgggcgctgttaggggg

SEQ ID NO: 115038 - DNA, 201 bp, Homo sapiens
cgagtacaccttcgccttcccgccccaccacgacacggtgcgtagctggggtccaccgtgggggtccgtccttctgcctgtccctcagataagccattgcrccggccctcggctggccctgcaggggctcccctcccccaggagtctcttcgggctctgcattcacgcttttttcggctgactccattttgaggaggaatc

SEQ ID NO: 115039 - DNA, 201 bp, Homo sapiens
gtgggtacaaccaatgtgagagacaccctggcaggagactgtgggatcttggacaacgagtacctgcccaagacctagggagtcagggagggcttcctggrggaggtgacagctgagccaagagctgaaggatgacaaagggttaagtggtgacaggggaaggggtgagaatgcgaaggggcacaagagggctaggcctgg

SEQ ID NO: 115040 - DNA, 201 bp, Homo sapiens
ttgggggtgggtacaaccaatgtgagagacaccctggcaggagactgtgggatcttggacaacgagtacctgcccaagacctagggagtcagggagggctycctgggggaggtgacagctgagccaagagctgaaggatgacaaagggttaagtggtgacaggggaaggggtgagaatgcgaaggggcacaagagggctag

SEQ ID NO: 115041 - DNA, 201 bp, Homo sapiens
catcccttttactcactcgaagcccgagccctgctgtccaggccaggtgctgggctggctctggggaccagcgtagtcctagtaggccagccctatctgcstggagccacggttgggtgtgcatcatgcagccccccattctcctccaggccgctgtggacgcgtccccaccctgcggtttctggggccccagctttctct

SEQ ID NO: 115042 - DNA, 201 bp, Homo sapiens; identical to SEQ ID NO: 19308

SEQ ID NO: 115043 - DNA, 201 bp, Homo sapiens
cgcctctccccacagtctcctgctcattggtgtaaaatcactggtgttgtaaaaagcacatcacggctgcataaaatactgctcattgctcggtttccaaycatcactgcgcgtgggtttcagcacaggggctgagtgcagacctcgcttctagcagtttccaaccatcactgcgcatgggtttcagcacaggggctgagt

SEQ ID NO: 115044 - DNA, 201 bp, Homo sapiens
ttctctgggctggcaattgggtgtgatcgcgggaagaggcttcttgggcctgctccgtgtctactgtcacctaggctgtaaagatgacagagggccggagyggctctccaggctggggcctggcatttcacagcgctagcgccgtgacttatggaccacaagaagctgtgatttatacaacgtgaggcagagctcctgggc

SEQ ID NO: 115045 - DNA, 201 bp, Homo sapiens
ccaggctggggcctggcatttcacagcgctagcgccgtgacttatggaccacaagaagctgtgatttatacaacgtgaggcagagctcctgggctcgtgasttcccttctgtgatgaagtgaagtgccttgcagaagcagcagccgcttagctgatgcgaggggactccgaggcccatccatctccctctctccccatgag

SEQ ID NO: 115046 - DNA, 201 bp, Homo sapiens
gtctgtaatcccagcactttgggaggctgaggtgggcagatcacttgaggtcaggagttcgagaccagcctggccaacatgatgaaaccccatctctattraaaatacaaaattagccgggcatggtggtgggtgcctgtaatcccagctactccggaggctgaggcaggagaatcgtttgaacctgggaggcggaggttg

SEQ ID NO: 115047 - DNA, 201 bp, Homo sapiens
tgttgttaaaggcagaaaggcagagagagtttgctctttttttttttttttttttgagacggagtctcactctattgcccaggctggagtgcagtggcgcratctcggctcactgcaacctccgcctcccaggttcaagtgattctcctgcctcagcctcccaagtagctgggattacaggcgtgcaccaccacacccagc

SEQ ID NO: 115048 - DNA, 201 bp, Homo sapiens
atctggccaggtcacatgttgttaaaggcagaaaggcagagagagtttgctctttttttttttttttttttgagacggagtctcactctattgcccaggcyggagtgcagtggcgcgatctcggctcactgcaacctccgcctcccaggttcaagtgattctcctgcctcagcctcccaagtagctgggattacaggcgtg

SEQ ID NO: 115049 - DNA, 201 bp, Homo sapiens
tgtgttatgcatccgaagttccttcctttttaaggctgaataacattccttcatgtggatagaacactttttgtctgttcatcatctgtttttggtgtgtktttttttttttaatttcagacagggtcttagtctgtcacccaggctggagtgcagcggtgcgatctcagctcactgcctcaacctcctggtctcaagtga

SEQ ID NO: 115050 - DNA, 201 bp, Homo sapiens
acgacggtaccatggaccccgctggcacctgtaccaccctcgccagggcagcttctgcccgaggagcacaggtactgatggccgcctggctctgggtcccytgttcccagcccactcctcctgccttagaaccctgagagcagaagggaagagaacaagagccattctctgactgctgtgtgactttgggccagtgaggac

SEQ ID NO: 115051 - DNA, 201 bp, Homo sapiens
gggctgagtgcagacctcgcttctagcagtttccaaccatcactgcgcatgggtttcagcacaggggctgagtgcagacctcgcttctagcagtttccaaycatcactgcgcgtgggtttcagcacaggggctgagtgcagacctcacttctaccaagcccactttgggcacgacccttgccccctcagaacaaggatgct

SEQ ID NO: 115052 - DNA, 201 bp, Homo sapiens
gtcacacagctggcgagggtcggattggcacaggcggcctggccccggagcctgcctcagtgccctgctccttaactcttatgctgaagcggattcaaggracaggctccgggggcgtggggaccggctaaggcttctgggagaaagtgaggctggggtttgcggtggatgcccagttggggaggggagtggcccaggggt

SEQ ID NO: 115053 - DNA, 201 bp, Homo sapiens
gctggagtgcaatggcgcgatctcagctcactgcaacctccgcctcctgggtccaagtgattctcatgcctcagcctcctgagtagctgggattacaggckcacaccaccatgcccaactattttttctatttttagtagagacggggtttcgccatattggccaggctggtctgaaactcctgacctcaggtgatcctcc

SEQ ID NO: 115054 - DNA, 201 bp, Homo sapiens
agttctcattctcctaactaaccagggggcatatattaagcacctatggtgtgcatgtcccaggacagccaaccttctgccttcaccatttcagccatggrtgtcctggcaaactggatctcctgacctgcagtgttggccagttcctgtggtgtgaacactcccaccctggccaatagcaaaagccaccagtgtgaggtc

SEQ ID NO: 115055 - DNA, 201 bp, Homo sapiens
ttatatattgaccttgtatcctgcaacctcgttgaactattttattagttctaacagttttttttcttttttttcttttttttttttagtggattccttargatttcctatatacaagatactgttttggcaaatagggatgtttttatttcttcttttctgatctggatgccttttatttttcttttcctgcctaattgc

SEQ ID NO: 115056 - DNA, 201 bp, Homo sapiens
ccccttcacgagcccctccctgacgcccccacctgagggtgcagagggctgcagtgctgatgggcagtctgctcgggggggcggtcgccccagggaacctyctggagttggggatgcccctgcctcctgcccaggtgactaagcagctctgagagtgtggctaggggctggagggggtgggtttaggcagcatcctcatgc

SEQ ID NO: 115057 - DNA, 201 bp, Homo sapiens
tttctccatgttggtcaggctggtctcgaactcctgaccccaggtgatccacccgcctcagcctcccaaagtgctgggattacaggcatgagccaccgcasccgactgtctttttattattgagttgcaaatttttttatagtttagttacaagtctcttatcagatctgtaatgtgcacacactctccccatcctgtggt

SEQ ID NO: 115058 - DNA, 201 bp, Homo sapiens
gagtgggagagaagcacaatgctttctaggctggggtccctgcgtgtgggatgggggggaggggaaacacaggggaggtgggacatgagcgtcaactggcrtgcgcgatcgtggggacacaggaaataggcggcggggaggtgctacacgcataaggaggcccagctgctgggaaacacgccgcgcaccggccgtggcagt

SEQ ID NO: 115059 - DNA, 201 bp, Homo sapiens
gacagagcctgctgcataccaggcccttaatacatacacacagaatgaatgaatgaatgaatgagtgaatgaatgaatgaatgagtgaatgaatgaatgartgaatgaatgagtgaatgaatgaatgagtgaatgaatgaatgagtgaatgaatgaatgagtgaatgaatgaatgaatgagtgaatgaatgaatgccatgg

SEQ ID NO: 115060 - DNA, 201 bp, Homo sapiens
ctgggattacaggcatgcaccaccacgcccagctaattttgtatttttagtagagatggggtttctccatgttggtcaggctggtctcgaactcctgaccycaggtgatccacccgcctcagcctcccaaagtgctgggattacaggcatgagccaccgcacccgactgtctttttattattgagttgcaaatttttttat

SEQ ID NO: 115061 - DNA, 201 bp, Homo sapiens
cacctctctgctttggaagtggccccgggaggaacttcccttgaacaccgtcctcccagtagatgctgactgttggtctgagagagggtagagctgggccyaccaggtcggaggtatgtgcggttcatggtcccgggtcactctgtggtgtgttcttctctgtccttccgtatttctgcgcccctcgcttgcccagtgcta

SEQ ID NO: 115062 - DNA, 201 bp, Homo sapiens
cactgacagagcctgctgcataccaggcccttaatacatacacacagaatgaatgaatgaatgaatgagtgaatgaatgaatgaatgagtgaatgaatgartgagtgaatgaatgagtgaatgaatgaatgagtgaatgaatgaatgagtgaatgaatgaatgagtgaatgaatgaatgaatgagtgaatgaatgaatgcc

SEQ ID NO: 115063 - DNA, 201 bp, Homo sapiens
catacagtgaagaatagaagattctcaaaacctcacccaggcatttgtaaacctggggaaggaaatagggagtgatgttgtttatgtgtgtgtgtgtgtgygcgtgcgtgtgtgtgtgtgtgctttgaaaacagctttattgagatctaattcgcatactatatgatttattcatttaaaaggtacaactcagtgtttttt

SEQ ID NO: 115064 - DNA, 201 bp, Homo sapiens
tcctctgtcctcagtcccctccccatcctccctgcccggcctcacggggcagcccactttcctcaggtctcactttggatctctgccagccacgccacccmctcttctctacctccccttgtggccccgacccccacttctacccagagcttggcgctccctgtcttttctgtgggctggcagagacctatcctcaccaag

SEQ ID NO: 115065 - DNA, 201 bp, Homo sapiens
tattggtcctctgtcctcagtcccctccccatcctccctgcccggcctcacggggcagcccactttcctcaggtctcactttggatctctgccagccacgycacccactcttctctacctccccttgtggccccgacccccacttctacccagagcttggcgctccctgtcttttctgtgggctggcagagacctatcctc

SEQ ID NO: 115066 - DNA, 201 bp, Homo sapiens
cggggcatggggaaccaagtccccacccagttctggatgatgccaaggcctctctctctgccttccagaacatgcccaatgtccgtgatcatgatgcctcygtctacctccgcctccaaggggatgccttgtctgtgggtggctatgaggccaaccccatcttttgggaggaggtaagatgccagggccctgggataatgg

SEQ ID NO: 115067 - DNA, 201 bp, Homo sapiens
caaggatgaaggctcagagcgggctttgggcggttccccagcgtgttgggcacccagcttgggcgtcaggcagctcccctgggtgttgggcacccagcttrggcattgggaagctcccccttcacgagcccctccctgacgcccccacctgagggtgcagagggctgcagtgctgatgggcagtctgctcgggggggcggt

SEQ ID NO: 115068 - DNA, 201 bp, Homo sapiens
ccaggctgggttggaattgagggccttggtttctctgagagctgtgaagaatggagccagggagcaggtgctgtggcctctggaagaagcccagaccctgwccagagcaaggatgaaggctcagagcgggctttgggcggttccccagcgtgttgggcacccagcttgggcgtcaggcagctcccctgggtgttgggcacc

SEQ ID NO: 115069 - DNA, 201 bp, Homo sapiens
cgaatgtcgtgactgttcccctgttcctttgaacgttccccgagaaccacttggaacgccctcagctgcgtctccagtgccctgctcatgtgtttcacacmgggtccacctctctgctttggaagtggccccgggaggaacttcccttgaacaccgtcctcccagtagatgctgactgttggtctgagagagggtagagct

SEQ ID NO: 115070 - DNA, 201 bp, Homo sapiens
gtcactctgtggtgtgttcttctctgtccttccgtatttctgcgcccctcgcttgcccagtgctaccctaggtctcaggcggagtgggagagaagcacaaygctttctaggctggggtccctgcgtgtgggatgggggggaggggaaacacaggggaggtgggacatgagcgtcaactggcgtgcgcgatcgtggggacac

SEQ ID NO: 115071 - DNA, 201 bp, Homo sapiens
tgcaccatggaaatgggcaaatgctacagtcacacccacctcaccccagagctggttgttaaacattttctagcacccaagtggggtaacggaggtttctkcctaagatagggaaacctgctcattgatgggaaaggctccgagatggggaaggcgtttctgcctcgtaggtatctgttagcaaggccagatgcccgcttt

SEQ ID NO: 115072 - DNA, 201 bp, Homo sapiens
ccagatgcccgctttgagttgtgcctgcccgtggacatctgaaggccaccagctctccatgctgcctgcctgcggggggcagctcagagctctcagccctrcaggtgcacacatggctcagaagcaccactcctaaagctcctgtcgcagaaaaagcttggtttgttttttatttttttcatccagtcctgagctgctagg

SEQ ID NO: 115073 - DNA, 201 bp, Homo sapiens
caggaagtggtggcctgggcctggacctcagccatcttacatggccacatctaagccatgaccttgtcccccaggtccgagccatgcggctgtcctttgtsggggagctgggctgggagctgcacattccaaaggcgtcctgcgtgcctgtgtaccgggctgtgatggccgcgggtgccaagcacggcctcatcaacgcag

SEQ ID NO: 115074 - DNA, 201 bp, Homo sapiens
aacgttccccgagaaccacttggaacgccctcagctgcgtctccagtgccctgctcatgtgtttcacaccgggtccacctctctgctttggaagtggcccygggaggaacttcccttgaacaccgtcctcccagtagatgctgactgttggtctgagagagggtagagctgggcccaccaggtcggaggtatgtgcggttc

SEQ ID NO: 115075 - DNA, 201 bp, Homo sapiens
ctctcaaggctggcgggacggcccccgcccagccccagcctctcgctgtctgtgatctgggggtgagtgtccctgagaccggagcccctcctttccagctrttggtcctctgtcctcagtcccctccccatcctccctgcccggcctcacggggcagcccactttcctcaggtctcactttggatctctgccagccacgcc

SEQ ID NO: 115076 - DNA, 201 bp, Homo sapiens
tggattgcagtcaccacggttgctgcgtccccaggacatggtgactcctttgactgcctgtcctgcctcgcctgcacccaaggagacatccgtcttcatcrgcgccttctctcctgagaaggagggctccctcttgcattctcattgttattggatttttctggctgggcagatctgggagggtttcctgaaggaggaggg

SEQ ID NO: 115077 - DNA, 201 bp, Homo sapiens
cttaaaatctccaccgaggggtgtgtttttttactattagaatgagcaaagggtcagtttgaggacaggtaaaatcaatgtgcacatgccctctccagggraaaggccctactgcagacagctttgcttgaacgagctcagttaacacgagctcagttacagtgcaaacgtggaggctgattgtgtggattgcagtcacca

SEQ ID NO: 115078 - DNA, 201 bp, Homo sapiens
aggtgctcgggaggaggctccctcgagagtggaagggtcgtctccggagcctgcagaggaagcgtggctcgcccacatggtgattttggattttgagcctscagaaccgagagagagtttactgttattgttttaagccaccagttgtggtcgtttgttatgacaggtaggaaactaacccagtcctggagaagacctgag

SEQ ID NO: 115079 - DNA, 201 bp, Homo sapiens
acaagccaaggggtgccgggaggtgctcgggaggtgctcgggaggaggctccctcgagagtggaagggtcgtctccggagcctgcagaggaagcgtggctygcccacatggtgattttggattttgagcctccagaaccgagagagagtttactgttattgttttaagccaccagttgtggtcgtttgttatgacaggtag

SEQ ID NO: 115080 - DNA, 201 bp, Homo sapiens
ctggcctagaagccccaactaagctggcctagaagccgcagtggtgggcggtacgctccgcccagatcctgggcggagacatggggctggcagcgagggtsgggggcgggggaggcctggagttccggccaggccactgcttgggaagcaagaaggtgaaggcacctctgctgggccaagcactcttagggccgaggggca

SEQ ID NO: 115081 - DNA, 201 bp, Homo sapiens
ccctgagttgagtgtggggcagcccaggagctaccggtgaccccagagcaccagcattccttcatgagggcattcattctacattaagtggcacttcgtckgtggtggaggcaggcacgctcagggccagcgccctccttctggcaggggagacccaatgcaagtcactgatcacagcccgtgggtgggtgctctgacacg

SEQ ID NO: 115082 - DNA, 201 bp, Homo sapiens
cctactggcctggggagcccggaaggctctgccccagggggcgggtgtggggctgaggctgctggcctggggagcccggaaggctctgccccagggggcgkgtgtggggctgaggctgctggcctgggccctggcaaaggtgcactctctgggaagcaggaggggctgcagctgaccttggcaccccagtgtttataacca

SEQ ID NO: 115083 - DNA, 201 bp, Homo sapiens
tgagagcaagagtgtgagtggggggtgaggtgggggtggggttgtcgctgtggcaggttccagagctggctaggattcccaatcactgccgctcttgggcmccaggtgaggtacttatctgggagtctcagtttccctgcccgagatcggcaggctacaagtgccccccaggtgtttgggcaggaccctgggacccttctc

SEQ ID NO: 115084 - DNA, 201 bp, Homo sapiens
aagaggctggagcaaaaaggtgggctcagctcccagatgccccacgtgggtcatccacagcgcagctcagccccaccccaccctactggcctggggagccyggaaggctctgccccagggggcgggtgtggggctgaggctgctggcctggggagcccggaaggctctgccccagggggcgtgtgtggggctgaggctgct

SEQ ID NO: 115085 - DNA, 201 bp, Homo sapiens
cctaaagctcctgtcgcagaaaaagcttggtttgttttttatttttttcatccagtcctgagctgctaggaacaagaaggagccctctgactcccagagcrgagcccgagactccctcctgtggccctgaccttgggtttaattgctgtaaaggaagaacagcttccctgagtggcctagcctgccctcctcatagcagct

SEQ ID NO: 115086 - DNA, 201 bp, Homo sapiens; identical to SEQ ID NO: 19310

SEQ ID NO: 115087 - DNA, 201 bp, Homo sapiens
tgtgatggccgcgggtgccaagcacggcctcatcaacgcagggtaccgcgccattgactccctgagcattgagaaaggtgagtgcagggtctggacagcayggggcgggggcgggcgcagtggggggcagtgacgctcgagacacctggaggccgagaagctgtttaccttccctgtgttgtcacccggcttccttctttc

SEQ ID NO: 115088 - DNA, 201 bp, Homo sapiens
tcatccagtcctgagctgctaggaacaagaaggagccctctgactcccagagcggagcccgagactccctcctgtggccctgaccttgggtttaattgctstaaaggaagaacagcttccctgagtggcctagcctgccctcctcatagcagctgcagcaaaagtgccaggcgtcaccagctgtgccaggctggaggtgac

SEQ ID NO: 115089 - DNA, 201 bp, Homo sapiens
gaacctgtgaatggggccttgtttggaaataggatctttgcaggtgtaattaaggtcaggatctccagatgatattatctagggctagggaaggtcctaartccagtgacaagtgtccttagaagacagagacacaaaggggaggctgtgagggctgaggcagaaatcgcagtggtgcagccacaagccaaggggtgccgg

SEQ ID NO: 115090 - DNA, 201 bp, Homo sapiens
gaccttgggtttaattgctgtaaaggaagaacagcttccctgagtggcctagcctgccctcctcatagcagctgcagcaaaagtgccaggcgtcaccagcwgtgccaggctggaggtgacaccctcctcctgcctaagagcacctgcacctggggctgactggctcccgagcgcttgctggggagcccgagccagggtgtg

SEQ ID NO: 115091 - DNA, 201 bp, Homo sapiens
ttattgaccgtgttcccaccgttgcaagggccgtggagggacgagatgaagcttagcccagagcacccgataatcggcactgtcacttctgcagggcttgrgccatcgtgtctttcacagtcaggtatccacagccccacaggcctttctctcctgcctcccaccatgtccgctgcccaacgctgggcctttgcacctcac

SEQ ID NO: 115092 - DNA, 201 bp, Homo sapiens
ctgcagcaaaagtgccaggcgtcaccagctgtgccaggctggaggtgacaccctcctcctgcctaagagcacctgcacctggggctgactggctcccgagsgcttgctggggagcccgagccagggtgtgggatggggagcatgcagaggccaagctgtctagaaggctgttccagccgcccctgccccgagggattcgag

SEQ ID NO: 115093 - DNA, 201 bp, Homo sapiens
tgcttgcccgggtccggggaagccaccgtgttgctgctgtttcccaggcatctggaattgctggggtgggaggtgtgttgtccggtggaagtcatattggytgccagaccttggctttgccggaccccagatgcccatgtccaactcaagatcacatggacacgaactgcacctgctctggggcaatgcctgggttcagaa

SEQ ID NO: 115094 - DNA, 201 bp, Homo sapiens
tgctctggggcaatgcctgggttcagaaaggagtccctggcacagggatgagtttgcccacagggcaggtagcaagaccaagaccccctcctccagagaarcaggcagacgtgagccctgtacctaccaacagagagtgatcctcatccccacctctgctcctaggtctcgctggactttgtgaagagcggggactatgcc

SEQ ID NO: 115095 - DNA, 201 bp, Homo sapiens
ccattccttccccctctccctggccatctcgtgctggacgctttgctttctggggaacaggggctatgtcctaggcactctggttcctgagcattgaggtrctcgggggatgtttgttgaacagatggatgggcggggaggcaagagggaggctcagggagcaggtggcgtttaaactgaagaaggggcctccctcacctg

SEQ ID NO: 115096 - DNA, 201 bp, Homo sapiens
tcatttctcacctgggtgaccccaacctccgcatctctggggtagagggaggggtgtcaaggcctggtccttggaatcctctggcttcattgccacgccarccttggacagggagtggggatatttttagtgtgggggaggcaggtgggccgtggagggaggaggtggcagatggaccgatcaaggtgcggcccgggggcg

SEQ ID NO: 115097 - DNA, 201 bp, Homo sapiens
ggatatcctttagatgggtggtcagggcagggtttttcagggaggggacatccaagcagagccctgcaccgcgacaacaaaccagcgtgccaggtctgggygaagaactgccccattgaggggtgaaggccttgagctcacacaagcttgctcttcccaaagagctgcaggaaggtcagggtggcgggcccagtggtagag

SEQ ID NO: 115098 - DNA, 201 bp, Homo sapiens
cgtgcatgatgaagagtggagggtgctggccgcagctgccgggaaagggactgggatgcggtggaatcatgcagtccccagcctggcccacaggcagccgygatgctgtgtgcttttcatttctcacctgggtgaccccaacctccgcatctctggggtagagggaggggtgtcaaggcctggtccttggaatcctctggc

SEQ ID NO: 115099 - DNA, 201 bp, Homo sapiens
aggcagggatgccaggagggagtgatgagctgagtccatgcggctcacgggcgagggtttggcgttgtggtggttcccatggactgggcgaggctcatagyacccgacagtggatggggtgtgctgagagggtcgggggagggtaggggacagagacagcttccgcgtgcatgatgaagagtggagggtgctggccgcagc

SEQ ID NO: 115100 - DNA, 201 bp, Homo sapiens
cttctagcagtttccaaccatcactgcgcgtgggtttcagcacaggggctgagtgcagacctcacttctaccaagcccactttgggcacgacccttgcccmctcagaacaaggatgctgggtctgtgggcaggtctcgtgagctgcggcacgaagctcatctggctgggacatggtggtcagcggcatctcagaggaccgt

SEQ ID NO: 115101 - DNA, 201 bp, Homo sapiens
ctgctcccagcagtggtaacagcaggtgcaaaggccccgtggcaggccagtgcgtatgtctgaggcacgcattgaggctgggatggagcaggccaggagcygggctcagagggcagcagggtgagatactggaggcccagcagctgctcctctgagggaggggtgctgagcagaggaggaacatggtcgggcttgggcttt

SEQ ID NO: 115102 - DNA, 201 bp, Homo sapiens
cccagcctggcccacaggcagccgcgatgctgtgtgcttttcatttctcacctgggtgaccccaacctccgcatctctggggtagagggaggggtgtcaakgcctggtccttggaatcctctggcttcattgccacgccagccttggacagggagtggggatatttttagtgtgggggaggcaggtgggccgtggagggag

SEQ ID NO: 115103 - DNA, 201 bp, Homo sapiens
tgcaaaatagaaccaagctgttgttattttgtgattttttttttttaccaagcagtagactgcaaacatctttctgttaatcaaatatcttgctttttttwaaaaaaaaaaaagtcagctactttttcacgttatgaaaagagggttccccccacaagtcaagtgaaagaacttgcccaactttcaagttctccaagtcaa

SEQ ID NO: 115104 - DNA, 201 bp, Homo sapiens
tgggagagacggtgtcgtgcagcccagaactggccatcgctgtggtcatggttagcaccaggggctttgtgtgctttcttgctggttcctcacagtggccygtggcatcacagatgagggactggggcttggtagggttcaggggtaagtacagggcctgggactagaaccggggcctctgactgggaagctcgtggaccc

SEQ ID NO: 115105 - DNA, 201 bp, Homo sapiens
tccctgggctcctgagagctgatgcgagccggctcccacaagccactgctccaactcttgctcttgccttctcactggccccctagctgggctgtcatagmctcttccctgacgtttcgccagccacacccctggcctgccacctctcacattcagctgctggagggcatcctttgttggggagagtgcagatttaagctt

SEQ ID NO: 115106 - DNA, 201 bp, Homo sapiens
ggagagacggtgtcgtgcagcccagaactggccatcgctgtggtcatggttagcaccaggggctttgtgtgctttcttgctggttcctcacagtggcccgyggcatcacagatgagggactggggcttggtagggttcaggggtaagtacagggcctgggactagaaccggggcctctgactgggaagctcgtggacccct

SEQ ID NO: 115107 - DNA, 201 bp, Homo sapiens; identical to SEQ ID NO: 19231

SEQ ID NO: 115108 - DNA, 201 bp, Homo sapiens
gccttggaccaggtggcagctccaggcttctgccccagggtcccttccgtgcggctgccactcaaggctgcagagagcatgtgcttgtcaggtctgaggcrctggtatcactctccagggcttggcaccacgtgggtgctgagtggttacataagggtcttggccaactgtaccacagctgagcacctcaggctgacgtgg

SEQ ID NO: 115109 - DNA, 201 bp, Homo sapiens; identical to SEQ ID NO: 19316

SEQ ID NO: 115110 - DNA, 201 bp, Homo sapiens
aactcaaaataccatccaactatttagttctttagacagagctgtgaaattataagatcaggaataaatgtgtcttcagagccctcctacacgagatattstgtaatgggatgggcattttcagtagtcttctgtggacttggcagtcttgtctcagatatcacacccaagcccaattcagttgaggcaattctttttgag

SEQ ID NO: 115111 - DNA, 201 bp, Homo sapiens; identical to SEQ ID NO: 19317

SEQ ID NO: 115112 - DNA, 201 bp, Homo sapiens
ataacaaactgaattgggatgatgactatttaacgagagaaggaaggaaattgggtttctgggaaatccggaagaaacaatgagcaggtcttgggtggacyggcagcagcggggaggcagcatcttggtctgaagtggagaggtcgttttcctttcctggcatgggccactctgaccctcgtcactatcttttcaccatgg

SEQ ID NO: 115113 - DNA, 201 bp, Homo sapiens
atgatcacaccactgcactctagcctgggcaacagagtgagaccctatcttaaaaaaaaaaaaaaaaaaaaaaggacatggggtgtgcattaaaggtcctyaagcaaacaactgccaggacaggagaaactccttgcaggcagaggatagctgcattaaatggcccttgagttccaccattcccttgggattttttggtca

SEQ ID NO: 115114 - DNA, 201 bp, Homo sapiens; identical to SEQ ID NO: 19321

SEQ ID NO: 115115 - DNA, 201 bp, Homo sapiens
cgtgcatctgtagtcctagctacttaagaggctgaggtgggagagtcacttgagcctgggaggtcgaggctgcagtgagccatgatcacaccactgcactmtagcctgggcaacagagtgagaccctatcttaaaaaaaaaaaaaaaaaaaaaaggacatggggtgtgcattaaaggtccttaagcaaacaactgccagga

SEQ ID NO: 115116 - DNA, 201 bp, Homo sapiens
tccctagtcgcttcgtgatcggccgctcccggggagaggcggtggccgagcggcggagggaggagctaaacggttacatctggcacttgatccacgcaccycctgaggtggccgaggtgggtgggcttgcctctcctcctggctgtccaggctggtggggatggttggggaggcagaggtggaagcatccggaggcactag

SEQ ID NO: 115117 - DNA, 201 bp, Homo sapiens
gagaagatccccactccaggcatgtttcatctcttccctctggaactttgccatcattctctccaggcgagaagtggcagaatagaaagactctccctccwtcagtcttcacaggacatatagaaagagtgggaactcctttaaatcagagtgtgagctgaggagagggagggagaaaatgggtttcccagggcactgggt

SEQ ID NO: 115118 - DNA, 201 bp, Homo sapiens
tggtaggcttgccccaagtttttttggcctcagcaccctagttggtagcattggaagaggggtctctcgctgagctcccaccctggagcctgagcacaggyggactccaacatgtctcttcctggttgtcccctatacagaggcccagaagatagggcttcagcaactgctccctgtgatgtgcctctgtttccccgctct

SEQ ID NO: 115119 - DNA, 201 bp, Homo sapiens
atcgcttgaacccgggtggtggaggttgcagtgagccgagattgcgccactgtactcccgcctgggtgacagagcgagactccatctcaaaaaaaaaaaaaggatttttacatcgatgggagaaactgagggctcccgagccatttctggggagccacaggactctggcctgctgtttggttttcttgtctggggcccttg

SEQ ID NO: 115120 - DNA, 201 bp, Homo sapiens
actgcaacacattcaacgcagacttccagacggcagtgcccgggagccgcaagcatgacctggtccaggaggcctgccatttcgccaggtccctggccttyactgtctatgccacccaccgcatccccatcatctgggctaccaggtgagcccagggctgagtagccgctagggagcaagctgagtttgacctccaccagg

SEQ ID NO: 115121 - DNA, 201 bp, Homo sapiens
cagaactgtacacttaaaaatggttaagatggcaaattttatgttacacatattttactgcaatttttttaaaaactacttttcaggccgggcgcagtggytcacgcctgtaatcccagcactttgggaggcctaggtgggcagattgcctgaggtcaggagttcgagagcagcctggccaacatggtgaaaccccatctc

SEQ ID NO: 115122 - DNA, 201 bp, Homo sapiens
tggaaagacagataaggggatggatgttgaccagacaaaataagatggagtcaacccctcaccactcctctcctgctttaaactcagaaatatctctaacrtattttaccaactaaagatgtcccattttcaagtgtaaaacactctctagacgtgttaagctgcctcagctcttctttggagtgcagtgactttaattag

SEQ ID NO: 115123 - DNA, 201 bp, Homo sapiens
atttacccacaggcacacagctattttctcagccaaaataggattcatttaaggtagaaagagcatctgtgacagggagaggatttgatagagatccaggwcacgactgggagttacgcgttatgctccttattaagtgcttttattcatttattttactttctaagaaatagtctttttcttccagaagatgaatgctgt

SEQ ID NO: 115124 - DNA, 201 bp, Homo sapiens
gaagatccccactccaggcatgtttcatctcttccctctggaactttgccatcattctctccaggcgagaagtggcagaatagaaagactctccctccttmagtcttcacaggacatatagaaagagtgggaactcctttaaatcagagtgtgagctgaggagagggagggagaaaatgggtttcccagggcactgggtct

SEQ ID NO: 115125 - DNA, 201 bp, Homo sapiens
ggggatgctgtttgtcccatttcctcactgccacctctcagcatcatagtgagctgagtgctgagcctttgggaggagcattgccagtgtggccctgggcrtgagatctgtcagaggggtgggcttccttccctgtgtggctgagacagtctagtggtggcctggcccagagccaggaggatggtggttagagaggggtag

SEQ ID NO: 115126 - DNA, 201 bp, Homo sapiens
agggcctgttgggttgggtgctcccctccttagattctgctttttaatgcaaatggccctgggagggactaacaccttgacctctcacacccctgtgtaartgagtatcagatgtttaggggtgtttcatttttctgtttttctctggattgaaagactggaactgcttgaaaaccggtgtccctttcctttcctaccctg

SEQ ID NO: 115127 - DNA, 201 bp, Homo sapiens
acatgacccgtgaaaggacctatcctgcaacactttggagtttcgtgccgacccaattagtggctttgtctttgggaaatttacttccccaaaacactggracattgggatggaattcactcaccccaaatcatcaccctggttaaggagactaaagaatcagaagacatttgtgctttggggagcagaggccctcagggt

SEQ ID NO: 115128 - DNA, 201 bp, Homo sapiens
ctgtgaactctacttaaagacagagtgagggcacagactggggtatgggcacaggtgagcatctccatatgagccgtacatacagaatgtattttccctcycaagttcggggtgggttttgcagtgagttggagctgggcctgactctgtctccccctgtacccttgcctttgatccctggagtgccctgactcctgactc

SEQ ID NO: 115129 - DNA, 201 bp, Homo sapiens
caacttcaggcagtatgtgagccccagggtacagcttcttggccttggaaagggaggagggggacagagaaaggggcctggctgctgcactggccagtgcrccttgggagagttggccatgtggggctcactggtgaagtccagaggatccccaagcacagaactggtgaccaggactattgatgtaaccaagagccactg

SEQ ID NO: 115130 - DNA, 201 bp, Homo sapiens
ggccacctacatccagcggacctttgaggagttccaggaattacacaataagttgcggctgctcttcccttcttcccacttgcccaggtagctgccccctytactatctgcacagagggatgtcggggagggggaaaggatacgggatgggaggtggtcagggctgcaggggcagaaaatacccttttggactaaacatct

SEQ ID NO: 115131 - DNA, 201 bp, Homo sapiens
gccccgggatgagaaggctatgggcaccagcccagctcctaagtcctcaggtacagtatcttctctgagaccttactgccaactcctctgaactaccccargggtaactgcttctgccccaacctcttctcagttctctctccttgacttgcctcctgttccttttcttactctctgggaaatctagtttcccactcaggc

SEQ ID NO: 115132 - DNA, 201 bp, Homo sapiens
tctctgttgttacaggcaccctctcttcttctttctgctccttctagatgttgtcctgtgggatccctgaactctcagacctggaggacctcaagtatgtrtacgatgccctgaggcctcaggatacagaggccaatgccactacctacttcactaggtaaaatgattccctgagcgaatcagcactgcccaccctgagta

SEQ ID NO: 115133 - DNA, 201 bp, Homo sapiens; identical to SEQ ID NO: 19329

SEQ ID NO: 115134 - DNA, 201 bp, Homo sapiens
ccctatcatcccccaaattccttttactgttggcttgttagagctataatccacataagaactgcatgttgttggttgttatatttcctaagtctttttamatctggaacagtccccttcctttttgtattgggccattgtcttattgaagaatggccctgtttctgattctgttccagtgtgatttggtgtacaccttct

SEQ ID NO: 115135 - DNA, 201 bp, Homo sapiens
aagcttaaagacatcatgcagaaagagtccttgtactggtgagacccgggcccccactgaatctgtcatgtttcatctgacctcccagcactgagtctccrtcctcctgctttgggagtggaggtgggaaggggtgggcattgccatctcagcaggaagtggaggcagcccccaggcctttctccatcagctgacactagg

SEQ ID NO: 115136 - DNA, 201 bp, Homo sapiens
gattttgttgacctttgctgccaagcctacaacctcattcgcaagcacacccacctcttcctcaaccttctgggcctggtgaggagctccatccctttccraataccttcttcttattatctggcatcatctttaagacttccctgtcttgccgcagaggatttctagagatttacctctctgagccccaactgaatacct

SEQ ID NO: 115137 - DNA, 201 bp, Homo sapiens
ttgaacatttccagtgatgcgggggaagctctctgaacacctgtgctgtgctggtctggccctttgctagtggctacgatgggtagagaagtgtaagaatygtcatagccttggccaggtgcggtggctcacgcctgtaatcccagcactttgggaggctgaggtgggcgggtcacctgaggtcaggagttcgagaccagc

SEQ ID NO: 115138 - DNA, 201 bp, Homo sapiens
ccatctgccttgacccctcccaggctgtggagaactttatctactcctgcgctggctgctgcgtggccacgtacgtcttgggcatctgtgaccgacataaygacaacatcatgctgaagaccactggtcacatgttccacattgattttggccgcttcctgggccatgcccagatgtttggcaacatcaagcggtaagtga

SEQ ID NO: 115139 - DNA, 201 bp, Homo sapiens
agatggagtctatgtttcccaggctggcctcaaacttctgggctcaagcgatcgtcctgctttggcctcccaaaatgctgggattgcagttgtgagccacygtgcctggcctttctgaggatcttgaattcggatggaagcaggagagagagaaagcaggaggaagagaaaggcacccccagtggtagccatggctttggg

SEQ ID NO: 115140 - DNA, 201 bp, Homo sapiens
gtcaagtccttgcagggccttgcagaagaatgcggggaccagctgttcttccctaccaaggactgaacaaagggaaatgaaccaaactgtagcaaaaaggratgcaatcagatatccagaaaaaaatattgccagctcacagataaggaaccaatgaaggatatagagatcttttaagattaaggtaggaaaggaacaaag

SEQ ID NO: 115141 - DNA, 201 bp, Homo sapiens
ttttgtgttttttgtaaagatggagtctatgtttcccaggctggcctcaaacttctgggctcaagcgatcgtcctgctttggcctcccaaaatgctgggaytgcagttgtgagccactgtgcctggcctttctgaggatcttgaattcggatggaagcaggagagagagaaagcaggaggaagagaaaggcacccccagtg

SEQ ID NO: 115142 - DNA, 201 bp, Homo sapiens
cttgggaccttcctgtgcaaactggggggataagagatcggagaaaggcatcagggcatgtacaaagcaacatcaaaactaattgacatgattctttgctytatacccctccccctcgctaaagtcactttcttttttcaaaatcttcatgacccataaccattccatgcacagagatgcaaaaatggtcagttaatatcc

SEQ ID NO: 115143 - DNA, 201 bp, Homo sapiens
tctcctttgacctggctaaagtagaatccttggtcttccggctgggttcagtgtccttgactgaccctggagcaggatatccttctggcctgctaccaggragaatggaggctcccagcttgggaactgcatggctgtaggcagaggaccgtggccacctggatcaacctgggctaagaatagccaaggccagggtttgga

SEQ ID NO: 115144 - DNA, 201 bp, Homo sapiens
agccactttagcagctcttcccactctccctccttcttagggtcctgacctgtggccggaagcttctgggtttgtggccagcaacacaggaaaatcccagygcccgttggagtgcacctaatttccaccagccagacagtgtcatcctgcaggtgaggctttagcccttccctcccagtcaccagcaagaccattccagtc

SEQ ID NO: 115145 - DNA, 201 bp, Homo sapiens
tgaggaaagtagggacactgggaaggaacaaatcacaataaccaaactcacaagagactggctataggccagaatgctaattcgtataattttaacttcargggacccaaatactgatttatattgatcaatgtactttatcctggagggaaaaccagcatgggcagccaaggtataatcagaacattgtttagtgaatgt

SEQ ID NO: 115146 - DNA, 201 bp, Homo sapiens
agggcgtaagcttttacaggacttgggagaaggaagaggctatggtccacggtgagaatgagaggggagttggatgatggcttcaaacagaaaaggcagayttttggattgggggagcagtagaaatattctctgcttagccactttagcagctcttcccactctccctccttcttagggtcctgacctgtggccggaagc

SEQ ID NO: 115147 - DNA, 201 bp, Homo sapiens
ctctctttgtgactgattgatatttttacccctcacctgcaggcgcccagacaccatgtcacaaccctccagaactgacgttggcaggaagtagagacttygttgcctgtgtcccccatcctcaccatgtcttcgactcagggcaatggggaacactggaagtccctggagtcagtgggcatcagccgcaaagagctagcg

SEQ ID NO: 115148 - DNA, 201 bp, Homo sapiens
ggttgtgcgcagtgacctggcccggacggttcgtgtgagggtggtggagggttgcccagggctggggaggtggaatgggaatacaatatagaacacatcakgtgggaggggggtaggagtgctgagctgagataagggcaccgcccctctctgaataggtcacttcttatacaggtgaatgatgaccagagcccctccacc

SEQ ID NO: 115149 - DNA, 201 bp, Homo sapiens
ttttctaggagccaaagtagggtacaacacgggtactacccccttacctaaaccttctttctgtatgtctctccccaaggctaaggtatgtatctcccttsccactgagtccccaggatgctaatggtcttgtccctctaccctaccagcaagcatgccttgggcagtcatgagtacatccaatactgccgcaagtttgac

SEQ ID NO: 115150 - DNA, 201 bp, Homo sapiens
ccgcatgcagcctaaaattcagaaggtaaaggggcccagggtgctagcaggggaaaggaagagagggatactgtcaggtaactgagttgcctgttgctagrgtgtgtaggtgttcactcactaaaaaggggcttctctccacctccatcttttatgtttaaggaattcaaccgcaagagctcttcagaaatggatgccaag

SEQ ID NO: 115151 - DNA, 201 bp, Homo sapiens
agtaagagtgtgagggggcttcatgggattggtgctgggaccggcctggcagctccgccccaatcccacagtcaagactcctgctttctgggcacactctyggccacgtagcactttccccaggagctctgtcttccagcagggttggctgacgtcctgagccaagtctgctgtggaaagagcttggagctgggattaggc

SEQ ID NO: 115152 - DNA, 201 bp, Homo sapiens
atgcaaggtcgaggagctgagttgtctgggcgtcagtatgttgctaacttaccatgtggtcttggcctagcatcttttcctcaggggtctcagctcacccycatgcaacatggtgaggattatgttatcctgtctctcctctacccacacatggcagaaatagaaaggagaaacgaggcagaggggctgtgaactctgctt

SEQ ID NO: 115153 - DNA, 201 bp, Homo sapiens
cagagtgggagggctcagtggaggtgaggtcttcactaaccaggcatgcaaggtcgaggagctgagttgtctgggcgtcagtatgttgctaacttaccatrtggtcttggcctagcatcttttcctcaggggtctcagctcacccccatgcaacatggtgaggattatgttatcctgtctctcctctacccacacatggca

SEQ ID NO: 115154 - DNA, 201 bp, Homo sapiens
ggacgtgggtgactttgtgctaaagccctgcgggctggaggagttcctgcagaagtgagtgaatgggtgggaggtagcccctgccttcctggtagtaagaktgtgagggggcttcatgggattggtgctgggaccggcctggcagctccgccccaatcccacagtcaagactcctgctttctgggcacactctcggccacg

SEQ ID NO: 115155 - DNA, 201 bp, Homo sapiens
ccgacgtacatcctcatccccttggaatggggctgggccctcgtttgaagtacgcctccacactgcctccttgctccttgcagacctggatgggttagccyggccccgccgagcccagtgcagaagacctgcggaggcagctcctctgccgtggcctctcctgtcctctctctgatgagccctccaggcagagcagagcct

SEQ ID NO: 115156 - DNA, 201 bp, Homo sapiens
aaatacaaaagttagccaggtatggtggcacacacctgtagccccagctactctggaggctgaggtgggaggatcgcttgagcccaggagtttggggctgkagtgagctatgatcacaccattgcactccagcctgcgtgacagagtgagaccctatctcaaaaaacaaaacaaaaaccaatccctgtctcattgatccag

SEQ ID NO: 115157 - DNA, 201 bp, Homo sapiens
atggctcaggcctgatgccacccagagaggacacctttatctgtttgtacgaagacattgtaaccagccagcagtgttcctggttaacgacatttaaaaaytgagagattttgtatcaacgtccagattgttagcttttcttggcagaagcctaaatagctcttcccccttgagagacagcctgccctctctgtgcactgt

SEQ ID NO: 115158 - DNA, 201 bp, Homo sapiens
ttcctacacccttcactgggtgcagagggctcggcaggtacaccctaagatctggacctttgcagatatatgtggtaaaggtgatgcgagagaacactcaygaggccacctacatccagcggacctttgaggagttccaggaattacacaataagttgcggctgctcttcccttcttcccacttgcccaggtagctgcccc

SEQ ID NO: 115159 - DNA, 201 bp, Homo sapiens; identical to SEQ ID NO: 19332

SEQ ID NO: 115160 - DNA, 201 bp, Homo sapiens
gtgagttcctagttcctttctaccttggtttgatggtttttggctcaggtgggcagccaggggaggagataagaccctggggttcacatgagcaaattgcrtgagattattgtgtgccagtcatttgctttatgaggatatgacacaggaaaatggtttgatctgagctgattgttagtctcaggagtcaggaatattcct

SEQ ID NO: 115161 - DNA, 201 bp, Homo sapiens
agatgaatggatggatagttggatataataaataggtaaagttgtcttggtatcccttttttcctccatcttcctgtacattccattagttgtacacaacraagaagcaggcactggcccagataatatcacctaaattggattattatggatgattagtaaatctctctttgtgactgattgatatttttacccctcacc

SEQ ID NO: 115162 - DNA, 201 bp, Homo sapiens
tatagagatcttttaagattaaggtaggaaaggaacaaagaaaaaagttagagccccttctatccagtgtgtccacgtgatgagggatgagggaaactgayccctgatgcagcccatatggtgggcttcctcctccatgttgaccttctacctgtatgttccccttggctcagggaccgtgccccctttgtcttcacctcg

SEQ ID NO: 115163 - DNA, 201 bp, Homo sapiens
agtgctggaattgagtgagccaccgcgcccggccatcagcttaaacacttaatcaaatgtgatgtgcctgggtttccacaacaggatgggaaaaagaccaygaagtttgggctcacacacatttcagtttaactcttgattttatcatttacaagttgtgtgacctttgggccaattattgcatccctttcctgttttcta

SEQ ID NO: 115164 - DNA, 201 bp, Homo sapiens
cacaactagtaagttgtgcgcagaatgaactaacaggatgggaggttaagtgctggagctgaggtcataacaaactgaattgggatgatgactatttaacragagaaggaaggaaattgggtttctgggaaatccggaagaaacaatgagcaggtcttgggtggaccggcagcagcggggaggcagcatcttggtctgaag

SEQ ID NO: 115165 - DNA, 201 bp, Homo sapiens
tctccatccaagatgtccctgagttgggatcaaagataggatttgggctctggttcccaaactttgattcatattggaatcacctggtgatctgtggcatmgactgatgcctggcttccccagccatttggacttaactggtatcaggtgtgacccaggcatggcgagggggttcactcagcccctcaagtgggtgtcata

SEQ ID NO: 115166 - DNA, 201 bp, Homo sapiens; identical to SEQ ID NO: 19318

SEQ ID NO: 115167 - DNA, 201 bp, Homo sapiens
ttatcctgtctctcctctacccacacatggcagaaatagaaaggagaaacgaggcagaggggctgtgaactctgcttaaagacagaatgagggcacagackggggtatgggcacaggtgagcatctccatataagccataaaataagagagagattaggaagaaaggcatatctgtggcctcttcccattcctaatgtgta

SEQ ID NO: 115168 - DNA, 201 bp, Homo sapiens
tttgtttttatacagaatccctagtagcccttgaagactaagggaatggagcaatcttaatttaaatttaaatttaatttaatttaatttgagacagggtytctgtcactcagactggagtgcaatggcacgatcacggctcactgtagcctcaaactcccaggtccaaacgatccatccacttaacccttcccagtagct

SEQ ID NO: 115169 - DNA, 201 bp, Homo sapiens
ttcagaaacagggactagtctctgctgttctacatccaactctgccaagtccttacccctttaggcctctcctaccctctttgggaccctggccctggtgrgggaggtccaggggaggcttgattaggggtggacaccagtagagggagggctccttctcagggccaggtttcatgtatcttggccaaaacggcccttctg

SEQ ID NO: 115170 - DNA, 201 bp, Homo sapiens
tgcctcacttaggtggagattcctctggaggacagcggtggaggcaggctgctttatcatgaaactgccaaccttgggggtggccgccctgcctctgcgcyctctggcatagaagttgctgggccctgggctggccaggagggtgtgacagtatggactttggcccagggacagcttccccgaaaggtaacgtgggtcctc

SEQ ID NO: 115171 - DNA, 201 bp, Homo sapiens
agcttaaacacttttttttttttgagacggagtctcgctttgtcgcccaggctggagtgcagtggcacgatcttggcttactgcaacttccacctcccagkttcaagcgattctcctgcctcagcctcccaaatagctgggaccacagacatgcgccaccatgcccagctaatttttagtatttttagtagagacgggctt

SEQ ID NO: 115172 - DNA, 201 bp, Homo sapiens
ggaattaagttgcccaggattgtgagtggcagaaccaggactggagccaaccagcacattccaggaatccttcctggaggaggcagcctgtgtgatatgakgttgttgaatgggctgcaggaaggagaggggtttctcagggaggaaggtaagggctgcagccaacataatggttatcctgaccagccctgggtgaagatc

SEQ ID NO: 115173 - DNA, 201 bp, Homo sapiens
agcaaggagacagactagttagtggtctgtttcaatcattcatcattcaggtgagaaaaaggaataataatttttttggtgcccaataaaataatttttcmggtaaaagaataatcattcaggtagaagaaaggaataacaaattttttggtgcccaatatatgctttatataggttatttcacttaaagtcatcagaggt

SEQ ID NO: 115174 - DNA, 201 bp, Homo sapiens
tgctgtcaagagaaggggtgccagcctgggcaacaagggagacccaatctctacaaaaaatacaaaaaattagccaagtgtggtggcatacacctgtggtyccagctacttaggaggctgaggtgggagaatcacttgagcctgggaggtcaaggctgcagtgagtatccagcctcggcaacagagcgagaccctgtctca

SEQ ID NO: 115175 - DNA, 201 bp, Homo sapiens
actgagaaatggggacattggtttcactcagaggcagttatggcgtcgagatgagataggtgggttataaatataaatatgaaaccaaaagcacaaggtartattaatcaccacatgtaaacaataatttggtgtcgggaaggtaggcgtcagccaagcaaagcaggaaggaaacggaggagagggtgccttgcttgaatg

SEQ ID NO: 115176 - DNA, 201 bp, Homo sapiens
gcgggcggatcacctgaggcagggagttcaagaccagcctgaccaacatggagaaacctcgtctctactaaaaaaaatacaaaatagccgggcatggtggygcatgcctgtaatcccagctactagggaggctgaggcaggagaatcgcttgaacccgggaggtggaggttgtagtgagctgagatcgtgccattgcactc

SEQ ID NO: 115177 - DNA, 201 bp, Homo sapiens
ctatcctccgtcagctcactctgtccatcatacagatctggtacaaaccattactctctcctctctggggattctcagctactcacatttcagcccattcyggtccagatgagcgcagctgtgaaaagcccttcttccagctgtgacgaaaaaggctatggccctgaagctcccctccctcttctttttcccaacaggatc

SEQ ID NO: 115178 - DNA, 201 bp, Homo sapiens
aagattatcctggcagtggagagcagatactttagggggtcagcaaggagacagactagttagtggtctgtttcaatcattcatcattcaggtgagaaaaaggaataataatttttttggtgcccaataaaataatttttcaggtaaaagaataatcattcaggtagaagaaaggaataacaaattttttggtgcccaata

SEQ ID NO: 115179 - DNA, 201 bp, Homo sapiens
tgggcatggcccattgaattcagtgggagagattatttgctgatgatgaatatttgaaaataaaatgtattgcacatttacccctgaggatcatgaatctstctactcttcccaaccctttcctttaaagactggggtggggaggggttggagaccaagagcatgagagcagagcctgccagcctcactgtgccacctccc

SEQ ID NO: 115180 - DNA, 201 bp, Homo sapiens
cgcttgggcctgggaggtggaagttgcagtgagccaagatcctgccactgcactgcagtctgggcgacagagcaagaccctgtctcaaaaaaaaaaaaaaaggaagaatgacatgatcagagctgccctgtaggaagattatcctggcagtggagagcagatactttagggggtcagcaaggagacagactagttagtggt

SEQ ID NO: 115181 - DNA, 201 bp, Homo sapiens
ggggactgtgagaaaaaaaatgttcatgaggctcgagtcctgaatgagatggagcttccccaagagccagtaatgacacaagtggttcttaaagtcatttytggaagacaataggatcacaagggtttaagtctatcagatcatgttaaaaaggaactcattcatttattcattaatttgactaacatcttgattgtttac

SEQ ID NO: 115182 - DNA, 201 bp, Homo sapiens
ggggaacggctgaaagaattggggcatgtgggcatggcccattgaattcagtgggagagattatttgctgatgatgaatatttgaaaataaaatgtattgsacatttacccctgaggatcatgaatctctctactcttcccaaccctttcctttaaagactggggtggggaggggttggagaccaagagcatgagagcaga

SEQ ID NO: 115183 - DNA, 201 bp, Homo sapiens
cccaaagtatttgggggaccaagagagaattggcagccttttacttggccaaacttttttgacttttgcttttttgaagcaactgacaataattattaacrctgtttcctaaaagaaaggacattttaatactaagtagcaatacgtaaaaataaggattatgtttaacattgtataactgtcattttatgaaaagctcat

SEQ ID NO: 115184 - DNA, 201 bp, Homo sapiens
gtcccagcttctcaggaggctaggatgggagaagatcgcttgggcctgggaggtggaagttgcagtgagccaagatcctgccactgcactgcagtctgggygacagagcaagaccctgtctcaaaaaaaaaaaaaaaggaagaatgacatgatcagagctgccctgtaggaagattatcctggcagtggagagcagatact

SEQ ID NO: 115185 - DNA, 201 bp, Homo sapiens
agtcgggctgccgaaaactgcagtctctgccccgattcctttttctgcctgggccccttgatttatgtgtcggagttcggctggggtgtgtgtgtgtgtgkgtgtgtgtgtgtgtgtgtgtgtgtgtgttcctatatgaggtgtggatacagctggagagcacatttctttccacaaagtgttttcttattatttttccta

SEQ ID NO: 115186 - DNA, 201 bp, Homo sapiens
gctactgaagcatccagcatccagggactcaccctactgagtcagaacttccagaggagaggtcgggaatgtgtatatttttaaagcttcgcagatgacarttgcggtcactcaaatgtggagtgtgcattagataatattattgttgtcaatgttaagttttgtgggtgtgctcatggcattgtgttttacataggagaa

SEQ ID NO: 115187 - DNA, 201 bp, Homo sapiens
gcgaccacgtctgtagtcccagcttctcaggaggctaggatgggagaagatcgcttgggcctgggaggtggaagttgcagtgagccaagatcctgccactscactgcagtctgggcgacagagcaagaccctgtctcaaaaaaaaaaaaaaaggaagaatgacatgatcagagctgccctgtaggaagattatcctggcag

SEQ ID NO: 115188 - DNA, 201 bp, Homo sapiens
tcaaggggaacggctgaaagaattggggcatgtgggcatggcccattgaattcagtgggagagattatttgctgatgatgaatatttgaaaataaaatgtrttgcacatttacccctgaggatcatgaatctctctactcttcccaaccctttcctttaaagactggggtggggaggggttggagaccaagagcatgagag

SEQ ID NO: 115189 - DNA, 201 bp, Homo sapiens
tattattcctcaatagcaggtttgtgctaaattctaggaatacaaccttgaattgagtgtggtccctgaccttgagggaaccacattgcacccccctcccmcccaaaatgcaggtaaatggatgagtttcttcatggagtggggtaatcctataagctcaatatgaatcgattgtgataaggtgccccaagagttatatat

SEQ ID NO: 115190 - DNA, 201 bp, Homo sapiens
agcctgacagcttgcagggtagaggaattgggttggaggttgggcggctaggcaggtgtctttctctgatgatgttggggatgaagtcggaggtggtggtrgtgatagcagctgtcatctgtcatttattgagcactctctgtgcccggccctgttctgagtgcttaatgttggttatggcatttcatcttcacaactctt

SEQ ID NO: 115191 - DNA, 201 bp, Homo sapiens
ggtccccagcatccaaggcctgagggaataggcactgggccctaccccgcccctgccggtcccctttccccaacccccttccccttctctctttgttcctyacttaatgtattcctctgggcgattggcagagaacaaaggaggcagcctgggaaaccggggccttctctgacctcttctgtcaggcacctgtcatgagcc

SEQ ID NO: 115192 - DNA, 201 bp, Homo sapiens
tggcagccttttacttggccaaacttttttgacttttgcttttttgaagcaactgacaataattattaacgctgtttcctaaaagaaaggacattttaatrctaagtagcaatacgtaaaaataaggattatgtttaacattgtataactgtcattttatgaaaagctcatgacatgcttctgcttttttctcattttacc

SEQ ID NO: 115193 - DNA, 201 bp, Homo sapiens
tccatcttcatccagtcgggctgccgaaaactgcagtctctgccccgattcctttttctgcctgggccccttgatttatgtgtcggagttcggctggggtgtgtgtgtgtgtgtgtgtgtgtgtgtgtgtgtgtgtgtgtgttcctatatgaggtgtggatacagctggagagcacatttctttccacaaagtgttttctt

SEQ ID NO: 115194 - DNA, 201 bp, Homo sapiens
ctccatcttcatccagtcgggctgccgaaaactgcagtctctgccccgattcctttttctgcctgggccccttgatttatgtgtcggagttcggctggggtgtgtgtgtgtgtgtgtgtgtgtgtgtgtgtgtgtgtgtgtgttcctatatgaggtgtggatacagctggagagcacatttctttccacaaagtgttttct

SEQ ID NO: 115195 - DNA, 201 bp, Homo sapiens
ctctccatcttcatccagtcgggctgccgaaaactgcagtctctgccccgattcctttttctgcctgggccccttgatttatgtgtcggagttcggctggkgtgtgtgtgtgtgtgtgtgtgtgtgtgtgtgtgtgtgtgtgtgttcctatatgaggtgtggatacagctggagagcacatttctttccacaaagtgtttt

SEQ ID NO: 115196 - DNA, 201 bp, Homo sapiens
cagccctgctgactcctgtaatcccatccactgcaacctaccatcttatgctaacctatgctccagctaggttactagctagatcatgcggtgggggcagrgggggctactactttcatttctgcagtactgtaggcagtaatatttcctttgcctggaaagtcatttcttcccttctcattcctcaaaactctgccactc

SEQ ID NO: 115197 - DNA, 201 bp, Homo sapiens
cccgggaggcagaggttgcagtgagccgagatcgcgccattgcactctagcctgggtgacagagcaagactccgtctcaaaaaaaaaaaaaaaaattgtcrtagcctttggggagcttgtgttcttgttagaaaaattgaatagtaacacaaagctattagtagacagaacaggatggtaataaattaattaagggctcct

SEQ ID NO: 115198 - DNA, 201 bp, Homo sapiens
cctctctggaaagcagcctccctggaaagtctgatgtggaccagctgaggcaaccccctttccactaccctgggctctggagggctgcagtggaagagaggcaggggcaaggttatcacttctcagatggtacagctgtgtgacagcagacagataagatctgctttcctctcttaggcttcagagccgctcctgccccca

SEQ ID NO: 115199 - DNA, 201 bp, Homo sapiens
gttcatgaggctcgagtcctgaatgagatggagcttccccaagagccagtaatgacacaagtggttcttaaagtcatttctggaagacaataggatcacaagggtttaagtctatcagatcatgttaaaaaggaactcattcatttattcattaatttgactaacatcttgattgtttactagtgactttaggtactttta

SEQ ID NO: 115200 - DNA, 201 bp, Homo sapiens
gtaaggttgaggactttgtcccattttctttaaatcctccaaggagtgagagtggctacctagttgttcccccatggctcaaggcagactctaaccgtgargaaggctcattcccaagggttgctatccagggaagttgctaaggattcttctagtgactttagcagaatctagggccattgcattttctttctccatgcc

SEQ ID NO: 115201 - DNA, 201 bp, Homo sapiens
gccctctctggaaagcagcctccctggaaagtctgatgtggaccagctgaggcaaccccctttccactaccctgggctctggagggctgcagtggaagagaggcaggggcaaggttatcacttctcagatggtacagctgtgtgacagcagacagataagatctgctttcctctcttaggcttcagagccgctcctgcccc

SEQ ID NO: 115202 - DNA, 201 bp, Homo sapiens
ctttggcagccagtttcttcttaggaatcctgaacaacaagattccacgtgacgatttttgattttggagcggggagcagctgactctggaaactaggccrtaaacaggcagtccacaagctggatacagcccgtggatgtgttttgtttgtcctgtaaaatattgaaatttatttagctgtttgttttaaaggctaagca

SEQ ID NO: 115203 - DNA, 201 bp, Homo sapiens
aggttgctgcattttgccacatgctggatatgtaagagttaaagaatggggtgggatttgggagggctatgggggatggggaggggggccatccatttccraactttctttaggagggaagaagcaccataataagtaaatctcagttcatagctatgaaaatgcttcctacaacaagtgtctgcagggtttttgaaatct

SEQ ID NO: 115204 - DNA, 201 bp, Homo sapiens
ccattgtttaaggggcactggggttttcccaccttgtgtctagcctttgggaaccttcccaactctgaagagctacacagttcttccttcctccgcttctsctaagagagtccccccaaaagcagaatcagctcctgggataagccacatccctagagctcagggatttttaaaggccctgctctgagaggtggggctgtt

SEQ ID NO: 115205 - DNA, 201 bp, Homo sapiens
tctttggagtaaggttgaggactttgtcccattttctttaaatcctccaaggagtgagagtggctacctagttgttcccccatggctcaaggcagactctraccgtgaagaaggctcattcccaagggttgctatccagggaagttgctaaggattcttctagtgactttagcagaatctagggccattgcattttctttc

SEQ ID NO: 115206 - DNA, 201 bp, Homo sapiens
gctggctgatgtgagtacgaatccaggggctggccctgctgcccgaaagctcctcctctccccttcctcagtcctcctgggatcacccagcactatgaggrgtctgggtggagcctgaaaatctgttggcagagcacttctttttaacccctcgctcatgggcaaactaagactactagatgttgggcaacggcaagtgcg

SEQ ID NO: 115207 - DNA, 201 bp, Homo sapiens
aattgaaaattgtacagtgaatacccatgtgcctaccacctagattctattgttagcatttgctctgtgtgctggattgtgtacatttcatttatccatcrctgtatccatccatctatccatcttattttttatgctttttttttttttttttgagacagggtcttgctctgtcacccaggctggagtgcagtggcatgc

SEQ ID NO: 115208 - DNA, 201 bp, Homo sapiens
gcattatgtctagtcactgccagaatcccttctccagcagcctgtgcttgaacatttccagtgatgcgggggaagctctctgaacacctgtgctgtgctgktctggccctttgctagtggctacgatgggtagagaagtgtaagaattgtcatagccttggccaggtgcggtggctcacgcctgtaatcccagcactttgg

SEQ ID NO: 115209 - DNA, 201 bp, Homo sapiens
aatagaaagactctccctccttcagtcttcacaggacatatagaaagagtgggaactcctttaaatcagagtgtgagctgaggagagggagggagaaaatsggtttcccagggcactgggtctttcatgacctctcctgtggtttttccctgcccccaactcccaggcaggccctgagtcttctgttcgacacttaccaca

SEQ ID NO: 115210 - DNA, 201 bp, Homo sapiens; identical to SEQ ID NO: 19325

SEQ ID NO: 115211 - DNA, 201 bp, Homo sapiens
gagttgggatcaaagataggatttgggctctggttcccaaactttgattcatattggaatcacctggtgatctgtggcatagactgatgcctggcttcccsagccatttggacttaactggtatcaggtgtgacccaggcatggcgagggggttcactcagcccctcaagtgggtgtcatatgcagcaaagcttgggaacc

SEQ ID NO: 115212 - DNA, 201 bp, Homo sapiens
acttggattcatgcggagtctcaagcctcaaaaccatgagagtcaacatttgtcttaaatgtcacaacgccaaagaaaatctgacagtgatcttcaaaaayaatcccttgctgagtgtgatggcccacgcctgtaatcctaaccctttgggaaactgaggtgggagaattgcttgaaccccaaagttcaaggccagcctgg

SEQ ID NO: 115213 - DNA, 201 bp, Homo sapiens
acacctgcctggcctcttgacccttcatggtttcatttgtccctacagatggcacatgggcccggcccgtcggaaaggtgggaggggaggtgaagctgtcyatctcctacaaaaacaataaactcttcatcatggtgatgcatattcggggcttggtaagtgcctgcacagccgtgattttttttcttttttaatgtttct

SEQ ID NO: 115214 - DNA, 201 bp, Homo sapiens
agcaatgcttgggtaatagatcatctggtcttgtcattggaagaaccttagaggtcatctagcccagcctccccacctcatgaaggcatccctgccaccargtcatccagaccagggtgtggttagctcacaagtcctcttggagggcgtaagcttttacaggacttgggagaaggaagaggctatggtccacggtgagaa

SEQ ID NO: 115215 - DNA, 201 bp, Homo sapiens
ctgcttgcctttctgtcagggctaagggattcttgcaggtgtcaggggttggggcccacacatcttatcagagaagatccccactccaggcatgtttcatytcttccctctggaactttgccatcattctctccaggcgagaagtggcagaatagaaagactctccctccttcagtcttcacaggacatatagaaagagtg

SEQ ID NO: 115216 - DNA, 201 bp, Homo sapiens
ccctctggaactttgccatcattctctccaggcgagaagtggcagaatagaaagactctccctccttcagtcttcacaggacatatagaaagagtgggaastcctttaaatcagagtgtgagctgaggagagggagggagaaaatgggtttcccagggcactgggtctttcatgacctctcctgtggtttttccctgcccc

SEQ ID NO: 115217 - DNA, 201 bp, Homo sapiens
tactgccgcaagtttgacattgacattcggctacagctgatggagcagaaggttgtgcgcagtgacctggcccggacggttcgtgtgagggtggtggaggrttgcccagggctggggaggtggaatgggaatacaatatagaacacatcaggtgggaggggggtaggagtgctgagctgagataagggcaccgcccctctc

SEQ ID NO: 115218 - DNA, 201 bp, Homo sapiens
agccacagggacccccgtgtgttggcattcatgtcggcatatgtcgtcttcctcccccacccttctcacttgcgcatgcacgtgcacgcgcacacacgcaygcacacacagacgctccatgggctggagctttctataaagaggctgggtggccagttcccattaaaggaagaaaaacaacaaggctcagaatggagccta

SEQ ID NO: 115219 - DNA, 201 bp, Homo sapiens
ccttggtccctggaaaccctggctgcaaggagtcaagagacaagtgacacccccatggctgatgccttcttttttttttttttttttttttttttgagacrgagtctcgctctgtcaccaggctttagtgcagtggcgctatcttggctcactgcagcctctgcctcccgggttcaagagattctcctgcctcagcctccc

SEQ ID NO: 115220 - DNA, 201 bp, Homo sapiens
cctggtgggggaggtccaggggaggcttgattaggggtggacaccagtagagggagggctccttctcagggccaggtttcatgtatcttggccaaaacggsccttctggggcaggcatttgggaatcctggttcctagcgtgtgcctgcttcctgatgtaaggactgaattgggagttatgggattcattattgactggct

SEQ ID NO: 115221 - DNA, 201 bp, Homo sapiens
cccttcctctttcaagggaccgacatggctatttgtttttatacagaatccctagtagcccttgaagactaagggaatggagcaatcttaatttaaatttwaatttaatttaatttaatttgagacagggtctctgtcactcagactggagtgcaatggcacgatcacggctcactgtagcctcaaactcccaggtccaaa

SEQ ID NO: 115222 - DNA, 201 bp, Homo sapiens
atgagttctttttgtctcaggtaataaactaagcaaagcccagatagtagtaatgatggagcccttcaactattgacgtctccctaagagccctcattttytgaaagcagagtgtttgtcccattcctgactcgccatgctgtgtgtctcccagagagtgaaagaaattgctgtgactgcgagcaccagtagagtggattt

SEQ ID NO: 115223 - DNA, 201 bp, Homo sapiens
tggtcaggggaggtcatcctgggaccttccctgtccccctacctttctctggaaggccaagaaagctggaggagtccctcataactaccatgcccttagagggaacctggggtgaactggatgagaaggattggttcttgggtgagggaagaggggaggaggaagcaggaagtaggaaccagacagagatgtggctgctct

SEQ ID NO: 115224 - DNA, 201 bp, Homo sapiens
ttggtcaggggaggtcatcctgggaccttccctgtccccctacctttctctggaaggccaagaaagctggaggagtccctcataactaccatgcccttagagggaacctggggtgaactggatgagaaggattggttcttgggtgagggaagaggggaggaggaagcaggaagtaggaaccagacagagatgtggctgctc

SEQ ID NO: 115225 - DNA, 201 bp, Homo sapiens
gttggtcaggggaggtcatcctgggaccttccctgtccccctacctttctctggaaggccaagaaagctggaggagtccctcataactaccatgcccttagagggaacctggggtgaactggatgagaaggattggttcttgggtgagggaagaggggaggaggaagcaggaagtaggaaccagacagagatgtggctgct

SEQ ID NO: 115226 - DNA, 201 bp, Homo sapiens
ttgcctctcctcctggctgtccaggctggtggggatggttggggaggcagaggtggaagcatccggaggcactaggagtcaggaacaggacttggcacttyggggtctgtgggctgaatgaccaatgctccagtctgcagaagacaggaggagggtgggtccagcctcacagggttatacacagaaatgcaattaaacaga

SEQ ID NO: 115227 - DNA, 201 bp, Homo sapiens
aaccaggactggagccaaccagcacattccaggaatccttcctggaggaggcagcctgtgtgatatgatgttgttgaatgggctgcaggaaggagaggggyttctcagggaggaaggtaagggctgcagccaacataatggttatcctgaccagccctgggtgaagatctgtgggagaggttgtggaataccagatatacc

SEQ ID NO: 115228 - DNA, 201 bp, Homo sapiens
ggttggtcaggggaggtcatcctgggaccttccctgtccccctacctttctctggaaggccaagaaagctggaggagtccctcataactaccatgcccttagagggaacctggggtgaactggatgagaaggattggttcttgggtgagggaagaggggaggaggaagcaggaagtaggaaccagacagagatgtggctgc

SEQ ID NO: 115229 - DNA, 201 bp, Homo sapiens
ctagtcgcttcgtgatcggccgctcccggggagaggcggtggccgagcggcggagggaggagctaaacggttacatctggcacttgatccacgcacccccygaggtggccgaggtgggtgggcttgcctctcctcctggctgtccaggctggtggggatggttggggaggcagaggtggaagcatccggaggcactaggag

SEQ ID NO: 115230 - DNA, 201 bp, Homo sapiens
gactctgagtctagcttgctggttgaggaacaccacgatggcacagggacagtgggctgggctgtgggcacgtggtggagagccttcctatcccaagggargaaagaagcatggcgcgggggctggtcggcgccttagccggttcccatgaatggctggctctgcctttttctgcttgacttcctttggcccttctcagag

SEQ ID NO: 115231 - DNA, 201 bp, Homo sapiens
ccagcaccataggcactgtgatctgcagccgagtagcctgagggttgggatatctcagaagggtggacccgatgattgctatcctccgtcagctcactctrtccatcatacagatctggtacaaaccattactctctcctctctggggattctcagctactcacatttcagcccattctggtccagatgagcgcagctgtg

SEQ ID NO: 115232 - DNA, 201 bp, Homo sapiens
ctactttcctcttccataaaagaaggatgataacatccacatttaaggattgttgtgaggactaaataagacaatacctggcacaaaataccagagggggraaaaaaaggtatatttccttccttctatttctgtgatgctcatatgcatgtagtcttccctcctgtctccccacttctctgccttccttctctttccctt

SEQ ID NO: 115233 - DNA, 201 bp, Homo sapiens
aggtagttctccctctgcccctcctcttgggtttccttgctgttgaaggtgtgatttgggagagaggaagaggttggatcgccgagggctcctaggccttmtctctgaaagggggagtctcacacatgggtgcttgagcaggtgggactggcatgcatttgggacttttcaagaagtcatagaaatttgtaaggttattca

SEQ ID NO: 115234 - DNA, 201 bp, Homo sapiens
acctcccagtttcaagcgattctcctgcctcagcctcccaaatagctgggaccacagacatgcgccaccatgcccagctaatttttagtatttttagtagrgacgggctttcactatgttggccaggatggtctcgatctcatgacctcgtgatccgcccaccttggcctcccaaagtgctggaattgagtgagccaccgc

SEQ ID NO: 115235 - DNA, 201 bp, Homo sapiens
cctctagccctcttcccttcctccaggtggttctatagccaccttcttgctggacttttccacctacgtttcacccacgtctcaaactcggtgtaggcaaractgagcctgctgtctctcctttgcctcttgaaacctgctttttgtgtttgctatcagtcaatggtgtgactctttctgtgcatttacccaagccaaagc

SEQ ID NO: 115236 - DNA, 201 bp, Homo sapiens
aaggtatgtatctcccttcccactgagtccccaggatgctaatggtcttgtccctctaccctaccagcaagcatgccttgggcagtcatgagtacatccartactgccgcaagtttgacattgacattcggctacagctgatggagcagaaggttgtgcgcagtgacctggcccggacggttcgtgtgagggtggtggagg

SEQ ID NO: 115237 - DNA, 201 bp, Homo sapiens
tgtcatctgccccaagaggcagagaggacttgagagtagccaagaggttgggtgagagatgtgaggcgttgctatgtgcacaggccggagctagactcccsccagaaacagctgttggaaccacatgccggccttatctccatctgagctgaagcctcgtccctggtgtggcctcccaggctgccctgagcagacccctca

SEQ ID NO: 115238 - DNA, 201 bp, Homo sapiens
tctgtccactttggcctcccaaagttctgggattacaggtgtaagccaatgcccctggctgctgatgccttctgtgacagcttagcattctacttcattcygtcctggtttcctccttagccattgtttaaggggcactggggttttcccaccttgtgtctagcctttgggaaccttcccaactctgaagagctacacagt

SEQ ID NO: 115239 - DNA, 201 bp, Homo sapiens
gaaaggatacgggatgggaggtggtcagggctgcaggggcagaaaatacccttttggactaaacatctgcctgctttgcttggcctggtatggagtttgakgacaagtgctccccctgctggccaagctctccttgcacgcaagagctctcactccaggcccactggccagaaaggaaggcatggttgaatctgatgtttc

SEQ ID NO: 115240 - DNA, 201 bp, Homo sapiens
agcctgaagatggggtctgagaccctctgcattcagggctcagcttctgagtcccttgtattgaatcttcatacgtctaagtctgatcaaacctgacctgkgtcctcttggggcttgaggggacacctttgcccctgccagtgactcagtgctttggcaggatggacctattctccagggagaagaggaggagctggtcac

SEQ ID NO: 115241 - DNA, 201 bp, Homo sapiens
aaggtgcctctctctctttttggggcacaaatgacagaggtgagtatagggattagggcgcagagatgaggcatgtagagatgaatggatggatagttggrtataataaataggtaaagttgtcttggtatcccttttttcctccatcttcctgtacattccattagttgtacacaacgaagaagcaggcactggcccaga

SEQ ID NO: 115242 - DNA, 201 bp, Homo sapiens
tgctgcactggccagtgcaccttgggagagttggccatgtggggctcactggtgaagtccagaggatccccaagcacagaactggtgaccaggactattgrtgtaaccaagagccactgagcggttctggtggcacaggaccatgttaaggatacatggaaaagcaatgcttgggtaatagatcatctggtcttgtcattg

SEQ ID NO: 115243 - DNA, 201 bp, Homo sapiens
acccccttacctaaaccttctttctgtatgtctctccccaaggctaaggtatgtatctcccttcccactgagtccccaggatgctaatggtcttgtccctytaccctaccagcaagcatgccttgggcagtcatgagtacatccaatactgccgcaagtttgacattgacattcggctacagctgatggagcagaaggttg

SEQ ID NO: 115244 - DNA, 201 bp, Homo sapiens
taccacctgtatcttgatgacctccgaagccattcctctagccctcttcccttcctccaggtggttctatagccaccttcttgctggacttttccacctaygtttcacccacgtctcaaactcggtgtaggcaaaactgagcctgctgtctctcctttgcctcttgaaacctgctttttgtgtttgctatcagtcaatggt

SEQ ID NO: 115245 - DNA, 201 bp, Homo sapiens
tgcattctgccccttagaaaccagagatcccagtgcaataataataagtgtaggttacaggcagttaatgaagcttcatattctctttctccctttcttcraaacaggccctgaagtatgaatgctacctggacagcccgttggtgcgcttcctcctgaaacgagctgtgtctgacttgagagtgactcactacttcttct

SEQ ID NO: 115246 - DNA, 201 bp, Homo sapiens
ggctcttgagcctcagagcatgaggttcccaacagatgtcttcttgactactctcttctaaaggcacagtgagggttttttttcttcctgtacagccttcratctggctctgacatccaagactacttcctcactggctatgtctggagtgctgtcacccctagcccagagcacctcggggatgaggtcaacctgaaggtg

SEQ ID NO: 115247 - DNA, 201 bp, Homo sapiens
agaattgggtagctgaattggatggttattccctctgagtcaaggatcctggcaacatatgtgggaagtctgcttttagattcctgtgtatgtgctatcayctgtctccactcttgctctcttccttctggaatgtgcccctcccctcagcacatacatacacttccggacctttcctacacccttcactgggtgcagagg

SEQ ID NO: 115248 - DNA, 201 bp, Homo sapiens
acttagggaggtgaaaagagtttagtcatttacccacaggcacacagctattttctcagccaaaataggattcatttaaggtagaaagagcatctgtgacwgggagaggatttgatagagatccaggtcacgactgggagttacgcgttatgctccttattaagtgcttttattcatttattttactttctaagaaatagt

SEQ ID NO: 115249 - DNA, 201 bp, Homo sapiens
cccactggctccagtggtggcccctgggctcctccctctctggcacagggactaaacagagccagctccactggagggagtgccctctcctttctttccaycctttgactctgaaccattgtgtcactctgtcctgaccccatttcctccccggctagccctcagccatctgtgggcagctgtgagactgagtttggtgcc

SEQ ID NO: 115250 - DNA, 201 bp, Homo sapiens
tcccccttgagagacagcctgccctctctgtgcactgtggcctgcttcatgctgttctgccatctgctcccctctagagctatttggtcttgctgttagcrtacagtcccaggctggggtgtagggggtcctcctccttaaggatcttctggagggtgtccacacttctcagggggtggttttcataccgactactacgga

SEQ ID NO: 115251 - DNA, 201 bp, Homo sapiens
cagtggaagagaggcaggggcaaggttatcacttctcagatggtacagctgtgtgacagcagacagataagatctgctttcctctcttaggcttcagagcygctcctgcccccagtctctgtccacttggaggaagcacgttttgggaatagagaaaggagagacctgtgtctcacttcttaggagtgccctataagtgcc

SEQ ID NO: 115252 - DNA, 201 bp, Homo sapiens
ccagatctccacaacaacccttcctgatagtccaaagccacacagcaagcaatagcagggccagcattcagccctggcctctctcgttcctaagccttctstctcctcctctccttctccctttctctctctctctctccctgctctgttctttattgtgataaaatatacgtaacgtaaaattcgccaccgtaaccattt

SEQ ID NO: 115253 - DNA, 201 bp, Homo sapiens
gcagcctagagtggcattaagtagcccctgggtggttctcttcccactgttccatgctgtcttaatgtaggaaagatgatcaggtgaaaaaggatttagaygaattctgcatggccccagaggcctaacaacagagtgttaggtatagggaggcaactggcagctcagtatcccgaagtgctttctaggaggcagagctcc

SEQ ID NO: 115254 - DNA, 201 bp, Homo sapiens
ttctgcagtactgtaggcagtaatatttcctttgcctggaaagtcatttcttcccttctcattcctcaaaactctgccactctatgctatacatttcaagrccctctacccttggagaggagtaatgatttttttcctttctactaccaacctcccatatacttactctttatgctaatatgcatttttcaggtattaaac

SEQ ID NO: 115255 - DNA, 201 bp, Homo sapiens
gcattaaaggatgttaacaagacaaaataatgcttttacccacatcagggccctccaatggcaggaatttctggcacagtgggagtcaagggagaaatctytggagtaaggttgaggactttgtcccattttctttaaatcctccaaggagtgagagtggctacctagttgttcccccatggctcaaggcagactctaacc

SEQ ID NO: 115256 - DNA, 201 bp, Homo sapiens
tcccagggccttctcccagtgtgtggtcttgcctcccctctggcagcagtgtcctctggcaccccatggaagtcaccccggactcagcctggatgcacccygtgtttcagctgggtgacacctctgttcagagttctggctggggcttgtcccctcacccctcaccaaggtgcatctccaccgaacctcttcctcacatgt

SEQ ID NO: 115257 - DNA, 201 bp, Homo sapiens
ttgcaaatgggttgttttgggatcctgggagaggaacattgtagccagagatattagattttcactctagactttaaggaggcagatttttttttttttttaaattaaaagataggggccaggaatagtggcttatgctgtaatctcagcacttgggagactgacatgggatgatcacttgagccaaggagtttgagacca

SEQ ID NO: 115258 - DNA, 201 bp, Homo sapiens
cttccctcccagtcaccagcaagaccattccagtcaactctacatttttctcctggagatttgggctgggacagcaggagagagtgctagaacttcaagcrtgggaggatgatgtgactgaagcaactgagggaatatggttagatgtggattgtgaggtgagctctggggtatccatctcccatctcctggaggttaaat

SEQ ID NO: 115259 - DNA, 201 bp, Homo sapiens
tggagatttgggctgggacagcaggagagagtgctagaacttcaagcgtgggaggatgatgtgactgaagcaactgagggaatatggttagatgtggattrtgaggtgagctctggggtatccatctcccatctcctggaggttaaattgatttcgtggagcctgaagatggggtctgagaccctctgcattcagggctca

SEQ ID NO: 115260 - DNA, 201 bp, Homo sapiens
tgaagtcggaggtggtggtggtgatagcagctgtcatctgtcatttattgagcactctctgtgcccggccctgttctgagtgcttaatgttggttatggcrtttcatcttcacaactcttaggatgttggtactattgggagtccccttttacagaggagtaaactgaggtgtagatgggacatgtgacttaccagaggtc

SEQ ID NO: 115261 - DNA, 201 bp, Homo sapiens
gtctgagaccctctgcattcagggctcagcttctgagtcccttgtattgaatcttcatacgtctaagtctgatcaaacctgacctgtgtcctcttggggcytgaggggacacctttgcccctgccagtgactcagtgctttggcaggatggacctattctccagggagaagaggaggagctggtcacgcccaaggtgcact

SEQ ID NO: 115262 - DNA, 201 bp, Homo sapiens
ccaggaggggctggacatgcgcatggtcatcttccgctgcttctccaccggccggggcagaggtcagttgggagtaggggtgagggtggaggaggggaccsctttgcttattgtccttctgcccattgccaacacaaactgtgtcctcctccaggaaagtgaaaagggcaagattatttcatgagaagctgtgggatagcc

SEQ ID NO: 115263 - DNA, 201 bp, Homo sapiens
tctgcattctgccccttagaaaccagagatcccagtgcaataataataagtgtaggttacaggcagttaatgaagcttcatattctctttctccctttctycaaaacaggccctgaagtatgaatgctacctggacagcccgttggtgcgcttcctcctgaaacgagctgtgtctgacttgagagtgactcactacttctt

SEQ ID NO: 115264 - DNA, 201 bp, Homo sapiens
catacgtctaagtctgatcaaacctgacctgtgtcctcttggggcttgaggggacacctttgcccctgccagtgactcagtgctttggcaggatggacctrttctccagggagaagaggaggagctggtcacgcccaaggtgcacttctcagttcccagcttccccttcttgtggttatgagatactttggtatggagtat

SEQ ID NO: 115265 - DNA, 201 bp, Homo sapiens
aagcagcggcgggtgcctgaagccctgggctgggtcactaccccactcttcaacttcaggcagtatgtgagccccagggtacagcttcttggccttggaargggaggagggggacagagaaaggggcctggctgctgcactggccagtgcaccttgggagagttggccatgtggggctcactggtgaagtccagaggatcc

SEQ ID NO: 115266 - DNA, 201 bp, Homo sapiens
gtgcacctgtagtcctagctacttgagaggctgaggtgggaggatcacttgacctggggagtttgaggttacagtaagctatgattgcaccactgcactcyagcctgggcaacagagtgaaaccctgtctctttaaaaaacaaacatagaggctgggcgcagtggctcacgcctgtaccagcactttgggaggctgagaag

SEQ ID NO: 115267 - DNA, 201 bp, Homo sapiens; identical to SEQ ID NO: 19328

SEQ ID NO: 115268 - DNA, 201 bp, Homo sapiens
actggagcatgtacttcgtgtaaaacattgtgctaagtatcctgggggagacaaagataaatacgaggtaatccatgcggtttaaaggcttagtggaaaagaatgttttgtatgtaatgagatgtttgtagatacatgttgaaatgataaaagtaagaatgttcatcttgagcaatggaacgagatttatctatacaaaaa

SEQ ID NO: 115269 - DNA, 201 bp, Homo sapiens
agctactcaggaggctgaagtgggaggatcttttgagcccaggagtttgaggctgcagtgagctataattgcaccactctgattgcatccaggtttcactstagcctgggtgacagagtgagaccctgtctctgaaaataataataataataaagagcttgtacaattaacttgagaggagccaaaatttgagtctaggtc

SEQ ID NO: 115270 - DNA, 201 bp, Homo sapiens
tacaaaaattagctgggtgtggtggcgggtgcctgtaaatcccaggtactcaggaagctgaggcatgagaaccacttgaaccggggaggcagaggttgcastgagccgagatcacacccctgcactccagcctgggtgacagagcaagactctgtctcaaaataaataaataaatgaataaataaataagttttttgaatg

SEQ ID NO: 115271 - DNA, 201 bp, Homo sapiens
cacacatcatgcaagtgaagctatgttccccttttccctgatgagaaactgaggcacagagatgggaattaagttgcccaggattgtgagtggcagaaccrggactggagccaaccagcacattccaggaatccttcctggaggaggcagcctgtgtgatatgatgttgttgaatgggctgcaggaaggagaggggtttct

SEQ ID NO: 115272 - DNA, 201 bp, Homo sapiens
catcacatttttaaaaatccattcactgttgatggacattttgggatattacaaataaagctgctgtggatattcatgaacaagtctttgtgtagacataygcttttattttccttggataagtaggagtgatagttgaatcctgtgttaggtgtatgttgacctttttaagaacctgcctgttttccaaagtggttgtac

SEQ ID NO: 115273 - DNA, 201 bp, Homo sapiens
agtcaatttagtgagcttcaattgtagctgactttggaagaaataatatactcatgtctctttggatgcatactgaagagggagctatgtgaagggctgcrattttgcagattgcaacctgatcagacttccaaacacagactattacctaaaaacacagagagagaaatccctgtatcttagaggaccagtgatttaagg

SEQ ID NO: 115274 - DNA, 201 bp, Homo sapiens
cacatatgcagaacatccttctgatattagtgccctttcatttgcaataaattctgccttcaatcctgtatgacatagctgacaaaaggacacagttactacataagtgtttgaggcacggacggcagcccttggactcaaacattgatttgcaggtgttctgccatcctctataaagaaaagaccgtgtccttggcatca

SEQ ID NO: 115275 - DNA, 201 bp, Homo sapiens; identical to SEQ ID NO: 19354

SEQ ID NO: 115276 - DNA, 201 bp, Homo sapiens
gcacatatgcagaacatccttctgatattagtgccctttcatttgcaataaattctgccttcaatcctgtatgacatagctgacaaaaggacacagttactacataagtgtttgaggcacggacggcagcccttggactcaaacattgatttgcaggtgttctgccatcctctataaagaaaagaccgtgtccttggcatc

SEQ ID NO: 115277 - DNA, 201 bp, Homo sapiens; identical to SEQ ID NO: 19355

SEQ ID NO: 115278 - DNA, 201 bp, Homo sapiens
tatgacatagctgacaaaaggacacagttactacataagtgtttgaggcacggacggcagcccttggactcaaacattgatttgcaggtgttctgccatcytctataaagaaaagaccgtgtccttggcatcagtgatagagaaatcttcaaaggagaggttggttaaaaataagcattttagaaaaaaaaaaaaacactt

SEQ ID NO: 115279 - DNA, 201 bp, Homo sapiens
aggacacagttactacataagtgtttgaggcacggacggcagcccttggactcaaacattgatttgcaggtgttctgccatcctctataaagaaaagaccrtgtccttggcatcagtgatagagaaatcttcaaaggagaggttggttaaaaataagcattttagaaaaaaaaaaaaacacttgctattccactgtcactg

SEQ ID NO: 115280 - DNA, 201 bp, Homo sapiens; identical to SEQ ID NO: 19356

SEQ ID NO: 115281 - DNA, 201 bp, Homo sapiens; identical to SEQ ID NO: 19358

SEQ ID NO: 115282 - DNA, 201 bp, Homo sapiens; identical to SEQ ID NO: 19357

SEQ ID NO: 115283 - DNA, 201 bp, Homo sapiens; identical to SEQ ID NO: 19359

SEQ ID NO: 115284 - DNA, 201 bp, Homo sapiens; identical to SEQ ID NO: 19360

SEQ ID NO: 115285 - DNA, 201 bp, Homo sapiens
aaggaatatcatcatctccagagcaaggtcactgccaattagaaccctgtacagggagaagctggggcttcctcaatttgcagatcccccaagtacaggcrctaattgttgtgataatttgcagttgtgacttgttctcccctgcaggcagcgtagtggggctgccaggcccccgctttgttccctggaccccctgaagcc

SEQ ID NO: 115286 - DNA, 201 bp, Homo sapiens
acttcaaggaaacaaagactcagctggaatctaaagtgtaagttggaattatttagttaaggagatggaaaggaagagagtccaggaagaggagacagtayatgcaaatgccttatggcaggaaggatcatagcacattcgggggcctgagcgaagcctggtgcgtggagcgagcatggtggggatgtggctggcaaagga

SEQ ID NO: 115287 - DNA, 201 bp, Homo sapiens
taattttttgttagattgtataatttatagtatcagttttgaatgcataatgtaatactgtatactgaagggtagttagtctttcttcaaataggttaccraaaatgaaataaatacctagattaaatttccatactagggagaggaaaatgaaataatttgctgacttgcaaaaatatgtaatagacattgtggagataa

SEQ ID NO: 115288 - DNA, 201 bp, Homo sapiens; identical to SEQ ID NO: 19362

SEQ ID NO: 115289 - DNA, 201 bp, Homo sapiens
aagggtagttagtctttcttcaaataggttaccgaaaatgaaataaatacctagattaaatttccatactagggagaggaaaatgaaataatttgctgacytgcaaaaatatgtaatagacattgtggagataatctacattctaaaaaattacctcattgttttagtcatctcagatggtttcactgtaaaggcaattct

SEQ ID NO: 115290 - DNA, 201 bp, Homo sapiens; identical to SEQ ID NO: 19363

SEQ ID NO: 115291 - DNA, 201 bp, Homo sapiens; identical to SEQ ID NO: 19364

SEQ ID NO: 115292 - DNA, 201 bp, Homo sapiens; identical to SEQ ID NO: 19365

SEQ ID NO: 115293 - DNA, 201 bp, Homo sapiens
acatatgcagaacatccttctgatattagtgccctttcatttgcaataaattctgccttcaatcctgtatgacatagctgacaaaaggacacagttactacataagtgtttgaggcacggacggcagcccttggactcaaacattgatttgcaggtgttctgccatcctctataaagaaaagaccgtgtccttggcatcag

SEQ ID NO: 115294 - DNA, 201 bp, Homo sapiens
tcccaggttcaagcaattctcctgcctcagcctcctgagtagctgggattacaggcatgcgccaccatgcctggctaatatttgtatttttattagagacrgggtttcaccatgttggtcaggctggtcttgaactcctgacctcaggtgatctgcccatctcggcctcccaaagtgctgggattacggcatgagccacct

SEQ ID NO: 115295 - DNA, 201 bp, Homo sapiens
tggcgtgatctcggctcactgcaaactccacctcctgggttcatgccattctcctgcctcagcctcccgagtagctgggactacaggcgcccgccaccacrcccggctaattttttgtatttttagtagagacggggtttcactgtgttagccaggatggtctcgaactcctgacttcgtgatctgcccgcctcaccctcc

SEQ ID NO: 115296 - DNA, 201 bp, Homo sapiens
atgaaatgagatagaaagtgtctgtcttggctttgcagacgccaccatcaggagccccatactatcagccatggtcaaccccaccgtgtccttcaacatcrctgtcaatggtgagcccttgggctgtgtctccttcaagctgtttgcagacaagtttccaaagacagcagaaaactttcgtgctctgagcactggagagaa

SEQ ID NO: 115297 - DNA, 201 bp, Homo sapiens; identical to SEQ ID NO: 19369

SEQ ID NO: 115298 - DNA, 201 bp, Homo sapiens
ggccatggagcacttcgggtctgggaatggcaagaccatcaagaagatcaccatcgctgactgtacacaacttgactaagtttgacttgtgttttttttttgagactgagtttcgctcttgttgccaggctggagtgcaatggcgccatctcggctcactgcaacctctgcttcctgagttcaggcgattctcctgcctca

SEQ ID NO: 115299 - DNA, 201 bp, Homo sapiens
tattaactttatatcctgcaaccttgctataattgcttgttagttccaggagttttttatgtgtggattctttttgattttctacatagacaatcatatcrtctgtaaacaaagacagttttatttcttgttccaaatttgtataccttttagttccttttcttgtcttactactttagctaggacttccagtacaacgtt

SEQ ID NO: 115300 - DNA, 201 bp, Homo sapiens
ccagagttggctcctccccttcctgcagccaggtcagagtgatgttggcaagtgagaagccaggtgctctacatggcaaggtgtggttgccctcagggtcytccttgtcagggaccacaactttggggaagtcggggaggcaccggatgcaggagatagagaacagagaggtggagtgagagtgggacacacttcagcctc

SEQ ID NO: 115301 - DNA, 201 bp, Homo sapiens
tcgggtctgggaatggcaagaccatcaagaagatcaccatcgctgactgtacacaacttgactaagtttgacttgtgttttttttttgagactgagtttcrctcttgttgccaggctggagtgcaatggcgccatctcggctcactgcaacctctgcttcctgagttcaggcgattctcctgcctcagcctcccgagtagc

SEQ ID NO: 115302 - DNA, 201 bp, Homo sapiens; identical to SEQ ID NO: 19372

SEQ ID NO: 115303 - DNA, 201 bp, Homo sapiens
tttttattagagacggggtttcaccatgttggtcaggctggtcttgaactcctgacctcaggtgatctgcccatctcggcctcccaaagtgctgggattayggcatgagccacctagcccgggcaattcccagtttttcatctgcactgccaagactgagtggttggatggcaagcccatggtctttggcaaggtgaaaga

SEQ ID NO: 115304 - DNA, 201 bp, Homo sapiens
gcgatttcattgattgcttgaccagatgggtaaggcatgggtcccagctctctaaactctatccatgccgcccaccaacaggtgcctggcacgcggcagcmcatctcctctgcccacagtaacagcaggacccggagagccatttccaggagtagacgtcggtaatgacgacgcattttttttttggcgtcaccgaaacca

SEQ ID NO: 115305 - DNA, 201 bp, Homo sapiens
gaaggtatttgggtggaagaaagccagtaagcccatggggctggctgggggcaggaccacgcgttatgaccaccgtcctgttcctacccccaggagccccrtttgaccccgtgcggctactggataatgctgtatccaatgttatctgttcttgtcttcgggaaccgctatcgctatggggacccggagttcctgaggctc

SEQ ID NO: 115306 - DNA, 201 bp, Homo sapiens
ggtgtgggagagtcccttgcactgccaagacggggccactggaaggtatttgggtggaagaaagccagtaagcccatggggctggctgggggcaggaccamgcgttatgaccaccgtcctgttcctacccccaggagccccgtttgaccccgtgcggctactggataatgctgtatccaatgttatctgttcttgtcttcg

SEQ ID NO: 115307 - DNA, 201 bp, Homo sapiens
ccggttctgctcccacctaggccccctctcaatacttcgtcgctccctagtcactctgaggctctgacaggacattgtcacagggggagcacctgggtgcktctccagaagtacaggtcatacctggtggcataggctggcttcacctcgtgggggttccgccggtcagaccagaaaatgagcaaccggtcaaagagtggc

SEQ ID NO: 115308 - DNA, 201 bp, Homo sapiens
aacagcaggacccggagagccatttccaggagtagacgtcggtaatgacgacgcattttttttttggcgtcaccgaaaccacgagcaccaccctgtgctaygggctcctcattctgcttaagtacctagaggtggcaggtgtgcaacccggagagacccagaatgggaggctgcagtctggggatggctggagggtcctgg

SEQ ID NO: 115309 - DNA, 201 bp, Homo sapiens; identical to SEQ ID NO: 19376

SEQ ID NO: 115310 - DNA, 201 bp, Homo sapiens
ccactggaaggtatttgggtggaagaaagccagtaagcccatggggctggctgggggcaggaccacgcgttatgaccaccgtcctgttcctacccccaggrgccccgtttgaccccgtgcggctactggataatgctgtatccaatgttatctgttcttgtcttcgggaaccgctatcgctatggggacccggagttcctg

SEQ ID NO: 115311 - DNA, 201 bp, Homo sapiens
ccagtaagcccatggggctggctgggggcaggaccacgcgttatgaccaccgtcctgttcctacccccaggagccccgtttgaccccgtgcggctactggrtaatgctgtatccaatgttatctgttcttgtcttcgggaaccgctatcgctatggggacccggagttcctgaggctcctgaacctcttcagtgacaactt

SEQ ID NO: 115312 - DNA, 201 bp, Homo sapiens; identical to SEQ ID NO: 19379

SEQ ID NO: 115313 - DNA, 201 bp, Homo sapiens
ggctggctgggggcaggaccacgcgttatgaccaccgtcctgttcctacccccaggagccccgtttgaccccgtgcggctactggataatgctgtatccartgttatctgttcttgtcttcgggaaccgctatcgctatggggacccggagttcctgaggctcctgaacctcttcagtgacaacttctgcatcattagttc

SEQ ID NO: 115314 - DNA, 201 bp, Homo sapiens
ctgggggcaggaccacgcgttatgaccaccgtcctgttcctacccccaggagccccgtttgaccccgtgcggctactggataatgctgtatccaatgttayctgttcttgtcttcgggaaccgctatcgctatggggacccggagttcctgaggctcctgaacctcttcagtgacaacttctgcatcattagttccagatg

SEQ ID NO: 115315 - DNA, 201 bp, Homo sapiens
gaggaaagccacacagaagcagaacccaagatgggatctgcaggaggaggcagaggacatcaggagctcagcctcacgcctgcagggcacaacactgcccrtgccatcagccagccaggcatcactgtgttgagcagtgggcactccccacagggccttgtccaaaggacaccaagccttggactcaaggccaggccccca

SEQ ID NO: 115316 - DNA, 201 bp, Homo sapiens
ccctcacccctaccttaacgtcccagttctgattcaggtaatagatacaggtgatgcagcgcccatcgccgtggggattgtcaacgtgccttacgtacccragcccgttgcctgggtaacacgccaccatggcctggcagggatggagggaggtaggtttactggggctaggcaggcacatcttagagaagcagccatgaa

SEQ ID NO: 115317 - DNA, 201 bp, Homo sapiens; identical to SEQ ID NO: 19375

SEQ ID NO: 115318 - DNA, 201 bp, Homo sapiens; identical to SEQ ID NO: 19377

SEQ ID NO: 115319 - DNA, 201 bp, Homo sapiens; identical to SEQ ID NO: 19378

SEQ ID NO: 115320 - DNA, 201 bp, Homo sapiens
ctccctatggaagggtcggcactctgagcaaccacctcactgggagaagaattgggccatggtccaggaggcttagaaacagtgagttactgactagagaygggcaagacctccccaattaggaatccaatcagagattacactgatgatgcacgtggatgggtggcagggaaggggtccagtgctgcaccctcttcccac

SEQ ID NO: 115321 - DNA, 201 bp, Homo sapiens
cagaataggaaggactgaagggagggaagcaggtacctagctgatacttgtctttggctgctgcccgctccttggcatcaaaataccagacagtgatggcrtacctggagaccagggtggttggacattagttttctgcaattccagctaccatatccacacacactaggcggccatccttttgagccacccggttctgct

SEQ ID NO: 115322 - DNA, 201 bp, Homo sapiens
aggctgatgagggggatggggtggcatcaggcccaagagggcccacagaataggaaggactgaagggagggaagcaggtacctagctgatacttgtctttrgctgctgcccgctccttggcatcaaaataccagacagtgatggcgtacctggagaccagggtggttggacattagttttctgcaattccagctaccatat

SEQ ID NO: 115323 - DNA, 201 bp, Homo sapiens
atgctcctcctggcaccttttactctgcccaagcagtggcagcccagtccaaaaggtgcctgccatggccaaaggggttggggagtcacttcacattccakgctggaggagtgagaggacttgggggtactcctcccaccccattgccagcaagaggccatgactcacctcaaccccaagtcctgcatcctggtgggaagt

SEQ ID NO: 115324 - DNA, 201 bp, Homo sapiens
tgaaggcagatctggggaacaagcatagtacacagggtcctaagagtaatggaagtgacaagggctcaggtgtgagctcctaggaatcacaggcacagagsacaggaatgccaggggtgtctttagaagtgtatttgagccaggcgcagtggcctgtagtctcaacacctcgggaggccgaggcaggcggatcacctgagg

SEQ ID NO: 115325 - DNA, 201 bp, Homo sapiens
gacacccacctgcacagccactgtctgcccaaaggtacccactgagtctggggatcccgtgcgggacccgggtgcatgagatcagccagaatcagcaggtktgcgctgtgcagaccaaaacacaatcagttacccctggagcaggaaggcagctctgccttcccttaggctttttgttgttgttgtttgagacggagtctg

SEQ ID NO: 115326 - DNA, 201 bp, Homo sapiens
ctaaggcctagtggccttgtgcagggcccatgttgagacagaccctgtctctccagatgtacatttgcctgtccctcatggactggctcccgggcccgcaycaccgaatcttccgaaacttttcggagctgcgggtcatctctgagcaaattcaacgacactggcagatgcggcagccagcggagccccgcgatttcattg

SEQ ID NO: 115327 - DNA, 201 bp, Homo sapiens
atgggtcccagctctctaaactctatccatgccgcccaccaacaggtgcctggcacgcggcagcacatctcctctgcccacagtaacagcaggacccggasagccatttccaggagtagacgtcggtaatgacgacgcattttttttttggcgtcaccgaaaccacgagcaccaccctgtgctatgggctcctcattctgc

SEQ ID NO: 115328 - DNA, 201 bp, Homo sapiens
gtgcccctggggctgccgcgcaccctcaccctcgacacccacctgcacagccactgtctgcccaaaggtacccactgagtctggggatcccgtgcgggacscgggtgcatgagatcagccagaatcagcaggtgtgcgctgtgcagaccaaaacacaatcagttacccctggagcaggaaggcagctctgccttcccttag

SEQ ID NO: 115329 - DNA, 201 bp, Homo sapiens
ggatcccgtgcgggacccgggtgcatgagatcagccagaatcagcaggtgtgcgctgtgcagaccaaaacacaatcagttacccctggagcaggaaggcasctctgccttcccttaggctttttgttgttgttgtttgagacggagtctggctctgtcattcaggctagaatgcagtggcatgatcttggctcactgcaac

SEQ ID NO: 115330 - DNA, 201 bp, Homo sapiens
gcggaagggcctggtgtgggagagtcccttgcactgccaagacggggccactggaaggtatttgggtggaagaaagccagtaagcccatggggctggctgrgggcaggaccacgcgttatgaccaccgtcctgttcctacccccaggagccccgtttgaccccgtgcggctactggataatgctgtatccaatgttatctg

SEQ ID NO: 115331 - DNA, 201 bp, Homo sapiens
gggcggatcgcggggtcaggagttcgagaccagcctgaccaatatggtgaaacctgtctctaataaaaaatacaaaaattagctgggcgtggtggcgagcrcctgtagtcccagctactcaggaggctgaggcaggagactcgcttgagcccgggaggcagaggttgcagtgagccgagattggccactgcactgcccagg

SEQ ID NO: 115332 - DNA, 201 bp, Homo sapiens
gcttgtttttttttttttttgtttgttttttttttttaaaaaccactcacctgtagactcatttcctccccaacattgaggccaacgtgccagggcacaarcccgcatggcccaggagagagccggggggtggggcctgagggtaaggctgtaaccttctcccctcaccctcggggcctcagagtcactgagcaccagact

SEQ ID NO: 115333 - DNA, 201 bp, Homo sapiens; identical to SEQ ID NO: 19385

SEQ ID NO: 115334 - DNA, 201 bp, Homo sapiens
tcaggagaaaggtgccggttgccctcgggcgcttgcttggcaaaaagaagtaagtctctctagctttgaagagcctcaaaaatttctaaaagccaaacaayggccttgagcaggcaatgccagccctagaacccagacagggcattttattcatccattttcaaggatttttaaaaacccaacctctccagatatggctgc

SEQ ID NO: 115335 - DNA, 201 bp, Homo sapiens
agaattgcttgaatccgggaggtgaaagtttcagtgagccaagatcgccctactgcactccagcctgggcaacagagtgagacagtctcaaaaaaaaaaamaaacaaacaaacaatacttgctcttgaacagcacgaatctgagatatgcacaaaaatcagcagttcctttgagacggaaagttggccacaactgccccca

SEQ ID NO: 115336 - DNA, 201 bp, Homo sapiens
cagaagggttgtgacaggattccgagtgccgggcgtcctcctggaaaggagctccattacaaacaaggagcagaacattacaaacaaaaatactgcccacrtgcggtggctcatgcctgtcatcccagcactttgggaggccgaggcgggcggatcgcggggtcaggagttcgagaccagcctgaccaatatggtgaaacc

SEQ ID NO: 115337 - DNA, 201 bp, Homo sapiens
aatgcatgtaattacagaagagtcagaaaatagagattagcaattagaacaaaacaccaaaaatttcatctacccagagacagccaaagttaagcatttaytgcaagttcttccaagtctgtggatataattgtaattttttaaatagagtttgctcataccatacaattttcttttttttctttctttcttttttctttt

SEQ ID NO: 115338 - DNA, 201 bp, Homo sapiens; identical to SEQ ID NO: 19386

SEQ ID NO: 115339 - DNA, 201 bp, Homo sapiens; identical to SEQ ID NO: 19387

SEQ ID NO: 115340 - DNA, 201 bp, Homo sapiens; identical to SEQ ID NO: 19388

SEQ ID NO: 115341 - DNA, 201 bp, Homo sapiens; identical to SEQ ID NO: 19389

SEQ ID NO: 115342 - DNA, 201 bp, Homo sapiens; identical to SEQ ID NO: 19390

SEQ ID NO: 115343 - DNA, 201 bp, Homo sapiens; identical to SEQ ID NO: 19383

SEQ ID NO: 115344 - DNA, 201 bp, Homo sapiens; identical to SEQ ID NO: 19384

SEQ ID NO: 115345 - DNA, 201 bp, Homo sapiens
cgaggccgggagaggcagggagctgcagcaagctgtgatgtgccaggcagccacacagaggccaccaccagggtccccaggaggaggcatggtggcagcargggcctcgcacgacaggcaggccaacgtgctgagagacagcagctcagccacacaggacaagggccagggaggctgcaggcaccgcccctcaagcccagg

SEQ ID NO: 115346 - DNA, 201 bp, Homo sapiens; identical to SEQ ID NO: 19391

SEQ ID NO: 115347 - DNA, 201 bp, Homo sapiens
ctcctgtacataatcggttaatttaaaattttacttaataagtgaacaagtaatgaagatttcacctgtttacttagggtatctacccagacccatcgatyctgagttcgggagatgattttgaaattactgttttccaaataaaggtgctcccttctaagtggcttacaagggtaatttttttccccccagtaatgacga

SEQ ID NO: 115348 - DNA, 201 bp, Homo sapiens
ggggaaggacaaaggcctgtcacactcctaggcctggcttgctggcctatatggtagggtgcccagcagaacccaggacacgccatgaggggccgctgacrtggcccgtcctgaccctgccagcttgccctgctccaggagagccagtgaaagcaccttctccttcctgctcagcctgacactcttgcaaccacctacgac

SEQ ID NO: 115349 - DNA, 201 bp, Homo sapiens; identical to SEQ ID NO: 19393

SEQ ID NO: 115350 - DNA, 201 bp, Homo sapiens; identical to SEQ ID NO: 19394

SEQ ID NO: 115351 - DNA, 201 bp, Homo sapiens
ttctcccctcaccctcggggcctcagagtcactgagcaccagacttgccccttgggggctacggtgagtcccgagtctttctcagaagtctgctgggggcytgtcctcacaaagcagacagagccgtggggggagacaggccttgatgtccctaaacccaccggggcgagaagtgagccaggtcccacacccccaggtgag

SEQ ID NO: 115352 - DNA, 201 bp, Homo sapiens
atatacacctacagagtcatcttagacaggaccgctgacaccagggaagcagggcccatccaggcagatgctgggtgagtaaggagacatgatcgtgtggmgcttatagacattctccttagattacttccagtttctgagttaaataagaagcaagctcatcagcagagagtgaggaaaggaaagaaaagggggaagcgt

SEQ ID NO: 115353 - DNA, 201 bp, Homo sapiens
ggcagctgagtcctctgtaccattaagagtattggtgatgtagcatttctgaaacaaacaaacaaacaaaaaaaaaaaaacaggcacacctgtctctgccrtctctggggttttcttctaagcttgtaataccatcctgtaagttctgatactggttctttcctgagcttactagaaagtacgaggtaatcataaccacct

SEQ ID NO: 115354 - DNA, 201 bp, Homo sapiens; identical to SEQ ID NO: 19395

SEQ ID NO: 115355 - DNA, 201 bp, Homo sapiens; identical to SEQ ID NO: 19396

SEQ ID NO: 115356 - DNA, 201 bp, Homo sapiens; identical to SEQ ID NO: 19397

SEQ ID NO: 115357 - DNA, 201 bp, Homo sapiens; identical to SEQ ID NO: 19398

SEQ ID NO: 115358 - DNA, 201 bp, Homo sapiens
agtcattccaaatttttggctctttttatgtcaacggcaggaggaagatggagggctcagggcaagaggtaactgatgactgcagatatctgggcaccagygagggtgtgaggatgttgggaacttcttttccctggtcaggtcacagtatttccataaatctttaacaaaacatagttacttgtcctttaaactcagagt

SEQ ID NO: 115359 - DNA, 201 bp, Homo sapiens
agaggctttcacatgctaaagcattacagagccacctgcattctgaattcattctttttctagcggatttgcaatttgtgaagaaatgaactttcctgttyctacaaagtaaacgtctagagtcttcatagttaatgaaataattatgttggggagaaagtaagacgcttacatctgttgacccacttatatctgcaccat

SEQ ID NO: 115360 - DNA, 201 bp, Homo sapiens
tttgaagttgggtattgtgatgcctcctccaactttgctctttttgcttaggattgttttggctatgttgattctcctttggttctatgtgaattttgaastagttttttttcttctaattctgtgaagaatgaaattggtagtttgataggaatggcactgaatttgtagattgctttgggcagtatggccattttaaca

SEQ ID NO: 115361 - DNA, 201 bp, Homo sapiens; identical to SEQ ID NO: 19400

SEQ ID NO: 115362 - DNA, 201 bp, Homo sapiens; identical to SEQ ID NO: 19401

SEQ ID NO: 115363 - DNA, 201 bp, Homo sapiens
aaaaaaaaaaagaaaaacattactattgagaatctcttattaagaactcatacaattaagtatctcccattgagttattgcctaatactcctgtctctaakcgacactgcttatcatatagtctctcagtggaggcagaagtaaaatcagctgttcactggagaactggcagcatcgtgggaggaggtaggccttgatact

SEQ ID NO: 115364 - DNA, 201 bp, Homo sapiens
cctctcgggttcaagaaattctctgcctcagcctcctgagtagctgggattacaggcgcccgcaagcaagcccagctaatttttgtatttttagtagagayggggtttcaccaccttggccaggctggtcttgaactcctgaccttgtgatacacctgcctcagcctcccaaagtgctggcattacaggcgtgagccactg

SEQ ID NO: 115365 - DNA, 201 bp, Homo sapiens
tagcaatgagaaaaatattaaagtatgaattttaaaagataaaacataaaattgataaaaaatataaaatcatagaattaatttttaatactatgtaactrtttgttaaaatttcaattagaataacaatttctaggaaacctgataagtggacaaaagagataaagcacatacatacaaacttataaatgttaatataac

SEQ ID NO: 115366 - DNA, 201 bp, Homo sapiens
ctgtctctaatcgacactgcttatcatatagtctctcagtggaggcagaagtaaaatcagctgttcactggagaactggcagcatcgtgggaggaggtagsccttgatacttaggtacaaggaagagcatcagaaacaccttgtgtggagtttctaagcatagaatcttggcttagcagagagccacagactgagaaattg

SEQ ID NO: 115367 - DNA, 201 bp, Homo sapiens
tgacaagtggttaatatccaatatatataagaaactcagataactcagcaaaaagaaaacaagtaacctgattaaaaaataagcaaagtgtttggatagcratttctccataaaaggaatacaaatggccaacaggtatatgaaaaaaagaatcaaaatcactaatcatcaaagaaacacaaataaaaaccacagagagat

SEQ ID NO: 115368 - DNA, 201 bp, Homo sapiens
gagaaattgtagagaagcaaataagacaatgagcataaagatttgtacaatgttaaaatattaataaaaatatgaaagacagcaatacataactatacatmtgcatatgaagaaaagaaacactggaatgagaaataatattaagtaacaccttctatatcccaaacactgtacttggtaggtgatggatattattttgtt

SEQ ID NO: 115369 - DNA, 201 bp, Homo sapiens
aagcccagcactgggctagacccctctgctcctggcaccaggccaatatacatgaacaaaacctctagacctgccccaacatgagacaaaatcctgtggtmccagggccagatgggaacctgtggccctggtaaggcaaacttgagatctgacccacatgaccaccagctgactgcaacagcctcagaccctgaataaacc

SEQ ID NO: 115370 - DNA, 201 bp, Homo sapiens
aaagggaataaaatgtttaccttatatttgaaagtcagacaaaacaactcaggtatcacgataataattatttatgtactgaataatatttcatcaaaatrtaaaatataaatttatatgcatagtagaaaatgacaaaatgcaatcatacatggagtgcattacacagcttgctatatgtttgctaaatgaaattggtaa

SEQ ID NO: 115371 - DNA, 201 bp, Homo sapiens
tctccagcgattatctccccttccgccatagaaacattaatttgaacaactatccatgcatgaagaagttttcacaagagctaagaaaaccagatgagacrttacggtacctggttttagcataataattagaatagacaaattgaagagggcagaaaggaccatttaagttttgcatcacctgttccccaacctcaggca

SEQ ID NO: 115372 - DNA, 201 bp, Homo sapiens
gaaaagaagttaaactatctcgttgctgacaataaaattccatacatagaaaaccctaaagaccacaccaaagggcttctagggctgattaatagattagktaaaggttcaggatacaaaatccatgtaaaaaattcagtagcatttttatacacgagtaacattctagctgagagtcaaatcaagaacatgatcccattt

SEQ ID NO: 115373 - DNA, 201 bp, Homo sapiens
gaaagaaaactggaataattgttaaatttagacaaaacagatttcaaagcaaataaaatggcagggataaagaccaacattgcataatgataaggcatccrttctcctaaaagatgtaacagttcttagcatgtatatgtctatcaaaagagtatcaaattacaaaaggcagagaggggtgggggaagatggtggagtagg

SEQ ID NO: 115374 - DNA, 201 bp, Homo sapiens
gaactagaacaagacaaatgtgtccactcttaccactttcattcaacatggtaatggaaattctatccacacacagcaatcaggaaagagaaagaaaaaaragccattcaaataggaaaagaagttaaactatctcgttgctgacaataaaattccatacatagaaaaccctaaagaccacaccaaagggcttctagggct

SEQ ID NO: 115375 - DNA, 201 bp, Homo sapiens
agttgagatcaatttatttgaagcagaagcaactcgagcaataaactggtaggaataattaaatggtgatactgatgaattgctggaggcttagtgtagastagcaccagagggataatctcctgcaggcccagtcttatggaagtcatacagtttcatgggcattcacttgaagaaactcatcatgttgtcattgtgaag

SEQ ID NO: 115376 - DNA, 201 bp, Homo sapiens
tgcttttttgattactgtaaccttatagtatggtttgaggttggatagtgtgatgcctccagcttcattcagcaaactgaatccagcagcacatcaaaacrttaattcaccatgaccaagtaagatttatttctgggatggaaagttagttcaccacatgcaaatcagtaaatatgattcaccacataaacagaataaaaa

SEQ ID NO: 115377 - DNA, 201 bp, Homo sapiens
tgcaggaaaccctgctacactgtagtttgctaaaataaagtgttttactatcgagtattattttattaatgccatggtcctcttttggtcaaggctatggrttaggatcttgggcagataacaaattcctacatactactgtgagattttatttgacttatccaaatctcatgaataatgatctaccaatatgctatgagc

SEQ ID NO: 115378 - DNA, 201 bp, Homo sapiens
catgcacatatatttcgtatatagctgtttaatacatgattaaatgatattacattttaagtagaaataaaagtataaagtactggatgagaccagaggcygaactcaggttctgatggccgagctgccccacaggatcatcaaggaaacccagcgtttgctggcagagccagttcctggcatcaaagcagaaccagatga

SEQ ID NO: 115379 - DNA, 201 bp, Homo sapiens
ggtgtttgctaaaatgtaactggccaagccataaatagtcacagtgttcagtaaaatataattagcttcatttgacttcactacaaagtaaaacaaaaaawggagctataatatgtaaacattaaaggtaataattataaaatagcaatgagaaaaatattaaagtatgaattttaaaagataaaacataaaattgataaa

SEQ ID NO: 115380 - DNA, 201 bp, Homo sapiens
gatgtgacctctttgaaggaagacagagggctgacatttgacatactctgtaataaaagaacagtatatctaaaattgaatttgacacctcttattttatrgaattcacatctggagatgaaagcatggcatgagatgtcagaacacacgacttggtcttctcttcaacaatatgggtaaatcaacacaatgtggagtcca

SEQ ID NO: 115381 - DNA, 201 bp, Homo sapiens
ttctgtaaatcattcaaggcaaagtccatcaatgtgacaaacatcgtcatgttattttaagaaattgccacaatcaccccaaccttcagcaaccatcaccytcatcaggcagcatacatcaacatcaaagccagatctcccctcagcagcaagataatggctcactggagtctcagatgattgttagtgttttatcagcaa

SEQ ID NO: 115382 - DNA, 201 bp, Homo sapiens
tgaacgtattatggagtaactaattatcacccatttatggtgttataggactcaaaaagctatgagctctttttgaacttaactcattttgtaaacataayatctccttgaagcaaaatgcaaaatattattcattgttttaatcttatttctacacacagaaatacttgcactgaataaaatactactaattctaacaca

SEQ ID NO: 115383 - DNA, 201 bp, Homo sapiens
ccttgtttttactcactccttaaagatttccttattaagagttctgcattctaatgctcgtcttggaaaccacaaaatgatccaaattaaatatatatatrtgtgtgtgtgtgtgtgtgtgtgtgtgtgtgtgtgtgtgtgtgtgttgtgacttctacattgctgaaatagtttatgaccaactttggtttttcaaaccca

SEQ ID NO: 115384 - DNA, 201 bp, Homo sapiens
atataggacaatttaaattgtaagcttaatattaccaagaaatggtgagcatgtgttgaaacaggaaggttcatatactccttgtggaaatataaaattgrtatcgtaacttgagagagctatttggaaaaaaaatgttagtttgtaaatgtgtataccccaaggcctggaaattttattcatcaaacatgattgtgaaga

SEQ ID NO: 115385 - DNA, 201 bp, Homo sapiens
gattggctataattgaaagtcttggtaataaacttactggcgaagccttatataaacaatcactttcatttgttactggtaggaatacaaattggaatgamatttgacactgtctatcaaaatttcaaatacatagatttttttgtccctagaattccacttcatgaattaaacccattaatggtcctgtgtatgcgtaaa

SEQ ID NO: 115386 - DNA, 201 bp, Homo sapiens
gactctatagatgctgaaaagcatattgcaaaattcaacaatttctcgatttataaaaatagttcataaaataagaatgcatggatattttcttaagctartaaaattctcaccccaaaagcagcattatgcttaataagtaaataatagatccattcatgttaaagtaaaaaagtagatgagaatgttcacaattattct

SEQ ID NO: 115387 - DNA, 201 bp, Homo sapiens
tctaataagttacagtacagtagtattcatctaattcattgagaaaagaatcagaaaaaaccatacatgaaatacgctatcattcaatagtaataacagamgtacaaattgtaacagtataaattgtactttttcagtgggaaaatgaccacaaaaacacctttgaagactatatttattattggtgaagattggaggaaa

SEQ ID NO: 115388 - DNA, 201 bp, Homo sapiens
taggctttcgggcacctcagggaactgcaactgctgaaatcgtaatggatttaaggatatcaccagtcaacctacattgaatcactggacaaacctgctgyggaagaaagttaccaaacaaagccaggctgcaaacactggattaggtaagaatatcgacatgcagacattgacacatggccacaagcatcaagatcaata

SEQ ID NO: 115389 - DNA, 201 bp, Homo sapiens
caagtgagagggtttaagtgccagacacaactctaactggtgccctatcacgctgtcgccaaactggtgtcctggatgcaagacaaagtcctccccacttrtttctctcctcaaacagaaggaagggatctgccttggatctgtgagttgtgtggttacggaagacgtgatgtaatcactctgttggctgccccagctggt

SEQ ID NO: 115390 - DNA, 201 bp, Homo sapiens
gggcacactccagtgctgtgctggtcttggcagccacggtttctggtgtgactcagcactgtgtcagcctcagcagccaaatattatggacccagcaattytaggctttcgggcacctcagggaactgcaactgctgaaatcgtaatggatttaaggatatcaccagtcaacctacattgaatcactggacaaacctgctg

SEQ ID NO: 115391 - DNA, 201 bp, Homo sapiens
tcagtgggaaaatgaccacaaaaacacctttgaagactatatttattattggtgaagattggaggaaataaacttttcatatatcgactactgtaggaagstatgttcatgtgtataaaaaatcttatatattgcagagtgacaatactacctttgattctttcacagtttgcactcagtaaggagatgtctatataaagg

SEQ ID NO: 115392 - DNA, 201 bp, Homo sapiens
ttatatcagtaattattttaaatgtgaatggaatggtctaaatacacatgttaaagatggtgattgtgatggtggctttttaaacaattgctcaactacasgctttttataagaaatctgctttagatataaagacaaagatgaattaaaattaacgaggtaaaaaatatatataccatgttgacactaattgaaagaaaa

SEQ ID NO: 115393 - DNA, 201 bp, Homo sapiens
gaagagcacctcacatctcactacaaatgatgaatgtaaatggcttaaatgctccacttgaaagacacagaatcacagaatggataagaattaaccaaccrtctgctgccttcaagggactcacctaacatataaggacttacataaacataagctaaagaggtggaaaaatacattgcttgcaaatggacaccaaaagtg

SEQ ID NO: 115394 - DNA, 201 bp, Homo sapiens
atgctaaatctattctgtctgtgctatatacatgggaccacaaagcctggatgacatctccttacagcatggttgactgaatattttaagcccattgttgwgatacgctgctcagaacaaaagattaatttaaaaatattactgcgtattaattattcacttggtaacccaacagctcttgtggaactgtataaggaaatt

SEQ ID NO: 115395 - DNA, 201 bp, Homo sapiens
gaaaaattattttgatgacctggacatggccaaggaaaggattagtgagtttgaagatgtgtcaattaatacttaccaaactgcaacaagagaaaaaaagratcaaatcagtaaactatctaagatgtgtagggtaatttgaaaacatgtaacatgtgtgtaaattggaataccataaggagaagaaaaaaaaaagaagaa

SEQ ID NO: 115396 - DNA, 201 bp, Homo sapiens
atctacagttattgtactattaagtctgtacatctttgatagtagtaatccaaaatctttggaatattaaaaacatgttttagttactgaatggagttacrtgtttccagttgaaactacatactttgtttcaattaagttcttctagccaaaacatcctcttactaagtggaccaggtggagtatccacttatctctaag

SEQ ID NO: 115397 - DNA, 201 bp, Homo sapiens
atcgttaataacctttataatgtaatgttgaatttggtttgctagtgctttttgaggatttttgcatctatgttcatcagggatattaccctacactcccrttttcttttagtgctttgtccttgtctggttttggtatcagggtaatgctggccccatagaatgagtttggaagaattccatcctgtccagctggcccca

SEQ ID NO: 115398 - DNA, 201 bp, Homo sapiens
tgcctgattacctatcggtaacctttatttctacatggcttagtggtttggcaacagttggtcagaattttttatatatatatatatatatatatatatatatttattatactttaagttttagggtacatatgcacaacatgcaggtttgttacatatgtatacatgtgccatgttggtgtgctgcacccattaactcgt

SEQ ID NO: 115399 - DNA, 201 bp, Homo sapiens
cggtttttaaaagtcacatggaaatcctttgtactaagtcatcataatttaaccatctactattggcaatttaggttaaattttttgcctctatgaactgygatggatatttttgcatataaattctttcctaagccattcctgtcactagaagtattgtgtcaaaaatataatttttaaaggttaaaaatacatattgcg

SEQ ID NO: 115400 - DNA, 201 bp, Homo sapiens
aataaagtgagacgttgtacacggttggtggaaatgtaagttggtacaaccattatggaaagcattatggagattagtcaaaaaattaaaaatagagctgycatatatccagcaattccacttctgtgtgtgtgtgtgtgtgtgtgtgtgtatatatatatatatatatatatatatctccaaaagaaatgacattagtat

SEQ ID NO: 115401 - DNA, 201 bp, Homo sapiens
tactgatttgtgtacattgattttgtatctggagactttactaagtctaggagctttttagatgagcctttagggttttctaggtatacaatcatatcatsagcaaacagtgacagtttgactccctctttagtgatttgcatgtactttatttctttctcttgtctgattgctctggctagacttccagtactaagataa

SEQ ID NO: 115402 - DNA, 201 bp, Homo sapiens
tccccattcagtattatgttggctgtgggtttgtcatagatagcttttattacattaaggtatgtcccttgtatgctgattttgctgagggttttaaccayaaagggatgctggattttctcaaatgcttttttctatgtctattgagatgcttatgtgatttttgtttttaattctgtttatgtgatgtatcacatttat

SEQ ID NO: 115403 - DNA, 201 bp, Homo sapiens
gcaattgcaaaaatatggaaccagcctaaatgcccatcaatcgacatgtggataaagaaaatgtggtatatatacaccatggaatactacttagaaataawaaaaaaaaaaccaatataatggcattcacagcaacctggatggatttggagaccattattctaagtgaagcaactcaggaatggaaaaccgacgtcgtat

SEQ ID NO: 115404 - DNA, 201 bp, Homo sapiens
agtgagccaagactgtgccattgcactccagcctgggcaacaagagtttttgaaactccatctcagaaataataataacaataataataaataaataaacbtgtgtaaattattctgttgttgataattcattacagcagcaatagaagactaataaaaatgactggctaaggcatatgagtggaggaaaatctacattaa

SEQ ID NO: 115405 - DNA, 201 bp, Homo sapiens
gaagttgatgcctggcttcaaagcttaaaaggacaggctcactctcttgttaggggctaatgcagttggtgactttaagttgaaaccaatgctcatttacygttctgaaaattctagggctcttgagaattaatgctaaatctattctgtctgtgctatatacatgggaccacaaagcctggatgacatctccttacagca

SEQ ID NO: 115406 - DNA, 201 bp, Homo sapiens
tggcaaatcagtattgtttattctctcttcagtacctctgtcagcaatacgagaataaaaccaggtactatgagggctcacctaatttttggttcttctgtttttttttttttttttctgtgtagatagttgttaaattggtatccttctgttggggattattgctggagccttctgttctgccatcttgcttagcctgtc

SEQ ID NO: 115407 - DNA, 201 bp, Homo sapiens
tgggtgcagcaaaccaacatggcacatgtatacctatgtaacaaacctgcacattgtgcacgtgtaccctagaacttaaagtataataaaaattaaaaaawaataataatagagtgtagacatgcaaggacattccctataataataagaaaatctctggaaaaaaataaataaataacttcagggcatggaaataaatag

SEQ ID NO: 115408 - DNA, 201 bp, Homo sapiens
atctttattgtattttgaaagagtggatccatgagcactgcactgaacacatgccacttaaaggtatactgaccataaaacgaagaaagatctatcacaakgaatggaaaattgaaaagaactagaatattcagcaagctagtttcagagatttagaaaaagccacaacattaaattgttgaaatttgtggtgagaaagca

SEQ ID NO: 115409 - DNA, 201 bp, Homo sapiens
acatgtttttctggccatcttgtcttgagtacatttttacttgagcagctttttctcccttggtttgagcaagtagaatacttaagcctaaaatctaagtyctatgattataaaatataattttgttttgttccaactaagagttgtctctttagaaatgcaaatttgttgccttgttaacaattgcttagggtaatgaaa

SEQ ID NO: 115410 - DNA, 201 bp, Homo sapiens
gataaaatattttgatatgaatgaaaatatagacgcagtatatcaaaatgtatgctaaagctgtactctgagagaaatttatcattgtaaatgcctatatyaaaaacaaaacacaccttaataatttaaccttccacttcaatcacctgaagatgttaccaaaacaaacaccaggggttcagtctaggttctggggcttgc

SEQ ID NO: 115411 - DNA, 201 bp, Homo sapiens
ggcaaatgaggcacaagggtggaagaggtattattaatggatagtttaattttcgaccatgcgattgaagccctgttacacggtgaattgtgtcctcatayacagcccccgaccccacaaaaaaaagatatgttgacatgttaattcttcagaatgtgatgttatttggaactaaggttcctgcagacatagttcattaaa

SEQ ID NO: 115412 - DNA, 201 bp, Homo sapiens
ctagacctcataggaatatatgaaaatttccgcccaataatagaagattacacatttttctcacagtcacacagaacattctccagtatagacaatacgtyggggcataaaacaagcttcaatattttttaaatgattcaaatcttaacgtatgttctctgacccaaatgcaatgaaatgatgaatcaaaacagaggaaat

SEQ ID NO: 115413 - DNA, 201 bp, Homo sapiens
caatctgtacatatatcagaacatcgcgttgtacaccttaaacatatacaatttttatttgccaattatacctcagtaaacgtgaaaaaagagaaataagkttttccaattcatttatacctataaaaaagctcacagataaagaccaataccactaatatatatacatgcaaaattcctaaatgaaatatgagaaagata

SEQ ID NO: 115414 - DNA, 201 bp, Homo sapiens
ttaagaccagaatagtcaacttctatgcaaaaacaaaatcaagaacaacaaaaaaactgtaaatgggactattaggttggtttcaaagacaatgagaaaamaaaaagcaaagaaaaagcctacagaaggaaacgagattagcgaaaaaattcatataatagaaaacacagataaaaacaatagagaaaataaacaaaacca

SEQ ID NO: 115415 - DNA, 201 bp, Homo sapiens
catatgagtggaggaaaatctacattaatgctaaagactagaaaaaggtaaacaatttccactcaatataatactgatgtgacctctttgaaggaagacasagggctgacatttgacatactctgtaataaaagaacagtatatctaaaattgaatttgacacctcttattttatggaattcacatctggagatgaaagca

SEQ ID NO: 115416 - DNA, 201 bp, Homo sapiens
tttcagatattagaggaataactgttaacatttttccatttagtatgttatctgtggatttgtcatacatagcttttattgtgttgaaatacattcttgcwatactacatttgttgagaatttttattataaaagaatgtctattttttcaaacacttctgcatttattgaagtggtcatatactttttgtctttcattct

SEQ ID NO: 115417 - DNA, 201 bp, Homo sapiens
acatcaggacaaccacctgcagagaggaggtaccctctccagggcctcctctcccctgagagctgcagatattgggatgacctgcctgtaaggggagccascctctccagggcctcctctctgctgagagcagcagacatcaggacaaccagctttagagtggagctacccactgcaggtcccctctgggctgttgtaaca

SEQ ID NO: 115418 - DNA, 201 bp, Homo sapiens
gaaattgccacaatcaccccaaccttcagcaaccatcaccctcatcaggcagcatacatcaacatcaaagccagatctcccctcagcagcaagataatggstcactggagtctcagatgattgttagtgttttatcagcaataaagtatttttaattaagatatgtacatggtttagacaatgctattgcccacttaatac

SEQ ID NO: 115419 - DNA, 201 bp, Homo sapiens
aggagaatcgtttgaacctgggaggcggaggtggcagtgagccaagactgtgccattgcactccagcctgggcaacaagagtttttgaaactccatctcaraaataataataacaataataataaataaataaacttgtgtaaattattctgttgttgataattcattacagcagcaatagaagactaataaaaatgactg

SEQ ID NO: 115420 - DNA, 201 bp, Homo sapiens
tgttgcagacttcatgttgcagaagctctcttccggaaaagatggtctataagtagctatactgaaaaagaatgaatatctcaaataaacaacctaatttyccatcttaatttattgtaaaaggaagagaaaagtaagcccaatgcaaatattttaaaaagttgtttcctcggaaagattaataaaagtagcaaaacttta

SEQ ID NO: 115421 - DNA, 201 bp, Homo sapiens
aaaaaaaaatacaatgtactgtaaccttttaatcaaaacacagcatcgtgggtagaaactaaaatgctgctgtagtttgttgtttaacagttaatacaagwattatgatgatgctactgtgttattttgttacactgagcatattatttttcactgtattaacggcatgtcataatttttactgttaagtattgatgtgtg

SEQ ID NO: 115422 - DNA, 201 bp, Homo sapiens
ggtgcagcaaatcaccatggcacacatttacctatgtaacaaacctgcacatgtatcccagaactttatatatctatatctatatctatatctgtatccatatctatctatctatctatctatctatctatctatctatctatctatcatctatctctctatctatatatatatgtcaaaaaacagcaggtgttggcaagg

SEQ ID NO: 115423 - DNA, 201 bp, Homo sapiens
gtgcagcaaatcaccatggcacacatttacctatgtaacaaacctgcacatgtatcccagaactttatatatctatatctatatctatatctgtatccatatctatctatctatctatctatctatctatctatctatctatctatcatctatctctctatctatatatatatgtcaaaaaacagcaggtgttggcaaggt

SEQ ID NO: 115424 - DNA, 201 bp, Homo sapiens
tgcagcaaatcaccatggcacacatttacctatgtaacaaacctgcacatgtatcccagaactttatatatctatatctatatctatatctgtatccatatctatctatctatctatctatctatctatctatctatctatctatcatctatctctctatctatatatatatgtcaaaaaacagcaggtgttggcaaggtt

SEQ ID NO: 115425 - DNA, 201 bp, Homo sapiens
gcagcaaatcaccatggcacacatttacctatgtaacaaacctgcacatgtatcccagaactttatatatctatatctatatctatatctgtatccatatctatctatctatctatctatctatctatctatctatctatctatcatctatctctctatctatatatatatgtcaaaaaacagcaggtgttggcaaggttg

SEQ ID NO: 115426 - DNA, 201 bp, Homo sapiens
ctttatatatctatatctatatctatatctgtatccatatctatctatctatctatctatctatctatctatctatctatctatcatctatctctctatcwatatatatatgtcaaaaaacagcaggtgttggcaaggttgcagagggaaagaaatgcttttacactgttggtgggcatgtaaattagttcaaccattgaa

SEQ ID NO: 115427 - DNA, 201 bp, Homo sapiens
ctaaggttttattaaaattaactttagtattgataatacactgataaaaactaaaattttgtttactcttttgaacaaaaattgtgtgtagtttaataagmcagtaaaatatttttgttcaccttttaagtaaactgtaaaaaggaaaaaagagacaaaagaaaagacagattgtttcatgctgtcttaggtcttttgatt

SEQ ID NO: 115428 - DNA, 201 bp, Homo sapiens
cttgtttttactcactccttaaagatttccttattaagagttctgcattctaatgctcgtcttggaaaccacaaaatgatccaaattaaatatatatatakgtgtgtgtgtgtgtgtgtgtgtgtgtgtgtgtgtgtgtgtgtgttgtgacttctacattgctgaaatagtttatgaccaactttggtttttcaaacccat

SEQ ID NO: 115429 - DNA, 201 bp, Homo sapiens
attggaatccttaaggtgaagctaaccagtgaggtttctccccagaagaagatggcatccttgatggggacagctttttctcaagattagagattgagacttctctactatcatgagactcttatctttcatttttttcccttgcttatgcctctttgaacaatagaaaaagaaaaacaggttttctgtgtgcactcacag

SEQ ID NO: 115430 - DNA, 201 bp, Homo sapiens
agaaaaaccaattttctgaggagaaatttaagcaggctgcagaaatttgcataagtaacagggagcctaatgttaatcccaaggacaatggggaaaatgtytccagggcaagtcagaggtcttcatggcagcccctcccatcacaggcctggaggcctaggagaaaatggtttatgggcgaggcccagggtccccatgctg

SEQ ID NO: 115431 - DNA, 201 bp, Homo sapiens
gaatatatatatatatatatagtaattttaagacaataagtttgggggtgggttttgctgcagcactagctaaatgatacaagtaactttccatcctactrtgtattttactctaatttttcttttacctttgcccacaagtcccttggttatctataattttctcccacgatatcttttaatatgattcttcctattttt

SEQ ID NO: 115432 - DNA, 201 bp, Homo sapiens; identical to SEQ ID NO: 19402

SEQ ID NO: 115433 - DNA, 201 bp, Homo sapiens
tccctgtttgaatgttttcagtgtagttaacagtgtattatagacattcacattaaaaaaaatgacatgaattaacagctcctgatacaaaccaaaccaayaaaaaagtaaaaactgacaatttcactggaaagtaatcctttgggaaaacaatttgacaaatacgagaaaagtttccagttactataaagctgataggaa

SEQ ID NO: 115434 - DNA, 201 bp, Homo sapiens
ggaaccagatctacagaaggctgagagagaaatttttgtgaatgggaaattacatacagtgccaaatggcacttacgaaaacaacaacagcaaaactttctttttttttttttttttgtttgtttgtttgacagagccttgctctgttgcctaggctggagtgctgtggcacaatctcggctcacggcaacctccacctct

SEQ ID NO: 115435 - DNA, 201 bp, Homo sapiens
ctttgtaagttatatttattatagagaaaaataaaaattctcaaaaaagacaaaaatgtactcaaataatatgatgttcaatctggaaaatttaagaaaawtgcctttctttttgagacggagtctcgctctgtggcccaggctggagtgcagtggtgcgatctcggctcactgcaagctccgcctcccgggttcacgcca

SEQ ID NO: 115436 - DNA, 201 bp, Homo sapiens; identical to SEQ ID NO: 19407

SEQ ID NO: 115437 - DNA, 201 bp, Homo sapiens; identical to SEQ ID NO: 19408

SEQ ID NO: 115438 - DNA, 201 bp, Homo sapiens; identical to SEQ ID NO: 19414

SEQ ID NO: 115439 - DNA, 201 bp, Homo sapiens
tcttcttttattgcaaatttacatttctaatcttataaccaaaataaatgccactgggtagaggaaccatattaatttggatcagccaccaaaaatagaarctcatacagcaaaagatatggtaatataaaatagactaacattgaggtactttgttgattgatcaccattttgcaatagcagatggatatctagtccttg

SEQ ID NO: 115440 - DNA, 201 bp, Homo sapiens; identical to SEQ ID NO: 19409

SEQ ID NO: 115441 - DNA, 201 bp, Homo sapiens; identical to SEQ ID NO: 19410

SEQ ID NO: 115442 - DNA, 201 bp, Homo sapiens; identical to SEQ ID NO: 19411

SEQ ID NO: 115443 - DNA, 201 bp, Homo sapiens; identical to SEQ ID NO: 19413

SEQ ID NO: 115444 - DNA, 201 bp, Homo sapiens; identical to SEQ ID NO: 19412

SEQ ID NO: 115445 - DNA, 201 bp, Homo sapiens
cattctgttggttgtctgtttattctgttgactatttttttatgtgcaaaagtttagtttaattagatctcatttgtccatttttattgttgcatttgcckttagccttagtcataaattctttgcctaggccaatatctagaagagttcttcttagattttcttctagcgattgcatagtttcaggtcttatatttacat

SEQ ID NO: 115446 - DNA, 201 bp, Homo sapiens; identical to SEQ ID NO: 19415

SEQ ID NO: 115447 - DNA, 201 bp, Homo sapiens
cagggcaggagttgctgccgttcatctgagttcccccttgccacacacatcagggtccagaggggctcccagcaagggggagagggaaagagagtgagtgsgtgggcagaaaccagcataggatggcgagcctcccggggtgcagacacacagggacacccttttcacagggacacgccagcctcttagaggcagagccag

SEQ ID NO: 115448 - DNA, 201 bp, Homo sapiens
tcctaccccacggggcctcccttctgtgtgctcagccccggcagtctacagggggctttcccagcctccgtctcccaggaccctagggcccccggtgctcytgtccgtcccagagccccagccaggacttgtcaaggccctggctgcctcctgagaaggtccgtttgagacttgaggaagaagcccatgaccctggacgtg

SEQ ID NO: 115449 - DNA, 201 bp, Homo sapiens
gtggccttatggggagaggcctgcagagggctcctaccccacggggcctcccttctgtgtgctcagccccggcagtctacagggggctttcccagcctccrtctcccaggaccctagggcccccggtgctcttgtccgtcccagagccccagccaggacttgtcaaggccctggctgcctcctgagaaggtccgtttgaga

SEQ ID NO: 115450 - DNA, 201 bp, Homo sapiens
caggaatttgagatgagcttggggcctgagcatgtgaggctttgtgggccacgaggagtctgaacttattgtaagtaaaatgggaaaccatcagtggggtytgagtaagaaatgatttgatttaagcctttaaaaatcactttggtggccttatggggagaggcctgcagagggctcctaccccacggggcctcccttctg

SEQ ID NO: 115451 - DNA, 201 bp, Homo sapiens
gtccacaacaagggcaccaggcttcatgctgctctcttgcctctattcccacccctaatctacctgcaacgcagaccttgcgacgtcacttttcgacttakcaagtgtgcactactgatgaccaagggcctttgctgaggagctcctgccagctggccctgccagctctctcccctggctgcccagcccctttctatccct

SEQ ID NO: 115452 - DNA, 201 bp, Homo sapiens
aacggagccagttactcttacatcccatatcatcatgagagttaaatgagaggactgtggaaacaccacatctgaccctgcgagcctgcaggagtgttgarcagggaggatctgcacgcgtgtatctgtggaatgtgcccatggcttgtgtgtgattgtgtctgtgtgtgtgggacagctgtggggtggggtgggggaaag

SEQ ID NO: 115453 - DNA, 201 bp, Homo sapiens
cctccccagcccgcaggctcccggggctccgctgcccagcagggagagggaggagggggatacatggagtgatggggcaccccacggaggagtcccacgtrggaaacttccctgaatgactgaagcacaaagagagttcttcaacaactctccatttctcactggcgcactggggagctggatgtggtttttggctctgtc

SEQ ID NO: 115454 - DNA, 201 bp, Homo sapiens
taaaatgagagttatttgctcactttacagatgaggaactggaggcttggaggatgaagtgccttgtatgtgtcagcccatctgtctcctgatctgaggtsgtgatgcagggctacaaaagcccagaaaaacagcaatggtccctggagggttcccaggggaggcagcctcagtgagcacacaacttcctcttctgcagaa

SEQ ID NO: 115455 - DNA, 201 bp, Homo sapiens
aggaactcagaaactcaagatggaggagggaaggtgagaattcctcagttttcaggaaactgagatgagagttctgtcttacagaaaaaaaaaaaaaagaraaaaaaaaacccaacagccaacttattaaattggcttccaacatcaaagagtgctcaccaaatcctcgcgggtgatttcagagcaggcaagatcaggcac

SEQ ID NO: 115456 - DNA, 201 bp, Homo sapiens
acaggaactcagaaactcaagatggaggagggaaggtgagaattcctcagttttcaggaaactgagatgagagttctgtcttacagaaaaaaaaaaaaaaraaaaaaaaaaacccaacagccaacttattaaattggcttccaacatcaaagagtgctcaccaaatcctcgcgggtgatttcagagcaggcaagatcaggc

SEQ ID NO: 115457 - DNA, 201 bp, Homo sapiens
tacccttccatctgtccatccatccatccatccatccaaccatctgttcatccatccatccatccatccatccatctgtctgtccatctgtccaaccatcyatctgtttgtctattatctatctatctatctatctatcatctatctatctatctatctgtctgtctgtctgtctatctttgagaagaacaaagaatctca

SEQ ID NO: 115458 - DNA, 201 bp, Homo sapiens
tgtgggattcttgcccaagattcctggccaaggccccatggcaaagaaggctgagatgggcacacatgaattccacctgaagaaggggggaatggcatcasactgtggggaggtgaggggtcagatgcctggattcacatctatgtgagaatccagtggataatcatcccacttacccactgtttgaccttggacaagtta

SEQ ID NO: 115459 - DNA, 201 bp, Homo sapiens
tgcatgagtatctcacacttctatcctgcccggggagagactctttcaataacctgtgcggcctggctgtttaatatagttcttggtaaccaaatcaccasctggtggcggcgtaccctacttttcaggaaagcaactactatgttggtgcaaaagtaatagccattttggcgttaaaactaatgaccacgccattctcct

SEQ ID NO: 115460 - DNA, 201 bp, Homo sapiens
aaagagcacccacattttgggggccatgtgaagcagattctcagagagcttgtgcctgtttggtggtttgtctcttccctctgtcctctgtcccctagaayccatgtccctcactgagggcaatatagatggggttggggaagggagaaaagttaataacattttacttcaaagtgctcttccctacccacttccacccca

SEQ ID NO: 115461 - DNA, 201 bp, Homo sapiens
tccttcaagcggggattctgtttggtgcatttctgtggccccagactcccagctgaggaccaggtgtgctgaccttcatggatgacttggcatttttgttycattttcagttcaaaagcatcaaccaaggcaagaggaccagtgttgctgactccatgctgtggttgctggagaaatattcccagaacctggaggacctga

SEQ ID NO: 115462 - DNA, 201 bp, Homo sapiens
ctgggagctgcgcaagagcagggaggggctctgatctatctacggcccctcacctccagcacagagcctggcacaagcatcagctcctctctggatgtcaytggagactccagttagctttatcctcaccccgcaactggagcccaggaagtgcagtggggaatggcacggagggtagagaagggtgaggctgtcactggg

SEQ ID NO: 115463 - DNA, 201 bp, Homo sapiens
tccccacttagctctggcatcaggggtggtgcccccctccacagatgagaaatctagagctcagagtaaatgacctctaaacagtcaccataatggtgggyagcagagctagggtgagcaaccagtttctaaagcacaagcttggaatctttccaggggatcggaggttgccatggccagtgaggtggggaagggctcttg

SEQ ID NO: 115464 - DNA, 201 bp, Homo sapiens
gggtggtcagcaggtaatggtggcatggccctgccctatgattgcagagctgctatggacagctcctgagctgctgccggggcctgggcgccctgggcggygcaccctcacaggggacatcttcagcactggcatcatcctgcaggaggtgctgactcgggcccactctactgctcctcgggacttccagtggaaggtagg

SEQ ID NO: 115465 - DNA, 201 bp, Homo sapiens
attggagactccagttagctttatcctcaccccgcaactggagcccaggaagtgcagtggggaatggcacggagggtagagaagggtgaggctgtcactgrgctctctctctggtccaagacctgctggagctcactgggtacattcgagtttcagggccctgtgcagcaggggtcgtgggtctcacgatgccttggtatt

SEQ ID NO: 115466 - DNA, 201 bp, Homo sapiens
aacaggagctgaggaatatcctcaggcccagaacctggcaccgccataagcctactctgcccacgctctcaggatccgaggccaggctcctttcatgaccyttcccaggaccccaggcccgccccatggtgttggttgccgaaatcatcaggagggtggcatctccccctcctctgtgccggccgctggtgacccctgatc

SEQ ID NO: 115467 - DNA, 201 bp, Homo sapiens
cacaggaactcagaaactcaagatggaggagggaaggtgagaattcctcagttttcaggaaactgagatgagagttctgtcttacagaaaaaaaaaaaaargaaaaaaaaaaacccaacagccaacttattaaattggcttccaacatcaaagagtgctcaccaaatcctcgcgggtgatttcagagcaggcaagatcagg

SEQ ID NO: 115468 - DNA, 201 bp, Homo sapiens
ctgtgggtggggggtcactttgcagttcccaaggcactttcatgtgcatgattccatttgacaaccctgggaggtggctaatcgccccccttttagagttmagtgaggctcagagagtggaagggacttctcagaggggaagctgtggacctgggattgggtggacatccctggtccaagctcagtgttctaaaatctctt

SEQ ID NO: 115469 - DNA, 201 bp, Homo sapiens
actcccgagaagcagccatgtgtagcagaatgtgtggtgggccagcgaggatatgttctcacgctggattgtgaaggctgtggtttctaggtggagaccaytggggacgcctacatggtggtgtgggggctgcctcagtgcaatggcagtcagcatgcggccgagatcaataacatggctctggatatccttggctctgtg

SEQ ID NO: 115470 - DNA, 201 bp, Homo sapiens
ggcgtggtggtgcatgcctggaggctgaggcaggagaatcgcttgaacctgggaggcagaggttgtggtgagctgggatcgcgacattaaaaaaaaaaaaagaacagaaaaaaaaaagaaaaaagaaggcagtttatatgctcatttcacagatcgggagactaaggctcagagaggtcattgtcttctccaccatcccat

SEQ ID NO: 115471 - DNA, 201 bp, Homo sapiens
tgtggagacaggatgacatgtggccaggttttcttgaggacagaatcataatgatgatgataatgataagcaggcagtgtcgttcacacctgtggggaacyggcacgccagtgtctgcgtggcaaggctggaggaaagagctgcgctgtcaaggtttcaagatcattggtgggcattgttggcaacagagcagcggcagtt

SEQ ID NO: 115472 - DNA, 201 bp, Homo sapiens
cggtttttctctcatctcagaattgaacaaaggtacaatcgggttttataccaagacattcagttcccagaggcaggcaggagacagtggccttcctctayctcaactgcaagaggctttcctcttactaatccacctcagcacagaccctttacggatgtcgggctgggggacggtcaggtctttctcatcccatgaggc

SEQ ID NO: 115473 - DNA, 201 bp, Homo sapiens
aagggaaggtactatgactggacatgcacgtaagccagatttatgtttctctccacccaaacatctcagtggagtaaagaataacaaggcagcattactgyaaacatgtctcacctcccaccatagggcggtttttctctcatctcagaattgaacaaaggtacaatcgggttttataccaagacattcagttcccagagg

SEQ ID NO: 115474 - DNA, 201 bp, Homo sapiens
ccatggttatgcagagcccctggacacttagcaggatccccaaccctggccagccccagaaggtcagctcagggataggcagggggctgccagtaggtttkggggcctctgtttaaccaggtgcttgtaaggtgcagggagagggagatctccagtcctctggtattggtgaccttgagttgatcgcttctcctctctgaa

SEQ ID NO: 115475 - DNA, 201 bp, Homo sapiens
ctacccaacaactcacccacccaccaaccacccatccacccactgaccaatcgcccaccaacccatccatccacccagccacccacccattcactcatccmtccatccacccacccatctacccaccagcccaccaagtacccactcacccacccattcacccatcatccatccaccctcccacccatcaaccactcaccc

SEQ ID NO: 115476 - DNA, 201 bp, Homo sapiens
actgtgtcaggagtccaggccttgggacacaggaactcagaaactcaagatggaggagggaaggtgagaattcctcagttttcaggaaactgagatgagakttctgtcttacagaaaaaaaaaaaaaagaaaaaaaaaaacccaacagccaacttattaaattggcttccaacatcaaagagtgctcaccaaatcctcgcg

SEQ ID NO: 115477 - DNA, 201 bp, Homo sapiens
atatctccaatatcaccacagtctgaaataaagttcagaaggattaagtgactggaagttaagttaggcatttcccagtgggcatcttgcaactatgtgagtagatttttttttttttttttttgagacagggtctcgctctttcacccaggctggagtgcagtggctgaatctcagctcactacaacctccggctcccgg

SEQ ID NO: 115478 - DNA, 201 bp, Homo sapiens
gcctctcctccccaaggcagcctaaaccttcgggtgtctgtgagcactgtgtcaggagtccaggccttgggacacaggaactcagaaactcaagatggagsagggaaggtgagaattcctcagttttcaggaaactgagatgagagttctgtcttacagaaaaaaaaaaaaaagaaaaaaaaaaacccaacagccaactta

SEQ ID NO: 115479 - DNA, 201 bp, Homo sapiens
ctggacgtgctccacaccctgagcttcaggctccccatctgtatagtgatggggttggccagaatgactcccaggggccctccagctttgaaaacaattcyccctggggtctaaattcctgtgtgttcctgaatccaaaccatccctgagtctcaggcgcatctggaagcgggcagccttccaatcccagccctctctggg

SEQ ID NO: 115480 - DNA, 201 bp, Homo sapiens
gatgtgatggtgattgtagaattggctttgggagatgccactgcctgtccctacttgtgcaactttgggcctaacctttctatgcctcagtttcctgaaaygcaaaacggagccagttactcttacatcccatatcatcatgagagttaaatgagaggactgtggaaacaccacatctgaccctgcgagcctgcaggagtg

SEQ ID NO: 115481 - DNA, 201 bp, Homo sapiens
caaaatgaaagactagctcagattcaagagctgaggaaacaaagtccacctcttgatggaagaagcttcagagtcccattgcaatggggtgaacatagagsgggtggaggatatgggccattttgcatttaatggaccacagtgtttacttgtccattgtccatctatccatccctttacaatcttatcagcaggctcttc

SEQ ID NO: 115482 - DNA, 201 bp, Homo sapiens
atagagaaacaatagtgggcccaggggaccggcgatcagcataccaaggacctgcaccggcaccggtctctgagttccctcagtttttattgattattatsttcattatttcagcaaaaaggaatgtagtaggagggcagggtgataataaggagaaggtcagcaacaaacatgtgagcaatagaatctacgtcataatga

SEQ ID NO: 115483 - DNA, 201 bp, Homo sapiens
agccctgtgcccactgctggctgcagggcccaaggcccagggggaggaggtcatttgccccaggtggcacagctgctttgggcagaagcaaggctaggacraggaagagaagccaggcagacgagggctccaggctcagctggcctcccacttgcaacatatctgttttgtcatctctgaaaggggcattgagaggattca

SEQ ID NO: 115484 - DNA, 201 bp, Homo sapiens
ccagcaggctagtccgggattgtttacatgatgtggcagggttctgagagagaggacagaagtacacaaggctcttgagatctaatctgggatcaggcatwttacaatttctgatgtattctattggtcaaaatgaaagactagctcagattcaagagctgaggaaacaaagtccacctcttgatggaagaagcttcagag

SEQ ID NO: 115485 - DNA, 201 bp, Homo sapiens
cagttctctgctgttacagtgtaatgttgggttgttaatgctcatgattacctcaaaggcagagaaaggtctgtaacctgtgcattctctctcaacattaycattctataaaggcaatggtacagcattcctttcagtgacttttcttcctaccccacctcctcttcctcaaattcctaagctgaagccaggtctagcagg

SEQ ID NO: 115486 - DNA, 201 bp, Homo sapiens
gggtttatattcatttcacattgttctaggagtagtagccaatgcaattagatgagaaaattaattttggaaaggaagaagaaatatacataattccaaawgataaaataattcagtggggtgcctggtgataaaattaatataaaagactttagtttgaaactcagatccaccactgtgtgctccttggcaagttattcc

SEQ ID NO: 115487 - DNA, 201 bp, Homo sapiens
tcacgctggattgtgaaggctgtggtttctaggtggagaccattggggacgcctacatggtggtgtgggggctgcctcagtgcaatggcagtcagcatgcrgccgagatcaataacatggctctggatatccttggctctgtgggtgacttccggaagaggcatgcacccaacgtgcccatttgcatcagggctggcctgc

SEQ ID NO: 115488 - DNA, 201 bp, Homo sapiens
ttcgggaggcagaagttgtggtgagccgagattgcgccattgcactccagcctggataacaagagcgaaactctgcctcgaaaaaaaaaaaaaaaaggcckgggtttatattcatttcacattgttctaggagtagtagccaatgcaattagatgagaaaattaattttggaaaggaagaagaaatatacataattccaaa

SEQ ID NO: 115489 - DNA, 201 bp, Homo sapiens
ggacagacctagcatggaccagatctacagccaggtgagtgctccccagaggagcaggtgctcacaaaaaatggcccattcgttcagctcacttagctcartgcaagccctgtgagttccctgggacctggaaagccatgcagtaaggggcaaccacccagcactgtcacccctgaggtccaccttttaaggagaactttc

SEQ ID NO: 115490 - DNA, 201 bp, Homo sapiens
ctaatagacggagatgatatacgtcattggctcttttaactttccacacaatatttgtggtgatctcatgagggcattagcagagaaaacaatgactcaaraggcaggaaatctgggtcctagccctggctctgcaactggcttgcttagtgtccttgggcaaaatgttcttcctgtaggccttagtttccccattgtaca

SEQ ID NO: 115491 - DNA, 201 bp, Homo sapiens
caaggcctttgctgctgcccggcctgatggagaggcggctgcccaccttgagccagagcaggtaggtgtgctccttgtgcagaccccgaatgccttgagtrggggtccggggcaggggtgcacgcggtcaggtaggcatgctcctcgtgcagaccccgaatgccttgagtgggggtccggggcaggggtgcatgcggtcag

SEQ ID NO: 115492 - DNA, 201 bp, Homo sapiens; identical to SEQ ID NO: 19428

SEQ ID NO: 115493 - DNA, 201 bp, Homo sapiens
ctatcctgcccggggagagactctttcaataacctgtgcggcctggctgtttaatatagttcttggtaaccaaatcaccacctggtggcggcgtaccctasttttcaggaaagcaactactatgttggtgcaaaagtaatagccattttggcgttaaaactaatgaccacgccattctcctgcctcagcctcccgagtaac

SEQ ID NO: 115494 - DNA, 201 bp, Homo sapiens
gggttagaggccctttttggtgctggcacagtcctggtgcttctttcatcacagccttgattgcaggttacacatctctccccaccaggctgggagctgcscaagagcagggaggggctctgatctatctacggcccctcacctccagcacagagcctggcacaagcatcagctcctctctggatgtcattggagactcca

SEQ ID NO: 115495 - DNA, 201 bp, Homo sapiens
gatggatctgggagagccctcagagtcatgagtatacccttcccatgtccctactccttccaccatggttcccctcgcctgcaggataaagtccattggcrctgccaccaccgccccgccactgccatagcctctccaaccgcatctcccaccacttcctgcatggccctccatccacactctgctgtgtgcagtttcaca

SEQ ID NO: 115496 - DNA, 201 bp, Homo sapiens
aatgcttcccccaccccaatatcacttcagaggaagtcatgtccagagagggcaagtattcactccagggcagtcagcactgcagcagacttgaaccagayctgctgatgctcaacacagtttcctctcaaatatcccttcctagcctccaaactgtcaaaaatagaccctcataccttatgtgtctggcccctcccatcc

SEQ ID NO: 115497 - DNA, 201 bp, Homo sapiens
tgggtttcgggaggcagaagttgtggtgagccgagattgcgccattgcactccagcctggataacaagagcgaaactctgcctcgaaaaaaaaaaaaaaarggcctgggtttatattcatttcacattgttctaggagtagtagccaatgcaattagatgagaaaattaattttggaaaggaagaagaaatatacataatt

SEQ ID NO: 115498 - DNA, 201 bp, Homo sapiens
cagccaacttattaaattggcttccaacatcaaagagtgctcaccaaatcctcgcgggtgatttcagagcaggcaagatcaggcacacgtggaattcattyccccaactgaggggagaggggcggggccaagtgggcaggttaagccccaaacaaacttatcctttcctcaaaagaccccttaggagcggggagctggtac

SEQ ID NO: 115499 - DNA, 201 bp, Homo sapiens
aggacctcccgcactatctaagacatggagggggtgggcttgtggcccccacagtacgggtccccagaggctcagcggaagccagggctgcaggccctgargtccatgtgatgaggggtcttcaggctccagcaaggagaccctcagccttcctgagttttctgcaaaaagggagtgcagtgagaacccaggccacatccc

SEQ ID NO: 115500 - DNA, 201 bp, Homo sapiens
gatccccaaccctggccagccccagaaggtcagctcagggataggcagggggctgccagtaggtttgggggcctctgtttaaccaggtgcttgtaaggtgyagggagagggagatctccagtcctctggtattggtgaccttgagttgatcgcttctcctctctgaacaagctgtaggctctttacctgtgaattggggag

SEQ ID NO: 115501 - DNA, 201 bp, Homo sapiens
ttaatctggcacaaagctgactgcacttttcccttgtcagagccaccatccccctgtaatttacatatctattccccacaacaatgcagctccttcaagcsgggattctgtttggtgcatttctgtggccccagactcccagctgaggaccaggtgtgctgaccttcatggatgacttggcatttttgttccattttcagt

SEQ ID NO: 115502 - DNA, 201 bp, Homo sapiens
cctcttgagtctcctatgcaccagccgccttccaccaagtcccctgccccagtctgtcccttcaggcactactgaaaatcccagctcccagccctcacccygcccaccctgtctcagaacccggaacctgcagatccggcagccatttgtcatcctgcgccccttcagctgatggcttttctggacagaaactttagaaag

SEQ ID NO: 115503 - DNA, 201 bp, Homo sapiens
tcgttacagtgccatctgcatacctttgaaaatcagtagtacatgtgtgcatgtggtgtatgactggttccatcagcacacagtcttttgtaagcacataygacttcccagatcccacactcgggggccctcagggtctaacgcctgtaggctgggaacctctgggcagaggagatcgtgcaggctgggtgcaaaccaggc

SEQ ID NO: 115504 - DNA, 201 bp, Homo sapiens
aatctcttggtgtcatccgtggggcatcctcttagagcccagccagatcccaccagagctggatgctcagcctcctcccccagccctcagcactgtccatmaatcatggctatgcctggggtgtggacagcatgcctggcgcagtgaggggagcatgagacctagcctggcctggggcaggggttcccagcatgttcactt

SEQ ID NO: 115505 - DNA, 201 bp, Homo sapiens
taaatcatggctatgcctggggtgtggacagcatgcctggcgcagtgaggggagcatgagacctagcctggcctggggcaggggttcccagcatgttcacwtatgaagactccattttaatgtcaaaaatggttagagcctcttatgctactatttgacttctaatatccactaactgagaacatacccaatgataaaatc

SEQ ID NO: 115506 - DNA, 201 bp, Homo sapiens
ggtcctcaataaatatctgcagggtgatgtgaggagcgtgctaaggggggtcccaggctctctcctgactctaacatctctttaggatcctgtgggtgggrggtcactttgcagttcccaaggcactttcatgtgcatgattccatttgacaaccctgggaggtggctaatcgccccccttttagagttcagtgaggctca

SEQ ID NO: 115507 - DNA, 201 bp, Homo sapiens
gtgagaaaaggaaagtgtgtaggagtccatggtccctaccctggatctgtatattacctgggagtcacagaagccctcaccatggcctcccagccgcccawggtcatgtcctgagtaggggtggaagctggggtagttccccatctcctaggaggccactgtacttgaagccacacctgcagatgaatcagcaacggcatg

SEQ ID NO: 115508 - DNA, 201 bp, Homo sapiens
gggaagaaactgagctgagagaggtagaggggttttcctgaggtcccacagctgaggagcagcagcagctaaactcttgctcttccttgaacagggagacygggtgtggctgaagaagtgtgaagtgggctcagaccctgagctgcgcccaagctgcctcagcctcccgaggaaggcagggctgtagagggcgcagaaggt

SEQ ID NO: 115509 - DNA, 201 bp, Homo sapiens
tcattaagcccctgagatgtgggtgggtgctatcatcctcactttacagatttggaacctgcagctcagagaactgaagtcacccaccccaggtcacagakttggaaagtggtggtgtcaggactggaactggagtccatcagccaaagcccggcccttggctctgcccggcttatagcaaatgtttccgctcaccaggct

SEQ ID NO: 115510 - DNA, 201 bp, Homo sapiens
ctagatgtggattgcacctggtccagccctcgaacggcccctgagggctgctaaggtgccaatttccctgacagatgcgggagctgcggtgtgagaacgtygccacctgcctgggcattttcgtgatctctggggaacctgcttcggaaagaggtcctgcacctagactggaccttcaaggcctccctgctgctggatttg

SEQ ID NO: 115511 - DNA, 201 bp, Homo sapiens
caaaattatttgggcgtggtggtgcatgcctggaggctgaggcaggagaatcgcttgaacctgggaggcagaggttgtggtgagctgggatcgcgacattwaaaaaaaaaaaagaacagaaaaaaaaaagaaaaaagaaggcagtttatatgctcatttcacagatcgggagactaaggctcagagaggtcattgtcttct

SEQ ID NO: 115512 - DNA, 201 bp, Homo sapiens
cctggtgcttctttcatcacagccttgattgcaggttacacatctctccccaccaggctgggagctgcgcaagagcagggaggggctctgatctatctacrgcccctcacctccagcacagagcctggcacaagcatcagctcctctctggatgtcattggagactccagttagctttatcctcaccccgcaactggagcc

SEQ ID NO: 115513 - DNA, 201 bp, Homo sapiens
tgttcacggaggatgggaggatcctgtcccccatgcgcaagtgggtgtcaagcatggagtgtgagaggtagtcacctcctgcctgccactcctccactctrcccatgctgtggggaccttccaaccccaacccttctcctcgttctgatccagggggtctaggggcagcttcagacatggtagggaaggtacggaggaagg

SEQ ID NO: 115514 - DNA, 201 bp, Homo sapiens
aaatcatcaggagggtggcatctccccctcctctgtgccggccgctggtgacccctgatcacgggccgcctgagtgcgttggctgatgaagaagtgctggracgaggctccagaggacagacctagcatggaccagatctacagccaggtgagtgctccccagaggagcaggtgctcacaaaaaatggcccattcgttcag

SEQ ID NO: 115515 - DNA, 201 bp, Homo sapiens
gtccaagctcagtgttctaaaatctcttggtgtcatccgtggggcatcctcttagagcccagccagatcccaccagagctggatgctcagcctcctccccyagccctcagcactgtccataaatcatggctatgcctggggtgtggacagcatgcctggcgcagtgaggggagcatgagacctagcctggcctggggcagg

SEQ ID NO: 115516 - DNA, 201 bp, Homo sapiens
tgttattttctctacctagatgacttgtccctttttcaacacctggtgaatgcctctacatccttcaaagtccacctaaaatgccaccttctcctgaaacmctttcccagtcctcctcggtatggaattagtagctgccatgcctgatcctcacttgacaggagggaccttatctagttccttcctttagtccaatgccca

SEQ ID NO: 115517 - DNA, 201 bp, Homo sapiens
cacctcatctgccccctacacaaccaactgtttggctatgacacactccttacacttctgcaaacccctcatgatgcggcatctttgctcttgttattttytctacctagatgacttgtccctttttcaacacctggtgaatgcctctacatccttcaaagtccacctaaaatgccaccttctcctgaaaccctttcccag

SEQ ID NO: 115518 - DNA, 201 bp, Homo sapiens
tgtgtgccaggagcttcatgcatattgtctcaaccatgcccactctctaaaatgagagttatttgctcactttacagatgaggaactggaggcttggaggrtgaagtgccttgtatgtgtcagcccatctgtctcctgatctgaggtggtgatgcagggctacaaaagcccagaaaaacagcaatggtccctggagggttc

SEQ ID NO: 115519 - DNA, 201 bp, Homo sapiens
agacaaaggtgatctgaaatgtacagatccaatcgttgctaaagtgcttggcactggaggcctggcaaagatggcactgcgggccagagacccacggggcrggttgggactcccgagaagcagccatgtgtagcagaatgtgtggtgggccagcgaggatatgttctcacgctggattgtgaaggctgtggtttctaggtg

SEQ ID NO: 115520 - DNA, 201 bp, Homo sapiens
gcagactttgccaaagcccatcaggacacggcagggacccagagctccgggaagagcttggccaggccctgagtagaacggtgtggggcaggtgcctgcascagcgcggagcctcttgtggataccccttccccctccctgctccacttccttcaaagacttccttgctgagctccctggtggccaacctggtgcttgtta

SEQ ID NO: 115521 - DNA, 201 bp, Homo sapiens
tacatggtggtgtgggggctgcctcagtgcaatggcagtcagcatgcggccgagatcaataacatggctctggatatccttggctctgtgggtgacttccrgaagaggcatgcacccaacgtgcccatttgcatcagggctggcctgcattcaggtatgggctaggggcctccagggtgagggggccacatccatctccca

SEQ ID NO: 115522 - DNA, 201 bp, Homo sapiens
gggcaggtcacttgaggtcaggagttggagaccagcctggccaacacggagaaatcccatctttactaaaaacacaaaaattagccaggtgtgcggcaggygtctgtaatttcagctacttgggaggctgaggcatgagaatcgcttgaacccaggaggcggaggttgcagtgagcggagatcgtgccactgcactgcagc

SEQ ID NO: 115523 - DNA, 201 bp, Homo sapiens
cctcaataaatatctgcagggtgatgtgaggagcgtgctaaggggggtcccaggctctctcctgactctaacatctctttaggatcctgtgggtggggggkcactttgcagttcccaaggcactttcatgtgcatgattccatttgacaaccctgggaggtggctaatcgccccccttttagagttcagtgaggctcagag

SEQ ID NO: 115524 - DNA, 201 bp, Homo sapiens
acaggatgtgtgtgtgcctagcagcccccactccatcacacatccctcctccggctggcttctccacctccctgcacccaccctggcccaagccaccacgyctctcaggtggcccgccgcagggctcctagccagttcccttccatccatctctacccggcagccagaattatcttttaaaaatacaaacatgggccgggc

SEQ ID NO: 115525 - DNA, 201 bp, Homo sapiens
acagcaccacggattgcaaagctccagcaacccttgaaacctggtcctccagcatccccagtcagacagcccaacaccatgccaagctcctggcgtctccrcacctacccctatccattagcaagtctggagcctccagagcctctggggaggcaggtgggagtccttgccccctcccaggcctcaggctcagatcctgca

SEQ ID NO: 115526 - DNA, 201 bp, Homo sapiens
ggggcctccctgtctacccagacactaacgacacccagtacacgtctcgggctcccaccccactgggcaccaggctcccgtagctctggctgctcactcartggttccttctggggcttcacagcaccacggattgcaaagctccagcaacccttgaaacctggtcctccagcatccccagtcagacagcccaacaccatg

SEQ ID NO: 115527 - DNA, 201 bp, Homo sapiens
cagcagcgttcgccctgctgccctccttttcctaaaagctctttcttccctggcctcctcctctggcaccagctcatcctccccttcttggggcctccctstctacccagacactaacgacacccagtacacgtctcgggctcccaccccactgggcaccaggctcccgtagctctggctgctcactcaatggttccttct

SEQ ID NO: 115528 - DNA, 201 bp, Homo sapiens
tgacttcacttcctcacctcccactccctcctcggcccccgcagtctgacttccaccccctcgggccagagggctcttcggaaggtctccggtgacctccrtccatgtcaccagatccgggggcagtttcagttctcaacctgactgctcagcagcgttcgccctgctgccctccttttcctaaaagctctttcttccctg

SEQ ID NO: 115529 - DNA, 201 bp, Homo sapiens
ttgctgccgttcatctgagttcccccttgccacacacatcagggtccagaggggctcccagcaagggggagagggaaagagagtgagtgcgtgggcagaarccagcataggatggcgagcctcccggggtgcagacacacagggacacccttttcacagggacacgccagcctcttagaggcagagccagcttgcactggt

SEQ ID NO: 115530 - DNA, 201 bp, Homo sapiens
gttgctgccgttcatctgagttcccccttgccacacacatcagggtccagaggggctcccagcaagggggagagggaaagagagtgagtgcgtgggcagamaccagcataggatggcgagcctcccggggtgcagacacacagggacacccttttcacagggacacgccagcctcttagaggcagagccagcttgcactgg

SEQ ID NO: 115531 - DNA, 201 bp, Homo sapiens
agccaaagcactgtccagatactgctcagccttgatgaaagctaccaaattgatatcagaggtcagactgagctgaaggtgagagaattttgtggtctttktgggaaaagtctccaaggatccagtttctgtgggaagcaggaaagattcttatctgactgatgtggctgcccaagttggggatgtagctggtcaccttta

SEQ ID NO: 115532 - DNA, 201 bp, Homo sapiens
aagatctcgaacaaattattcacctccctgcattctaatttcctcacacgctgaggcaggagaatcgcttgaagccgggaggcacaggttgcagtgagccragatcgtgccactgcactccagcctgggcaacagagcaagactctgtctcaaaaaaaaaaaaaaaaaaaaaaaagaacctgtttcaaaaaaaagagcagg

SEQ ID NO: 115533 - DNA, 201 bp, Homo sapiens; identical to SEQ ID NO: 19447

SEQ ID NO: 115534 - DNA, 201 bp, Homo sapiens
gatccgacccgcacctccgatcccgagagcttccattttactcgtcctcgaccacacttctcccccgacaactgtcaccctgaccggcgccgcccaccccyaggcccctccgagcgccgggctgccggcagtccccccgggaaccgccctgggagcccgcctcaggcccgtactcacgcccgctttggctgtggtcgccgc

SEQ ID NO: 115535 - DNA, 201 bp, Homo sapiens; identical to SEQ ID NO: 19450

SEQ ID NO: 115536 - DNA, 201 bp, Homo sapiens
tcccggtgaagcccaaaatcaaacaaatctttctccctctgtagcctgcttggcctgggcagtttgcttctagcccttccacctaccagtattcattgtayggagaagctattttacagaggacggctttagtgtctcttgagggatttagttctgtattctcaggggaatccgtagagtactcctttagaattcattcct

SEQ ID NO: 115537 - DNA, 201 bp, Homo sapiens
gaggaatgatgttaattagtgaaatttctaatatatatttttttttctttaggagaagaaacgaatgcatcagatcaacagaatgaaccccagttaggcckgaaagaccagcaggttctagatgtaaagagctatgcacgtcttttttcaaagagcatcgagactttgagagttcatttagcagaaaagggggatggagct

SEQ ID NO: 115538 - DNA, 201 bp, Homo sapiens
tgtttattatactgcaaagatcatgtggaaggctagttattttggtgacctttttttattttgttttgtagccctgactataatgtggaatttttccgacrgtttatactggttatgaatgctttagataacagaggtgaggttattttaatacttttaatttctcagtatttcctctctcccatatcaaatttgtttaca

SEQ ID NO: 115539 - DNA, 201 bp, Homo sapiens
gatttaattttggtagcttaagggaaaaaaattgctatatgtgctaggtaatgtgtgtttaacatgtgttttttttttgttttttttttttttttttttttttgtctcagaggtggagtttctctcttattgcccaggctggagtacaatggtataatctcggctcactgcaacctccgccttctgggttcaaatgattct

SEQ ID NO: 115540 - DNA, 201 bp, Homo sapiens
ccagaaatccttactcaaggctttgtgatattcacactaaattgtattctgattatttgtatgtttggcttattctctaaagattaaggatgctcagttaktattgatggattaagtatattttgatagaaatggctgtgatttttaaatatagccaaatttctgttcttacctggtaccagcaataaatgtgttgaataa

SEQ ID NO: 115541 - DNA, 201 bp, Homo sapiens
tactattatctttattttgttgatttaattttggtagcttaagggaaaaaaattgctatatgtgctaggtaatgtgtgtttaacatgtgttttttttttgktttttttttttttttttttttttgtctcagaggtggagtttctctcttattgcccaggctggagtacaatggtataatctcggctcactgcaacctccgc

SEQ ID NO: 115542 - DNA, 201 bp, Homo sapiens
ggggtttcaccatgttggccaggatggtctcgatctcttgacttcgtgatccacctaccttggtctcccaaagtgctgggattacaggtgtgagccaccaygcctggccagaaatccttactcaaggctttgtgatattcacactaaattgtattctgattatttgtatgtttggcttattctctaaagattaaggatgct

SEQ ID NO: 115543 - DNA, 201 bp, Homo sapiens
atgaagtgtttatattaccttataatgttgagaaactgccatcatggagtaaatttttctcatatcctgacttcatagggtgtgaccgagtgttatgagtktcatcctaagccgacccagagaacctttcctggctgtacaattcgtaacacaccttcagaacctatacattgcatcgtttgggcaaagtacttgttcaag

SEQ ID NO: 115544 - DNA, 201 bp, Homo sapiens
cacacacccaagaccagtactttgcatctttcaatccaatcaagttgacactcagtattaagcatcataatggtttttattttgattatacttaagatgcmgtaaacttcgatatggtcaacagcagtatcttccaaaccagtatccttatttccattccaatctgagcaagacttgaaagccagaaaaatctgaagtgca

SEQ ID NO: 115545 - DNA, 201 bp, Homo sapiens
ggggagttgatagagtattaattcacacgatcacaaggcccaacaataggcccatctgcaagctgaggagcaaggagagccagtctgagtctcaaaactgragaatttggagtctgatgtttgagggcaggaagcatccaacatgggagaaagatgtaggctgggaggctaggccagtctagtcttttcatgtttttctgg

SEQ ID NO: 115546 - DNA, 201 bp, Homo sapiens
tcatttgctattcagatattttttctttcagttcttttaagaagttaaatattgtagttacatttgaagagtcgttttccatgttttgaaactatagaaaraattataatgtacttaacatttgctggttgcgtctaattttttttggcagcttattcatgttagaaattgtgtctttgtttcttttaactgttaaatgtt

SEQ ID NO: 115547 - DNA, 201 bp, Homo sapiens
cttgttttaaggagcaataaatccatgcatctgactattttgagtgaacaggtgcttgttaagtatggaatttaggcatgttagagtttccttgtcaccartatgacttgggtatagtcctttcccctggattttcagtgctggtgcttggtatttttccaaataactgattgtttactgtattctgatttgaatatttac

SEQ ID NO: 115548 - DNA, 201 bp, Homo sapiens
caaatctttctccctctgtagcctgcttggcctgggcagtttgcttctagcccttccacctaccagtattcattgtacggagaagctattttacagaggasggctttagtgtctcttgagggatttagttctgtattctcaggggaatccgtagagtactcctttagaattcattcctcttagcagactcaacactacatt

SEQ ID NO: 115549 - DNA, 201 bp, Homo sapiens
ctgggcaacagagcaagactccatctcaaaaaaaaaaaaaaaaaaattaccatatggatctagaatcatataaaataaaaagtgtgtcttgaccacgtgtytattcaggaatacaagcatggtttaaactagaaaatctgtaaatgtcattcactcattaggaaattaaagataaactatatagttttcatagatacagag

SEQ ID NO: 115550 - DNA, 201 bp, Homo sapiens
cttggaagctgaagcgggtggatcacctgaggtcaggagttcaagaccaacttggccaatatggcgaaatcctgtctctattaaaaatacaaaattagccrgacatggtggtgggcgcctataatcccagctacttgggaggctgaggcaggagaattgcttgaacccgggaggtggaggctgcagtgagccgagatcgct

SEQ ID NO: 115551 - DNA, 201 bp, Homo sapiens
taaaccttttagactaagtcaggttggtttttctctcataacaacctttactttacttttcctatcattttcttttcttttttttttttttttttttttttagagatagggtctcactctgtcgccccaggctggagtggagtgatgcggtcatggcttactgcagcctagaactcctggcctcaagggatcctcctacac

SEQ ID NO: 115552 - DNA, 201 bp, Homo sapiens
agacaaaatgaaggaaaagtgttttcttatccttaaaccctgctgttcatttgaaactgtatagtatatttggttgagttggtcactgagttccgtgatgyttgacctacagaaaaatttgaggattcagaaattggcggggtgtggcggatcacctgaggtcaggagttcgagaccaacctggccaacacggtgaaaccc

SEQ ID NO: 115553 - DNA, 201 bp, Homo sapiens
tgggtcacttgaggccaggagtttgagaacagcctggccaacatggcgaaaccccgtctctactataaatacaaaaattaaccaggcgtggtggtgggcayctgtagtcccagctacttgggagactgagccatgagaatcacttgaacccagtgggtggagattgggccactgcactccagcctgggggacagcatgaga

SEQ ID NO: 115554 - DNA, 201 bp, Homo sapiens
atcttgaaattaatcttgtagtttacttaatttcaggagattataaggatatggctgtattccccagacccacttagttttgctcaaaaaaaaaaaaaaaacacatataagaaaatggctgcgaataatatttagataacatttacaactttgagaaataatttcttggaaagctgctgtttgtctttccagtagtttttc

SEQ ID NO: 115555 - DNA, 201 bp, Homo sapiens
ggcgcgatgtgccctgcctgtgtctgccggaggctgtagtgcgcaggagcggaaaccaggccgcccttcccccacccgcttccggccgcggctcggttctmccgcctccgcctccgccgcggctcgtggttgtcccgccatggcactgtcgcgggggctgccccgggagctggctgaggcggtggccgggggccgggtgct

SEQ ID NO: 115556 - DNA, 201 bp, Homo sapiens
gtgtggtggcatgtgcctgcagtcccagctactcaggaggctgaggcgggagaattgtttgaaccggggagccgagtttgcagtgagccgagattgcgccrttgcactccagcctgggcgacagagggggactccatgtcagaaaaaaaaaaaaaaaatgacaggaaggactgaatgtgagttattagtaagtagtgtatt

SEQ ID NO: 115557 - DNA, 201 bp, Homo sapiens
atcccttgaacccgagaggtggaggttgcagtcagccgggatcgcgccattgcactccaacctgggagacagagtgagactccaacttaaaaaaaaaaaaagaaaaccagaaataaaagaaataagcaaaaaatgttttaagagtaactgtcatcagtggtggcttatcagaaagacctagagtccaggtgtttgaacagt

SEQ ID NO: 115558 - DNA, 201 bp, Homo sapiens
ttaggagctggtaggatttaacagaatattatcacttctctaaatgcatggaacggggagacttatctgagagtcaggttaatgagaactgattccatctrtgaaacccctgccattacagggttggcacagagactgaaatgaaatatgtcaagtgtgtagctcactacctaacctgcagggaaagacaaagtagcaaga

SEQ ID NO: 115559 - DNA, 201 bp, Homo sapiens
gttgagacttcagtgagctatggtcacaccactgcacttcagcctgggcaggtcaaagaacagaggtgctgttctccgatataagtgagctgggaggcagwtgtgtgtagaggggttgggggagggtaggagaaggtgataataatcaattttgaactcatttgagattcttttggaacattagagaagtggttttgtaga

SEQ ID NO: 115560 - DNA, 201 bp, Homo sapiens
ctttggaatatgtttactcttggctctaatgttctcttgagaattttggagacgaacattcagattatggcctgggtcattggttcataacctgttttttyccccctcactgaaattagaaaggtccgtcatcttcctttgaggaagagactatctggtagattttccaaaatcataatttgaaatgtacatttattgatt

SEQ ID NO: 115561 - DNA, 201 bp, Homo sapiens
ctttggaaggctgaggcaggtggatcacctgaggtcagtagttcaagaccaacctggtcaacatggtgaaaccccatctctactaaaaaaaaaaaaaaaaattagccgggcctggtggcaggcacctgtaattccagctactcaggaggctaaggcagcagaattgcttgaacccgggaggcagaggttgcagtgagccaa

SEQ ID NO: 115562 - DNA, 201 bp, Homo sapiens
tggttacttcatgttgtatttttgctgaagcttgccattcatgtagaagtgtgtttggtggtacgtgggtcagggggggctctccggttattttataagtrtaaaagtataattttataagtgtagcttaaccctaatgcaattttctcacatttttggacttctttggtgtttaatataaataaggtactatgtaagtag

SEQ ID NO: 115563 - DNA, 201 bp, Homo sapiens
tatgggcatgagccagtgctcctggcgtgaaattactctcttaacctgactcatcttttttccctagccttaaactactttaatagttccaagttgatatkccacattctgccttcatttctatcatgtattatctgctagttatattagaatagtggtgagtttaggaacaccttgaaacagtgttttgtgtaaggtaca

SEQ ID NO: 115564 - DNA, 201 bp, Homo sapiens
ttgaatttgaagttgttggtgatgccccggaaaaagtggggcccaaacaagctgaagatgctgccaaaagcataaccaatggcagtgatgatggagctcarccctccacctccacaggtgagtatggccccagccagcaggttgttaaatacccacaaagcagaagtaaaaacaaactgattattaggaacattgaccata

SEQ ID NO: 115565 - DNA, 201 bp, Homo sapiens
tgggaggccgaggcgggcagatcgcctgagctcaggagtttgacactaacctgggcaacacagggaaatcccatctgtactaaaaatacaaaaaattagcygggcgtggcagcatgcgtctgtagtcccagctactcgggaggctgaggcaggaggcggaggttgcagtgagctgggatcgcgccactgcactccatccag

SEQ ID NO: 115566 - DNA, 201 bp, Homo sapiens
acttgaacccaggagttcgacactgcagtgagccatgattgcaccactgcactgcagcctgggcaacagcaagaccatgtctcaaaaaaaaaaaaaaaaaagtcatttaaggcctggcatggtggctcacacctgtaaccccaacgctttgggaggccgaggcgggcagatcgcctgagctcaggagtttgacactaacct

SEQ ID NO: 115567 - DNA, 201 bp, Homo sapiens
taagtagaggatgtagaaatctttttttggcattgtagctaaagaaataatgtccaagagttgctttaggccaccaagctttggacccagttttatgcttyagcaataaaagttatttactgttttaaagaaacaaaaaaccaaaaccttgccctgatttgaaagtgcatgtagagtttttgattatcacagaaatttgtt

SEQ ID NO: 115568 - DNA, 201 bp, Homo sapiens
atgccttgtgatgtcctaataaaatgattgatgcagtcaggatatgcaagttttaaaatgttaccatctacactaaatctatcagtataacatctaaatargaggtaaaatgagaggtggcttgtataccttcttggttgtctttccttctctcactttttacagaacttcttcgttttcctgctgcttctcatcttcact

SEQ ID NO: 115569 - DNA, 201 bp, Homo sapiens
aggcacttgctgcccaaagaaggcctagtgggactagtgaagtcatgccatctttctgccagtttgagatctttctcttgtgccctagctggccaaaaagrataggaatttgaaggaaataatttctttaaaatctgcttatgtttggaaagagtcaaaccttactatctatatgacatataatcctgatatcagttttgt

SEQ ID NO: 115570 - DNA, 201 bp, Homo sapiens; identical to SEQ ID NO: 19454

SEQ ID NO: 115571 - DNA, 201 bp, Homo sapiens
aatcagattctgagatactggggattagggtttcaacctttggattttggtgaacgggacacaaatcagcccataacagaggtttagctttttaaaaaatsaacctgactgctctatgaagatgtaactgaagtatctaaattattcacgtttcctagctaataatcacaagaagttgtcagaatttggaattagaaatgg

SEQ ID NO: 115572 - DNA, 201 bp, Homo sapiens
aggcactatcgttaactggagaaattaatgtgttggtcttgtcaggagattgcttgcttgataagaatagcctcagggagggacaccagctgctgatacartgatggcaccacagattaacatgcctgtgcccttactcttgccaaatcaggttgcagaagaacgcggagtcttatataatacaaggagatgtcttttcag

SEQ ID NO: 115573 - DNA, 201 bp, Homo sapiens
gatttcagataggaacagaaatattgtagtaattcagtgttgtttatttttccaggttgccaaggaaagtgtactgcagttttacccgaaagctaatatcgttgcctaccatgacagcatcatgaagtatgctatagtgattacattgcaaagttgtataaagagggttttgtaagccaaatatataagctcaaagtcatt

SEQ ID NO: 115574 - DNA, 201 bp, Homo sapiens
cggctcggttctcccgcctccgcctccgccgcggctcgtggttgtcccgccatggcactgtcgcgggggctgccccgggagctggctgaggcggtggccgrgggccgggtgctggtggtgggggcgggcggcatcggctgcgagctcctcaagaatctcgtgctcaccggtttctcccacatcgacctggtgagggccggg

SEQ ID NO: 115575 - DNA, 201 bp, Homo sapiens
caagagccagccagggagttcctagtcccctgttgagatgaagttggatctgatctgcatcagtggtcagatgtggggatggaactcaggtgaatccccayggctttcctgcttgctctaagggatcttgaagagtgacttcgccggtttccaataaatagaaggggaaagtaagagcctttatagaagtctaggatttct

SEQ ID NO: 115576 - DNA, 201 bp, Homo sapiens
cttgagggatttagttctgtattctcaggggaatccgtagagtactcctttagaattcattcctcttagcagactcaacactacattgtagtcacaagatraaggtttgtgtctcagcttcttgtcttctgacatttgttgtttctgttggatcttgctagtgttttctaaactttagtagaagcaggagcttggagcttt

SEQ ID NO: 115577 - DNA, 201 bp, Homo sapiens
ggcgtgaagccgcctcttatcctcccttcaaaacaaattcccggctgttaggagatgcgggagaggattgagtccctcgcggatgttgtgactttaatttkgaggtccctgtcgtaactccgaagtaacgacgcggggcggaggatggcaatgatagcgaccaacgcgtcccgagcgctggtcacgagcgggtttacacac

SEQ ID NO: 115578 - DNA, 201 bp, Homo sapiens
cttgtgattatctctttaagatttaatctagaaacacatttttaatgtaaaatttttttaatgtttagaaatgaaaagttttttgaggcatagtcttgctrtgttgcccagattagagtgcagtggctgttcacaggctgtcatagcacaaggcatccctggactcctgggctcaagccatcctcctccctcagtctcctg

SEQ ID NO: 115579 - DNA, 201 bp, Homo sapiens
actttgtcctcccaaagtgttgggattacaggtatgagccaccactcccggtgtagagaaatatgttaatatattttcagttagtgtttacctcgacagcrcatatagttttaatgaattcacatatttttatggcatccagggagtttcctgaaatattttccaggatgattaaacaaacaaaatataccattctttcaa

SEQ ID NO: 115580 - DNA, 201 bp, Homo sapiens
tttttttttttttttgagaccgtgtctcgctctgttgccaaggctggagcgcagtggcacgatctcagctcaccgcaacctgggttcaagcgattctcccrcctcagcctcccgagtagctgggataacaggtgtgagccactgcgcctagcctatttatgtacacctttgtacccttgtgattatctctttaagatttaa

SEQ ID NO: 115581 - DNA, 201 bp, Homo sapiens
tgactttaattttgaggtccctgtcgtaactccgaagtaacgacgcggggcggaggatggcaatgatagcgaccaacgcgtcccgagcgctggtcacgagygggtttacacacggaacgcgcaccatcttcataccacccgaggagtgcaaacgctatttccaccctgctttatttttaacagatgaggaaagggagacgc

SEQ ID NO: 115582 - DNA, 201 bp, Homo sapiens
gacctcaggtgatccacctgcctcggcctcccaaagtgctgggattataggtgtgagccgccatgcctggcacatatctcagtttttaaaacctcaacacrgcttcatttgctattcagatattttttctttcagttcttttaagaagttaaatattgtagttacatttgaagagtcgttttccatgttttgaaactatag

SEQ ID NO: 115583 - DNA, 201 bp, Homo sapiens
gctgacttttaaaaaaatgtttgtttgtgattatatgctgtcccttagttgtagccagctctttcaaatgctagcttaaaaatggaaactggtcaggaatytcagtggcttcagcgtgacccttctgtacggaatacatgtggtatggagggtgagacagcacttaccagaatatgtgtggagtcctgtatgacaggcata

SEQ ID NO: 115584 - DNA, 201 bp, Homo sapiens
atacctatgtattcagaccacaaacctgcacgtgccctatgttattgtcatgaattatatgggaagatactcctccccctccactaagcaccaagtttaakatcatttttatggagaaagtatttttctcctctcttttcaggtccttgctttgtgtaagggtctcctgttttaagagttcctaccttagtggtgggtggg

SEQ ID NO: 115585 - DNA, 201 bp, Homo sapiens
tattagaattgtgtctggtaattctttagggacccattgtagatgtatttcttcaaagagcatttgtggttattatatttgggtgcttggggcactgccartacaggaccacttttaaattaggattttcaatacctatgtattcagaccacaaacctgcacgtgccctatgttattgtcatgaattatatgggaagatac

SEQ ID NO: 115586 - DNA, 201 bp, Homo sapiens
ttaaggagcaataaatccatgcatctgactattttgagtgaacaggtgcttgttaagtatggaatttaggcatgttagagtttccttgtcaccagtatgayttgggtatagtcctttcccctggattttcagtgctggtgcttggtatttttccaaataactgattgtttactgtattctgatttgaatatttactcctct

SEQ ID NO: 115587 - DNA, 201 bp, Homo sapiens
gcatatgaagagagtttggcaaaggggagtgaaaaagagtcatccaggtttttctgaagtgttaatgaaacagcttttttttttttttttttttaattgaracagggtctcactctgtcaccaaggctggagtgcagtggcatgatcttggcttactgcagcctctgcgtcccgggttcaagtgatcccgccacctcaggc

SEQ ID NO: 115588 - DNA, 201 bp, Homo sapiens
aatttatttcatatttgatttcttaatggtcggggattgaacttgttaaacagagcacagtagaggaatgatgttaattagtgaaatttctaatatatatwtttttttctttaggagaagaaacgaatgcatcagatcaacagaatgaaccccagttaggcctgaaagaccagcaggttctagatgtaaagagctatgcac

SEQ ID NO: 115589 - DNA, 201 bp, Homo sapiens
agagtactttctaaaataaagctcttcctgcgtgtggtggtggtgcacatctgtgttccagctactcaggaggctgaggcaggaggatggctggagcccakaagttcaaggccagcctgggtaacatagcaagaccctgtctctaaaaaataagtaaataaaataaagcttttaatggcagtgggttttttgttcgttttt

SEQ ID NO: 115590 - DNA, 201 bp, Homo sapiens
tacaggtgagcacaggtaactcccacgcttttacccattttctttttcccttttttctgaaataagctcaagagcaagatgacgttctcatagttgattcrgatgaagaagattcttcaaataatgccgacgtcagtgaagaagagagaagccgcaagaggaaattagatgagaaagagaatctcagtgcaaagaggtcac

SEQ ID NO: 115591 - DNA, 201 bp, Homo sapiens
tttgagttacataatgcttgtcacaattttttgttttgattagaaaataaataggttcttatataaaacatttaaaacagtatggaaatacgtaatgtgtraagtgaaaatgcagccattcttaagtctggtgtgtattagaagagtcagctttcaattatagaaaatacaggtgagcacaggtaactcccacgcttttac

SEQ ID NO: 115592 - DNA, 201 bp, Homo sapiens
ggagtagcactgtcttcctggtcccggacctcagagggctttgcctgttagggtactcttatcactcagagatgggccttgagttttcagagaacagaaasccattaagctgtttcccctattgtattcatgtgccctttgtgtttctggcaataatttattttatatttcaactaaattttaaatttctaattcatgtat

SEQ ID NO: 115593 - DNA, 201 bp, Homo sapiens
ataggaggtgtggggcagggatccccgaagccaggacaagagtctccttcaggatctgctttgggttcaatcgagttgggcgagcaaggccccttgtgtcwatggagtgatgggcggcctcaataattttagcatgggacaatgccaaagtgctcacttaagccatcaaagtgaattttcagtaaagcactcatggatagt

SEQ ID NO: 115594 - DNA, 201 bp, Homo sapiens
ggggtttcaccatgttggccaggctggtgtcgatctcctgacctcgagtgatccgcccgcctcggcctcccaatgtgctgggattacaggcgtgagccacsgcgcctggccatttaattaactctttaatactgtttctcctgtaagatgaactagctgtgagaggtttctgggatattggttcactcagcaaggatgttt

SEQ ID NO: 115595 - DNA, 201 bp, Homo sapiens
tgaggtcctcttttgtcatggaggagctcgactcttcaggcaccagtctcaagagaaggtcactttgtctctttataggaggtgtggggcagggatccccraagccaggacaagagtctccttcaggatctgctttgggttcaatcgagttgggcgagcaaggccccttgtgtctatggagtgatgggcggcctcaataat

SEQ ID NO: 115596 - DNA, 201 bp, Homo sapiens
gaggatcactcttgagcccaggagtttgagaccagcctaggcaacatagtgagacccccatctctacaaacaatttttaaaaaagaaattagctggggtcrtagtggtgtcacctgtagtcccagctacttgggaggctgaggtgggaggattgcttgagcccaggaggtcgaggcttcagtgagccaagactgtaccact

SEQ ID NO: 115597 - DNA, 201 bp, Homo sapiens
gaattgattgatttatacctctaccttgttccagaaatgacttagttgacttatggaaatactacttatgaaaaattactttcaaaaataggcaaatcacytcacatccattaggatggctattataaacaacaacaagcaaacagaaaataacaagtgttggcaaggacagggagaagttggaactcttgtgcattgctg

SEQ ID NO: 115598 - DNA, 201 bp, Homo sapiens
ctgatgttcttaccattgctgtctttcatatgcattcctcatcatccttttcagctcttggcagatactgaagattgattcaaccttcatcctcaccaaarcgtctctaataatataccttctgtcttaaagagatcttaaacataaagatgacattgcattttcccaggtagggtttggtacaggacctaggttctacta

SEQ ID NO: 115599 - DNA, 201 bp, Homo sapiens
cttgtggggtggagaagggctttttctgtgatagaattccctgaccagtggtgtctgtaccaggagtcactcatgtgaaatcttttatactagtgcatcayaaattatgagccaaaaggggctcaagcttgatatatgtgacagtgcttagcattgctcccaattacattaataaatgacatttagcatttggtaaccaca

SEQ ID NO: 115600 - DNA, 201 bp, Homo sapiens
gatacaagtaccttagctcacaaaaatgaactcaaaatggatcacagacctaagtgtaaaagttaaaatttaaaaactaggagaaacacaagagaaaatcktggtgaccttgttgagcaaatatttcttttagacacaaaaacataggccataacagagaaaaagaatacattggactttatgaaaattagaactattgat

SEQ ID NO: 115601 - DNA, 201 bp, Homo sapiens
ataggcaaacattttcaaatttttagttgtttcttctgttggccactgcttgtattagtcaccttttttctagaaacaaaacaacccctacattgcagaartttgcagcctcaaacatttctttcttgctcctcttacttctgacagctacaggtgggctgctgtgaccctgctttagctctgtttccacttctcattcca

SEQ ID NO: 115602 - DNA, 201 bp, Homo sapiens
tacaatgccaggcaggtgacaccctagagctttgcagcctctaagatgtccagtgagcatttcttgtcactgtgtgaaacctacatgtgtgaaacctactrgctactaattattatgccttgaatattcttaaccaagtgggagaatgtttcaacaacagaaagaatactatgttacaattttaggatcaggacataaaat

SEQ ID NO: 115603 - DNA, 201 bp, Homo sapiens
tctaggatgtttgtatagggagaagccttgaacggtagaaatcatgtcccctttgtagcaaaggacaggcttgcttatagcattggaaagtagaggtagtrtttcccctcagagcaaagggcagataggtttactactcactataaaaaaattggggctccgtaagctcagggtttctctcctgagatgaagcccactgtg

SEQ ID NO: 115604 - DNA, 201 bp, Homo sapiens
cgtgccttgtgatgaagaaacagcatcaataagtacatgagaaaataaatctctcagtgcaaattgtgatatatgttatgatgaaagtgaatagaatacasggagagctagagaggtgtgaggtgacttcacagagagaatagtatgtgcaaggtcacttgggtgcaatggagcttggcatgttgagggtgctgagaagct

SEQ ID NO: 115605 - DNA, 201 bp, Homo sapiens
ttagtcaccttttttctagaaacaaaacaacccctacattgcagaagtttgcagcctcaaacatttctttcttgctcctcttacttctgacagctacaggygggctgctgtgaccctgctttagctctgtttccacttctcattccaagtcccagactgaaagagcagcccctatttgggcatgccattcttatgacagag

SEQ ID NO: 115606 - DNA, 201 bp, Homo sapiens
aatagacatagtatctaccctcatggagcgtgccttgtgatgaagaaacagcatcaataagtacatgagaaaataaatctctcagtgcaaattgtgatatrtgttatgatgaaagtgaatagaatacagggagagctagagaggtgtgaggtgacttcacagagagaatagtatgtgcaaggtcacttgggtgcaatggag

SEQ ID NO: 115607 - DNA, 201 bp, Homo sapiens
aagttagggattgtgttcctgaggaagtgacacttacgccatcatctggaggagatgtagaaaataactaggaggatggagaacattccaggtggagggamcagcaggtgctaagggaaaaatggaccatgaagtgttcaaggaactgaataatgctagagtagcggaagcagagagagaagggaagaggtgaaataaggc

SEQ ID NO: 115608 - DNA, 201 bp, Homo sapiens
caaataattcattttgcccttgttataaatgtgacttcaaggataaggcaacatcacatggcacatattctcaacctgagtttcatctcagtgtctctgtmaaggtggacaccacaggtgcctggtgagagcatgttttgaggctagtggaggccttttcctttcctgggacccaggtctgtgaggctcaagcgtctcttc

SEQ ID NO: 115609 - DNA, 201 bp, Homo sapiens
tcttggctcactacaacctccgcctcccgggttcaagcgattgtcccacctcagcctcctgagtagctgggattacaggcttccaccatcacgcctggctratgtttgtattttcagtagagagggggtttcaccatgttggccaggctggtgtcgatctcctgacctcgagtgatccgcccgcctcggcctcccaatgtg

SEQ ID NO: 115610 - DNA, 201 bp, Homo sapiens
agctcacattttggagtcagacagacctggtttcaaattactgctcagccaccagggcaagttacttaacctctctcaatttctcacctatctttattaawgtaaagaatacgtggcctaagatatgtggaaacactcaggagtgtgccaggcgtggattaacaataattgctacctgtgagtgacccgtgtgtgttggta

SEQ ID NO: 115611 - DNA, 201 bp, Homo sapiens
ctagttagtagagtgtaattttgtttctttctttctttttttttttttttttttgtgcaacgtttctttttcccttgagttaaaaatggcctttttgtagytgcaatttcaaaacatgcatagtcttaattcttttcacatattctttcctctaatatatagtggtctctcaaattcccctttcacttagagatctctctg

SEQ ID NO: 115612 - DNA, 201 bp, Homo sapiens
atcccagcactttgggaggccgaggcagggggatcacgtgaggtcaggaattcgagaccagcctggccaacatggtgaaaccccctctctactgaaaatayaaaaattagccgggtgtggtggcgcatgcctgtaatcccagttactcaggaggctgaggcaggaaaatcgcttgaactgaggaggcagaggttgcagtga

SEQ ID NO: 115613 - DNA, 201 bp, Homo sapiens
tcaatatgtgtaggatgacatctggctcttctcctgctgcctgggtggaggagaattggattagaagggggaaccaatatggttgttcccatgagtaagtyaattcatctgtctttgctctgggaaatcttatgtttactcttaggaaaacaggaataaatgtaggtattaaaagcttaagagtcagtttaaaaagtgttt

SEQ ID NO: 115614 - DNA, 201 bp, Homo sapiens
tcttttaatcctcaaaataatccctatgtcataggtgctattagccccattttacaaagagaaaaggagacttacagaagttaacttgattaacttctttstttgttggttttcagattagtaataaggcagaattttgatttttaagtttagaaaaaattttaatgaatgtgaactaaataaggcacaaaatagatggaa

SEQ ID NO: 115615 - DNA, 201 bp, Homo sapiens
ctgcagaactgccacactgttgcttctgcccatattccattggtctaattaagatgtatagctgaaactggagagttccgtgaccccccttgcaggacatrcaacaggggtgtggtgcatctgtttggccactgccacatgtgctcaaaccttttacaagaaggggagcatgcagatgggcaggtgcaggaaccagggcaa

SEQ ID NO: 115616 - DNA, 201 bp, Homo sapiens
acagcctgcccaaagaggagcaacaggaggcttccaggaagggaggtgtcaagaaccagctgctgagacctagtggctgattcctgtgaattgcatggatragccagatgcccttgtggtgctggcaaggaaatcttaagatcttaagaaggagaatgggagttgctgaaataacaaaccgaaacaaagacataaccatgt

SEQ ID NO: 115617 - DNA, 201 bp, Homo sapiens
aacacatttcaatcatgtctgtgctctgtgaaaatataaataataattgtattaataagtaacatatttttgcttcaaatttgggtggggaaacatattgyggaatctcttctttttaaaagtcaacttttattttggatacagagggtccatgtgcagatttgttacgtgagaatagtgcataatgctggagtttgcggt

SEQ ID NO: 115618 - DNA, 201 bp, Homo sapiens
taggataaaaaaaataagggggggtggtggtggtaatgaacatgatcttcatggtgagaacaggggacagtaagatacaaacattttttggcatatgaaartttattactacagtgttttcaccattaatatttatgatcttggtctttccttcttgcctttgtatagggccaaaagagaaacattggctactttgacaac

SEQ ID NO: 115619 - DNA, 201 bp, Homo sapiens
caagggtactttttaatggctaaattccagataattcttaaggacatttcaaaatgattggaataattagttttgatttgagataagcagattaaacaaayaacatgtttgaagggcaaatcaatttccaatgcctttctctgcttttcagtcatccaagcaaaaatttttgcttttatttattttggtccagggagagga

SEQ ID NO: 115620 - DNA, 201 bp, Homo sapiens
gggtttcatcatgttggccaggctggtctcgaactcctgacctcaggtgatctgcccacctcgttctctcaaagtgctgggattacaggcttgagctgccrtgcccgggcacctacaggtttttcttttttttttgctgggttttagagatcttgtggttactgggaacctagagacggaaagaatgaaaacttggcttct

SEQ ID NO: 115621 - DNA, 201 bp, Homo sapiens
tcttttatctgtatttacactagagtaattggtgcaaatttctttctttgtattgtacattttgtgggttttaataaatgtgtaatggcatgtatttatcrttacaggatgtgaattagctctttcatttctaggaagccttttgtaacatagacacaaattcatctcttatgttctttttatttggttaattaggctctc

SEQ ID NO: 115622 - DNA, 201 bp, Homo sapiens
cctaaaatatgcaataaacaaactgttaaatccttaggacatgtatgacaaaactggagatttaaacactaattttatgttaaataattatcagtattttstagatgtaattgtgctgttatttttaaaagttattatcttttagagatatatactgaaatgatataatttttgatattttattcaaactaatatcacacg

SEQ ID NO: 115623 - DNA, 201 bp, Homo sapiens
gagagaaaaggaaggaaatagaggaagaaaaaagaaaagaagaagagagggggttctgggtttgtattgctgtacaaaagaacagaagcaatttttctatkgatttaaaaattgctttttgatctcgttggttctagcaatcattactaattatgaggatagccaaaatgaatgactctgtagccagttcatagatacagc

SEQ ID NO: 115624 - DNA, 201 bp, Homo sapiens
taagcattagatagtatttactatgtgccagattctatttttggcttatatttattaactcattttattctcataaggaattttactgagggacagataamgataattttactgagggatagatatacaaaaactgaggctttggtgagtttaacttccccaagatcacgtatttagtaagtggtagaagtaagattttaa

SEQ ID NO: 115625 - DNA, 201 bp, Homo sapiens
tggggtctgagagttacacaggaacatgtggagcctgtaggccatggtaaagcctttttctactcttctggtgatttaaagccattgtaaagttttgagcwtgggagtaggtagcaaaataagatttatatttttatggggttactctggctgttgagaggagaaaaagacatgaatctgggaggccacttgggaaggtat

SEQ ID NO: 115626 - DNA, 201 bp, Homo sapiens
atagaatttattcattccacatgtgcgaagcaagggcttgctatatgcccaagcactgtgacacattgcatgccacatcaacctaattaaacggaaaagtyggtgctgtgatatgatgggatcctatactaatgctttctttctaaaagtttctaccaaaatacccatagttcttccctctcccccacccccatgccgcct

SEQ ID NO: 115627 - DNA, 201 bp, Homo sapiens
ctggagcagccagtatgagaaacactcagttacatgttcacaggctccctaagactactgccaatgtgcttgggataagcacattcatccctggtggtgtragatgtatacatcctcatcagcattcttattataaacacagctttcagggggacagatgggccttgttgaaacccccttcatgtgaagagatggcagaac

SEQ ID NO: 115628 - DNA, 201 bp, Homo sapiens
caaccttttccaaatatatgtgggcattggcatatatgcatattcttccctttcatccttcccaagcttagagaagtgtcgtgtggatgaaaggcagtttrgggtagggaaggagctcacattttggagtcagacagacctggtttcaaattactgctcagccaccagggcaagttacttaacctctctcaatttctcacc

SEQ ID NO: 115629 - DNA, 201 bp, Homo sapiens
tatttttagtagagatggggtttcactatgttggccaggctggtctcgaactcctgacctcgtgatccacccacctcggcctcccaaagtggtgggattayaggcgtgagccactgcgcctggcctgaatgagatttcttatcctctcattctagctactgcttggtgcagtgattatttcttctcacatctattccaagg

SEQ ID NO: 115630 - DNA, 201 bp, Homo sapiens; identical to SEQ ID NO: 19467

SEQ ID NO: 115631 - DNA, 201 bp, Homo sapiens
cccgtgtgtgttggtactgtggtcgttactttatgtgctttgtcttcagaacttaccataatgctgcaaggtggttttatgaatgaggtgactgaatctcygataatcacataatttttctaaggagtataactggtaaacggtagaggcagaactcaaattctggacagtttggttccaaggattcttttgtgtgtgtgt

SEQ ID NO: 115632 - DNA, 201 bp, Homo sapiens
tctccgataatcacataatttttctaaggagtataactggtaaacggtagaggcagaactcaaattctggacagtttggttccaaggattcttttgtgtgtgtgtgtgtgtgtgtgtgtgtgtgtataaaatgtttataaatattatttatattatgtatgtgtatgtctatacatgtgtgtatgcatgtgtgtatgtata

SEQ ID NO: 115633 - DNA, 201 bp, Homo sapiens
ctccgataatcacataatttttctaaggagtataactggtaaacggtagaggcagaactcaaattctggacagtttggttccaaggattcttttgtgtgtgtgtgtgtgtgtgtgtgtgtgtgtataaaatgtttataaatattatttatattatgtatgtgtatgtctatacatgtgtgtatgcatgtgtgtatgtatac

SEQ ID NO: 115634 - DNA, 201 bp, Homo sapiens
catcagtgcttgcgtcaatatgactatgtatattgttcacagacaagctagttagtagagtgtaattttgtttctttctttcttttttttttttttttttkgtgcaacgtttctttttcccttgagttaaaaatggcctttttgtagctgcaatttcaaaacatgcatagtcttaattcttttcacatattctttcctcta

SEQ ID NO: 115635 - DNA, 201 bp, Homo sapiens
attgtactgttcatagacgatgccttgcgtcagtaaacgtgggaaaagttctttaggagtaatgctgtttttataaccattttcagattcatccttaccarttacaacaagttgtccatccagagttggtttagtttgcgccgagtcgagatcatttccaacaattcaatccaagcagtctttaacccaactggcgtatat

SEQ ID NO: 115636 - DNA, 201 bp, Homo sapiens; identical to SEQ ID NO: 19469

SEQ ID NO: 115637 - DNA, 201 bp, Homo sapiens
ctggaccttacagacgagccatttggtcagaaggtaactgtggaccctgacaactcaaattgcagtgaagaaagtgctaggtaagttgatctctcagtttraggaagcccctagggctattgcgttctgttaactctgcattcaactttttttgtcatttcagaaaaaaaaagtaggctcctttgtataggaccctgacac

SEQ ID NO: 115638 - DNA, 201 bp, Homo sapiens
ggaaaagactcagtattaaaatgttaatgttgggaactgctttcatttggtggggtagatatctaacccttcctaaagagaagaaacaaaattatcaggcttttttttttttcgaacttaaaaccttcacacctatcaacactgccacactccagaaccattacacttctcaaggagacaaatctggaggcatttctgatt

SEQ ID NO: 115639 - DNA, 201 bp, Homo sapiens; identical to SEQ ID NO: 19472

SEQ ID NO: 115640 - DNA, 201 bp, Homo sapiens
atttgatgactgttgtgaacttgagttctctttcttgtgtgtaacccattgtgttgcacactaactggtgagccagaatggaactgctacatcccctggtstcagttatttctactgcactgatggacacctttcccttctttcagcaaagtgcagaggaaagttccacttccagaaaaagaactacagaagacgatatcc

SEQ ID NO: 115641 - DNA, 201 bp, Homo sapiens
ttttagtagagacggtttcaccattttggccaggatagtcttgatctcttgacctcatgatctgcctgcctcatctggggagtacaatcccaaagtgctgrgattataggcgtgagccaccatgcctggcccacttctgaattttaaattgtgcttgtttcctatttgacttattttatagcaaagtaaggtaatgggaga

SEQ ID NO: 115642 - DNA, 201 bp, Homo sapiens
tttctgcattagaatagatgttataaatttttttttctatttagttttaccaacagactgcagtttcttcactaccaaaatgacatcattttccacctctrctcagtgttcaacatctgacagtgcttgcaggatctctcctggacaaatcaatcaggtaaatcattttcggtatttctagttttttggtttttttttttt

SEQ ID NO: 115643 - DNA, 201 bp, Homo sapiens
tctgttctgcccataacagagttccagtctctgaacctttctttgggatgtagcacttctgatcttcagttcttccagttgcatttttctttgggtttgtrtgtacctgtgtgtgtgtgtttgaggatattgctttattagattttaataggcgtgttgcagttaagttcatgtcaggccatttcctaaagcttccccaaa

SEQ ID NO: 115644 - DNA, 201 bp, Homo sapiens
ggaatttatacttgattacagctataagccttttcagaagcatgagggatcttgttatcttcagccagtgtatttactgattgtctttttttttttttttkgagatggagtttcactcttgtaacccaggttggagtgcaatggtgcgatctcagctcactgcaacctccgcctcccaggttcaagtgattctcctgcctc

SEQ ID NO: 115645 - DNA, 201 bp, Homo sapiens; identical to SEQ ID NO: 19476

SEQ ID NO: 115646 - DNA, 201 bp, Homo sapiens
ccagtattttgggaggctgaggtggagggattgcatgaacccaggattttgagaccagcctgggcaacatgatgaaaccctgtctctaaaaaaaaaaaaawaaatacaaaaattgggcgggcatggtggtctgctcgtttagtcccagcagctacatgggaggctgaagtgggaggatcgcttgaacccagaaggtgaagg

SEQ ID NO: 115647 - DNA, 201 bp, Homo sapiens
ctggggaaactttatagtcatcttggtacgtggcgagggtttcatatgttttctgaattatgcctaattttgtagtagactggagggtttatacagatagsctgtttttaacagtagattttggcctttgtgcagaggttttttttccccccaggtttgggattcttctagctttgctcacagtgggttgaggagaggtgt

SEQ ID NO: 115648 - DNA, 201 bp, Homo sapiens
acctatattacttttacgattttaaattaagcacatcgttttggagtataaaatttgacacgtaagacctttttttccccaaacttattaaagtctggaattttttttttttttttttagttttatccttttattgaagcttacaatttcactgaacttttggccccaaatgaaaaaaatgcaaattaaaaaaagtattgg

SEQ ID NO: 115649 - DNA, 201 bp, Homo sapiens
tacttgagctcaagagttcgagaccagcttgggtaacatagcgagacctcgtctctacaaaaaatcagcccagtagaaaattagctgggcatgatggtgcrcaccagtcgtcccagctactcaggaggctgagatggaaggatcacttgagcccaagaggtggagattgcagtgagcggaggttgcagtgaatcaatatca

SEQ ID NO: 115650 - DNA, 201 bp, Homo sapiens
aatcagcccagtagaaaattagctgggcatgatggtgcgcaccagtcgtcccagctactcaggaggctgagatggaaggatcacttgagcccaagaggtgragattgcagtgagcggaggttgcagtgaatcaatatcatgtcactgcactccagcctgggcaacaaagtggtgccctgtctcaaaaaaaagttgggggca

SEQ ID NO: 115651 - DNA, 201 bp, Homo sapiens
ctattatcaggcactatgtactagagcaagtaattctatagtttatacatggtaggagtgtttaaaataccagtaaatgcccatttagaaattcttttagmacaaggtcattgttcagatgcttttagagtcttttttttttcctgtcttctcatagaagacaatgcttttagagtttaaacttgataaacgatgatctgt

SEQ ID NO: 115652 - DNA, 201 bp, Homo sapiens
tgcaggactctcaaccctcttttggaacagtgttgcatcaagcaagggagaatgttcttctagagggacaggaaaagaagagagaggtccacgtacttctstcactctaggaagccaggaaaggtccctggtgcactccactctccacagatgggttgggtcatagcatccgagctgtcatggtgacgacgtccttgaagc

SEQ ID NO: 115653 - DNA, 201 bp, Homo sapiens
tgtgatttgggttgcttgtgttttatttgaaaggacaaatgagagaagtgcttttcatataattttatacctttgcaaatgggttaaacttttcattttgrtcaagaagatgccattgtttaaaatggtagttcttttttttttttttttttgagatggagtctcgctctgtcgcctaggctggagtgcagtggcatgatt

SEQ ID NO: 115654 - DNA, 201 bp, Homo sapiens
gcttccactgctggatgaatttccacagggctgagaagccgtagacatttatgtggcctgattaggtcttgtcaaacatgtttatcatcatgaggcaggtytcatcattgaacaaggaccagttgcagttgaccagagcctgcttcacctccttcatggagataaagccactgtgatcagagtcaccgactggaaccagga

SEQ ID NO: 115655 - DNA, 201 bp, Homo sapiens
tggggttgttaattttttatcttctctctttaacagccctctctatgatatgctaagaaagaatcttgtcactttagccactgctactacaggtatgtcayatcatatttcttcagtctgtatcacagctttgagttcaagggggcaaatgatgggaaaacaaagaagatgaaggtggaaatggaatgctatctttggcat

SEQ ID NO: 115656 - DNA, 201 bp, Homo sapiens
gcagttctcctgcctcagcctcctgagtagctgggactacaggcgcccgccatcatgcctggctaattttttatatttttagtagagacggggtttcaccrtgttagccaggatggtctcgatctcctgacctcgtgatctgcccgccttggcctcctaaagtactgggattacaggcgtgagccactgcacccagcctaa

SEQ ID NO: 115657 - DNA, 201 bp, Homo sapiens
aggcgcccgccatcatgcctggctaattttttatatttttagtagagacggggtttcaccgtgttagccaggatggtctcgatctcctgacctcgtgatcygcccgccttggcctcctaaagtactgggattacaggcgtgagccactgcacccagcctaaaatggtagttctttctaaattgtctctccaaattttccca

SEQ ID NO: 115658 - DNA, 201 bp, Homo sapiens
agcgggcgggaggagcttgagaggtgggtcgggcggcgtggggaaggccgcgccaggcggaagaagggctcggggggaggggaagagttgtgggatgaggrctcgcggaagataaaagtggaggtggggtgacgtgaagtaactttggccaacaggtgacaaacctaaagtcgacgtagttggattgagtttaactggaca

SEQ ID NO: 115659 - DNA, 201 bp, Homo sapiens
gtgttgttttccttggttctttttattggccttgagaaaaactttatttgctgctgcttcttaggaaatgtttatagtaactgggaaaaataagacaatgaaaaaaattaatttatatacaggtgatggtaatgggaatttaaaccataaaattatccttgacacttagaatgtcgctttagatgaagatgctattgtttt

SEQ ID NO: 115660 - DNA, 201 bp, Homo sapiens
aatgggaatttaaaccataaaattatccttgacacttagaatgtcgctttagatgaagatgctattgttttatgaagcaaacggggaaaaatccagatttyaagatcccataaccctgtatgacttaacacttgaaagttgaaattaaatgtaaaaagccatacactcttttccttttgtttgtgagttaggcgaatttgg

SEQ ID NO: 115661 - DNA, 201 bp, Homo sapiens; identical to SEQ ID NO: 19470

SEQ ID NO: 115662 - DNA, 201 bp, Homo sapiens
atctcagctcactgcgacctccacctccttggttcaagtgattcttgtgcctcagcctcctgagtagctgagattacaggtgtgtgccaccacgcctggcttttttttttttttttttgagacggagtctcattcttgttacctgggctgagtgcaatggtgtgatctcagctcaccgcagcctccgcctcccaggttcaa

SEQ ID NO: 115663 - DNA, 201 bp, Homo sapiens
caaaaaaattgctccatctgcattatatgttagtccaacttcgctttgaagaccactgtggtcagaaaatgctgtctctcaaactttttgttgtctccgtytgtccacaaaaatgtttctggaaataatgttttttataattagaattttgaaaatgtttgcttttttcaatagaaccgcattgacagatcagttgtagga

SEQ ID NO: 115664 - DNA, 201 bp, Homo sapiens
gtgaccactgtcccctggagatggaagccgagcagagcgtggcaggcaagtgagggatcccagctgcggaggcagtagcctggccaaagatgcccagggarcagatttgtctgagcagggccagccccaggcagctagaagttaatacccaaggatttatgggtgtgatggaatccaagccactggtcccaggggcaaatc

SEQ ID NO: 115665 - DNA, 201 bp, Homo sapiens
tgttatgaaccttgactctatctattgcataaagggaatttcctgatttttattatttatttatttagagccagggtcttactctgtcacccatgctggartgcagtggtggtatctcagctcactgcaacctccgcttcccaggttcaagtgatcctcccgcctcagccttcctagtagctgggactacaagcgtgcctc

SEQ ID NO: 115666 - DNA, 201 bp, Homo sapiens
gtgatctcagctcaccgcagcctccgcctcccaggttcaagccattctcctgcctcagcctctggagtagctgggattacaggcgcacgccaccacacccrgctaattttgtatttttagtagagatggggtttccccacgttggttaggctggtctccaactcccgacctcaggtgatctgcctaccttggcctcccaaa

SEQ ID NO: 115667 - DNA, 201 bp, Homo sapiens
ctgaactgtcttttgcactgtcttttgatagtttactgaaataagtaggttgagaagaatccattcctttttatctttttctttctttcttttctttttctttttttttttttttaaatgtagagcgtcttgctctgtcactcaggctggaatgcagtggtgcaatcatagttcactgcagcctttacctcctgggcttaa

SEQ ID NO: 115668 - DNA, 201 bp, Homo sapiens
tcttttagcaactcatgagtactaggatggtgcaagaccctttcaaaggatcttagaataagttgagcatccaaaatctgaaaacttgttttttttttttkttttgttttgtttttttttttttgagacagggtcttgctctgtcaccaggctggagtgcagtggcacagtctcagctcactgcaacaacctccacctccc

SEQ ID NO: 115669 - DNA, 201 bp, Homo sapiens
aaaatacaataatgagctgggcgtggtggcgtgtgcctgtaatcccagctactcaggaggctgaggcaggagaatcgcttgaacctgggaagcagaggttrcagtgagccgagattgcgccattgcgcttcagcctgggggacagcgagactgtgtctcaaaataaataaataaataaacaatctatcttccttctctgta

SEQ ID NO: 115670 - DNA, 201 bp, Homo sapiens
tgagaccatcctggccaacacggtgaaatcctgtctctacttaaaaaaaatacaaaaaattagctgggtgtggtggcgggcgcccgtagtcccagctaccygggaggctgaggcaggagaattgcgtgaacccaggaggtggagctagcagtgagccgagattgtgccactgcactccagcctgggcgacagagcgagact

SEQ ID NO: 115671 - DNA, 201 bp, Homo sapiens
caaggtcattgttcagatgcttttagagtcttttttttttcctgtcttctcatagaagacaatgcttttagagtttaaacttgataaacgatgatctgttygtagtgtcattacttgctaatgaagtctaaacaagggaggagatttgagctctgccactaagacagatacttgatttctggttctttctttcttagaaca

SEQ ID NO: 115672 - DNA, 201 bp, Homo sapiens
tgaggcaggagaattgcgtgaacccaggaggtggagctagcagtgagccgagattgtgccactgcactccagcctgggcgacagagcgagactctgtctcaaaaaaaaaacaaaagggaaacttgggtcccatccccaggatatctcattatgtatatgcaaatattccaaatccagaaaaattgtttttgcccttggatg

SEQ ID NO: 115673 - DNA, 201 bp, Homo sapiens; identical to SEQ ID NO: 19477

SEQ ID NO: 115674 - DNA, 201 bp, Homo sapiens
ataaaaataatattgtcattgttttcttaaaaagaagcaaatggaaaacagcttaatttccacacagattagtattaatggaggactattaaagaagactkgatattccactcttaggttaatagggatggatttgtcactagttgacaactcaagtctagacccaaatgtataccttgcttttttgttgctatttcccca

SEQ ID NO: 115675 - DNA, 201 bp, Homo sapiens
ataatatacttaatcacaaagccaagaatgagatataagaagcctggtataagttgagcactctaaatttgaaatgttgagcattctcaatttgaaagatkgtaatgctcttttagcaactcatgagtactaggatggtgcaagaccctttcaaaggatcttagaataagttgagcatccaaaatctgaaaacttgttttt

SEQ ID NO: 115676 - DNA, 201 bp, Homo sapiens
agaatcatgtgtttggtcttgcatttaagctgtctccttaagtgctagagatgggagaagaatgtgagttttaaattgaagcagttgtcttttttgctttyagttaattagcctcatctaaaacaagtaaacattactaatgagatgtttttgccttcacaggtgattgaagtgggaaaaaatgatgacctggaggactct

SEQ ID NO: 115677 - DNA, 201 bp, Homo sapiens
gtgattgaagtgggaaaaaatgatgacctggaggactctaagtccttaagtgatgataccgatgtagaggttacctctgaggtatgaatctttagcaagarctattttgcaccagccccatcttcagatgatgtaatcccagcagttcacttgtgttgaagagtgctgtttacccctcatttctgtctcccttgcctagtt

SEQ ID NO: 115678 - DNA, 201 bp, Homo sapiens
agaaaactaatacaattactatacaacaattcattatacatttatacaattcagtatgttactgtagaacaacgttaaaacattaaaaatgaattaaccarggccaggtgcggtggctcacacctgtcatgccagcactttgggaggctgaggcgggtggatcacgaggtcaagagtttgagaccagcctggccaacatgg

SEQ ID NO: 115679 - DNA, 201 bp, Homo sapiens
aaataacttctgtttctctttcctgatctgtaaaataaggataatagctacataatagggctgttttggtattaaatgggtttatatgtatgcctggtacwtaataggcttgatgagtccttaccatttgtttcaattatctaatgctatggaataaaccaccccaaaacttagtgagttgaaacagtcattttatttatt

SEQ ID NO: 115680 - DNA, 201 bp, Homo sapiens
tcttgtggttttgtggtttgtcatgcagctgttaagtcaggtgcagctgaggctggaacgtgtgtgatgctttgttttgttttctttcttttttttaaggrcacctcgagaccgttgagtaagtgctttgttgtagtcaggtggcaactggggctggaagatgtgtggtgctttggagggtatggctaagagtctgggctc

SEQ ID NO: 115681 - DNA, 201 bp, Homo sapiens
gaggcagaagaatggcatgaaccccggggggtggagcctgcagtgaggggagatctcgccactgcactccagcctgtgcgacagagcgagactccatctcaaaaaaaaaaaaaaaaaaatgaattttgatatgacagtaggaattaatctatgttagtggaacaaaatttcccaaattacatgcaacatccctgctttttt

SEQ ID NO: 115682 - DNA, 201 bp, Homo sapiens
gctccaaatgaagggacgatttgtgcaaaggccctgtttgagaaactaaaagatcagggtggctgaggctcaagatacgactaaacagtgcaagataagastgaaaatgtgctgaggggatagaccacgtgtttatctttacagcaatagcaagctgttgagcagggcctgacactataggatttttttactttttaaaat

SEQ ID NO: 115683 - DNA, 201 bp, Homo sapiens
agtgaaactccatctcaaaaaaaaaaaaaaaagtgtcagacactcttctgagcactgtgagttattttaaacacatgcatttaaataacttatttagcttmtgaagttttttaaaaaacaatttgtattctttaagtggaaaagactcagtattaaaatgttaatgttgggaactgctttcatttggtggggtagatatct

SEQ ID NO: 115684 - DNA, 201 bp, Homo sapiens
gtggtttttaggaaacttgagaagcaactatacacctagaagtaatggctcaactgatttacagacaaatcaggtaaatttcacatttgaagggaagtggytttttttcttttgaaagggtaacattcttggttactcttgaccacacattatattctctaagaattcttatttactcctatggcgttaaataccatctgt

SEQ ID NO: 115685 - DNA, 201 bp, Homo sapiens
ttcatagatgaatgcagaaggttagttctatatggagttcagaaagtgtcaggacaaaaggtttgggtgaccatcagtatttctcatatttctttaataarcatccttgaccattttaagggaaagaatatgtcagaactaatggaatgttttgtagcttcttagagtgtcacctgtagaagggaatttagggaatagatt

SEQ ID NO: 115686 - DNA, 201 bp, Homo sapiens
ccatcttagtcaaataatcacactaattcatggtaaacctacactatggcaagtgctacagaaaagagatacatgaagcagggagtgggtgggatttagartgttagaggtcaagaaaatgttcttttgaggaagtgaaatttcagccaaaagctgaaagatagataattaagtagtcaatcagagagtttgaggttgatt

SEQ ID NO: 115687 - DNA, 201 bp, Homo sapiens; identical to SEQ ID NO: 19473

SEQ ID NO: 115688 - DNA, 201 bp, Homo sapiens
ccaacatgttgtagaggttttcctagaagtcctgttggaatcttaaaacctgtgacttaccttggtaaatccccagtcttgcatctagagagtgctctacytgataaccattggggagataatgatttgactttcagctaaaacagtttactgattaacatcagttggaggttggagcgtgcctgaaactgttactgtttc

SEQ ID NO: 115689 - DNA, 201 bp, Homo sapiens
attctgggtgcaatgagagtgcatgagtaaatttagtcgttttcaaatctcatttgttttagctttcttttttgccaaactttataacatttgctattagygtagaaaagaatgacagagtattctcttcattcttcagcctcttgcccgataaaggagtaagttgtgcaaagaaaaataactccaaagaagcccataagg

SEQ ID NO: 115690 - DNA, 201 bp, Homo sapiens
attaacatcagttggaggttggagcgtgcctgaaactgttactgtttcagccttcacctgagagaagcttggacgattcttactcttaattaaatcagaaytagaaagtagtcagaagatatgcagaacctcagcaagggtatacagcatttgtgtacggtgctccattatatgtgtcatatgtgtcttttacttctgctg

SEQ ID NO: 115691 - DNA, 201 bp, Homo sapiens
atgtgccaccatgcccagctaattttgtatttttagtagagacgaggatctccatgttggtcaggctggtcttgaacttctgatctcaggtgatccgcccrcctcagcctcccacagtgctgggattacaggcgtgagccaccactcccggccatgtttccatcttaatcagacttctgtggctacttgggtgcagaaaac

SEQ ID NO: 115692 - DNA, 201 bp, Homo sapiens
attgggcagtctccagaatcacagcagattcagagagactccagggatgcctcatggtcagaacaaatttatagacaaaaagagggaagtgacgtaaatamataggcagtgaagtacagaaacagctggctggattggttacaggtgggcgtttgccttatttgaacacagtttgaacactcagcagtgtatgagtggttg

SEQ ID NO: 115693 - DNA, 201 bp, Homo sapiens
atgttttgtagcttcttagagtgtcacctgtagaagggaatttagggaatagattctatttacttgagcaactacaagtccttaccttttaaactcttcartactgtttcttaggtgttatacctgatttagtgttaaaagagaaaagtccatgcctgacaccattatatccatccattagtttatccacagtaggtgtca

SEQ ID NO: 115694 - DNA, 201 bp, Homo sapiens
ataactagtttcacttttgaaagtgaaaagtaaatttttaagatactttgtttcattcttcctgtctgcttagataaaaaattgcacgtttaacaatttgsagcttttctactctgaaattatttatttatttatttttaaattgttttagagacaagctcttattctgtcacccaggctggagtgcagtggtgagatcat

SEQ ID NO: 115695 - DNA, 201 bp, Homo sapiens
acactcttctgagcactgtgagttattttaaacacatgcatttaaataacttatttagcttctgaagttttttaaaaaacaatttgtattctttaagtggraaagactcagtattaaaatgttaatgttgggaactgctttcatttggtggggtagatatctaacccttcctaaagagaagaaacaaaattatcaggcttt

SEQ ID NO: 115696 - DNA, 201 bp, Homo sapiens; identical to SEQ ID NO: 19471

SEQ ID NO: 115697 - DNA, 201 bp, Homo sapiens
caggggtgtccaatcttttggcttccctggtccacaatggaagaagaattgtcttggaccacacataaaatacactaacactaacaatagctgatgagctaaaaaaaaaaaaaaaaaaaatcgtggaccgggcgtagtggctcacgcctgtaatcccaacactttgggagatcacctaggtcgggagtttgagaccagcct

SEQ ID NO: 115698 - DNA, 201 bp, Homo sapiens; identical to SEQ ID NO: 19478

SEQ ID NO: 115699 - DNA, 201 bp, Homo sapiens
agaagacttgatattccactcttaggttaatagggatggatttgtcactagttgacaactcaagtctagacccaaatgtataccttgcttttttgttgctrtttccccatgtttcttttagtcttgccacaggtaacacactatgggaaaaaggttggtggaggaaggataagaaggggattttacattttgctgcttgga

SEQ ID NO: 115700 - DNA, 201 bp, Homo sapiens
agggctcggggggaggggaagagttgtgggatgagggctcgcggaagataaaagtggaggtggggtgacgtgaagtaactttggccaacaggtgacaaacytaaagtcgacgtagttggattgagtttaactggacacaacatttgaggactgttgaggcaatttggagaaaggaggtgggagagagggaaccgggtagaa

SEQ ID NO: 115701 - DNA, 201 bp, Homo sapiens
tatacagcatttgtgtacggtgctccattatatgtgtcatatgtgtcttttacttctgctggttgcctttgtgtgaatgctaaatagggaattttctgcaytagaatagatgttataaatttttttttctatttagttttaccaacagactgcagtttcttcactaccaaaatgacatcattttccacctctgctcagtgt

SEQ ID NO: 115702 - DNA, 201 bp, Homo sapiens
agcagttgtcttttttgctttcagttaattagcctcatctaaaacaagtaaacattactaatgagatgtttttgccttcacaggtgattgaagtgggaaamaatgatgacctggaggactctaagtccttaagtgatgataccgatgtagaggttacctctgaggtatgaatctttagcaagaactattttgcaccagccc

SEQ ID NO: 115703 - DNA, 201 bp, Homo sapiens
agttcaggtgattctcatgcctcagcttccttagtagttgggactgcaggctcgtgccatgcccagctagttgttgtatttttagtagagacagggttttrccctgttgcctagtctggcctctgttagaaataaattttcgaagctgcaaatgaatatcactcaaacataaatttaattttctcagcaaggcaattttac

SEQ ID NO: 115704 - DNA, 201 bp, Homo sapiens
tgacaccattatatccatccattagtttatccacagtaggtgtcaagtagatatatgttgaatgaatacatgtccactgaataaaggcaagatgttctttsgcgatgtagtgtgacgacattgagttttgggttcatttgtgttgtttcaacatctctgataaacctctgaatacagaaactcatgtttgttttttttctg

SEQ ID NO: 115705 - DNA, 201 bp, Homo sapiens
taggcaggtctcttgagcccaggggtttgagaacagccagggaaacatggtgaaaccccctctctacaaaaaaatacaaaaattacctggatatggtggcrtgcacctgtagtcccagctactctggaggctgaagtgggaggatcagttgagtctgggaggttgaggctgcagtgacctgtgatcacaccactgcactcc

SEQ ID NO: 115706 - DNA, 201 bp, Homo sapiens
gtatacagcatttgtgtacggtgctccattatatgtgtcatatgtgtcttttacttctgctggttgcctttgtgtgaatgctaaatagggaattttctgcrttagaatagatgttataaatttttttttctatttagttttaccaacagactgcagtttcttcactaccaaaatgacatcattttccacctctgctcagtg

SEQ ID NO: 115707 - DNA, 201 bp, Homo sapiens
atacctattcctatttctcatcttacaaattaagtatcctttgatgttccttaccttgaatgccacttagagtcagaaagataaggcagcaaatcagaatsgcagtttgattcatggtgctgagactggaggttcctctgctgtaggctcagaatatgtctaagcaattgaggaatgtctcagaaaacgtggggctagtgt

SEQ ID NO: 115708 - DNA, 201 bp, Homo sapiens
ttttgacaaatgtatatcatcatgtaacatctactacaatcatgatataaaacatttcatcacccaaaaaatgtgttccctcatgcccatattgtggcatstattaatagtttattctttttcaaagcatgtttattgagatacaattcacatacaataccattcattaaggaagactggataaagaaaatgtggtacata

SEQ ID NO: 115709 - DNA, 201 bp, Homo sapiens
agaagcttgaagaccatagtaagacatttttataaattctgggggcttggccaggcgtggtggcttatgcctgtaatcccagcactttgggaggccgaggmgggaggatcatgaggtcaggagattgagaccatcctggccaacatagtaaaaccccatctttactaaaaatacaaaaattagctgggcgtggtggcacat

SEQ ID NO: 115710 - DNA, 201 bp, Homo sapiens
atgggtagaggccagaaacactgatagacaatgcataggacagccccacacaacaaagaattatatggcccaaaatgttggtagtgctgatgttgagagaccctactataaggcttacaataaataaatagtgcagcctgggaaacatagggagaccaccatttctactaaaataaaaataaattaaaaattagccaggca

SEQ ID NO: 115711 - DNA, 201 bp, Homo sapiens
aggaggctgagacaggagaattgcttgaacccaggaagaggaggttgcagtgagctgagactgcacaactgcactccagcctggtcaacaagagtcccccccccgctccctccccgcagaaaaacagaactaccatatgacccagtaatccctttcttgggtatataccccaaagagttgaaatcaccgcctcataaagat

SEQ ID NO: 115712 - DNA, 201 bp, Homo sapiens
tgtattgtgccctctcctggaaagctatgtgtagctttttaaaaggtgatgtgaaaacagtacacaggagctcatttaatccaataagataaatattattracacttcagagatgagaacatggaacataagaaggctaacaaatttataataggctagagacaaccaggactcaaacttttcaagctttgttcactttgt

SEQ ID NO: 115713 - DNA, 201 bp, Homo sapiens
gttgggactacagtgtattgtgccctctcctggaaagctatgtgtagctttttaaaaggtgatgtgaaaacagtacacaggagctcatttaatccaataarataaatattattgacacttcagagatgagaacatggaacataagaaggctaacaaatttataataggctagagacaaccaggactcaaacttttcaagct

SEQ ID NO: 115714 - DNA, 201 bp, Homo sapiens
tgttgggactacagtgtattgtgccctctcctggaaagctatgtgtagctttttaaaaggtgatgtgaaaacagtacacaggagctcatttaatccaatamgataaatattattgacacttcagagatgagaacatggaacataagaaggctaacaaatttataataggctagagacaaccaggactcaaacttttcaagc

SEQ ID NO: 115715 - DNA, 201 bp, Homo sapiens
tatgcagagtaaggagagggattggttttgtgctgtaaccttttcacttcatctccttgaaccacaaaataagcctaattaggctttagcaggtgctaatrtggatactctctccttctataacactctctccctctttactgctcttcctcccagtgttcctgccttagagtgtcctggaaagcactacccttttctata

SEQ ID NO: 115716 - DNA, 201 bp, Homo sapiens
gaaatagcatcatccaagaactgtgaatgaggactgtgcagcatgccaatactgggaccagccattctgtgtgctcctcaccacactctacaatcgtccartaggccactagattttgttgggactacagtgtattgtgccctctcctggaaagctatgtgtagctttttaaaaggtgatgtgaaaacagtacacaggagc

SEQ ID NO: 115717 - DNA, 201 bp, Homo sapiens
ctctatactctctgacatcacatgaggaagattaccttctttcacagcatcccctcatctggtgagcctgagagatccctattttttatatttgtataatwtggtttttctagcatgaaaatgcactttcctctcctcttttgaatcctttccttcgtttaagtcttgatgtcttcatgaagcctttttcattatatcgtg

SEQ ID NO: 115718 - DNA, 201 bp, Homo sapiens
tgtagacatagaaatagcatcatccaagaactgtgaatgaggactgtgcagcatgccaatactgggaccagccattctgtgtgctcctcaccacactctayaatcgtccagtaggccactagattttgttgggactacagtgtattgtgccctctcctggaaagctatgtgtagctttttaaaaggtgatgtgaaaacagt

SEQ ID NO: 115719 - DNA, 201 bp, Homo sapiens
gcatgaaaatgcactttcctctcctcttttgaatcctttccttcgtttaagtcttgatgtcttcatgaagcctttttcattatatcgtggtatcttcttgwcctttatactttgtagaacttactgtcttttctaactttatccagtagaaatacagtgcaaggcatggacataattttaaatattccaatagccacattt

SEQ ID NO: 115720 - DNA, 201 bp, Homo sapiens
cttttgaatcctttccttcgtttaagtcttgatgtcttcatgaagcctttttcattatatcgtggtatcttcttgacctttatactttgtagaacttactktcttttctaactttatccagtagaaatacagtgcaaggcatggacataattttaaatattccaatagccacatttagaaagtaaaaagaaacagatgaaa

SEQ ID NO: 115721 - DNA, 201 bp, Homo sapiens
ttccttcgtttaagtcttgatgtcttcatgaagcctttttcattatatcgtggtatcttcttgacctttatactttgtagaacttactgtcttttctaacyttatccagtagaaatacagtgcaaggcatggacataattttaaatattccaatagccacatttagaaagtaaaaagaaacagatgaaattaatttaaata

SEQ ID NO: 115722 - DNA, 201 bp, Homo sapiens
acataattttaaatattccaatagccacatttagaaagtaaaaagaaacagatgaaattaatttaaatatattttctttaattaagcatgaaaatatatthtttcaatgtgtaatcaatgtggatataaaaatgttaaatgaaatattttaccttttattactaagtcttcaaattgaactagctacatttcaaatgcttg

SEQ ID NO: 115723 - DNA, 201 bp, Homo sapiens
gctaccatattggacagtgaaggtctagttattcatttggcatgtattatatactgactccatacttattttaaactaaagctgaggttggagaggcagakagataactgtcaaactcctgtaaatttccctagttgttttcttctttctctaagtcattatatctcattgctctttttctttgattaaatgcaaaaaaga

SEQ ID NO: 115724 - DNA, 201 bp, Homo sapiens
atgttgtgccttggcatccagtctctaaaatataaataccttgtatttatcttaccacaaccctaggctcctttgactcacctagttctctttcctcatcwttcatgggccattgcattacagatactttactgtggtagtcttcaaattgggatacatatatatctgggggtacacaaatttcagggagtatgtaggcaa

SEQ ID NO: 115725 - DNA, 201 bp, Homo sapiens
attttattttcccaggttcacccacttaaataagttttgcttttaatttaaagacataggagcatcccaggaaatgatggaatctagtttccataagtaawcaccttttcagcttaaaaaatctgtaatctgtgcttcatctgaaattttattaatgctgctaagttagccaattaatgtagaatttaaaaatgtttccaa

SEQ ID NO: 115726 - DNA, 201 bp, Homo sapiens
taaaacttaactgcataaaattaactataatacatactgtatcattgtaatcatttcatggccacctcctgttgctattgcagtgagttcaaatgtttcgmgtatcctcttaaaacaccatgtgttgctaaacatctctgaggagttcatctccagtaaattgcacatcacagcaaaaagtgatctctcacagttctcctg

SEQ ID NO: 115727 - DNA, 201 bp, Homo sapiens
tttccataagtaaacaccttttcagcttaaaaaatctgtaatctgtgcttcatctgaaattttattaatgctgctaagttagccaattaatgtagaatttwaaaatgtttccaagttaaaagagattaatgtaagctatttaaaaataatttccaactcaccattcaccaggtctctgaataatatattgcctgacaaaag

SEQ ID NO: 115728 - DNA, 201 bp, Homo sapiens
agctcataaaagcagtgtggacccaaagagtgagcagcagcaagatttattgcaaagagtgaaagaacaaagcttccacagtgtggaaggggacctgagcrggttgccactgctggctcgggcagcctgcttttattctcttatctggccccacccacgtcctgctgattggtagagccgagtggtctgttttgacagggc

SEQ ID NO: 115729 - DNA, 201 bp, Homo sapiens
ggagaacagatatatgtcatcaaacagtttgtaacatgatataacctgtagctttaaaactgagttctacctcaagttcacacggtgtctgacagatatcaagcctggctgtgtttttcttgaaatttaaaatattctttggaggctgggcgcggtggctcacgtctgtaatcccagcactttgggaggccgaggcgggca

SEQ ID NO: 115730 - DNA, 201 bp, Homo sapiens
ttggtttgtggcctccttcatccatcttcagtcagaaacagcatgttgatggccaggtgtggtggctcatgcctgtaatctcagcactttgggaggctgakgcaggaggatcacttgagttcaggagtttgagaccagcctgggcaacatagcgagaccctgtctctacaaaaaataaaataaaaaaagtatccaggcatg

SEQ ID NO: 115731 - DNA, 201 bp, Homo sapiens
tctgtagctttcttatccacaattcccctcaccttcaccttaccctcaaataagccctctggatgaggcttgtactcactcatctcctgctgagacaacatttttttttttcttttgagacagagttttgctcttgtcacccaggctggggtgcagtggcgcaatcttggctcactgcaaactctgcctcccatgttcaag

SEQ ID NO: 115732 - DNA, 201 bp, Homo sapiens
gggttgaagagaagattggaagctattctatacaggaagtataagaaaatggagtgaagaaatagagtagatactaaataaaaactgatgtttaatgttthtcaaaactattaaaaatatacataaaactgctttaggttctgagtttgattattttaaataggttttaacttacatgtatgtctagcagtacatttgaaa

SEQ ID NO: 115733 - DNA, 201 bp, Homo sapiens
gtgcagtaggtttatttacaccatcatcaccccaaacacgtaatatgttacaacggcaacgatgttgctaggcagtaggaaattttcagctctattataawtataatcttatgggatctctgtcatacatgtggtctgtcattgatggaaacatcattatgcgttgcacgactgtactaatgcatgtgtgcatctgcctat

SEQ ID NO: 115734 - DNA, 201 bp, Homo sapiens
ctattataattataatcttatgggatctctgtcatacatgtggtctgtcattgatggaaacatcattatgcgttgcacgactgtactaatgcatgtgtgcrtctgcctatccatttctctgtgtgtatacatccaactgcatgtttataactatggcaagtacattgataatatgaaggcttttacaaatctgactggcta

SEQ ID NO: 115735 - DNA, 201 bp, Homo sapiens
tctcatttaggaatgaaaattccagaaccttttccactacctggtaagcaactgataggcatgccagaggggaacatgccagtttggggagtacagtcacyattagatatgcatgggactttctatgcctcataattgtcatctatcaaatgtagccatcagtagtcacatgtacatgacaggaatatttgtaaggactat

SEQ ID NO: 115736 - DNA, 201 bp, Homo sapiens
atacatgtggtctgtcattgatggaaacatcattatgcgttgcacgactgtactaatgcatgtgtgcatctgcctatccatttctctgtgtgtatacatcyaactgcatgtttataactatggcaagtacattgataatatgaaggcttttacaaatctgactggctatttttcttggttttatttatgaaatctgagtgg

SEQ ID NO: 115737 - DNA, 201 bp, Homo sapiens
ttaacagtataagataactgattaatacaaaccaatatttatttctgcctttaggtgtgaaaatccttgaacccacccaaatacctggtaagacagctttytatttactccctgagcccaagaatgagttgagcaggattcccaggcatttaagagaatactgtcatgagactattattcatgaatatttcccttatagct

SEQ ID NO: 115738 - DNA, 201 bp, Homo sapiens
gtaggcaggagaatcatagtgagttatgatcgtgtcattgtaccccaccacagcctgagcgactcagcgagaccctgtctctcaaaaaagaaaaaaaaatrttactgagcctggagagtttgaggaatgagttagacaagaacaaagggacttcatttattgagtaccttttttcgctccgtgcagtgtaccaagcacttt

SEQ ID NO: 115739 - DNA, 201 bp, Homo sapiens
agtttatcctgtggatggactccactgctcctctccactagttcaaatgaaagggaaagagtttctccagcagtgtatgtatggagggaaaaacatttatttttttttatcatcttgcagagattagtgtttaaaaaacaatgcagctatagttagccctctgtatcctctgggattcaaccaactgtggatcgaaaatat

SEQ ID NO: 115740 - DNA, 201 bp, Homo sapiens
ccagttgtatgttggtggttatcttgtttgaaatagaagacacacagagttaaactttaccttgcatgtatatacagaaaatggaaatagaaaaattgctaaaaaaaatgctagagaacttgaacaacagaaaatcattatattggctatatagaaatgtaaaagcatgtgaaatcctacataaaacctagcgtagcagat

SEQ ID NO: 115741 - DNA, 201 bp, Homo sapiens
gccactgctggctcgggcagcctgcttttattctcttatctggccccacccacgtcctgctgattggtagagccgagtggtctgttttgacagggcgtgaytggtgcgtttacaatccctgagctagacacaaaggttctccacatccccaccagattagctagatacagagtgtcgacacagaggttctccggggcccca

SEQ ID NO: 115742 - DNA, 201 bp, Homo sapiens
gggcgtgattggtgcgtttacaatccctgagctagacacaaaggttctccacatccccaccagattagctagatacagagtgtcgacacagaggttctccrgggccccaccagaatagctagatacagagtgtcgattggtgcattcacaaaccctgagctagacacagggtgctgactggtgtatttacaaaccttgagc

SEQ ID NO: 115743 - DNA, 201 bp, Homo sapiens
tagctagatacagagtgtcgattggtgcattcacaaaccctgagctagacacagggtgctgactggtgtatttacaaaccttgagctagatacagagggcygattggtgtatttacaatccctgagctagacataaaggttctccacgtccccaccagactcaggagcccagctggcttcacgcagtggatcccgcaccag

SEQ ID NO: 115744 - DNA, 201 bp, Homo sapiens
aaggttctccacgtccccaccagactcaggagcccagctggcttcacgcagtggatcccgcaccagggctgcaggtggagctgcctgccagtcccggtgcygtgtgcccacactcctcagcccttgggtggttgatgggactgggcaccgtggagcagggggtggcactcgtcagggaggctcgggccacacaggagccca

SEQ ID NO: 115745 - DNA, 201 bp, Homo sapiens
cccagctggcttcacgcagtggatcccgcaccagggctgcaggtggagctgcctgccagtcccggtgccgtgtgcccacactcctcagcccttgggtggtygatgggactgggcaccgtggagcagggggtggcactcgtcagggaggctcgggccacacaggagcccatggagggggtgggaggctcaggcatggcgggc

SEQ ID NO: 115746 - DNA, 201 bp, Homo sapiens
ccagctggcttcacgcagtggatcccgcaccagggctgcaggtggagctgcctgccagtcccggtgccgtgtgcccacactcctcagcccttgggtggttratgggactgggcaccgtggagcagggggtggcactcgtcagggaggctcgggccacacaggagcccatggagggggtgggaggctcaggcatggcgggct

SEQ ID NO: 115747 - DNA, 201 bp, Homo sapiens
atcccatcacatagacattttatcatttcacagcatcactagaagagtgagtatagtacaataagatatttgaagagagagagactacacagtcacttaasttttattacagaatattgttgtaattattctatatattaatgttgatgctcttactgtggctaatttataaatcaaacttttttataggtatatatgtac

SEQ ID NO: 115748 - DNA, 201 bp, Homo sapiens
caagcgccgtgcgcagccctggttcccactggcgcctgtccctccacacctccctgcaagctgagggagctggctccggccttggccagcccagaaagggkctcccacagtgtagcagtgggctgaagggctcctcaggtgccgccaaagtgggagcccaggcagaggaggtgccgagagcaagcgagggctgtgaggact

SEQ ID NO: 115749 - DNA, 201 bp, Homo sapiens
ccggccttggccagcccagaaagggtctcccacagtgtagcagtgggctgaagggctcctcaggtgccgccaaagtgggagcccaggcagaggaggtgccragagcaagcgagggctgtgaggactgccagcacactgtcacctctcaatcccccctctaaacaggacaccccaactgctgttgggaatttggccgatgac

SEQ ID NO: 115750 - DNA, 201 bp, Homo sapiens
ttggggttccatttgtaagaccatctgtagcttgatggcctcgattctagaggaaacaaatttgacaggaaggttaaaaatacagggcccaaaagcgagtwacagcaagatggctgccatgggacctagaaaggggagaagccatgttgcccaactccagagattggtataagaatttgaaaggcgttgtctgatttcaga

SEQ ID NO: 115751 - DNA, 201 bp, Homo sapiens
ttggtataagaatttgaaaggcgttgtctgatttcagaagccttttcctgtaaacgccgggcggcatctcatactatccccgactggttagtgtgaaaacmacattcttcccctaagaaggtgcagagtcctcctttctcagcagtgaggaggtctaggccttggcgtttttggagagtcactgctgccaaagagtctatt

SEQ ID NO: 115752 - DNA, 201 bp, Homo sapiens
cctactcaaatctcatgttcagttgtaatctccaatgttggagatggggcctggaaggaggtgattggatcatgggggctgtttctaattatttagcaccktcccctttgtgctgttatcatgatagagttctcacaacatctggttgtttaaaaatgtgtagcatcttccccctctccctcttcctcttgctctggccat

SEQ ID NO: 115753 - DNA, 201 bp, Homo sapiens
gattgagttctcttgtcatgatgaattgtattttcctgcttctttgctggtagtttttgattgggtgccagatgctgtgaattttaccttgttgtgtgcayggtaattttatatttctaaaaatattcttgagctttgttctggtacatagttaatttactttagaacagtttgattgttttagggcttattcttcagatt

SEQ ID NO: 115754 - DNA, 201 bp, Homo sapiens
gtaaactttgggtattagtaaatacagtacagtactgtaaatgtgttttctcttccttatgattttaatattttttctctattttattgtaaaaatacagtttatttatttatttatttatttgagctggagtcttgctctatcacccaggatggagtgcagtggtgcaatctctgctcactgcaagctctgcctcccagg

SEQ ID NO: 115755 - DNA, 201 bp, Homo sapiens
aaaatgcctttggattaagacatgctctgggtggatccttttgaagatttcctcattaaaaagtttaaaaacataccaaaggtatcagaagagagagaaaraaagttcaaaagcaaggttctgtttctagctgtttttctggctagctttcctgtgaatttttttttcatgtaacttaaatgaatccacatccagaggctg

SEQ ID NO: 115756 - DNA, 201 bp, Homo sapiens
aaaatcctgaattttgttaaaaaaattagaaaatggacttacaataaggtctctccggttgtgccatatatattcctttgatgagaatttcccaataggtwtttaagtagtcatgtatttatatatcattatttgacagagactcggagaacataaaaacaagaaagctaaaagtaatataaagcctgcacttgaaaatta

SEQ ID NO: 115757 - DNA, 201 bp, Homo sapiens
taaactttgggtattagtaaatacagtacagtactgtaaatgtgttttctcttccttatgattttaatattttttctctattttattgtaaaaatacagtttatttatttatttatttatttgagctggagtcttgctctatcacccaggatggagtgcagtggtgcaatctctgctcactgcaagctctgcctcccaggt

SEQ ID NO: 115758 - DNA, 201 bp, Homo sapiens
aaactttgggtattagtaaatacagtacagtactgtaaatgtgttttctcttccttatgattttaatattttttctctattttattgtaaaaatacagtttatttatttatttatttatttgagctggagtcttgctctatcacccaggatggagtgcagtggtgcaatctctgctcactgcaagctctgcctcccaggtt

SEQ ID NO: 115759 - DNA, 201 bp, Homo sapiens
aactttgggtattagtaaatacagtacagtactgtaaatgtgttttctcttccttatgattttaatattttttctctattttattgtaaaaatacagtttatttatttatttatttatttgagctggagtcttgctctatcacccaggatggagtgcagtggtgcaatctctgctcactgcaagctctgcctcccaggttc

SEQ ID NO: 115760 - DNA, 201 bp, Homo sapiens
cagaattatataaaagtaattacaaattaagaatttatttataagttttcatctttttagaaataaaaaggcttaaaaaacaaaatggttgcaaaaatggttaagtagttttgttatatcctaattgcttaggtgtgctctgtaaattccaaataagtaaaataatataaaaatacattttcatatctttatagaacaaaa

SEQ ID NO: 115761 - DNA, 201 bp, Homo sapiens
gaattatataaaagtaattacaaattaagaatttatttataagttttcatctttttagaaataaaaaggcttaaaaaacaaaatggttgcaaaaatggttaagtagttttgttatatcctaattgcttaggtgtgctctgtaaattccaaataagtaaaataatataaaaatacattttcatatctttatagaacaaaaac

SEQ ID NO: 115762 - DNA, 201 bp, Homo sapiens
attatataaaagtaattacaaattaagaatttatttataagttttcatctttttagaaataaaaaggcttaaaaaacaaaatggttgcaaaaatggttaagtagttttgttatatcctaattgcttaggtgtgctctgtaaattccaaataagtaaaataatataaaaatacattttcatatctttatagaacaaaaacaa

SEQ ID NO: 115763 - DNA, 201 bp, Homo sapiens
agattagagcagaagactaaatgtggaacaatttgggataaataaaatctgagggtcctggtgagaaagcaattaagaaagctagagaaggtgtctagagcccatttaatttacatttcattgaataacaggagaatgattatgtgagacttgttaaaacttgcattttgttggtaaagtttatcctctacttccccattg

SEQ ID NO: 115764 - DNA, 201 bp, Homo sapiens
aattatataaaagtaattacaaattaagaatttatttataagttttcatctttttagaaataaaaaggcttaaaaaacaaaatggttgcaaaaatggttaagtagttttgttatatcctaattgcttaggtgtgctctgtaaattccaaataagtaaaataatataaaaatacattttcatatctttatagaacaaaaaca

SEQ ID NO: 115765 - DNA, 201 bp, Homo sapiens
aatcccataactgggtatatacccaaacaagtgtaaatcattctaccataaagacacgtgcacatgtatgtcatcacagccctattcactatagcaaagayatggaaccaacctagatgcccatcaacggtggacttcataaagaaaatgtggtacatatacaccatggaatactaaaaaagaacaaaatcatgtcctttg

SEQ ID NO: 115766 - DNA, 201 bp, Homo sapiens
gtcctcctttctcagcagtgaggaggtctaggccttggcgtttttggagagtcactgctgccaaagagtctatttgggattgtaaagtaagaatagatttygttatttcttgcaaactgtctgagaggcagatatgggttgaagatccacataagtagaatatgccttggctaggaagacagaaatttaccctggctttta

SEQ ID NO: 115767 - DNA, 201 bp, Homo sapiens
atccacataagtagaatatgccttggctaggaagacagaaatttaccctggcttttaaaggaaaagggtacactgttttttctttactacttccatctctytctttctctcttcgacttctttgtctcttcctctctttttaactctctctttgactttctgtgtctgtccctctttctgactccttttctttgtctctgt

SEQ ID NO: 115768 - DNA, 201 bp, Homo sapiens
aatatgccttggctaggaagacagaaatttaccctggcttttaaaggaaaagggtacactgttttttctttactacttccatctctttctttctctcttcracttctttgtctcttcctctctttttaactctctctttgactttctgtgtctgtccctctttctgactccttttctttgtctctgtttctgacaccctct

SEQ ID NO: 115769 - DNA, 201 bp, Homo sapiens
actgttttttctttactacttccatctctttctttctctcttcgacttctttgtctcttcctctctttttaactctctctttgactttctgtgtctgtccytctttctgactccttttctttgtctctgtttctgacaccctctttaacgttctgtctctctgtctcttcctctccctgtctctttctctgactttctctt

SEQ ID NO: 115770 - DNA, 201 bp, Homo sapiens
cttccatctctttctttctctcttcgacttctttgtctcttcctctctttttaactctctctttgactttctgtgtctgtccctctttctgactccttttstttgtctctgtttctgacaccctctttaacgttctgtctctctgtctcttcctctccctgtctctttctctgactttctctttctctctttccttcttgc

SEQ ID NO: 115771 - DNA, 201 bp, Homo sapiens
cccatggacacaaagaaggcaacaatagatactgggacctactcgacagtgggggtagggaggaagatgaagattcaaaaactacctatctggtactatgwtcattacctgggtgatgaaataatctatacaccatacccccacaacacacgatttacccatgtaacaaacctgcatgcgtactccctaaacctaaaataa

SEQ ID NO: 115772 - DNA, 201 bp, Homo sapiens
cactagttctgctaactgggcactggtccctgggggaagaggcttgctttcaagtgtggttacatcactatggcgtaacctgcccttcgtatcccattctycacaaatgaacttccgtcggtatataggttaaggtcaggattagttaaggggacttctaagagatcatctcgggcggcataagtctggactataatttgt

SEQ ID NO: 115773 - DNA, 201 bp, Homo sapiens
tgggcactggtccctgggggaagaggcttgctttcaagtgtggttacatcactatggcgtaacctgcccttcgtatcccattctccacaaatgaacttccrtcggtatataggttaaggtcaggattagttaaggggacttctaagagatcatctcgggcggcataagtctggactataatttgttggcagtcatgctcaa

SEQ ID NO: 115774 - DNA, 201 bp, Homo sapiens
aatcttatgggatctctgtcatacatgtggtctgtcattgatggaaacatcattatgcgttgcacgactgtactaatgcatgtgtgcatctgcctatccayttctctgtgtgtatacatccaactgcatgtttataactatggcaagtacattgataatatgaaggcttttacaaatctgactggctatttttcttggttt

SEQ ID NO: 115775 - DNA, 201 bp, Homo sapiens
taagaggcggttgtctgatagccataaacttcctttggcacctagtatgccatttacatcatgagtagtccagacagtgagatcctttccttgtattattytgatagcctctgacgctaagacggccgctgctgcaactacccttaaacagtgaggccagccttttgctactacatcaatttccttacttaggtatgccac

SEQ ID NO: 115776 - DNA, 201 bp, Homo sapiens
ataaacttcctttggcacctagtatgccatttacatcatgagtagtccagacagtgagatcctttccttgtattattctgatagcctctgacgctaagacrgccgctgctgcaactacccttaaacagtgaggccagccttttgctactacatcaatttccttacttaggtatgccactggttgtgggggttgtcccacga

SEQ ID NO: 115777 - DNA, 201 bp, Homo sapiens
tagtccagacagtgagatcctttccttgtattattctgatagcctctgacgctaagacggccgctgctgcaactacccttaaacagtgaggccagcctttkgctactacatcaatttccttacttaggtatgccactggttgtgggggttgtcccacgagtctaaggactccaagagctatcttggctctctctgtgatgt

SEQ ID NO: 115778 - DNA, 201 bp, Homo sapiens
ttaacagctgatttcttatcagaagccaaggaagcaagagggcagtgaaacaacatgtttaaagtgctgaaagaaaaaaaatctgtcaatgaagaattctrtatctggcaaaactacccttcaagaatgaaaaagaaatgaagacatttttaaatagactgaagctagggggagtttattactagtagacttgctctacac

SEQ ID NO: 115779 - DNA, 201 bp, Homo sapiens
accatttaaaagagtacaattcagtggagttaagtactttcacagtgctgtgaagccatcaccataatttagttccagaacattttcatcacccagaaacyccatactcattaagtagttactcctcattaacacctcccccaaaccccagtcagctaatttgctttttgtttttatggttttgcctactctagatatttc

SEQ ID NO: 115780 - DNA, 201 bp, Homo sapiens
tagcatattttcaaggttcatccatgttgtagcatgtatcagtacttcattcctttttatggccgaataatctattgtgtgtgtataccacattttatccmttcacttgttgatggatatttgggttgtttctgctttctggctgttgtgtataatgctgctatgaacatttgtgtaccagtttttgtttaaagagctgtt

SEQ ID NO: 115781 - DNA, 201 bp, Homo sapiens
ttactataattatgtttaacttattgcagagccagccccattacttttcacaccagtgtttcccaaagtgtgggacactaccatgtacattgataataacrtttagtatcagtgaattattctcttcttaacttcaatccctctgattaattaaatcagggggaatattagtattttttcattgtattttgttttatcatt

SEQ ID NO: 115782 - DNA, 201 bp, Homo sapiens
gggagtcactgaggccagatcttatttgttacccaaaaaggggctaattttctgagatagcaagcggaatgggagggcttctctcgcctgaccctacttcktggtgaaactgttctgccatggtagggtagggccccgcccctctgagcaggctggggccgctgcgcccagctcaggcctgtccagacactagtttcctgg

SEQ ID NO: 115783 - DNA, 201 bp, Homo sapiens
actataattatgtttaacttattgcagagccagccccattacttttcacaccagtgtttcccaaagtgtgggacactaccatgtacattgataataacgtktagtatcagtgaattattctcttcttaacttcaatccctctgattaattaaatcagggggaatattagtattttttcattgtattttgttttatcattac

SEQ ID NO: 115784 - DNA, 201 bp, Homo sapiens
tatgtttaacttattgcagagccagccccattacttttcacaccagtgtttcccaaagtgtgggacactaccatgtacattgataataacgtttagtatcrgtgaattattctcttcttaacttcaatccctctgattaattaaatcagggggaatattagtattttttcattgtattttgttttatcattacattttatt

SEQ ID NO: 115785 - DNA, 201 bp, Homo sapiens
tgctaaagctgtagtaacttctaatctgtgagattaaataaaactttatcatgtcttttaggataaaagtggaagaaaagacatttgaaacattagaaaargaacttataggttgagaaataaaaattactgcataccttgaacaactgtagcacacaatatcacagccaaggctatagccatgcccttcacactcatgtt

SEQ ID NO: 115786 - DNA, 201 bp, Homo sapiens; identical to SEQ ID NO: 19487

SEQ ID NO: 115787 - DNA, 201 bp, Homo sapiens
acctagagcaggatatggaagcaagttttgttttgcgtttacaagttagtatctctgtctctctctctctgtctctctctctttcactctctctctctctcacacacacacacacacacacagagagagagagagagagtttttaagtatcattcacatagaacctgtaactttttttttgaatctgtaactttaacagct

SEQ ID NO: 115788 - DNA, 201 bp, Homo sapiens
cctagagcaggatatggaagcaagttttgttttgcgtttacaagttagtatctctgtctctctctctctgtctctctctctttcactctctctctctctcacacacacacacacacacacagagagagagagagagagtttttaagtatcattcacatagaacctgtaactttttttttgaatctgtaactttaacagctt

SEQ ID NO: 115789 - DNA, 201 bp, Homo sapiens
atcataagttactgattaagttactgatatcataagtacattggtaatatataaccaagcccaaagaacccttatttcatatcagtttgatttattttggcctgtgacaatcaactgttttctctctcatgaaaatctcttttcttgaggcttcttattctccttctcaatctccttcttgaaatcttgtctctctctgca

SEQ ID NO: 115790 - DNA, 201 bp, Homo sapiens
tctgcagtttcaggcactcattgggggtcttggaacatatcccccaaggataaggtgagggggctactgtattttaattaatttccaagtagctggaataktctttccttcttttccattaattcatttaacatatgtaaagaaagactaattttccctcaggaatatgggtaaagtaaaaggaatgtgttcttggagctc

SEQ ID NO: 115791 - DNA, 201 bp, Homo sapiens
gatccagagtagcctgctggcacgaggcttccaaactggtagccaaaagtaaatcatccacatattgaaggaccagagtgcctggacttgagaagtggcctatagatcttgggccagtgcctgaccaaacagatgagggctatccctaaacccttggggcaagaccatctgtgtaagttgggacgtgtggtctgtgggatc

SEQ ID NO: 115792 - DNA, 201 bp, Homo sapiens
atccagagtagcctgctggcacgaggcttccaaactggtagccaaaagtaaatcatccacatattgaaggaccagagtgcctggacttgagaagtggcctatagatcttgggccagtgcctgaccaaacagatgagggctatccctaaacccttggggcaagaccatctgtgtaagttgggacgtgtggtctgtgggatcc

SEQ ID NO: 115793 - DNA, 201 bp, Homo sapiens
gtagcctgctggcacgaggcttccaaactggtagccaaaagtaaatcatccacatattgaaggaccagagtgcctggacttgagaagtggcctatagatcytgggccagtgcctgaccaaacagatgagggctatccctaaacccttggggcaagaccatctgtgtaagttgggacgtgtggtctgtgggatcctcaaaag

SEQ ID NO: 115794 - DNA, 201 bp, Homo sapiens
ccccgagtgattcaggtgactggggagtatattttcttaaggcctctcatagccgctcggggaaggcagaaggattttcttcctttccctgagttatggcrgatatcattgaataattcatgggcttttttctaattctccttagtccttctagaacacaggtcaacagatgtttacgactccagtccccatgatctgagt

SEQ ID NO: 115795 - DNA, 201 bp, Homo sapiens
ggcagatatcattgaataattcatgggcttttttctaattctccttagtccttctagaacacaggtcaacagatgtttacgactccagtccccatgatctragtcaaggtcccagtggggatccatactggggatggcttgctgactggtagggaatttgtccctttcttcagctgtcattctatcatttacttgactaag

SEQ ID NO: 115796 - DNA, 201 bp, Homo sapiens
ctccagtccccatgatctgagtcaaggtcccagtggggatccatactggggatggcttgctgactggtagggaatttgtccctttcttcagctgtcattcyatcatttacttgactaagataccgggtatctccaaactctcgggctgcagctaaagccacattcttttcattaaaggccagggtttgatctaacagtggc

SEQ ID NO: 115797 - DNA, 201 bp, Homo sapiens
gccagggtttgatctaacagtggcatgacatctctccaagcgaggtcaaaggtttgccctagaccctgtaggacatctatgtaggtacatctgtgtacctmtcaggatcatctgaaaacttccccaggtctgccttgatctgttttaaatcagagagggagaaggggacaggtacccgggttgggccaaattcccctcccc

SEQ ID NO: 115798 - DNA, 201 bp, Homo sapiens
ctcatgcctgtaatcccagcgctttgggaggccgaggcgggcagatcacctgaggtcaggagttcgagaccagattggccaacatggtgaaataccatctytactaaaaatacaaaaattagccaggcgtggtgccacgtgcctgtaatcacagctacttaggaggctgagacaggagaattgcttgaacccaggaagagg

SEQ ID NO: 115799 - DNA, 201 bp, Homo sapiens
cttgatctgttttaaatcagagagggagaaggggacaggtacccgggttgggccaaattcccctccccctacagcttgaaggggacataacctatagcccrggggtttttatggtcgtttggagatttctttgcttatttccttctgggcaggggagattagaggaggattatcactaataggaaggggagctatagggag

SEQ ID NO: 115800 - DNA, 201 bp, Homo sapiens
aatgagcacacagtgctgtaatctgtgacaataacaattgtcaaaggggagggatgcagatgtataggagcagagtgtgtttgtttactgttgaaactaargtggtattcaaactaggatgttacaagtttaggatgttaattataatccccaaagtaaccagtaagagaataactaaaaatatacagaaaagaaaagagg

SEQ ID NO: 115801 - DNA, 201 bp, Homo sapiens
tcctcctgtaggatgtaaattgtaagctttgcatagttgtgtattctccctcaatgaaaagaaagcttggacataaggtatttcactccatttcccttccytcttacagaaaagatcaagctgcaggatagtattataatttgtacttccctcaggtggccatttttccccatcagagagagaatattggggccaagccat

SEQ ID NO: 115802 - DNA, 201 bp, Homo sapiens
tttcactccatttcccttccttcttacagaaaagatcaagctgcaggatagtattataatttgtacttccctcaggtggccatttttccccatcagagagmgaatattggggccaagccatagtgtagaaaaaaatgagccatctctttttcagggttagtgggtcaaattggtcccaatggcttaggatgcatttcaagg

SEQ ID NO: 115803 - DNA, 201 bp, Homo sapiens
aggacattagtggcaatttagagaagaagaaagtgggcctttaagagtttatataactcccccaaatcacttaacacatttagttaagaagcggggtcagrggacagcagcaatgaaaaacacaagaattcctttctgagatgaaacgggagtgaaaggcatctcaaaggtctgacaatgtaattcccagacccaagcctc

SEQ ID NO: 115804 - DNA, 201 bp, Homo sapiens
cttactttctgtgtttcttacttccctgttcttactttcagtatgagcagtaaaaggtgtagtcagagaaatgtggctcactcttcagctctgagtgtctrcctctcaccttgtatttgtgcagttggtggctgggtatgtggtggtaactggatgagtgatggagtccagaataattgccatcatttgtttaatgtctcc

SEQ ID NO: 115805 - DNA, 201 bp, Homo sapiens
tgactgcagcctcaacctcccagacccaagtgatccatccacctcagcttcccaagtagctgaggttacaggcatgtgccaccatacccagctaattttcmtattttttatagagatgaattttcgctatgttgcccaagctagtcttgaactcctgggcttaagccattcacctatgttggtctcccaaagtgctcagat

SEQ ID NO: 115806 - DNA, 201 bp, Homo sapiens
ttatgaattacatttaatgaattggttataaaacaaaccaaatgatgcataagaatgtttccctacatattgatgtgctacatgatatttggggaaagaaktgtgtatttgcatgaaaaaatgtttgaggaatgctttacgacacatagatgcttttgacttataagggcttgactccagtaataatgtcaatgtctccac

SEQ ID NO: 115807 - DNA, 201 bp, Homo sapiens
atggtaggcagaataattattccccaaagatttccatgccctaattcctggaatctgtgaatatgttatattacatggcaaaaggaacactggacttatagttatggacctcaaaatacatatatacattgggtggacccactgtaataacatgggcacttaaaagaggaagaggaagacagagcagtcagttagagagat

SEQ ID NO: 115808 - DNA, 201 bp, Homo sapiens
taaattatcgttattgctaagcatttaaaaatgatccaccattttgcagagatttaaacatctcagagcatctcatccttatgtgaaagaaaaataaatctttttttttttttttttttgagacagagtctcgctctgttgcccagactggagtgcagtggtgggatctcggctcacggcaagctccgcctctcgggttca

SEQ ID NO: 115809 - DNA, 201 bp, Homo sapiens
ctcttgattttgttcagggcccagggcttgcttttggagctttctcctgatatctgcggctgattgggtaataaacttacccccgagtgattcaggtgacwggggagtatattttcttaaggcctctcatagccgctcggggaaggcagaaggattttcttcctttccctgagttatggcagatatcattgaataattcat

SEQ ID NO: 115810 - DNA, 201 bp, Homo sapiens
ttgttttttgctgttgctgctggtgctgttgctgctacttcagctttgctgctcttcttggaaggagtagaaatgctgaacatgaaaggaaattgataatyggcatatatagagcattttatacaccagcaatccttttatggcacaggaatttccctctttgagtcatgcacctttcctgcttccaagagtttctgtttt

SEQ ID NO: 115811 - DNA, 201 bp, Homo sapiens
gcaggatagtattataatttgtacttccctcaggtggccatttttccccatcagagagagaatattggggccaagccatagtgtagaaaaaaatgagccayctctttttcagggttagtgggtcaaattggtcccaatggcttaggatgcatttcaagggtgagcctgttgatgcatgagtgtttcccatctgaaaggcaa

SEQ ID NO: 115812 - DNA, 201 bp, Homo sapiens
ttacccatgtgtctcatccttcatagccagcctaagcagagggcaaactgagtgctggcaaagtgggtggtagaccctaacaatcatcatggcattggagraggcagaggctcagaatagcttctgtttggatacattttaggctatgcagtgtttctgaactcgtgcacttgagaggacttttacaaatatggcagattt

SEQ ID NO: 115813 - DNA, 201 bp, Homo sapiens
ccatctctttttcagggttagtgggtcaaattggtcccaatggcttaggatgcatttcaagggtgagcctgttgatgcatgagtgtttcccatctgaaagrcaaaaccacccgtggttttggtttattttgtttctccccctgcccaagaacccacaacggtccctggaccctgctgattggaatagttgcgctcaccgat

SEQ ID NO: 115814 - DNA, 201 bp, Homo sapiens
gaatagttgcgctcaccgatgcagcagcagaaacaacccctgcccaagaacccgcaacagtctctggaccctgctgatcagaatagttgtgctcactgacrcagcagcggaaacactagttttcctcccagaccacatggaggactgaggaaggtcggatttagtggtccttaccaatgcattctcgaaaacctgcaccct

SEQ ID NO: 115815 - DNA, 201 bp, Homo sapiens
gttgaaagtcacaaaaccatagaaaagtctcagtttcctactgtagaattcttgtcatttcagtagtcacagttaaacttgttctaggtttttcagatgcycttttccaggacttcatatgttttgatatttttaaaaattctttctttcaactttctggaataagaaaacaagagttttatttacttgggctgttcttgt

SEQ ID NO: 115816 - DNA, 201 bp, Homo sapiens
tggaggactgaggaaggtcggatttagtggtccttaccaatgcattctcgaaaacctgcacccttgcctgtcttcctagaccacaaggaggaccgaccacraaaaatcggatttagtggcccttactgatgcattctcaaaaacctgttagagtcctaagcattctcctgttagtactgggactttacccctgtcctataa

SEQ ID NO: 115817 - DNA, 201 bp, Homo sapiens
agtggtccttaccaatgcattctcgaaaacctgcacccttgcctgtcttcctagaccacaaggaggaccgaccacgaaaaatcggatttagtggcccttactgatgcattctcaaaaacctgttagagtcctaagcattctcctgttagtactgggactttacccctgtcctataaagatgttatgccccaaaaatgaagt

SEQ ID NO: 115818 - DNA, 201 bp, Homo sapiens
tagaccacaaggaggaccgaccacgaaaaatcggatttagtggcccttactgatgcattctcaaaaacctgttagagtcctaagcattctcctgttagtaytgggactttacccctgtcctataaagatgttatgccccaaaaatgaagtggagggccataccctgagggagggaagggatcttcagggttggaagagtga

SEQ ID NO: 115819 - DNA, 201 bp, Homo sapiens
atcggatttagtggcccttactgatgcattctcaaaaacctgttagagtcctaagcattctcctgttagtactgggactttacccctgtcctataaagatsttatgccccaaaaatgaagtggagggccataccctgagggagggaagggatcttcagggttggaagagtgacacctttttcctcacttatatgaatagga

SEQ ID NO: 115820 - DNA, 201 bp, Homo sapiens
aaaaatgaagtggagggccataccctgagggagggaagggatcttcagggttggaagagtgacacctttttcctcacttatatgaataggaaggatacaayttctgaggctccccatatcctagcttcaggaatagcttttgttaggcctgttagtctcaggagggatcctaaaattccaggtagtccccactatgacggg

SEQ ID NO: 115821 - DNA, 201 bp, Homo sapiens
ctggagtttatactataaatcattcttataggagaaactagaaaagcaccagggacaggtagcaatttttagaagtgggtctaacctcagagaagacaggygagaggaagtttgtctggcaggcattaggacccaggcggcaagggtcaggatagataggatagatgggtgagtctttcttgggcgacatgcttttgagag

SEQ ID NO: 115822 - DNA, 201 bp, Homo sapiens
tagaaaagcaccagggacaggtagcaatttttagaagtgggtctaacctcagagaagacaggcgagaggaagtttgtctggcaggcattaggacccaggcrgcaagggtcaggatagataggatagatgggtgagtctttcttgggcgacatgcttttgagagtgccgctcatggccgcagggtcagccaacatgttgtcg

SEQ ID NO: 115823 - DNA, 201 bp, Homo sapiens
gcattcctcaaaacatttcataaatgttttaaggaatatctgtgaaatatggataattatacctggctaataagactaagaagtaaaggtgacagtgtacrtaaagcatttgcacaatgcatggcacatagtgaacactcaatagtaggtattaatgtacttgggaatctaagttcaatatgtagaaaatactttttgtga

SEQ ID NO: 115824 - DNA, 201 bp, Homo sapiens
tggatttattgagacacaaccccatcataagtcgagaagcatctgtatagcatagtaattcagagcaaatttgaaattagatatttctagcaccaattacmcccgtgattttatgcatggcattcctcaaaacatttcataaatgttttaaggaatatctgtgaaatatggataattatacctggctaataagactaagaa

SEQ ID NO: 115825 - DNA, 201 bp, Homo sapiens
tacattggatttattgagacacaaccccatcataagtcgagaagcatctgtatagcatagtaattcagagcaaatttgaaattagatatttctagcaccarttacacccgtgattttatgcatggcattcctcaaaacatttcataaatgttttaaggaatatctgtgaaatatggataattatacctggctaataagact

SEQ ID NO: 115826 - DNA, 201 bp, Homo sapiens
tgccactgcactccagcctgggcgacaaagcaagactcttgtctcaaaaaaataaaagtgaattcacatccatttgtctttgaattgaaattttatatctsttatagtaactgtatttttatgtttcttaaatataagccaacacaatctttatttttaatgaacatttaaaaatagactgatcctgacattcacatctga

SEQ ID NO: 115827 - DNA, 201 bp, Homo sapiens
ggtctaacctcagagaagacaggcgagaggaagtttgtctggcaggcattaggacccaggcggcaagggtcaggatagataggatagatgggtgagtcttkcttgggcgacatgcttttgagagtgccgctcatggccgcagggtcagccaacatgttgtcgggaccttggagctgcatggctttcctctctgtcgaccct

SEQ ID NO: 115828 - DNA, 201 bp, Homo sapiens
gcggtgagtgttacagctcttaaggcggcgcgtctggagttgttcgttcctcccggtgggcttatggtctcactggctcaggagtgaagctgcagactttygcggtgagtgttacagctcataaaagcagtgtggacccaaagagtgagcagcagcaagatttattgcaaagagtgaaagaacaaagcttccacagtgtgg

SEQ ID NO: 115829 - DNA, 201 bp, Homo sapiens
gtcattggccttccccgaggtatctgatcctgcttggtctttggctgatagaaatttgcactcaccactgtaatgttgtgccttggcatccagtctctaaratataaataccttgtatttatcttaccacaaccctaggctcctttgactcacctagttctctttcctcatcattcatgggccattgcattacagatactt

SEQ ID NO: 115830 - DNA, 201 bp, Homo sapiens
attatggatagaaaaaggaaagtgacgtagagaaaatggaagtgaggtacggaaacagctggattgattacagcttgaagtttgccttatctgagcatagkttgaacagctggctgcccttgattggctgaaacttggtgattggcacaagagtagattacagtctgtttacacatccagttaggttacagttcactgtgt

SEQ ID NO: 115831 - DNA, 201 bp, Homo sapiens
agtaaagtgctaattgctcatgattactatgttatgattaagtacaatatgattaagtagactcaaacttcattcagaatttaaccaaattctgcagtttytctcatgagtactttggttagtatgaatgcctttttcattttactattggaattacattttcttaactcaaaaactgtcagctattgtaacaatgacttt

SEQ ID NO: 115832 - DNA, 201 bp, Homo sapiens
cagcaagatttattgcaaagagtgaaagaacaaagcttccacagtgtggaaggggacctgagcgggttgccactgctggctcgggcagcctgcttttattytcttatctggccccacccacgtcctgctaattggtagagctgagtggtctgttttgacagggcgctgataggtgggtttacaatccctgagctagacaca

SEQ ID NO: 115833 - DNA, 201 bp, Homo sapiens
tcctgtattggattttgagcctgagaaattctttagagaacacattttggggatcatatttatttaggatattcatttctctcctaaactctgattggctrgtatctttagctgagctaactaaattgaccacaaacttgattgtgctgggggaaaccctagtctcagatccaagggaatttctgcatgtttttatttcca

SEQ ID NO: 115834 - DNA, 201 bp, Homo sapiens
gagtaaagtgctaattgctcatgattactatgttatgattaagtacaatatgattaagtagactcaaacttcattcagaatttaaccaaattctgcagttkttctcatgagtactttggttagtatgaatgcctttttcattttactattggaattacattttcttaactcaaaaactgtcagctattgtaacaatgactt

SEQ ID NO: 115835 - DNA, 201 bp, Homo sapiens
ggggacctgagcgggttgccactgctggctcgggcagcctgcttttattctcttatctggccccacccacgtcctgctaattggtagagctgagtggtctrttttgacagggcgctgataggtgggtttacaatccctgagctagacacaaaggttctccacatccccaccagattagctagatacagagtgtcgacacaa

SEQ ID NO: 115836 - DNA, 201 bp, Homo sapiens
cactgctggctcgggcagcctgcttttattctcttatctggccccacccacgtcctgctaattggtagagctgagtggtctgttttgacagggcgctgatwggtgggtttacaatccctgagctagacacaaaggttctccacatccccaccagattagctagatacagagtgtcgacacaaaggttctccagggccccac

SEQ ID NO: 115837 - DNA, 201 bp, Homo sapiens
gtcactggttaggaaatcagaacctactttcctatagatgtcaaatggtaagggtgattgttcagtctgagaggtccctccagggcaaggaaccttgtctratttatcttccatctcatcctgttgccttgcatggagtcaggtcttaaaaaactcatttccgtagttcctggtttataaagtctaattaacatgtaagat

SEQ ID NO: 115838 - DNA, 201 bp, Homo sapiens
cccagctggcttcacgcagtggatcccgcaccagggctgcaggtggagctgcctgccagtcccggtgctgtgtgcccgcactcctcagcccttgggtggtygatgggactgggcgccatggagcagggggtggcacttgtcgcggaggctcgggccacacaggagcccatggagggggtgggaggctcaggcatggcgggc

SEQ ID NO: 115839 - DNA, 201 bp, Homo sapiens
ttaacttttatttttatgtaaacacatattgatgggaaaaaaaattcaaagagcacagatgagaacaaattaaacccttcccctaaccccacacatacccrtaaacctattaccctgcccctcagacccactcacagagataaccaagtttgcttaatttttaatcagatctttcttttctggataaacagatatacaata

SEQ ID NO: 115840 - DNA, 201 bp, Homo sapiens
atgtacatagtgtctcactagtcctcacaataattctgtaagaaggggcactgtaaaaaggacattagtggcaatttagagaagaagaaagtgggcctttwagagtttatataactcccccaaatcacttaacacatttagttaagaagcggggtcaggggacagcagcaatgaaaaacacaagaattcctttctgagatg

SEQ ID NO: 115841 - DNA, 201 bp, Homo sapiens
tggtaatatataaccaagcccaaagaacccttatttcatatcagtttgatttattttggcctgtgacaatcaactgttttctctctcatgaaaatctcttktcttgaggcttcttattctccttctcaatctccttcttgaaatcttgtctctctctgcacctaaatgctagtgttctctagggtattatgctctctatct

SEQ ID NO: 115842 - DNA, 201 bp, Homo sapiens
atattatccagaaagaagatccatagatgagatgcatttgtacccataaaaatcaacatcatgtctaaagtagaccgatgtttacatttatgcaaataaayttgggttgaagagaagattggaagctattctatacaggaagtataagaaaatggagtgaagaaatagagtagatactaaataaaaactgatgtttaatgt

SEQ ID NO: 115843 - DNA, 201 bp, Homo sapiens
ctgtaaaaaggacattagtggcaatttagagaagaagaaagtgggcctttaagagtttatataactcccccaaatcacttaacacatttagttaagaagcrgggtcaggggacagcagcaatgaaaaacacaagaattcctttctgagatgaaacgggagtgaaaggcatctcaaaggtctgacaatgtaattcccagacc

SEQ ID NO: 115844 - DNA, 201 bp, Homo sapiens
atactcttctgtgaagcaatctctgttacaagttttttggcttttcttttaatccttcaaagaataatttactttcgaacattgataggaaagcaactcaytttggtttttatttgtaatattcagagctgtgctatgaccatgttttagtctctcttcagaatcttctgatggcatgctaacaattgtagatggcaactg

SEQ ID NO: 115845 - DNA, 201 bp, Homo sapiens
taccatgtacattgataataacgtttagtatcagtgaattattctcttcttaacttcaatccctctgattaattaaatcagggggaatattagtatttttkcattgtattttgttttatcattacattttatttccatggcatgtattaccgattttacatgtacagtagtgaaagtttacttttcatgtaaatgtacgta

SEQ ID NO: 115846 - DNA, 201 bp, Homo sapiens
ggattggtggggcaggggaagaatctaatagcagatatttgctttgcaaggtccaaagatcaattttgttttcttgctgtcttttcgttattttctcttgttttttttttttcttttttttttcctaagctttatttgcatctccagtccttttctctatccttactttttaattgactataatatggaattgaatttttt

SEQ ID NO: 115847 - DNA, 201 bp, Homo sapiens
taggtgtgagccaccatgcccagctgactatgtgaatttttatttttaaagagacttaaaaaaaaaatcactgtaagtagtcaaagattagattcaagtcttttttttttttttttttttgaggtggagtttcactcttgttgcccaagctggaatgcaatggcatgatctcagctcactgcaacctctgcctcccgggtt

SEQ ID NO: 115848 - DNA, 201 bp, Homo sapiens
aggtgtgagccaccatgcccagctgactatgtgaatttttatttttaaagagacttaaaaaaaaaatcactgtaagtagtcaaagattagattcaagtcttttttttttttttttttttgaggtggagtttcactcttgttgcccaagctggaatgcaatggcatgatctcagctcactgcaacctctgcctcccgggttc

SEQ ID NO: 115849 - DNA, 201 bp, Homo sapiens
ggtgtgagccaccatgcccagctgactatgtgaatttttatttttaaagagacttaaaaaaaaaatcactgtaagtagtcaaagattagattcaagtcttttttttttttttttttttgaggtggagtttcactcttgttgcccaagctggaatgcaatggcatgatctcagctcactgcaacctctgcctcccgggttca

SEQ ID NO: 115850 - DNA, 201 bp, Homo sapiens
attttggttgactagctaaagattggagatttccttattgtaaaacaatgtttctcaacgttttttttcattatggactcagcactgcatgcgtgtgtgcrcgcatgtgcacccacacacacacacacacccccccacatttcaccttgctctgagaaaaaataaaatgaactgaaaactaaatttaatttcttcctgaag

SEQ ID NO: 115851 - DNA, 201 bp, Homo sapiens; identical to SEQ ID NO: 19486

SEQ ID NO: 115852 - DNA, 201 bp, Homo sapiens
aatcttattttacttgaacatttccttgtgtctacgtagtttatatatttgtaaaatgttctcatatttctagcctcttcattctcagttctgtgtatttragttgtttccaataatgtctcagtaatacaacagtgatcttactattttaaaaaagattttactctcttggggtatttcccatctttgaaactgtaggga

SEQ ID NO: 115853 - DNA, 201 bp, Homo sapiens
acagaatatttcacacaggatcatagcagaatctttctgtagttgtccacattattttctttttcaaaagatctgtcttggataaaacagattataacatrggagtaatctggtaacttactttgattataagccttgcttgcttcgatttgggatttaggcatcgttgtcctttattttctttcagggtaatactgttaa

SEQ ID NO: 115854 - DNA, 201 bp, Homo sapiens
tgccactttcactgcttttaccccagggcctatgcaaagacagcgtcctcttttgaacatggggaagcctagaatagatcatagcattagttagtaatgcrtctgattgcaacagatggctgtggtttatagctggtggtgaacgtgagcagaattttcattaagggtaaagatagtaatttgtcaaatagcacttaacac

SEQ ID NO: 115855 - DNA, 201 bp, Homo sapiens
ctgattgcaacagatggctgtggtttatagctggtggtgaacgtgagcagaattttcattaagggtaaagatagtaatttgtcaaatagcacttaacacawctgttactgggaaaagttaagtaagatgttgattattttctcattaaattagtaagcaaatcgctaacaaatgggaagcatgaaggaagtttattggagg

SEQ ID NO: 115856 - DNA, 201 bp, Homo sapiens
aaatggttctttatagtcatatttcctgaaaataattttgctgtagcaatagtaactgccagttcttttgttccattgttaaaactgatgaacttcttttytgtgactcaggtgagaaaaaccagaagcttgaagaccatagtaagacatttttataaattctgggggcttggccaggcgtggtggcttatgcctgtaatc

SEQ ID NO: 115857 - DNA, 201 bp, Homo sapiens
actgcataccttgaacaactgtagcacacaatatcacagccaaggctatagccatgcccttcacactcatgtttgttttttgctgttgctgctggtgctgytgctgctacttcagctttgctgctcttcttggaaggagtagaaatgctgaacatgaaaggaaattgataattggcatatatagagcattttatacaccag

SEQ ID NO: 115858 - DNA, 201 bp, Homo sapiens
ctagaaatccatttaattgtcggactactttgggcagcggaattctgattgtcattcattcaggaagactgtgtttctgtttttggtcctttcacccaccyttcatccttcacatatctatacaaaataatattctgaaaagcttttttttattatctcacttttgcttttcagtccaaactcttataatagataaggcct

SEQ ID NO: 115859 - DNA, 201 bp, Homo sapiens
taaaatgtcttggtaatttattcttctgttctatgaaagtgaccttttcaatcagattatgtttctcctctacttcatggtttcccattgccatttcagtmaagttccaatttctaagcattacacacaaggcgctctttatgatctgattcctctttcctccccaactttttaactctttgtgttccataaaacatatca

SEQ ID NO: 115860 - DNA, 201 bp, Homo sapiens
gattggtggggcaggggaagaatctaatagcagatatttgctttgcaaggtccaaagatcaattttgttttcttgctgtcttttcgttattttctcttgttttttttttttcttttttttttcctaagctttatttgcatctccagtccttttctctatccttactttttaattgactataatatggaattgaatttttta

SEQ ID NO: 115861 - DNA, 201 bp, Homo sapiens
ggtttattatgagaactatacagtttagtcaatataaaatatacagtgccttgtgtgtaattaagtagttaataaaggctagctattagttgttataaatkatcgttattgctaagcatttaaaaatgatccaccattttgcagagatttaaacatctcagagcatctcatccttatgtgaaagaaaaataaatctttttt

SEQ ID NO: 115862 - DNA, 201 bp, Homo sapiens
attggtggggcaggggaagaatctaatagcagatatttgctttgcaaggtccaaagatcaattttgttttcttgctgtcttttcgttattttctcttgttttttttttttcttttttttttcctaagctttatttgcatctccagtccttttctctatccttactttttaattgactataatatggaattgaattttttaa

SEQ ID NO: 115863 - DNA, 201 bp, Homo sapiens
actcggagaacataaaaacaagaaagctaaaagtaatataaagcctgcacttgaaaattagtttaaaacaatgatagtgaaaaatagaataattttggcaytaaacattgaatttatacaaatcttttagagtttcatgtattatacaaagttctgaggaaaaattattttgaacctagaattatatactagccaactgtt

SEQ ID NO: 115864 - DNA, 201 bp, Homo sapiens
atataaaagtaattacaaattaagaatttatttataagttttcatctttttagaaataaaaaggcttaaaaaacaaaatggttgcaaaaatggttaagtarttttgttatatcctaattgcttaggtgtgctctgtaaattccaaataagtaaaataatataaaaatacattttcatatctttatagaacaaaaacaaaac

SEQ ID NO: 115865 - DNA, 201 bp, Homo sapiens
tataatatggaattgaattttttaaaaaatctgttaaatttatttttaaaagtttatttcttggtcttgcatttaaaaggctgtgaattgaacctttcttytctttaactaaaaaaaactgtaattaagtggcttttttcttaaatatgttctcaactaattttcctccttgtaggtagcttaaaggaaaaagaaatgtcc

SEQ ID NO: 115866 - DNA, 201 bp, Homo sapiens
ttatatggaagtcccatctctatatagatatttatatagatttatataacaatttattataaatctatattgtatctataacctatataataatgcaatayagatatatctgattataatcctataataaatatttttatttttcaaatgtatgggtgcctatatagagagtactgctatcagtcaaggcttttggttaca

SEQ ID NO: 115867 - DNA, 201 bp, Homo sapiens
tcaggtcttaaaaaactcatttccgtagttcctggtttataaagtctaattaacatgtaagatacccccaattcaagcctttgtcctattttcttcttaasctactgatgtcagatgtttttctattttggaacataatactgttgtagaatattgtggaatcataagttactgattaagttactgatatcataagtacat

SEQ ID NO: 115868 - DNA, 201 bp, Homo sapiens
tttagtagagatggggtttcattgtgttagccaggatggtcttgatctcctgacctcgtgatccgcccacctcagcctcccaaagtgctgggattacaagygtgagccaccgagcccggccccaagtcacatttcaaatgctcagtagctacatgtggtggctagtggccattgaacaatacacttctagctattctctct

SEQ ID NO: 115869 - DNA, 201 bp, Homo sapiens
gaatgtataatacaacaagtaagaacgtgaaagcactttgtaaactccgatggtaaccagcctttcttaaggtagcttttcctagaaatccatttaattgytggactcctttgggcagtggaattctgattgtcattcattcaggaagactgtatttctgtttttggtcctttcacccacctttcatccttcacataactg

SEQ ID NO: 115870 - DNA, 201 bp, Homo sapiens
agacagagcagtcagttagagagatgcagtggaagaggcaggaggtatttgattatgagagattccacttgctgttattggctttgaagatggagaaagtrgaccacaaaccaaggaatgtgggtggcctctggagtctgtgaatagccctcagctgacagtcaacaaggaaacacaggtctcaatcttaagtcttcaaga

SEQ ID NO: 115871 - DNA, 201 bp, Homo sapiens
agtttccctgtgtttctgtatttatgtccatattgttttgcattttcaacaatttttactttatatattttattttgttttgctttattttatttttaaawttaattttattactttattttatatttattttattctgcaaagctttcattataggcagatggcagggggctcagtccttcttggcagctgctttcctca

SEQ ID NO: 115872 - DNA, 201 bp, Homo sapiens
cagagcatctcatccttatgtgaaagaaaaataaatctttttttttttttttttttgagacagagtctcgctctgttgcccagactggagtgcagtggtgsgatctcggctcacggcaagctccgcctctcgggttcacgccattcttctgcctcagcctcccgagtagctgggactacaggtgcctgccaccatgcctgg

SEQ ID NO: 115873 - DNA, 201 bp, Homo sapiens
acctcaggtgatcctgccgccttggcctcccaaagtgctgggattacaggcgtgagccactgtgcccagcccacattcagttatttatgaacaagttacckcaactttttgaggctattttctcatctatagactggggataataatagtactttttttttttttttgagatggagtctctctgtgccacccaggctggag

SEQ ID NO: 115874 - DNA, 201 bp, Homo sapiens
atctcatccttatgtgaaagaaaaataaatctttttttttttttttttttgagacagagtctcgctctgttgcccagactggagtgcagtggtgggatctyggctcacggcaagctccgcctctcgggttcacgccattcttctgcctcagcctcccgagtagctgggactacaggtgcctgccaccatgcctggctaatt

SEQ ID NO: 115875 - DNA, 201 bp, Homo sapiens
tgagccactgtgcccagcccacattcagttatttatgaacaagttaccgcaactttttgaggctattttctcatctatagactggggataataatagtactttttttttttttttgagatggagtctctctgtgccacccaggctggagtgcagtggcatgatctcggcttactgcaacctccgcctcctgggttcaagcg

SEQ ID NO: 115876 - DNA, 201 bp, Homo sapiens
cactctctcagtgaggcctaccttgaccactctatttaatactatagtgtgccccaactccccacacttcacacttcttcattctttatctctttcactgygtaattactaatttattattttcattgtttattgcctgccttctttttctctactacttcatggacggaagcttcctggaggcagggatttttattttgt

SEQ ID NO: 115877 - DNA, 201 bp, Homo sapiens
ctcccaaagtgctgggattataggtgtgagccactgtgcctggtgatttatctttattccagtatcatatattgatcactatagctatataataaacctcraaaccaggtagtgttcattgtattcttttcttgcaaagttgttttggtgattatatgttctttatgcttccatatgaattttagaatcaccttgtcaatt

SEQ ID NO: 115878 - DNA, 201 bp, Homo sapiens
tccttactgcaaaggtaatatctgatattttaaaaaaacattagagctgggcatggtggctcatgcctgtaatcccagcagtttgggagaccgaggcaggyggatcacttgaggtcaggagttcgagaccagcctggccaacatggtgaaactctgtctctactaaaaatacaaaaatcagctgggtatggtggcgcatgc

SEQ ID NO: 115879 - DNA, 201 bp, Homo sapiens
gtacccagggattcaattgaaagattttctagtctcctagttgttggcctggagagcagtttgtccaggttagaactggtcttcaagaataagaacaaaayggattccaagcaatagaattggaaatagaagcatattaggtacacgatggagacaaatactacttttcccaacaaccaccatgatcaccactaccatcac

SEQ ID NO: 115880 - DNA, 201 bp, Homo sapiens
aagctacagtctttattcaatccaatttagcttagtctgcatctaccatggaactgaacgtagctggagaaaaatacaaccatcttaagtgatttcatttwaaattcaggtagccccttaatgcagcccagcaatcataaggcattcactcttctccttttctagatgactatttcattctttctccaatttcttcaagtc

SEQ ID NO: 115881 - DNA, 201 bp, Homo sapiens
ggatacacacacacacacacacacacacacacacacacacacacacatttcgcctaacaagttctatatcagactatatcaggttctcccccccgcccccyccatgtgtcagggactatatagatacttcagaaggagacagaggagaagacagggagaaaaaaaaattcttccttttcctctgtgaggaagactactgca

SEQ ID NO: 115882 - DNA, 201 bp, Homo sapiens
atactacttttcccaacaaccaccatgatcaccactaccatcaccaccaaaaaaggcactcagaaactaaaggaaaaataaaaaattttagtgatctaaayacaaaagagacaaaagtgaggcatgattttaagggattagtggagtatgggaaaggaatattcatttgatcttgacataaaaatgttttgttttgagtgt

SEQ ID NO: 115883 - DNA, 201 bp, Homo sapiens
gtctttattcaatccaatttagcttagtctgcatctaccatggaactgaacgtagctggagaaaaatacaaccatcttaagtgatttcattttaaattcargtagccccttaatgcagcccagcaatcataaggcattcactcttctccttttctagatgactatttcattctttctccaatttcttcaagtctctgtcac

SEQ ID NO: 115884 - DNA, 201 bp, Homo sapiens
tacacacacacacacacacacacacacacacacacacacacacatttcgcctaacaagttctatatcagactatatcaggttctcccccccgccccctccmtgtgtcagggactatatagatacttcagaaggagacagaggagaagacagggagaaaaaaaaattcttccttttcctctgtgaggaagactactgcataa

SEQ ID NO: 115885 - DNA, 201 bp, Homo sapiens
ctatatagatacttcagaaggagacagaggagaagacagggagaaaaaaaaattcttccttttcctctgtgaggaagactactgcataatcttcctcacgraggctgctgcttgtgtatgaccctagaggagggggctatccctcccccatgtagacacatctttgtctgcttttcctcagagctaaatcacagtttgaaa

SEQ ID NO: 115886 - DNA, 201 bp, Homo sapiens
agtttgaaaactgagggaggtttatttagttcttcacttcttcaggtgatagatccaaaattatgcagagtaaggagagggattggttttgtgctgtaacsttttcacttcatctccttgaaccacaaaataagcctaattaggctttagcaggtgctaatatggatactctctccttctataacactctctccctcttta

SEQ ID NO: 115887 - DNA, 201 bp, Homo sapiens
tatcttttttaggagccaggcctctctagggattctcctattgtaggtaaagaggctcctcctcaggtagctgaacttccagattagattagtgtgttcgycaggtatgaagtagagaccacgaggcatctagacctttgttatgcattctggtaggccttccgtatggctcatactgcacccaatctgtatactgtctca

SEQ ID NO: 115888 - DNA, 201 bp, Homo sapiens
cccgcactcctcagcccttgggtggtcgatgggactgggcgccatggagcagggggtggcacttgtcgcggaggctcgggccacacaggagcccatggagkgggtgggaggctcaggcatggcgggctgcaggtcctgagccctgccccgcaggaaggcagctaaggcccaatgagaaatggagcgcagtgccagtgggct

SEQ ID NO: 115889 - DNA, 201 bp, Homo sapiens
gtgctcctgctctatcaggttcaacttgggattttttgattttgcaatggtctgaaagccatacacattcagtaaaaaccatacttcaagtacccataccrttctctttttcactttctgtacaatattcaatagattacatgagacattcaatattttattataaaataagctttatcttagctgatttcgcccaactgc

SEQ ID NO: 115890 - DNA, 201 bp, Homo sapiens
tgttgctaggcagtaggaaattttcagctctattataattataatcttatgggatctctgtcatacatgtggtctgtcattgatggaaacatcattatgcrttgcacgactgtactaatgcatgtgtgcatctgcctatccatttctctgtgtgtatacatccaactgcatgtttataactatggcaagtacattgataat

SEQ ID NO: 115891 - DNA, 201 bp, Homo sapiens
cgtcctgagtagctgggattacaggcacctgccaccatgcctggctaatttttgtatttttagtagagatggggtttcaccatgttggccaggctggtctygaactcctgaactcaagtgatctgcccaccttggcctcccaaagtgctgggatcacaggcgtgagtaatggtagccatagtggtggtgagttcaatcaag

SEQ ID NO: 115892 - DNA, 201 bp, Homo sapiens
acgggggtcttaatgacttccatggcagaattctctgtggctagtaatcaagatagtttctgaagctggcacaattccctcgtttgtaaaatggtgttaaytattttttgtttaaccttttataaatgttgtaatgaggacagaattacactctttttcaagtgctacataaatgtccatggtcttcataattggaaacat

SEQ ID NO: 115893 - DNA, 201 bp, Homo sapiens
cagtaaacatttgtagattaaatgtaatgaaggaatgagtcattgcaaaaacttgttacaattataaataagcatatactagattcaagacataattcagraagagttaaaagcattgctgaccaaatctctcttaactaggtcttgaatatattctctgtaccttataccattttaagctgggagtaatggggagagaaa

SEQ ID NO: 115894 - DNA, 201 bp, Homo sapiens
ggatctttggggtgttgattttcttcccctgtaaacctctgttgccagtggggcctttgccccatttcttgtcctggtccaggaagaatgaggtatgcagrcaaatgaagggtgaggaagaagaagaggagatttatttagtgctataactgctcagaaggagacccacagtgggtagctcccctctgtgggcaggcaggt

SEQ ID NO: 115895 - DNA, 201 bp, Homo sapiens
cagtggggcctttgccccatttcttgtcctggtccaggaagaatgaggtatgcaggcaaatgaagggtgaggaagaagaagaggagatttatttagtgctrtaactgctcagaaggagacccacagtgggtagctcccctctgtgggcaggcaggtcgtctgtcaagtgttcagctctcaacagagaggaggccctggaga

SEQ ID NO: 115896 - DNA, 201 bp, Homo sapiens
caggcaggtcattcggcagtctctgcagatctctgaagctattagcagagagcgtaattagcagagagggtagctcctctctgctgctggtcatcccatcktctgctcagctctggctgagcccggctatttatggacctcagaggggaggaagtgcacactggttggcccatgggtggtcatgggcaggcctggaaaagg

SEQ ID NO: 115897 - DNA, 201 bp, Homo sapiens
ccaggctcagcctgactttgctccaagattggagcaggagccaacagcagggagaagccaagcagtgggagcaggcacttttaagcttgtgagggcagggrggccttcccaggcccccaagagtgcagggatacctgagtctgctgccatagtttgggcagttgcacccctgcccaggagggcagggctcctgcctgctct

SEQ ID NO: 115898 - DNA, 201 bp, Homo sapiens
taaaagtgtgatagtctgactctggcttcagattgggttgtgtttggaaagtaccgagttcatagaatagataactgagctttcctgctgctatgcattcrttatggattataggggttgcttttttcaaccatgaaagacttggggaaaatgttgtcagttttgcttagatagttatagctgtacttcaaggttgactgg

SEQ ID NO: 115899 - DNA, 201 bp, Homo sapiens
gataaaagaactactgatggaagctgggaggtgaaaggcagaaaggaggtgaagggaagggtaacagtgctaacgtcctcttattacaaaatgagtaccaraaagagaatattgaaagtggatgctttaaaatatactaacaatattgcttcaattatcagtgttggtagaaagatgggagttggaatattgagtaaattt

SEQ ID NO: 115900 - DNA, 201 bp, Homo sapiens
aaatcaaagttgtcatgatagaattcctaggtttccctttgggcttagggaaggtaactggggtacaaaccagtttatgatcttctttaagaagatgccckccaagggcaaaggagtgcatcttgagtttgtgggaggcccaccgaacagggtgaaaggacatagaaattgtttgtctttagaatgcccaatgccaggagg

SEQ ID NO: 115901 - DNA, 201 bp, Homo sapiens
cattatacgtccagccctaaaaaaatcaataatctactttctgtctgtatagatctgtctactctggacatttcatgtaaatgtatcagtacttaattccttttttttttttttttttttgagacacagtctgtctctatcacccaggctggagtgcggtggcactatctcagctcactgcaaccttcaccttccgggttc

SEQ ID NO: 115902 - DNA, 201 bp, Homo sapiens
tcatttgtttatccatttaccagttgatgacatttgggttgtttctaccttttgactattatgaatcaacctgctgtgaacatttgacaggtgtgaacatmcactttaatgaattcctgttcttttaagtataatgaattcctgtaagtagaattacggggtcatatggtaaatatataagtttaactttatgaaaactgc

SEQ ID NO: 115903 - DNA, 201 bp, Homo sapiens
atccatttaccagttgatgacatttgggttgtttctaccttttgactattatgaatcaacctgctgtgaacatttgacaggtgtgaacatacactttaatgaattcctgttcttttaagtataatgaattcctgtaagtagaattacggggtcatatggtaaatatataagtttaactttatgaaaactgccaaattgttt

SEQ ID NO: 115904 - DNA, 201 bp, Homo sapiens
catttaccagttgatgacatttgggttgtttctaccttttgactattatgaatcaacctgctgtgaacatttgacaggtgtgaacatacactttaatgaattcctgttcttttaagtataatgaattcctgtaagtagaattacggggtcatatggtaaatatataagtttaactttatgaaaactgccaaattgtttaaa

SEQ ID NO: 115905 - DNA, 201 bp, Homo sapiens
atttaccagttgatgacatttgggttgtttctaccttttgactattatgaatcaacctgctgtgaacatttgacaggtgtgaacatacactttaatgaattcctgttcttttaagtataatgaattcctgtaagtagaattacggggtcatatggtaaatatataagtttaactttatgaaaactgccaaattgtttaaaa

SEQ ID NO: 115906 - DNA, 201 bp, Homo sapiens
ggcaacagaacagtttggttaagaggacaagacggccgggcacggtggctcacgcctgtaatcccagcactttgggaggccgagaaaggcagatcacgagktcgggagatcgagaccatcctggctaacatggtgaaaccccgtctctactaaaaatacagaaaaattagccgggcgtggtggcgggcgtctgtagtccca

SEQ ID NO: 115907 - DNA, 201 bp, Homo sapiens
tttaccagttgatgacatttgggttgtttctaccttttgactattatgaatcaacctgctgtgaacatttgacaggtgtgaacatacactttaatgaattcctgttcttttaagtataatgaattcctgtaagtagaattacggggtcatatggtaaatatataagtttaactttatgaaaactgccaaattgtttaaaaa

SEQ ID NO: 115908 - DNA, 201 bp, Homo sapiens
ttaccagttgatgacatttgggttgtttctaccttttgactattatgaatcaacctgctgtgaacatttgacaggtgtgaacatacactttaatgaattcctgttcttttaagtataatgaattcctgtaagtagaattacggggtcatatggtaaatatataagtttaactttatgaaaactgccaaattgtttaaaaaa

SEQ ID NO: 115909 - DNA, 201 bp, Homo sapiens
accagttgatgacatttgggttgtttctaccttttgactattatgaatcaacctgctgtgaacatttgacaggtgtgaacatacactttaatgaattcctgttcttttaagtataatgaattcctgtaagtagaattacggggtcatatggtaaatatataagtttaactttatgaaaactgccaaattgtttaaaaaata

SEQ ID NO: 115910 - DNA, 201 bp, Homo sapiens
tcagggttagtgggtcaaattggtcccaatggcttaggatgcatttcaagggtgagcctgttgatgcatgagtgtttcccatctgaaaggcaaaaccaccygtggttttggtttattttgtttctccccctgcccaagaacccacaacggtccctggaccctgctgattggaatagttgcgctcaccgatgcagcagcaga

SEQ ID NO: 115911 - DNA, 201 bp, Homo sapiens
cccagctacacgggaggctgaggcaggagaatcacttgaaccctggagacggaggttgcagtgagccgagatcacgccattgcactctagcctgggcaacragagcgaaactccgtttcaaaaaaaagaaaagaaaaaaagaaactttatgatcagtaccaaatgagtggtatagaaaataaataatgtggaggttcatag

SEQ ID NO: 115912 - DNA, 201 bp, Homo sapiens
ttttgattgggtgccagatgctgtgaattttaccttgttgtgtgcatggtaattttatatttctaaaaatattcttgagctttgttctggtacatagttartttactttagaacagtttgattgttttagggcttattcttcagattttctaggcagaaccagagacactttaatccagggctcattatttctcactgctg

SEQ ID NO: 115913 - DNA, 201 bp, Homo sapiens
acccatgacggggctaatgtccttataagaagaggaaaggagaccatagctttgttctttctctgacataatgaggatatagtgagaaggtggctatctgmaagccaagaagaaagcctttaccagaaattgaacctgccattaccttgatcttggatttcccagctctggaattatgagaaataaaaatctgttgtttaa

SEQ ID NO: 115914 - DNA, 201 bp, Homo sapiens
ttttaccaacttttgataaaggcatgataataaaacagaactcaaaggaggtattcaaatatagatgactagcaaaataacattctgaaaactgagaataktcatgttttgaagtacaaagtacatagtgataatggtggtgatgactacagatgctaacatttttttaagactcctcctcatgggttaaggtgctgtttt

SEQ ID NO: 115915 - DNA, 201 bp, Homo sapiens
gacttggggaaaatgttgtcagttttgcttagatagttatagctgtacttcaaggttgactggtaatcagggtaacttctgatacttatcacacaagatgktgcctcagcatttaaataaatggaggtaggggagggcgtggtggtaacatacttttaaaccagcgattgcacagcaaaccacaatgcaagtatttctgac

SEQ ID NO: 115916 - DNA, 201 bp, Homo sapiens
ctctatcctccctcttccccatctcttctgtcctccttccctttttccttctctttctcttattctatttgtttctctcacttcaattcatataagttttrtgatctgagggaatctctatttatttccctcttatttataagcatgcagtgaaacttttacaaatacattatttctgtatttttagaatttatacctatt

SEQ ID NO: 115917 - DNA, 201 bp, Homo sapiens
gatccataagccagagtacagggttctaatgtagttcacttgaatattttgccaggttctgtgctaggtgtgtaggattcaaagataaaaacgatacagaycgtacccttaaggatctaacagtataatacatatattcctagcatgaaataatacaaaaaaaccacatcacactggagaaagaccttatgaaaaaataat

SEQ ID NO: 115918 - DNA, 201 bp, Homo sapiens
aaaattggttataagtcaggcgagaattttggcaagggatgagaaggtgggggtaataatgtgagagaaaatgatattcactgaatttcttatttcaagartattaatttctttttcctttgaaggtgaaggctgaagtgttagacatggcagataatgcatttgatgatgaatacctgaaatgtacggacaggatggaaa

SEQ ID NO: 115919 - DNA, 201 bp, Homo sapiens
aaggcagtggttcttaaccaaaggcagttttgccctgcagggtcatttggcaatggtcagaaacatttttggttgtcacagttggggaaaagggggattgstactgacatctaatgggtagaggccagaaacactgatagacaatgcataggacagccccacacaacaaagaattatatggcccaaaatgttggtagtgct

SEQ ID NO: 115920 - DNA, 201 bp, Homo sapiens
gggggattgctactgacatctaatgggtagaggccagaaacactgatagacaatgcataggacagccccacacaacaaagaattatatggcccaaaatgtkggtagtgctgatgttgagagaccctactataaggcttacaataaataaatagtgcagcctgggaaacatagggagaccaccatttctactaaaataaaaa

SEQ ID NO: 115921 - DNA, 201 bp, Homo sapiens
aggttttaggttgttttctttattcccaacattctgaaattttatggtgttgtgccttagtgtgtgtgagcaaagggttagtaaactccttctcctgtctkctgtgaaaatggcctcctggtgatcttccagcactctctctgcaatctatgaaaggtggaatgacagctgtgtgaccttacagcattgcctgtggtaaac

SEQ ID NO: 115922 - DNA, 201 bp, Homo sapiens
agaaggacgattctagttagagcagatgaaagctgaaatgagtaaatttggttgaaagaaaaagtgtttataaaaagataggggaaaaaagacaaaagacragatgagaaatgctggctagggtttggagaagagggaaccctggaacactgttggtaggaaggtagattggtgcagccattatggaaaacagtatggagg

SEQ ID NO: 115923 - DNA, 201 bp, Homo sapiens
ttctacttcttgttttttccacttttaagaatttatgttattagattgagctcacctggaaaatccaagataattgccccacctgaaggccagctaattarcaacattatttgcatcttcaaccattgttctcttttgccatgtaaaataacatattcacaggttctggggataggatgtagacctctttaagaagggtat

SEQ ID NO: 115924 - DNA, 201 bp, Homo sapiens
agctctctcattttcttataaattaattaagagtttgatctaccattcctcttctgaaaagaaaacagtgtttctctacctttttggtagaagagttactaaaaaaaaaaccagctattatttgtctcttttttcaacctggcaaagcacagtatataaatattgtttgttttatctataaccaaatttaattgccttgga

SEQ ID NO: 115925 - DNA, 201 bp, Homo sapiens
tttcttataaattaattaagagtttgatctaccattcctcttctgaaaagaaaacagtgtttctctacctttttggtagaagagttactaaaaaaaaaacyagctattatttgtctcttttttcaacctggcaaagcacagtatataaatattgtttgttttatctataaccaaatttaattgccttggaatattactttt

SEQ ID NO: 115926 - DNA, 201 bp, Homo sapiens
ataagatggtatctagaatggtgtgagaaaaggattcatagctatcctagggttattgtaaaaaacaaagggtgctttttgaggaaatgaatttaaaagcgggggggcacgcatagagacagaccttgggaaagtagcttgagacagaagggaaacaggttgatttacgatggggttcagctccaagacactgttaaatgc

SEQ ID NO: 115927 - DNA, 201 bp, Homo sapiens
atattgtttgttttatctataaccaaatttaattgccttggaatattactttttgccaagtctactgccaagttaattttattagggtataattaacagtygtcaaagaaaagctacttaatttatttccacaggaattcagaagaaaaaaagaatatgggtttaaaaccaattactttcctttaaaattgtaggtaaaat

SEQ ID NO: 115928 - DNA, 201 bp, Homo sapiens
atgttgtattttggttaagtatgcgtattcatgttttttattagattttgagtgctttttagtactttgttttacttgcttatgtatcccgactcctgacraggtacctgaaatatagtaagctagttgagcgaatggtgatagctgtcaccattgccagtgattaacagagcaagtttccctagttatgtgaatcactta

SEQ ID NO: 115929 - DNA, 201 bp, Homo sapiens
tgcttttgtactgaatcatttaatcttgtgcatttgtattattattgtatacttttggaatttttattttacaataattggtgttcattcattcatttccraacctgttcacttaacatgccgatctttgggatgtgggaggaaaccagagtccctggagaaacccacacagacatggggagaatgtacaaactccacata

SEQ ID NO: 115930 - DNA, 201 bp, Homo sapiens
gtgaaaaaaatggccccaccaaaagatgaaaaatatcaaaaagattagaactaagtgtgtttttgtaatactcaggaaaggagtaaaaaagaaaagtagartaattacagagaataaaagcagtactattctggtgatggcttgtattggctagggagagctaatggttagattttcatgaattatgtgagttagttttaa

SEQ ID NO: 115931 - DNA, 201 bp, Homo sapiens
ggaaacagtcctgaaattttaagtcactgtgagtgtttggcatcttaagttccatgtatttaaaatcgaatctgcagttttttctgctaaactacatcttcccctcatatccctatttctgttagtgacagaactattctttcagacctcagaagttcagccttttttccttgtctcttctctgctttaaattcagattca

SEQ ID NO: 115932 - DNA, 201 bp, Homo sapiens
gcgattctcctgcctcaatctcctgagtagctgggattacaggcatgcaccaccatgcccagctaattttttgtatctttggtagagacggggtttcaccrtgttggccaggctggtcttgaactgctgacctcatgatccacccgcctcggcctcccaaagtgctgggattacaggcgtgagccaccgtgtctggcctca

SEQ ID NO: 115933 - DNA, 201 bp, Homo sapiens
cttcccctcatatccctatttctgttagtgacagaactattctttcagacctcagaagttcagccttttttccttgtctcttctctgctttaaattcagaytcaaatccttaacatgttctttgtttcttttttgcatcttcaactttctttttctgagatggagtctcgctctatgtagcccaggctggagcgcaatgac

SEQ ID NO: 115934 - DNA, 201 bp, Homo sapiens
gttctagaacagcctggccaacatcgtgaaaccctgtctctactaaaaatacaaaaaattggctgggcgtggtggtgggcgactgtaatcccagctacacrggaggctgaggcaggagaatcacttgaaccctggagacggaggttgcagtgagccgagatcacgccattgcactctagcctgggcaacgagagcgaaact

SEQ ID NO: 115935 - DNA, 201 bp, Homo sapiens
tctggctgctacctatttgtccaacctcatatcattccttctcaaccactacaatccagtcagtggcccatacactggcagttttctccatctggtatgcytttcctcctgttcgtcacatagagagttccttctggacatttaaattttagctggcttgtaccttctcttgtcacacaatctgaagcagacatgacttta

SEQ ID NO: 115936 - DNA, 201 bp, Homo sapiens
gaagaagcaactaaaattgcctcattcaccccttctccaaaaaaaaccctaacagttttttttgtgtgtgtactacttataatccacagaatgtgctgacyatatcataaagatttataattgttggctatgaaaatcttttcagaaatagatacaaagaggtatattaattccatgtgggcatattaggtcctgtactca

SEQ ID NO: 115937 - DNA, 201 bp, Homo sapiens
ctttactaaatcctctatgatctggctgctacctatttgtccaacctcatatcattccttctcaaccactacaatccagtcagtggcccatacactggcarttttctccatctggtatgcttttcctcctgttcgtcacatagagagttccttctggacatttaaattttagctggcttgtaccttctcttgtcacacaat

SEQ ID NO: 115938 - DNA, 201 bp, Homo sapiens
taaaatttgcagacaaggcaagaagaagcaactaaaattgcctcattcaccccttctccaaaaaaaaccctaacagttttttttgtgtgtgtactacttayaatccacagaatgtgctgaccatatcataaagatttataattgttggctatgaaaatcttttcagaaatagatacaaagaggtatattaattccatgtgg

SEQ ID NO: 115939 - DNA, 201 bp, Homo sapiens
atttttactaaacattgtattacattaactgtgtgccaggcattgtttgaactgctttgtgactattgaccatattgactcattttattcttataataacwtctacctctgacccagccactcttctatttttttcaccatagattatttttgcctgttctagaacttcatataaatggaaccacttgagtatatactctt

SEQ ID NO: 115940 - DNA, 201 bp, Homo sapiens
cattttgacagattgcttgccagaaagattgggctatcagtatgtagatgtatctgtttcacaatcctcttgtcattttatttacttttgttcatttagcrtgtgaaaattggcactagagactagtgttaattccattttctttacaaattgatattttactttgtattggtttaacatctgcatttcctacctttttaa

SEQ ID NO: 115941 - DNA, 201 bp, Homo sapiens
ttctctcataaagaaacctccaggcctgtttgaatttctcacagtgtggatttcccctcctctcggcagctgttgttagtattaaactgactagaaagggrtttatttcttgaaagtcttagaagccccaagagaatattctgatttttctttttccctctcctctccccacgcagggagtcattccttccttcctaaata

SEQ ID NO: 115942 - DNA, 201 bp, Homo sapiens
cccaaagtgctgggatcacaggcgtgagtaatggtagccatagtggtggtgagttcaatcaaggaggaagtgtttgcaaagcaaaaattgtgaggtgcacytcttaacaccacaaagttcaaaaacaaacaattacaaatatggcgagctcactgagtgcttttgtactgaatcatttaatcttgtgcatttgtattatta

SEQ ID NO: 115943 - DNA, 201 bp, Homo sapiens
gctgggattacaggcacctgccaccatgcctggctaatttttgtatttttagtagagatggggtttcaccatgttggccaggctggtctcgaactcctgarctcaagtgatctgcccaccttggcctcccaaagtgctgggatcacaggcgtgagtaatggtagccatagtggtggtgagttcaatcaaggaggaagtgtt

SEQ ID NO: 115944 - DNA, 201 bp, Homo sapiens
tttagtgaaaatatttgctttttccattttgttaaattaatttccttcataattaaaaaaaagaaaacacaacttaggggctgaattgtgttcccccaccraatgcttatgttgaaaacctaactgccagtacctcagaaggtgactgtatttagagatagggttttcacagaggtaattaagttaaggtgaggtccctga

SEQ ID NO: 115945 - DNA, 201 bp, Homo sapiens
aatagcagatatttgctttgcaaggtccaaagatcaattttgttttcttgctgtcttttcgttattttctcttgttttttttttttcttttttttttcctragctttatttgcatctccagtccttttctctatccttactttttaattgactataatatggaattgaattttttaaaaaatctgttaaatttatttttaa

SEQ ID NO: 115946 - DNA, 201 bp, Homo sapiens
atcgaggtgttctgtttaattatccagtgtgactgactctgtggcagggacggtaagagccttccctttttacttgtgagaggagaagtttctctcataargaaacctccaggcctgtttgaatttctcacagtgtggatttcccctcctctcggcagctgttgttagtattaaactgactagaaaggggtttatttcttg

SEQ ID NO: 115947 - DNA, 201 bp, Homo sapiens
tgtggcagggacggtaagagccttccctttttacttgtgagaggagaagtttctctcataaagaaacctccaggcctgtttgaatttctcacagtgtggayttcccctcctctcggcagctgttgttagtattaaactgactagaaaggggtttatttcttgaaagtcttagaagccccaagagaatattctgatttttct

SEQ ID NO: 115948 - DNA, 201 bp, Homo sapiens
gattacaggcatgcaccaccatgcccagctaattttttgtatctttggtagagacggggtttcaccgtgttggccaggctggtcttgaactgctgacctcrtgatccacccgcctcggcctcccaaagtgctgggattacaggcgtgagccaccgtgtctggcctcagcttcaactttcacatccaatctatcactgtctt

SEQ ID NO: 115949 - DNA, 201 bp, Homo sapiens
ccacccgcctcggcctcccaaagtgctgggattacaggcgtgagccaccgtgtctggcctcagcttcaactttcacatccaatctatcactgtcttgattmtttttgtacagtgtacttgtcattatatttctactcttaccaataccaccttagtgtagcccttcttctttttatgatagtaaaatacaaataacataaa

SEQ ID NO: 115950 - DNA, 201 bp, Homo sapiens
ctcttaccaataccaccttagtgtagcccttcttctttttatgatagtaaaatacaaataacataaaatttaccattttaaccatttaaaagagtacaatwcagtggagttaagtactttcacagtgctgtgaagccatcaccataatttagttccagaacattttcatcacccagaaaccccatactcattaagtagtta

SEQ ID NO: 115951 - DNA, 201 bp, Homo sapiens
acccagaaaccccatactcattaagtagttactcctcattaacacctcccccaaaccccagtcagctaatttgctttttgtttttatggttttgcctactstagatatttcctataaaatggaatcatacaatatgtggtcccttgtgtctggctttttttacttagcatattttcaaggttcatccatgttgtagcatgt

SEQ ID NO: 115952 - DNA, 201 bp, Homo sapiens
acattaaacaatcaaaatgagagatggtgacagttttattttagttggtatctaagttgtcagctaaaatgtctctatatagaagacaatgtaaaaaggakatacttgataaatggactaaaaatctgttattagggataaaatatttgatttttactaaacattgtattacattaactgtgtgccaggcattgtttgaac

SEQ ID NO: 115953 - DNA, 201 bp, Homo sapiens
atgtacagtagtgaaagtttacttttcatgtaaatgtacgtaaaataaagtggtatacagagtttctaaaaatataatgaagatcaaacagagaaatgttaaaaaaaaattgtaaagatgatatgagaatgccttgaagttttggaaatacagacctgagatattgcagctattgcagcaaatcccaactgattttcctcc

SEQ ID NO: 115954 - DNA, 201 bp, Homo sapiens
agagagggaggtgaggtagagactgacagaacccaaaagactttcacctagcaaagaggcgttcgttctgatgagggaaagtcttatgagaaatagtgacatggagggatccttccatacctatttgtgcagaacaaacattttactgtgaatagaatgccaacaaatttcagagaaatgtctgacatcatgaatggaaga

SEQ ID NO: 115955 - DNA, 201 bp, Homo sapiens
ccaaacgaatctaattatgattcctaaaaatcactttatacttcctactactgtacattcccttgtgtcattcctctgctgtaaattccttttcccttagyttatattgccattcaatagggtctgatatgcaccagaaactgtactgttggcctgggctacagcagctttcttttacacttatgagagagcagatattag

SEQ ID NO: 115956 - DNA, 201 bp, Homo sapiens
aataaagcctgtatctgcaaactgggtgcacataaaacttggatcctcaaatgtaggaactccatcattaaagcagagagtgagttgcttggggtaaatgsaatttgctagagagctgaatcccatgttaatctgttctaggaactggaatagagctaagctttcaagtgaataagtcagtggaattagctgtgggaaacc

SEQ ID NO: 115957 - DNA, 201 bp, Homo sapiens
taggcacaggaataattcattaattacaattgcagtaagtagtatgatggaaaaatagagagtgttatggaaataaataaataggacacctaatctagttraagctgaagtggtggtttcaaaggcttcttggagaaaaagtcatttaagctgagacctaagcaattagtaggcattagcttagtgaagaaatgggcagag

SEQ ID NO: 115958 - DNA, 201 bp, Homo sapiens
accaggcagatactgtctcagaacctggtatcaggggccaagaataaagcctgtatctgcaaactgggtgcacataaaacttggatcctcaaatgtaggarctccatcattaaagcagagagtgagttgcttggggtaaatgcaatttgctagagagctgaatcccatgttaatctgttctaggaactggaatagagctaa

SEQ ID NO: 115959 - DNA, 201 bp, Homo sapiens
ggtaccaaggtggggaggatcttggctcaaatatgttaattattaatatttcatatatttattttgctatgaagaactttaggtgtatgttttcttctcartaataatgtactggcctataatatttaatatacttcttacaaataccaatttatcatgcagccttaactctgtgaattttttttttttttgaggcaggct

SEQ ID NO: 115960 - DNA, 201 bp, Homo sapiens
aaaatatatgggagttcttttcatagtcagctgggctgcaacaatgcagggattggtcagggaatggaaaagcttccatcctgggatcaggctactgtacyaggcagatactgtctcagaacctggtatcaggggccaagaataaagcctgtatctgcaaactgggtgcacataaaacttggatcctcaaatgtaggaact

SEQ ID NO: 115961 - DNA, 201 bp, Homo sapiens
tttaggtgtatgttttcttctcagtaataatgtactggcctataatatttaatatacttcttacaaataccaatttatcatgcagccttaactctgtgaattttttttttttttgaggcaggcttttgcccaggctggagtgcagtggtgtgatcacagctgactgcagcctcaacctcccagacccaagtgatccatcca

SEQ ID NO: 115962 - DNA, 201 bp, Homo sapiens
tgatatttagaacctaggaaaatatatgggagttcttttcatagtcagctgggctgcaacaatgcagggattggtcagggaatggaaaagcttccatcctrggatcaggctactgtaccaggcagatactgtctcagaacctggtatcaggggccaagaataaagcctgtatctgcaaactgggtgcacataaaacttgga

SEQ ID NO: 115963 - DNA, 201 bp, Homo sapiens
ctagtaacagtgataactgaaattggcacaattttaactggatgatgaatcgtggcaaaacttaatttcacagcattcaatagtacttgactgattattcrtagtagctagcagtagaaagcacatgatactcatataatggaacacatgttgaacctgagagtggaaatttagcagtatccatggatatagtggtccttg

SEQ ID NO: 115964 - DNA, 201 bp, Homo sapiens
atctctatttatttccctcttatttataagcatgcagtgaaacttttacaaatacattatttctgtatttttagaatttatacctattcctatttctcatyttacaaattaagtatcctttgatgttccttaccttgaatgccacttagagtcagaaagataaggcagcaaatcagaatggcagtttgattcatggtgctg

SEQ ID NO: 115965 - DNA, 201 bp, Homo sapiens
atctcttctcacccttctttttcattgtagcactgtagaaataaatagggatgaaaatatttaaaactgtgttgggtcaataaaacagatggcatacgcarttctgaagtcagacatttaagtttcactctgcatgtttttgtttgctgtacattagttttagaatcatcacaaaccctttactgatctttttttattatc

SEQ ID NO: 115966 - DNA, 201 bp, Homo sapiens
aactgagctttcctgctgctatgcattcattatggattataggggttgcttttttcaaccatgaaagacttggggaaaatgttgtcagttttgcttagatmgttatagctgtacttcaaggttgactggtaatcagggtaacttctgatacttatcacacaagatggtgcctcagcatttaaataaatggaggtaggggag

SEQ ID NO: 115967 - DNA, 201 bp, Homo sapiens
ttttacattctcaccaggagtgtataagagttctagctataccacattcttgccgacacttgatagatgtctttttaacagttctaaatagatatgtggtrgtattttattgtagttttaatttgcatgttcctaatgagtaataatgttgagcatcttttcacatacttatttgccatttgtatatatttactgaaacac

SEQ ID NO: 115968 - DNA, 201 bp, Homo sapiens
gtaggtttatttacaccatcatcaccccaaacacgtaatatgttacaacggcaacgatgttgctaggcagtaggaaattttcagctctattataattatartcttatgggatctctgtcatacatgtggtctgtcattgatggaaacatcattatgcgttgcacgactgtactaatgcatgtgtgcatctgcctatccatt

SEQ ID NO: 115969 - DNA, 201 bp, Homo sapiens
acttgacataaaaaatgatgtgtcagtgactgtgtattcttgttaacagctccaggtccagttcctgttccaggtcccaaaagccatccttctgcatcctygggcaaactgctgcttccacagtttgggatggtcatcattttaatcagtgtttctgctataaatctctttgttgctctgtagtttgatgcattgtttatc

SEQ ID NO: 115970 - DNA, 201 bp, Homo sapiens; identical to SEQ ID NO: 19489

SEQ ID NO: 115971 - DNA, 201 bp, Homo sapiens
attggtctagaaatgtggcaggaacaagacgatgaagtgccttgtgaatctctatgtggggaggagacactgcagaattttaactaagggaataacatgakatttatatatacacacacacacacacccctgtgtatacatctgccccttgtcaccagtctttaatcttattttacttgaacatttccttgtgtctacgta

SEQ ID NO: 115972 - DNA, 201 bp, Homo sapiens
tgccccttgtcaccagtctttaatcttattttacttgaacatttccttgtgtctacgtagtttatatatttgtaaaatgttctcatatttctagcctcttsattctcagttctgtgtatttgagttgtttccaataatgtctcagtaatacaacagtgatcttactattttaaaaaagattttactctcttggggtatttc

SEQ ID NO: 115973 - DNA, 201 bp, Homo sapiens
actttttggttgcctttggattggtggggcaggggaagaatctaatagcagatatttgctttgcaaggtccaaagatcaattttgttttcttgctgtcttytcgttattttctcttgttttttttttttcttttttttttcctaagctttatttgcatctccagtccttttctctatccttactttttaattgactataat

SEQ ID NO: 115974 - DNA, 201 bp, Homo sapiens
agaatttagttggaggttgaagaatccacaggacaatggagaataagtcttggaaaatggacaaagacctaagggaactaggtgataggaaggactagccrgagtcatgctacaggaacacacattgggaagacactactgtaagactttcattgtttctcctgctgctgccaggcttgaaataattttcttactaatagt

SEQ ID NO: 115975 - DNA, 201 bp, Homo sapiens
tcttccatctcatcctgttgccttgcatggagtcaggtcttaaaaaactcatttccgtagttcctggtttataaagtctaattaacatgtaagataccccmaattcaagcctttgtcctattttcttcttaacctactgatgtcagatgtttttctattttggaacataatactgttgtagaatattgtggaatcataagt

SEQ ID NO: 115976 - DNA, 201 bp, Homo sapiens
attcccaggcatttaagagaatactgtcatgagactattattcatgaatatttcccttatagctacctgccagtcatctacaaatatttagctggggaagygtagagaagtctctttcctcctgtgcattcatgtgctcctggagcattgtctctggggcaggaaagttagttctgctctggatgttgctgagggaaaggc

SEQ ID NO: 115977 - DNA, 201 bp, Homo sapiens
caccatacccagctaattttcctattttttatagagatgaattttcgctatgttgcccaagctagtcttgaactcctgggcttaagccattcacctatgtyggtctcccaaagtgctcagattataggtgtgagccaccatgcccagctgactatgtgaatttttatttttaaagagacttaaaaaaaaaatcactgtaag

SEQ ID NO: 115978 - DNA, 201 bp, Homo sapiens
tggaatgcaatggcatgatctcagctcactgcaacctctgcctcccgggttcaagcgattctcctgcctcagcttcctgagtagctgggattacaggcacrtgccagcacactcggctaattttttgcattttaagtagaaatggggtttcaccatgttagccatgctggtcttgaactcctgacctcaggtgatccgccc

SEQ ID NO: 115979 - DNA, 201 bp, Homo sapiens
atggcatgatctcagctcactgcaacctctgcctcccgggttcaagcgattctcctgcctcagcttcctgagtagctgggattacaggcacatgccagcasactcggctaattttttgcattttaagtagaaatggggtttcaccatgttagccatgctggtcttgaactcctgacctcaggtgatccgcccgcttcggcc

SEQ ID NO: 115980 - DNA, 201 bp, Homo sapiens
tagtctgactctggcttcagattgggttgtgtttggaaagtaccgagttcatagaatagataactgagctttcctgctgctatgcattcattatggattayaggggttgcttttttcaaccatgaaagacttggggaaaatgttgtcagttttgcttagatagttatagctgtacttcaaggttgactggtaatcagggta

SEQ ID NO: 115981 - DNA, 201 bp, Homo sapiens
tggtccatccttggaagcactgcatcgattttgctcccctctggttttaaggagatcttttagacctgtaagaagagaaaggggatataaaagtgtgatastctgactctggcttcagattgggttgtgtttggaaagtaccgagttcatagaatagataactgagctttcctgctgctatgcattcattatggattatag

SEQ ID NO: 115982 - DNA, 201 bp, Homo sapiens
atattggaaatatttttggatatttgcatcaatttgaagaaacttgcagacaaactgcatgacctagaaatatatatatatataaaaagaaagtatgtcaygaatgcataaaatatatgtagatgctagtctatttttatcatttactaccataaaacatacacaaatctattgtaaaacgttagtatttatccaaatttg

SEQ ID NO: 115983 - DNA, 201 bp, Homo sapiens
tggcatgatctcagctcactgcaacctctgcctcccgggttcaagcgattctcctgcctcagcttcctgagtagctgggattacaggcacatgccagcacmctcggctaattttttgcattttaagtagaaatggggtttcaccatgttagccatgctggtcttgaactcctgacctcaggtgatccgcccgcttcggcct

SEQ ID NO: 115984 - DNA, 201 bp, Homo sapiens
agcttacattatagtgccagggtagagttattactgaatagcttaggatgatgaacattaaccttcctacaggagtagtagcagctgatttggtgaccatsattggtcaccttttagtgtaactgcaaactaagaacaattatggcttgacatatactccatgtagggaagtgatgggagaggcagcctctgtgtggtcca

SEQ ID NO: 115985 - DNA, 201 bp, Homo sapiens
gcagatcttgatgatatatagtcgacccttgaacaacacaggtttgaactgcatgggtccacttatacatggattttttttaaataaatatattggaaatmtttttggatatttgcatcaatttgaagaaacttgcagacaaactgcatgacctagaaatatatatatatataaaaagaaagtatgtcatgaatgcataaa

SEQ ID NO: 115986 - DNA, 201 bp, Homo sapiens
catgtatatacagaaaatggaaatagaaaaattgctaaaaaaaatgctagagaacttgaacaacagaaaatcattatattggctatatagaaatgtaaaakcatgtgaaatcctacataaaacctagcgtagcagatcttgatgatatatagtcgacccttgaacaacacaggtttgaactgcatgggtccacttatacat

SEQ ID NO: 115987 - DNA, 201 bp, Homo sapiens
ttcacacaggatcatagcagaatctttctgtagttgtccacattattttctttttcaaaagatctgtcttggataaaacagattataacatgggagtaatytggtaacttactttgattataagccttgcttgcttcgatttgggatttaggcatcgttgtcctttattttctttcagggtaatactgttaaaagaacata

SEQ ID NO: 115988 - DNA, 201 bp, Homo sapiens
gtggattttggtatcctcaggggttctagaaccagtccccaaaggatactgagggatgactgtatatccagttgtatgttggtggttatcttgtttgaaayagaagacacacagagttaaactttaccttgcatgtatatacagaaaatggaaatagaaaaattgctaaaaaaaatgctagagaacttgaacaacagaaaa

SEQ ID NO: 115989 - DNA, 201 bp, Homo sapiens
ttttatcatcttgcagagattagtgtttaaaaaacaatgcagctatagttagccctctgtatcctctgggattcaaccaactgtggatcgaaaatatttgygggaaaaaataatacaaatttaaaaacccatacagtacaacaactacttgcatatcatttacattgtattaggtattataagaaatctagagatagtata

SEQ ID NO: 115990 - DNA, 201 bp, Homo sapiens
tccaggttcaagcgattctcctgcctcagcgtcctgagtagctgggattacaggcacctgccaccatgcctggctaatttttgtatttttagtagagatgrggtttcaccatgttggccaggctggtctcgaactcctgaactcaagtgatctgcccaccttggcctcccaaagtgctgggatcacaggcgtgagtaatgg

SEQ ID NO: 115991 - DNA, 201 bp, Homo sapiens
cttccaggttcaagcgattctcctgcctcagcgtcctgagtagctgggattacaggcacctgccaccatgcctggctaatttttgtatttttagtagagayggggtttcaccatgttggccaggctggtctcgaactcctgaactcaagtgatctgcccaccttggcctcccaaagtgctgggatcacaggcgtgagtaat

SEQ ID NO: 115992 - DNA, 201 bp, Homo sapiens
ctagagcaggatatggaagcaagttttgttttgcgtttacaagttagtatctctgtctctctctctctgtctctctctctttcactctctctctctctcacacacacacacacacacacagagagagagagagagagtttttaagtatcattcacatagaacctgtaactttttttttgaatctgtaactttaacagcttc

SEQ ID NO: 115993 - DNA, 201 bp, Homo sapiens
ggtggtagaccctaacaatcatcatggcattggagaaggcagaggctcagaatagcttctgtttggatacattttaggctatgcagtgtttctgaactcgygcacttgagaggacttttacaaatatggcagatttcatcatttggaggaagagacaaaattggaggacattataataaagtaaatgtgtttgggggaagt

SEQ ID NO: 115994 - DNA, 201 bp, Homo sapiens
gagcaggatatggaagcaagttttgttttgcgtttacaagttagtatctctgtctctctctctctgtctctctctctttcactctctctctctctcacacwcacacacacacacacagagagagagagagagagtttttaagtatcattcacatagaacctgtaactttttttttgaatctgtaactttaacagcttctag

SEQ ID NO: 115995 - DNA, 201 bp, Homo sapiens
gcaagttttgttttgcgtttacaagttagtatctctgtctctctctctctgtctctctctctttcactctctctctctctcacacacacacacacacacasagagagagagagagagagtttttaagtatcattcacatagaacctgtaactttttttttgaatctgtaactttaacagcttctagctaaatatgtctata

SEQ ID NO: 115996 - DNA, 201 bp, Homo sapiens
gctatataaaatcttcttaacagacatttaaaactgttgctaaaggcttttgccagatattctagccaaatcaaaaattccatgaagttcataatttctaktttcaataatcatctctagtatcttaaacatgtccaccatttctgtgctaaagctgtagtaacttctaatctgtgagattaaataaaactttatcatgtc

SEQ ID NO: 115997 - DNA, 201 bp, Homo sapiens
aagcgattctcctgcctcagcttcctaagtagctgggattacaggcgcctgccactacgctcagctaatttttgtatttttagtagagatggggtttcatcatgttagccaggctggtcttgaactcctgacctcatgatctgcccgcctcggcctcccagagtgctgggattacagacatgagccactgcacctggcctt

SEQ ID NO: 115998 - DNA, 201 bp, Homo sapiens
agcgattctcctgcctcagcttcctaagtagctgggattacaggcgcctgccactacgctcagctaatttttgtatttttagtagagatggggtttcatcwtgttagccaggctggtcttgaactcctgacctcatgatctgcccgcctcggcctcccagagtgctgggattacagacatgagccactgcacctggccttt

SEQ ID NO: 115999 - DNA, 201 bp, Homo sapiens
aagaaataagctttagtttccagtgattaaggatttgaaaaatagttactggtagttcaatttactttgttttttaactatgcctgttcatgctgatcacrtacaggttatctctatcttgttactggaattggattgtttctcattggcttaattaagtttattgcacaggaagagtcttcctggaacatttaagctata

SEQ ID NO: 116000 - DNA, 201 bp, Homo sapiens
gtgattaaggatttgaaaaatagttactggtagttcaatttactttgttttttaactatgcctgttcatgctgatcacatacaggttatctctatcttgtyactggaattggattgtttctcattggcttaattaagtttattgcacaggaagagtcttcctggaacatttaagctatacctgatttattaactacagctc

SEQ ID NO: 116001 - DNA, 201 bp, Homo sapiens
aatttactttgttttttaactatgcctgttcatgctgatcacatacaggttatctctatcttgttactggaattggattgtttctcattggcttaattaartttattgcacaggaagagtcttcctggaacatttaagctatacctgatttattaactacagctctctcattttcttataaattaattaagagtttgatct

SEQ ID NO: 116002 - DNA, 201 bp, Homo sapiens
actatgtgaatttttatttttaaagagacttaaaaaaaaaatcactgtaagtagtcaaagattagattcaagtcttttttttttttttttttttgaggtgsagtttcactcttgttgcccaagctggaatgcaatggcatgatctcagctcactgcaacctctgcctcccgggttcaagcgattctcctgcctcagcttcc

SEQ ID NO: 116003 - DNA, 201 bp, Homo sapiens
tatttatttaggatattcatttctctcctaaactctgattggctagtatctttagctgagctaactaaattgaccacaaacttgattgtgctgggggaaamcctagtctcagatccaagggaatttctgcatgtttttatttccatttcacataaatgggtggtttatagtaagggatgtgaaactagcaacactgatagc

SEQ ID NO: 116004 - DNA, 201 bp, Homo sapiens
catttatttttttttatcatcttgcagagattagtgtttaaaaaacaatgcagctatagttagccctctgtatcctctgggattcaaccaactgtggatcraaaatatttgtgggaaaaaataatacaaatttaaaaacccatacagtacaacaactacttgcatatcatttacattgtattaggtattataagaaatcta

SEQ ID NO: 116005 - DNA, 201 bp, Homo sapiens
ggaaaaacatttatttttttttatcatcttgcagagattagtgtttaaaaaacaatgcagctatagttagccctctgtatcctctgggattcaaccaactrtggatcgaaaatatttgtgggaaaaaataatacaaatttaaaaacccatacagtacaacaactacttgcatatcatttacattgtattaggtattataag

SEQ ID NO: 116006 - DNA, 201 bp, Homo sapiens
attatgcgttgcacgactgtactaatgcatgtgtgcatctgcctatccatttctctgtgtgtatacatccaactgcatgtttataactatggcaagtacaytgataatatgaaggcttttacaaatctgactggctatttttcttggttttatttatgaaatctgagtggtgatcccatttggatacttccagtcaacgct

SEQ ID NO: 116007 - DNA, 201 bp, Homo sapiens
agagtgtcctggaaagcactacccttttctatagtagttcatttattcatttactcattcattcagcaaatgtttattttagatgtctgtcacatgtctgkcactcttttgggtattagagatagaacagtgaacaaaactcaccaagtcctttccgtgtgttccaaatttcaaactttctgccttattgtagaagttagt

SEQ ID NO: 116008 - DNA, 201 bp, Homo sapiens
cccacccggaactccagctggcctgcaaacccacgcgcagccctggttcccgctgacgcctgtccctccacacctccctgcaagctgagggagccggctcyggccttggccagcccagaaaggggctcccacagtgcagcagtgggctgaagggctcctcaagtgccgccaaagtgggagcccaggcagaggaggtgccga

SEQ ID NO: 116009 - DNA, 201 bp, Homo sapiens
actagataaagcctaatggctcttgtagcccgttaggaatttattgataatcacttcctgaccatcatgctatccactcacattctaaatgaaaaaatacrcagtgtcatcctattctacttccctacacctcttttttgagtctactgaattgaaatttctttattttaatttagaagagaaaaatgaagacgggacatt

SEQ ID NO: 116010 - DNA, 201 bp, Homo sapiens
gtgttcttacagtggcctgcagagattgacatggtcttcccaccacccccttacatctctgaccttatcttgtactactctaatgttccaaccatattggyctgcttactattcctcaaacaaaagtaggcatattcttgtctcagggctttagtacgtgctgttcactgtgtttgactgccacagtcttcatggctgatc

SEQ ID NO: 116011 - DNA, 201 bp, Homo sapiens
tttctcttagagtgaaagccagtgttcttacagtggcctgcagagattgacatggtcttcccaccacccccttacatctctgaccttatcttgtactactmtaatgttccaaccatattggcctgcttactattcctcaaacaaaagtaggcatattcttgtctcagggctttagtacgtgctgttcactgtgtttgactg

SEQ ID NO: 116012 - DNA, 201 bp, Homo sapiens
acctctttttaaaacctgtgatttgctccttttctcttagagtgaaagccagtgttcttacagtggcctgcagagattgacatggtcttcccaccaccccyttacatctctgaccttatcttgtactactctaatgttccaaccatattggcctgcttactattcctcaaacaaaagtaggcatattcttgtctcagggct

SEQ ID NO: 116013 - DNA, 201 bp, Homo sapiens
aaattagctgggcgtggtggcacatgcctgtagtcccagctactcgggaggctgaggcaggagaatcccttgaaccagggagctggaggttgcagtgagcygagatcgtgccacagcactgtagcctggaaacagagcgaggctccgtctcaaaaaaaaaaaaaaaaaaattctgggggcttgcattttgcaagatacctc

SEQ ID NO: 116014 - DNA, 201 bp, Homo sapiens
ttacatggatatattgcatagtggtgaaattagggcttttagtgtatccatcaccagaataatgtacatggtacccattaagtagtttctcatcatccacygcccccaacccttccaagtctccactgtctatcattccatactctatgtctatgtgtacacattatttagctcccacttgtaagtgagaacatgcgtgta

SEQ ID NO: 116015 - DNA, 201 bp, Homo sapiens
agagaacacattttggggatcatatttatttaggatattcatttctctcctaaactctgattggctagtatctttagctgagctaactaaattgaccacaracttgattgtgctgggggaaaccctagtctcagatccaagggaatttctgcatgtttttatttccatttcacataaatgggtggtttatagtaagggatg

SEQ ID NO: 116016 - DNA, 201 bp, Homo sapiens
tgtcctttattttctttcagggtaatactgttaaaagaacatacaaaagagtcttaaagtttagatgcaaatacataaacaaaaaagcctgcaccattgtyatcttcagcaagttcattacttacatcacttctattttgtcacagttgttacttgggtacattatggaggctttctcaatatctgccactttcactgctt

SEQ ID NO: 116017 - DNA, 201 bp, Homo sapiens
aaaaaataaatcagatcatgttatacctctttttaaaacctgtgatttgctccttttctcttagagtgaaagccagtgttcttacagtggcctgcagagaytgacatggtcttcccaccacccccttacatctctgaccttatcttgtactactctaatgttccaaccatattggcctgcttactattcctcaaacaaaag

SEQ ID NO: 116018 - DNA, 201 bp, Homo sapiens
tcttaaaaaataaatcagatcatgttatacctctttttaaaacctgtgatttgctccttttctcttagagtgaaagccagtgttcttacagtggcctgcaragattgacatggtcttcccaccacccccttacatctctgaccttatcttgtactactctaatgttccaaccatattggcctgcttactattcctcaaaca

SEQ ID NO: 116019 - DNA, 201 bp, Homo sapiens
atgatggtgcaattaaactaggacatagaatagaggaggagaaacagatctcagggagaggagaattagtttattttggagtttaaactaaagttcctatrggatattcaagtggacatgtcttagagaaatttggccatagggctggatgtggtggcttgcacctgtaatcccagcttctctggaggctgaggtcagagg

SEQ ID NO: 116020 - DNA, 201 bp, Homo sapiens
catagatttctccaatctaagtttcttatgaaataaatatcccaaccaagtgacacacaaggcacttcatcttagttataattactttattaaccttttgrtctttcaacatttagatagtctttcttaatatttccaggagagtacctcatttttattttgaaaaccattcagcacatttatcttatgtaacatgcagag

SEQ ID NO: 116021 - DNA, 201 bp, Homo sapiens
agtctccactgtctatcattccatactctatgtctatgtgtacacattatttagctcccacttgtaagtgagaacatgcgtgtacccaatttcttttttcyttcttttttttttttttaagacagagtcttgctctgtcatccaggctggagtgcacgggcacgatctcggcttgctgcaacccctgcctcccagattcaa

SEQ ID NO: 116022 - DNA, 201 bp, Homo sapiens
gtctccactgtctatcattccatactctatgtctatgtgtacacattatttagctcccacttgtaagtgagaacatgcgtgtacccaatttcttttttccttcttttttttttttttaagacagagtcttgctctgtcatccaggctggagtgcacgggcacgatctcggcttgctgcaacccctgcctcccagattcaag

SEQ ID NO: 116023 - DNA, 201 bp, Homo sapiens
tccactgtctatcattccatactctatgtctatgtgtacacattatttagctcccacttgtaagtgagaacatgcgtgtacccaatttcttttttccttcttttttttttttttaagacagagtcttgctctgtcatccaggctggagtgcacgggcacgatctcggcttgctgcaacccctgcctcccagattcaagcaa

SEQ ID NO: 116024 - DNA, 201 bp, Homo sapiens
tgtctatgtgtacacattatttagctcccacttgtaagtgagaacatgcgtgtacccaatttcttttttccttcttttttttttttttaagacagagtctygctctgtcatccaggctggagtgcacgggcacgatctcggcttgctgcaacccctgcctcccagattcaagcaaacagattcaagcaattctcgtgcctc

SEQ ID NO: 116025 - DNA, 201 bp, Homo sapiens
tacacattatttagctcccacttgtaagtgagaacatgcgtgtacccaatttcttttttccttcttttttttttttttaagacagagtcttgctctgtcayccaggctggagtgcacgggcacgatctcggcttgctgcaacccctgcctcccagattcaagcaaacagattcaagcaattctcgtgcctcagcctcccaa

SEQ ID NO: 116026 - DNA, 201 bp, Homo sapiens
cctcagcctcccaagttgctaggattacaggcctgtgccaccgcaccaggctaatttttgtatttttagtagagacggggtttcaccatgttggcaaggcyggtctcaaactcctggtcttaagccatccacctgcctcagcctcccaaaatgctgggattataagcatgagcccctgcacccagctggtgtgtaccaaat

SEQ ID NO: 116027 - DNA, 201 bp, Homo sapiens
tcagcctcccaagttgctaggattacaggcctgtgccaccgcaccaggctaatttttgtatttttagtagagacggggtttcaccatgttggcaaggctgktctcaaactcctggtcttaagccatccacctgcctcagcctcccaaaatgctgggattataagcatgagcccctgcacccagctggtgtgtaccaaattt

SEQ ID NO: 116028 - DNA, 201 bp, Homo sapiens
ctgcataaaaacctacccaaaattggttataagtcaggcgagaattttggcaagggatgagaaggtgggggtaataatgtgagagaaaatgatattcactraatttcttatttcaagagtattaatttctttttcctttgaaggtgaaggctgaagtgttagacatggcagataatgcatttgatgatgaatacctgaaat

SEQ ID NO: 116029 - DNA, 201 bp, Homo sapiens
accttcctgtatgtgtttggaattgtatgtaggtagccactgaaagaatttgggccccttgggaggatggcagtggaagtccatgaagtaaagagcattcyttaaaaagcagatttgattgcataccttttagttatttgagattctgagaattctgataaaccccaaagcagaaagattccttatacccttggaagatgg

SEQ ID NO: 116030 - DNA, 201 bp, Homo sapiens
ctctgtatcctctgggattcaaccaactgtggatcgaaaatatttgtgggaaaaaataatacaaatttaaaaacccatacagtacaacaactacttgcatwtcatttacattgtattaggtattataagaaatctagagatagtataaggtatacaggaggatgtgtgtaggtatatgcaaatactgtgtatgctatttta

SEQ ID NO: 116031 - DNA, 201 bp, Homo sapiens
aaatgtggcaggaacaagacgatgaagtgccttgtgaatctctatgtggggaggagacactgcagaattttaactaagggaataacatgagatttatatayacacacacacacacacccctgtgtatacatctgccccttgtcaccagtctttaatcttattttacttgaacatttccttgtgtctacgtagtttatatat

SEQ ID NO: 116032 - DNA, 201 bp, Homo sapiens
ggtagagtgaataatggagtggtgagaaattggtctagaaatgtggcaggaacaagacgatgaagtgccttgtgaatctctatgtggggaggagacactgsagaattttaactaagggaataacatgagatttatatatacacacacacacacacccctgtgtatacatctgccccttgtcaccagtctttaatcttattt

SEQ ID NO: 116033 - DNA, 201 bp, Homo sapiens
ggcctacttgagggtggagggtgggaaggggaagaggatagaggataaaaaaaaaaataactgttgtgtactaggcttagtacttgggtgatgaagtaatsggtacaacaaacccctctgacacgagtttacctatataacaaacctacacatgtacccttgagcctaaaataaaagtttaaaagaaaaaaaattcattca

SEQ ID NO: 116034 - DNA, 201 bp, Homo sapiens
ctgagttaggtctgaaaaggagaattggctggaatttgttacaagaagaagttgggggaatattctaagcaagaggcaggagaaggtatgccaaatttgaraagctgcaagtactttagcaagggtggacggtagagtgaataatggagtggtgagaaattggtctagaaatgtggcaggaacaagacgatgaagtgcctt

SEQ ID NO: 116035 - DNA, 201 bp, Homo sapiens
acatatataccatgtaatactatgcagccataaaaaagaatgagattatgtcctctacaggaacatggatgaagctagaggccattatccttagcaaactmatgcgggaacagaaaaccaaatatcacatgttaccacttgtaagtggaagccaaatcatgagaacacatggacacaaaggggggaccaacaggcagtggg

SEQ ID NO: 116036 - DNA, 201 bp, Homo sapiens
tacaaccattatggaaaacaatatggaggttcctaaaaaaattaaaaatagaactacaatatgatccggcaatcccaatactgggtattatatccacaggaaatgaaatcagtatgctgaaaagatactctgtgcttccatgtttattgcagcatattcatagtaaccaagatatggaaaccacctaagtgtctgacaatg

SEQ ID NO: 116037 - DNA, 201 bp, Homo sapiens
gccccttcatgtaaaagagattttaaaaatccagtccagaacagttttatgctagttttgtttaacatggattttgtgatttttaagtattggaaatttcwctttcagaatcaagtccgtcgagagattaagtttactgtccaggcattgccatggataagtattcttactgttgcactgttcttgctggagataagaggt

SEQ ID NO: 116038 - DNA, 201 bp, Homo sapiens
acaaccattatggaaaacaatatggaggttcctaaaaaaattaaaaatagaactacaatatgatccggcaatcccaatactgggtattatatccacaggaaatgaaatcagtatgctgaaaagatactctgtgcttccatgtttattgcagcatattcatagtaaccaagatatggaaaccacctaagtgtctgacaatgg

SEQ ID NO: 116039 - DNA, 201 bp, Homo sapiens
caaccattatggaaaacaatatggaggttcctaaaaaaattaaaaatagaactacaatatgatccggcaatcccaatactgggtattatatccacaggaaatgaaatcagtatgctgaaaagatactctgtgcttccatgtttattgcagcatattcatagtaaccaagatatggaaaccacctaagtgtctgacaatggc

SEQ ID NO: 116040 - DNA, 201 bp, Homo sapiens; identical to SEQ ID NO: 19516

SEQ ID NO: 116041 - DNA, 201 bp, Homo sapiens
aaccattatggaaaacaatatggaggttcctaaaaaaattaaaaatagaactacaatatgatccggcaatcccaatactgggtattatatccacaggaaatgaaatcagtatgctgaaaagatactctgtgcttccatgtttattgcagcatattcatagtaaccaagatatggaaaccacctaagtgtctgacaatggct

SEQ ID NO: 116042 - DNA, 201 bp, Homo sapiens
actcacagaaatggacacaggtccatagtccctagtcacaatttggaactctggaaagccctgtaaaaccaaaaagttgttttctttttgctttaagttcrgctctcaaaatcatttgatgacaaattctcactccatctgaccgaggtgcccattgtgtcttggcacacctaccaggtattcctggtgttttttattgtt

SEQ ID NO: 116043 - DNA, 201 bp, Homo sapiens; identical to SEQ ID NO: 19523

SEQ ID NO: 116044 - DNA, 201 bp, Homo sapiens
cattcgttatgtaatgtaattaattagcatggggtggtactcagaatccctcatctgcatataaaacatcttgagagataacataacgtggtagcaaagaraaaggttgtggaatgtacatcccagctggttttttctgttattgttgcttgctactgaacaagttatttaaatactctgacctcagtttccctatctata

SEQ ID NO: 116045 - DNA, 201 bp, Homo sapiens
tccattcgttatgtaatgtaattaattagcatggggtggtactcagaatccctcatctgcatataaaacatcttgagagataacataacgtggtagcaaaragaaaggttgtggaatgtacatcccagctggttttttctgttattgttgcttgctactgaacaagttatttaaatactctgacctcagtttccctatcta

SEQ ID NO: 116046 - DNA, 201 bp, Homo sapiens
tcacacctatttagatggctatgatagaataggtgaaagatgacaagtgttggggagggtgtggagaaaaggaagcccttgtatactgttggtgggaatgytaattagtacaaccattatggaaaacaatatggaggttcctaaaaaaattaaaaatagaactacaatatgatccggcaatcccaatactgggtattatat

SEQ ID NO: 116047 - DNA, 201 bp, Homo sapiens
ttcctttaagagttcagttgtaaagatcctgttgtcaaaattacttaatgcttgaaatgatgttgataaatcagcaataataaatgtttaacattttagckgacaatgaggtttgaaaatgaacctgtagatattttggaagattttctatcactaatgaggtgatgatacctaatctctttaattataccatacatttaa

SEQ ID NO: 116048 - DNA, 201 bp, Homo sapiens
acaaatataaaagaactaaggaacaccacgtttaactaactaaaaggaagtattagaacagtttcttcccaagtagagaatatcaataaagtgataaaagttttttttttttttttttaaagaaccaaatggaaacgcaggtgttgaaaagtacagtgactgaaactgtcttgcttaacagcagatttgagccaacagagc

SEQ ID NO: 116049 - DNA, 201 bp, Homo sapiens
tggggaacatgtagattggctcatcagctgttaccaacctttagtgatatagcaatatccttttcaattattaaatgtttatgttatctgatattacgtartaccctgtccctgctacaccacctcccttggcagtcttcacccctataacttcaactactacctgtatactaaccaggctcgcttttgaacttcacattt

SEQ ID NO: 116050 - DNA, 201 bp, Homo sapiens
gtagaggcactgaacatttttaaaaattcaggagttgacgacttgaagtagtggtgaagaggctatagaacttggcagaagttcacgtactttgcaactakattgtgtgtatttgaatcctagctccagcatttatttactcttatgaccctatgcaagttacttaaaatttctgtgcccagcttcttcatctataaaata

SEQ ID NO: 116051 - DNA, 201 bp, Homo sapiens
tggtggtgcacacctgtagtcccagctactcaggagggtgaggcaggagaatcccttgaacctgggaggcagagattgcgccactgcactccagcctgggygacagagcgagactccgtctcaaaaaaaaaaaagaaaaaaaaagtcagttattcagaagaaggaacaaaaaattatatactagagtaatgaattggctgg

SEQ ID NO: 116052 - DNA, 201 bp, Homo sapiens
gaaagtttgtggcagctcggtacttttagaggaaaccctctggaagttatttgtctttatatcactatcattttttaaagtttctaatgattgatacctartaaataataactgatccttgatcatttacagagtgcttttccattcgttatgtaatgtaattaattagcatggggtggtactcagaatccctcatctgca

SEQ ID NO: 116053 - DNA, 201 bp, Homo sapiens
cgaagactggcggcgagggctgggccgggggacctcggggcctggagggctgcgccacctgggagtccgggcggaggggccttccgctcgcgctgggaggsatcgcggggccgatagggaggcctggacttgaaggagccgaccgtggacgggcttaaagaaaatgcagtgtttgatgttgggtgttgcagatctcttact

SEQ ID NO: 116054 - DNA, 201 bp, Homo sapiens
tgcactcagatggacatgtgaaaagtgaactctaatcccaggagctgagttttgattcttctgtttcccgttttcttttctaggattgtttgaacttgtcrttagtataatatctttcctctttttcactgacatgttcatctactggattcacagaggccttcatcatagactggtatataaggtaaagtcatttgtggt

SEQ ID NO: 116055 - DNA, 201 bp, Homo sapiens; identical to SEQ ID NO: 19515

SEQ ID NO: 116056 - DNA, 201 bp, Homo sapiens; identical to SEQ ID NO: 19514

SEQ ID NO: 116057 - DNA, 201 bp, Homo sapiens
gtacaaccattatggaaaacaatatggaggttcctaaaaaaattaaaaatagaactacaatatgatccggcaatcccaatactgggtattatatccacaggaaatgaaatcagtatgctgaaaagatactctgtgcttccatgtttattgcagcatattcatagtaaccaagatatggaaaccacctaagtgtctgacaat

SEQ ID NO: 116058 - DNA, 201 bp, Homo sapiens
ttgcaatcagacacaactggcatggaaaactagctttgttttcactagctgtaggaccttggacaagtcgctcaacttctctgagtctccatttcctcatrtgtaaaatagtaatgttgttgttagctacaaggacagaattttagatgatccactaagaggaaaagagatattctgcatatatcttctctagggggaaaa

SEQ ID NO: 116059 - DNA, 201 bp, Homo sapiens
tgtaaaatagtaatgttgttgttagctacaaggacagaattttagatgatccactaagaggaaaagagatattctgcatatatcttctctagggggaaaaygggtgagtccgtttaggagttattgttgatctggggtgactataggactgtggttgttaacacctaggaagacctccgtgtggatggccgtggctgtgag

SEQ ID NO: 116060 - DNA, 201 bp, Homo sapiens
cagaattttagatgatccactaagaggaaaagagatattctgcatatatcttctctagggggaaaatgggtgagtccgtttaggagttattgttgatctgkggtgactataggactgtggttgttaacacctaggaagacctccgtgtggatggccgtggctgtgaggactaccgatgtgtcgaagtggaaactgatgtgg

SEQ ID NO: 116061 - DNA, 201 bp, Homo sapiens
attgagtggtggcactgggatttaaatccagacctgtctgattgcaaagcccatacttgactctgaggccaccttcctgctgcagtgaaagtcatttcttycatttcctcagtagggatccagagatcaaggcaggagagaatctttgcttcctctacctccttttctttccccctttctctaaaagcttgtggggaaact

SEQ ID NO: 116062 - DNA, 201 bp, Homo sapiens
gggccctttatatatgaagaaatgccaatatttagcatattatgcctggataataaagtcagaactcacagttgcatattttagttataattcaggattarcaacagtgggacatatgtgtgtattacagggtaacatgtatgttatttgtgtgtgagggggcataaaaatgcccaaaagcagttagatatgtctttccct

SEQ ID NO: 116063 - DNA, 201 bp, Homo sapiens
ttggcccttagccatcctttcttatcactcttgttttgaaattgctttgtgttttataaccactccctggtgtttcctaagattttgttttgtcagcattmagaaggcagctttcaagatgttgtcatttgataattcagctgccttcatgctctcagcattgaaaggaagactatgcttgctggcccagaaggctcttcc

SEQ ID NO: 116064 - DNA, 201 bp, Homo sapiens
agggattccaactcctattctcaatcttaaaaagaagttatttttcctcctccaagtgggaattttactagtgcttctgcttccaggataccaagggttcragttttggaggatgaagaggggtcgaaggacattgaattgtcagatgacccttatgactgcatacgactaagtgtggagaatgtcccctgcattgtcact

SEQ ID NO: 116065 - DNA, 201 bp, Homo sapiens
gttttttttcctttttcaattcctgtctcccttagcttctggaatgtggtggaaatttgtttgatgccatttccattgctgtaaaggctgctctcttcaayacaaggtaagtcttcctagaaacagctctgcgaacctgtggagaaccagagcagacacttgtaatggaacactgaggaaatttctattgtagctcatatg

SEQ ID NO: 116066 - DNA, 201 bp, Homo sapiens
tgagttttaaaatggagcttttacttcagggtaactcctatttaagtgttcacacatggattaattcctttgctcgtgactgctgcagataaataaaaactgtggtagggcaccaggccctgagctaggccaggcaggtttggacaatttcctaagccttttataaggaaaactgggtttaaaaaaaaaagttgccctggg

SEQ ID NO: 116067 - DNA, 201 bp, Homo sapiens
gagttttaaaatggagcttttacttcagggtaactcctatttaagtgttcacacatggattaattcctttgctcgtgactgctgcagataaataaaaactgtggtagggcaccaggccctgagctaggccaggcaggtttggacaatttcctaagccttttataaggaaaactgggtttaaaaaaaaaagttgccctgggt

SEQ ID NO: 116068 - DNA, 201 bp, Homo sapiens
tgctgcagataaataaaaactgtggtagggcaccaggccctgagctaggccaggcaggtttggacaatttcctaagccttttataaggaaaactgggtttaaaaaaaaaagttgccctgggtacagtgattcatggactggttaggttggtttttttggtttgttttcctcctatcctttttttatatggaaaaaaattat

SEQ ID NO: 116069 - DNA, 201 bp, Homo sapiens
ttggccagcccagaaaggggctcccgcagtgcagcggcgggctgaagggctcctcaagtgctgccaaagtgggagcccaggcagaggaggtgccgagagcragcgagggctgtgagggctgccagcacgctgtcacctctcaatatcttccagggaggaaaggtgctgggggaaggatgggctgcacaggaccttccacct

SEQ ID NO: 116070 - DNA, 201 bp, Homo sapiens
agctggagtaaagacctgacagaaactggtttacaggaaatgcttatgatatgtattttgtgaatttttttccccttgaagaactttaaaaataagaatcwcaaagaaaagttcattcaccttgtgtatttgggtggttctgggagaggaaaaaagaggaggcactctgctgcaggtacacacccagggcgtctgtctgtc

SEQ ID NO: 116071 - DNA, 201 bp, Homo sapiens
tcaggaggctgaggtagaaggattgcttgagcctaggagtttgaggctgcagtgatcaccactgcactacagcctgggtgacagagtgagatcctgtctcaaaaaaaaaaaaaaaggaagaagcagcagtagtaaaccctgtgaccttgtggccagccagttcatcctgtgaaggaggtctctgctgagtccttttgtaaa

SEQ ID NO: 116072 - DNA, 201 bp, Homo sapiens
aaatggaaaacaaaaatttacaaatgaaaattagccaggcatggtgatgtgcctgtaattccagctacttcagaggctgaggcgggagaagcgcttgaacrcaggtggcggaggttgcagtgagctgtgccacactgcactccagcctgggcgacagagccatagtctaaaaaaaaagttacaagttacaaatgagcctgt

SEQ ID NO: 116073 - DNA, 201 bp, Homo sapiens
gattctttttctgaaaaaaactgcttttgaaaaatgtttacaaagaatgagaaggagctccatgagccaacgtggaatgatttcctgcatatatatagttragtgttaaaaaaaaaaaaaaaagtaagagtatctatagtattccacccttcatataagaaacaaggagatattaaaaaattcatgtatttgcttatttgt

SEQ ID NO: 116074 - DNA, 201 bp, Homo sapiens
attctttttctgaaaaaaactgcttttgaaaaatgtttacaaagaatgagaaggagctccatgagccaacgtggaatgatttcctgcatatatatagttaagtgttaaaaaaaaaaaaaaaagtaagagtatctatagtattccacccttcatataagaaacaaggagatattaaaaaattcatgtatttgcttatttgtg

SEQ ID NO: 116075 - DNA, 201 bp, Homo sapiens
tttctgaaaaaaactgcttttgaaaaatgtttacaaagaatgagaaggagctccatgagccaacgtggaatgatttcctgcatatatatagttaagtgttaaaaaaaaaaaaaaaagtaagagtatctatagtattccacccttcatataagaaacaaggagatattaaaaaattcatgtatttgcttatttgtgcagaga

SEQ ID NO: 116076 - DNA, 201 bp, Homo sapiens
gtctgctgacctaatcaaggggggttgtgggggtggatactctggactgggaggtaaggagcctaccagtaaccattaattgtcctcagtaagtacccccsatctcatttctatgtgtctaaataagactgttggactttcataatgtaaagagccactcgtaactccaaaagtgcaggcctttgtgacttgatgagggaa

SEQ ID NO: 116077 - DNA, 201 bp, Homo sapiens
gatgctactcttcaggaggaggcctgctcgctggccagcttgctggtgtcggtgaccagcaagggagttgtgacgtgcatgaggaaagtggggaagggcascctggacccagagagcatcttcgagatgatggaggtgaggccttagttctgaggaaggtgcagggacctggccggggtgcctgctgcttcctgctccctt

SEQ ID NO: 116078 - DNA, 201 bp, Homo sapiens
cttgttgagttttaggggtaggagggcttcagttgagatgattgtactctgtagctctgacaacatatacttcttggtgcaatttaagaattgcagatttrgagagaggtggcttattttgtctcttgttcagatcttgtttttgtgtgcatattctatatagtggtatgtagtatagattttgcaatcagacacaactgg

SEQ ID NO: 116079 - DNA, 201 bp, Homo sapiens
tggccgtggctgtgaggactaccgatgtgtcgaagtggaaactgatgtggtgtccaacactagtgggtccgccagggtcaagctggtgagtactgtgaccrtggttcaagcccaggtggagaaatgagtaggccctaaggaatgagctgctgacgctgtctggcttttggaatgcaaattgctcttggggaaatcgaagat

SEQ ID NO: 116080 - DNA, 201 bp, Homo sapiens
tgcagccccatgacgtgaactctccagttccatcctgtgtctgaagaagtttatgtcccctcccctccgccactagagaaagttaagacacaagtgtgtgrcacactgcatttgtccttttgtaatcctttgttcatcctcagtattcatgcacacttgtagttttgtaggatggcccagtgatggggactgatgtgcttt

SEQ ID NO: 116081 - DNA, 201 bp, Homo sapiens
cccagtgatggggactgatgtgcttttgattcagtcagttaaagtcaaagcaacagaagcctgttctattagggaaggcttttacaaaactgatgactacygggacattatctcagctcagaagcagccctcttcagtgagcaggggatggatacatggtgcgcaggaatatccaggggaatgtgtattgtgtccctgtca

SEQ ID NO: 116082 - DNA, 201 bp, Homo sapiens
gaaatgagtaggccctaaggaatgagctgctgacgctgtctggcttttggaatgcaaattgctcttggggaaatcgaagatccgagccaaactcagggagkgggggtctatccagatctgaaaagactgctcacctcctccaaagaccactttccaagtcttagcactgctcctaaaagagtcccccaggggtgtatgtcc

SEQ ID NO: 116083 - DNA, 201 bp, Homo sapiens
gtgtgtgtgccttacaagggggtgtgtgctctctcccgtcccttctccacagactggcaagcgtgtgggcaaggtactgcatgcctccttgcagagtgttstgcacaaggaagaaagcctggggcccaagagacagaaagttggattcctgggatgatttgcacatcaactgctcaactgtggattgttttttacttttcc

SEQ ID NO: 116084 - DNA, 201 bp, Homo sapiens
atgggtttaggactgtggtttaacctcttagagaggcttgggtttttaactaggggagtttaggagaacatttttcattcataaatgtttcagaatactcygcacttgtcacttccctttgggatcttaactatttttcaatgtgaacacttgtatttttcactaaaattgaaccagaatcttcaagcctgcattggtggt

SEQ ID NO: 116085 - DNA, 201 bp, Homo sapiens
actggtagggttgttgtgatcacatgggtaacagctgtgaaagtcaccaagagctttcctggcatccagaagcccttgatctagaggcacatcagtctccyctgctgagaaggaggggacaccactccatgctgttgacatctcttgagttttaaaatggagcttttacttcagggtaactcctatttaagtgttcacaca

SEQ ID NO: 116086 - DNA, 201 bp, Homo sapiens
agcatggaagagggagatcagggcctcagcctggttttcaactatgagattgagcagtcagtattcggttgctcagtctggccatgacagaattggagccrgccctcaggactcttgatttttagctctctgccctttctgtttacagacccatggcacagaaagccttatgcccagacactgcaggatgcagagttatgg

SEQ ID NO: 116087 - DNA, 201 bp, Homo sapiens
aagtgctgggaggcatgagccgctgcgcccagcctttggcttgttcttgagtgtgtcccttagcatggaccctcttgattcccccttgccatcagtgaaaygtccatgtggccttgtgtgtgaatttctcccttgtgcccctctgttggaaagccttggtggcctttgtcttggttggtctctgaattctagttttaaacc

SEQ ID NO: 116088 - DNA, 201 bp, Homo sapiens
ggaaggtgcagggacctggccggggtgcctgctgcttcctgctcccttggtcataccgtggggattctccccattcacagccttgaccccaaacttggagrtttgggaacagctggtttgagccaggggtctgctgacctaatcaaggggggttgtgggggtggatactctggactgggaggtaaggagcctaccagtaac

SEQ ID NO: 116089 - DNA, 201 bp, Homo sapiens
ggcgcgcaggagaagcccatcgagctctcccggcagtggcggcggccgcggctgcaggagcggccgccgcgcaggttgatgacgcgctgacgcggggcggkggggggtgggacgtgggggcgcggtccagaggaggggacgcgcgcagatgacgtgcggctcgtggggcagctcggcagcatggcgtccgtgacgctgagc

SEQ ID NO: 116090 - DNA, 201 bp, Homo sapiens; identical to SEQ ID NO: 19532

SEQ ID NO: 116091 - DNA, 201 bp, Homo sapiens
cacagcccctaagtcaacttagcattttctgcatctccacttggcattagctaaaactttccatgtcaagattcagctagtggccaagagatgcagtgccrggaacccttaaatggttacacagaatctcagctcatctctactgcaaaaattcaaaaagtgaggtgagaggatcgcttgatcctgggaggttgaggctgc

SEQ ID NO: 116092 - DNA, 201 bp, Homo sapiens
aggttgcagtgagtcaagatcgtgccactgcactccagcctgggtgacagagtgagactccatctcaaaaaaaaaaaaaaaaagagagagagaaagaaagaagggagggaaggaaagagagagaaagagaaagaagaaggaaggaagaaagaaagaaaggaaggaaggaaggaaggaaggattataccagtgctggggagg

SEQ ID NO: 116093 - DNA, 201 bp, Homo sapiens
ggttgcagtgagtcaagatcgtgccactgcactccagcctgggtgacagagtgagactccatctcaaaaaaaaaaaaaaaaagagagagagaaagaaagaagggagggaaggaaagagagagaaagagaaagaagaaggaaggaagaaagaaagaaaggaaggaaggaaggaaggaaggattataccagtgctggggagga

SEQ ID NO: 116094 - DNA, 201 bp, Homo sapiens
gttgcagtgagtcaagatcgtgccactgcactccagcctgggtgacagagtgagactccatctcaaaaaaaaaaaaaaaaagagagagagaaagaaagaagggagggaaggaaagagagagaaagagaaagaagaaggaaggaagaaagaaagaaaggaaggaaggaaggaaggaaggattataccagtgctggggaggac

SEQ ID NO: 116095 - DNA, 201 bp, Homo sapiens
gaggttgcagtgagtcaagatcgtgccactgcactccagcctgggtgacagagtgagactccatctcaaaaaaaaaaaaaaaaagagagagagaaagaaagaagggagggaaggaaagagagagaaagagaaagaagaaggaaggaagaaagaaagaaaggaaggaaggaaggaaggaaggattataccagtgctggggag

SEQ ID NO: 116096 - DNA, 201 bp, Homo sapiens; identical to SEQ ID NO: 19542

SEQ ID NO: 116097 - DNA, 201 bp, Homo sapiens; identical to SEQ ID NO: 19533

SEQ ID NO: 116098 - DNA, 201 bp, Homo sapiens
gcgcccggccttctgtaggggtttttgaatgggaagcttttgcccggggaaccaaagccctcatggatgaggtggtggagacactgccacttgctgtgtaraatggaacatggaggataaagtcagccaggtgagcactgggggtggtgccggtttagagctcctagaaggtaaagtccatcctggggttgatactcttgg

SEQ ID NO: 116099 - DNA, 201 bp, Homo sapiens; identical to SEQ ID NO: 19537

SEQ ID NO: 116100 - DNA, 201 bp, Homo sapiens
gatgagaataccaagactggccaagccactgtggcttctggcatacctgctggctggctgggcttggactgtggccctgaaagcagcaagaagtatgctgrggctgtcactcaggctaagcagattgtgtggaatggtcctgtggggttttttggggttttttgtttgtttgttttttgagatggagtctcactctgtcac

SEQ ID NO: 116101 - DNA, 201 bp, Homo sapiens; identical to SEQ ID NO: 19539

SEQ ID NO: 116102 - DNA, 201 bp, Homo sapiens; identical to SEQ ID NO: 19538

SEQ ID NO: 116103 - DNA, 201 bp, Homo sapiens; identical to SEQ ID NO: 19540

SEQ ID NO: 116104 - DNA, 201 bp, Homo sapiens; identical to SEQ ID NO: 19541

SEQ ID NO: 116105 - DNA, 201 bp, Homo sapiens
ctgattcaagtgattctcctgcctcagcctccccagtagctgggactactggtgcgtgccaccacgcccggctaatttttgtatttttagtagagaccggkgtttcaccatgttgaccaggctggtctcgaactactgacctcatgatctgcccacctcggcctcccaaagtgctgggattacaggcatgagccaccgcgc

SEQ ID NO: 116106 - DNA, 201 bp, Homo sapiens
tagtagagaccggtgtttcaccatgttgaccaggctggtctcgaactactgacctcatgatctgcccacctcggcctcccaaagtgctgggattacaggcrtgagccaccgcgcccggccttctgtaggggtttttgaatgggaagcttttgcccggggaaccaaagccctcatggatgaggtggtggagacactgccact

SEQ ID NO: 116107 - DNA, 201 bp, Homo sapiens
gaggagagcctgaagatccagctgtgtgagagggacactgggagctgggaagggcagatggatggatggatggatggatggatggatggatggatggatgratggaagtagcttggaagactgctgcagtgatgggattgggcagggttgctgcagaggccggcatcactcagtgggtgcatcccagaggtctgtggaagc

SEQ ID NO: 116108 - DNA, 201 bp, Homo sapiens
ctttgtttccagcctcctgggtcttgatgctgttgcgctggagataagtgttgcagtggtgagtagggaatggctgggacagagcccccccccccccccccgggtattgtcctgtgcccctaaggtcctgaccaccatctgtatgggaaggaattaacagcagacatcatcccactgccgcctctgagaaagcattctcct

SEQ ID NO: 116109 - DNA, 201 bp, Homo sapiens
agctgtctttagatgaggagagcctgaagatccagctgtgtgagagggacactgggagctgggaagggcagatggatggatggatggatggatggatggayggatggatggatgaatggaagtagcttggaagactgctgcagtgatgggattgggcagggttgctgcagaggccggcatcactcagtgggtgcatcccag

SEQ ID NO: 116110 - DNA, 201 bp, Homo sapiens
gcctccctcctcccctgcacaagggccagattctgaaatgatctgtctttattatgtcatcagaaaacaaaaaaatcccccgagtgtaaacaggagaaatstgctggttaagttactcatcattatcttattattaacaaaataaagcactatctatgtttacagtcataaaaaaagaaacagcctggagagaagtggggg

SEQ ID NO: 116111 - DNA, 201 bp, Homo sapiens
ggagcttagatgggcagttttatacccatgtgctcatttctccttcactctctgattgtggcagggaccagggttggggacatttccccattttacttagrggatgccgaagctcagagactgagcttggcccagcgttatggggcttgtaagaggcagagcttctgtttcccagcccagggctctttccacctgccccac

SEQ ID NO: 116112 - DNA, 201 bp, Homo sapiens
gccatgctgaggacagctgtctttagatgaggagagcctgaagatccagctgtgtgagagggacactgggagctgggaagggcagatggatggatggatgratggatggatggatggatggatggatgaatggaagtagcttggaagactgctgcagtgatgggattgggcagggttgctgcagaggccggcatcactcag

SEQ ID NO: 116113 - DNA, 201 bp, Homo sapiens
ggtctctaactcctggcctcaaatgatcctcccacctcagcctcctgagtagctaaggttataggcgtgagctaccatgcctggctatatgtgtgtgtgtrtatacatatatatttttttaacctttagagaagatacagaatatcaagctcatacttctgtgtaactacctccactgactcagaactctaagtaagcttt

SEQ ID NO: 116114 - DNA, 201 bp, Homo sapiens
tgaggagagcctgaagatccagctgtgtgagagggacactgggagctgggaagggcagatggatggatggatggatggatggatggatggatggatggatgaatggaagtagcttggaagactgctgcagtgatgggattgggcagggttgctgcagaggccggcatcactcagtgggtgcatcccagaggtctgtggaag

SEQ ID NO: 116115 - DNA, 201 bp, Homo sapiens
atgaggagagcctgaagatccagctgtgtgagagggacactgggagctgggaagggcagatggatggatggatggatggatggatggatggatggatggatgaatggaagtagcttggaagactgctgcagtgatgggattgggcagggttgctgcagaggccggcatcactcagtgggtgcatcccagaggtctgtggaa

SEQ ID NO: 116116 - DNA, 201 bp, Homo sapiens
acacctgtggaaatagatttagtagccttggtgttggatccatgccctaagctgcctaagccctaagctgacatggatgtgtccagagtggctgggagaaygtggggcggataactgggttgggccatcacaaggagatactggtgggtgggttggtgggagggcaaagtgtgaaaccagtaagctcaaacgcttagaaag

SEQ ID NO: 116117 - DNA, 201 bp, Homo sapiens
gatgaggagagcctgaagatccagctgtgtgagagggacactgggagctgggaagggcagatggatggatggatggatggatggatggatggatggatggatgaatggaagtagcttggaagactgctgcagtgatgggattgggcagggttgctgcagaggccggcatcactcagtgggtgcatcccagaggtctgtgga

SEQ ID NO: 116118 - DNA, 201 bp, Homo sapiens
atggggacccccccgaccctgtgctcatgagggaggaataaagaccagctgccatggacagcccctctccagggcctctgacgctggcaggaaggggagcmccatcaatcctcctgtcccaactccctcgtgggatcaggttgggaccaggggcgggggcaccaggacaaagccccttggaggccgaggcacattcccatg

SEQ ID NO: 116119 - DNA, 201 bp, Homo sapiens
ggcgtattaatacttagctttattcctgatccttagccatgctgaggacagctgtctttagatgaggagagcctgaagatccagctgtgtgagagggacaytgggagctgggaagggcagatggatggatggatggatggatggatggatggatggatggatgaatggaagtagcttggaagactgctgcagtgatgggat

SEQ ID NO: 116120 - DNA, 201 bp, Homo sapiens
agatgaggagagcctgaagatccagctgtgtgagagggacactgggagctgggaagggcagatggatggatggatggatggatggatggatggatggatggatgaatggaagtagcttggaagactgctgcagtgatgggattgggcagggttgctgcagaggccggcatcactcagtgggtgcatcccagaggtctgtgg

SEQ ID NO: 116121 - DNA, 201 bp, Homo sapiens
ggacagctgtctttagatgaggagagcctgaagatccagctgtgtgagagggacactgggagctgggaagggcagatggatggatggatggatggatggayggatggatggatggatgaatggaagtagcttggaagactgctgcagtgatgggattgggcagggttgctgcagaggccggcatcactcagtgggtgcatc

SEQ ID NO: 116122 - DNA, 201 bp, Homo sapiens
aatcgcttgaaccagggaggcagaggttgcagtgagccgagatcatgccactgtactccagcctgggcgacagagcgagactctgtctcaaaaaaaaaaaagacaaaaacaaacaaacaaaaatctgtgccaagaaagagagagaacgaacacatcctggtgttgctgatgagggcatcaccccagggcgtattaatactt

SEQ ID NO: 116123 - DNA, 201 bp, Homo sapiens
atgcctgtaatcccagcactttgggaggctaaggcgggtggatcatgaggtcaggagttcaagaccagcctggccaacatggcgaaaccccatctctactraaaatacaaaaattagctgggcatggtggtgtgcgcctgtaatcctagctactcaggaggctgaggcaggagaatcgcttgaaccagggaggcagaggtt

SEQ ID NO: 116124 - DNA, 201 bp, Homo sapiens
aagggacttgcaatcatcccatccttggccctctggcaagtgccctggtgggcctggagggtccctatctggccaggaggaaatgagtggggaaggcaatrtcccagcactgatgctctactcttcctgttccctgctgtaggttaatcgccttagaaatggcaaagattcatactatccacgccaacggcagcctgccca

SEQ ID NO: 116125 - DNA, 201 bp, Homo sapiens; identical to SEQ ID NO: 19543

SEQ ID NO: 116126 - DNA, 201 bp, Homo sapiens
tgactcctattacagtgctcttactactgccttctttcttaggatccgggtggcctcacctcgtcaaggtaggggcattcagcgtgggctctgtggaggamatgtgtcactcacaagcttggcctgggattcccttgcattaagccaattcctctgaggccccaggcctgaagctcctgcaggctgccaccaggggacagt

SEQ ID NO: 116127 - DNA, 201 bp, Homo sapiens
atgactcctattacagtgctcttactactgccttctttcttaggatccgggtggcctcacctcgtcaaggtaggggcattcagcgtgggctctgtggaggraatgtgtcactcacaagcttggcctgggattcccttgcattaagccaattcctctgaggccccaggcctgaagctcctgcaggctgccaccaggggacag

SEQ ID NO: 116128 - DNA, 201 bp, Homo sapiens
ggaatcctacagtagtaaaaagctgtgcacactggccatccacgccatggatatcccgccacccactggacccacctgggccctgggggccaccttcatcygaaagttctacacagagtttgatcggcgtaacaaccgcattggcttcgccttggcccgctgaggccctctgccacccaggcaggccctgccttcagccct

SEQ ID NO: 116129 - DNA, 201 bp, Homo sapiens
ggtgggcagggtggggttcagactgaagtcagggacagagcagcaggcatcttggatgtcagagccatgtttttcaggccgggacctgagcaaaccaaagraaccctcctaattcttcccttttgatggtctcagtccaagaaaaaaaaaaaaggaatcttaaaaggtagcttcttaaggagagccaggactgaaacacat

SEQ ID NO: 116130 - DNA, 201 bp, Homo sapiens
tttctcctgcagtcccttcagtcctagtcggtaagcctctgtctccaagcagagttggccctgctgactaaggagcttagatgggcagttttatacccatrtgctcatttctccttcactctctgattgtggcagggaccagggttggggacatttccccattttacttagaggatgccgaagctcagagactgagcttgg

SEQ ID NO: 116131 - DNA, 201 bp, Homo sapiens
ggtttaagggcttaggtctcggggaggaggctggggagtttctcctgcagtcccttcagtcctagtcggtaagcctctgtctccaagcagagttggccctsctgactaaggagcttagatgggcagttttatacccatgtgctcatttctccttcactctctgattgtggcagggaccagggttggggacatttccccatt

SEQ ID NO: 116132 - DNA, 201 bp, Homo sapiens
ctggtctgtttccaggcgtctcacttcttctgggctctctgggccctcatccagaaccagtactccaccatcgactttgatttcctcaggtgagtgtgggkgtgatggtgggatgtggagaaaagggagagccttggttgagcccagggtgtgggcaaaggacagcccaggcagaatgcccagagtccgctcccctgctct

SEQ ID NO: 116133 - DNA, 201 bp, Homo sapiens
gtaataggtaccatatttttactgtaccttttctatgtttagacatgtttagatacgtaaatacttagcattgtgttacagttacccacagtattcagtayagtaacatgctgtacaggtttgtagctcaggagcaacaggctataccatgcagcctaggtgtgtagtaggctatcccatctaggtttgtgtaagtacact

SEQ ID NO: 116134 - DNA, 201 bp, Homo sapiens
gctttgtagcggtgtttcagtcaatgactgaccgcatgtagatggtggtcctatgagattactgtatatttacggtaataggtaccatatttttactgtaycttttctatgtttagacatgtttagatacgtaaatacttagcattgtgttacagttacccacagtattcagtatagtaacatgctgtacaggtttgtagc

SEQ ID NO: 116135 - DNA, 201 bp, Homo sapiens
tgccaccaggggacagtggtgcccaggctggtggcatatttgggaattctggacttaggccagcctccctcctcccctgcacaagggccagattctgaaaygatctgtctttattatgtcatcagaaaacaaaaaaatcccccgagtgtaaacaggagaaatgtgctggttaagttactcatcattatcttattattaaca

SEQ ID NO: 116136 - DNA, 201 bp, Homo sapiens
tgaggccaagcacctgtctatcagccctcctttcactggctaccttttttgccactgcccagcctttctgcagatgtccctaaggtagaggtgttggaacrggagctggcctggctgaaggagcatctgtcccagctggagtcccctgtggtgttttgtcacaatgacctgctctgcaagaatatcatctatgacagcatc

SEQ ID NO: 116137 - DNA, 201 bp, Homo sapiens
cgcctcagtgccattttacagatgataaaagtgagggtctaagagattggccatttttccaaggccccctgcagtaagacagagggagtgatgaggctcarattcagggctcttgaggccaagcacctgtctatcagccctcctttcactggctaccttttttgccactgcccagcctttctgcagatgtccctaaggtag

SEQ ID NO: 116138 - DNA, 201 bp, Homo sapiens
atgcacaattatttcacgcttgtgaagaacgagatcaaccccaggtacaaagatctgggagggtccaaggctgccttaatatgatctcccttccccatccktttggctccagcccaccctgctaggaggtttaagggcttaggtctcggggaggaggctggggagtttctcctgcagtcccttcagtcctagtcggtaagc

SEQ ID NO: 116139 - DNA, 201 bp, Homo sapiens
ctagggagaccccaccacatctcttccagggtcctagctgtgtgtcttccacaatgactgcatccctccagtgctgtagagtcggaaacaggcatggggasattgccaggctgaccctctctggtctgtttccaggcgtctcacttcttctgggctctctgggccctcatccagaaccagtactccaccatcgactttgat

SEQ ID NO: 116140 - DNA, 201 bp, Homo sapiens
atcgagttgggacaaggtcttccccagaggagaaggggccaggcccacccagccgggatcagtctgtgagcaccaccaactccccatcgctcttctcttcrccctccgagtcctcgtcctcgctgtaccggtacatctcgccatcagccaccgagtgcctgtcatctgtgccctcaccctcctctctgaggctgcaggtgt

SEQ ID NO: 116141 - DNA, 201 bp, Homo sapiens
acacagagtttgatcggcgtaacaaccgcattggcttcgccttggcccgctgaggccctctgccacccaggcaggccctgccttcagccctggcccagagmtggaacactctctgagatgcccctctgcctgggcttatgccctcagatggagacattggatgtggagctcctgctggatgcgtgccctgacccctgcacc

SEQ ID NO: 116142 - DNA, 201 bp, Homo sapiens
cttaggcacgcctggtggccacctgcccactgtcggcatgctgcgtgtgcgggccgcaccccctgtcgctgcgtgctggtgcccctcgctgaccagaagckcgtacccagccagctctgaaacctgaggaggcgggaacttttaagagaccccccgcccccccgacccagccatacatgcatacattgctgccccttctcc

SEQ ID NO: 116143 - DNA, 201 bp, Homo sapiens
gagtgggggaggggagggcaggcaggtgaggggcagggctgggtgggagaggctgaagcccaggagtcttctcaacctcttccaagaatggggacccccccgaccctgtgctcatgagggaggaataaagaccagctgccatggacagcccctctccagggcctctgacgctggcaggaaggggagcaccatcaatcctcc

SEQ ID NO: 116144 - DNA, 201 bp, Homo sapiens
ctcctggcctcaaatgatcctcccacctcagcctcctgagtagctaaggttataggcgtgagctaccatgcctggctatatgtgtgtgtgtgtatacatakatatttttttaacctttagagaagatacagaatatcaagctcatacttctgtgtaactacctccactgactcagaactctaagtaagcttttcccaacag

SEQ ID NO: 116145 - DNA, 201 bp, Homo sapiens
ctcctgacctcaggtgattcgcccgcctctgcctcccaaagtgttgggattataggagtgaactactgcgcccggcatatatatatatatatatatatatwctttttttgagacagggtcccgctctgtcatctaggctggagcacagtgacacaatcatagctcactgcagcctgaaactcccaggctcaagcaatcctc

SEQ ID NO: 116146 - DNA, 201 bp, Homo sapiens
atgttggccaggctcatcttgaactcctgacctcaggtgattcgcccgcctctgcctcccaaagtgttgggattataggagtgaactactgcgcccggcatatatatatatatatatatatatactttttttgagacagggtcccgctctgtcatctaggctggagcacagtgacacaatcatagctcactgcagcctgaa

SEQ ID NO: 116147 - DNA, 201 bp, Homo sapiens
gtgacccttgggcagtttatttaccttctctgtgcccctataaaatggagatgatgatagtacctacctcatagtgttgatatgagacacacacacacacatatgtatgacacatactaagcattgtattggtgtttgctgctgtgattagactgcgaagctttccgggagtggggatggaagaggcaggataggggggtg

SEQ ID NO: 116148 - DNA, 201 bp, Homo sapiens
tgggaagagccatcttaggcagctcttaatacttgatgccctgttccctgctccccaagccccaccaagtctaggctctctcctttctagagaaatacttycaagaaatatcctagcttcctgtgttagcaattcccttgtttgaataagtagttctttctactgcctaacctcagcccttcatgctgcagttaaattcat

SEQ ID NO: 116149 - DNA, 201 bp, Homo sapiens
tgtgacccttgggcagtttatttaccttctctgtgcccctataaaatggagatgatgatagtacctacctcatagtgttgatatgagacacacacacacacatatgtatgacacatactaagcattgtattggtgtttgctgctgtgattagactgcgaagctttccgggagtggggatggaagaggcaggataggggggt

SEQ ID NO: 116150 - DNA, 201 bp, Homo sapiens
ctcattccttcacgctccctgctgggtttggctatcacccgtgttccaaatgttcatgggagtagggtgcagaagaggtttgaggtgaaggatgtgtcttycctcttccaagatgacaagataataattaactctatccccattttgagtatgtctctgtcacacacatgcatgactttatctgcatcatcccatgccatg

SEQ ID NO: 116151 - DNA, 201 bp, Homo sapiens
tttgctgcttactggctgtgtgacccttgggcagtttatttaccttctctgtgcccctataaaatggagatgatgatagtacctacctcatagtgttgatrtgagacacacacacacacatatgtatgacacatactaagcattgtattggtgtttgctgctgtgattagactgcgaagctttccgggagtggggatggaa

SEQ ID NO: 116152 - DNA, 201 bp, Homo sapiens
ctcaggttctaccagctccatagagaagctcatggaggccttgggagccaagaagaggctgtttgatgtaagaagccaaagagggaaggtgctgtgggtgkggggagcgccacctggtatcggctcacaaatcccccaggcaaatgaggccatctcaggccttcgcttgttcacctcacactctccacacatgtggctggt

SEQ ID NO: 116153 - DNA, 201 bp, Homo sapiens
tggggaaggcaatgtcccagcactgatgctctactcttcctgttccctgctgtaggttaatcgccttagaaatggcaaagattcatactatccacgccaasggcagcctgcccaagcccatcctctggcacaagatgcacaattatttcacgcttgtgaagaacgagatcaaccccaggtacaaagatctgggagggtcca

SEQ ID NO: 116154 - DNA, 201 bp, Homo sapiens
cgagggacatagtgctccaccagtggctgtgccagcggcatgcctgctgcccgagggtacaggacatctgaggagctcatctgcacctggccagcctgcgrgctgtggggcagagaaggggaacggtgatggatgcacacttgattcaaccccaaacccatctcccctccaggcctcctcagagcgtgcactcccactcca

SEQ ID NO: 116155 - DNA, 201 bp, Homo sapiens
ttttctacctctgtctctgtttgtcaaggaaaatgggccctatccagggtaagcatggttttaccagcccagggagatgctatctcttctgccagtctgarctccttcctggctccttgacgaagtgggaacccaggtttggggaactgtcaaggcctcctttcaaaggctcacaagaacctgtggctcctggggagcccc

SEQ ID NO: 116156 - DNA, 201 bp, Homo sapiens
aggcgtctcacttcttctgggctctctgggccctcatccagaaccagtactccaccatcgactttgatttcctcaggtgagtgtgggggtgatggtgggaygtggagaaaagggagagccttggttgagcccagggtgtgggcaaaggacagcccaggcagaatgcccagagtccgctcccctgctctgctgactcgcccc

SEQ ID NO: 116157 - DNA, 201 bp, Homo sapiens
atctctggggcacgaacaagtccaagtaccaacatagtcttaggttggctggctgtgcccatcgagttgggacaaggtcttccccagaggagaaggggccrggcccacccagccgggatcagtctgtgagcaccaccaactccccatcgctcttctcttcgccctccgagtcctcgtcctcgctgtaccggtacatctcgc

SEQ ID NO: 116158 - DNA, 201 bp, Homo sapiens; identical to SEQ ID NO: 19554

SEQ ID NO: 116159 - DNA, 201 bp, Homo sapiens; identical to SEQ ID NO: 19555

SEQ ID NO: 116160 - DNA, 201 bp, Homo sapiens
gaggtggtttatgcctgtaatcccagcattttgggaggccgagatgggaggataacttgagcccaggagtttgagagtagcttggggcaacatgacgagaccccccccccccgcccatttctacaagaaataaaacagtatctgggcgtggtggcacatgtgcctttggtcccagtagcttgagaggctgaggtgagggga

SEQ ID NO: 116161 - DNA, 201 bp, Homo sapiens
ctccacggccttcgatacttatgcaagcctggtgttgctcctgtcctcagagtcatcctgcgctcatgccttttcccgaatgggttcacctctggcagttrccgcttcagtcttggccttagcctcatcttgaagtgggtagctggcgggagagggtggctgcgccccctgctggccctgaggctgcagagttgggagcag

SEQ ID NO: 116162 - DNA, 201 bp, Homo sapiens
cttgccatcccactagcagctctgggctcctgcctggctgctgcaggctccgagctctttccccagggaattacgctaggcagccaggaggcttgcaggtrggcaccctgccaagtctagtctggtagcccctccacctaccatctggcagctgggacccctgccttaactctggacttgcaggcagggtgagtgatctgc

SEQ ID NO: 116163 - DNA, 201 bp, Homo sapiens
cttaggcacggctggtgggatactgcacagatacatatatatagttcacagactctctttcacagtctctgctatgttttttagagttatcaggggaatcttttttttttttaagctttatttttatatatttacttttttttttttagagacagggacttactgtgttgcccaggctgtagtgcagtggtacaattatag

SEQ ID NO: 116164 - DNA, 201 bp, Homo sapiens
ccttactgctcctcccaccaatgggctccctcacacccaggacaggactaagagggagctggcggagaatggaggtgtcctgcagctggtgggcccagagragaagatgggcctcccgggctcaggtacagtgggcagtgctagggtgaggtcccattgctgatgatgggaagtaggaatctgaagtcccgccatggggga

SEQ ID NO: 116165 - DNA, 201 bp, Homo sapiens
gaccccaatctgcctctctgagatgtggtgaaaaatgagtaccttctccacagtgatgattttccccacacggatatccagccgggatgggatgacctccwctggttctgaattcttggcagggcctttggccattggctctgggaatgagaagaaccccatgaggtagaattcttccctgtggcaggtcagctgctgatc

SEQ ID NO: 116166 - DNA, 201 bp, Homo sapiens; identical to SEQ ID NO: 19558

SEQ ID NO: 116167 - DNA, 201 bp, Homo sapiens
gatgttgagagtaagggccagagggagctgtgtgggcttctgtgcttgaggctgcttggctgggagatggtagcagagataaaaataagtccctatgctgyccctttacatcagttaattcatttgtcctttgtcctccaacagtcccacaagccacaggctattctcccattttagagatgaggaagctgagttcggaga

SEQ ID NO: 116168 - DNA, 201 bp, Homo sapiens
aatacaaaaattagccaggcatggtgggagggtacctataatcccagctgcttgagaggctgaggcaggataatcgcttgaacttgggaggcggaggttgyggtgagccaagatttcgctactgcactccagcctgagctggatttgtctcaaaaaaaagttccaatggggagccttgaggagacagccccacccagatct

SEQ ID NO: 116169 - DNA, 201 bp, Homo sapiens
agaagtgaagtcactttctcaaggccacacagcaaggagatggctgaatctggattaaaactcaagcctgtcacattacaaagcctgtgcccttaatcagwttaggaatagaagggtgtcatcttatgacaccctgcacgtcctctgggcagagaaagcctgcggccccggccccgggggatttggactatgtaaagagga

SEQ ID NO: 116170 - DNA, 201 bp, Homo sapiens
ctccagaactgtgggttatgtgtccagactggggaagggggcattgcttgtatatgcaatggccgtgtgcagtctggggaccatgactgcccttgccgtgrgacctgtgcccctgcagggcccagatgcctttacctcatttcccttcctcctccctcctactaggctctgccaaggctgagaatgacaaacatctaagtg

SEQ ID NO: 116171 - DNA, 201 bp, Homo sapiens
tccagccgctttgttgctgcctttgtctgggccctgcttgtgggttgggaggatggatccaggtgtctctgaccttgaagcctgcagccctcccgtgagayttgcctccctgccggggtacccacactttactgggtacagcctcccagtcaagatgtactagcctttcctagtgtgccggggaggatgggacgtgggcgg

SEQ ID NO: 116172 - DNA, 201 bp, Homo sapiens; identical to SEQ ID NO: 19560

SEQ ID NO: 116173 - DNA, 201 bp, Homo sapiens
cctgaaagtttgttatgctcattttcctttgtcttgcctctttgggaataaaatctacattctggtttctgcttctgcttctagaatgtgtaatggttggrgagcgggggccttcgtttgtccacctgtgcagtgaggggttgaggctaagggcctctgaacacccagcattctggctcatgggctggccagggacagttc

SEQ ID NO: 116174 - DNA, 201 bp, Homo sapiens; identical to SEQ ID NO: 19561

SEQ ID NO: 116175 - DNA, 201 bp, Homo sapiens; identical to SEQ ID NO: 19562

SEQ ID NO: 116176 - DNA, 201 bp, Homo sapiens
agccttgaggagacagccccacccagatctccttctaccctgatagtcctcccggacggggccggatgaagacaacatctccttctgcagtcagaccacaycctacgtggctgagagctccacagcagaggacgcgctctccatccgctcggagatgatccagcgcaaaggtggattcatgggcaggggagagggacagtg

SEQ ID NO: 116177 - DNA, 201 bp, Homo sapiens
tgatctgcccgcctcagccttccaaagtgctgggattacaggcatgagccacagcgcccggccccttttatttatttatttatttttttgagacagtctcrctgtgtcacccaggctggagtgcagtggtgtgatctcagctcactgcaacctctgactcccaggttcaagcgaatctcctgcctcagcctcccaagtagc

SEQ ID NO: 116178 - DNA, 201 bp, Homo sapiens; identical to SEQ ID NO: 19564

SEQ ID NO: 116179 - DNA, 201 bp, Homo sapiens; identical to SEQ ID NO: 19565

SEQ ID NO: 116180 - DNA, 201 bp, Homo sapiens
ggcatggtgggagggtacctataatcccagctgcttgagaggctgaggcaggataatcgcttgaacttgggaggcggaggttgcggtgagccaagatttcrctactgcactccagcctgagctggatttgtctcaaaaaaaagttccaatggggagccttgaggagacagccccacccagatctccttctaccctgatagt

SEQ ID NO: 116181 - DNA, 201 bp, Homo sapiens
ggctgagaatgacaaacatctaagtgtagggcctggccaggggccagggtctgcagtggatgagcaccaggacaacgtcttctttcccagtgggcgacccycccacctggaagagctgcacactcaggcccaggaggggctccgctccctacaacaccaaggtaagcttcctctccactcccctcccctctcctccctcca

SEQ ID NO: 116182 - DNA, 201 bp, Homo sapiens
gggccctttgtgtggtgtgggtactcagatttatgtacacttgggtgtagtttgtgtatatgggggctgtgtgtgttgagtgtttactccagaactgtggrttatgtgtccagactggggaagggggcattgcttgtatatgcaatggccgtgtgcagtctggggaccatgactgcccttgccgtgggacctgtgcccctg

SEQ ID NO: 116183 - DNA, 201 bp, Homo sapiens; identical to SEQ ID NO: 19567

SEQ ID NO: 116184 - DNA, 201 bp, Homo sapiens
tggggccttatatggggccctttgtgtggtgtgggtactcagatttatgtacacttgggtgtagtttgtgtatatgggggctgtgtgtgttgagtgtttaytccagaactgtgggttatgtgtccagactggggaagggggcattgcttgtatatgcaatggccgtgtgcagtctggggaccatgactgcccttgccgtgg

SEQ ID NO: 116185 - DNA, 201 bp, Homo sapiens
gcagtagcgggatctcagcttactgcaacctctgcctcccgggttcaagcgattctcctgcctcagcctcccgagtagctggaattacaggtgtgtaccascacgcccggctaatttttttgtacttttagtagagacagggtttcaccatgttggccaggctggtctcaaactcctgacctcaggtgatctgcctgcctt

SEQ ID NO: 116186 - DNA, 201 bp, Homo sapiens
gcatgccttgggactcgactcctctcatcttctggggtttcaggttgcacagcaccactaccagcctgtcctgcagttcctccttgggcacgaactgtacsaggccgctcaccacagtccgtggttcagcttcccccacgtcaatcttctctacatacaggctgtctgcatctgggtgctgccagggagagacgtcaggag

SEQ ID NO: 116187 - DNA, 201 bp, Homo sapiens
tcaatgaattcgggaaacacagtaccctgtgtcctcttgcacattcgtgatacacactaactataaagcagttaagagttagaaaatcttggcggccgggygcggtggctcacgcctgtaatcccagcactttgggaggtcgaggtgggcgggtcacgaggtcaggagatcgagaccatcctggctaacacggtgaatgaa

SEQ ID NO: 116188 - DNA, 201 bp, Homo sapiens
cagtaccctgtgtcctcttgcacattcgtgatacacactaactataaagcagttaagagttagaaaatcttggcggccgggtgcggtggctcacgcctgtmatcccagcactttgggaggtcgaggtgggcgggtcacgaggtcaggagatcgagaccatcctggctaacacggtgaatgaaaccccgtctctactaaaaa

SEQ ID NO: 116189 - DNA, 201 bp, Homo sapiens
ccagggacagttcagacaggagtagggagttgggggctgggttggcttcagagggttcggcctcctgagcaaggccacctggacagctgtgccctcccccytcattcctctcccctgagtcaggcctgcctggctgtgggcgcgccaccacccccgccccttgctctggaatggggcaggttgaggcctcaccccatggag

SEQ ID NO: 116190 - DNA, 201 bp, Homo sapiens
ggaaccactgaccccccttccttctaggggcaaagtcatccatggtgagggctctttgaagatcatctctccaacccctgccacatctcagatgaagaaamtgaggcccagaaaagcacagtacctggctcaggatcatgttgcaattaaggggaaatgaaagctccaacctaggaatcctcactccagggcagtgagatc

SEQ ID NO: 116191 - DNA, 201 bp, Homo sapiens
ttttgagaccagcctggccaaagtggtgaaaccctgtctctactagaaatacaaaaattagccaggcatggtgggagggtacctataatcccagctgcttragaggctgaggcaggataatcgcttgaacttgggaggcggaggttgcggtgagccaagatttcgctactgcactccagcctgagctggatttgtctcaaa

SEQ ID NO: 116192 - DNA, 201 bp, Homo sapiens
tgaaaaatgagtaccttctccacagtgatgattttccccacacggatatccagccgggatgggatgacctcctctggttctgaattcttggcagggcctttggccattggctctgggaatgagaagaaccccatgaggtagaattcttccctgtggcaggtcagctgctgatcccaccacgttaagacactgagattaggt

SEQ ID NO: 116193 - DNA, 201 bp, Homo sapiens
gggcttccagataagaggctggtccagctctctctgatcccagggatctgagataagcggaatctccttgctgccccaggccccgactcaaggaagggaascactgaccccccttccttctaggggcaaagtcatccatggtgagggctctttgaagatcatctctccaacccctgccacatctcagatgaagaaactgag

SEQ ID NO: 116194 - DNA, 201 bp, Homo sapiens
tgtgttgcccaggctgtagtgcagtggtacaattatagctcactgtaacctcgaactcctgggctcaagcccagcctcccaggaaatcttttatttatttwtttttttgagacggaatttttttgctctcttgcccaggctggaatgcaatggctgcgatctcggctcactgcaatctctgcctcccggattcaagcgatt

SEQ ID NO: 116195 - DNA, 201 bp, Homo sapiens
ttcccaggctagctgagcactcggtcctgggtaggttggggaatggtggtggatgtgaattggtaacccaggaagacccgccctcttccttttcccatgcrttgcactgtcaagctcacacacatggccctccttctggttggatttattgttcccattgtgcacatggggagactgagggaagggactgctggagtcaga

SEQ ID NO: 116196 - DNA, 201 bp, Homo sapiens
ctactagaaatacaaaaattagccaggcatggtgggagggtacctataatcccagctgcttgagaggctgaggcaggataatcgcttgaacttgggaggcrgaggttgcggtgagccaagatttcgctactgcactccagcctgagctggatttgtctcaaaaaaaagttccaatggggagccttgaggagacagccccac

SEQ ID NO: 116197 - DNA, 201 bp, Homo sapiens
aatggctgcgatctcggctcactgcaatctctgcctcccggattcaagcgattttcctgcctcagcctcccaagtagctgggattacaggcgcccgccacygcgccttgctaatttttgtatttttagtagagacgggctttcaccatattgaccaggctggtctcaaactcctgacctcgtgatccacccaccttggcct

SEQ ID NO: 116198 - DNA, 201 bp, Homo sapiens
atcctaagtcatcctcggcctcagcctctgctgtgacaagcccagatggggactggagcttgagtataagtactcaagtgccagtataagtactcatttcrttagtctgtgagaagaggaaggagagaatacaaggcagggagagaggtctggagtctgcaggccacagggagccagtgaaggtgtttgagcaagggagga

SEQ ID NO: 116199 - DNA, 201 bp, Homo sapiens
cgcccggcccggtcttgaactcttgacctcaggtgatctgcccacctcagcctcccaaagtgctaggattacaggtgtgagccacagtgctagcctggaattttttttttttttttttttgagacggagtctctctctgtcacccaggctggagtgcaatggtgcaatctcagctcactgcaacttctgcctcctgggttt

SEQ ID NO: 116200 - DNA, 201 bp, Homo sapiens
cctaggtgacttcttgggacacttactgttctggctagccatttcatggatgacgagactgaggtccaggaaagagggacttgtccaaggtcatttgcctrtggtggtttgaggtagtaatataatcaaaatgacaataagaaaagggttaactaagttcagttaggctctttgaggatttctcagaaggtaggtgttgat

SEQ ID NO: 116201 - DNA, 201 bp, Homo sapiens; identical to SEQ ID NO: 19559

SEQ ID NO: 116202 - DNA, 201 bp, Homo sapiens
gcacatagtaaacactaagtaaaagggtgctactattttgaacactgtaactacagaaatacagtcagttcgatacatttgtacacacaggcacgtgacastcacggggaggtggctggtgggctctagcggcagcagggctgcggatccgcgttctcccagctccattgcactcctcagagcggtagcctctgggctgag

SEQ ID NO: 116203 - DNA, 201 bp, Homo sapiens
agtggtgaaaccctgtctctactagaaatacaaaaattagccaggcatggtgggagggtacctataatcccagctgcttgagaggctgaggcaggataatygcttgaacttgggaggcggaggttgcggtgagccaagatttcgctactgcactccagcctgagctggatttgtctcaaaaaaaagttccaatggggagcc

SEQ ID NO: 116204 - DNA, 201 bp, Homo sapiens
tgggcctgggaccttgatgagctgatgttcctccacccccatcttggcaggagctcagcccttagtttccctggttagagggtagctgaagatgactgtcytgtgtggtgaaaggctccagttttagagccagccagagttcaggaagtcacttagctctctgagcctcgcaggcccatgatcaattactaggaaagtacc

SEQ ID NO: 116205 - DNA, 201 bp, Homo sapiens
ccacagctggacaaggctccctcctccattccccccatgtctcgtcccctttcttgtggggagacttgtgatcaactgcttgggtgacttgcttgtgggakccccgggcttccagataagaggctggtccagctctctctgatcccagggatctgagataagcggaatctccttgctgccccaggccccgactcaaggaag

SEQ ID NO: 116206 - DNA, 201 bp, Homo sapiens
cacattcgtgatacacactaactataaagcagttaagagttagaaaatcttggcggccgggtgcggtggctcacgcctgtaatcccagcactttgggaggycgaggtgggcgggtcacgaggtcaggagatcgagaccatcctggctaacacggtgaatgaaaccccgtctctactaaaaatacaaaaaattagccttgcc

SEQ ID NO: 116207 - DNA, 201 bp, Homo sapiens
tgtctctgaccttgaagcctgcagccctcccgtgagacttgcctccctgccggggtacccacactttactgggtacagcctcccagtcaagatgtactagsctttcctagtgtgccggggaggatgggacgtgggcggcccagaagagaggagagtagtaccactggaagttgggaagcctgctcagtgaaatcctgttta

SEQ ID NO: 116208 - DNA, 201 bp, Homo sapiens
tgaaccctgagggctagttcagggttgctcagtgctaggtgatgctggaggggatctgtgactcaaaagttcgagtgggaggctgggcgaggtggcttacwcctgtaaccccagcactttgggacgctgaggtgggcggatcacttgaggtcaggattttgagaccagcctggccaaagtggtgaaaccctgtctctacta

SEQ ID NO: 116209 - DNA, 201 bp, Homo sapiens
gaaaatcttggcggccgggtgcggtggctcacgcctgtaatcccagcactttgggaggtcgaggtgggcgggtcacgaggtcaggagatcgagaccatcckggctaacacggtgaatgaaaccccgtctctactaaaaatacaaaaaattagccttgcctgatggcgggtgcctgtagtcccagctacttgggaggctgag

SEQ ID NO: 116210 - DNA, 201 bp, Homo sapiens
tctcgggcactggtctggttggatctgttgggggcctcctagctctgacctgtgggattcctgcagactccctagggcaggagctctggctgttgacgaaygggctgagggaggaggaaaggcaggtttctgaactgaagaccctgctcctggagcatggccctttaaagggcttgttttgttcccgtccctttataaggt

SEQ ID NO: 116211 - DNA, 201 bp, Homo sapiens
tgttctggttggaaaggcagacactaaaactattgtctgaaggcaagttctgggatggtgaacacggggtgcaggggagccctggggtgtgatcagtactrtatcagaaggcagcactaatgtctgtggggccttcattaaggaagcactgagctgggggaagagggggtgcaaggaagacttcatggaggagcagcatgt

SEQ ID NO: 116212 - DNA, 201 bp, Homo sapiens
ttggcggccgggtgcggtggctcacgcctgtaatcccagcactttgggaggtcgaggtgggcgggtcacgaggtcaggagatcgagaccatcctggctaamacggtgaatgaaaccccgtctctactaaaaatacaaaaaattagccttgcctgatggcgggtgcctgtagtcccagctacttgggaggctgaggcaggag

SEQ ID NO: 116213 - DNA, 201 bp, Homo sapiens
agctgagaaggaagcaaggccaagggagtcttccctgccctcccctcaacaccttcaggggctccttccagctctctctccctcacccttctcttggaaaytccccttgggcctgaaaggggctctcaatcagtgtgctctccccatactgtaccctccctgcagtccctgaagcagggctcctagcaagggttgaactgt

SEQ ID NO: 116214 - DNA, 201 bp, Homo sapiens
gggtcacgaggtcaggagatcgagaccatcctggctaacacggtgaatgaaaccccgtctctactaaaaatacaaaaaattagccttgcctgatggcgggygcctgtagtcccagctacttgggaggctgaggcaggagaatggcgtgaacccaggaggtggagcttgcagtgagccgagattgcaccactgcactccagc

SEQ ID NO: 116215 - DNA, 201 bp, Homo sapiens
gtagtcccagctacttgggaggctgaggcaggagaatggcgtgaacccaggaggtggagcttgcagtgagccgagattgcaccactgcactccagcctggkcgacagtgtgagactccatctcaaaaaaaaaataaaaaaagagttagaaaatcttaactgttggaagcctggtgtaactaactagtgccagctgtgtgac

SEQ ID NO: 116216 - DNA, 201 bp, Homo sapiens; identical to SEQ ID NO: 19568

SEQ ID NO: 116217 - DNA, 201 bp, Homo sapiens
gaatggcgtgaacccaggaggtggagcttgcagtgagccgagattgcaccactgcactccagcctggtcgacagtgtgagactccatctcaaaaaaaaaawaaaaaaagagttagaaaatcttaactgttggaagcctggtgtaactaactagtgccagctgtgtgaccttgggaaaacccttaacctctctgaacttctg

SEQ ID NO: 116218 - DNA, 201 bp, Homo sapiens
ggccctgtgtgggtctgtgcggtcgctcatgggtgaggaaggcagggactagggtggcttaggtgtgctttatgggtgtgtgtgtgtgttttttttttttktttgtttgagaccgagtgtcactctgtcacccaggctggagtgcaatggcgtggtcttggctcactgcaaccttcgcctcctgggttcaagcgattctcc

SEQ ID NO: 116219 - DNA, 201 bp, Homo sapiens; identical to SEQ ID NO: 19569

SEQ ID NO: 116220 - DNA, 201 bp, Homo sapiens
tttcagaggggagatcaggtttgtagctggcacagtgcacagaacgtggcttttggattcaagttgttctgagtgagaatactgctttgccatttacaccrtggaggccagagagggcagctttataatgcttgctccctctggtttccatttcctcatctataaaatgggaataaaagtgcctacttcttaggattattg

SEQ ID NO: 116221 - DNA, 201 bp, Homo sapiens
ttagtgcagtgcctggcacagagaggccatagttcacgcttatgcaggggatgaagaagaatgagatgccacccacagaggccctgttggttttgctctgsgtgccctgtagcctgagtttgcagtgcatccccctctgatgctgtgggccaggaaggctggccccaaccagctgtggctgggagcagctggtggtgtgag

SEQ ID NO: 116222 - DNA, 201 bp, Homo sapiens
tcagatgagaggatgatagtccaggagacttggggtttccatggcaactgatgtaaacgatgaggaagagcaggtaaggtgcgaggacccccaaaagtgcygtggaatgtggtgattgtaaggccaggagtgggggatgggggaggtgggtcttgccagcagcctgcaggggctctggggcccctgcacactcctgcctct

SEQ ID NO: 116223 - DNA, 201 bp, Homo sapiens
ggcaaggccagcgatgcccttgagtaggggatgtgccccaggagggctggtcttgggcaagagcccagacagcacacccctcttcccaggagggcaggcayggtcgtggactcaaaggcaggagggctgggagatgaggtggtgggaggagggaggttgaaggctctgagtgacaagggggaagagtggggaggcttctgg

SEQ ID NO: 116224 - DNA, 201 bp, Homo sapiens
gcctgcctgccatggggtgactgggctgcgtgccatggggtgactcacctgcccctgctgcctcgtgcccgttgggcagatgtgtctccggtttgacctgycccaggaagcctgggcctggctcctcccccgcagagcttccttagaggatagaggatggattggggcaataagagataaaggccatagcttcctggagtc

SEQ ID NO: 116225 - DNA, 201 bp, Homo sapiens
ggcatgttcttgttctcactcccctttgatctctctcccctcttccttatccctgttcacagaagtggaaactgaggctcagaaaggtgaattggcttggmcagggctatgcagccagggagcagcagggctggggccttgagagaggaaggaggagaagccaggcttggtcagggcccctctgcagagcttcctgcagga

SEQ ID NO: 116226 - DNA, 201 bp, Homo sapiens
cacgctggggcaatgacctattttcacagaagcaaatctgagcctctcatctgagaagtctggtgaaatgcgagagacacggtggggaaataggaccttgmggggcccagaggtggggtgggtaagattcagggggatcctgtgggaacaggtgaagcaaggtgtcaggaaggggcagggctcaccccaaggataaaaaat

SEQ ID NO: 116227 - DNA, 201 bp, Homo sapiens
agtttaattttaatttaaacaactgcatgtggccagtggctactgtggtggacagcaaagctctaagggactgctgagctctggttctggctgaaggtggsggggagggcctaggctggagcgtgtgtgtctgtggtctggcctccatctgccggaagcccctgactgtgggtcatcctgtggggattccctagcttcgtt

SEQ ID NO: 116228 - DNA, 201 bp, Homo sapiens
ctcagccaggctaatcaggtcgcagggtgaaatttaaagggaggaggaggcaccagtccatcagaactcacacttcttcctggcaaagaagtgcccaggaygggagctggggagccagggctgatctaggaggctgggagccaggtgacaggatggccccaaagagagttgtgcagctgtccctgaagatgcctacccatg

SEQ ID NO: 116229 - DNA, 201 bp, Homo sapiens
caaactgcaggataggacagttggcagggaagcattcctctgtgactgctgtatttctcttctccctagagaccaggtggtacatttctgagctgttgacmtaagatttggccggtggagccgcagtgggccgaggcttctgggaagcaagttgcagccacgcaaaaggaaaagctttctaattacctgaactgtcaaagc

SEQ ID NO: 116230 - DNA, 201 bp, Homo sapiens
gaccaggctcagccaggctaatcaggtcgcagggtgaaatttaaagggaggaggaggcaccagtccatcagaactcacacttcttcctggcaaagaagtgyccaggacgggagctggggagccagggctgatctaggaggctgggagccaggtgacaggatggccccaaagagagttgtgcagctgtccctgaagatgcct

SEQ ID NO: 116231 - DNA, 201 bp, Homo sapiens
gccctgagtgaggagggtgtggagccaggaggtggggaccaggctcagccaggctaatcaggtcgcagggtgaaatttaaagggaggaggaggcaccagtycatcagaactcacacttcttcctggcaaagaagtgcccaggacgggagctggggagccagggctgatctaggaggctgggagccaggtgacaggatggcc

SEQ ID NO: 116232 - DNA, 201 bp, Homo sapiens
agggtttcaccatgttggccaggctggtctcaaactcctgactgcaggtgatctgcccaccttggcctcccaaagtgctgggattacaggcgtgagccacsacacccagccctgaattgggccttgaaggaagaaatcagaatgccctggtgggcaaaatgcgaagggcctccagggagggagaacagcacagacaaagtt

SEQ ID NO: 116233 - DNA, 201 bp, Homo sapiens
agcaaagctctaagggactgctgagctctggttctggctgaaggtgggggggagggcctaggctggagcgtgtgtgtctgtggtctggcctccatctgccrgaagcccctgactgtgggtcatcctgtggggattccctagcttcgttccaggctctgctgaaggatcccagcttgtcttcactggagggtcccataggga

SEQ ID NO: 116234 - DNA, 201 bp, Homo sapiens
acaggtggccagataaaaagcatggattttggcaccagccagatccaagtccaaatgtcagtctcatcattctctggctgtatgattatgtgacttaaccygtctgagccacagcttcagagggaggctgtggcatttagtgatgatatatctggcacataaaagatgctcaataaatgctaacaatgatcagggctgcca

SEQ ID NO: 116235 - DNA, 201 bp, Homo sapiens
gtcttggcttctccacgctctacgccccacgtttaaagcgttctttgagcaattccgccccctggtggcagatctgatgatgactcaggcaaggcctgatrcctctcaggcacaaggtgactgcccgccctctccctcctggccaggtccggtgggcggcagatggccagggcagtgcggaacttcctgaaggcacagcag

SEQ ID NO: 116236 - DNA, 201 bp, Homo sapiens
ttggcctcatgagaaaatgttagccattttacagataagaaactgaggcttagagaggttgagtcattgagctaaggccatgcagcttgcacgtggcagarccagagaggaacccaagctgctctaaccacaaagggggctctgtcctggattcctgggcttgcagcccctcacccctgtctcctcgctagcccctgactc

SEQ ID NO: 116237 - DNA, 201 bp, Homo sapiens
agtttgggaccagcctggccaacatggtgaaacctcgtctctgctaaaaatactaaaattagctgggcctgatggtgcacgcccatggtcccagctacttsggaggctgaggtaggagaattgcttgaatccaggaggcagaggttgcgctgagctaagatcaagccactgcactccagcctaggtgacagagcaatactc

SEQ ID NO: 116238 - DNA, 201 bp, Homo sapiens
ttgccgatggtgcctattccaattacacatttcagaacttgttggggtggggcggaaccacacatgggctcaggggctactggacccactgtaagatgaasctgagctgaaactccatggatcacctggcctccatgagcccctgctctgccaggtgggccgcagtgttgtttagggtctcctagaccagttcagggccgg

SEQ ID NO: 116239 - DNA, 201 bp, Homo sapiens
ccaaagtgctgggattacaggcgtgagccaccacacccagccctgaattgggccttgaaggaagaaatcagaatgccctggtgggcaaaatgcgaagggcstccagggagggagaacagcacagacaaagttctggaggtgggaacctgcttggaggactgggagagttgcagacagtgctttgtggctggggtgcagacc

SEQ ID NO: 116240 - DNA, 201 bp, Homo sapiens
agcagaagaaatgaggaggtcaaaggagaatgagtttggggatgggtgatattcacgtctgtgtgctgggtgcaagggaggggagaaggggcaaggccagygatgcccttgagtaggggatgtgccccaggagggctggtcttgggcaagagcccagacagcacacccctcttcccaggagggcaggcacggtcgtggact

SEQ ID NO: 116241 - DNA, 201 bp, Homo sapiens
actggctagagtgggagtgtttacaccacagacattggtcaaggctacaaatcagggcttcattcatcgttttatcaaatgcctagagttcagaaagtgakggagacaggttaacaatgtcaactcaatttaaaagtgtattgcgtctatagccatgacattgtggttagtaccaaaaattgatgaaatgttcctccagga

SEQ ID NO: 116242 - DNA, 201 bp, Homo sapiens
taatttttaagaaggttatgaaccccttgttaaacacagccactatttaaaattaaatatacacacaattaagcaaattatattaaaaacaaaggcagtartactgaaaactcatcactgcttaattattttactgcattttaccattgtccagatatagtggaaatagtgatgtcacgaggtgctattatgcagctcttt

SEQ ID NO: 116243 - DNA, 201 bp, Homo sapiens
gcctggagggatcaggtgacaatgaaccctgtaggtgagtgcacccgccagggccagcgtgctggagggggacccacctgacctgccccgggcttggcctrtaggagccaggggattttttcactgatttctgctctcatctttatcattttcattttctactttctttgtgtttagtttgctgttctttttctggcttga

SEQ ID NO: 116244 - DNA, 201 bp, Homo sapiens
tatcattatttcctctttatggatgaggaaatcaaggctcagggaggttaagtaacttgccccaggccatgcagcaagttaatagtggcaccaagatgcamaactaggggggctgtccccacagccctgcactcagcctcgaggctgcactacccctcgaggtgagtccacagtctctgcctgtttcccggctcccactct

SEQ ID NO: 116245 - DNA, 201 bp, Homo sapiens
gcctctctttaggtgccaaatgttttctgaacacctactacatgccaggcactgtgctacctcctgtgcacaagatggcaacagcagcacccaccgttacktattgagttccaggcactgtctcctagctttccatggcttaccttatgtattccatggggtactcctacagataagtgctatcattatttcctctttatg

SEQ ID NO: 116246 - DNA, 201 bp, Homo sapiens
ttgctataatatgacaattttctcatagatgaaagaaagagtgggagaagtttttttttgttttttgtttttgttttttaatgtacaaaattcctggtagycctggctgttattcaacctcatttccaaccctgaatctttttctcctctgctttcataggccctaactcttgagcaaactccagtcctagagccctttct

SEQ ID NO: 116247 - DNA, 201 bp, Homo sapiens
tccagtcctagagccctttctaggctgtggctatggccaacccattccccagggcctgtctcattctggcaaggaaggggtgccagaagcacagcacttayagccagacagcctccctcttgccttttctcttttgcaggttaacatggtggtcttaggcaagtacctgggcatccccaagccctacgggcccatcatcaa

SEQ ID NO: 116248 - DNA, 201 bp, Homo sapiens
ttaatatgaagagagaacctggagcaagacggctgggacttatgtttgctgtgagatgatggtgatgacgctgattatggtgatgaacagtgatgatggcratgatggcggtgatggtggcaatgatgacatctgagggggcatcagtagcatttgcttctcctgttgacccaaatctttcctgtgctggctgtgtccaga

SEQ ID NO: 116249 - DNA, 201 bp, Homo sapiens
tgggcaccactgcccgcgcttatgcctcaccttgcacctgtcacctgatgtgatctggagactttatccatcttccccatgcgcctatgagcctctcaagrtcatgaactggaacccctgtaccccagaggctgcacagggcccagcacaaactgaaggccactcacacctcagccacagtcagaggccattagcatgctc

SEQ ID NO: 116250 - DNA, 201 bp, Homo sapiens
cacctctgcccttgtctgacctgatgggatgagtcagggcaaagccatctggaaccagctcaaccctgtgccccgagtaagctctggattgggacattttytgggtcagggcaccctgacacgctcatcctcacacttccagggtatttgtgcttggacccaaatcccttatccaatagtcaggaatgatattgataataa

SEQ ID NO: 116251 - DNA, 201 bp, Homo sapiens
gggtggggccaggggcttttaaacctcatcctaaggggcctcaggggcagtgttggggttggcggccacagctaagtccaacaccagcatgtcgctgcagmgaatcgtgcgtgtgtccctggagcatcccaccagcgcggtgtgtgtggctggcgtggagaccctcgtggacatttatgggtaagagtcagaggcctagtg

SEQ ID NO: 116252 - DNA, 201 bp, Homo sapiens
agggcctccagggagggagaacagcacagacaaagttctggaggtgggaacctgcttggaggactgggagagttgcagacagtgctttgtggctggggtgyagaccgagtgggagaggggagtcccaagaactgtcaggcccctcctgagtcctgagtctggggtctcctgtgtctaaggggaccctgtccactgagccat

SEQ ID NO: 116253 - DNA, 201 bp, Homo sapiens
aagtgtttcaggcttctgtctctgggtctcagctgcctgctgtgttccccaccacagcccctcgcttgctgctccccagtgggggtcctgtgtcaggcggkgcaggtggggtgggcggtggcctcgctgactctcattaacagggcagctgacaaggagatgagcagatgtgatctcaactgggaagggcctgagcgatgc

SEQ ID NO: 116254 - DNA, 201 bp, Homo sapiens
cctggctgcccatctatcccttcgcccctccaggttgactgtttgagggtcttagtggattccttggagtggaagacccatggccagcttcctccatcacygaggggcttggattcctcgggaccttctgtccactctggaaccacagggattgagacccagcagtccttaggaccacaaggatctagaaacttcactgcc

SEQ ID NO: 116255 - DNA, 201 bp, Homo sapiens
ctagagagaaggtccggagtcccctttgaacaccaagggtcaccccttatgacctcttgccatcaacctgggctgagatttcctctaagaaacccccatascacagcatgggggagaattcccatccccagattagggccccaagccaggtccgcaaccaagggaaggagaggtgcccccagagttaaactcaagtgtccc

SEQ ID NO: 116256 - DNA, 201 bp, Homo sapiens
tgggaggctgaggcaggagaatcgcttgaacccaggaggcagaggttgcagtgagctgagatcatgcctttgcactccagcctgggtgacagagcacgackttgtctcaaaaaataaaaaataaataaaataaaatgcctggtagacacccagggagaaactcagaaagcaagaagtctgagagttctaaccatattgatg

SEQ ID NO: 116257 - DNA, 201 bp, Homo sapiens
aatgggtcaggaaagcctgggaggccacacaggctctggtgacagcctctgagcaggagggatgcaacgggacttctattttaaaaggtccctctggctgstatgttgaagctggactgtggggagagaggggaagcaggtcactggcctatgataaaaatccacatggaagcaactggtggcttggacaggatgtgagct

SEQ ID NO: 116258 - DNA, 201 bp, Homo sapiens
ggttgaggcaggagaatcactcaaacccaggaggcagaggttgcagtgaaccaagatcatgccactgcactccagcctgggtgagtgaaccaagatcatgscactgcactccagcctgggtgacagtgcaagacttcatctcaaaaaaaaaaaaaaagaaaaagaaaaaattggccgggcccagtggctcatgcctataat

SEQ ID NO: 116259 - DNA, 201 bp, Homo sapiens
tgcaggaagccacatttcccccaaggcctgacccctctaggcactgcccactcatctgttactcacaggggagggagacactgagaccaggagcccagcamcccagagagaggtgaacagaggtgtgagctattgagcaagtttggggtggggagggagcagatctagactacaggaagctaggctgggcttggagggtct

SEQ ID NO: 116260 - DNA, 201 bp, Homo sapiens
aactcttgagcaaactccagtcctagagccctttctaggctgtggctatggccaacccattccccagggcctgtctcattctggcaaggaaggggtgccaraagcacagcacttacagccagacagcctccctcttgccttttctcttttgcaggttaacatggtggtcttaggcaagtacctgggcatccccaagcccta

SEQ ID NO: 116261 - DNA, 201 bp, Homo sapiens
tgccaccacgcctggctattttaaaaaattttttgtagagatggggtctccctatgttacccaggctggtctcaagtgatcctcccgccttggcctcccaragtgctgggattatagacatgagccaccatacctgtctggtcattactttttacgaattaataatattccatcttatgaatatattacattttgcatatc

SEQ ID NO: 116262 - DNA, 201 bp, Homo sapiens
gggctttcatgactggagccaatgaattggcaccctgggctggaggggtggggccaggggcttttaaacctcatcctaaggggcctcaggggcagtgttgrggttggcggccacagctaagtccaacaccagcatgtcgctgcagagaatcgtgcgtgtgtccctggagcatcccaccagcgcggtgtgtgtggctggcgt

SEQ ID NO: 116263 - DNA, 201 bp, Homo sapiens
ctttctccctcttgggactcagcccctgtacctgctggtctggttaatgtatgtggggcccagggccagctgcccacctggcctctggtgatcctctgctygagaagcccttcctgcttctctgttgggcagtggtctgtgaccccggtggcagggctggggaggaaaaccaggagccatggaaaccaaaccttgactcta

SEQ ID NO: 116264 - DNA, 201 bp, Homo sapiens
atgtatgtggggcccagggccagctgcccacctggcctctggtgatcctctgctcgagaagcccttcctgcttctctgttgggcagtggtctgtgaccccrgtggcagggctggggaggaaaaccaggagccatggaaaccaaaccttgactctaagttgctgctgggagccccgctgtgggggctggttctctcgggtct

SEQ ID NO: 116265 - DNA, 201 bp, Homo sapiens
gccatggaaaccaaaccttgactctaagttgctgctgggagccccgctgtgggggctggttctctcgggtctaggtggccagcagagaccccattgtctcytgccctgttaacataggcttgccagatttagcaaataaaaatacaggatgcctggttaagtttgaatttcagataaaaaacaaaaagcttttttagtata

SEQ ID NO: 116266 - DNA, 201 bp, Homo sapiens
agataaaaaacaaaaagcttttttagtatattgcatgggagatatttctactaaaataatctgctgtttagctgaagctgaagtcttttttttctttttctttttttttttttttttttttgagatggagtctcgctctgtcacccaggctggagtgcagtggcgagatctttgctcactgcaacctccacctcccgggtt

SEQ ID NO: 116267 - DNA, 201 bp, Homo sapiens
agggaatgactgcagcatccaccctccctgtgcccccatcacaaacacaattccccagtctgagaagtgatcttaacttcctgcgtggaatcctggaatcwaagactcggcaacctaggatctcagatttaaaagatcagagaatcttaggagaaaagtcacacgcttgtggcctgcgatcttttggcctacctcatttta

SEQ ID NO: 116268 - DNA, 201 bp, Homo sapiens
aattctgtggaactccctgctcccctgggtcctagctgccacttgccattttgggactggctgggaatctctccccctccctctggccccccaggccctcygctttccgcctccttaccccttcctggcatttcctggatcctagtcttggaatgtctcctcactctgagccttcttctcttcccttctcagctcccatcc

SEQ ID NO: 116269 - DNA, 201 bp, Homo sapiens
gtctgagaagtgatcttaacttcctgcgtggaatcctggaatcaaagactcggcaacctaggatctcagatttaaaagatcagagaatcttaggagaaaastcacacgcttgtggcctgcgatcttttggcctacctcattttatgagcttaatgagtcaccaacataaacagatatcgggagggcctcccataaaaaggc

SEQ ID NO: 116270 - DNA, 201 bp, Homo sapiens
gtctgctcccacaagcctcacgagccagtgagccaagccaggaaccttctctcaagggtgcaggggtctgctctgggaactcccaggcacagagcaaggaycccacatgggaaagtgaggggtctcctgtgtggacgtgtccccattccattggctgttggactgaaaaccaggaatgaggcctttggtggatagatagga

SEQ ID NO: 116271 - DNA, 201 bp, Homo sapiens
cctgagccaccgcgcccggccaatttttttccattttaccttgaggaattccacaatccacagaatgcggacatgctttggggagaggatcggtgactcaygacttggactctaaattcagggccctatctctcagggacattctggtccccagcctctgtttatctcttctgggaagaccagtgagtgaaagctgtccct

SEQ ID NO: 116272 - DNA, 201 bp, Homo sapiens
gacacagccacatcatgtgtgattctagactcctgagaaaatgcctgagcctgctgaggggtctgggacatcagccattgccctccctcaacctccagcarccccagccagccccggggagaggatgcaggggaaagctaaagccagggttgcagccaggggactgggggttggagctgccccctcctactgtctggtgcc

SEQ ID NO: 116273 - DNA, 201 bp, Homo sapiens
ccttttggagagaatgcacccttagtgagcctgcacggctcttgttcttaagagctagggcctctctttaggtgccaaatgttttctgaacacctactacrtgccaggcactgtgctacctcctgtgcacaagatggcaacagcagcacccaccgttacgtattgagttccaggcactgtctcctagctttccatggctta

SEQ ID NO: 116274 - DNA, 201 bp, Homo sapiens
gtttcaacaattgcacacctgacccattttcttggtcagggaggagagtgaagggaggtgccagggtcctattaacgacagggccctgtgtcctcttttgyccgggtctgcccactcctccatgcctttcagatgccctctgtgactgtaatgatcatgatggcagccctggtattttgtttttgtttttgtttttgtttt

SEQ ID NO: 116275 - DNA, 201 bp, Homo sapiens
gccagtgcggagtttgggcaagagaggaaatgatatgcaaatcacatgcaaataggcagcagcctgattgttcctgtgttgggaggggcaggtcagcagcsctcttctggataaggcggctggtcaccaagggggaattggcagtgtggtcagctctggggagaccaaactgccttttggagagaatgcacccttagtgag

SEQ ID NO: 116276 - DNA, 201 bp, Homo sapiens
aacgacagggccctgtgtcctcttttgcccgggtctgcccactcctccatgcctttcagatgccctctgtgactgtaatgatcatgatggcagccctggtwttttgtttttgtttttgtttttgtttttttttgagacggagtcttgctctgtcacccaggctggagtgcagtggcacgatcttggctcactgcaacctcc

SEQ ID NO: 116277 - DNA, 201 bp, Homo sapiens
tgggtcctcctggaggcgcaccagtgaagtctcatctggacctagtcctatagggctcagagaacaggaagagggggcagaaggatacaggaggtgggatrtcagcaaactggggagccagtgcggagtttgggcaagagaggaaatgatatgcaaatcacatgcaaataggcagcagcctgattgttcctgtgttgggag

SEQ ID NO: 116278 - DNA, 201 bp, Homo sapiens
tagcggctggcacctgtggggctcctggcaggccagatcctggccaggcgtgcaggggagccacaggctcagccagcagtgcctgctcttcagccttttcrtccgattctgcctgattctccccctcctgcccccaccactcatccagcacagtgccccagacgacccccaagagcacattggcccccacccccacccact

SEQ ID NO: 116279 - DNA, 201 bp, Homo sapiens
cccgctgccctgccctgccccaggcctggtggggaccaccctgttctgtaaaccacccgaaaaaggtcaccgtggctttttcatctctcccctcccaggaygagatggagtttggctacatcgaggcccctcacaaatccttccccgtggtctttgactcccccaggaacaggggcctgaaagatttcccctataagagga

SEQ ID NO: 116280 - DNA, 201 bp, Homo sapiens
tctgagaagagtaattgtaaccatggtgacagcatctaacgctgagaagtcatcatctcagggaatccctccaacagtctaggaagtagctcttgggattrtgtccattttacagcggaggaaaatcgaggcagttgagtgacccagttggaggccatgctccacacagaacccacacttcactccatggaagaggtggca

SEQ ID NO: 116281 - DNA, 201 bp, Homo sapiens
gaattcaccccattctgcccataacctctctattgaacctgatgcaactggccctgctgtgggcatgaggttggtgggcattgcagggtgagtaggaggaygctgctctgggcggcgcagacgagatgtgaagtggcccccaggaaggtctgaaccagggccatgggggcacagaggaagcacataaggtttctggctgga

SEQ ID NO: 116282 - DNA, 201 bp, Homo sapiens
agggcctcccataaaaaggcaggtttctggcttctcatgaaaaattggagaagctggggaggtgagatacagtctggcacagagacagaggaatagactcrttgacttctcccattaggaagtcagaatagcttctgtcctaaccatggcttaaaagggtcctgaggtcatgaagttcccagggcaggtggctgcaggtaa

SEQ ID NO: 116283 - DNA, 201 bp, Homo sapiens
atgctgccttatgccataaccagtgggtgaacctgcaccttaccacaggaggcgggcaggggtggagagtagttggttttacactcctcatcccgccctcygcgtctccttttgtgagattctctaagaattcaccccattctgcccataacctctctattgaacctgatgcaactggccctgctgtgggcatgaggttgg

SEQ ID NO: 116284 - DNA, 201 bp, Homo sapiens
gcctgattctccccctcctgcccccaccactcatccagcacagtgccccagacgacccccaagagcacattggcccccacccccacccactcagtttctgyccccaggatctggccatgtccaaactgcaggataggacagttggcagggaagcattcctctgtgactgctgtatttctcttctccctagagaccaggtgg

SEQ ID NO: 116285 - DNA, 201 bp, Homo sapiens
ctcatgagttttaatgtgctatcaaaagacagcagatttttatgaatttcacttcaaaatcttgtctaatttccactttgatttcttctttgatccatggmttctttagatgtatactgcttaatttccaaacatttgggggagtttttagttatctttggttattgatttgtctttaatcgcatggttcgcagagcccag

SEQ ID NO: 116286 - DNA, 201 bp, Homo sapiens
accactcatccagcacagtgccccagacgacccccaagagcacattggcccccacccccacccactcagtttctgtccccaggatctggccatgtccaaastgcaggataggacagttggcagggaagcattcctctgtgactgctgtatttctcttctccctagagaccaggtggtacatttctgagctgttgacctaag

SEQ ID NO: 116287 - DNA, 201 bp, Homo sapiens
ggcagggaagcattcctctgtgactgctgtatttctcttctccctagagaccaggtggtacatttctgagctgttgacctaagatttggccggtggagccscagtgggccgaggcttctgggaagcaagttgcagccacgcaaaaggaaaagctttctaattacctgaactgtcaaagcagagaggggtgtgaggtagtga

SEQ ID NO: 116288 - DNA, 201 bp, Homo sapiens
taataccagccaggacagcttctcactttgctatctgggtgacctgagtaaagttacttaacttctccgagatttcttcatctgtgaagtggggacgtaattcggagtcctcattagggaaaaggagccaggctggtaggagcagggaaaagtaaaaaaagaaaagaaagctgatcagctccaagcctgcctttcttcatg

SEQ ID NO: 116289 - DNA, 201 bp, Homo sapiens
ccagccaggacagcttctcactttgctatctgggtgacctgagtaaagttacttaacttctccgagatttcttcatctgtgaagtggggacgtaattcggagtcctcattagggaaaaggagccaggctggtaggagcagggaaaagtaaaaaaagaaaagaaagctgatcagctccaagcctgcctttcttcatggtcca

SEQ ID NO: 116290 - DNA, 201 bp, Homo sapiens
cagccaggacagcttctcactttgctatctgggtgacctgagtaaagttacttaacttctccgagatttcttcatctgtgaagtggggacgtaattcggagtcctcattagggaaaaggagccaggctggtaggagcagggaaaagtaaaaaaagaaaagaaagctgatcagctccaagcctgcctttcttcatggtccag

SEQ ID NO: 116291 - DNA, 201 bp, Homo sapiens
gccaggacagcttctcactttgctatctgggtgacctgagtaaagttacttaacttctccgagatttcttcatctgtgaagtggggacgtaattcggagtcctcattagggaaaaggagccaggctggtaggagcagggaaaagtaaaaaaagaaaagaaagctgatcagctccaagcctgcctttcttcatggtccagga

SEQ ID NO: 116292 - DNA, 201 bp, Homo sapiens
caggacagcttctcactttgctatctgggtgacctgagtaaagttacttaacttctccgagatttcttcatctgtgaagtggggacgtaattcggagtcctcattagggaaaaggagccaggctggtaggagcagggaaaagtaaaaaaagaaaagaaagctgatcagctccaagcctgcctttcttcatggtccaggacg

SEQ ID NO: 116293 - DNA, 201 bp, Homo sapiens
gtttggctacatcgaggcccctcacaaatccttccccgtggtctttgactcccccaggaacaggggcctgaaagatttcccctataagaggatcctggtaygtagcgacaggtagagtgcagaaaccctggttgggtcctcctggaggcgcaccagtgaagtctcatctggacctagtcctatagggctcagagaacagga

SEQ ID NO: 116294 - DNA, 201 bp, Homo sapiens
ggtcaccgtggctttttcatctctcccctcccaggacgagatggagtttggctacatcgaggcccctcacaaatccttccccgtggtctttgactcccccmggaacaggggcctgaaagatttcccctataagaggatcctggtacgtagcgacaggtagagtgcagaaaccctggttgggtcctcctggaggcgcaccag

SEQ ID NO: 116295 - DNA, 201 bp, Homo sapiens
ggacagcttctcactttgctatctgggtgacctgagtaaagttacttaacttctccgagatttcttcatctgtgaagtggggacgtaattcggagtcctcattagggaaaaggagccaggctggtaggagcagggaaaagtaaaaaaagaaaagaaagctgatcagctccaagcctgcctttcttcatggtccaggacgca

SEQ ID NO: 116296 - DNA, 201 bp, Homo sapiens
gacagcttctcactttgctatctgggtgacctgagtaaagttacttaacttctccgagatttcttcatctgtgaagtggggacgtaattcggagtcctcattagggaaaaggagccaggctggtaggagcagggaaaagtaaaaaaagaaaagaaagctgatcagctccaagcctgcctttcttcatggtccaggacgcat

SEQ ID NO: 116297 - DNA, 201 bp, Homo sapiens
cctctgcccctcaccaggtcttagggaagacccgctgccctgccctgccccaggcctggtggggaccaccctgttctgtaaaccacccgaaaaaggtcacygtggctttttcatctctcccctcccaggacgagatggagtttggctacatcgaggcccctcacaaatccttccccgtggtctttgactcccccaggaaca

SEQ ID NO: 116298 - DNA, 201 bp, Homo sapiens
tccacagaatgcggacatgctttggggagaggatcggtgactcacgacttggactctaaattcagggccctatctctcagggacattctggtccccagccyctgtttatctcttctgggaagaccagtgagtgaaagctgtccctcttctccagcctccattcctggctgggcagagctccacttgggagaaagctggttc

SEQ ID NO: 116299 - DNA, 201 bp, Homo sapiens
accaccctgtccacccccgactccagtgggctagctcaccaccctgtccaccacccaccccagtgggctagcccaccaccctgtccacccccgactccagwgggctagctcaccaccctgtccaccccccacaccagagggctagctcaccatcctgatgacccacactccagtgggctagctcaccacactgacccccac

SEQ ID NO: 116300 - DNA, 201 bp, Homo sapiens
ttcatagctgttgtgctctggttggctctgggaggcagaggttgctctgggatcctgagtgagcacacagggcacctccatccaagagcccttcaggaacyttcacctgggtgttggtggtgactatggtcatagctactgagagcctccaaactaggacacagaagttgattctgcagcataaggaagagcttcctgctg

SEQ ID NO: 116301 - DNA, 201 bp, Homo sapiens
gtcaggcagtgctgagaaggtcacagcctcacctggtgaatctggcagcctcagagctctggatcggatgaggcgaggcttcctggcacctacccaggcaygtaactgggtgcccagacaggatgcctggggctgagactggccaggcgagaggcatgtgctcaccctgttggtgactcatgcccagacactactgtgtgg

SEQ ID NO: 116302 - DNA, 201 bp, Homo sapiens
agacaccatgacctgcctgggccctggccctgcccacaactggccaagggcacatcctacacatccatgtggtctgtttgaacttggcattccaggcttgwttgatacctgccacccagtattattgtgaggattaggtaaatgaatacatggagaggtcttaaaacagtggcacatggtgagggccatatatgtgtttgc

SEQ ID NO: 116303 - DNA, 201 bp, Homo sapiens
acttgcggtgggttgggcaggagcaggtttgaaaggagtggggaaggagtgggcatggggaagcaggagtttggctttggatgtgtgaaatttaaaatgcytggtagggctgggcgcagtggctcacgcctgtaatcccagcactgtgggaggccgaggttggcagatcacttgaggtcgggagttcaagaccagcctggc

SEQ ID NO: 116304 - DNA, 201 bp, Homo sapiens
gctacatcgaggcccctcacaaatccttccccgtggtctttgactcccccaggaacaggggcctgaaagatttcccctataagaggatcctggtacgtagmgacaggtagagtgcagaaaccctggttgggtcctcctggaggcgcaccagtgaagtctcatctggacctagtcctatagggctcagagaacaggaagagg

SEQ ID NO: 116305 - DNA, 201 bp, Homo sapiens
gaggcgcaccagtgaagtctcatctggacctagtcctatagggctcagagaacaggaagagggggcagaaggatacaggaggtgggatatcagcaaactgrggagccagtgcggagtttgggcaagagaggaaatgatatgcaaatcacatgcaaataggcagcagcctgattgttcctgtgttgggaggggcaggtcagc

SEQ ID NO: 116306 - DNA, 201 bp, Homo sapiens
agagagaataagcagacccctcctcctgcctcttcctggtggttttcaaagctcctgctggggtacctgccgctcttctgtagctgaagctgacctggatrggggtgatgggaaccaagtcttgaaggcagtggggctgggaactagaataggcccctccccatgcctgtgggagtggccctgggcctcagacctgcatag

SEQ ID NO: 116307 - DNA, 201 bp, Homo sapiens
gaggtgggagaatcgcttgaacctgggaggcggaggttgcagtgagcagagactgcaccactgcactccaacctgggtgagagagtgagactctgtctcaagaaaaaaaaaaaaaaagaatcagagcaggggaagggagatgggggatcagtcggggggaaaggtgggcaaggtgcagcattaaatggagtgattgggtgg

SEQ ID NO: 116308 - DNA, 201 bp, Homo sapiens
gctgagaaggtcacagcctcacctggtgaatctggcagcctcagagctctggatcggatgaggcgaggcttcctggcacctacccaggcacgtaactgggwgcccagacaggatgcctggggctgagactggccaggcgagaggcatgtgctcaccctgttggtgactcatgcccagacactactgtgtgggctgttctac

SEQ ID NO: 116309 - DNA, 201 bp, Homo sapiens
aggtgggagaatcgcttgaacctgggaggcggaggttgcagtgagcagagactgcaccactgcactccaacctgggtgagagagtgagactctgtctcaagaaaaaaaaaaaaaaagaatcagagcaggggaagggagatgggggatcagtcggggggaaaggtgggcaaggtgcagcattaaatggagtgattgggtggg

SEQ ID NO: 116310 - DNA, 201 bp, Homo sapiens
cgcaatgactcacatctgtaatcccagtactttgggaggcggatcacctgaggtcaggagtttgagagcagcctggccaacacagtgaaaccctgtctctrttaaaaatacaaaaattaggccgggcacggtggctcacacctgtaatcctagcactttgagaggccgaggagggtggatcacaaggtcaggagatcgaga

SEQ ID NO: 116311 - DNA, 201 bp, Homo sapiens
gctaacatggagaaaacccgtttccactaaaaaatacaaaaaaattagccaggtgtggcggcaggtgcctgtagtcccagctgctccggaggttaaggcargaggtggagcttgcagtgagctgagatcacgccactgcactccagcctgggcgacagagtgagactctgtctaaaaaaaaaaaaaaaaattagctgggtg

SEQ ID NO: 116312 - DNA, 201 bp, Homo sapiens
tgaagtgggaggatcacttgagcccaggaagtcaaggctgcagggagccgtgttcatgccactgcactccagcctgggagacagagtgagaccctgtctcwaataaataaataaataaataaataaataaataaataaataaataaattaccactccttaaccccggactgctcttacttgtttttacaaacagcaacagg

SEQ ID NO: 116313 - DNA, 201 bp, Homo sapiens
atgtggaggggctgaccttccccgatgccgatttcctagggctggtttccctcagtgtcagcctggtggacccgggggtgtgtacagcactggggggtggscaaggaggctgaggggtttgggggcccagtttgcaggctccagggctgggcaggctgggggctgggggggcttgaggcaggctaggggtccctgcagggc

SEQ ID NO: 116314 - DNA, 201 bp, Homo sapiens
atgtgctatcaaaagacagcagatttttatgaatttcacttcaaaatcttgtctaatttccactttgatttcttctttgatccatggattctttagatgtrtactgcttaatttccaaacatttgggggagtttttagttatctttggttattgatttgtctttaatcgcatggttcgcagagcccaggggggatttgtaa

SEQ ID NO: 116315 - DNA, 201 bp, Homo sapiens
atgagccaccatacctgtctggtcattactttttacgaattaataatattccatcttatgaatatattacattttgcatatctatttatccatgggtaatkttcaccttttgtgccaggtgcttctatctctttatttagtttaaagtttatattggcctcatgagaaaatgttagccattttacagataagaaactgagg

SEQ ID NO: 116316 - DNA, 201 bp, Homo sapiens
ggagtttttagttatctttggttattgatttgtctttaatcgcatggttcgcagagcccaggggggatttgtaaaaagtggacagagatcgtttttcaggyactaagagccatggagtgggagacccccagcaactcccctctactccaagaactgcctcgtcctgtcctcactgacctctccttcttggggtgggggtct

SEQ ID NO: 116317 - DNA, 201 bp, Homo sapiens
cttgggcacctcctcccctgacctcctggattgacagccctgagtgaggagggtgtggagccaggaggtggggaccaggctcagccaggctaatcaggtcrcagggtgaaatttaaagggaggaggaggcaccagtccatcagaactcacacttcttcctggcaaagaagtgcccaggacgggagctggggagccagggct

SEQ ID NO: 116318 - DNA, 201 bp, Homo sapiens
gtctctattaaaaatacaaaaattaggccgggcacggtggctcacacctgtaatcctagcactttgagaggccgaggagggtggatcacaaggtcaggagrtcgagaacatcctggctaacatggagaaaacccgtttccactaaaaaatacaaaaaaattagccaggtgtggcggcaggtgcctgtagtcccagctgctc

SEQ ID NO: 116319 - DNA, 201 bp, Homo sapiens
gatggaatcagggttggaagtgaatgtcggaatcgggatggaatcagggttggaagtgaaagtcggaatcgggatggaatcagggttggaagtgaatgtcrgaatcggcatggaatcagggttggaagtgaatgtcggaatcaggatgcaggttgcaggaggtggggagggtcagtgtgctttcctgactcctcatgggga

SEQ ID NO: 116320 - DNA, 201 bp, Homo sapiens
tccaatcatatgtatgaatatagtatgaatgcatgaacaaatgcatataactttaattttctgggactcaactccctcacctgtaaaatggggacagtaakagtcccaaccccacagggctgtcataaggattaaatgaggtagcctgggtaaagcatgtgtgtggcacatgtcaataaatgtttgtctcagctttgctga

SEQ ID NO: 116321 - DNA, 201 bp, Homo sapiens
ctttgctgagagtctgctgtttaaacaaagccttgaaggaaaagaggcagttaggccaagcacagtggccctcacttgtagtcccagtgctgtgggaggcsgaggtgggggggtcgcttgaatccaggagtttaagactagcctgggtggcatggcgaaacccacctctacaaaaattacaaaaattagccgtgcgtggtg

SEQ ID NO: 116322 - DNA, 201 bp, Homo sapiens
tctagactacaggaagctaggctgggcttggagggtcttgatagccccagagaaattgtacctgtcatttcttcccccttctttcatcatcatcatcatcrtcatcatcatcatcatcatcattttctaccaagactccaaatagggggctgtgacttagagatgtcaacttttgcccaaagctagggattggctccacag

SEQ ID NO: 116323 - DNA, 201 bp, Homo sapiens
tacctgtcatttcttcccccttctttcatcatcatcatcatcgtcatcatcatcatcatcatcattttctaccaagactccaaatagggggctgtgacttrgagatgtcaacttttgcccaaagctagggattggctccacagagtcctgcttcccttgaaagggctgtgtctggcaccggtggtccctgagtggggtgga

SEQ ID NO: 116324 - DNA, 201 bp, Homo sapiens
tgcaatgagcagatatgtgctctgtcaggtggctgggaggtggccggtgccatgggctggaatgaagctggggttggggaaccagactcatggtgtcattygtgtcacgccatttgcaacaggcaagaagggtacatcagaaaggcctcgtatgctaccctgagagaaggaagtgaggggctgggcggaccgcagggattg

SEQ ID NO: 116325 - DNA, 201 bp, Homo sapiens
tggccgcagcgggggactatgggatctatgggactatcctggggaagggaagagggaacatgagggatgagggacagcagtggggggcgagtagagaggamtcagccttcaaaggtcaagcgtcccagtgggctgaaggtttggttgcactggtgtgttaggagtgagctggaatattgggaagcggtgtccgagtgggtt

SEQ ID NO: 116326 - DNA, 201 bp, Homo sapiens
cagggttggaagtgaatgtcggaatcgggatggaatcagggttggaagtgaaagtcggaatcgggatggaatcagggttggaagtgaatgtcagaatcggsatggaatcagggttggaagtgaatgtcggaatcaggatgcaggttgcaggaggtggggagggtcagtgtgctttcctgactcctcatggggagattccag

SEQ ID NO: 116327 - DNA, 201 bp, Homo sapiens
acaagccttggggtagaggaggctatggtggtcagccccaggtaacacctgaagagtaaggaggaggacagagtgggctcaaggcgtcaccccacaggaastatctggaagctgtcctgggaggggtagaaggtacaatttaaagggaaagactccagagaggcagcctggatcacaaagctttgaggacaaggtgggcag

SEQ ID NO: 116328 - DNA, 201 bp, Homo sapiens
ggagtgggggttctcattcccatcttattgaggaactacccgaggcttagaggagctgagagacttgcctaagtcgatggagccggctgctcctccctcawctgccagctgctcctgctgggagctgccccacctttcccatccctccacctttcccccaccctccttgctcctcacacctgctctgggaaccaaggtggg

SEQ ID NO: 116329 - DNA, 201 bp, Homo sapiens
aatgtttatgtcattatcactaaggtctcatttccagctctctactccaatatcatttcttcagattggccttctctgatcacttgactcaaaacagcacmccatcccctcctctcttctattttatttgtctgaatcacttcctggtatcacagtttttatcccaccagctttctacctgcctgctctccacgatgtccc

SEQ ID NO: 116330 - DNA, 201 bp, Homo sapiens
tttaggcagagccctgaagagggtgagggaaggagacttgtggacatcttggggaggagcagtccatgcagcaggagcgggcagtgccaggacagccttgscatcttcatggcacaacaggaaggccagcgtggctggagctaagtgagcgagggaaagcgtagtagggaggaggcagtcagcaaggtggcaggggcgcat

SEQ ID NO: 116331 - DNA, 201 bp, Homo sapiens
ggagctggggagccagggctgatctaggaggctgggagccaggtgacaggatggccccaaagagagttgtgcagctgtccctgaagatgcctacccatgcygtgtgtgtggtgggagtcgaggcacatgtggacattcacaggtaagagctgggaggcgctctcctggctgcagagagctgggttagagtgtaagtcaatg

SEQ ID NO: 116332 - DNA, 201 bp, Homo sapiens
ctctaagtagggctgtcaggatgtgtccctcatcacctctgcctccgccatctctgaaggtgatggccgtgcaggcttagggctatgttctgcaggtgagrgtctcctactttggggagcaggaagaccaagctctgggccgcagcgtgctttacctcactggcgtcggtaagtagcagctccctggctgcccatctatcc

SEQ ID NO: 116333 - DNA, 201 bp, Homo sapiens
cggtggcagggctggggaggaaaaccaggagccatggaaaccaaaccttgactctaagttgctgctgggagccccgctgtgggggctggttctctcgggtytaggtggccagcagagaccccattgtctcttgccctgttaacataggcttgccagatttagcaaataaaaatacaggatgcctggttaagtttgaatttc

SEQ ID NO: 116334 - DNA, 201 bp, Homo sapiens
atttataataaatttatatatacatatatatgcataagaacccccccactccagagagctggttgttaaacatttgccagcacaccactgcctggagttasggggtaagggggagtgacacagcaaaggcattagaggaaaggccacggagtcagaggagagcaagcagagcccgtgtcccagctgccaagtgggaaagtg

SEQ ID NO: 116335 - DNA, 201 bp, Homo sapiens
gggggaagagtggggaggcttctggagataggagaagataggacatagtcctctaggacactgaaagagaaaagagcctggagcaatgctgtaggagcacragcatgtcacgcatccattgaggtcagcagtcatgagtccaagtgaaccatggtcagccgcgtggtgcaggtgcagagggggtggagagttggatctgat

SEQ ID NO: 116336 - DNA, 201 bp, Homo sapiens
gacccatgagaaagctgctcggtgatccaggcgaggggtgatggtggcttgggccgcagtgatgtcagtggaggtggtgagaggtggtgggttagtggatytctgttgagctggagagtttggaagtgtcagatctggaaaggacttgggtgtgggctgggggtgtccaagggtttaccatctatgccctggcttccagat

SEQ ID NO: 116337 - DNA, 201 bp, Homo sapiens
tcctactttggggagcaggaagaccaagctctgggccgcagcgtgctttacctcactggcgtcggtaagtagcagctccctggctgcccatctatcccttygcccctccaggttgactgtttgagggtcttagtggattccttggagtggaagacccatggccagcttcctccatcactgaggggcttggattcctcggga

SEQ ID NO: 116338 - DNA, 201 bp, Homo sapiens
gcacatacctgttgtccaagctactcaggaggctgaggtgggaggatcacttgagcacgggaggttgaggctgcagtgagccatgcactccagcctctagrctgggcaacagagtgagtgagaccttgtctcaaaaaaaaattaaaaaagagagagagaaagaaagaaaaaaagaaaggaaggaaggaagaggaagaaaga

SEQ ID NO: 116339 - DNA, 201 bp, Homo sapiens
ttcagccagggccagggtcaatgtaacggcagaacccagcccctgcaacctcaggccatgtccccagttctcagagtttggggtcaccagcatatgatttrgaaccccaaagccaccaagagctagcaggtggacatgcacaggcaagcaagtgattcaagagccaaaggcttgggtccctccaactcccagaaccacagg

SEQ ID NO: 116340 - DNA, 201 bp, Homo sapiens
caggcacccgtggagctctactcggactggctctctgtgggccatgtggacgagtttctgacctttgtgcctacctctgaccaaaaggtgcgtcccctccytccctgcctgagccacctctgcccttgtctgacctgatgggatgagtcagggcaaagccatctggaaccagctcaaccctgtgccccgagtaagctctgg

SEQ ID NO: 116341 - DNA, 201 bp, Homo sapiens
gattcaaatccgggttctgggcctctacagtaagccttgcagaggtggcttgggaaggcatggccagggagccagcagcctgggagaggaggcttcccagygaccagtggttacagctctgctagggacagctctgacagtgaaggaggagacatctgaattgggtattttgtttgttttttgtttgtttgtttttcgaga

SEQ ID NO: 116342 - DNA, 201 bp, Homo sapiens
ctaagagccatggagtgggagacccccagcaactcccctctactccaagaactgcctcgtcctgtcctcactgacctctccttcttggggtgggggtctcrctggttcttccatagggtcctgactttggatatgttacccgggagatcccgctccctggtccctccagccttgactccttcggcaacctggacgtcagcc

SEQ ID NO: 116343 - DNA, 201 bp, Homo sapiens
tataatctttgctttggggggttgtgatgagcattagggagcgccaagtaggactcgtgattgttggaattaggactgttgtcaccgcagtcaatggagayagttttttgatggggccaagtgatcatggcagaggttgtggagggggtctggtttctccagagggctgaatatttgggtggttttttaggggtccaggaa

SEQ ID NO: 116344 - DNA, 201 bp, Homo sapiens
gctggggctgggacagtgtgttgtgctgacaagaacatttgcatccagaaactgcctgggttcgaaccccagctttggcacatcctagccttgtgcacttsagcaggttgcctgagcctcagtttcccccggacagcaatggtttctattgcacaaagctgttgtgaggcttgaaggagctagcgggcccagagggctcca

SEQ ID NO: 116345 - DNA, 201 bp, Homo sapiens; identical to SEQ ID NO: 19586

SEQ ID NO: 116346 - DNA, 201 bp, Homo sapiens
gggggatcagtcggggggaaaggtgggcaaggtgcagcattaaatggagtgattgggtgggggcaggagcttgctgagaaggtgacatttaggcagagccytgaagagggtgagggaaggagacttgtggacatcttggggaggagcagtccatgcagcaggagcgggcagtgccaggacagccttgccatcttcatggca

SEQ ID NO: 116347 - DNA, 201 bp, Homo sapiens
tccgggcaccccaaggctgcggggttgaaaggcaaacttggggtggtcccgggtggattgtgccctccctccagaagaatgatggatccccagggtctgtwgtatccaaccatgtagggaacccatctgggacagcaaaattggcatgagtggacattaacctacaccctgtaaccgacatgctgtgtgactgctggaaaa

SEQ ID NO: 116348 - DNA, 201 bp, Homo sapiens
actccatcagtaccaaatatagtcctcaaggaggaggttcaacaacaacgagttccattttatggagaggaaaaccgaggctcagatgcaggaattcactrtggcacaaccatctggggtggagcaggcattccaacccaggtgtcttgggtgcaccaaagctcctccttttaccattgccccacacccgttccctcctct

SEQ ID NO: 116349 - DNA, 201 bp, Homo sapiens
atctatcccttcgcccctccaggttgactgtttgagggtcttagtggattccttggagtggaagacccatggccagcttcctccatcactgaggggcttgrattcctcgggaccttctgtccactctggaaccacagggattgagacccagcagtccttaggaccacaaggatctagaaacttcactgcccagtgaacaac

SEQ ID NO: 116350 - DNA, 201 bp, Homo sapiens
ctgcagggcccaccaagtcctcattttcccctcagaccctgcccgaggtgaccctcttcacagacactgtgggcttccgcatggccccctggatcatgackcccaacactcagcctcctgaggagctgtatgtgtgcaggtgaggctccctccctccagccctcccccaagtctggagtgcagaggtagggacagaagctg

SEQ ID NO: 116351 - DNA, 201 bp, Homo sapiens
gattacaccaccatgcccagctaattttttgtattttaagtagagacagggtttcaccatgttggccaggctggtctcaaactcctgactgcaggtgatcygcccaccttggcctcccaaagtgctgggattacaggcgtgagccaccacacccagccctgaattgggccttgaaggaagaaatcagaatgccctggtggg

SEQ ID NO: 116352 - DNA, 201 bp, Homo sapiens
ggctggtctcaaactcctgactgcaggtgatctgcccaccttggcctcccaaagtgctgggattacaggcgtgagccaccacacccagccctgaattgggycttgaaggaagaaatcagaatgccctggtgggcaaaatgcgaagggcctccagggagggagaacagcacagacaaagttctggaggtgggaacctgcttg

SEQ ID NO: 116353 - DNA, 201 bp, Homo sapiens
ccactctctgtttcttgggtccccaggtcctctgatgggtgggggagttcctgggccacaccccaggagaggaaaggcacaggaagtcatgagtgccccasgtgccggtcaatgccaggcatgttcttgttctcactcccctttgatctctctcccctcttccttatccctgttcacagaagtggaaactgaggctcagaa

SEQ ID NO: 116354 - DNA, 201 bp, Homo sapiens
ttcctgcgtggaatcctggaatcaaagactcggcaacctaggatctcagatttaaaagatcagagaatcttaggagaaaagtcacacgcttgtggcctgcratcttttggcctacctcattttatgagcttaatgagtcaccaacataaacagatatcgggagggcctcccataaaaaggcaggtttctggcttctcatga

SEQ ID NO: 116355 - DNA, 201 bp, Homo sapiens; identical to SEQ ID NO: 19587

SEQ ID NO: 116356 - DNA, 201 bp, Homo sapiens; identical to SEQ ID NO: 19588

SEQ ID NO: 116357 - DNA, 201 bp, Homo sapiens
tgatctaggaggctgggagccaggtgacaggatggccccaaagagagttgtgcagctgtccctgaagatgcctacccatgccgtgtgtgtggtgggagtcraggcacatgtggacattcacaggtaagagctgggaggcgctctcctggctgcagagagctgggttagagtgtaagtcaatggggtgggtgcctggtagac

SEQ ID NO: 116358 - DNA, 201 bp, Homo sapiens
cgggagctggggagccagggctgatctaggaggctgggagccaggtgacaggatggccccaaagagagttgtgcagctgtccctgaagatgcctacccatsccgtgtgtgtggtgggagtcgaggcacatgtggacattcacaggtaagagctgggaggcgctctcctggctgcagagagctgggttagagtgtaagtcaa

SEQ ID NO: 116359 - DNA, 201 bp, Homo sapiens
cttctggaagccagaagtccaggcaggctgagctgccgtctcagctcccatggctgatcttaaggtgttggccactctgggctcttctctgggggcttgargggagaatcttttccaagctcattcaggttgtggcagaattcaccttcttgtggtgataggactgtttcctatcagctgggaatgctctcagcaacttga

SEQ ID NO: 116360 - DNA, 201 bp, Homo sapiens
ggaaggatggggggattatgacaaatgtcatgaggacacttgggggtagtgggtatattcattatcttaattgtggtgatgttttcccaagtcaaagcatygccttgtgcaatgcatataaacccatgcagtttattatgtgtcatataagctaatcaggttgtttttaagaacctgccaccctcccttagaaataaggct

SEQ ID NO: 116361 - DNA, 201 bp, Homo sapiens; identical to SEQ ID NO: 19598

SEQ ID NO: 116362 - DNA, 201 bp, Homo sapiens
ccttttgggcttgcaggaccaacatccctgattggtttgggaggggcgtgtgtgtgtggatctgcctcacaatggcctgtctgagcccttatctgaggtcrcacgttatcatttgtttggccaataagactgtagcacacacaccagcttcagtccccacttggccttacctttgatgtcacaatctgacctgtgggtatt

SEQ ID NO: 116363 - DNA, 201 bp, Homo sapiens; identical to SEQ ID NO: 19599

SEQ ID NO: 116364 - DNA, 201 bp, Homo sapiens; identical to SEQ ID NO: 19600

SEQ ID NO: 116365 - DNA, 201 bp, Homo sapiens
aagtatccaatatttttactcaaattcttcctattcaagtttaattgattttcctgttgatgggtaaattttcagggagggttctgaagcagtaaaaagcrttgtagtgcatcaattagaatctttgtctttttctctttttttagctccatttatgccctttatgctccatttatgccagggtgagagccacgtgtaaag

SEQ ID NO: 116366 - DNA, 201 bp, Homo sapiens; identical to SEQ ID NO: 19604

SEQ ID NO: 116367 - DNA, 201 bp, Homo sapiens
tatgctggtgccggtgccagctcccagaaagggtgcgctgcgtggagatgacagttgaggagatgaaggagactgagaatgggacacagttggcgcctctkcccatggagggagtggacattcgcccaaacaggaggaaggcatgctgaaggtcatcgagagagggcacaggtacagagatgcccatgattggggactgaa

SEQ ID NO: 116368 - DNA, 201 bp, Homo sapiens; identical to SEQ ID NO: 19606

SEQ ID NO: 116369 - DNA, 201 bp, Homo sapiens; identical to SEQ ID NO: 19608

SEQ ID NO: 116370 - DNA, 201 bp, Homo sapiens
ggtagcacccctgcctttggctcagagtatgctggtgccggtgccagctcccagaaagggtgcgctgcgtggagatgacagttgaggagatgaaggagacygagaatgggacacagttggcgcctcttcccatggagggagtggacattcgcccaaacaggaggaaggcatgctgaaggtcatcgagagagggcacaggta

SEQ ID NO: 116371 - DNA, 201 bp, Homo sapiens
accacagcacctggcctcctgcacaccctgaaggtagcacccctgcctttggctcagagtatgctggtgccggtgccagctcccagaaagggtgcgctgcrtggagatgacagttgaggagatgaaggagactgagaatgggacacagttggcgcctcttcccatggagggagtggacattcgcccaaacaggaggaaggc

SEQ ID NO: 116372 - DNA, 201 bp, Homo sapiens; identical to SEQ ID NO: 19615

SEQ ID NO: 116373 - DNA, 201 bp, Homo sapiens
actaggcttttatttcatctctttaagattaggagggcccgaagaaaaatatctagctatgttaatagggattattttcaaatgaaaattcacccccccccaacaaaggacaactttgcatggccatttcaagatatggcaaaggaacatgttttagggtaaaatattttgactttcttatttgtcacataatgttatgcc

SEQ ID NO: 116374 - DNA, 201 bp, Homo sapiens
attgcattatctaactttctacactaatattaaaacgctaaaatctgttgtttgggtatctttttaggaagataaatctatgaggatgtctatgcaatgcmaacaaatcatatttcactgcataactgaacatatggagattaggaacctcataaattgaattttaaatgaactgaccttattggatccttgacaaaaggg

SEQ ID NO: 116375 - DNA, 201 bp, Homo sapiens; identical to SEQ ID NO: 19616

SEQ ID NO: 116376 - DNA, 201 bp, Homo sapiens
ttagaagttactaggcttttatttcatctctttaagattaggagggcccgaagaaaaatatctagctatgttaatagggattattttcaaatgaaaattcrcccccccccaacaaaggacaactttgcatggccatttcaagatatggcaaaggaacatgttttagggtaaaatattttgactttcttatttgtcacataa

SEQ ID NO: 116377 - DNA, 201 bp, Homo sapiens; identical to SEQ ID NO: 19617

SEQ ID NO: 116378 - DNA, 201 bp, Homo sapiens; identical to SEQ ID NO: 19618

SEQ ID NO: 116379 - DNA, 201 bp, Homo sapiens
tattatttttattttaattggtcactgagaaaactgacctgatggagctaaaagcatgtctttggccagtttctcattaagttcaagtctgtatgacattmtgaccttcctttttcttgacaaagttagaattcaaggaaaatactagaaattctgctttctgattcatccatgaaaaaatgtgtctcaattattgtgcca

SEQ ID NO: 116380 - DNA, 201 bp, Homo sapiens
gcaggatagctggcacacttacaccttcctgtgactatgttgatggcctctactgatccatggcactgtttgtgttctaagtggctacacactaaagatawgcccaactgggaagtctgccctgattaatgtccttcacacataaggtacagatggcatggcacttcttgccttaattaatttattagggacgccatatgg

SEQ ID NO: 116381 - DNA, 201 bp, Homo sapiens
agagaaattgtattaggcagagacttgatggaagcgtaatcacatgaagaaaaggcagtgttcaaggcagaagaaacagcataaacaaaagcctaaagggraaatagagctgtggatacttctggaactgcaaatagatttacatgatagggaaatccccaggctaaggatgataagatgagatagaaataatctgcaggt

SEQ ID NO: 116382 - DNA, 201 bp, Homo sapiens
gcaagactgaaggtgtgctggtaggatggcgtcttaagaagcaattacttggctttgcagacgccgccgccgaggaaaaccgtgtactattagccatggtyaaccccaccgtgttcttcgacattgccgtcgacggcgagcccttgggccgcgtctcctttgagctatttgcagacaaggtcccaaagacagcagaaaatt

SEQ ID NO: 116383 - DNA, 201 bp, Homo sapiens
ctctgtgactagaaggcaagactgaaggtgtgctggtaggatggcgtcttaagaagcaattacttggctttgcagacgccgccgccgaggaaaaccgtgtrctattagccatggtcaaccccaccgtgttcttcgacattgccgtcgacggcgagcccttgggccgcgtctcctttgagctatttgcagacaaggtcccaa

SEQ ID NO: 116384 - DNA, 201 bp, Homo sapiens
caggatagctggcacacttacaccttcctgtgactatgttgatggcctctactgatccatggcactgtttgtgttctaagtggctacacactaaagatatkcccaactgggaagtctgccctgattaatgtccttcacacataaggtacagatggcatggcacttcttgccttaattaatttattagggacgccatatggg

SEQ ID NO: 116385 - DNA, 201 bp, Homo sapiens
ctttttttgaacttgtttcttatcagtaaacatgaaactgtatattattttgtgtacgcgtgtatatgctttggaagcaaaaaacaaaatggaaaaaatcmagtgccctgaaccattccctccagcctctgaactcatttgctgcaattctttattgaccagtagaggccactgttgaataacaaagctggcgggaaggcc

SEQ ID NO: 116386 - DNA, 201 bp, Homo sapiens
gcaaggaatggcctctgaaaatttccctgataccaagattcgtctctttttttgaacttgtttcttatcagtaaacatgaaactgtatattattttgtgtrcgcgtgtatatgctttggaagcaaaaaacaaaatggaaaaaatcaagtgccctgaaccattccctccagcctctgaactcatttgctgcaattctttatt

SEQ ID NO: 116387 - DNA, 201 bp, Homo sapiens
tgaagtcagtaaggatgtgggttaaaatcgctcacctcacagcgggtcaatcgggaaagcacacccactcactacagccattatgggaaaaagggctcgcyccttacaggatcctcaactgtggagaggccgggagcccacgcggggcgctggggagtctctcagcaccccaggggttcgggcagggacctgagccgcgcc

SEQ ID NO: 116388 - DNA, 201 bp, Homo sapiens
ttagcaaaatacctgatgtgtaacccttaataaagttagctgctgcttttgtaattagattgaggataattttggaagaaagttaagctaaaagaatgaawgtgagaaaaaaaataagtggtgaatatacatgtagcttgatttcgtaaaactattggtgacaccgcccagtaagagttgatgtttggcttaagcagacca

SEQ ID NO: 116389 - DNA, 201 bp, Homo sapiens
ataataggtctggaaccgtctgtccgtccttccttcctctcctctcctccctcctctctctcttcctttctcccctcctttcttccctcccctcccctccyctccctttcttatggagacatggtctagctctgtcacccaggctgaagttcagtggcctggtcacagctcactgcagcctcaaactcccaggctcaaaca

SEQ ID NO: 116390 - DNA, 201 bp, Homo sapiens; identical to SEQ ID NO: 19625

SEQ ID NO: 116391 - DNA, 201 bp, Homo sapiens
tcattttataaagcactgtggtcatttgaaaagatggaggtagactgaaattttgaattttggggaattttcctacactatgcatacttgtgaagtttgtrttgttaaatttcatttgatttgacaaatccgtgttaagagtatacgatgtccaggtacagaggctgccccagaaacaagacagaagtaggcagggaccca

SEQ ID NO: 116392 - DNA, 201 bp, Homo sapiens; identical to SEQ ID NO: 19626

SEQ ID NO: 116393 - DNA, 201 bp, Homo sapiens; identical to SEQ ID NO: 19627

SEQ ID NO: 116394 - DNA, 201 bp, Homo sapiens
cttccctgaggctccattgctgcttggtggccattctctgcctttttacagtcacctgaacaatgacccatcatctcttgcttgcttgaaatcttgctgamatgttctcatttcctgtttgctgtatgggctcgggtgggatgtttgttggctctgttgtgtttattcaccaatttgtacattatttgttgtcctttacta

SEQ ID NO: 116395 - DNA, 201 bp, Homo sapiens; identical to SEQ ID NO: 19629

SEQ ID NO: 116396 - DNA, 201 bp, Homo sapiens
acctgaggtgatccacccgcctcggcctcccaaagtgctgggattacaggcgtgagccaccgcgcctggccctctgtttattctttttaaagatagtgtcytggctattctggattgtttgcatttttatatatcttttagaaagatatatatatgcctcatattcagcaactgtgccaaactcacttttactaattatct

SEQ ID NO: 116397 - DNA, 201 bp, Homo sapiens; identical to SEQ ID NO: 19631

SEQ ID NO: 116398 - DNA, 201 bp, Homo sapiens
tcacgaggtcaggagatctagaccatcctggctaacacggtgaaaccccgtctctactaaaaatacaaaaaattagctgggcgtggtggtgggcgcctgtmgtcccagctacttgggaggctgaggcaggtgaatggcatgaacctgggaggtggagcttgcagtgagctgagatcacaccactgcacttcagcctgggtg

SEQ ID NO: 116399 - DNA, 201 bp, Homo sapiens; identical to SEQ ID NO: 19633

SEQ ID NO: 116400 - DNA, 201 bp, Homo sapiens
gtgaggttaaataaaatttaggaagttgaaatttgtaatcagtctctgttttctttcttttctttttctttctttcttttttttttttgagatggagtttygcccttgttgcccaggctggagtgcggtggcacaaccttggctcactgcaactcctgccccttgggttcaagcgattctcctgcctcagcctccctagta

SEQ ID NO: 116401 - DNA, 201 bp, Homo sapiens; identical to SEQ ID NO: 19634

SEQ ID NO: 116402 - DNA, 201 bp, Homo sapiens
ctgcactcatgccagcggggcagcacgcctgctgcaggggcccagagtggcgggaggcctgtctgtgtgtagaggttgaaggcgcctgtcgtgtctgcagttatttgtggggtgttggctcctccgtaggcctatttggaagctcattaaaggaacagttgagccgtccagtgtggttttaaaaaaatgttcattgttaaa

SEQ ID NO: 116403 - DNA, 201 bp, Homo sapiens
accccatgcagttctcaggttctttgtttctgggacacagctcttgaaagcccccgccagtgttttaaataaatgggagaccttgccaggctgcttacgtrtaagactcccttttacatggagggtgttcccttttctttcagagcccaatgacgaaagtggagctaacgtggatgcgtccaaaatgtggcgcgatgaccg

SEQ ID NO: 116404 - DNA, 201 bp, Homo sapiens
cccaccgaacccacccactgggcagtgccaactgtctggtaccccgaggcaggtctggtgcccccgaggcagctggcccatgcccttcgtcatcccctggygaacatctgtaacccctgcccttggcctcaccccgttgaatgtcccagccctgccctctgctgggtgggcgtactggttcggggatcccataggagcgtc

SEQ ID NO: 116405 - DNA, 201 bp, Homo sapiens
gctcagctttggaggcctctcctggggtgggggtcacgcaggatgcgcctcactcccctgcaagcagctgggactctgcgtgtgcgatgttggggatgccytgcctggtgatgtacccgggggctggtcacgtgagcagcttctgcctgggctgcgctacaattccagactctcagcagggatgtgagtgttctgcctaaa

SEQ ID NO: 116406 - DNA, 201 bp, Homo sapiens
agcccaccttggtcctgctgtcctgggcattagtggggtgggaacatcggcaagaagcttttgctgaactgcagagcagggactgaaggaaggagacgcacccaagctcagatgccgggagccctcatgcccttcctgctgggtgccctctgtcgattctgtagcgtaagggaggtgcttatccttcccccagagtggagg

SEQ ID NO: 116407 - DNA, 201 bp, Homo sapiens
agttgctggtatacagtggtgagcaaataatagcagaccttcaggagcttatattccaaggacagggatggacattgataggagaatcacacaaacaaaaygcaaagtcacatcaggaagttctgggcagcaccttgcagaggtggtggttggatggaccatctgtagggagtgaagcaggagttacctgagtgattcggg

SEQ ID NO: 116408 - DNA, 201 bp, Homo sapiens
cttcgcttttcactggcatataagtgacccacactgttgctgaggaatggtcacaactctggaggaggacagtgacaaggcagttgtcctttgtgaggagrgagaattgctagtcaggagtaggccatgggtgttttcaatatttgcttttgtatctaattcacccacaagacagcaaaacagtctgagctgttgcaagcg

SEQ ID NO: 116409 - DNA, 201 bp, Homo sapiens
ggcttcaggaatgtgtttgttcaggccattgcagggggagcagagtaacccaggcttgaggcgtccccaggctgccgggcgctgggtgccagtgtgggccggggggggtactcatccgggcactgtcctctccagcgcggctgttgtaccagtagcaagagctcatgctcgtgcctccctcggtggcgttccctgtgctgg

SEQ ID NO: 116410 - DNA, 201 bp, Homo sapiens
tgctgcggaattaggagggaaaagtgtatgcgttaaaaggggaaaggctcgttggtggagctttgaaaggtcagattttggctttccctctaatgaaggaraagggtttttgaacagtgccacctgtcactcctcctaggtagtgttgaggaaacctcttgagtgctttcctacccggtaaattagatatttctaatgtct

SEQ ID NO: 116411 - DNA, 201 bp, Homo sapiens
cgcggctgttgtaccagtagcaagagctcatgctcgtgcctccctcggtggcgttccctgtgctggtcatgctgaggctctggggactgtcacacagtaccccccccccaccccagctccccaaaacaaagtggccatattcgctatcttcttctgaaaaggtagcaaagacagttttcagaatcaaaatttgtcttttag

SEQ ID NO: 116412 - DNA, 201 bp, Homo sapiens
agataaatatttccaagtctgttgttattaatttcactgaaccaagataattttaagatttttaaaacaaatttttacttttaagaaatctattttttaaytgaagatttaaaacgtatatttttttaaattatttttttcctgtgccatatcctggattctttctgaaggcagtaggtctggtgtggactgtcctctgct

SEQ ID NO: 116413 - DNA, 201 bp, Homo sapiens
cactgaaaagaaagtaccaattcattgttacttagataatctttttgtgtgcatttttattatttatttttatttttgtttattttttgagacggagtcaygctctgtcgcccaggcttgagtgcggtggcgagatcttggctcactgcaacctccacctcccaggctcagacgattctcctgcctcagcctcccaagtag

SEQ ID NO: 116414 - DNA, 201 bp, Homo sapiens
agtgttatttgtaatggtgaaaattttgacttaacctgggtttttaacacaagaataaattaagttatatattgtattagtctgttgtcacgctgctaatraagacatattcaagtctgggtaatttataaaggaaagagatttaatggactcacagttccacatggctggggagacctcacaatcatggcagaaggcaaa

SEQ ID NO: 116415 - DNA, 201 bp, Homo sapiens
cagggcacagccacggggccacctgagacttggcagcagtcagcaacatggctcctggatgccttcccacccaggcctgtccgaaggagagctcctccaaygtggggtggatggagccgcaccctgggtggcatccctccaggaggtcacccactgagagtcctgggcctagctgctcaccctcccaccgcagggccaggt

SEQ ID NO: 116416 - DNA, 201 bp, Homo sapiens; identical to SEQ ID NO: 19621

SEQ ID NO: 116417 - DNA, 201 bp, Homo sapiens; identical to SEQ ID NO: 19622

SEQ ID NO: 116418 - DNA, 201 bp, Homo sapiens; identical to SEQ ID NO: 19623

SEQ ID NO: 116419 - DNA, 201 bp, Homo sapiens; identical to SEQ ID NO: 19624

SEQ ID NO: 116420 - DNA, 201 bp, Homo sapiens
taccagaggtgctgctctgggttcaggagacagcaggatttggggaatagtttgaggtgtgtgggacaaggggcctccatccacaaaagggggtcagacaygagagtgaagatgtggggtcatttctggatgaggcagtaggtgatggagtaggacggagggtgacagcatagcagggaggggtcttccagggcagtcagg

SEQ ID NO: 116421 - DNA, 201 bp, Homo sapiens
taataataaaaaaggaaacatcactgttccacataatttatggagcatctatatagagtaatgccatgtagctgtaaaacagttcaggtggaattttcatmctggcatggaaagatgtacacaatataaatggaaaaggcggattctagaataataggtctggaaccgtctgtccgtccttccttcctctcctctcctccc

SEQ ID NO: 116422 - DNA, 201 bp, Homo sapiens
gatcacattaattcttaatgctctatgggttggtctgagaaacagattgcagctaagtgttgtctgtggaggttaaattgatatgaaaattagtattttgrataaacaaaatgtttttaaaaaatcatcaaacgctattcagatggtacagcacgcctgccatttcctgatcatttgtaatatcctaattgcttgggccta

SEQ ID NO: 116423 - DNA, 201 bp, Homo sapiens
agggagatggggctctccacctttgtgcccctcctgtgcccccgttcccatgcctggactgtgagcgctgctggctgtgtggaacctgacctccagggccygagctctgacaccagaagtgggcaagtcctcacacgtccgggcatcttcccctctgaaggctgtgaacccagccatgagatgtccgagggcgtgctctga

SEQ ID NO: 116424 - DNA, 201 bp, Homo sapiens
ggggtcatttctggatgaggcagtaggtgatggagtaggacggagggtgacagcatagcagggaggggtcttccagggcagtcaggaggaagggtgtgggaaaggaaggcggcaagtccgaaaggaaagagcagacccagcagagggccaggggtcgatgccagagtgaggccactcagctgttctctgcagagcctttgg

SEQ ID NO: 116425 - DNA, 201 bp, Homo sapiens
ccttgttgttgtttcttttgaagattcccaggtgaggccatcttcggtgaaagagaagtgaggttgtctgggagtatggcaataaaacttgtccaaaaacrgcactgtggcgtctcccactcctggctcgggagttgcctggaaggcatgttccatggggtcaggcatgctgctgcacaccactgcccatctgccctcctg

SEQ ID NO: 116426 - DNA, 201 bp, Homo sapiens; identical to SEQ ID NO: 19635

SEQ ID NO: 116427 - DNA, 201 bp, Homo sapiens; identical to SEQ ID NO: 19637

SEQ ID NO: 116428 - DNA, 201 bp, Homo sapiens
caagattgtttactaggccattgcatttccattacattttagggtcagcttgtcaatttctacaaaatgcctggtgggattttgattgagactacattgartctttagataagtttgagggatattgccatcatatcagtactgagtgctctaatccatgaacatggactgtctctccatttatttaggtgttttaaaatt

SEQ ID NO: 116429 - DNA, 201 bp, Homo sapiens
gtaaacacttgtcttgtcacactgtctgtgtggacatggagttcatttctctagaccagatatagaggtgtggaattgctggggtgtggagtaaatttgcrtttaatgttttaagaaactatcagactatcttcctagagtagctcaccattttgcattcccagcagcagtgtatgagcattccagtttctccacttccac

SEQ ID NO: 116430 - DNA, 201 bp, Homo sapiens
cttcctactttttggctcttttgagcaatgctgctgtaaacacttgtcttgtcacactgtctgtgtggacatggagttcatttctctagaccagatatagrggtgtggaattgctggggtgtggagtaaatttgcgtttaatgttttaagaaactatcagactatcttcctagagtagctcaccattttgcattcccagca

SEQ ID NO: 116431 - DNA, 201 bp, Homo sapiens
gggattacaggcgtgagccaccgcacccggcctcacgtgcatttttaaagtggtaaaaatgttcttaacccatttgtcaattgtggtcgacgttgaaaaaygtactttgaagttcagtctacgtattttatatcttctaggggcccagaagacacctgctttgagtttggtgtttttcctgccatcctgagtttcccactt

SEQ ID NO: 116432 - DNA, 201 bp, Homo sapiens
ggttttagtaaatttctagagttttgtagtcatcaccacagtccagttttagaacatttccaaaaagattcttatgtctatgtgcagacagttcccattcyaacccccaggcaatccctgctctttcctctgactatagatttgccttttctgacttttcctatgtgtggaatcatacactgtctaatcatctgtgcctgg

SEQ ID NO: 116433 - DNA, 201 bp, Homo sapiens
agcttgagggctcccaggctgccgcggcttctaccaggagcccttctcacactgggggccagtgtccggggcacagcagcctccctttatgtccaggtttyttgttgactgaagactgtcacagggcatctcttggcagtattatgccttgctgaaataaacccgagataataaaataggtgtttataatttgtattgtat

SEQ ID NO: 116434 - DNA, 201 bp, Homo sapiens
ttataactttaatggctttataattttacagttgagtctatctagatggattactgcatatctgagtatatatggagccatctgagaattcctcccaattwtatgtaaaagaggactgattaaatgctgtgaattgaaaatttatttctctttatcagaccttgtgtatctttttaatgatgatatttggtggaaagggat

SEQ ID NO: 116435 - DNA, 201 bp, Homo sapiens; identical to SEQ ID NO: 19639

SEQ ID NO: 116436 - DNA, 201 bp, Homo sapiens
gggtttcaccatgttgcccaggctggtcttgaactcctgacctcagatgatctgcctgtctcggccttccaaagtgctgggattacaggcgtgagccaccrcacccggcctcacgtgcatttttaaagtggtaaaaatgttcttaacccatttgtcaattgtggtcgacgttgaaaaatgtactttgaagttcagtctacg

SEQ ID NO: 116437 - DNA, 201 bp, Homo sapiens
caaaggacaggtgggaggaagccaggcaggccctcggctgtagtggtctagggtagagacaccggcaacttgggaactaaatgtgggcactaaagataaaragatgtgtgtggatccacgagaggtttaggacatggcactgctgggacttggtgaaggaggggctgtggcagggacacaggtgcttttgatgcttctgtg

SEQ ID NO: 116438 - DNA, 201 bp, Homo sapiens
gtagcactgttataatttcctcttgaaaaagaaattcacatgtaaatgtatatataactggaaaagtaagcacaaaaatgttaaaagtgattcttttttcrgattgaaattttttttcctttttgtaaatctttttttgccctaaaattaatatatattaattttaaaaggaggaaaaaaataaggtcatttaagtgaatt

SEQ ID NO: 116439 - DNA, 201 bp, Homo sapiens
tggtcacaactctggaggaggacagtgacaaggcagttgtcctttgtgaggagggagaattgctagtcaggagtaggccatgggtgttttcaatatttgcytttgtatctaattcacccacaagacagcaaaacagtctgagctgttgcaagcgtgcctcctgtgtagagtgcagggtcattatgatgcttaatctaatgc

SEQ ID NO: 116440 - DNA, 201 bp, Homo sapiens
acaaagtagtatttgtgttatattgactgggaaaagcagtagcactgttataatttcctcttgaaaaagaaattcacatgtaaatgtatatataactggaraagtaagcacaaaaatgttaaaagtgattcttttttcggattgaaattttttttcctttttgtaaatctttttttgccctaaaattaatatatattaatt

SEQ ID NO: 116441 - DNA, 201 bp, Homo sapiens
ctggggagacctcacaatcatggcagaaggcaaaggagaagcaaaggcacatcttagtggcggcaggcaagagagtgtgtgcaggggaactgccctttacrgaaccatcagatctcgtgagacttgtacactatcacgagaacagcacgggaaagatgtgcctccatgattcagtacttcccactgggtccctcccatgac

SEQ ID NO: 116442 - DNA, 201 bp, Homo sapiens
gtgccgtaattcatacccttatcctaaaatgtgattgtaccacatctgcagaaaaaactcccagatcttagagcattgacattagttcttttctctgatcyccttcttatcaagaggttctgctgcttgactcttaaccttcataaatgtgaaaactgcctggaattcagtctttgtacttgtacctaagatttagaccag

SEQ ID NO: 116443 - DNA, 201 bp, Homo sapiens
ctcctgtggccatcatgccttgaactgttggtcaagatagtgttaatttatacttgttgggttttaaaccttaagcaggatttctgaaatggtttcatctrtttcttccatttacacgtgaggaaagtataggtccagggagactcagtgcctgtgtctgtgcccatgacggggagttgctccaatgttgcatcagtggga

SEQ ID NO: 116444 - DNA, 201 bp, Homo sapiens
gacactcttcctctcctgtggccatcatgccttgaactgttggtcaagatagtgttaatttatacttgttgggttttaaaccttaagcaggatttctgaartggtttcatctatttcttccatttacacgtgaggaaagtataggtccagggagactcagtgcctgtgtctgtgcccatgacggggagttgctccaatgtt

SEQ ID NO: 116445 - DNA, 201 bp, Homo sapiens
aagaaatctattttttaactgaagatttaaaacgtatatttttttaaattatttttttcctgtgccatatcctggattctttctgaaggcagtaggtctgstgtggactgtcctctgctcatccaggcctcggcccctgcacgactgttctttctgccttagcctttgttgttagaggagcagagctgtttaggaagggac

SEQ ID NO: 116446 - DNA, 201 bp, Homo sapiens
gtagctgggaccacaggtgcacaccaccacgcccagctagtttttaaaatgctttgtagagatggggtcttgctctgtttcccaggctggtctcgaactcytggcctcaagcaatccttctgcctcagcctcccaaagtgctgggattacaggcaggatccaaggcacccagcctaaacagctttattgagataatttaca

SEQ ID NO: 116447 - DNA, 201 bp, Homo sapiens
tgctcccaggttctccagctggctcatggcagccagcttgagggctcccaggctgccgcggcttctaccaggagcccttctcacactgggggccagtgtcyggggcacagcagcctccctttatgtccaggtttcttgttgactgaagactgtcacagggcatctcttggcagtattatgccttgctgaaataaacccgag

SEQ ID NO: 116448 - DNA, 201 bp, Homo sapiens
ctcgtgcctcagcctgccaagtagttgggattacaggcatgagccatggtgcccagcaaaggtatgttcttgaagttgtcttttttctgagatttatgcaratggtgcatttggaaaaatagatctgttgggattactattttcaacaagattacttatgtgaaactgactccaagaatctttgggttaaattgatgctcc

SEQ ID NO: 116449 - DNA, 201 bp, Homo sapiens
aggagcctgagtcgccgatggagacgagatagtagccggctaagagcagggcctgagttcagacccggcctctctgcttgttagctctttgaccttgttcctctctctgtctctgcagtttccttgtcttaaaaggttaaacttgatactgcaggtgaagtgcttagcaaaatacctgatgtgtaacccttaataaagtta

SEQ ID NO: 116450 - DNA, 201 bp, Homo sapiens
caggagatcatatacatgaactgatgtgtaacctgcttgtttcatgtgttaatgcaggcgcacctgcactcatgccagcggggcagcacgcctgctgcagrggcccagagtggcgggaggcctgtctgtgtgtagaggttgaaggcgcctgtcgtgtctgcagttatttgtggggtgttggctcctccgtaggcctatttg

SEQ ID NO: 116451 - DNA, 201 bp, Homo sapiens
tcaggaggaagggtgtgggaaaggaaggcggcaagtccgaaaggaaagagcagacccagcagagggccaggggtcgatgccagagtgaggccactcagctrttctctgcagagcctttgggtgccgtggagtggggtctagagggatgtgaggtcagggcctgtgacgcgagtgtgtatcctgagagggctgaggcgtgaa

SEQ ID NO: 116452 - DNA, 201 bp, Homo sapiens
cggtgtcggggcaggaggcacgcgcgcggctgaggcgaggtcgctcggcgcagctgttgcggggccatggcggggaccgcgctcaagaggctgatggccgwgtacaaacgtgagtctggggacccgggccgtcagcagcgtcccgcgttcctgctcccgggcccgcgtcgtccggcggggctggggcagggagcctggcgg

SEQ ID NO: 116453 - DNA, 201 bp, Homo sapiens
tcattcatggaaaagactgccctttgcctctgggccatagctctgtgttccctcgagtcagggtctctgttggtacaggtatgcttctgggctttctcttstgccccattgttcaatttaactttgagccagtgctacgttgccttaatttccatagctctgtaaggaaggcttggtaactcatagatgaagctttctgtt

SEQ ID NO: 116454 - DNA, 201 bp, Homo sapiens
ctgccaaggcttggggtttgtactctctgaagcaacagcctgagcggtaccttggccctttttagccatggctggagctggaacagctgggacacagggcwccaagtaccaaggctgcacagagtagcagcggggctgggcctggcccacaaaaccatttttccctcctaggcctccctgcttgtgatgggaggggctgct

SEQ ID NO: 116455 - DNA, 201 bp, Homo sapiens
gagggaggtatttgctttttattttatatacttctgtatttgaatattttccaacattcttttattttcctagttaaataaggtcaaagtttatgttgtaraagtgattgtctatgttagaatatactataaagttcttataattgatgaacttatttagtacactttatagttcaaatatattagatttaaaaattttaa

SEQ ID NO: 116456 - DNA, 201 bp, Homo sapiens
aaattttttctcaccctacaggccccatgaatgaagagaacttttttgaatgggaggcattgatcatgtaagttaattttaggtgtactagtttttagggytttgctggaagtcagatgtaagaatcacatcagcagtgtgactgtgtccaaaagcatcagctggaaaaaagactgagttctccagtaatgcccagctctc

SEQ ID NO: 116457 - DNA, 201 bp, Homo sapiens
gaattgtagcaggtaaggtaccaaagttaacttccttataatttacttttaattgccaaagttccttcaaagttaaaatgttgtgaaattttttctcaccytacaggccccatgaatgaagagaacttttttgaatgggaggcattgatcatgtaagttaattttaggtgtactagtttttagggctttgctggaagtcag

SEQ ID NO: 116458 - DNA, 201 bp, Homo sapiens
gctcccaggctgccgcggcttctaccaggagcccttctcacactgggggccagtgtccggggcacagcagcctccctttatgtccaggtttcttgttgacygaagactgtcacagggcatctcttggcagtattatgccttgctgaaataaacccgagataataaaataggtgtttataatttgtattgtatgtaatctca

SEQ ID NO: 116459 - DNA, 201 bp, Homo sapiens
gcatggcctgctgctcttggcccagtcactttgcctctctttgacttatttggatcaaaacagagaggtttatcagcatcttctagacagatggttacagktcttgcccagctctagggtccatggcccgtgaccccattgccactaagccacggtgacgggggtgtagctgcagagagggtgggtgccctctttcattga

SEQ ID NO: 116460 - DNA, 201 bp, Homo sapiens
gggaataactctgctgaccctgccacgctcatggtggagtctgagcctgcaatcaaatcgagcgtggctgggatggcggcacaccaggggatgtggccacygtggctgtgggtgctagcatggcctgctgctcttggcccagtcactttgcctctctttgacttatttggatcaaaacagagaggtttatcagcatcttct

SEQ ID NO: 116461 - DNA, 201 bp, Homo sapiens
agagttttaaggtggtaattttggaatgttgtatgatcgtggttaaaataacctcaaatggcgtaggtggctttggcttccagaagtagccccttcaggtstgaaattttgacgagaaaagggtcctcaaagatgtgtctgaccacaccaggcatgttagcgcagccttgcctgccctgcctttgggccaggacttctttt

SEQ ID NO: 116462 - DNA, 201 bp, Homo sapiens
atactgataatgctgaagctattgagctgtatcttattgtggttttaatttgcattacccttatgattcacaatgttgagcattttctcatgtgcttattwgccatctgttttagtcagttcaggctgctgtaaaaaaataccaaagaccagggagcttaaacaacaaacatttattgctcccaattctggaggctgggaa

SEQ ID NO: 116463 - DNA, 201 bp, Homo sapiens
aagcttttgtgtgttctgctgccaggcctctacttagttgcccactgacattgtgtttctcccgcaccccacctgcttagcagtttacagtctatctgccktaatctgttatttttttcttataattaggcggtttggcttgagacacaagaatgggactagattttagatgactgggtgtaggaagcctagcaaattagg

SEQ ID NO: 116464 - DNA, 201 bp, Homo sapiens
attttgtgtacgcgtgtatatgctttggaagcaaaaaacaaaatggaaaaaatcaagtgccctgaaccattccctccagcctctgaactcatttgctgcamttctttattgaccagtagaggccactgttgaataacaaagctggcgggaaggccagcgcacacccgggcaggtctctgtgctgagcctgcattgccagga

SEQ ID NO: 116465 - DNA, 201 bp, Homo sapiens
ggagcctgagtcgccgatggagacgagatagtagccggctaagagcagggcctgagttcagacccggcctctctgcttgttagctctttgaccttgttcctctctctgtctctgcagtttccttgtcttaaaaggttaaacttgatactgcaggtgaagtgcttagcaaaatacctgatgtgtaacccttaataaagttag

SEQ ID NO: 116466 - DNA, 201 bp, Homo sapiens
tttgttctgtactagcatgtagaggtatttatagctgcaaagtaccccactggtatatgtatcataatttgactggtcctctgttgatagacactcaagtyctttttaatttctttttgtttttacaaatagtcctgaaatgaatagcctgtgtatacattttttatcttcaccaatgttatctgtgggatggattcctag

SEQ ID NO: 116467 - DNA, 201 bp, Homo sapiens
attaagtataaaagttagtggttttagtaaatttctagagttttgtagtcatcaccacagtccagttttagaacatttccaaaaagattcttatgtctatktgcagacagttcccattccaacccccaggcaatccctgctctttcctctgactatagatttgccttttctgacttttcctatgtgtggaatcatacactg

SEQ ID NO: 116468 - DNA, 201 bp, Homo sapiens
cactaagcattctttttaatgggtaagaactctaatgtgatactgagttggggtccccaagaccacccagggcggcgattctccaggaggacagaggccaygcaggtcacggtagtcacggctgtgatttcccacagggaggacactgagcaaaatcggccaagggaaaggttcctggggccgagtccaggggcaccatgc

SEQ ID NO: 116469 - DNA, 201 bp, Homo sapiens; identical to SEQ ID NO: 19628

SEQ ID NO: 116470 - DNA, 201 bp, Homo sapiens
tgcatttaatgtatgcatagcctctcataacttttaaatcatctcaaggttacttatagtacctaatgcaatgtaagtgctgcacaaatagttacactgattttttttacttgtatttttaaatcgtcattttttattgttatttttttcaaatattttgtattcctggttggtcgaatccatggatatgcagccgcagat

SEQ ID NO: 116471 - DNA, 201 bp, Homo sapiens; identical to SEQ ID NO: 19630

SEQ ID NO: 116472 - DNA, 201 bp, Homo sapiens
ggtattgggaggagatgatgccatatacaacgtaaacagctagagagaagtcaatgactggcttcaaaggacagggcgactcttgttaggggctaatgtcrgtcactttaagttgactgagttgaagccagttctcatttatcattcagaaaatcttagggcccttaaaaattatgctaaatctactctgagctctagaga

SEQ ID NO: 116473 - DNA, 201 bp, Homo sapiens; identical to SEQ ID NO: 19632

SEQ ID NO: 116474 - DNA, 201 bp, Homo sapiens
gttttttgttttcttttttctttctttctttctttttttttttgagacaggttctcactctgtcactcgggctagagtgcagtggtgtagtcatggctcayggcagcctctgcctcctaggctcaagcaatcctgccacctcagcctcccaagaagctgggattacagttgcatgccacctcgcttagctaatttttgtat

SEQ ID NO: 116475 - DNA, 201 bp, Homo sapiens
ccttccagttttaaaaattttagccattctattgggtgtatagcagtcttactgaggttttgttttatttatttatttttttttattttttatttttgagrtgctctctctgtcatccaggctggagtgcagtggcatgatctcagctcactgcaacatctgcctcctggcttcaagtaattctcctgcctcagcttccca

SEQ ID NO: 116476 - DNA, 201 bp, Homo sapiens
aggaatggcctctgaaaatttccctgataccaagattcgtctctttttttgaacttgtttcttatcagtaaacatgaaactgtatattattttgtgtacgygtgtatatgctttggaagcaaaaaacaaaatggaaaaaatcaagtgccctgaaccattccctccagcctctgaactcatttgctgcaattctttattgac

SEQ ID NO: 116477 - DNA, 201 bp, Homo sapiens; identical to SEQ ID NO: 19636

SEQ ID NO: 116478 - DNA, 201 bp, Homo sapiens
aagtgacttgagtctttgcttctttcaaaattgtgttgattttcttaagttttagttctttggctgggcgcagtggctcacgcctgtaatcccagcacttygtgggctgaggtgggcggatcacgaggtcaggagatggagaccatccgggctaacacggtgaaaccccctctctactaaaaatacaaaaaattagctggg

SEQ ID NO: 116479 - DNA, 201 bp, Homo sapiens
tcgcgtggccagttgttttttgttttcttttttctttctttctttctttttttttttgagacaggttctcactctgtcactcgggctagagtgcagtggtrtagtcatggctcatggcagcctctgcctcctaggctcaagcaatcctgccacctcagcctcccaagaagctgggattacagttgcatgccacctcgctta

SEQ ID NO: 116480 - DNA, 201 bp, Homo sapiens
gttttagttctttggctgggcgcagtggctcacgcctgtaatcccagcactttgtgggctgaggtgggcggatcacgaggtcaggagatggagaccatcckggctaacacggtgaaaccccctctctactaaaaatacaaaaaattagctgggcatggtggcggacccctgtagtcccagctactcaggaggctgaggcag

SEQ ID NO: 116481 - DNA, 201 bp, Homo sapiens
agctactttcatggtgggcattgagtgtctttggcttttctaggtgcacagtgcaaagctcttggtggatctaccgttctggggtctggaggatggttgtyctcttctcacagctccactaggcagtgccccagtggggactctgggagctccaaccccacatttcccttctgcaatgccctagcagatgttctccatgag

SEQ ID NO: 116482 - DNA, 201 bp, Homo sapiens
aaatgtacatgtctttctgtggatatatgcttttatttctcctgtgtaaataaccagggttataatgggaagtgtgtgtttaatttttaaagaaacggccmgttttcctctagttcacatttccctagcagtgtattaagtgttcccgttgccccacctccttgctgacacttcgcgtggccagttgttttttgttttctt

SEQ ID NO: 116483 - DNA, 201 bp, Homo sapiens
gggattggagttgggggtgtgatgtcctgtgagctgtgccttcgaagggccatccttgcagcagtaaccaatagtgtgatggaagacaaacagagacatcrtggtgttgcagtagcctggagagaaaagagaagggctgagtggtcccagggctaagaggaaggggtgggtttgggagaccttgaaggtacaggctctggg

SEQ ID NO: 116484 - DNA, 201 bp, Homo sapiens
cccaaacgtcagttattgaattctttgcacccacaggcccaacaccacgtggaagctgccaaggcttggggtttgtactctctgaagcaacagcctgagckgtaccttggccctttttagccatggctggagctggaacagctgggacacagggcaccaagtaccaaggctgcacagagtagcagcggggctgggcctggc

SEQ ID NO: 116485 - DNA, 201 bp, Homo sapiens
catcttccccctgtgtgcatgtcctaaatgtacatgtctttctgtggatatatgcttttatttctcctgtgtaaataaccagggttataatgggaagtgtrtgtttaatttttaaagaaacggccagttttcctctagttcacatttccctagcagtgtattaagtgttcccgttgccccacctccttgctgacacttcgc

SEQ ID NO: 116486 - DNA, 201 bp, Homo sapiens
cagcattttggtcaaaagcattcagcaagtctctaggaagttccagactttcccacatcttccttcttctaagcccttcaaactgttccaacctctgcctrctacccagttctgaagttgcttccacattttcaggttatctttatagcagtacccctggtaccaatttactgtattcatctgttttcacactcctataag

SEQ ID NO: 116487 - DNA, 201 bp, Homo sapiens
tgatttctttgatggatctgggcaaagaaaatcaaaagtcttctggaaaggatttatcattctagatggcattaagaacatctgtgattcatgggaggtcmccatatcaacaacaggcgtttgaaaaagttgatttcaatgctcatggatgactttaaggggaggaagcaactgcaggtgtggtagaaatggcaagggaac

SEQ ID NO: 116488 - DNA, 201 bp, Homo sapiens
tatgcagccgcagatacacagggcctcctgtaaacgttcaaataacgctcgccacctagtgtctgctaaagcagaacataaaggcacacctcagtttcccrcgcgctttgctttattgagcttcacttcgcagatcttgcattttttacaagtttacaagttttttacaagcaaccctgcatggaagcaagtctgttggca

SEQ ID NO: 116489 - DNA, 201 bp, Homo sapiens
tggaagaaagttaagctaaaagaatgaatgtgagaaaaaaaataagtggtgaatatacatgtagcttgatttcgtaaaactattggtgacaccgcccagtragagttgatgtttggcttaagcagaccaaaacgttgcaaatacaggctcactcacgtatggtcattcttcccttggtatctggaggggattggttccagg

SEQ ID NO: 116490 - DNA, 201 bp, Homo sapiens; identical to SEQ ID NO: 19695

SEQ ID NO: 116491 - DNA, 201 bp, Homo sapiens
gttttcctttaattatttgaacagttttcttggattttttggaagatgtctataatagctgcttacagtcatcatttgccatgtccaatatctagaccatmtcaggtttattttttttaacagtgaattaaatttacctatatcttttaatatctgatgatttgttttttgagacggggtcttgctctgttgccctggctg

SEQ ID NO: 116492 - DNA, 201 bp, Homo sapiens; identical to SEQ ID NO: 19710

SEQ ID NO: 116493 - DNA, 201 bp, Homo sapiens
agtctcacccctgcagaggcagcttgggggaaagtgaggagctggtgtgaaattccaggatgcccctgaacttgggaagcagcgggcaggagtgtggatgrcacgctcctcctcacactccagctctgttctctcgatggattggccacagcgctttattctacggtggtgtcacacagtaggggtatgagccatctctca

SEQ ID NO: 116494 - DNA, 201 bp, Homo sapiens; identical to SEQ ID NO: 19715

SEQ ID NO: 116495 - DNA, 201 bp, Homo sapiens
ttactgatcagacttgtgaggccaatcaaaataatgtttgtgatctctactactgttgattttgccctcggagcaaactgaataaacaagatgaaaactgaaaaaaaaaatgcatccttgtctcattcagttcttacaagaaaggctttcagcttttttccatttaatatgatgttagctgtgggtctgtcatacatggcc

SEQ ID NO: 116496 - DNA, 201 bp, Homo sapiens
gttaatgaaatcccctccaaggctgaagaccaagtggggtctcagagctgtggacagaacttagaagtctatggacccagagccgatctgtggccatgtgrgagtgaccttaaggcctagggacaagccgggtgaggccacaagttcagccctgtcacaggcaactcctttcactgctatagttcagaatcacacttaaaa

SEQ ID NO: 116497 - DNA, 201 bp, Homo sapiens
tctgcagacccatctcctgcagcaccccttcctgctgctgagcatgaatctccagacccgctgctcccagtgcagatgaggccacacctgtacactccctrgatgagtcctcagttggtcttctgcacatggtgcaggtgaaaagcatgctcagtgaaccctctgaattctggatcgagaatataatagaatgatctggag

SEQ ID NO: 116498 - DNA, 201 bp, Homo sapiens
ctatctattctgctgattacatagaatttgctgctaaaccctcttcagtgatcccttcacccagtgctcatcagaaggtggtgtcccgggtggagggcgcrgctgcagatgcccatgtggtctctcccagggctcctggggcccagctgcagtggccacagcggtgacttacccgcctgtggtggagtggccttgcttccc

SEQ ID NO: 116499 - DNA, 201 bp, Homo sapiens
agggcgcagctgcagatgcccatgtggtctctcccagggctcctggggcccagctgcagtggccacagcggtgacttacccgcctgtggtggagtggcctygcttccccactggctgtccactcctgctccaggccagcaagccctgcattgatggccaaagcctcagagcactgaggatcgggctttcccatgtggttgg

SEQ ID NO: 116500 - DNA, 201 bp, Homo sapiens; identical to SEQ ID NO: 19693

SEQ ID NO: 116501 - DNA, 201 bp, Homo sapiens
ccactcctgctccaggccagcaagccctgcattgatggccaaagcctcagagcactgaggatcgggctttcccatgtggttggtggatgtcctgcttcccrggtcgcggaggatctcaggtttacagaactggattagttctgcagcacacactcccatcactgatctacatatggcactttttaaaaattgatacataat

SEQ ID NO: 116502 - DNA, 201 bp, Homo sapiens; identical to SEQ ID NO: 19704

SEQ ID NO: 116503 - DNA, 201 bp, Homo sapiens; identical to SEQ ID NO: 19694

SEQ ID NO: 116504 - DNA, 201 bp, Homo sapiens; identical to SEQ ID NO: 19707

SEQ ID NO: 116505 - DNA, 201 bp, Homo sapiens
ggaaacagccttgaggaagaaaaacaaggaagacaacaggtgtgtgcttctgtgctgtggggatgcctgggtccaggtataaaggctacccagggaggccrtccccagacatcactgccctctgcctcgaccttatccagccacacgccaccatgtgccacaccagctgctcctcgggctgccagccagcctgctgcgcgc

SEQ ID NO: 116506 - DNA, 201 bp, Homo sapiens; identical to SEQ ID NO: 19708

SEQ ID NO: 116507 - DNA, 201 bp, Homo sapiens
ctcctcggcagagttgggtcactgtattctgctctgactccggctggtgacactgcattttggaaggtgacactgcattttggaagcctgccccagcagasagctgggaaatgggagtttatctcctaagtttcttctctctcaggaagcacagtctgcactgctggttgacggctgcctgaaaacgagcatctcctaaat

SEQ ID NO: 116508 - DNA, 201 bp, Homo sapiens; identical to SEQ ID NO: 19709

SEQ ID NO: 116509 - DNA, 201 bp, Homo sapiens
ctctgtgggctcccgactgattctagctgggccagctgcctcccttcccttgccttctgtgcctcagatatttcctgtcgcttctttgctgaattccagtygcttctttgctgaattccagtgtctctctcagatgtcccattcaaaatgttgttacctctcactcttttgggttctttgtggaagaggcaagtgtcaggt

SEQ ID NO: 116510 - DNA, 201 bp, Homo sapiens; identical to SEQ ID NO: 19698

SEQ ID NO: 116511 - DNA, 201 bp, Homo sapiens
gcagggcgggggtggccaggtggcagcaggaggtcccacagccctgggtgggcagcaggtggtggagatgcagcatagaaccagggcaggtcacgggcatycgggcagcaaggcccctggcatcttcctccttgggtgggttttcctcctctgccctctcctgttgatctttctgggttttcttgttgaggttactcagtt

SEQ ID NO: 116512 - DNA, 201 bp, Homo sapiens; identical to SEQ ID NO: 19700

SEQ ID NO: 116513 - DNA, 201 bp, Homo sapiens
ctcttctagctgatttgagacatacaatacattgttaactgtagtcaccctatgctgctatcaaatattagaacttattctttctgtgtaactgtatgttygtacccattaaccaaactcacttctcctctaacacacaccgttcttcacctctggtaatatcattctactctctacttccatgagatcaactttgtgaac

SEQ ID NO: 116514 - DNA, 201 bp, Homo sapiens
gcggggggcagggcgggggtggccaggtggcagcaggaggtcccacagccctgggtgggcagcaggtggtggagatgcagcatagaaccagggcaggtcaygggcatccgggcagcaaggcccctggcatcttcctccttgggtgggttttcctcctctgccctctcctgttgatctttctgggttttcttgttgaggtta

SEQ ID NO: 116515 - DNA, 201 bp, Homo sapiens
cagggcgggggtggccaggtggcagcaggaggtcccacagccctgggtgggcagcaggtggtggagatgcagcatagaaccagggcaggtcacgggcatcygggcagcaaggcccctggcatcttcctccttgggtgggttttcctcctctgccctctcctgttgatctttctgggttttcttgttgaggttactcagttc

SEQ ID NO: 116516 - DNA, 201 bp, Homo sapiens; identical to SEQ ID NO: 19713

SEQ ID NO: 116517 - DNA, 201 bp, Homo sapiens
tcaggtttacagaactggattagttctgcagcacacactcccatcactgatctacatatggcactttttaaaaattgatacataatatgtttacatatttrtggggcatatgaaatactttacacacagaggatacgtaatgatgaaatcaggatattcatcaccttgtctatcatttctctgtgttgaggacattttaca

SEQ ID NO: 116518 - DNA, 201 bp, Homo sapiens
ggaaggggcagaagggcgggcagcacctggaggaccggcaggaggcggccacacacaggcccgacctgagcatgcggcaggccagctggcaggaggtggaygcctcacacaggggccggcacagcagagctgcacggtgcggggggcagggcgggggtggccaggtggcagcaggaggtcccacagccctgggtgggcagc

SEQ ID NO: 116519 - DNA, 201 bp, Homo sapiens; identical to SEQ ID NO: 19701

SEQ ID NO: 116520 - DNA, 201 bp, Homo sapiens
atcttctgaactactttttaaaaactatctttattttcattttgttatgaaaaacggaaacatacagaaaagttgtaaaaattaaacagtgggcatccacrcgcccggccctggatctgcacctggcacgtcactcactgtgcttgatcggatactcacccccgagccggcctctgtcagtgcatcatatttcacaggcac

SEQ ID NO: 116521 - DNA, 201 bp, Homo sapiens
tttctaacaatatcatttcttctgatccatgaacatggaatgtctttccatttgtttgtgtcttcttcaatttattttatcagtgttttgtagttttcttwgcagaggtctttcacatccttggttatatttattgccaggtattttatttttaaaatagctattgtgaatgagattgtgttccatgggcaggtctatgca

SEQ ID NO: 116522 - DNA, 201 bp, Homo sapiens; identical to SEQ ID NO: 19717

SEQ ID NO: 116523 - DNA, 201 bp, Homo sapiens; identical to SEQ ID NO: 19718

SEQ ID NO: 116524 - DNA, 201 bp, Homo sapiens; identical to SEQ ID NO: 19720

SEQ ID NO: 116525 - DNA, 201 bp, Homo sapiens; identical to SEQ ID NO: 19721

SEQ ID NO: 116526 - DNA, 201 bp, Homo sapiens; identical to SEQ ID NO: 19722

SEQ ID NO: 116527 - DNA, 201 bp, Homo sapiens
ttcatagtgtgaaatatacttaaaggagtgtccagagactggattctggccctgactcagaacttgagaggcagccacctcagcctccgggcctctcttcwtctattaagaaaatcctacatctgttatctttcttgcctacaactcttttatgtctgaagctttttgtcttggcgattgctttgcaacattcacaaagga

SEQ ID NO: 116528 - DNA, 201 bp, Homo sapiens
caatgcaaggaggatgctaagagtaaccagttttttattttaattcctgttctccacagctccatacaacaggggatatgaaatgacaaggaaagtgttaragacatctgtttcctaaaaccattatcactcccaggcttagaaaatacttcacaatgttgatcaattcccccttgaaggtaaactaactccagatttgct

SEQ ID NO: 116529 - DNA, 201 bp, Homo sapiens
ggagcccatggggcttgaatgaggccttggattcttggatccaggagggggcacagccaggacagtggtttggaggaggataaagggcatgaagagccccsccaactgctgggaagtatgtacagagggcagatgagggagctcaggtgcaagactcagccacagaccagacaggcaggctctgagggcctgggtggggtg

SEQ ID NO: 116530 - DNA, 201 bp, Homo sapiens
atctccagaacccagtcttcagcaccacagcattccaacccctggcctggccctccacattcagtctactcaaactccttttcttttttttctttcttttytttttttttttttttgacagagtttcactcttgtcacccaggctggagtgcaatggcacgatctcagctcactgcaacctccacctcctgggttcaggcg

SEQ ID NO: 116531 - DNA, 201 bp, Homo sapiens
gctccctcgttagattaatttttgaaagcctaagactgtctctccagaaattcaaattgcacagagactttaaatagggagcctctttcccagggaacacrccatcaggaaaagagtgggtctccagcatgttcccacaacccattgtttactcagtgactccagagatggtccttgtgacaaagttttattagtcctcaa

SEQ ID NO: 116532 - DNA, 201 bp, Homo sapiens; identical to SEQ ID NO: 19724

SEQ ID NO: 116533 - DNA, 201 bp, Homo sapiens
cgtcatccacaccgcctgtatcattgatgtcttcggagtcactcacagacagtctatcatgaatgtcaatgtgaaaggtagggtagcctggggaggagatraagcaaggtggggaaatgaggatcagaaagaaggacaggaaggaaagagaagtctatccattgaacacctgctgtgctctgggccaagtgactttgctga

SEQ ID NO: 116534 - DNA, 201 bp, Homo sapiens; identical to SEQ ID NO: 19725

SEQ ID NO: 116535 - DNA, 201 bp, Homo sapiens
gatctccagaacccagtcttcagcaccacagcattccaacccctggcctggccctccacattcagtctactcaaactccttttcttttttttctttctttyttttttttttttttttgacagagtttcactcttgtcacccaggctggagtgcaatggcacgatctcagctcactgcaacctccacctcctgggttcaggc

SEQ ID NO: 116536 - DNA, 201 bp, Homo sapiens
atttctagaccttgcaagacaggagcaacatctcaaatgatagtctgagagaggagataatgggctaatgtggatttccttccgaatgtattcactgcacraggtcagaattcacattgcacttgaagatttctcccagtctactttaagttcacagattgcagatcccagagaactggtatcaactgaccagtgtcctgt

SEQ ID NO: 116537 - DNA, 201 bp, Homo sapiens; identical to SEQ ID NO: 19727

SEQ ID NO: 116538 - DNA, 201 bp, Homo sapiens
cagctcactgcaacctccacctcctgggttcaggcgattctcctgcctcagcctcccagtgtatctgagattacaggtgcctaacaccatgccaagctaatttttttttttttttttttgtatttttagtagagaggggtttcaccatgttggccaggcaggtcttaaattcctgacctcaggtgatccacccacctctgc

SEQ ID NO: 116539 - DNA, 201 bp, Homo sapiens
ccagtgtcagtcagagccacagaagaatgtatcctgagtctgttacaaccactgcacttgggagtggggagtggggcacatggatctgttcatgtgtttgsccctcccttagggatacttcctgacactgaaagcatgctctttctgggcgggtacccagctcctgttggaggcctgtgtccaagctactgtgccagtctt

SEQ ID NO: 116540 - DNA, 201 bp, Homo sapiens
tgctcacacagaactccagaacaagatcaagctgacagtgctggaaggagacattctggatgagccattcctgaagagagcctgccaggacgtgtcggtcrtcatccacaccgcctgtatcattgatgtcttcggagtcactcacagacagtctatcatgaatgtcaatgtgaaaggtagggtagcctggggaggagataa

SEQ ID NO: 116541 - DNA, 201 bp, Homo sapiens
tgtttcctggagagtgtttcctgctacctcggattggccatgacaggctggagctgccttgtgacaggagcaggagggtttctgggtcagaggatcatctscctgttagtggaggagacagagctgaaggagatcagggccttggacaggccttcagaccaggattgagggaggaattttctagtaagtaaacttgagtca

SEQ ID NO: 116542 - DNA, 201 bp, Homo sapiens
gactccagcaatgcttacattctaggcacacctgacagctcactgctcagattacttttctgaaatgagataaggtagaaacagatgtttgctctttcctrgtaaactgctgcacatgctgatttctgtgcctttgtttgcttgttctttccattgaattttgccctccattctaacaccccactctaaccgtccttgagc

SEQ ID NO: 116543 - DNA, 201 bp, Homo sapiens
tgatctccctttttagccctctccagggacaccctagaataagatcttctccccagcatcttctgtttcctggagagtgtttcctgctacctcggattggycatgacaggctggagctgccttgtgacaggagcaggagggtttctgggtcagaggatcatctgcctgttagtggaggagacagagctgaaggagatcagg

SEQ ID NO: 116544 - DNA, 201 bp, Homo sapiens; identical to SEQ ID NO: 19726

SEQ ID NO: 116545 - DNA, 201 bp, Homo sapiens
aaatatctgatctccctttttagccctctccagggacaccctagaataagatcttctccccagcatcttctgtttcctggagagtgtttcctgctacctcrgattggccatgacaggctggagctgccttgtgacaggagcaggagggtttctgggtcagaggatcatctgcctgttagtggaggagacagagctgaagga

SEQ ID NO: 116546 - DNA, 201 bp, Homo sapiens
tataaatatctgatctccctttttagccctctccagggacaccctagaataagatcttctccccagcatcttctgtttcctggagagtgtttcctgctacytcggattggccatgacaggctggagctgccttgtgacaggagcaggagggtttctgggtcagaggatcatctgcctgttagtggaggagacagagctgaa

SEQ ID NO: 116547 - DNA, 201 bp, Homo sapiens
ttgaaggtaaactaactccagatttgctccctcgttagattaatttttgaaagcctaagactgtctctccagaaattcaaattgcacagagactttaaatwgggagcctctttcccagggaacacaccatcaggaaaagagtgggtctccagcatgttcccacaacccattgtttactcagtgactccagagatggtcctt

SEQ ID NO: 116548 - DNA, 201 bp, Homo sapiens; identical to SEQ ID NO: 19740

SEQ ID NO: 116549 - DNA, 201 bp, Homo sapiens
agtgttagagacatctgtttcctaaaaccattatcactcccaggcttagaaaatacttcacaatgttgatcaattcccccttgaaggtaaactaactccaratttgctccctcgttagattaatttttgaaagcctaagactgtctctccagaaattcaaattgcacagagactttaaatagggagcctctttcccaggga

SEQ ID NO: 116550 - DNA, 201 bp, Homo sapiens
tgtataaatatctgatctccctttttagccctctccagggacaccctagaataagatcttctccccagcatcttctgtttcctggagagtgtttcctgctmcctcggattggccatgacaggctggagctgccttgtgacaggagcaggagggtttctgggtcagaggatcatctgcctgttagtggaggagacagagctg

SEQ ID NO: 116551 - DNA, 201 bp, Homo sapiens; identical to SEQ ID NO: 19742

SEQ ID NO: 116552 - DNA, 201 bp, Homo sapiens
ggccttggagtgttgtagccaacaaaatgtgccatcccttcatatacctgagggtgccaggtaggcagagctcctgcaccaagctctgctgcacctcatgygatgcaccacatggagacatcaaaggctcagagggaagaacaaggaaacctgacctggtggggacttttgggtcccttttctccacctaggtggctctgc

SEQ ID NO: 116553 - DNA, 201 bp, Homo sapiens; identical to SEQ ID NO: 19764

SEQ ID NO: 116554 - DNA, 201 bp, Homo sapiens
ctctgccagcgccctttgacattctgggctaaaagttgagcctctcagagccccagcccacctgggccctcctgccccgccctcggccggcgcccctcccycgaggcgtggcccctcggtcgggggtgggccaaccggctccttccttcccccacggcgctagctcccgctggccacctcgggaccgcagccacgtctgaa

SEQ ID NO: 116555 - DNA, 201 bp, Homo sapiens
ttgtaaaggggattttttttttttttttttttgaaacagtttcgctctgtcgcccaggctggagtgcagtggtgcaatctcagctcactgcaacctccgcytcctgggctcaagcagttctcctgccttagcctcctgagtagctaggattacaggtgcctgccaccacgcccggctaatttttgtatttttagtagagac

SEQ ID NO: 116556 - DNA, 201 bp, Homo sapiens
gggattttttttttttttttttttgaaacagtttcgctctgtcgcccaggctggagtgcagtggtgcaatctcagctcactgcaacctccgcttcctgggytcaagcagttctcctgccttagcctcctgagtagctaggattacaggtgcctgccaccacgcccggctaatttttgtatttttagtagagacggggtttc

SEQ ID NO: 116557 - DNA, 201 bp, Homo sapiens
gacaggatttgaacccaatccggcttcagaagccaagcttctaaggccagtcgcagtggttcacgcctgtaatcccagcactttgggaggccgaggcaggyggatcacctgaggtcaggagttcaagaccagcctggccaacatggtgaaaccccatctctactaaaaatacaaaaataagctgggcatggtggtgagtgc

SEQ ID NO: 116558 - DNA, 201 bp, Homo sapiens
gtggttcacgcctgtaatcccagcactttgggaggccgaggcaggtggatcacctgaggtcaggagttcaagaccagcctggccaacatggtgaaaccccrtctctactaaaaatacaaaaataagctgggcatggtggtgagtgcctgtaatcccagctacttgggaggctgaggcagaagaatcacttgaacccaggag

SEQ ID NO: 116559 - DNA, 201 bp, Homo sapiens
tggccaacatggtgaaaccccatctctactaaaaatacaaaaataagctgggcatggtggtgagtgcctgtaatcccagctacttgggaggctgaggcagragaatcacttgaacccaggaggcggaggttgcagtgagctgagattgcggtacttcactccagtctggacaacagcgagactccatctcagaaaaaacac

SEQ ID NO: 116560 - DNA, 201 bp, Homo sapiens
catggtgaaaccccatctctactaaaaatacaaaaataagctgggcatggtggtgagtgcctgtaatcccagctacttgggaggctgaggcagaagaatcrcttgaacccaggaggcggaggttgcagtgagctgagattgcggtacttcactccagtctggacaacagcgagactccatctcagaaaaaacacaagccag

SEQ ID NO: 116561 - DNA, 201 bp, Homo sapiens
cgtaccctgtgtgtgttgctgcacagaagaagtggggaaccctcagactttatggcctccagctgtaaggtactacaatttagaccaaggcaggtgctgtktgaagtgccctgtgagaatccctaaagctcccagccaaggaaaagggtttgtgtgttgctatctgcttatctgctctgaaatgccccagggcagtggctc

SEQ ID NO: 116562 - DNA, 201 bp, Homo sapiens
gtcttgctaatgttcttgaattaagaggaaaatatgggttgggtgtggtggcttatgcctgtaatcccagcactttgggaggtcgaggtgggtggatcacraagtcaggggttcgagaccagcctggccaagatggcaaaaccctgtctctactaaaaatacaaaaattagcagagcatggtggtgggcacctgtaatccc

SEQ ID NO: 116563 - DNA, 201 bp, Homo sapiens
ctgtccctcgtgacaattataggaggaaggtatttaaaaccccagatttatgaatgtgtactacatggcttagagaatgtctttgttcttgttcaggtggktataacaaaataccttaagagtgggtaacttggctggatgcagtggctcatgcctgtaatcccagcactgtgggaggccgagggggatgaatcacctgag

SEQ ID NO: 116564 - DNA, 201 bp, Homo sapiens
gcagtgaaagtgacataatctcggctcactgcaacctctccgcatcccaggttcaagcgattctcctgcctcaaattcctgagtagctgggattacaggcrcccgccaccacgcccggctaatttttgtatttttagtaaagatggggtttcactatgttggtcaggctggtctcaaactcctgacctcgtgatccgccct

SEQ ID NO: 116565 - DNA, 201 bp, Homo sapiens
gtgaaagtgacataatctcggctcactgcaacctctccgcatcccaggttcaagcgattctcctgcctcaaattcctgagtagctgggattacaggcaccygccaccacgcccggctaatttttgtatttttagtaaagatggggtttcactatgttggtcaggctggtctcaaactcctgacctcgtgatccgccctcct

SEQ ID NO: 116566 - DNA, 201 bp, Homo sapiens
aagtgacataatctcggctcactgcaacctctccgcatcccaggttcaagcgattctcctgcctcaaattcctgagtagctgggattacaggcacccgccyccacgcccggctaatttttgtatttttagtaaagatggggtttcactatgttggtcaggctggtctcaaactcctgacctcgtgatccgccctcctcagc

SEQ ID NO: 116567 - DNA, 201 bp, Homo sapiens
acataatctcggctcactgcaacctctccgcatcccaggttcaagcgattctcctgcctcaaattcctgagtagctgggattacaggcacccgccaccackcccggctaatttttgtatttttagtaaagatggggtttcactatgttggtcaggctggtctcaaactcctgacctcgtgatccgccctcctcagcctcgc

SEQ ID NO: 116568 - DNA, 201 bp, Homo sapiens
cctcttggtatccaagtcctttgttgtatgacccatccattctcccctgactcccaaggtgtcaggacatgcttgactggctcctgaatttgctctctgcrcatgggcagtacagtcaagcctcacagtgaacccaggtcagctttcaggacaaagaaagtggcctggctgactaggcacagtaaagccagggctgggtag

SEQ ID NO: 116569 - DNA, 201 bp, Homo sapiens
aatccacacaaggtccacatgttgcatttgactatgtgttttttggttttggtttttgtttttgtttttgtttgagatggagtctctctctgtcgcccagrctggagtgcagtggcgtgatctcagctcactgcagcttcggactcctggctccagtgattctcctgcctcagcctcctgggtagctaggattacaagcac

SEQ ID NO: 116570 - DNA, 201 bp, Homo sapiens
ttggtttttgtttttgtttttgtttgagatggagtctctctctgtcgcccagactggagtgcagtggcgtgatctcagctcactgcagcttcggactcctggctccagtgattctcctgcctcagcctcctgggtagctaggattacaagcacgtgccaccacacctggctactttttgtgtatttagtaaagacagggtt

SEQ ID NO: 116571 - DNA, 201 bp, Homo sapiens
accagccgggcacggtggctcacgcctgtaatcccagcactttgggagactgaggcaggcggatcacgaggtcaggagatcgagaccatcctggctaacasggtgaaacccggtctctactaaaaaatacaaaaaattagccaggcgtggcgtcgggcacctgtagtcccagctactcaggaggctgaggcaggagaatgg

SEQ ID NO: 116572 - DNA, 201 bp, Homo sapiens
acagtagctcagcacagggacagtaacagtaatgggggcatgtgtgtaaggaatgctttcccaggccccctcttcataggtgtttgcagcagcatctcacwgccctaagaggttaaatgttgcacatcccatcctacagaagtggaaatcgagcctcagagaagttgtgtcgcttttggggctatcttcccctgtagagtg

SEQ ID NO: 116573 - DNA, 201 bp, Homo sapiens
atcgagaccatcctggctaacacggtgaaacccggtctctactaaaaaatacaaaaaattagccaggcgtggcgtcgggcacctgtagtcccagctactcrggaggctgaggcaggagaatggcatgaacctgggaggcagagtttgcagtaagccgagatcgtgccactgcactccagcctaggcgacagagcaagactc

SEQ ID NO: 116574 - DNA, 201 bp, Homo sapiens
cacggtgaaacccggtctctactaaaaaatacaaaaaattagccaggcgtggcgtcgggcacctgtagtcccagctactcaggaggctgaggcaggagaayggcatgaacctgggaggcagagtttgcagtaagccgagatcgtgccactgcactccagcctaggcgacagagcaagactccgtctcaaaaaataaaaata

SEQ ID NO: 116575 - DNA, 201 bp, Homo sapiens
tgcagtcccagccccctgcctctgggggatgccatgcagctgcatcaccaggactggcagagttggcagatgtggccagggcttgggggccaggcacagcytcagccacagcctggcccagcccacagtcctggtgttgagagtgtgcatgggagctctgacaccttttagtgcagagcgggtaattcatgcccctggact

SEQ ID NO: 116576 - DNA, 201 bp, Homo sapiens
aggatgcccccgagagtgaggagggtcaagattaagattcgacttccttcactagggcctttgtcctcccaggagccccccttctctggggatttggggtrgggtggggtacaacgttcctctgtagtcagatgagaggtgactctgccagcgccctttgacattctgggctaaaagttgagcctctcagagccccagccc

SEQ ID NO: 116577 - DNA, 201 bp, Homo sapiens; identical to SEQ ID NO: 19762

SEQ ID NO: 116578 - DNA, 201 bp, Homo sapiens; identical to SEQ ID NO: 19763

SEQ ID NO: 116579 - DNA, 201 bp, Homo sapiens
actttttgtgtatttagtaaagacagggtttcaccatgtttggccaggctggtctccaactcctgacctaaggtgatctgcctgtcttggcctcccagagygctgggattacaggcgtgagccaccgcgcccggccctgagttattttcctataaaatagtctcttcctttttctgtcatagatttggaagtatgatttac

SEQ ID NO: 116580 - DNA, 201 bp, Homo sapiens; identical to SEQ ID NO: 19748

SEQ ID NO: 116581 - DNA, 201 bp, Homo sapiens
ctgtagtcccagctactcaggaggctgaggcaggagaatggcatgaacctgggaggcagagtttgcagtaagccgagatcgtgccactgcactccagcctrggcgacagagcaagactccgtctcaaaaaataaaaataaaaaaaaattacctgtaaactggccatagaaaaataaacaccaaacttcagtgtgcatctcc

SEQ ID NO: 116582 - DNA, 201 bp, Homo sapiens
ctcaccacaacctctgcttcccaggttcaagtgattttcctgcctcagcctccctagtacaggcatgtgccacaacgcctggctaattttgtatttttagbagagatagggtttctccatgttggtcaggctggtctcaaactcccaacctcaggtgatctgcctgccttggcctcccaaagtgctgggattaccagcatg

SEQ ID NO: 116583 - DNA, 201 bp, Homo sapiens
tgccactgcactccagcctaggcgacagagcaagactccgtctcaaaaaataaaaataaaaaaaaattacctgtaaactggccatagaaaaataaacaccmaacttcagtgtgcatctcccatactttgtatttttttaaataatggctttattgagatagaattcatgtatgttaaagtttatatatattatatataagt

SEQ ID NO: 116584 - DNA, 201 bp, Homo sapiens
ggatggaaagtgacttgtcactgtggtttaatttgcatttccccgctgcctaaaaatgttaagcatctttcctttttttttgagacggagtttcactcttrttgcccaggctggagtgcaatggtgcgatctcggctcaccacaacctctgcctcccaggttcaagtgattctcctgcctcagcctcccgagtagctgggt

SEQ ID NO: 116585 - DNA, 201 bp, Homo sapiens
ggtttaatttgcatttccccgctgcctaaaaatgttaagcatctttcctttttttttgagacggagtttcactcttgttgcccaggctggagtgcaatggygcgatctcggctcaccacaacctctgcctcccaggttcaagtgattctcctgcctcagcctcccgagtagctgggtttacaggcatgcgccaccatgcct

SEQ ID NO: 116586 - DNA, 201 bp, Homo sapiens
ctactaaaaaatacaaaaaattagccaggcgtggcgtcgggcacctgtagtcccagctactcaggaggctgaggcaggagaatggcatgaacctgggaggsagagtttgcagtaagccgagatcgtgccactgcactccagcctaggcgacagagcaagactccgtctcaaaaaataaaaataaaaaaaaattacctgtaa

SEQ ID NO: 116587 - DNA, 201 bp, Homo sapiens
cccgctgcctaaaaatgttaagcatctttcctttttttttgagacggagtttcactcttgttgcccaggctggagtgcaatggtgcgatctcggctcaccrcaacctctgcctcccaggttcaagtgattctcctgcctcagcctcccgagtagctgggtttacaggcatgcgccaccatgcctggctaattttgtattct

SEQ ID NO: 116588 - DNA, 201 bp, Homo sapiens
ctttcctttttttttgagacggagtttcactcttgttgcccaggctggagtgcaatggtgcgatctcggctcaccacaacctctgcctcccaggttcaagygattctcctgcctcagcctcccgagtagctgggtttacaggcatgcgccaccatgcctggctaattttgtattcttagtagagacggaatttctccatgt

SEQ ID NO: 116589 - DNA, 201 bp, Homo sapiens
tatgtgttaacttttccaaaaagtaaacatataataaatatgtgcccctcatcaagggaagactttcaagggggagataggccttccaggatgggaaaggrcactggacaaaggctcaggactgcgacacccaccacagagccctgcagtgagagtctggttcttcgatgtatttatgtatgtttgtttgtttatttattt

SEQ ID NO: 116590 - DNA, 201 bp, Homo sapiens
agtagagacggaatttctccatgttggtcaggctggtctcgaactcccgacctcaggtgatccaccagccttggcctcccaaagtgctgggattacaggcktgagccactgtgcccggcctttttttttttttttttttttttgaggcaaagtctcgctcttgttccccaggctagaatgcaatggcacaaccttggctca

SEQ ID NO: 116591 - DNA, 201 bp, Homo sapiens
gcccggcctttttttttttttttttttttttgaggcaaagtctcgctcttgttccccaggctagaatgcaatggcacaaccttggctcactgcaacctctscctcccgggttcaagcgattctccctccccgccgagtagctgggattacaggtgcctgccaccacgcctggctagtttttggtatttttagtagagacgg

SEQ ID NO: 116592 - DNA, 201 bp, Homo sapiens
gtctcaaacaaacaaaaaacgaaagaaccagagctaaagtcttgatgaaatggaaaggattggcctactatccatttttccaagatggcaattcattccarccaatcgagcattttctcctttgggagtaagaccagaaaacctggcctgtcctgcaagtcttgtgttattctgctcccagtcctcaagaactccactcat

SEQ ID NO: 116593 - DNA, 201 bp, Homo sapiens
cgcaaagtgctgggattacaggtgtgagccaccgcacctgaccttccagatttttttttaaccaagcaggcacagaaggaagtaacttgcacaagatcgckcagtaaatggtcaagtgggattcacactcttaacctcagtgctctatacctactgtctttaatgagacagacaccattctgcttctagtgtcttgggcgg

SEQ ID NO: 116594 - DNA, 201 bp, Homo sapiens
ccactgtgtgaattcttcccgcaagtcccttttcttttttctttttttttttttttttttttgagacagagtcttgctttgttgcccaggctggagtgcartggcacaatctcggctcactgcaacctccgcctcctgggctcaagcgattcttctgcctcatcttcacgagtagctgggattacaggcatgcaccaccac

SEQ ID NO: 116595 - DNA, 201 bp, Homo sapiens
tcttcccgcaagtcccttttcttttttctttttttttttttttttttttgagacagagtcttgctttgttgcccaggctggagtgcagtggcacaatctcrgctcactgcaacctccgcctcctgggctcaagcgattcttctgcctcatcttcacgagtagctgggattacaggcatgcaccaccacgcctagctaattt

SEQ ID NO: 116596 - DNA, 201 bp, Homo sapiens; identical to SEQ ID NO: 19752

SEQ ID NO: 116597 - DNA, 201 bp, Homo sapiens; identical to SEQ ID NO: 19754

SEQ ID NO: 116598 - DNA, 201 bp, Homo sapiens; identical to SEQ ID NO: 19758

SEQ ID NO: 116599 - DNA, 201 bp, Homo sapiens
ttgaccctgggaggttgaggctacattgaaccatgatcatgccagtgcactccagcctgagtgacagagcaagacacctatctctaaataaatgaccccayctgtggtattgttatagcaaaacaaaacagattaagagagactttttaatgaaaagacagattcacaaagaaaaacaatgtttttgtttctgtttttttg

SEQ ID NO: 116600 - DNA, 201 bp, Homo sapiens
agactccatctcaaaaaaaaaaaaaagactgggtaacttataaacaaatgttcttctcacaagtctggagactgggaagtccaagatcaagccaccagtgytgtctgatgagggcccactttttcaaagacagtgccttctagctgtgtcctcttatcgtagaagatgggagacagctctccagggccatttttttttttt

SEQ ID NO: 116601 - DNA, 201 bp, Homo sapiens; identical to SEQ ID NO: 19743

SEQ ID NO: 116602 - DNA, 201 bp, Homo sapiens
ttctactggccaaagggagtcccagggctcacccagattcagaggtggggaaactgagtccaccacttgagaagagtagctataaagacatatgagcgagrccagctgagcccagcactgcggccaagtcgaagactttaggagcaataaaagtgcttattgtgtttcagtcatttgagtgttgtggtggtttgttacgta

SEQ ID NO: 116603 - DNA, 201 bp, Homo sapiens
agggcatggtgtcgtgcacctgtagtcctagctacttgggaggctgagttgggaggactgcttgaccctgggaggttgaggctacattgaaccatgatcaygccagtgcactccagcctgagtgacagagcaagacacctatctctaaataaatgaccccatctgtggtattgttatagcaaaacaaaacagattaagaga

SEQ ID NO: 116604 - DNA, 201 bp, Homo sapiens; identical to SEQ ID NO: 19745

SEQ ID NO: 116605 - DNA, 201 bp, Homo sapiens
agatgctggctccttgatcttgggcttcccagcctccagaactgtaagccaatacacttctatttattatatatgacccttgctgggttcagtggctcacrcctgtaatcccaatactttgcaaggctgaggcaggaggatcacttgagaccaggcactcaagaccagcctgggcaacatagtgagaccccatctctacaa

SEQ ID NO: 116606 - DNA, 201 bp, Homo sapiens; identical to SEQ ID NO: 19746

SEQ ID NO: 116607 - DNA, 201 bp, Homo sapiens
ggcaaggagcaaaggatgcaggagcaaggagaaaacttccaggctcctcccttccaaagtcacccagccttgagatcattgcagatgcaacaggtgcaaasagaagaacactttgggaccttggaatgcgggaagctggctcagtgttccttccaccctgtgagacatgtgtgacatttttgttgttgttgctgttttgag

SEQ ID NO: 116608 - DNA, 201 bp, Homo sapiens
cagattatctctgtaatgagagggctctgtcaatacttagggaaacaggcaaatgtgctaaaagcacagtcccactccgtaccctgtgtgtgttgctgcasagaagaagtggggaaccctcagactttatggcctccagctgtaaggtactacaatttagaccaaggcaggtgctgtttgaagtgccctgtgagaatccct

SEQ ID NO: 116609 - DNA, 201 bp, Homo sapiens
cagagcagatgagtggctactctccctgtcttccaggttttcccagagtggctgtgggatctggagtcggctggtgacagagctgctgggcatcctccacycacccctgttgcctcctgatgagggaaatgggcagagaggagatctgctcacaagttagaccctggcttctctcagtgggcgatgtggacaggggaaggg

SEQ ID NO: 116610 - DNA, 201 bp, Homo sapiens
acctcagtgctctatacctactgtctttaatgagacagacaccattctgcttctagtgtcttgggcggggaaatgggtccagaaatacatgaacaagattkttctgggtagtgataatagtattaataataatttctcactatcacctattagtcaatattgaaatatatctgattacctctagggtatctcctggcagat

SEQ ID NO: 116611 - DNA, 201 bp, Homo sapiens
gccactgcactgggctaatttttgtatttttagtagagatggggtttggccatgttgcccaggctggtcttgagcttctgggcccaagcaattcacccgcytcagcctcccaaagtgccctaattacaggcatgagttaccgtacccggctggctcttggatttaagcccctgcccttcctccttcttactggatattcat

SEQ ID NO: 116612 - DNA, 201 bp, Homo sapiens
ctcagcctctggagtagctggggttacaaataggcacctgccaccatggtggctaatttttgtatttttagtagagacgaggtttcaccatgttggccagsctggtctcaaactcctgacctcaggtgatccacctgcctcggcctcccaaagtgctgggattatagacatgagccaccgtgcccaggtggctttgggatt

SEQ ID NO: 116613 - DNA, 201 bp, Homo sapiens
cttgggttttcctcattcaaagactttcccttggattcatagaatataagtgtggcccaggaaggaagattgctaagcaaatactcataagtgcactatgygccagactttgttctgctttacaaatatccactcactcactctttcaatcaagcccatgagttgggttatattgtttcccccactttacagatttttttt

SEQ ID NO: 116614 - DNA, 201 bp, Homo sapiens
gctggggttacaaataggcacctgccaccatggtggctaatttttgtatttttagtagagacgaggtttcaccatgttggccaggctggtctcaaactccygacctcaggtgatccacctgcctcggcctcccaaagtgctgggattatagacatgagccaccgtgcccaggtggctttgggattctcgaacagggatgac

SEQ ID NO: 116615 - DNA, 201 bp, Homo sapiens
ggcacctgccaccatggtggctaatttttgtatttttagtagagacgaggtttcaccatgttggccaggctggtctcaaactcctgacctcaggtgatccrcctgcctcggcctcccaaagtgctgggattatagacatgagccaccgtgcccaggtggctttgggattctcgaacagggatgacctccagccaactctaa

SEQ ID NO: 116616 - DNA, 201 bp, Homo sapiens
ctcgcaaagtgctgggattacaggtgtgagccaccgcacctgaccttccagatttttttttaaccaagcaggcacagaaggaagtaacttgcacaagatcrctcagtaaatggtcaagtgggattcacactcttaacctcagtgctctatacctactgtctttaatgagacagacaccattctgcttctagtgtcttgggc

SEQ ID NO: 116617 - DNA, 201 bp, Homo sapiens
ccaccatggtggctaatttttgtatttttagtagagacgaggtttcaccatgttggccaggctggtctcaaactcctgacctcaggtgatccacctgcctbggcctcccaaagtgctgggattatagacatgagccaccgtgcccaggtggctttgggattctcgaacagggatgacctccagccaactctaaacagagaa

SEQ ID NO: 116618 - DNA, 201 bp, Homo sapiens
accatgttggccaggctggtctcaaactcctgacctcaggtgatccacctgcctcggcctcccaaagtgctgggattatagacatgagccaccgtgcccasgtggctttgggattctcgaacagggatgacctccagccaactctaaacagagaaatctaaacctgggatctatacctagtgttacattttgttcccttag

SEQ ID NO: 116619 - DNA, 201 bp, Homo sapiens
ctagagtgcagtggcatgatctgagctcactgcaacctctgcctcctgggttccagcgattctcctgactccgcctcccgagtagctgggattacaggtgyccaccaccacacctggctaatttttgtattttttctctttttttttttttttttttttttaggggggacggagtctcactctgtctgtcacccaggctgg

SEQ ID NO: 116620 - DNA, 201 bp, Homo sapiens
ggagtgcagtggcacgatctcagctcactgcaagctctgcctcccagattcacgccattctcccacctcagcctcctgagtagctgggactacaggtgccygccaccacgcccggctaattttttgtatttttagtagagacagggtttcactgtgttagccaagaagatgtcgatctcttgaccttgtgatccaccctac

SEQ ID NO: 116621 - DNA, 201 bp, Homo sapiens
acgatctcagctcactgcaagctctgcctcccagattcacgccattctcccacctcagcctcctgagtagctgggactacaggtgcccgccaccacgcccsgctaattttttgtatttttagtagagacagggtttcactgtgttagccaagaagatgtcgatctcttgaccttgtgatccaccctactcagcctcccaag

SEQ ID NO: 116622 - DNA, 201 bp, Homo sapiens
cgatctcagctcactgcaagctctgcctcccagattcacgccattctcccacctcagcctcctgagtagctgggactacaggtgcccgccaccacgcccgrctaattttttgtatttttagtagagacagggtttcactgtgttagccaagaagatgtcgatctcttgaccttgtgatccaccctactcagcctcccaagt

SEQ ID NO: 116623 - DNA, 201 bp, Homo sapiens
tctcagctcactgcaagctctgcctcccagattcacgccattctcccacctcagcctcctgagtagctgggactacaggtgcccgccaccacgcccggctrattttttgtatttttagtagagacagggtttcactgtgttagccaagaagatgtcgatctcttgaccttgtgatccaccctactcagcctcccaagtgct

SEQ ID NO: 116624 - DNA, 201 bp, Homo sapiens; identical to SEQ ID NO: 19755

SEQ ID NO: 116625 - DNA, 201 bp, Homo sapiens
accggagaacaggtgttcgcttgcgaaaaaccacaatccaaagttccgggttgctcacaggcaagaagggaaagcaaagtacaatgcagggcagagtgggrcatgccttgacaggcacagaggaggtggctgcaggcgaggctgaaatgcctcccagtgggagtcagggctgcgcactcatagcatgggtgagggagttgg

SEQ ID NO: 116626 - DNA, 201 bp, Homo sapiens
agctctgcccctgcacccttcccacctcaccccaccaagggtttcactgtcactatctaatcaccactcttgggtgtaagtgacagaaactcatctcccarggacttaagcagaaagtgaatgcttccctcagctgaggggtccatgggtaagccttgcacaactggatccaaatgcttagatggtgctgtcagcttgcct

SEQ ID NO: 116627 - DNA, 201 bp, Homo sapiens
tagctccttcctaggtctctcaggccaggccaagaaatggtaagggatgtttagaagatcctgtgactttaaggtgctcggcagaaagccatgtgggctaytggggaattcctccctctggatgtggaccacagagtatctgagtgcaatggcaagtatttgttcatgtcctctactcatttgttgtttgggacattcctt

SEQ ID NO: 116628 - DNA, 201 bp, Homo sapiens
ggatctcatagcagttcctgtagtgtgtgagtcacttaagaagacctctggcttccctggaacacaggtaacaaataccttggcttgggatcaagatcctycctacccagggaagggctgagctggccaggacaactgtgtttgggccagagcagcagggtcctgcactctgcagggagcaatcacaggtgggagaagccc

SEQ ID NO: 116629 - DNA, 201 bp, Homo sapiens; identical to SEQ ID NO: 19744

SEQ ID NO: 116630 - DNA, 201 bp, Homo sapiens
ggagtctcgctctgtcacccaggctggagtgcagtggtgtgatcttggctcactgcaacctccacctcctggattcaagcaattctcctgcctcagcctcycgagtagctgggactacaggtgcctgccatcatgcctggctatttttatatttttagtagagacggggtttcaccatgttggtcaggctagtctcaaatt

SEQ ID NO: 116631 - DNA, 201 bp, Homo sapiens
aggaaaactaagggaaacaagaaaaaacaagaaaggaaatgtactctcagtacttcagctgtgagctgtgagcttcagctgtgagctggagtgttttgctstggttttaggtttttgattttttttaagaaagagggtcacactctgttgcccaagctggtgagcagtagaatgatataactcactgcaaccttgaactcc

SEQ ID NO: 116632 - DNA, 201 bp, Homo sapiens
cgcactcatagcatgggtgagggagttgggagagatggagcttgtttgatgaacactgattattcccggccatctgaagcctgggatatgggagataaggytggaaagctgaaggttactgaaaaggagaatgacaggatcagatgtgtggtgtaggcacctctgggggcaactgtacaagatggactgaagggaggccag

SEQ ID NO: 116633 - DNA, 201 bp, Homo sapiens
cactgcaacctctgcctcctgggttccagcgattctcctgactccgcctcccgagtagctgggattacaggtgcccaccaccacacctggctaatttttgkattttttctctttttttttttttttttttttttaggggggacggagtctcactctgtctgtcacccaggctggagtgcagtggcacgatctcagctcact

SEQ ID NO: 116634 - DNA, 201 bp, Homo sapiens
ccagggcctctgagggtgctatgctgctccgggagctggggctgggctcctctccagcctgagaggccggaacttttctggctttgttctacaaacagagwcaactggagtatagagagccagagagtgacttgctctaagtcacacccctcactggtagtagagacaggatttgaacccaatccggcttcagaagccaag

SEQ ID NO: 116635 - DNA, 201 bp, Homo sapiens
actgcgaggggagaaccccttttgtctcgatacttgagtttcaaaggacatgactttcaaaagctctccaagggctttttccatagaattattgagagacrgtagcttggcgggttgatttggaaccagacccaggggaattggagtcctgcgtcactgcttctgacggcttcatcttgggcttcaggacaggccctctgg

SEQ ID NO: 116636 - DNA, 201 bp, Homo sapiens
cattgggtatgttttttccagcctttgggattcttttttttttttttttctccttgtgacggggctttgctcttgttgcccaggctggaatgcaatggctyatgatctctgctcactgcaacctccacctcccagactcaaacaattctcctgcctcagcctctggagtagctggggttacaaataggcacctgccaccat

SEQ ID NO: 116637 - DNA, 201 bp, Homo sapiens
ccaccgtgccgctgcagctcgggcagagccgccaagctttggggtacgttggttcttcattctccgcgggggatgtccccacactcgggtcggctgggggycgggctggtggcacagctggggacgctcctctgtcctgcaccggggacctggggtggcgggaagagctgggagtggcttttccatcagcaacgtggaaag

SEQ ID NO: 116638 - DNA, 201 bp, Homo sapiens
gtaaccttcttggtggatggaaagtgacttgtcactgtggtttaatttgcatttccccgctgcctaaaaatgttaagcatctttcctttttttttgagacrgagtttcactcttgttgcccaggctggagtgcaatggtgcgatctcggctcaccacaacctctgcctcccaggttcaagtgattctcctgcctcagcctc

SEQ ID NO: 116639 - DNA, 201 bp, Homo sapiens
tgcagctgcatcaccaggactggcagagttggcagatgtggccagggcttgggggccaggcacagcttcagccacagcctggcccagcccacagtcctggkgttgagagtgtgcatgggagctctgacaccttttagtgcagagcgggtaattcatgcccctggacttctctggctaactgggtactcaggtcagctggga

SEQ ID NO: 116640 - DNA, 201 bp, Homo sapiens
ggggcaactgtacaagatggactgaagggaggccaggtggggactttgctggaatccaggagataaggatgcagccaggaccagcatgaccctcccgcggctggatgtccaggccatccactgggacaccatcaggtcccttgaccgtcacatagccagatgtgtcttcagtgtccccaacttgattgtcagctctgccag

SEQ ID NO: 116641 - DNA, 201 bp, Homo sapiens
agaaagagggtcacactctgttgcccaagctggtgagcagtagaatgatataactcactgcaaccttgaactcctgggctcaagagatcctcccaccttgrcctcccaaagtgctaggattacaggcacgagccaccgtgcctggcctccaggcatattttatcctttctcaagctatgtgtagtgttttgacaaaaataa

SEQ ID NO: 116642 - DNA, 201 bp, Homo sapiens
gtgagagtctggttcttcgatgtatttatgtatgtttgtttgtttatttatttatttactttttgagacggagtctcgctctgtcacccaggctggagtgyagtggtgtgatcttggctcactgcaacctccacctcctggattcaagcaattctcctgcctcagcctcccgagtagctgggactacaggtgcctgccatc

SEQ ID NO: 116643 - DNA, 201 bp, Homo sapiens
agagtctggttcttcgatgtatttatgtatgtttgtttgtttatttatttatttactttttgagacggagtctcgctctgtcacccaggctggagtgcagkggtgtgatcttggctcactgcaacctccacctcctggattcaagcaattctcctgcctcagcctcccgagtagctgggactacaggtgcctgccatcatg

SEQ ID NO: 116644 - DNA, 201 bp, Homo sapiens
gtttatttatttatttactttttgagacggagtctcgctctgtcacccaggctggagtgcagtggtgtgatcttggctcactgcaacctccacctcctggrttcaagcaattctcctgcctcagcctcccgagtagctgggactacaggtgcctgccatcatgcctggctatttttatatttttagtagagacggggtttc

SEQ ID NO: 116645 - DNA, 201 bp, Homo sapiens
actacaggtgcctgccatcatgcctggctatttttatatttttagtagagacggggtttcaccatgttggtcaggctagtctcaaattcctgaccttaggkgatccacccgcctcagcctcccgaagtgctgggtttacaggcgtgagtcaccgcacacccggcctatttatttatttattatttatttatttttgagaca

SEQ ID NO: 116646 - DNA, 201 bp, Homo sapiens
tcagcctcccgaagtgctgggtttacaggcgtgagtcaccgcacacccggcctatttatttatttattatttatttatttttgagacagggtctttctcckttttccaggctggagtgcagtcacacagtctctgctcactgcaacctgtgcctcctaggctcaagcaatcctcccacctcagcctcctgagtagttggga

SEQ ID NO: 116647 - DNA, 201 bp, Homo sapiens
gtgctgggtttacaggcgtgagtcaccgcacacccggcctatttatttatttattatttatttatttttgagacagggtctttctccgttttccaggctgragtgcagtcacacagtctctgctcactgcaacctgtgcctcctaggctcaagcaatcctcccacctcagcctcctgagtagttgggactacaggtccgcg

SEQ ID NO: 116648 - DNA, 201 bp, Homo sapiens; identical to SEQ ID NO: 19753

SEQ ID NO: 116649 - DNA, 201 bp, Homo sapiens
ctgctgggcatcctccacccacccctgttgcctcctgatgagggaaatgggcagagaggagatctgctcacaagttagaccctggcttctctcagtgggcratgtggacaggggaagggggcaggcaaggagcaaaggatgcaggagcaaggagaaaacttccaggctcctcccttccaaagtcacccagccttgagatca

SEQ ID NO: 116650 - DNA, 201 bp, Homo sapiens; identical to SEQ ID NO: 19756

SEQ ID NO: 116651 - DNA, 201 bp, Homo sapiens; identical to SEQ ID NO: 19759

SEQ ID NO: 116652 - DNA, 201 bp, Homo sapiens; identical to SEQ ID NO: 19757

SEQ ID NO: 116653 - DNA, 201 bp, Homo sapiens; identical to SEQ ID NO: 19760

SEQ ID NO: 116654 - DNA, 201 bp, Homo sapiens; identical to SEQ ID NO: 19761

SEQ ID NO: 116655 - DNA, 201 bp, Homo sapiens
tgctgggcatcctccacccacccctgttgcctcctgatgagggaaatgggcagagaggagatctgctcacaagttagaccctggcttctctcagtgggcgrtgtggacaggggaagggggcaggcaaggagcaaaggatgcaggagcaaggagaaaacttccaggctcctcccttccaaagtcacccagccttgagatcat

SEQ ID NO: 116656 - DNA, 201 bp, Homo sapiens
cccctgttgcctcctgatgagggaaatgggcagagaggagatctgctcacaagttagaccctggcttctctcagtgggcgatgtggacaggggaagggggmaggcaaggagcaaaggatgcaggagcaaggagaaaacttccaggctcctcccttccaaagtcacccagccttgagatcattgcagatgcaacaggtgcaa

SEQ ID NO: 116657 - DNA, 201 bp, Homo sapiens
ttgcctcctgatgagggaaatgggcagagaggagatctgctcacaagttagaccctggcttctctcagtgggcgatgtggacaggggaagggggcaggcarggagcaaaggatgcaggagcaaggagaaaacttccaggctcctcccttccaaagtcacccagccttgagatcattgcagatgcaacaggtgcaaacagaa

SEQ ID NO: 116658 - DNA, 201 bp, Homo sapiens
tgtgccacaacgcctggctaattttgtatttttaggagagatagggtttctccatgttggtcaggctggtctcaaactcccaacctcaggtgatctgcctkccttggcctcccaaagtgctgggattaccagcatgaacctccatacccgacctatgtgacattcttaaggtccacgaaagggctggtggttggaggccag

SEQ ID NO: 116659 - DNA, 201 bp, Homo sapiens; identical to SEQ ID NO: 19749

SEQ ID NO: 116660 - DNA, 201 bp, Homo sapiens; identical to SEQ ID NO: 19750

SEQ ID NO: 116661 - DNA, 201 bp, Homo sapiens
ctctactaaaaatacaaaattagcgaggcatggtcgcacatacctgtaatcccagctcctcgggaagctgaggcaggagaatcgcttgaacccaggaggcrgaggttgcagtgagccaagatcacgccattgcactccagcctgggtgacagagcaagactccatctcaaaaaaaaaaaaaagactgggtaacttataaac

SEQ ID NO: 116662 - DNA, 201 bp, Homo sapiens
ctactaaaaatacaaaattagcgaggcatggtcgcacatacctgtaatcccagctcctcgggaagctgaggcaggagaatcgcttgaacccaggaggcggwggttgcagtgagccaagatcacgccattgcactccagcctgggtgacagagcaagactccatctcaaaaaaaaaaaaaagactgggtaacttataaacaa

SEQ ID NO: 116663 - DNA, 201 bp, Homo sapiens
taaaaatacaaaattagcgaggcatggtcgcacatacctgtaatcccagctcctcgggaagctgaggcaggagaatcgcttgaacccaggaggcggaggtkgcagtgagccaagatcacgccattgcactccagcctgggtgacagagcaagactccatctcaaaaaaaaaaaaaagactgggtaacttataaacaaatgt

SEQ ID NO: 116664 - DNA, 201 bp, Homo sapiens
aattagcgaggcatggtcgcacatacctgtaatcccagctcctcgggaagctgaggcaggagaatcgcttgaacccaggaggcggaggttgcagtgagccragatcacgccattgcactccagcctgggtgacagagcaagactccatctcaaaaaaaaaaaaaagactgggtaacttataaacaaatgttcttctcacaa

SEQ ID NO: 116665 - DNA, 201 bp, Homo sapiens
aggcatggtcgcacatacctgtaatcccagctcctcgggaagctgaggcaggagaatcgcttgaacccaggaggcggaggttgcagtgagccaagatcacrccattgcactccagcctgggtgacagagcaagactccatctcaaaaaaaaaaaaaagactgggtaacttataaacaaatgttcttctcacaagtctggag

SEQ ID NO: 116666 - DNA, 201 bp, Homo sapiens
tcccagccccctgcctctgggggatgccatgcagctgcatcaccaggactggcagagttggcagatgtggccagggcttgggggccaggcacagcttcagycacagcctggcccagcccacagtcctggtgttgagagtgtgcatgggagctctgacaccttttagtgcagagcgggtaattcatgcccctggacttctct

SEQ ID NO: 116667 - DNA, 201 bp, Homo sapiens
ggtaatccgcccgcctcggcctcccaaagtgctgtgattacaggcatcagtcaccatgccctgcctcccttaatttttctacacctcactttcctcatctrtaaaatagggatgatcatcaggtccatgtcatagggttgctgtgaggatcaaatcagaaaatggatgggaaagactgggcatgtaggaaaccctcataga

SEQ ID NO: 116668 - DNA, 201 bp, Homo sapiens
gccaggcacagcttcagccacagcctggcccagcccacagtcctggtgttgagagtgtgcatgggagctctgacaccttttagtgcagagcgggtaattcrtgcccctggacttctctggctaactgggtactcaggtcagctgggagatggttttgcaggcacctgtctctctgcagtgatagctggacaaagacaaact

SEQ ID NO: 116669 - DNA, 201 bp, Homo sapiens
tgcaccaccatgcccagctaatttttgtatttttgtagacactgggtttcaccatattggccaggttggtctcaaactcctgacctcaagtgatctgcccrcctcagcctcccaaagtgctgagattacaggcatgagccactgtacccagtctccagggccttttaaagaatgtcactaatcccattcttgaggtctcca

SEQ ID NO: 116670 - DNA, 201 bp, Homo sapiens
catgcccagctaatttttgtatttttgtagacactgggtttcaccatattggccaggttggtctcaaactcctgacctcaagtgatctgcccacctcagcytcccaaagtgctgagattacaggcatgagccactgtacccagtctccagggccttttaaagaatgtcactaatcccattcttgaggtctccaccttcatt

SEQ ID NO: 116671 - DNA, 201 bp, Homo sapiens
tggatcacttgaggtcaggagtttgagaccagcctggccaacatggtgaaaccccatctctactaaaaataaaaaaaattagccgggtgtggtggtgcacrcctgtaattccagctactcaggaggctgaggcaggagaatcccttgaatccaggaggcggacagtgcagtgagccgagataatgccactgcactccagcc

SEQ ID NO: 116672 - DNA, 201 bp, Homo sapiens
gatggctgcaattaatggcctcttggtatccaagtcctttgttgtatgacccatccattctcccctgactcccaaggtgtcaggacatgcttgactggctcctgaatttgctctctgcgcatgggcagtacagtcaagcctcacagtgaacccaggtcagctttcaggacaaagaaagtggcctggctgactaggcacagt

SEQ ID NO: 116673 - DNA, 201 bp, Homo sapiens; identical to SEQ ID NO: 19751

SEQ ID NO: 116674 - DNA, 201 bp, Homo sapiens
tatgacccttgctgggttcagtggctcacgcctgtaatcccaatactttgcaaggctgaggcaggaggatcacttgagaccaggcactcaagaccagcctrggcaacatagtgagaccccatctctacaaagttaaaaaaaaattagcagggcatggtgtcgtgcacctgtagtcctagctacttgggaggctgagttggg

SEQ ID NO: 116675 - DNA, 201 bp, Homo sapiens
atgaaaagacagattcacaaagaaaaacaatgtttttgtttctgtttttttgaggcagagtcttgctcttgtcccccaggctggagtgcagtggcgccatyttggctcactgcaacctccgcctcccagtttcaagcgattctcctgcctcagcctcccgagtagctgggattacagatgtacaccaccacgcccggctaa

SEQ ID NO: 116676 - DNA, 201 bp, Homo sapiens
agaaaaacaatgtttttgtttctgtttttttgaggcagagtcttgctcttgtcccccaggctggagtgcagtggcgccatcttggctcactgcaacctccrcctcccagtttcaagcgattctcctgcctcagcctcccgagtagctgggattacagatgtacaccaccacgcccggctaattttttttgtatttttagta

SEQ ID NO: 116677 - DNA, 201 bp, Homo sapiens
tttttttgaggcagagtcttgctcttgtcccccaggctggagtgcagtggcgccatcttggctcactgcaacctccgcctcccagtttcaagcgattctcytgcctcagcctcccgagtagctgggattacagatgtacaccaccacgcccggctaattttttttgtatttttagtagagatggggtttcaccatgtcgat

SEQ ID NO: 116678 - DNA, 201 bp, Homo sapiens
tcctagaaaggccgtttctgaagactcagcaggaccatggctgcctcattgtcatcttctgggaacgtcttaggaccttttgaaagagcccagcggacacmtgcgggcttgtgtgcttttccctcagagacaacggttctttccagttttgctctacacagttccgtatcttcagagctcctgcagaattgtcagggacta

SEQ ID NO: 116679 - DNA, 201 bp, Homo sapiens
gaaaccccatctctactaaaaatacaaaaattagccaggcgtggtggtggtggtgcacgcttgtaatcccagctaatcaggaggctgaggcaggagaatcrcttaaacctgggaggcggaggttgcagtgagctgagatcgcgccactgcactccagcctgggcgatagagtgtgactctctcaaacaacaacaacaacaa

SEQ ID NO: 116680 - DNA, 201 bp, Homo sapiens
cgcctggctaattttgtatttttaggagagatagggtttctccatgttggtcaggctggtctcaaactcccaacctcaggtgatctgcctgccttggcctsccaaagtgctgggattaccagcatgaacctccatacccgacctatgtgacattcttaaggtccacgaaagggctggtggttggaggccagagggtggcct

SEQ ID NO: 116681 - DNA, 201 bp, Homo sapiens
tatatcttcaccctgtaatggttgagaccaggccaatcccttctccgcttactataatggttggaactaaacgtcaccaaggtggcttctccttggctgaragatggaaagggtggaatttgctcctgggtcccctaggccccagtgaaggcaggagataaaccatcctctcccttcttacaccatgaggccaagatcctc

SEQ ID NO: 116682 - DNA, 201 bp, Homo sapiens
tatcattctggtgagtaattttgatagtggggggtgctgtatgtatgtgggggcatgaggcatatggaaaaatctccacgctttccatataattttcctaygaacctaaaattgctctaagaaacttgtctttttttaatcacacaaaaatgactaaataactgtaaataaactgttccaaatgcctcgatttgataagtg

SEQ ID NO: 116683 - DNA, 201 bp, Homo sapiens
aggaggggggtttcaaaggatgagacaacaggagagaagcagcagagaggccgggggaagcagaggtttgggaacagagaaggtagctggaggcgcagcascgagcagagggcagagccaggagtgggagccaggcgggccccagtggcagggctcttgggcctccctccctgcagattattagattctaagaattgtaca

SEQ ID NO: 116684 - DNA, 201 bp, Homo sapiens
ttacctggcctctaggaggcttccctccaggaagccaggttcaatgcaggaagtgtactgcagttgacaaagtcccggggatatgagttggacatgaagaygttgttcttagacacggtggtgatgcctgtgttgtcgcagatgatccggggcaatgagatctgggccagggcctgtcgctgctgcatgctgaacacaccc

SEQ ID NO: 116685 - DNA, 201 bp, Homo sapiens; identical to SEQ ID NO: 19789

SEQ ID NO: 116686 - DNA, 201 bp, Homo sapiens
acagcctccctctgcagaggtttaaaccttcttacaccctttcctcttgattttattctccctccagattatcacctttagggactacctacccattttgytaggtgaccacatgcagaagtggatacccccatatcaaggctacagtgaatctgtggatcccagaatttccaatgtcttcaccttcgccttccgctttgg

SEQ ID NO: 116687 - DNA, 201 bp, Homo sapiens
tacagtgaatctgtggatcccagaatttccaatgtcttcaccttcgccttccgctttggccacttggaggtcccctctagtatgttccgcctggatgagarttatcagccatgggggccagaaccagaactccccctccacaccctcttcttcaacacttggaggatggtcaaagatggtatgccctttcagggaagtgct

SEQ ID NO: 116688 - DNA, 201 bp, Homo sapiens
tgcagataaaaaacaatggattccctccttccccatcccaaaggctgtaagcccagactttctagggctgatagagctggagtggacatggccccaaaggrggctgtgaacaggaagtccccgggatgagacagcctcagtctctccaccctagggtacaattcctggagagccttctgtgacctctcacagccgcagaca

SEQ ID NO: 116689 - DNA, 201 bp, Homo sapiens
cccattatgcaacgttcctcagcagaacatatggaagaaaaagctgactccatgaactagagctttaaaaataccttttttttttttttttttttttttttgagacagggtcttactctgtcacccaggctggagtgcaagggcgcaatctcagctcactgcggccttgacctcctgggctcacatgatcctcctacctca

SEQ ID NO: 116690 - DNA, 201 bp, Homo sapiens
ccagtctttccattcttctgtatttctttcagaactggagattggatgaactttcctcagttgcccctgaatcattcctgtggtttatcattcctcttgcyctgacattgttacattaaagtgacacacaaagactgtcactttagcatcaaggtcataaacttagcacaaagatgacaaagatagtacgtttcatatgcc

SEQ ID NO: 116691 - DNA, 201 bp, Homo sapiens
ggttctggactacttttgtgggctttaggtccaccaaagcttagtttcctgagccttgcaatgctattctggtctacttcactcttctggtgtttgggggsttcccactcaatccctgctggtgctgtctgcaaggcaggaaagtacttccctggctgcctgctgttgctgagcaaccttctaggggaacaggaaccactg

SEQ ID NO: 116692 - DNA, 201 bp, Homo sapiens; identical to SEQ ID NO: 19793

SEQ ID NO: 116693 - DNA, 201 bp, Homo sapiens
gacccctgtctctacaaaaaatttaaaaactagcaacacatggtggcacatgcctgtagtcccagctactctggaggctgaaacaggaggatcacttgagyccacgaggttgaggcttcagttagccaagataatgccattgcactccagcctgggcaacagagcaagactgtccagatagatagatagatgatgatagat

SEQ ID NO: 116694 - DNA, 201 bp, Homo sapiens
tgcctgtgttgtcgcagatgatccggggcaatgagatctgggccagggcctgtcgctgctgcatgctgaacacaccctcgttctcccaccaaaacctgcakggggaacacccatggacactgtgcccaaggatattctgggctggcagggcatcgatgggcttgtgctgctcccaggatataacaaagccacaacaaatgc

SEQ ID NO: 116695 - DNA, 201 bp, Homo sapiens
tgtgtgtctctggaagcggcacctttccccggggcgggggagccccgcgccttcagggggtgggcgcagttcagagaccccaaatttgagaggcccccttmtctgcgtcccctccgcctcgagcagaggctccttcccccatggggtcctgggctttggagccccggagccggcctgccgaagctcagcgaggatcgtgct

SEQ ID NO: 116696 - DNA, 201 bp, Homo sapiens
ggaagacgcgcaacggcttccctctcccgctggtgagggcaggccgggccggggtgaaggatgggagccagaggggacgggatgcactacccaaacacgcwgtgaaaggaggaggagggatcggtgggggcagcaggggtgcgcgatggagatctgcacagacccccaccttccgctagagggcagcagagctcggagccc

SEQ ID NO: 116697 - DNA, 201 bp, Homo sapiens
cgttggcgatgcgtgggtccactgagtcattgtaggaacggtacgtgggcaggtacttcctcatggccgttggccccagcaccaggggcaggtagtcccgrtaagtgatgatctaaagacaagtcatttggaatggcctctccacccactcctccacagcaaatgccgcctggcagcacaggagggccagagtctctgcct

SEQ ID NO: 116698 - DNA, 201 bp, Homo sapiens
gggtgtggccgtagcggaaggcattggtgaagacgttggcgatgcgtgggtccactgagtcattgtaggaacggtacgtgggcaggtacttcctcatggcygttggccccagcaccaggggcaggtagtcccggtaagtgatgatctaaagacaagtcatttggaatggcctctccacccactcctccacagcaaatgccg

SEQ ID NO: 116699 - DNA, 201 bp, Homo sapiens
aggcttccctccaggaagccaggttcaatgcaggaagtgtactgcagttgacaaagtcccggggatatgagttggacatgaagatgttgttcttagacacrgtggtgatgcctgtgttgtcgcagatgatccggggcaatgagatctgggccagggcctgtcgctgctgcatgctgaacacaccctcgttctcccaccaaa

SEQ ID NO: 116700 - DNA, 201 bp, Homo sapiens
atcccagcctggacttgacttcactgtctctggaggtgggctgtggtgctcctgctcccgtggtgagatgcgacccgtgcagcccttaccgcaccattacsggagactgcaataacaggtggcggggcttggggtgtgggggccgaccattccagccactccgccccgccctgccaaggcctttgtcccttgggcactcta

SEQ ID NO: 116701 - DNA, 201 bp, Homo sapiens
agacacaaaaccgagttctttcttgtttttcataaaaatatgcactcacaccaagaatttacaattttaaatagatttcctggcctggtgcagtggctcaygcctgtaatcccaacactttgggaggcttaggtgggaggattgcttgaggccacaagttcgagaacagcctgggcaacatagcaagacccctgtctctac

SEQ ID NO: 116702 - DNA, 201 bp, Homo sapiens
tggacaaaccccctggccaccctgacattgcagaaggccagctcttaggccaagatacctttatagatcttttggattttgtgttcacatatatcccacakcaatccagacacaaaaccgagttctttcttgtttttcataaaaatatgcactcacaccaagaatttacaattttaaatagatttcctggcctggtgcagt

SEQ ID NO: 116703 - DNA, 201 bp, Homo sapiens
gacaccgagctggggagtagcgagtactccaaagcccagtgtgatgagtactgtatccagggagacaactgcttccccatcatggtacggccctgcagctrggcatctctgactagccccttgcccaccctgatgtagcagacattcccagctcatcagctaggatctctggatagatctgggatactgatttggtagttt

SEQ ID NO: 116704 - DNA, 201 bp, Homo sapiens
ggagccccgcgccttcagggggtgggcgcagttcagagaccccaaatttgagaggcccccttctctgcgtcccctccgcctcgagcagaggctccttcccycatggggtcctgggctttggagccccggagccggcctgccgaagctcagcgaggatcgtgctggtttcaggaggaagcctgcgctgggcgccgccaacag

SEQ ID NO: 116705 - DNA, 201 bp, Homo sapiens
caaggttactggagtgagcctgtagcagatgcacccatggcagcaaggggaagagcccagggcccacagggcaccagtagagtcaactgccctccgatccygtacaggggcaacgtgggcgccttccctcaggaaacgcacactctagggagagggcagacattgagaaaaaaagtaaccttattctttcctctcgctgtc

SEQ ID NO: 116706 - DNA, 201 bp, Homo sapiens
ttgctgagccgctggtggaaaggggtcgggtggggcctctcctggcctgcctcttgggcaagcagttccagcagatccgtgatggagacaggcaagtgcgycctcagccagggagggaagggcagggcccttctccaagaggggtgtcccaaggtcctgcgtgagcgctgactccggatctcagtgtgagtagggcttttc

SEQ ID NO: 116707 - DNA, 201 bp, Homo sapiens
aggaaactggcttgcagggagcaatgcatcctgcagggaaggagggaggggaactcaaaggcaggctccagccttggtaacagcgtttctcacacctgtgmcaagacaggtacagcatctcccgaccacaggctgtcagggcagaattgaacattctggatcacttggtcccacctcctcccatagcaagccaggacccca

SEQ ID NO: 116708 - DNA, 201 bp, Homo sapiens
tgtgctcttctctccctccttccagcctgggatgtccaggtgacccacattcaactaagagaaaatgtctggtggaggcagaggcaagccatgaatgatgwtcccactcttcccccaacctaagcatggcttctgggtctcccttggcaggtggaattgatcctctggtgcggggcctgctggccaagaaatccaagctga

SEQ ID NO: 116709 - DNA, 201 bp, Homo sapiens
ccgcgagcataaccggctggccagagaactaaagagactcaaccctcagtgggatggagagaagctctaccaggaagcccggaaaatcctgggagccttcrtgcaggtagggagtcccaggagcactgtcacctggtcccacctggctcccactcctggctctgccctctgctggctgctgtgcctcaggctctctcctct

SEQ ID NO: 116710 - DNA, 201 bp, Homo sapiens
atttaccaaaatccctaggtgatagtaggcacattacagtgtgagaggcttgccgagggactatctctgccctctccctctgcaacctccagatgctgaayttctctgctctaggagttttattcattcagcatgcacccaacacctattatgtattgacatgcttaggtcctgggaaaacaaataaataagatggagccc

SEQ ID NO: 116711 - DNA, 201 bp, Homo sapiens
tgaacacagtgctgaagagcaagatgctggccaagaagttactgggtctctacgggacccctgacaacatcgacatctggataggggccattgctgagccrctggtggaaaggggtcgggtggggcctctcctggcctgcctcttgggcaagcagttccagcagatccgtgatggagacaggcaagtgcgtcctcagccag

SEQ ID NO: 116712 - DNA, 201 bp, Homo sapiens
tcaggcacctgccaccacgtcctgctgatttttgtatttttagtagagatagggtttcaccgtgttggccaggctggtctcaaactcctgaccttaagcgktccacccaccttggcctcccaaaatgctgagattacagacatgagccaccgcgcctggccatcattctattttttggtacccaccaaccatctccacctc

SEQ ID NO: 116713 - DNA, 201 bp, Homo sapiens
tgcctcaggctctctcctctgttcccacacctccgtttcccccggcccctctgctgcttctctcttgttgtctcattctttgaaatccccttcctttcatwtcttcagcttctctgtctcaaaatgaatctctggatttggagtgttggaaagtcacttgtgcgttggtcccttcagtgtgcctgcctgggtgccattact

SEQ ID NO: 116714 - DNA, 201 bp, Homo sapiens
gactgtccagatagatagatagatgatgatagatatatagatatatagatatatagatagatagatagatagatagatagatagatagatagatagatagdctctcctaaagattagagggcacagggagaagtcctttatccccttatgagacacctggtctttggccatttaactgttcccccatcgttactcctctct

SEQ ID NO: 116715 - DNA, 201 bp, Homo sapiens
gagtcaggccaaggtccaagtcaacaaggccttcctggactcccgaaccaggtacgtgagacacacacacacacacacacacacacacacacacacacacacttcccttcacaggcttcctgttcatgacaagcacatctaggccagcccggatgagccaatgaggtgaacaatgataaaacttacccttccatcctccta

SEQ ID NO: 116716 - DNA, 201 bp, Homo sapiens
tggggtggggggaagtaacagagagaatcttggccagagaggtatttattcatgccttgccccttctctagagttagctggcaaaaagtacaacaagatayaaattattagggggaccacgaaagggcagagggaaaaattggaggcaggcaggggtgaaggaggctgaaatgacctgatccatatacagaggtctcctgg

SEQ ID NO: 116717 - DNA, 201 bp, Homo sapiens
tgagtcaggccaaggtccaagtcaacaaggccttcctggactcccgaaccaggtacgtgagacacacacacacacacacacacacacacacacacacacacacttcccttcacaggcttcctgttcatgacaagcacatctaggccagcccggatgagccaatgaggtgaacaatgataaaacttacccttccatcctcct

SEQ ID NO: 116718 - DNA, 201 bp, Homo sapiens
gtgagtcaggccaaggtccaagtcaacaaggccttcctggactcccgaaccaggtacgtgagacacacacacacacacacacacacacacacacacacacacacttcccttcacaggcttcctgttcatgacaagcacatctaggccagcccggatgagccaatgaggtgaacaatgataaaacttacccttccatcctcc

SEQ ID NO: 116719 - DNA, 201 bp, Homo sapiens
  misc_feature (1)...(201): n = A,T,C or G
tgagatgcgacccgtgcagcccttaccgcaccattacgggagactgcaataacaggtggcggggcttggggtgtgggggccgaccattccagccactccgncccgccctgccaaggcctttgtcccttgggcactctaggcagatctgccactgccttgcccacctgggctggcgttcccaccttccccaccttctcaaga

SEQ ID NO: 116720 - DNA, 201 bp, Homo sapiens
aggcttttctgtgtctgaaaactatgtcagagaatcataaactcttagggctggaaggtaccatagacctctcttatccaccttgtttaggaactgagacytaagcaatttaatgtgtccagagtcacacaggaatttgggggaaaacagtgacagaatggtgctccctgtgctgttcttgagacagtgtgatgaaatctg

SEQ ID NO: 116721 - DNA, 201 bp, Homo sapiens
tgcagcccctcacctgggaggccgtggtccctgctgcgctgcatgttcagagcaggcaggtccagcccaatcctcatgacctgctcaaacaatcgctcccrgatctcatccactgcaatttggttctgacgattcagcttggcaggggtggccatgaggccccggaggatggggtcaatgccacctggggaccagaggagc

SEQ ID NO: 116722 - DNA, 201 bp, Homo sapiens
caaggattctcttaccctcactaactaacttcctaaataatttctttctagctcctatatcaatatcaggtctgacttcaaggcacatttgggaggagacragggaagcccagtgaggccagtctcatttgaattacaagtgaataaattgaattttaagctgtatgcaattattattctataatctatcatgtatattta

SEQ ID NO: 116723 - DNA, 201 bp, Homo sapiens
ctttttattagaaggaaaccttaccaaggattctcttaccctcactaactaacttcctaaataatttctttctagctcctatatcaatatcaggtctgacytcaaggcacatttgggaggagacgagggaagcccagtgaggccagtctcatttgaattacaagtgaataaattgaattttaagctgtatgcaattattat

SEQ ID NO: 116724 - DNA, 201 bp, Homo sapiens; identical to SEQ ID NO: 19802

SEQ ID NO: 116725 - DNA, 201 bp, Homo sapiens
cttttctattgtagactgctgtgattgcacctgccatcttatgcagaaatgacctgaagacagactgaaacaacgtgttctacagcctgaaaatatctaccttgacttacagttttattaatgctggtgtgatcagactggacaaaaattagcatatgttattaactgatctaattcaagtgccaattcttaatagaaaca

SEQ ID NO: 116726 - DNA, 201 bp, Homo sapiens
ctttatccaactaatgagggattgttagcacataaataacattccaagagtgtgttttgtccatttcagtaagtcaaatacttattcaattggtgacaaargcaagatctaaattcacgagcactttatgtccttcctcagtggaaggtataacaggaagtaaattaaggttctatataatttattggatttttaaaagct

SEQ ID NO: 116727 - DNA, 201 bp, Homo sapiens; identical to SEQ ID NO: 19803

SEQ ID NO: 116728 - DNA, 201 bp, Homo sapiens
ggcattttatgtcccagaaaagaatgtggtttccattgttgaatgttccatgcaaacttgagaagaatatacatgctgctgttattgaatgaagtggtatwtaagtatcaattataccaagttgatttttagtattgttcaggtcaacaatgtccttactgattttctgcttactgatatatcacttgtgaaaagaaatgt

SEQ ID NO: 116729 - DNA, 201 bp, Homo sapiens
tttatttttatttacttcacattctttacaatatttgtttgaaactactgtttgatacatttatcatttaaaagtgtgctgttaaatcttcaaatgttctrggatttcccaactatattttatgcatttctagtttaattgtattgttttctgaacacatggttttcatgatttctgtgcctttaagttattaatatgtgt

SEQ ID NO: 116730 - DNA, 201 bp, Homo sapiens
actgacaaaatacatatcagcccctaccccgccccccaatattcattgaactttgaattgcttcagaacacaggtgtggcctgaaggtattcccttattarggaaatgttgtgactgctgtcttctagtcaaacttgtaaagaaaaagatttcagttcagtatttgcagcaagaagcttgaatcctgttctttttattgca

SEQ ID NO: 116731 - DNA, 201 bp, Homo sapiens
agtttaagtttttttcctcattgtgggggatgataagaagaaatgatctgggaaaattaagtaacgacatcctagaaaagtgagaacaatctcatttaccrtcatgtatccagtagtgtataattcattttgatggcttctatttttggccaaatgagaactaagccagtgcctgagactgtcagaagctgactggtctac

SEQ ID NO: 116732 - DNA, 201 bp, Homo sapiens; identical to SEQ ID NO: 19804

SEQ ID NO: 116733 - DNA, 201 bp, Homo sapiens
atgccatttacttctaggtttctggtaggtattaaatatgcacaatattccatagctcactgaggattttaaaattataagcataggatattatatttcgyggtgaaagatttatctggcacatggtattggggttaaaaaaagccaaatttcacagtcttagtaactttttcaaaaaaaaagaaaaactaaaaggcactt

SEQ ID NO: 116734 - DNA, 201 bp, Homo sapiens; identical to SEQ ID NO: 19805

SEQ ID NO: 116735 - DNA, 201 bp, Homo sapiens
gcaatttgaaaataatatgtgttattttgtgagtgtgtgtgtgtgtgtgtgtgtgtgtttatcatgcctgttatctctgagcttcctgagtgtttgttttsgtgtctattcttaattttgtaaagttcttagccattgttccttgaagtattacttctgctacactatctctttattcctcttttagtattactattatgt

SEQ ID NO: 116736 - DNA, 201 bp, Homo sapiens; identical to SEQ ID NO: 19806

SEQ ID NO: 116737 - DNA, 201 bp, Homo sapiens
gaggaagcagttaacttgtgcactgtattttgcagatgatggggattcaaattctagtaataggcttttttttttctttttataaccttaaccagtttaaktttttttcctcattgtgggggatgataagaagaaatgatctgggaaaattaagtaacgacatcctagaaaagtgagaacaatctcatttaccgtcatgta

SEQ ID NO: 116738 - DNA, 201 bp, Homo sapiens
ttttagtgtgtcgtataactttgctgtgtatcaaactaattttgacaagctttcatcataagcctcaaatcatgtaattaataatttgcctgtttatttaygacctaattgtgattcttttattaataaaagctaatgggaaaaggatccctgattaagctgatgactagacctacaattaattttcctgcaatatatgaa

SEQ ID NO: 116739 - DNA, 201 bp, Homo sapiens; identical to SEQ ID NO: 19808

SEQ ID NO: 116740 - DNA, 201 bp, Homo sapiens; identical to SEQ ID NO: 19809

SEQ ID NO: 116741 - DNA, 201 bp, Homo sapiens
gtggacacaacatcagtgctcactggcactcctggtttgggatcttaccctcttgaactgagacgcggtctcacaatctgaatggaagtgacgtgtcactycggtaggcagaagtggttaagagcaggtacgtgatccttcgtgccctctgctcctgctgcagcaaaccctaaagccttgtgtggaggtggcagtgtcgca

SEQ ID NO: 116742 - DNA, 201 bp, Homo sapiens
ttgtgctcttgctgcagttccctttgggttccatgttttccttgttcccttccgtgcctagctggattgcagtgttaagtttatgattatgaataaaaacraaataacaaaaaatagtaaatgttggcaatgatatgagaaattggaacccttgcacactgttagtgggaataaaaatggtacagaaactgtggaaaacaa

SEQ ID NO: 116743 - DNA, 201 bp, Homo sapiens
cttgagcctgggaggtcaagactgcatgagccatgatcaagccactacactctggtctgggcaacagagtgagaccctgtcaataaataaataaataaatrcatcactatgctatgggacaacttcaggtagcctattatactgataattaaagtcctcaaagaagaggagaaaggagagaaaaaatatttgaagaaatag

SEQ ID NO: 116744 - DNA, 201 bp, Homo sapiens
gtaggctttgcagatgccaccgccgctgggagccctgtactatcagccatggtcaaccccactgttcttcaacattgctgacgaaggcaagcccttgggcygcgtctccttcaacctgtttgcagacaagattccaaagacagcagaaaactttcatgctctgagcactggcgagaaaggatttggttttaagggtttccg

SEQ ID NO: 116745 - DNA, 201 bp, Homo sapiens
aaaagttcaaggcccaatgaaaaatatgcgaaagatagcataattcattgaaaaggaaatataacccttcaatatgtgaaagaattaacaatatttatttratttttaagggtcttactatgtcagccaggctggagtgcagtggtgcgatctcagctcactacagccttgacctcccgggctcaagcagtcctcccaact

SEQ ID NO: 116746 - DNA, 201 bp, Homo sapiens
aatctacaaagggctttttttttttttttttttttataacagagacagagaaacagggtcttgctgtgctgcccacactggtctcattctcctggccttaygcaatcctctcgcctcagcccccacagagtgctgcattacagcagagtgctggcattacaggggcgagccaccatgcctggccagagctcctttaaagag

SEQ ID NO: 116747 - DNA, 201 bp, Homo sapiens; identical to SEQ ID NO: 19812

SEQ ID NO: 116748 - DNA, 201 bp, Homo sapiens; identical to SEQ ID NO: 19890

SEQ ID NO: 116749 - DNA, 201 bp, Homo sapiens
cccgcgacgcatgcgtgcttcttcccgcgcggctccacctgccgcgcgcttccgctgctggccagtctcttctgcccctccccctcctgtacggccgctaytctgcgcccggcttccttctcacaacctggttctgcccacacctgttcttcagccctgtgaacagtggctgtagaacagtctcaggccctgcagacccac

SEQ ID NO: 116750 - DNA, 201 bp, Homo sapiens
gcagcctcgggcaggccgttcacgcgccggcgacggcgggcccggccgcaggtaccaacagcacctgtcagagggcagcgcgggcgcaccctgcaagggcyctgcctcgtcaagagaggcagcgagaaacagcagcgatgaacgaaacaaaaccttcctccaccacggctacacagagctcgcgtccgaggaagcgggaac

SEQ ID NO: 116751 - DNA, 201 bp, Homo sapiens
aatcgaaggtcacttaagtaaaaatggttataattatgaaaatacttagaaatatgtaaagtctctatggtatgattagaaatcataatgcaaaatctgtrtactgtgcttatacctatgttcatatatttccatgtgagagaagcccgaaggggaatactctgcggtgaaagtagcttttcaagttcattcattggttca

SEQ ID NO: 116752 - DNA, 201 bp, Homo sapiens
gaggaatattttgccacacggcaaatatataccgtataattttctgtaccacttgatagaaaggtaaagaatgaatattgttttttaaataacttttttcktatataagtaatatgtgcttatcgtgtaactacctaaaaacattgaaaaataaaaggaaaataaaattcatacataaccgccctgcccagattaactatc

SEQ ID NO: 116753 - DNA, 201 bp, Homo sapiens
tcccctgggttggggtggggggactggctcccagcccttggcctagggtttggtgaacgcctttcctggactgcgggcccacttcaggcgcggctccaggmtgggcagctgcgctggagggccgagggcaggggtggggtcgggcgtccaccctcagggttgcgccagggagccggaaagccgactcccgaagttggggtc

SEQ ID NO: 116754 - DNA, 201 bp, Homo sapiens; identical to SEQ ID NO: 19820

SEQ ID NO: 116755 - DNA, 201 bp, Homo sapiens; identical to SEQ ID NO: 19822

SEQ ID NO: 116756 - DNA, 201 bp, Homo sapiens
ctgaaagtagaaagaaatggggcatgcaggagagactgggcttggttataacagcctgttatccctggggaactagctcactcaccagaggacgttaggarggatctgcccctgccccccttgtgatccaaacacctaccactagaccccacctccggcagcaccaccacacaggggatcaaatcccaacatgtgtttcag

SEQ ID NO: 116757 - DNA, 201 bp, Homo sapiens
tatgagtaaaccacaatttgtttatctgtatttccctgttgatgggcctttgggttatttccagttttgagtgattatgaataaagttaccatcaacactsctgtgtaggtttttgtagggacatggctgaaagtagaaagaaatggggcatgcaggagagactgggcttggttataacagcctgttatccctggggaact

SEQ ID NO: 116758 - DNA, 201 bp, Homo sapiens
tctagaagcttcctaatgcccctgtgtagtaactaccctactgcccttctctgcctccatccccaggcaacaactgatctgctttctgtaatatagattastttctattttcggcagttttatgtcaatggaatcacagtgtatgtgctcttttttgtttttcccaaaaagacccatattgtgtaattatttggagattgt

SEQ ID NO: 116759 - DNA, 201 bp, Homo sapiens
tagaccctcagctctggaggcaggagtgtctttatcacttgtaagaagagcatatggaatgggatatgtgcggtcatctctggaaaatgtcacacttcackctcttgctgctgcgttggccatctttctccctgatttcggtaatagtgcaagcagtcttccatccagccacttgaacctcatacatgtgccaagcactgt

SEQ ID NO: 116760 - DNA, 201 bp, Homo sapiens
atgagagggggacaggagacaaatttttatttacacaactctgtatgacttgttataacaagcacgaaaaatcgaaggtcacttaagtaaaaatggttatrattatgaaaatacttagaaatatgtaaagtctctatggtatgattagaaatcataatgcaaaatctgtatactgtgcttatacctatgttcatatatttc

SEQ ID NO: 116761 - DNA, 201 bp, Homo sapiens
agctgggcgagggagtggggctggctcctggcttgcaccggcctcgtggaatccaggcctcagacctgatcgctggcgaaactggctctgtgcgctggagyccctggtcttctgcgtctgtcctcctcccggccagactttactcctggctcagcgacaggtatttgctatggaagagctgtccctccctcccctcggtgg

SEQ ID NO: 116762 - DNA, 201 bp, Homo sapiens
aaatatttggaaagatatccactagtttaaaagtggttcctttcagcagggtgggatgagagggggacaggagacaaatttttatttacacaactctgtaygacttgttataacaagcacgaaaaatcgaaggtcacttaagtaaaaatggttataattatgaaaatacttagaaatatgtaaagtctctatggtatgatt

SEQ ID NO: 116763 - DNA, 201 bp, Homo sapiens
caacccaaatgtacaaaaataggggagataattatggtacatttgtataatagtatgccacttggtcattaaaaatgccatagaagtatatttttcataarcttatttctagctgctggttttacaggtggtttttgcttttttattttatcatttatattttcctgtaattattgcatattttttaataattttttaaaa

SEQ ID NO: 116764 - DNA, 201 bp, Homo sapiens
gctggctcctggcttgcaccggcctcgtggaatccaggcctcagacctgatcgctggcgaaactggctctgtgcgctggagcccctggtcttctgcgtctstcctcctcccggccagactttactcctggctcagcgacaggtatttgctatggaagagctgtccctccctcccctcggtgggcctgggtccacctccacc

SEQ ID NO: 116765 - DNA, 201 bp, Homo sapiens; identical to SEQ ID NO: 19815

SEQ ID NO: 116766 - DNA, 201 bp, Homo sapiens
acaacccaaatgtacaaaaataggggagataattatggtacatttgtataatagtatgccacttggtcattaaaaatgccatagaagtatatttttcataracttatttctagctgctggttttacaggtggtttttgcttttttattttatcatttatattttcctgtaattattgcatattttttaataattttttaaa

SEQ ID NO: 116767 - DNA, 201 bp, Homo sapiens
tggagcccctggtcttctgcgtctgtcctcctcccggccagactttactcctggctcagcgacaggtatttgctatggaagagctgtccctccctcccctyggtgggcctgggtccacctccacctcctcttcaggtccgcaccttcctcccctttaaaacaccagccgggcgcagacccgttctaggcttttccatggtg

SEQ ID NO: 116768 - DNA, 201 bp, Homo sapiens
acacgagttcccagactttatcctaaaaaaaaaaaaaatgacgtgcacacagatttagctacaagtaattttgcaaaagtgaaaagttgaaaacaacccaratgtacaaaaataggggagataattatggtacatttgtataatagtatgccacttggtcattaaaaatgccatagaagtatatttttcataaacttattt

SEQ ID NO: 116769 - DNA, 201 bp, Homo sapiens
atggttataattatgaaaatacttagaaatatgtaaagtctctatggtatgattagaaatcataatgcaaaatctgtatactgtgcttatacctatgttcrtatatttccatgtgagagaagcccgaaggggaatactctgcggtgaaagtagcttttcaagttcattcattggttcatttattccacaaatgtgtgctga

SEQ ID NO: 116770 - DNA, 201 bp, Homo sapiens
gcaacctccgcctcccaggttcaagcgattctcctgcctcagcctccctactagctgggattacaggtatgcgccaccacgcccggctgatttttgtattkttagtagagatggggttttaccatattggccaggctggtctcaaacttctgacctcaggtgatccgtctgcctcggcctcccaaagtgctgggattacag

SEQ ID NO: 116771 - DNA, 201 bp, Homo sapiens; identical to SEQ ID NO: 19825

SEQ ID NO: 116772 - DNA, 201 bp, Homo sapiens
caccacggctacacagagctcgcgtccgaggaagcgggaacacacaggccccggtgctttccgaaaggcttctcgccaggacccgcgaccagcgtggggcggagggggggggtcaccctttttgagaaaccaggtcaagcaggccgtcgctgggcgacctttgggcggagggagagggcagggctgcaccgcacaggttcc

SEQ ID NO: 116773 - DNA, 201 bp, Homo sapiens
accacggctacacagagctcgcgtccgaggaagcgggaacacacaggccccggtgctttccgaaaggcttctcgccaggacccgcgaccagcgtggggcggagggggggggtcaccctttttgagaaaccaggtcaagcaggccgtcgctgggcgacctttgggcggagggagagggcagggctgcaccgcacaggttccg

SEQ ID NO: 116774 - DNA, 201 bp, Homo sapiens
tgttcttcagccctgtgaacagtggctgtagaacagtctcaggccctgcagacccacctccctcgctcccgtggtggcggtggtgacgggctggggacgtkgggtagaaaaatgggcgggatgtggaacgctgcgttgccggggcccacttccggaggacgggcggaagtggctgcggtggatggtgggaggggggaagga

SEQ ID NO: 116775 - DNA, 201 bp, Homo sapiens
ccacggctacacagagctcgcgtccgaggaagcgggaacacacaggccccggtgctttccgaaaggcttctcgccaggacccgcgaccagcgtggggcggagggggggggtcaccctttttgagaaaccaggtcaagcaggccgtcgctgggcgacctttgggcggagggagagggcagggctgcaccgcacaggttccgc

SEQ ID NO: 116776 - DNA, 201 bp, Homo sapiens
acccgcgaccagcgtggggcggagggggggggtcaccctttttgagaaaccaggtcaagcaggccgtcgctgggcgacctttgggcggagggagagggcarggctgcaccgcacaggttccgcccctacttcagcgtcctcgcccctcccaagctccgcccagcaccccaagggccaacccccccgcgacgcatgcgtgct

SEQ ID NO: 116777 - DNA, 201 bp, Homo sapiens
gttcccaacttccccttacccaagctggatgagtgccttgtaagggattgtgagcaatggcagttgtgaggttaggccaaggagaacatgataataattgaagacttctgaagggaggttggattagattacctttaaaggcccttccaacactgagataataggattccaagtcagtctgggttaagactggaatggatt

SEQ ID NO: 116778 - DNA, 201 bp, Homo sapiens
aacagtctcaggccctgcagacccacctccctcgctcccgtggtggcggtggtgacgggctggggacgttgggtagaaaaatgggcgggatgtggaacgcygcgttgccggggcccacttccggaggacgggcggaagtggctgcggtggatggtgggaggggggaaggagtgcgaggggagggccgggccgctgggggtc

SEQ ID NO: 116779 - DNA, 201 bp, Homo sapiens
aggaagcgggaacacacaggccccggtgctttccgaaaggcttctcgccaggacccgcgaccagcgtggggcggagggggggggtcaccctttttgagaarccaggtcaagcaggccgtcgctgggcgacctttgggcggagggagagggcagggctgcaccgcacaggttccgcccctacttcagcgtcctcgcccctcc

SEQ ID NO: 116780 - DNA, 201 bp, Homo sapiens
tctgggctctggccacttaagcggaggcttcacggcagcgcctgagaggagacagagccctctcaaagcactggcgctggaggatgtgtgcgggggtgttggggggcgcacaggagtgcccggtctaaaacctggctatgctccccaccaggtctggtggcttgcagcacgtttgcacttaccctgagcctcaaactagtt

SEQ ID NO: 116781 - DNA, 201 bp, Homo sapiens
tagaacagtctcaggccctgcagacccacctccctcgctcccgtggtggcggtggtgacgggctggggacgttgggtagaaaaatgggcgggatgtggaasgctgcgttgccggggcccacttccggaggacgggcggaagtggctgcggtggatggtgggaggggggaaggagtgcgaggggagggccgggccgctgggg

SEQ ID NO: 116782 - DNA, 201 bp, Homo sapiens
gtctggtggcttgcagcacgtttgcacttaccctgagcctcaaactagttatctgtagaatggggatgataacgctcactccgcagagctgctgaggcttgaaggacaggccgagggagggtttggcccgtgaggcccctcaccatgcctggtgaccccttagcagttttgatttaggtcctcgcctccacgcaggggcct

SEQ ID NO: 116783 - DNA, 201 bp, Homo sapiens
agggttcagtcctggaaatgcctggaaggggtgttttacaaatagacaacagccggtgcagaggccaatgcagctaacagaggaaggggagagcaggtcasacagctaggcaggccagtgggttgtccggctctgcagccattgtaaggactttggcgttttatttcaagtaaactgaggagccgctgtgcagtttggagc

SEQ ID NO: 116784 - DNA, 201 bp, Homo sapiens
gatgcctctgggctgtctggcttgcctttgttgctgctgcactctcctgatggtggcctgagcagtgcttcctggagaagcaggtcaccgctgctggccarggtctgggcttgatcatccttttgggcacagccagttgtgagagggtgtatggctcctggttcatgtgtgtgcacacagcactaacttccaggcagagct

SEQ ID NO: 116785 - DNA, 201 bp, Homo sapiens
gtcaaggaaggcatcttggcagagacacgaatcagagtgtgccaggtgaagaagatagggaagagcagagctggcacatgggcacatgcaaagaccccgayggtaggcttggctgttggggtaccagacgggagtgtggtagagtggagcaaagaaaatggggagaaaggagtgaaataacggccgatatttacgttgtca

SEQ ID NO: 116786 - DNA, 201 bp, Homo sapiens
acagcagcgtccaggtatatgcttactggggaaaaagcagcctgctgaggccagagtgcagggtccatggggttagtggttggaggtaaggttgaaaaggratgtttcagacagtctgtctgaagggctttggatgtcatcataatgagtttgagtttgagtttgtgggcagtgcagcctctgatggtttttaaagcaagt

SEQ ID NO: 116787 - DNA, 201 bp, Homo sapiens
acacagcagcgtccaggtatatgcttactggggaaaaagcagcctgctgaggccagagtgcagggtccatggggttagtggttggaggtaaggttgaaaarggatgtttcagacagtctgtctgaagggctttggatgtcatcataatgagtttgagtttgagtttgtgggcagtgcagcctctgatggtttttaaagcaa

SEQ ID NO: 116788 - DNA, 201 bp, Homo sapiens
cttccatccagccacttgaacctcatacatgtgccaagcactgtggtgggcacagaggtcatagagtcttttttcctaaggaggaaggtgggagtcaggtmagcgtggccacagattctgttacagcgtggagagagtgctgtgggagtgtagtcatagggaggcctggctctgtctgtgatgttacagaaggagtcacct

SEQ ID NO: 116789 - DNA, 201 bp, Homo sapiens; identical to SEQ ID NO: 19823

SEQ ID NO: 116790 - DNA, 201 bp, Homo sapiens
tcttgctgctgcgttggccatctttctccctgatttcggtaatagtgcaagcagtcttccatccagccacttgaacctcatacatgtgccaagcactgtgrtgggcacagaggtcatagagtcttttttcctaaggaggaaggtgggagtcaggtcagcgtggccacagattctgttacagcgtggagagagtgctgtggg

SEQ ID NO: 116791 - DNA, 201 bp, Homo sapiens; identical to SEQ ID NO: 19824

SEQ ID NO: 116792 - DNA, 201 bp, Homo sapiens
aatgcaaaaccatcgttctatcatattaacaaagatgacaaaaaatggtgtgacagtgcagggtgtggagaaaagttggtgtcaaagctgtgccatctttstgtgtatctttcatatcaaacaaacgccttcaacaatgagcacacctttcgacacgagttcccagactttatcctaaaaaaaaaaaaaatgacgtgcaca

SEQ ID NO: 116793 - DNA, 201 bp, Homo sapiens
tagggaactccgcatttgtacagcaagtggtgggtaaagagagaaaagggagaagcctgctaggatgctgaggaggagcagccagaggagggggaaccccrgagagcgtgctggcgtgggagtcaagagaagtgtgtcagaagaagggagcggttgacaatgtcagaagctgccaagaggcacaataagattgagggaaca

SEQ ID NO: 116794 - DNA, 201 bp, Homo sapiens
tggtgcttccgccaaagcttgtgaccgagtccttcccgcctagggctggtgggcctcccctgctggtaggtctctcttcgctttctttactcagaactgamgctctcattccccacccaccaaggaaaaacaaaagggaagaagccacagctggccccggcttgctttggcacaggtgtttccccccggccccccgtcggg

SEQ ID NO: 116795 - DNA, 201 bp, Homo sapiens
tcgcgtccgaggaagcgggaacacacaggccccggtgctttccgaaaggcttctcgccaggacccgcgaccagcgtggggcggagggggggggtcaccctytttgagaaaccaggtcaagcaggccgtcgctgggcgacctttgggcggagggagagggcagggctgcaccgcacaggttccgcccctacttcagcgtcct

SEQ ID NO: 116796 - DNA, 201 bp, Homo sapiens
tctggtggcttgcagcacgtttgcacttaccctgagcctcaaactagttatctgtagaatggggatgataacgctcactccgcagagctgctgaggcttgaaggacaggccgagggagggtttggcccgtgaggcccctcaccatgcctggtgaccccttagcagttttgatttaggtcctcgcctccacgcaggggcctg

SEQ ID NO: 116797 - DNA, 201 bp, Homo sapiens
ctggtggcttgcagcacgtttgcacttaccctgagcctcaaactagttatctgtagaatggggatgataacgctcactccgcagagctgctgaggcttgaaggacaggccgagggagggtttggcccgtgaggcccctcaccatgcctggtgaccccttagcagttttgatttaggtcctcgcctccacgcaggggcctgc

SEQ ID NO: 116798 - DNA, 201 bp, Homo sapiens
tggtggcttgcagcacgtttgcacttaccctgagcctcaaactagttatctgtagaatggggatgataacgctcactccgcagagctgctgaggcttgaaggacaggccgagggagggtttggcccgtgaggcccctcaccatgcctggtgaccccttagcagttttgatttaggtcctcgcctccacgcaggggcctgcg

SEQ ID NO: 116799 - DNA, 201 bp, Homo sapiens
gtggcttgcagcacgtttgcacttaccctgagcctcaaactagttatctgtagaatggggatgataacgctcactccgcagagctgctgaggcttgaaggacaggccgagggagggtttggcccgtgaggcccctcaccatgcctggtgaccccttagcagttttgatttaggtcctcgcctccacgcaggggcctgcggg

SEQ ID NO: 116800 - DNA, 201 bp, Homo sapiens
tggcttgcagcacgtttgcacttaccctgagcctcaaactagttatctgtagaatggggatgataacgctcactccgcagagctgctgaggcttgaaggacaggccgagggagggtttggcccgtgaggcccctcaccatgcctggtgaccccttagcagttttgatttaggtcctcgcctccacgcaggggcctgcgggt

SEQ ID NO: 116801 - DNA, 201 bp, Homo sapiens
gcttgcagcacgtttgcacttaccctgagcctcaaactagttatctgtagaatggggatgataacgctcactccgcagagctgctgaggcttgaaggacaggccgagggagggtttggcccgtgaggcccctcaccatgcctggtgaccccttagcagttttgatttaggtcctcgcctccacgcaggggcctgcgggtgc

SEQ ID NO: 116802 - DNA, 201 bp, Homo sapiens
cttgcagcacgtttgcacttaccctgagcctcaaactagttatctgtagaatggggatgataacgctcactccgcagagctgctgaggcttgaaggacaggccgagggagggtttggcccgtgaggcccctcaccatgcctggtgaccccttagcagttttgatttaggtcctcgcctccacgcaggggcctgcgggtgcg

SEQ ID NO: 116803 - DNA, 201 bp, Homo sapiens
ttgcagcacgtttgcacttaccctgagcctcaaactagttatctgtagaatggggatgataacgctcactccgcagagctgctgaggcttgaaggacaggccgagggagggtttggcccgtgaggcccctcaccatgcctggtgaccccttagcagttttgatttaggtcctcgcctccacgcaggggcctgcgggtgcgc

SEQ ID NO: 116804 - DNA, 201 bp, Homo sapiens
tgcagcacgtttgcacttaccctgagcctcaaactagttatctgtagaatggggatgataacgctcactccgcagagctgctgaggcttgaaggacaggccgagggagggtttggcccgtgaggcccctcaccatgcctggtgaccccttagcagttttgatttaggtcctcgcctccacgcaggggcctgcgggtgcgcg

SEQ ID NO: 116805 - DNA, 201 bp, Homo sapiens
gcagcacgtttgcacttaccctgagcctcaaactagttatctgtagaatggggatgataacgctcactccgcagagctgctgaggcttgaaggacaggccgagggagggtttggcccgtgaggcccctcaccatgcctggtgaccccttagcagttttgatttaggtcctcgcctccacgcaggggcctgcgggtgcgcgc

SEQ ID NO: 116806 - DNA, 201 bp, Homo sapiens
cccgccccgcctgccggggaagggccacgttgcccgcccggccgtccggccccggcgcgccgcagaaagggctggcgagtcgaaaggcgaggcggccgcgrcagcgcttgggacgcgcctgggcaccgggctcgctccctgcgccccggagcaggccaagttcggggccaggacgtcgggaggacctggtgagtaggtgtc

SEQ ID NO: 116807 - DNA, 201 bp, Homo sapiens; identical to SEQ ID NO: 19886

SEQ ID NO: 116808 - DNA, 201 bp, Homo sapiens
gagctgtccctccctcccctcggtgggcctgggtccacctccacctcctcttcaggtccgcaccttcctcccctttaaaacaccagccgggcgcagacccrttctaggcttttccatggtgcttccgccaaagcttgtgaccgagtccttcccgcctagggctggtgggcctcccctgctggtaggtctctcttcgctttc

SEQ ID NO: 116809 - DNA, 201 bp, Homo sapiens
taatcttgtgactgtttatcctcctgttttttccttttgcacataatccaatcccaggcccacccccagaatcctggccccttgtttctatccttcttacyccagtcactgctccccatgtaacctctatcaagagctcagagcctcttttccccaggtcagtttggcactcatttaccctggtttcttgcctctcagacc

SEQ ID NO: 116810 - DNA, 201 bp, Homo sapiens
gtgcagaaggtgttgagctggcgagttcgcggaggctactattcaggaaatcttatccagatgagtacactggaagctacacctctccattactctgtccrggtatagacttgttcccaacttccccttacccaagctggatgagtgccttgtaagggattgtgagcaatggcagttgtgaggttaggccaaggagaacat

SEQ ID NO: 116811 - DNA, 201 bp, Homo sapiens
gcgctggaggatgtgtgcgggggtgttggggggcgcacaggagtgcccggtctaaaacctggctatgctccccaccaggtctggtggcttgcagcacgttkgcacttaccctgagcctcaaactagttatctgtagaatggggatgataacgctcactccgcagagctgctgaggcttgaaggacaggccgagggagggtt

SEQ ID NO: 116812 - DNA, 201 bp, Homo sapiens
ggagagcaactgagacaagagaagaaaggtaaggctcctgtctcatttcccacttaatgtcttgctgtgcctgtgcagaaggtgttgagctggcgagttcrcggaggctactattcaggaaatcttatccagatgagtacactggaagctacacctctccattactctgtccaggtatagacttgttcccaacttcccctt

SEQ ID NO: 116813 - DNA, 201 bp, Homo sapiens; identical to SEQ ID NO: 19819

SEQ ID NO: 116814 - DNA, 201 bp, Homo sapiens; identical to SEQ ID NO: 19818

SEQ ID NO: 116815 - DNA, 201 bp, Homo sapiens; identical to SEQ ID NO: 19896

SEQ ID NO: 116816 - DNA, 201 bp, Homo sapiens
agcacgtttgcacttaccctgagcctcaaactagttatctgtagaatggggatgataacgctcactccgcagagctgctgaggcttgaaggacaggccgagggagggtttggcccgtgaggcccctcaccatgcctggtgaccccttagcagttttgatttaggtcctcgcctccacgcaggggcctgcgggtgcgcgcgg

SEQ ID NO: 116817 - DNA, 201 bp, Homo sapiens
caactcttgaattatttagtgtatcttctctgactacctttcttttttttccgtcctgaaattatgggcctggtacatgatacaggagtccagccaaggtctaagaacgaacatgaaagcagttcagttagagttccattacctgtgacatgtctatattttctggaatttttacgtagtgctttttaactttaagcaaag

SEQ ID NO: 116818 - DNA, 201 bp, Homo sapiens
tttcactggatggtctgtttatttatgtaccagtaccacgcagttgtaattatggaggttttgtagtatgccatatatatatatatataataaaaaaaaawttttttgagacagagtctcactctcttgcccaggctggagtgcaatggcacaatccaatcacagctcactacagcctcagcctcccagactcaggtgatc

SEQ ID NO: 116819 - DNA, 201 bp, Homo sapiens
cggaggacgggcggaagtggctgcggtggatggtgggaggggggaaggagtgcgaggggagggccgggccgctgggggtcgagggggtggggcctgggccrgcgctggggatcgggcctggggcctggattgcgacccgcggcgggccgcggctcctagccgagacggggcgggcgggaaccaggtaacgacccggcgcag

SEQ ID NO: 116820 - DNA, 201 bp, Homo sapiens
gtaattatggaggttttgtagtatgccatatatatatatatataataaaaaaaaatttttttgagacagagtctcactctcttgcccaggctggagtgcartggcacaatccaatcacagctcactacagcctcagcctcccagactcaggtgatcccatctcagcctcctgagtagctgggaccacaggtgcgtgccacc

SEQ ID NO: 116821 - DNA, 201 bp, Homo sapiens
cgtgcttcttcccgcgcggctccacctgccgcgcgcttccgctgctggccagtctcttctgcccctccccctcctgtacggccgctactctgcgcccggcktccttctcacaacctggttctgcccacacctgttcttcagccctgtgaacagtggctgtagaacagtctcaggccctgcagacccacctccctcgctccc

SEQ ID NO: 116822 - DNA, 201 bp, Homo sapiens
gcctcagcctcccagactcaggtgatcccatctcagcctcctgagtagctgggaccacaggtgcgtgccaccatgcccagctttttttttttttttttttaattgttacttgtagagacagggtctccgtgtgctgcccaggctattcttgaactcctgggctcaagtgatcctcctgtattggcctcccaaagtgctggg

SEQ ID NO: 116823 - DNA, 201 bp, Homo sapiens
gcgcggccctttgtttctctagaaccctgcacgattcgtggtttcatgtagaaacaagttagtgagcagtcagtcagtaaccacaggccgcagagttccgrgctgctccgtgctctggaacacgggggaggggttgatgtcaggggcgtgggtcctgatcacatggcagcagcccttcttggggaagtcagctacccagca

SEQ ID NO: 116824 - DNA, 201 bp, Homo sapiens
cagcctcccagactcaggtgatcccatctcagcctcctgagtagctgggaccacaggtgcgtgccaccatgcccagctttttttttttttttttttaattrttacttgtagagacagggtctccgtgtgctgcccaggctattcttgaactcctgggctcaagtgatcctcctgtattggcctcccaaagtgctgggattg

SEQ ID NO: 116825 - DNA, 201 bp, Homo sapiens
tgatcccatctcagcctcctgagtagctgggaccacaggtgcgtgccaccatgcccagctttttttttttttttttttaattgttacttgtagagacaggrtctccgtgtgctgcccaggctattcttgaactcctgggctcaagtgatcctcctgtattggcctcccaaagtgctgggattgcaggtaggagctactgca

SEQ ID NO: 116826 - DNA, 201 bp, Homo sapiens
catctcagcctcctgagtagctgggaccacaggtgcgtgccaccatgcccagctttttttttttttttttttaattgttacttgtagagacagggtctccstgtgctgcccaggctattcttgaactcctgggctcaagtgatcctcctgtattggcctcccaaagtgctgggattgcaggtaggagctactgcatctggc

SEQ ID NO: 116827 - DNA, 201 bp, Homo sapiens
gcctcctgagtagctgggaccacaggtgcgtgccaccatgcccagctttttttttttttttttttaattgttacttgtagagacagggtctccgtgtgctkcccaggctattcttgaactcctgggctcaagtgatcctcctgtattggcctcccaaagtgctgggattgcaggtaggagctactgcatctggccagtatg

SEQ ID NO: 116828 - DNA, 201 bp, Homo sapiens
tttttttttaattgttacttgtagagacagggtctccgtgtgctgcccaggctattcttgaactcctgggctcaagtgatcctcctgtattggcctcccaragtgctgggattgcaggtaggagctactgcatctggccagtatgcagtattttcatatctggtagggctgagtccctcctcacagcttatttttattgtt

SEQ ID NO: 116829 - DNA, 201 bp, Homo sapiens
ctgctccgtgctctggaacacgggggaggggttgatgtcaggggcgtgggtcctgatcacatggcagcagcccttcttggggaagtcagctacccagcagmctgtagtcctcggctacccaccctcaccgcctggggtcccatggtgagacagctgggtgggcatcaggcttctgcagagggccaggccggagggagctgg

SEQ ID NO: 116830 - DNA, 201 bp, Homo sapiens
cttcaactcctgacctcatgacccacccgcctcagcctcccaaagtgctgagattacaagcgtgagccactgcacccgaccccagtttcagatattctgtyataagcaatagaaacagactaagtatctttgacatggagtggatactggaagccatgtgacttctgtgggatcatctcgaaagaaagtgtaaaatgagaa

SEQ ID NO: 116831 - DNA, 201 bp, Homo sapiens
caaagcactggcgctggaggatgtgtgcgggggtgttggggggcgcacaggagtgcccggtctaaaacctggctatgctccccaccaggtctggtggcttscagcacgtttgcacttaccctgagcctcaaactagttatctgtagaatggggatgataacgctcactccgcagagctgctgaggcttgaaggacaggccg

SEQ ID NO: 116832 - DNA, 201 bp, Homo sapiens
tgccacagtgcgcgcagtcagctaaagtggaagccacgggcttcccgcacatcgcacactgcacacggcggcctcggtgggcctgcccttctcccactccrcctccaggtctgggctctggccacttaagcggaggcttcacggcagcgcctgagaggagacagagccctctcaaagcactggcgctggaggatgtgtgcg

SEQ ID NO: 116833 - DNA, 201 bp, Homo sapiens
ctggcccagtgctgcccagcctccccgcccgctcccaggcgccccatgtcctcacaggccaggacgccatggcaggatggagaggacttggtggatttttktttcttgcctgacctcagtttcatgaaagaaagtggaagctacagaattattttctaaaataaaggctgaattgtctgaaaaatatttatgtgtgtgtgt

SEQ ID NO: 116834 - DNA, 201 bp, Homo sapiens
agtgctgcccagcctccccgcccgctcccaggcgccccatgtcctcacaggccaggacgccatggcaggatggagaggacttggtggatttttgtttcttkcctgacctcagtttcatgaaagaaagtggaagctacagaattattttctaaaataaaggctgaattgtctgaaaaatatttatgtgtgtgtgtcctggaa

SEQ ID NO: 116835 - DNA, 201 bp, Homo sapiens
catatccgcctgggttcgaggctcctgccacagtgcgcgcagtcagctaaagtggaagccacgggcttcccgcacatcgcacactgcacacggcggcctcrgtgggcctgcccttctcccactccacctccaggtctgggctctggccacttaagcggaggcttcacggcagcgcctgagaggagacagagccctctcaaa

SEQ ID NO: 116836 - DNA, 201 bp, Homo sapiens
cccccaggcccctgactcctccattaggcaaacatagggcagaggtgacagacactggcctctgactggcatatccgcctgggttcgaggctcctgccacrgtgcgcgcagtcagctaaagtggaagccacgggcttcccgcacatcgcacactgcacacggcggcctcggtgggcctgcccttctcccactccacctcca

SEQ ID NO: 116837 - DNA, 201 bp, Homo sapiens
agcccccaggcccctgactcctccattaggcaaacatagggcagaggtgacagacactggcctctgactggcatatccgcctgggttcgaggctcctgccrcagtgcgcgcagtcagctaaagtggaagccacgggcttcccgcacatcgcacactgcacacggcggcctcggtgggcctgcccttctcccactccacctc

SEQ ID NO: 116838 - DNA, 201 bp, Homo sapiens; identical to SEQ ID NO: 19816

SEQ ID NO: 116839 - DNA, 201 bp, Homo sapiens; identical to SEQ ID NO: 19817

SEQ ID NO: 116840 - DNA, 201 bp, Homo sapiens
cgggccgcggctcctagccgagacggggcgggcgggaaccaggtaacgacccggcgcagttagagcgagggtcgtccgcagggcggacgggtgggggtcaragtccaggaagggtcgcagtgtcaccctcttctcttgtgaacacggggcacggggttccggggagaagggtgggaggagttaaattcttggagggggtgg

SEQ ID NO: 116841 - DNA, 201 bp, Homo sapiens
tttttatttacacaactctgtatgacttgttataacaagcacgaaaaatcgaaggtcacttaagtaaaaatggttataattatgaaaatacttagaaataygtaaagtctctatggtatgattagaaatcataatgcaaaatctgtatactgtgcttatacctatgttcatatatttccatgtgagagaagcccgaagggg

SEQ ID NO: 116842 - DNA, 201 bp, Homo sapiens
gcgggccgcggctcctagccgagacggggcgggcgggaaccaggtaacgacccggcgcagttagagcgagggtcgtccgcagggcggacgggtgggggtcrgagtccaggaagggtcgcagtgtcaccctcttctcttgtgaacacggggcacggggttccggggagaagggtgggaggagttaaattcttggagggggtg

SEQ ID NO: 116843 - DNA, 201 bp, Homo sapiens
gggggaaggagtgcgaggggagggccgggccgctgggggtcgagggggtggggcctgggccagcgctggggatcgggcctggggcctggattgcgacccgsggcgggccgcggctcctagccgagacggggcgggcgggaaccaggtaacgacccggcgcagttagagcgagggtcgtccgcagggcggacgggtgggggt

SEQ ID NO: 116844 - DNA, 201 bp, Homo sapiens
agattctcgaacatgtcgggagagggctgcataggaacttcaaaaacgagtagcggctcccctggattcagcgtgagggggaaaccgcggggcaggttcgraactcaggagtccgacgtctgaaggagcgggaggctgcttccgaggagcccggggcacgacgggaagggccgcgccggccaggcagccctcctcccggca

SEQ ID NO: 116845 - DNA, 201 bp, Homo sapiens
attactatggggcttagggatttatttgttttttaaaatcaactatgttagctgggactagactccctacaatctatcaatggaaaagtaacatttaaaamcccttttggtaattcaaattacagatttaaaagtgcttaagatctggtgttttgttaatgcttctgtttattccagaagcattaaggtaacccattgcca

SEQ ID NO: 116846 - DNA, 201 bp, Homo sapiens
gttaattctcagccatctttgaagtttgaaagaagagtctttggtattttctaaatgttagcggactttcctgccagtgtcagaaaatcctatttatgaaycctgtcggtattccttggtatctgaaaaaaatatcaaatagtacccatagatgatttatttctaagtttgaaaaataaaaagaaattgtatcacactaat

SEQ ID NO: 116847 - DNA, 201 bp, Homo sapiens
cctgccagtgtcagaaaatcctatttatgaaccctgtcggtattccttggtatctgaaaaaaatatcaaatagtacccatagatgatttatttctaagttygaaaaataaaaagaaattgtatcacactaattacaaaatacaggttctggaaaaaatatttttcttcattttaaaacttttgttaactaataatggcttt

SEQ ID NO: 116848 - DNA, 201 bp, Homo sapiens
tcagtttcccaagtacatatttttgggggagaggactgtgttgcatttggccagagaatatgtgacctttcggttgttgagggactggtgtgtacccctgrgggctcggtatccacttggaggttgggtgtccgtgtggaacctgatgtacctgtggacctggttgcccacatgggtcctggtgtccacctggagcctgat

SEQ ID NO: 116849 - DNA, 201 bp, Homo sapiens
ggacccagatgtgcaccttggcagagcctccgtaacaaaggcctagggccaccaggaggctgtgaaaaagaagcagggcgtctctttccccggacacttgwgagtttgtcagagccttcagcgacagagcaggtgccctggacataggaacccaggcacctgggcactgacatcacctcaagggccacttgtgccccaggc

SEQ ID NO: 116850 - DNA, 201 bp, Homo sapiens
caaagaatggaatggactcttaaaacaatgaaagagcatttatcatttgtctcttgaatgtagaatttgttgttttaataattctgctggtaaatgtgacrgttaaaatggtgtattatgtatacatattgtaatttagaaattccattttataatgttactattccaaggtgaaataatgcatttaaatttgatatttgg

SEQ ID NO: 116851 - DNA, 201 bp, Homo sapiens
cactgccatctgtctccacagctaagttgcgggacctgtgggaaggagggggagggcaaaggtcattgtcacaccacctgggccgcaggtgacaggcaagytcccactgaggctgcatggaagtccccacaaccctggtggagggtaggttccaaggtgcagccccagccctacccctagcctggggtgaacacctgggcc

SEQ ID NO: 116852 - DNA, 201 bp, Homo sapiens
caatgagcaagactccgtctcaaaaaaaaaaaaaaaaaaattagacttggaacagtggctcacacctataatcccagcactttgggaggcagaggtgggtraatcacccgaacctaggaatttgagattagcctggccaacacagcaaaaccctgtctctactgaaaatacaaaaattatccgggtgtggtggtgtgtgcc

SEQ ID NO: 116853 - DNA, 201 bp, Homo sapiens
ggcaggggcagcagccagggccctgcccagggcagaaaccctcatggcaaggaacagcaggcagtggggaccgggcctcctccaggctcccacctcctccrttctcgggagcactgctgggactggcttcgccatgcactcagacgcctccgtcctccctgggcctctcacggttaggccagcaccactccccatggcctt

SEQ ID NO: 116854 - DNA, 201 bp, Homo sapiens
agacggatttagggttctgaaaggccttttcacccaaaaaacatgggggaaaatatgtggactctggctggggagagattaaaggagccctggggctcatrcttcttataattcccaccagaaggctgacatccagggacttccgctgcaagaggcaaatagtcagtaagttctgtaaatggagatttaggtcccttgcaa

SEQ ID NO: 116855 - DNA, 201 bp, Homo sapiens
cccaggggcctgggtatccactggggtcccgatgttcatctaggagctggtgttcacctaggccctgatagtcacctgggggctgggtatgtacctgaggyctcatgtccacctgtgctgtaggtatctatgcatgggctgtgtgccaacctggtgcctcatgtcctcctatggattagatacccaactagggtttggtgt

SEQ ID NO: 116856 - DNA, 201 bp, Homo sapiens
agctgtgattgacatttttctcttaatgaatcctctcaggacattgtgtagcctgtggtaagtacaaagggagaggaagacattttgaattttaagaattytattatcagcataactctcccgagttgaatgttgttttcttcttgttccattaagtcaaaatacaaatcagcagagatactcagttttcaatattttaaa

SEQ ID NO: 116857 - DNA, 201 bp, Homo sapiens
gactggatagccaactgaggcctgagtgtttcttggtgactgaggacttcctgggacccatatttcctggacccggattttcacatggagcctgatgtctkgagttctgagttctaggtgtttacttgggacccagatgtgcaccttggcagagcctccgtaacaaaggcctagggccaccaggaggctgtgaaaaagaag

SEQ ID NO: 116858 - DNA, 201 bp, Homo sapiens
cgtgtgaagagaccaccaaacaggctttgtgtgagcaacatggctgtttatttcacctgggtgcagacgggctgagtccgaaaagagagtcagccaagggmgataagtttggggccgttttataggatttgggtaggtaaaggaaaattacagtcaaagggggtttgttctctggcgggtaggagtgggggtcgcaaggtg

SEQ ID NO: 116859 - DNA, 201 bp, Homo sapiens
gccaagggcgataagtttggggccgttttataggatttgggtaggtaaaggaaaattacagtcaaagggggtttgttctctggcgggtaggagtgggggtygcaaggtgctcagtgggggtgctttttgagccaggatgagccaggaaaaggactttcacaaggtaatgtcatcagttaaggcaagggccggccatttgca

SEQ ID NO: 116860 - DNA, 201 bp, Homo sapiens
aagtttggggccgttttataggatttgggtaggtaaaggaaaattacagtcaaagggggtttgttctctggcgggtaggagtgggggtcgcaaggtgctcrgtgggggtgctttttgagccaggatgagccaggaaaaggactttcacaaggtaatgtcatcagttaaggcaagggccggccatttgcacttcttttgtgg

SEQ ID NO: 116861 - DNA, 201 bp, Homo sapiens
tgtgtatcgatttttttgttgttgaccaaaatcacacacatggaaacatgtaattcaacagagtgggatagcgatcagattcttggcttagtattactaaygggcaggattttacaacgagcaactatcagattattcctttcagtgattcttatggtatctaaattactgaataaattattaatcagtgaatcaaattga

SEQ ID NO: 116862 - DNA, 201 bp, Homo sapiens
tgtcctccatgcaaagcctgtggtgggtcttgctctgggactagttgagcagcattgcactcgtgttggatgcgggagtttcatggtttgttctttcggtrtgtctttggccttctattaagagttccttgacttgagaatgattgagaagtgtacttttcagtttcccaagtacatatttttgggggagaggactgtgtt

SEQ ID NO: 116863 - DNA, 201 bp, Homo sapiens
acagagtgggatagcgatcagattcttggcttagtattactaacgggcaggattttacaacgagcaactatcagattattcctttcagtgattcttatggyatctaaattactgaataaattattaatcagtgaatcaaattgattaaaattattaaatgaatgctcagcattagttgaaaactgttgtgtgaaacatgtc

SEQ ID NO: 116864 - DNA, 201 bp, Homo sapiens
gaaggtggaaggtctctttgcagcctttatatgagcaggatgccttatagttcctcaaggggatctgctgtcatctcctgtgaccttcacatgagccctghggggtgggtggagcagagctgtgacccacattttacaattgaaaactgaaatttagaggggctgagtgactttcccaaagccacaacactgaggagggat

SEQ ID NO: 116865 - DNA, 201 bp, Homo sapiens
ggaaggtggaaggtctctttgcagcctttatatgagcaggatgccttatagttcctcaaggggatctgctgtcatctcctgtgaccttcacatgagccctvtggggtgggtggagcagagctgtgacccacattttacaattgaaaactgaaatttagaggggctgagtgactttcccaaagccacaacactgaggaggga

SEQ ID NO: 116866 - DNA, 201 bp, Homo sapiens
ggaaggtctctttgcagcctttatatgagcaggatgccttatagttcctcaaggggatctgctgtcatctcctgtgaccttcacatgagccctgtggggtsggtggagcagagctgtgacccacattttacaattgaaaactgaaatttagaggggctgagtgactttcccaaagccacaacactgaggagggatgggctg

SEQ ID NO: 116867 - DNA, 201 bp, Homo sapiens
tggaaggtctctttgcagcctttatatgagcaggatgccttatagttcctcaaggggatctgctgtcatctcctgtgaccttcacatgagccctgtggggygggtggagcagagctgtgacccacattttacaattgaaaactgaaatttagaggggctgagtgactttcccaaagccacaacactgaggagggatgggct

SEQ ID NO: 116868 - DNA, 201 bp, Homo sapiens
aaggtggaaggtctctttgcagcctttatatgagcaggatgccttatagttcctcaaggggatctgctgtcatctcctgtgaccttcacatgagccctgtkgggtgggtggagcagagctgtgacccacattttacaattgaaaactgaaatttagaggggctgagtgactttcccaaagccacaacactgaggagggatg

SEQ ID NO: 116869 - DNA, 201 bp, Homo sapiens; identical to SEQ ID NO: 19901

SEQ ID NO: 116870 - DNA, 201 bp, Homo sapiens
atattttgaaatgtgaagaatattactgattttgagtttgtgttttgttttaatctatgagaaatattgcatctcacatttgacatgtttaaaaatgtacrcatatctcgctgggtgcagtgactcaggcctgtaatcccagcactttgggaggctgaggcgggcagatcacgaggtcaggagatcgagaccatcctgact

SEQ ID NO: 116871 - DNA, 201 bp, Homo sapiens
ccagggactccacacgtgctgccagggcccctgaggcccagggataggagctggcaggcagatatgctctggccaccttgtgctgacacagagatgtgacrgaggaggttgggatgtcattgtgtgactagggaacaggcgggcagcacgtgaccccctgcctgggacagggagctcctgggcctctggcttgggcatatg

SEQ ID NO: 116872 - DNA, 201 bp, Homo sapiens
cggaaggtggaaggtctctttgcagcctttatatgagcaggatgccttatagttcctcaaggggatctgctgtcatctcctgtgaccttcacatgagcccygtggggtgggtggagcagagctgtgacccacattttacaattgaaaactgaaatttagaggggctgagtgactttcccaaagccacaacactgaggaggg

SEQ ID NO: 116873 - DNA, 201 bp, Homo sapiens; identical to SEQ ID NO: 19902

SEQ ID NO: 116874 - DNA, 201 bp, Homo sapiens
aaatgtgaagaatattactgattttgagtttgtgttttgttttaatctatgagaaatattgcatctcacatttgacatgtttaaaaatgtacacatatctsgctgggtgcagtgactcaggcctgtaatcccagcactttgggaggctgaggcgggcagatcacgaggtcaggagatcgagaccatcctgactaacatggt

SEQ ID NO: 116875 - DNA, 201 bp, Homo sapiens
tgtgacaggaaggtaagttaggaaggcagatctctaagcagttccctgcactagagtctgcgtgactggtcactcccagccaggcaggccattctgcagcrtggacatcagaccggggcttgcaagcccagctctatcctcctggctcaggcccctctgaaggcacagagcagcagagctgggtgggtgtcttcattacac

SEQ ID NO: 116876 - DNA, 201 bp, Homo sapiens
aaggtctctttgcagcctttatatgagcaggatgccttatagttcctcaaggggatctgctgtcatctcctgtgaccttcacatgagccctgtggggtggstggagcagagctgtgacccacattttacaattgaaaactgaaatttagaggggctgagtgactttcccaaagccacaacactgaggagggatgggctgga

SEQ ID NO: 116877 - DNA, 201 bp, Homo sapiens
cttcataagtgctataaaagtgttcaaatgtgaagcatctgcaggattaaggcagacacatagcagtggttgcctccagagaggaaacctggttggctacmagacgcggaaggtggaaggtctctttgcagcctttatatgagcaggatgccttatagttcctcaaggggatctgctgtcatctcctgtgaccttcacatg

SEQ ID NO: 116878 - DNA, 201 bp, Homo sapiens; identical to SEQ ID NO: 19903

SEQ ID NO: 116879 - DNA, 201 bp, Homo sapiens
aatattactgattttgagtttgtgttttgttttaatctatgagaaatattgcatctcacatttgacatgtttaaaaatgtacacatatctcgctgggtgcrgtgactcaggcctgtaatcccagcactttgggaggctgaggcgggcagatcacgaggtcaggagatcgagaccatcctgactaacatggtgaaaccccgt

SEQ ID NO: 116880 - DNA, 201 bp, Homo sapiens
gaaggtctctttgcagcctttatatgagcaggatgccttatagttcctcaaggggatctgctgtcatctcctgtgaccttcacatgagccctgtggggtgsgtggagcagagctgtgacccacattttacaattgaaaactgaaatttagaggggctgagtgactttcccaaagccacaacactgaggagggatgggctgg

SEQ ID NO: 116881 - DNA, 201 bp, Homo sapiens
aaatgactggcacttcataagtgctataaaagtgttcaaatgtgaagcatctgcaggattaaggcagacacatagcagtggttgcctccagagaggaaacytggttggctaccagacgcggaaggtggaaggtctctttgcagcctttatatgagcaggatgccttatagttcctcaaggggatctgctgtcatctcctgt

SEQ ID NO: 116882 - DNA, 201 bp, Homo sapiens; identical to SEQ ID NO: 19904

SEQ ID NO: 116883 - DNA, 201 bp, Homo sapiens
ttactgattttgagtttgtgttttgttttaatctatgagaaatattgcatctcacatttgacatgtttaaaaatgtacacatatctcgctgggtgcagtgrctcaggcctgtaatcccagcactttgggaggctgaggcgggcagatcacgaggtcaggagatcgagaccatcctgactaacatggtgaaaccccgtctct

SEQ ID NO: 116884 - DNA, 201 bp, Homo sapiens; identical to SEQ ID NO: 19905

SEQ ID NO: 116885 - DNA, 201 bp, Homo sapiens
ctgtaatcccagcactttgggaggctgaggcgggcagatcacgaggtcaggagatcgagaccatcctgactaacatggtgaaaccccgtctctactaaaartacaaaaaaaacaaattagcttggtgtcctccatgcaaagcctgtggtgggtcttgctctgggactagttgagcagcattgcactcgtgttggatgcggg

SEQ ID NO: 116886 - DNA, 201 bp, Homo sapiens
ttcagtgtctacctggagcctaatgtgacctggggccctatgtcaacctggggcttggtatttaggtcgggttcgggcgaccacccagggattgatctcasctggggcctgatgttttcttagcgcctggtgttcacctgaggcctgggtgtcaacttgggactggatagccaactgaggcctgagtgtttcttggtgact

SEQ ID NO: 116887 - DNA, 201 bp, Homo sapiens
tcttaaagacagatgtggctgcaagccagccacaaccttaagacagcatcacaaaacattagtttcaccaaaactcacaaactgttatgagcagggcaggygaattaactagggaggatgcctgctgggctgatgctcggggggtttggtgagtgaagcccacaagctcccagggtctcatggactgaagagctaagcagc

SEQ ID NO: 116888 - DNA, 201 bp, Homo sapiens
tatttaggtcgggttcgggcgaccacccagggattgatctcagctggggcctgatgttttcttagcgcctggtgttcacctgaggcctgggtgtcaacttrggactggatagccaactgaggcctgagtgtttcttggtgactgaggacttcctgggacccatatttcctggacccggattttcacatggagcctgatgtc

SEQ ID NO: 116889 - DNA, 201 bp, Homo sapiens
gccatatctacagaatgttagaggtgaaaccctcatggcctcctctacgtatggtggcatcctcccagattctgactagaatgacgcagcccagcaacaaktataaaccagacggatttagggttctgaaaggccttttcacccaaaaaacatgggggaaaatatgtggactctggctggggagagattaaaggagccctg

SEQ ID NO: 116890 - DNA, 201 bp, Homo sapiens
aggtgtttacttgggacccagatgtgcaccttggcagagcctccgtaacaaaggcctagggccaccaggaggctgtgaaaaagaagcagggcgtctctttycccggacacttgagagtttgtcagagccttcagcgacagagcaggtgccctggacataggaacccaggcacctgggcactgacatcacctcaagggccac

SEQ ID NO: 116891 - DNA, 201 bp, Homo sapiens
gtttacttgggacccagatgtgcaccttggcagagcctccgtaacaaaggcctagggccaccaggaggctgtgaaaaagaagcagggcgtctctttccccrgacacttgagagtttgtcagagccttcagcgacagagcaggtgccctggacataggaacccaggcacctgggcactgacatcacctcaagggccacttgt

SEQ ID NO: 116892 - DNA, 201 bp, Homo sapiens
gtaagttctgtaaatggagatttaggtcccttgcaaaggggacagtttatttcaagagaggagacatgggttgaatgctggtatgttttaactctgcagtrcaaacagttgcaacaagtgtggtgaactaatcacccaacagccctttgctgccttgtcattgtgccttaagtgtaagtgaatatattcaatgccactgcg

SEQ ID NO: 116893 - DNA, 201 bp, Homo sapiens
cgcacagccaagcccagatgccagtcttgctagcagccttcctttagcttcaagagtaggccgaggctcatctgatcgctccaggtatcttggtagtttakgatcgaagtcgtctgccttggaagagaaattaatggaaagaggagaaaacttgagaatccacactactcactccacagggccaagaactctccctcccgt

SEQ ID NO: 116894 - DNA, 201 bp, Homo sapiens
caggcacagtggcgggcgcctgtagtcccagctactcgggaggctgaggcaggagaatggcgtgaacccaggaggcggagcttgcagtgagccaagatcgygccactgcactccggcctgggcaatgagcaagactccgtctcaaaaaaaaaaaaaaaaaaattagacttggaacagtggctcacacctataatcccagca

SEQ ID NO: 116895 - DNA, 201 bp, Homo sapiens
cgttggatgttttgtgttttatatttataatgttcaaaaatgcaagcataacatttaatctttgtccacatggttttacaaaagtaaatcttaaattaccwcgcttttctcatatgttctcatactttctcaaatcactataaagaattacttgttatctattaaaaatccccttcactcaagtctgtattatggtttcac

SEQ ID NO: 116896 - DNA, 201 bp, Homo sapiens
gtgcccaagaccactttgggaaaggaatttttttcataccagaggcacctgagaggaaagccccattgtgaaaccaagtccccacccaaaccccttctgaggacacacaggccattggttattcaactggcagctcaggaaaggctgcagccaagggcccaggtggctgtgaggcccacagggcccgctgggaacacgggg

SEQ ID NO: 116897 - DNA, 201 bp, Homo sapiens
ggtctctttgcagcctttatatgagcaggatgccttatagttcctcaaggggatctgctgtcatctcctgtgaccttcacatgagccctgtggggtgggtsgagcagagctgtgacccacattttacaattgaaaactgaaatttagaggggctgagtgactttcccaaagccacaacactgaggagggatgggctggagc

SEQ ID NO: 116898 - DNA, 201 bp, Homo sapiens
accctgcaaacagaaacaatttgacttttttttcccccaatttggatgggttttattgcattctcctgtctaattgctctagctaggacttccagtaccaygatgaataaaagtggtaaaagtagccacttgttccttacaggaagagcttttaacttttccccattgattacgatgttagttgttggtttgtcatatatg

SEQ ID NO: 116899 - DNA, 201 bp, Homo sapiens
aaaggaatttttttcataccagaggcacctgagaggaaagccccattgtgaaaccaagtccccacccaaaccccttctgaggacacacaggccattggttrttcaactggcagctcaggaaaggctgcagccaagggcccaggtggctgtgaggcccacagggcccgctgggaacacgggggtgctggggctggagcaccc

SEQ ID NO: 116900 - DNA, 201 bp, Homo sapiens
aggtctctttgcagcctttatatgagcaggatgccttatagttcctcaaggggatctgctgtcatctcctgtgaccttcacatgagccctgtggggtgggwggagcagagctgtgacccacattttacaattgaaaactgaaatttagaggggctgagtgactttcccaaagccacaacactgaggagggatgggctggag

SEQ ID NO: 116901 - DNA, 201 bp, Homo sapiens
ggccattggttattcaactggcagctcaggaaaggctgcagccaagggcccaggtggctgtgaggcccacagggcccgctgggaacacgggggtgctgggsctggagcaccccaccttcaaaacagccaatcgcaaggcaggggctgggctcccctggccattcctccccgggcagctggcatgctgagacaaggcatgaa

SEQ ID NO: 116902 - DNA, 201 bp, Homo sapiens; identical to SEQ ID NO: 19906

SEQ ID NO: 116903 - DNA, 201 bp, Homo sapiens
ataaaaagcacaagtgtagtattccattactatggggcttagggatttatttgttttttaaaatcaactatgttagctgggactagactccctacaatctrtcaatggaaaagtaacatttaaaaacccttttggtaattcaaattacagatttaaaagtgcttaagatctggtgttttgttaatgcttctgtttattcca

SEQ ID NO: 116904 - DNA, 201 bp, Homo sapiens
cctccctccctctttccctcctttctctctctcaatctttctttttctcttttctctctctctctctttttttttttgagtttcactttttttacccaggytggaatgcaatggcatgatttcagctcactgcaacctctgcctcctgggttccagcaattctcctgcctcagcctcctgagtagctgggattacaggtgc

SEQ ID NO: 116905 - DNA, 201 bp, Homo sapiens; identical to SEQ ID NO: 19908

SEQ ID NO: 116906 - DNA, 201 bp, Homo sapiens; identical to SEQ ID NO: 19910

SEQ ID NO: 116907 - DNA, 201 bp, Homo sapiens
cagtcactgtaggagcagaagaggcatttttctgccaactggttgaagcttgtgccagaatgatcctgctgtttcttaattgtcctaaaagctcgtagccrgcaatttccctgccaagcctgacctcactttcatgttttttgtaatatgcagatcacgaagtgtcccattcagagtgggaaaacaagaaattacttcctc

SEQ ID NO: 116908 - DNA, 201 bp, Homo sapiens
ttttaagttaataatgccctaactggggatccaagtccttggacttcaccaaagaaaataacaggggttcaggagctatttttaatatttcaaaatgcctrttagtatgtcactaatcatataaaatatagtctttgtgtatggtaacagagtcttaaaggagaaaacttttagggaaaaattcatagacttgagcaaatt

SEQ ID NO: 116909 - DNA, 201 bp, Homo sapiens
aaagaaaagtgatatttattgacagcttataatttaagtgagtaggaatattttaagttaataatgccctaactggggatccaagtccttggacttcaccraagaaaataacaggggttcaggagctatttttaatatttcaaaatgcctgttagtatgtcactaatcatataaaatatagtctttgtgtatggtaacaga

SEQ ID NO: 116910 - DNA, 201 bp, Homo sapiens; identical to SEQ ID NO: 19914

SEQ ID NO: 116911 - DNA, 201 bp, Homo sapiens
tggctaggtatcaggggtggaaggcatatggtcagcaatgtagtctcagggcaaactgtgaattgaagttaaaagaaaagtgatatttattgacagcttayaatttaagtgagtaggaatattttaagttaataatgccctaactggggatccaagtccttggacttcaccaaagaaaataacaggggttcaggagctatt

SEQ ID NO: 116912 - DNA, 201 bp, Homo sapiens
tcatcttagctctccttttaaagttttcttttctttttaaaatctcaagtgaatttgcaaagggaggtatgagaatgtgggggaattggggatgaaaactrgtgtgtggtaccaagaagaggcaaaagaaaaagatcaaagattagctttcctaaactgggtggcaccttggcactgaatcctgggaacagatgctggctg

SEQ ID NO: 116913 - DNA, 201 bp, Homo sapiens; identical to SEQ ID NO: 19907

SEQ ID NO: 116914 - DNA, 201 bp, Homo sapiens
ttatcccctttatacagataaagtcactgaggctggagaggttaagaaacttgctagtggtaagtggtcaagtcaggcagcctggctccaagcccctgctsttatctgaccaaatatgaggggaagatttactgaacttataccaccttcttcctctttgtttctgttatgacccagggaacaagatgaagaggttttcct

SEQ ID NO: 116915 - DNA, 201 bp, Homo sapiens; identical to SEQ ID NO: 19909

SEQ ID NO: 116916 - DNA, 201 bp, Homo sapiens; identical to SEQ ID NO: 19911

SEQ ID NO: 116917 - DNA, 201 bp, Homo sapiens; identical to SEQ ID NO: 19912

SEQ ID NO: 116918 - DNA, 201 bp, Homo sapiens
atgttgtgcatttacatatgtgttggtcatacaaagataattggaaaggtttctggcagtaagcagaaggcagggactgacggcctctctaccctatttaytgttgaccctgagaatccttggggtaatcagatatgcgtggctcacagagatatccaggggtttagaagaaagaacactagcctgtgaatcagaagacct

SEQ ID NO: 116919 - DNA, 201 bp, Homo sapiens; identical to SEQ ID NO: 19913

SEQ ID NO: 116920 - DNA, 201 bp, Homo sapiens; identical to SEQ ID NO: 19915

SEQ ID NO: 116921 - DNA, 201 bp, Homo sapiens; identical to SEQ ID NO: 19916

SEQ ID NO: 116922 - DNA, 201 bp, Homo sapiens
ttcatcagatgtttggcttccctgtatagcaacatgactctactgaaatttcatctggtgaaacactgaccttgttaagataatgttagattcaaattgcrtcctctaagggctagccacatctttcatcttgcaaattccatgtagtaccacgagttacaactgttctgaaaacagacatcacttgttaaattggttatt

SEQ ID NO: 116923 - DNA, 201 bp, Homo sapiens
caatttccacacagacctccctgaagaaggaggggcctgggaagcccactttgtcatgtactatcaataaagttccctgtactcaaaaaattaattaactrattaatcaaaatgtattgaatactaacattatgctaaggagagtcaattcctgcttgtttttaaaaatataattcttcatcattcaacttgaaattactg

SEQ ID NO: 116924 - DNA, 201 bp, Homo sapiens
gcactcccgtgttcattgcagtactattcacaatagccaagatatggaatcaacttaagtgcccatcaatggattaatggataaagaaaatgtaacatatrtaaacaatggaataccattagccttaaaaaaaaaaggaaatcctgttttttttttttttttctgtgacaactggatgaacctggaggacattatgttaag

SEQ ID NO: 116925 - DNA, 201 bp, Homo sapiens; identical to SEQ ID NO: 19921

SEQ ID NO: 116926 - DNA, 201 bp, Homo sapiens
tgaggtctcgctctctcacccaggctagactggaactcctgggctcaagtgatgctcctaccttggtcttccagttagctggggctacaggtgtgctaccrctcctgaatccttttctttattctttatgcacaatttcttattcatcagatgtttggcttccctgtatagcaacatgactctactgaaatttcatctggt

SEQ ID NO: 116927 - DNA, 201 bp, Homo sapiens
gaaaggcatgtagaaaatgtatacaattactctctgctcctcccgtaagacagacagctgcatcttgtcatgcagcaccagctgtatccctgagacaccayggtgaaggtgaagaccaaagtaaatggatttggccatgttgggtgtctggtcaccagggctgcttttaactttggcaaagtggatactgtcaccatcaat

SEQ ID NO: 116928 - DNA, 201 bp, Homo sapiens; identical to SEQ ID NO: 19922

SEQ ID NO: 116929 - DNA, 201 bp, Homo sapiens
atgaaaaatttcaaacatacagaagagttaaaagaatttatacaccacctaaattctacaattaacatgttgccacatttactttatcacatatccacccyctatctctccatcaagccacttttttttttttactttgcagaatttccaagtaagttgcaactatctgtatacctcacccctaaatgcttcagtatgaat

SEQ ID NO: 116930 - DNA, 201 bp, Homo sapiens
tctcccctccccacaatttccacacagacctccctgaagaaggaggggcctgggaagcccactttgtcatgtactatcaataaagttccctgtactcaaamaattaattaactaattaatcaaaatgtattgaatactaacattatgctaaggagagtcaattcctgcttgtttttaaaaatataattcttcatcattcaa

SEQ ID NO: 116931 - DNA, 201 bp, Homo sapiens
tccaccttacagtactgatttgactccttctgacttatttatgttttctaatcttggaaagatctttaaagggcacccacttttcttcagttaattatttaaaaaaaaaacacattgacattgttaaattcccagttctttaaggatggactatatggctggtatcattgcttatagagtatcttaaccttgatggagctt

SEQ ID NO: 116932 - DNA, 201 bp, Homo sapiens; identical to SEQ ID NO: 19924

SEQ ID NO: 116933 - DNA, 201 bp, Homo sapiens; identical to SEQ ID NO: 19925

SEQ ID NO: 116934 - DNA, 201 bp, Homo sapiens; identical to SEQ ID NO: 19926

SEQ ID NO: 116935 - DNA, 201 bp, Homo sapiens; identical to SEQ ID NO: 19927

SEQ ID NO: 116936 - DNA, 201 bp, Homo sapiens
ttcttacttacacatttgtagacatctgaactcccatgccaagaggggatgccagaagaggtgaggtgagggggtagctttggctagtgagggctcccagrgtcagcatgctgggggcgtcttccaactggagttgggataatgctgcaatccaagtcaagtgcagaaccagaaacaagaggatggcaggggagccagaga

SEQ ID NO: 116937 - DNA, 201 bp, Homo sapiens; identical to SEQ ID NO: 19928

SEQ ID NO: 116938 - DNA, 201 bp, Homo sapiens; identical to SEQ ID NO: 19929

SEQ ID NO: 116939 - DNA, 201 bp, Homo sapiens
aaccacttttcttacttacacatttgtagacatctgaactcccatgccaagaggggatgccagaagaggtgaggtgagggggtagctttggctagtgaggrctcccagagtcagcatgctgggggcgtcttccaactggagttgggataatgctgcaatccaagtcaagtgcagaaccagaaacaagaggatggcagggga

SEQ ID NO: 116940 - DNA, 201 bp, Homo sapiens; identical to SEQ ID NO: 19930

SEQ ID NO: 116941 - DNA, 201 bp, Homo sapiens; identical to SEQ ID NO: 19931

SEQ ID NO: 116942 - DNA, 201 bp, Homo sapiens; identical to SEQ ID NO: 19932

SEQ ID NO: 116943 - DNA, 201 bp, Homo sapiens; identical to SEQ ID NO: 19933

SEQ ID NO: 116944 - DNA, 201 bp, Homo sapiens
ctccccttctccgcacacacagttggactacatttcccaggctctcttgtgttatgcgtggtcacatggccagttcttgccaatggaagaggagtgggatygatgtgagccactgccagtccaggcccataaaatcctcctgtggacatttcttcgtgctctttcttcttctgctgatgcatgcaagtagggatgaggccc

SEQ ID NO: 116945 - DNA, 201 bp, Homo sapiens; identical to SEQ ID NO: 19934

SEQ ID NO: 116946 - DNA, 201 bp, Homo sapiens; identical to SEQ ID NO: 19935

SEQ ID NO: 116947 - DNA, 201 bp, Homo sapiens; identical to SEQ ID NO: 19936

SEQ ID NO: 116948 - DNA, 201 bp, Homo sapiens
tgtctttcaattcagctgctgttttagcaaccacaaactcccatctctaattcctctgcccagagaggctaagattctctgcctgaatggcatatcaccaytaaactctaggaaatgcccataatagcaaacttgagtgaatgtagatcttaccttgtatgcttcactcaaagattgcaactccatgcaccgtgcaatgcc

SEQ ID NO: 116949 - DNA, 201 bp, Homo sapiens
ttaagaaaatgaaatgctctggagatagatggtggagaaggttgcaaaacaatatgcatgtaggttttgcagatgctgctgccgctgctgggatccccatmctgtcagccgtggtcaaccctgccgtgttcttcgacatcgctgtcgatagtgagcccttgggccatgtctctttctagctgttttcagagaaggttccaa

SEQ ID NO: 116950 - DNA, 201 bp, Homo sapiens
ttctggtcaacccccatcttctttccaaccactttctgatgtcagtcatcatgggtttatgcctgttctcgatgttcttgtagacagaaactcacagtgtrcactcttgtgtgccctgctggtcttgctcagcctgccgtctgctgttgacctgtgctgatgcgtgtccctggagttaactctactgctaactagtactcc

SEQ ID NO: 116951 - DNA, 201 bp, Homo sapiens
aatctcaggtgatggttccctgggagcagaaaaagaggcagattctgggcgatgactattaaaaaaaaaaatcactcagtcattagcaaatcgtacaaaartttagaaaggagaataattatctttgtgatgatgctgtttaagataatcagaacttgcattgctaagttagacacgccgaagtgaattgaggactgttta

SEQ ID NO: 116952 - DNA, 201 bp, Homo sapiens
ttgtgcatccattctcctgtgggtggacattgagatggcactgtggtttggagaccgctgacagtgagtgaagatgtcagctgaccactggggagtgtccyggcagagtgagcttgccacacttcaagttttcggtgctgggggttttgcttttttggtgactcagcactagggacaggaagtggacagatggccttaaca

SEQ ID NO: 116953 - DNA, 201 bp, Homo sapiens
accacaataatgcgtttttgttaaggaggacctctgggggaggcagcaggggtggggtggtcactcactgactgtgaagtcacaatttgacagctgtaacwgtctgctgtttttattcctggtataccttcccgaatgcctggtctccggaaacattttttgatagctcaaatagacacctgggccaagtatagtctcctt

SEQ ID NO: 116954 - DNA, 201 bp, Homo sapiens
gcccctccccacaggctctccctcacatcactgagtgagcagggcttttcagagctacggccctgctcaggttttaaaatttaaagcttgattctgcagayaccacaataatgcgtttttgttaaggaggacctctgggggaggcagcaggggtggggtggtcactcactgactgtgaagtcacaatttgacagctgtaac

SEQ ID NO: 116955 - DNA, 201 bp, Homo sapiens
tgggtagaggtctggcagtgcgggggaaggtaggggaggatttgtgctctgagacctggaaggtacctgtgactgggacagagggaaggtcgcaggcagcygtggagaacctcgtcaggagagcagctcctgctgctgccttgatgggataaaggcacacaaacggccctcctgtggcaggggctccagccccagttctag

SEQ ID NO: 116956 - DNA, 201 bp, Homo sapiens
gtcaaaaccacaataagataccacttcacgtccattaacgtgactataaacaacaacagaaaataacaagtgttggtgaggatgtggagaaactgcaacccttatgcactgctcatgaaaatgcaaattgtgcaaccgctatggaaaacattatggccattcttcaaaaaattaaacatagaattatcatctgatccagca

SEQ ID NO: 116957 - DNA, 201 bp, Homo sapiens
tgaattagcttatttgttttgggtaagttattttgccattgacttagcttatttagccaatgggaagacatataagatgacctagccctggcttttcaaamcaaaattaagggccgtggagtttgggaaaggtgcatacctcatttggaagctgggctggttggaccaggaggctgcgtgcagtgcgcttgtcaggccgat

SEQ ID NO: 116958 - DNA, 201 bp, Homo sapiens
agtcaaaaccacaataagataccacttcacgtccattaacgtgactataaacaacaacagaaaataacaagtgttggtgaggatgtggagaaactgcaacccttatgcactgctcatgaaaatgcaaattgtgcaaccgctatggaaaacattatggccattcttcaaaaaattaaacatagaattatcatctgatccagc

SEQ ID NO: 116959 - DNA, 201 bp, Homo sapiens
agtcgcttttttttctctgtataaggtcaccacctcacttgtgaccttgagggaggcttcctccctggccccaggtgtctgacaaggtctgctctagtggmccctgggtagaggtctggcagtgcgggggaaggtaggggaggatttgtgctctgagacctggaaggtacctgtgactgggacagagggaaggtcgcaggc

SEQ ID NO: 116960 - DNA, 201 bp, Homo sapiens
tatttatgccggtttccctctctccattcagaaaccgtactctatacacccccggtccccaccctaagtccaccaggtcactgacagctaacaattgaccytcacctgggagaggtaagcttgcaaggcccagcttggacatgcacctgtgatttctaaaggacttcttctgaattcatctctgaatgaggttggcggcac

SEQ ID NO: 116961 - DNA, 201 bp, Homo sapiens
ggcacaaaactctggtaaaaatgtttgcctggagaaggtgtcagataacagacatcaaagctgactttttggatgttcttttcactccgtggctgtgtagycacatgttcatggtttgtcattgtgtggaatttttgatgctatatttgggcatatatctattaaatatgcttattgatgaattgtaatctggatggaatc

SEQ ID NO: 116962 - DNA, 201 bp, Homo sapiens; identical to SEQ ID NO: 19938

SEQ ID NO: 116963 - DNA, 201 bp, Homo sapiens
atatgcatgtaggttttgcagatgctgctgccgctgctgggatccccatactgtcagccgtggtcaaccctgccgtgttcttcgacatcgctgtcgatagygagcccttgggccatgtctctttctagctgttttcagagaaggttccaaagacagcagaaaactttcatgctctgaactttcatgctttcatggagagaa

SEQ ID NO: 116964 - DNA, 201 bp, Homo sapiens
aaaacccaaaacctgattcttcaccgcaggtaggcgtagagaactgcctggaagaaacctagctgcagttgtcttgccaaagcaagacatgtcccgtgatkttataacaattgggtctagaatccctcatcagtgagaccaatattgccacctttaggttaacaagtgggctgaattctgtccaacccagtggtgctcata

SEQ ID NO: 116965 - DNA, 201 bp, Homo sapiens
gcaaggtgaaagaaggcatgaagattatggaggccatggagcgctttgggtccaggagtggcaagactagcaagaagatcaccattgctgactgtggacarctccaataaattagacttgtgttttatcttcaccactcagccattcctttatagttcaggagagcatgcctgctccccatttgctcacagtatcctagaa

SEQ ID NO: 116966 - DNA, 201 bp, Homo sapiens
taattttattattttcaattgctgcccgtcaatctcaggtgatggttccctgggagcagaaaaagaggcagattctgggcgatgactattaaaaaaaaaaatcactcagtcattagcaaatcgtacaaaagtttagaaaggagaataattatctttgtgatgatgctgtttaagataatcagaacttgcattgctaagtta

SEQ ID NO: 116967 - DNA, 201 bp, Homo sapiens
gggaggcagaggttgcagtgagctgagatcgcaacactgcactgtagcctgggtgacagagtgagactccgtctcaaaaaaggaaagaaaaaaaaaaaaaagaaactccgattgcattcaacactgccttggcagcatgatccgtgggctcccctcattaactaggtacagaccagtttgcatggtcttggactctcatgg

SEQ ID NO: 116968 - DNA, 201 bp, Homo sapiens
ggtagttgccaggggatgtggggagagagttatcgtttaatgcgcaaagagtttcagtttaagaaaatgaaatgctctggagatagatggtggagaaggtwgcaaaacaatatgcatgtaggttttgcagatgctgctgccgctgctgggatccccatactgtcagccgtggtcaaccctgccgtgttcttcgacatcgct

SEQ ID NO: 116969 - DNA, 201 bp, Homo sapiens
tacactagtgttgctcatagcaaccacattcacaatagccaaaaggtagaagcaacccaagtgtccgtcagtgatgaatgaataaacaaaatacactagayacatacaatggaagatgattcagccttaaaaaggaaggaacttttgacacacgctatagcgtggatgaaccttgaagacgttatactaagtgaaataagc

SEQ ID NO: 116970 - DNA, 201 bp, Homo sapiens
gtggggctgtgcacaccctgaaagtcagaagcttagaccttattctaagggtagcaggaggccgttataaccaagaaaagctgttagcatctgtgcttggraagtctcccctgtggctgcagtatagagaatggattgaaggagggcaggagtggaagtcaggagaccagtggggaggctgttgcaaccatccaggtgaga

SEQ ID NO: 116971 - DNA, 201 bp, Homo sapiens
tgaggcctagaggacggctagatgttggcaggaaaaggggagaggggtgttctgtgcaaaagggacagtatgtttaagaatgggcatggggccgggcgcartggctcacacctgtaatcccagcactttgggaggccgaggcagttggatcacgaggtcaggaggtcgagaccatcctggctaacacggtgaaaccccgtc

SEQ ID NO: 116972 - DNA, 201 bp, Homo sapiens
agctgggagatcccagctccctagagctgaggggaatcagtaacccatacccagcatactgccgggagctttgttgcatggactgtgctgaaaagtagagrtactcactaaatttggcaatacaaataaaaagtctcaaaagaatttatagcctttgattcagtaattccattcttcaacgcctctcccaaatatataaca

SEQ ID NO: 116973 - DNA, 201 bp, Homo sapiens; identical to SEQ ID NO: 19941

SEQ ID NO: 116974 - DNA, 201 bp, Homo sapiens
agggaaaccttgagacagactcatttgctttaggaggaatcaaggatgagtttctggctggagccactgccctaagtaaggttggatcacaaggaagttawagagccaggggtgaatccacatgtgccttgcctccatggcccgtacgttcctacaacaccacactagggctctgtggcagtgcctgaccacctttaaaca

SEQ ID NO: 116975 - DNA, 201 bp, Homo sapiens
agtggttctcccagtggggtccctggaccagcagcatctgtgtcacctgggaacttgttagaaatacaggttctctgcccacaccccaaacttactaaatsagaagctctggagatgggcctctgcaatcactgttttaacaaacccaaccgggcatggtggctcacgcctgtaatcccagcactttgggaggccgtggcg

SEQ ID NO: 116976 - DNA, 201 bp, Homo sapiens
ctgtgtccaggcactgtgctgaatgctgcagataaaacttggaataaaatagacatagctgtcgtcttcatggagtttaagacattagtcattggtggtasacagctagacccctgcagtggttctcccagtggggtccctggaccagcagcatctgtgtcacctgggaacttgttagaaatacaggttctctgcccacac

SEQ ID NO: 116977 - DNA, 201 bp, Homo sapiens; identical to SEQ ID NO: 19942

SEQ ID NO: 116978 - DNA, 201 bp, Homo sapiens; identical to SEQ ID NO: 19944

SEQ ID NO: 116979 - DNA, 201 bp, Homo sapiens
cagggtgcagccattgggaggcctgactggaatccaggctgcctgattccagagcctgtgcactcactacatgacgctgtctctccacaggatgttgttartgtttttataatcaggaaaatattgatttttcaaaaacggaagtaagaggttagagaaatagtgctttgatctgctaggatattagaaatggaaggattt

SEQ ID NO: 116980 - DNA, 201 bp, Homo sapiens
gaggcaagagaatctcttgaggctgggggtacggaggttgcagtgatctgacattgcaccactgcactccagcctgggtgatagagtgaactctgtctctaaaaaaaaaaaaaaaaaaacaagccctccagcgattctgatgctcaattagatttcagaaccactgggtaactgtaatgtagcaagtggtattgaggggct

SEQ ID NO: 116981 - DNA, 201 bp, Homo sapiens
gcaggaaccctaggagacaagtgggctatgcgggaaaagccagccctttgggggtatggggagtgggacaagaaaggcttcctggggagaggatggtaatcctgaggcctagaggacggctagatgttggcaggaaaaggggagaggggtgttctgtgcaaaagggacagtatgtttaagaatgggcatggggccgggcgc

SEQ ID NO: 116982 - DNA, 201 bp, Homo sapiens
agttggatcacgaggtcaggaggtcgagaccatcctggctaacacggtgaaaccccgtctctactaaagatacaaaaaaattagcgggcatggtggcgggygcctgtagtcccagttactcgggaggctgaggcaggagaatggcgtgaacccgggaggcagagcttgcagtgagcccagatcgcgccactacattccagc

SEQ ID NO: 116983 - DNA, 201 bp, Homo sapiens
ggcgggtgcctgtagtcccagttactcgggaggctgaggcaggagaatggcgtgaacccgggaggcagagcttgcagtgagcccagatcgcgccactacaktccagcctgggtgacagagcgagactccgtctcaaaaaaaaaaaagagtgggcgtggcaaagcctgatcagagagggggcagtggtgagatgaggcccaa

SEQ ID NO: 116984 - DNA, 201 bp, Homo sapiens
tcactgcaacctccacctcccaggttcaagtgattctcctgcctcagcctcccaagtagctgggattacaggcgtgtcaccatgcccagctaatttttgtrtttttagtagagacagggtttcgccatgttggtcaggctggtctcaaactcctgacctcaggtgatctgcccatcttggcctcccaaaatgctggaatca

SEQ ID NO: 116985 - DNA, 201 bp, Homo sapiens
agacagggtttcgccatgttggtcaggctggtctcaaactcctgacctcaggtgatctgcccatcttggcctcccaaaatgctggaatcacagacataagccaccatgcccagccttcttttcttttttgttttcagatttcccccctagttttctataataataatagcagacattagttgagctcatagtacatgccag

SEQ ID NO: 116986 - DNA, 201 bp, Homo sapiens; identical to SEQ ID NO: 19945

SEQ ID NO: 116987 - DNA, 201 bp, Homo sapiens
gacacaagtgactttatatttcagagcctcccttttctgagttgggcataataataataataatagcactttgtgagacttaatattatgtatcaggtacsgttgtaaacgctttaggtacaacttttctgattagattggggggcaatggtgagtcaaagaatctttaaaaaggcctgggctggaagggctgacagtgtc

SEQ ID NO: 116988 - DNA, 201 bp, Homo sapiens; identical to SEQ ID NO: 19943

SEQ ID NO: 116989 - DNA, 201 bp, Homo sapiens
aaaaggcctgggctggaagggctgacagtgtcccgacagagtaggtactcaaaaaaatcgactgaatgtctcagaggctgtttgccagagcctgaagtgtygcatacgttagttactgtattgctcctgaaaaactgagataattctacttattctcctgtttgtataagctgaggggtctgaggacagacatgctaaacg

SEQ ID NO: 116990 - DNA, 201 bp, Homo sapiens
cccagctacacagggtgcagccattgggaggcctgactggaatccaggctgcctgattccagagcctgtgcactcactacatgacgctgtctctccacagratgttgttaatgtttttataatcaggaaaatattgatttttcaaaaacggaagtaagaggttagagaaatagtgctttgatctgctaggatattagaaat

SEQ ID NO: 116991 - DNA, 201 bp, Homo sapiens
tcccagcactttgggaggccgtggcgggctgatcacttgaggtcaaggagtttgagaccagcctggccaacatggtgaaactctgtctgtactaaaaataygaaaaatagttgggcatggtggcacatgcctgtaattccagctactcaggaggctgaggcaagagaatctcttgaggctgggggtacggaggttgcagtg

SEQ ID NO: 116992 - DNA, 201 bp, Homo sapiens
gcagcatctgtgtcacctgggaacttgttagaaatacaggttctctgcccacaccccaaacttactaaatcagaagctctggagatgggcctctgcaatcwctgttttaacaaacccaaccgggcatggtggctcacgcctgtaatcccagcactttgggaggccgtggcgggctgatcacttgaggtcaaggagtttgag

SEQ ID NO: 116993 - DNA, 201 bp, Homo sapiens
ggcagcacttcctggtctctccctcggtcgtcgtgagagtcacacagttctcgaagtgccagctctggaaaggccctgggaccacctgctgcctgagccarccttcccgttttatgttggagaaaacggaggtccggggcgaagtgagtggtccagggtcaccgagcgagtgaaggccgagcttgttcttagaactaggcc

SEQ ID NO: 116994 - DNA, 201 bp, Homo sapiens
atgaggctgcttgaggttggaggggacaagctggaggacctgaggctgctagaggtaaccagctgggagatcccagctccctagagctgaggggaatcagyaacccatacccagcatactgccgggagctttgttgcatggactgtgctgaaaagtagaggtactcactaaatttggcaatacaaataaaaagtctcaaaa

SEQ ID NO: 116995 - DNA, 201 bp, Homo sapiens
gggaggcagagcttgcagtgagcccagatcgcgccactacattccagcctgggtgacagagcgagactccgtctcaaaaaaaaaaaagagtgggcgtggcraagcctgatcagagagggggcagtggtgagatgaggcccaagggggtcagcttatgtggggctgtgcacaccctgaaagtcagaagcttagaccttattc

SEQ ID NO: 116996 - DNA, 201 bp, Homo sapiens
cacagagttttgaagtacctacctgatgtattctccaggaggcaggtggagattttgagtcagctctcagcatgcaggctgtccagggagtgtgtgctgtraagagggaagaggcccatgacatttaaatattgggggcaggtagaggaacaagagagggatgtgcaaaggacagggtttgcaagagacagatggcaacaa

SEQ ID NO: 116997 - DNA, 201 bp, Homo sapiens; identical to SEQ ID NO: 19946

SEQ ID NO: 116998 - DNA, 201 bp, Homo sapiens
ttggcagcaggtcttttagctggacaataggttgatcaaggcatagcaaatgacaagtaggggtgtgaacccgtttctatcatttgctggccatgaccttrtgcaaattcttttccttctctgtgcctctgtctcctcatttgccaaatgaaagcattggattagaatctgcaaaggccaattagtttcatcatatcaaca

SEQ ID NO: 116999 - DNA, 201 bp, Homo sapiens
cttgcctatgctatttaccaggtcaccaagtaatatccctggtgtgagggaacagagacaacctttctgttttcagcctctgctcttgtgagctttgcacrgaggatgagggagggtggatggtggtaaatggatcatttctttcaaccataatgtatgactctcagtgactgtgattctcagaaaagaacatgtagtgac

SEQ ID NO: 117000 - DNA, 201 bp, Homo sapiens
gttattcttctctgctcttggcctcagtttactcatgaaggggttgatcttgtcaccagatgttctctcaaagtacacttcctctctgacatccccacccrctccagtgccctagaatttcaccccaacaggccctgagccaagcttacgtagcaccagcagggctcagcactgtctacctacctggggaggctgtctctg

SEQ ID NO: 117001 - DNA, 201 bp, Homo sapiens
ttacaacaggaaatgactctccagttcttgggtagtgaaactgggtcaactataacaggtggcttggaagaacctatgataagaggcactagagaacagasaagcctcaggaaagcaatattaaacttaagcggggtctcagaaaggtctttgtagttgaatcaagttaaaacaagtttggttccaagggtctggtgactc

SEQ ID NO: 117002 - DNA, 201 bp, Homo sapiens
taacctcatgcctcaccctatcaaaaccactaggaaatagcttctctgggattggatgcaaaaattgtggaatttcctctcccaagaattgttaggcagtkcaacgattttgctaaagaggtgcccacaaagactttgaaagagaaggaaggttgtcttctgagggtttgactgtaaatcaaaacctgttggacacaaata

SEQ ID NO: 117003 - DNA, 201 bp, Homo sapiens; identical to SEQ ID NO: 19947

SEQ ID NO: 117004 - DNA, 201 bp, Homo sapiens
cacataatgtagagtttatttcctagcaaataatgaaagatcgatggatgaatgttggtcatgaagaggaagaactaaagccatatactgagcctgatccrgatttcaatgacacaaaaagaataggtaagtatttaaacatggtaagaagtgctgtccctaggcaacaagtaagagtcctttagtgtgccaaaatagtgt

SEQ ID NO: 117005 - DNA, 201 bp, Homo sapiens; identical to SEQ ID NO: 19948

SEQ ID NO: 117006 - DNA, 201 bp, Homo sapiens; identical to SEQ ID NO: 19949

SEQ ID NO: 117007 - DNA, 201 bp, Homo sapiens; identical to SEQ ID NO: 19950

SEQ ID NO: 117008 - DNA, 201 bp, Homo sapiens
atcgcttgcaccctagaggcggaggttgcagtgagctgattgcaccagggcactccagcctggagaactgagtgagactccatctcaaaaaaaaaaaaaaagggttgaggggggcatgccaagtgtatggaatttgtcaagagctttaacctgcctatgctgatgctgggaggaagtggttccaatttgtaatgttgccta

SEQ ID NO: 117009 - DNA, 201 bp, Homo sapiens; identical to SEQ ID NO: 19953

SEQ ID NO: 117010 - DNA, 201 bp, Homo sapiens
ggaagtcacagatatcaattttgtttatatcatctcagcctgcacttcataatatgatcacatctaagtgaaagggaacctggacaataatgttctataaytgagtcatcatgggccccattaaaactgttactgaaaggaagaataacaaagggtgaagttaagacaatatcaaaaagaagaacctatgacaatttcaca

SEQ ID NO: 117011 - DNA, 201 bp, Homo sapiens
ttcacctagcaacacagttcagatcgagattgacaggaccatgagccaatcacaaagctagatttgctttccagtctaacagtggccgttgtgctggagasagtgaggagaagaaaggggcgggacaagggcaaaggcgttagaagtcaccaccgacccagcccctcaacagcaagttggttcttcagcattaagatccag

SEQ ID NO: 117012 - DNA, 201 bp, Homo sapiens; identical to SEQ ID NO: 19955

SEQ ID NO: 117013 - DNA, 201 bp, Homo sapiens
gacacgaatcacatggccaacagtgaggtttgaagagcacctttgttctgttctcctgggtggctatcagtggctgagaatgccagtcaatcaaccagctratagaccaagtgatgaaataaaaatgatcctccaggaggaataagttctagtatcctatagtattacgggatgactataataaacaacaatttattgtac

SEQ ID NO: 117014 - DNA, 201 bp, Homo sapiens
gccttctaggcaggggggaaaatggcacaggcaaagaccctttcatcagtgtggctggagtggagggagaggaggagaaaaaggagatgcagacagagatktgagagagacccgggtctcatctcatggggccatttttaggacatgggttttgttccaagtgagataacaaatttattttcagatattctgtgtgttttg

SEQ ID NO: 117015 - DNA, 201 bp, Homo sapiens
ctgtataaccaatcatgtaaagttgcatttagaattatatagtatcatgcattgttcaaaattgtcatcttccccagttctgcctagttttactataacawtgcatcaaatgaataaacagatatgtccagattacagaatgaagaagggttttcttgaagcaaatttcttaggtatctgattacccaagctgccactcct

SEQ ID NO: 117016 - DNA, 201 bp, Homo sapiens
atccccaacctgacatctccttacatctgtcacattaaatatagttctgtttcttcaccttactcactgatgtggcatttatcaaatcctcacacaaaggygtaggttggaaagaatgacaagatcacattatttaatagactcctaaaatctattaaaaataatgaagtttaactttagatttttttttttcatttaggg

SEQ ID NO: 117017 - DNA, 201 bp, Homo sapiens
ctttttttgaaatgtgcgtgaaggaattaacaattatatagtaatataaaaattatcctgtgaatgaacccggtaatatgacatgtaacttgacaacgagyggtgataaataattgctctaggcttcttcagtttttttttttcttagattcccttcctaccaatatgctctgtctgtgagacaccagatcttctataagg

SEQ ID NO: 117018 - DNA, 201 bp, Homo sapiens
gttctagcttcccaattttgcggtctcaagagaattgcctgctcgattggtattcatataggcaggtgctaaaggattacctgacttcaaatccccaacckgacatctccttacatctgtcacattaaatatagttctgtttcttcaccttactcactgatgtggcatttatcaaatcctcacacaaaggcgtaggttgga

SEQ ID NO: 117019 - DNA, 201 bp, Homo sapiens
cctgatcaaatggaatcttctatgaaggtctattgctatgcctaagagtgtgaactccaagcgaaatttgagtgtttctgctcacttacattttcccttgsaggtcaggagaaagacccccaattcccaacactcctcttccctagattcccagttccttgattttcttcccattacacattgttttccaggtactatccc

SEQ ID NO: 117020 - DNA, 201 bp, Homo sapiens; identical to SEQ ID NO: 19961

SEQ ID NO: 117021 - DNA, 201 bp, Homo sapiens; identical to SEQ ID NO: 19963

SEQ ID NO: 117022 - DNA, 201 bp, Homo sapiens
gatggcggaagccccgtgacggtggccatggcggcggcggaagtctcatcaagcccggcggccttgtctctgggctgggccttctcgagctactggccctkctagccccagttgtggggtctcagcctgagctggcgactgaccggcttctccggcaggaagggctgaggctgcaagctcccgcaggaggcactgcccaaa

SEQ ID NO: 117023 - DNA, 201 bp, Homo sapiens
taactcagggaaaaacaaagcatctttaatcctatcgtcctggaaaacttgagtatctcaatgcagaaaggcatgaaaatatctttttttatttttttttygagatggagtctcgctctgttgcccaggctagagtgcagtggcatgatcttggctcactgcaaactccacctcccggattcacgccattctcctgcctca

SEQ ID NO: 117024 - DNA, 201 bp, Homo sapiens
atttatgattggcttaataggacataaccctatcatcacttcaagagcatctctctctctctctctctgtgtatatatatgtatatgtgtgtgtgtgtgtrtatatatgtatatgtgcgtgtgtgtgtgtgtgtgtgtataagtgtctcacaaaaagacttattataaggaattggcttgtgtgattatggaggctagcaa

SEQ ID NO: 117025 - DNA, 201 bp, Homo sapiens
actatttgctctatgtgagtgtatactactacactatatcacgagaaaaggaaactccacaagaacttgctctagcaaaatgggcttttctagaaccaatattttttacttaaaaatagttgataagtcaatgtttaattccacccacccttccccccatggaaggacttcctgggcattaggaatattttgtaattacat

SEQ ID NO: 117026 - DNA, 201 bp, Homo sapiens
gtggctgaccatttggagtagggtgtatttttgggagtcaaccaccgagaccactgcaataaggcagattggaaggaaggatggagccacctgacactatktaacctccattcaaactctgcagagtggactctttgtaaggctgcttggttgatggagatagcagcacatctgccattttgtacttcttgttacaaggcg

SEQ ID NO: 117027 - DNA, 201 bp, Homo sapiens
cctcctctcagtatctgcctctgcagatataagacagaaacagagatgacagacagcctctacacactgaaaggatgtgaagtaaatacaataatgcgtgraaacatatccttagaccaacgatcacgtctaggtttgaattaagtcatgatcctaggttgtcttaggtaatgttctttctgcatagatcccttataaaaa

SEQ ID NO: 117028 - DNA, 201 bp, Homo sapiens
ttgtacttcttgttacaaggcggatcatgaccattttatagttcctgttctgtggccactataattggcttgagattcctatgtagcttttctctcttttyctttcttttcgttattttgaagagactgagtctacagttgcaatggaagacattgagatgaaagaaaatctctactcattttgattcgcagaaagctaca

SEQ ID NO: 117029 - DNA, 201 bp, Homo sapiens
ggaataatacctgctgaaggacctgcctgagtcagctttacaactaacttaaaaaagtaagcagaagaagtacactctaaaagggatagcattgtaaatayataaaccagtaacagttgtccattatcaagcattatgtactgttcatatttgtatgcgctcaacttttatgcaactggcagttcagtaagtttcctacac

SEQ ID NO: 117030 - DNA, 201 bp, Homo sapiens
agaaagagaaaaaggcacagggccattagtgaaatgtgtccccgtgaatatcctaggctctgagtgatcacactggaaatccttccttccttggggtggcrggcaagaggaaaaagggtatggtcagatgtgcgcatcacatgaagagggccaaagcagctactgccacaagagttgtagtgaaaaatgaatgagagaatg

SEQ ID NO: 117031 - DNA, 201 bp, Homo sapiens
gggagcaagggctccacagagagtcttgacttgggggccaggacacctatgagggagtgctcttggcagcagggtggaagaaaggaaggtgccctgccagragctaaggaaagagtgggcagtttcctttgcccataaaagggcctcgtagtcactcaaacttgaaaccttggaatcaactcttcctcctcactctgccac

SEQ ID NO: 117032 - DNA, 201 bp, Homo sapiens
actctcttgctgtagggcttctgttcggtccagccaatgccagacaaagcagggaatacgaaggtgggagaagagcgaggtgggcccactgcttttttttktttttttttttttgttgttgttgtttgttttttttgagacagagttttgctcttgttgcccaggctggagtgcaacggcgcaatttcggctcaccgcaac

SEQ ID NO: 117033 - DNA, 201 bp, Homo sapiens
aaatatgacctggtttggggataaaaagctgaaacaagagatgttaatttgtataagtaagagagaaaataagatatatttcctgtgtatcactatctttwcaggtaaaaataaaaatggttatagaaacatgtacattctaaatgtgcaggtggagcacctgaggtcaggagttcgagacaagcctggccaacatgggga

SEQ ID NO: 117034 - DNA, 201 bp, Homo sapiens
acatgttcctaagaggtttgtgacacccggagcaatggcagactgggctcccctcgtaattagtgactataaatgtaattcctttttttattttttaaacrgagtctcactctggctcactgcaacctctgcctcctggttcaagctattctcccacctcagcctcccaagtagctgggactacaggtgtgcgccaccatg

SEQ ID NO: 117035 - DNA, 201 bp, Homo sapiens
gtgagccgagattgagccactgcactccagccgggagacagagcgaaacaactccatctcaaaaaaaaaaaaaaaaaaaaaaaaaaaaaaaaaaaaaaaarccaaaaaacaaagaaatagaatcagaaacttgatgactgttgggaagtgaagaatgagagaaagaaaagagtctagaatgtacagtattcagtgacattt

SEQ ID NO: 117036 - DNA, 201 bp, Homo sapiens
gacagctttgggattagcatgtgtcttggtttgggttcctatatagcagaccttgagacaaggatttgagtgccagtagtgtatctaggatatattcccaygttaagtgagtgaagaagcgagacaggaagtgatcgaagccaccaaaggatgtgttatcaaaccagttaccaccacaaacaacaggaggtcaatttctct

SEQ ID NO: 117037 - DNA, 201 bp, Homo sapiens
taggaaccaatacattttctttttcacttgaactggtttgaattgggtttctgtcatatgttgctaacaagaaaagagaaaagaatataaacttagaagamaattgcattttgtggggctgaaggaaagttagagtaagtaataaaagctcatggaactaagaaatccaagaagatggagacttaacaaaaaggaataaca

SEQ ID NO: 117038 - DNA, 201 bp, Homo sapiens
catgtccccaggtgggcttattatatttgccctcaaacagcctacttgtttgacttatcttcaggaagggcaactattttaccctgagccagaagtctgtmtgtcattcttactttttctccctcacttttattcctgacattcaattcatcatcaagatctctctcatattgccctcctttcatttttcattgctaatgc

SEQ ID NO: 117039 - DNA, 201 bp, Homo sapiens
aacttatttcccacagttctggagtctgagaagttcaagatcaaggtgctggcagatttggtgtctggtgagggctttgcctcctggtttgtagatgtggkttttgtagatgcctgtcttttccctgtgtcttcacatggttgcagggggatgggccctgtctagggcctctttcataagagtatgttgacagattttaaa

SEQ ID NO: 117040 - DNA, 201 bp, Homo sapiens
accttaaaatcagttattaaaagaatcagaaaaaagatgttagaatattctttttccaaaaggatgttagaagaatttatcttaatgtaacagaaacagttaactgtaaggaaaaagaaacaaaacaaaacaggctgagactgaaaaacaataggagaatctgaaagtggaaatgagtgagaagaaggagttttaataaat

SEQ ID NO: 117041 - DNA, 201 bp, Homo sapiens
acctatgagggagtgctcttggcagcagggtggaagaaaggaaggtgccctgccaggagctaaggaaagagtgggcagtttcctttgcccataaaagggcytcgtagtcactcaaacttgaaaccttggaatcaactcttcctcctcactctgccacagcccacacaaccaaacagtcatcttggcctacaaattctccct

SEQ ID NO: 117042 - DNA, 201 bp, Homo sapiens
aacagatgtaaatagatgtaaacaacaacaactacatgttgttttcctagccaacatgtggttagagaattacgtggtttacctttgagtctcctcttagyggacacactctttccaactgttagttcatgtgattcgaatgagcccaaccctggccatctgccattcaggcctggccaatcagcacattccagccctctg

SEQ ID NO: 117043 - DNA, 201 bp, Homo sapiens
catggtacagctttgactggcatgccagtaaccctcagatcaacttctccactgcaaggctctcttctagctctttatctgcacatccagactcataaagytagacatgtccccaggtgggcttattatatttgccctcaaacagcctacttgtttgacttatcttcaggaagggcaactattttaccctgagccagaagt

SEQ ID NO: 117044 - DNA, 201 bp, Homo sapiens
tggctgcatagtattccgtggtgtatatgtgccacattttctttatccagcctatcattgatggacatttgggttggctccaagtctttgctgttgtgaayagtgctgcaataaacatacgtgtgcatgtgtctttatagtagaatgatttataacattttgggtatgggctttttatttttttcaacttacctgtggttg

SEQ ID NO: 117045 - DNA, 201 bp, Homo sapiens
ttatggctgcatagtattccgtggtgtatatgtgccacattttctttatccagcctatcattgatggacatttgggttggctccaagtctttgctgttgtkaacagtgctgcaataaacatacgtgtgcatgtgtctttatagtagaatgatttataacattttgggtatgggctttttatttttttcaacttacctgtgg

SEQ ID NO: 117046 - DNA, 201 bp, Homo sapiens
ggatgatggtttccagcttcatttatgtccatgcaaaggacatgaattcattcttttttatggctgcatagtattccgtggtgtatatgtgccacattttytttatccagcctatcattgatggacatttgggttggctccaagtctttgctgttgtgaacagtgctgcaataaacatacgtgtgcatgtgtctttatagt

SEQ ID NO: 117047 - DNA, 201 bp, Homo sapiens
aatccccttttaatacaaaatattttatttgaatgggtttttaatcaataaagagcaatttagttctcagagatgcatgggcaattcccattgatttgtaygaaatccttggattctttttagagtgatggatggtttagtgtggctgtttaaaaataaaattttattcttgggctggagactccatgctggagagagatg

SEQ ID NO: 117048 - DNA, 201 bp, Homo sapiens
gttctaaaaaattatcacctgtggtagattttagtttcccaaaatacaacagtgatatttcccatctcttctagagccttataatttctccattcagtggytgacaggactttgtgaccatgtgaatctcatgtggcagaattgatgttgtgtgacttctgaggctaggtcacaaaaggcaatgtggctgccactaatatt

SEQ ID NO: 117049 - DNA, 201 bp, Homo sapiens
cagaaaaaaaaaattgtgttatagcaagtcattttttagtattacatgtaaatacaggtaactatttgctctatgtgagtgtatactactacactatatcwcgagaaaaggaaactccacaagaacttgctctagcaaaatgggcttttctagaaccaatattttttacttaaaaatagttgataagtcaatgtttaattc

SEQ ID NO: 117050 - DNA, 201 bp, Homo sapiens
tttgcaggtactaattgctaggtggatcagtgggattctgaatgcatcctactgtccttagtgattattaaagatccctgagactttaaatattaagtgargcatgaggatcactttggttttaattaacagaaatttctgactcaaaatgatttaaacattaggagacatcaggaaccatttcatctcactgaaccagaa

SEQ ID NO: 117051 - DNA, 201 bp, Homo sapiens
tacacgctattgtgggcagattatcttttctttgctagctgtttcctctgcctgtaaagctctttccccagagtaaagacctggacacaggagcatgcccrgctttcaaagaacaacaaggggcagttgtagatagtatacaagtttaagtcatcaaaatccaaaatgcgggcacatttaatatcatttacatgtggattg

SEQ ID NO: 117052 - DNA, 201 bp, Homo sapiens
tcgtgccttagcttctggagtagctgggatgtgccaccatgcccggctaatttttgtattttaagtagagatggggtttcaccatgttggccaggctggtktcgaactcctgacttcagcctcttaaagtgctgggattataggtgtgagccattacgcctggcaaagataattactttgaagggattctgttgtctccaa

SEQ ID NO: 117053 - DNA, 201 bp, Homo sapiens
ctcactctgttgcccaggctggagtgcactggcacgatcttggctcactgcaaccctctgcctcctgggttcaagtgattgtcctgcctcagcctcctgartagctgggattacaggcgtgtgccaccacacctggctaatttttgtatttttagtagagatggggtttcaccatgttgtccaggctggtctcgaactcct

SEQ ID NO: 117054 - DNA, 201 bp, Homo sapiens
catcttggttcaaaaataaccttctgagttcattattttgtttctgtttgacaagtagaatttgagaaaaaggtcatttaatttttttttaattttatgtmttacttctattaagaaccaaatagaaatagaaataaacagtagttaagatgagctgaaagcctaaagtctacttgacagtacaaatcaaaaccccaatat

SEQ ID NO: 117055 - DNA, 201 bp, Homo sapiens
tccagaatggtgcccgggagaatctctgtgggagatatttgactgttacttcatattaacttgagtggaaactaaaaaggccctctcctcttctcccctckcctcaggcctttccagcaggcgcgatggcggaagccccgtgacggtggccatggcggcggcggaagtctcatcaagcccggcggccttgtctctgggctg

SEQ ID NO: 117056 - DNA, 201 bp, Homo sapiens
gcttgggcgagaagggtgtccagaatggtgcccgggagaatctctgtgggagatatttgactgttacttcatattaacttgagtggaaactaaaaaggccstctcctcttctcccctcgcctcaggcctttccagcaggcgcgatggcggaagccccgtgacggtggccatggcggcggcggaagtctcatcaagcccggc

SEQ ID NO: 117057 - DNA, 201 bp, Homo sapiens
ttataaaaaattcctttctcagtgacagatgacaagagctcacctgtcaaaaactgttctgtaaaaatcatttacctttccatccttctctgcattattgyctttatttttcaggcactgcaaaagtggcctcattttcaatggcaggtgttagcagagtggtcatcctgtctgtgtgtgttccatgtcacccctacctgc

SEQ ID NO: 117058 - DNA, 201 bp, Homo sapiens
ttatcaacccataggtctgcttaatccattggagctgccaaccttgcagggggtgtgatatgagggctaacctagcccaatgctttatcactctagcctckccaaaaatgctaccatcctttaaaataatactttgtaaaatttcagcaccggtatggtttggatacgtgtccccacccaaacctcatgttgagtcataat

SEQ ID NO: 117059 - DNA, 201 bp, Homo sapiens
gagggctaacctagcccaatgctttatcactctagcctcgccaaaaatgctaccatcctttaaaataatactttgtaaaatttcagcaccggtatggtttkgatacgtgtccccacccaaacctcatgttgagtcataatccccagtgttggtggtggggcttggtgggaggtgattggatcatgggggcagatttctcat

SEQ ID NO: 117060 - DNA, 201 bp, Homo sapiens
gtttttcaaaaggagagcagttacatctccagatttatcacatatctccatatgtaatatattggatcatgggctttttaattaattaatttatttattttactttaagttctgggatacatgtgctgaatgtgcaggtttgttacataggtatacatgcgccatggtggtttgctgcacctatcaacctgtcatctaggt

SEQ ID NO: 117061 - DNA, 201 bp, Homo sapiens
gcttgaacccaggaggcagaggttaccatgagatgagatcgcgccattgcactccagcctgggtgacagagtgagactctgtctcaaaaaaaaaaaaaaaagaaaagagaagacagaaagacaaattactgtgaatctgaagcaggtgactggcttctgcagagcatgtctttttatccacctgattattaaggatctcct

SEQ ID NO: 117062 - DNA, 201 bp, Homo sapiens
tgccctatttctttgttgctctttgtgctcatatatgtttattgaacatttgtgtgtatttagcagtgacagggatgaaaatagtctgaggtttagggaarcattatttttcaggcttcaagaataaaaccgatgttttccagggcacagaatgcctacctgtgcctaggtgataaggtctccagcacaatgagctctttt

SEQ ID NO: 117063 - DNA, 201 bp, Homo sapiens
gggtatggtagcacacgcctgtaatcccagctacttgggaggttgaggcaggagaatcgcttgaacccaggaggcagaggttaccatgagatgagatcgcsccattgcactccagcctgggtgacagagtgagactctgtctcaaaaaaaaaaaaaaaagaaaagagaagacagaaagacaaattactgtgaatctgaagc

SEQ ID NO: 117064 - DNA, 201 bp, Homo sapiens
tgtgtggcatatatttggtggttttgtgacctgaaatgatctaatgtctagtgtttaatcttataccatcaaagtaaggtcatctttgccctatttctttrttgctctttgtgctcatatatgtttattgaacatttgtgtgtatttagcagtgacagggatgaaaatagtctgaggtttagggaaacattatttttcagg

SEQ ID NO: 117065 - DNA, 201 bp, Homo sapiens
ctcaagttctaccaccatcccgttattactataggacccatcctgatgggacaggtactaactggaggattgccagtagcaatgacaggaggaatatcacrgtgaaacacacactagcttttaaaactaaccagaaatgacatatgccacttgttctcgtatcattggcccaaattagtcatgtgaccatgcctgagacca

SEQ ID NO: 117066 - DNA, 201 bp, Homo sapiens
gtgcgtttacaatccctgagctagacacaaaggttctccacgtccccaccagattagctagatacagagtgtcgacacaaaggttctccaaggccccaccmgagtagctagatacagagtgtcgattggtgcattcacacaccctgaggtagacacagggtgctgattggtgtgtttacaaaccttgagctagacataaag

SEQ ID NO: 117067 - DNA, 201 bp, Homo sapiens
gtggggttcgtggtctcgctggctcgggagtgaagctgcggaccttcgcggtgagtgttacagctcttaaggcggcgcgtctggagttgtttgttcctccygtgggtttgtggtctcgttggcttcaggagcgaagctgcagacccttgcggtgagtgttacagctcataaaggcagtgtggacccaaagagtgagcagca

SEQ ID NO: 117068 - DNA, 201 bp, Homo sapiens
gataagctagggaggaggaggaatgccttattacctctgggtggaagtggaagcccaagatccccatatggcctccattgacaccatgaagggggtttcaygttgctggcgtgggtgacaatcctggctcctcactcaatcgtctttcataataatgggatggaggagatagagtgaggtgttattgttaccgctgggaga

SEQ ID NO: 117069 - DNA, 201 bp, Homo sapiens
ctacaccttccatgtattgatttatgtctttgccttctgtctccataaaatgtataaaatcaacctataaccaaaccatcttgggcacatgttctcagaamcttttcaggctgtgtcacaggccatggcccttatatttggctcaaaataaacctcttcaaatattttggagagttttgcttttttttttttttgtcgaca

SEQ ID NO: 117070 - DNA, 201 bp, Homo sapiens
cctcttcaggaaaagcttacccctttcaaccaattaccaatcaggacatcttcgaatctttctatgagcaggaagcccctctactcttggagatgtacctytgttttgggcccaaccaatctacaccttccatgtattgatttatgtctttgccttctgtctccataaaatgtataaaatcaacctataaccaaaccatct

SEQ ID NO: 117071 - DNA, 201 bp, Homo sapiens
tttgggggtggtctatgaaacagcgataaatagcagaacacctcctctgtgaagccatccttatgacctcttggcttgcctgcttcctcaggactaaaagmttttctctgtggtcccttagcattttatttattttgctaggacttagaagtctgtgaagtcttcgagggcaaacatcaaagcctattcttttttgtatca

SEQ ID NO: 117072 - DNA, 201 bp, Homo sapiens
gaggcttcatgcacctaacaagaaccttggcttccacatcccctttatcttaactcaaacatttctttatgctgactttacctcttcaggaaaagcttacscctttcaaccaattaccaatcaggacatcttcgaatctttctatgagcaggaagcccctctactcttggagatgtacctttgttttgggcccaaccaatc

SEQ ID NO: 117073 - DNA, 201 bp, Homo sapiens
aaactgtaaaatgtgcatttggccaaccaatatttaatttatttattattaattattttagagaggggggtctcacactgtcacccaggctggagtgcagyggcatgatgataactcactgcaacctcaaactcctgggctaaagtgatcctcttgccttagcctcccaagtagctagtactgcaggtgtgtgccaccact

SEQ ID NO: 117074 - DNA, 201 bp, Homo sapiens
gactgcaatcagccgagatcatgccactgcactccagcctgggtgacagagcgagactccatctcaaaataaataaataaaataaacttaaaaataaataygagggatcactgagaaggtgcacttgatcaaagtttcaagaaagggagatagtagtagtcatgcagataactggagggaaagccttctaggcagggggga

SEQ ID NO: 117075 - DNA, 201 bp, Homo sapiens
aaagagaatgtgaaaaaagaatatggtcataaaactgtaaaatgtgcatttggccaaccaatatttaatttatttattattaattattttagagagggggktctcacactgtcacccaggctggagtgcagcggcatgatgataactcactgcaacctcaaactcctgggctaaagtgatcctcttgccttagcctcccaa

SEQ ID NO: 117076 - DNA, 201 bp, Homo sapiens
gtgatagtttgtgtaaaaaatttagagtaaaatttccttcttagatgtggggggaaaatcctccaggaaactactgaaataaggaaggtaaggtggaattrtcagaacagctgcaatttaggaaatgggctgaaaccaatttcaacttcattttagcattcatcaagtcatacttattttagatgactttggttttggagg

SEQ ID NO: 117077 - DNA, 201 bp, Homo sapiens
gctttgctccaatcatgctgtcaggaaacagggacaattctatagttgagtgtcttaataaatcttatctctgaggctggaagaatgcatcgaggctaaakatgtgatcagtaaagaggcaatagtcccttatagtagccaggatgagaggatgtccgggcatttttatggtttgaacaatggtcttgattttgtctgtgt

SEQ ID NO: 117078 - DNA, 201 bp, Homo sapiens
gaaggatttagtataggatttggtgttttcagggagggtttaaggaagtagagctttgctccaatcatgctgtcaggaaacagggacaattctatagttgrgtgtcttaataaatcttatctctgaggctggaagaatgcatcgaggctaaagatgtgatcagtaaagaggcaatagtcccttatagtagccaggatgaga

SEQ ID NO: 117079 - DNA, 201 bp, Homo sapiens
ctttgggagagaggccaacctgagtgtgaaattgtcagacacttatcttattagagaagatggcgataagtcagggtgctgagggtatggaacctttgtcragcgaaatgacaagatttcctctggggcaggaggctctgacctggactgctgctgctgcaggtgactggctgagaagagagaaggggcaaaatggaaact

SEQ ID NO: 117080 - DNA, 201 bp, Homo sapiens
agatttcctacctccaaatatgtcatttttctgagtctcactctgtcgcccaggctggagtgcagtggcacaaccttggatcactgcaacctctgcctccygggttcaagagattctcctgcctcagcctctcgagtagctggaaccacatgctttgcaccaccatgcctggctaatttttgcatttttagtagagacaga

SEQ ID NO: 117081 - DNA, 201 bp, Homo sapiens
agtcattcgacagcggacagaagtcacagcatctttaacagacagtcaagagacttaaatggggggcactgaattgctgggaaagctaatggcttgtcgaragcagtagggtcccttttgattacaaggcctaatcaccacctttgccttctgaatgttttgcttctcattgcatctcgtctctgaggatgacagagaagg

SEQ ID NO: 117082 - DNA, 201 bp, Homo sapiens
atgaaattcaatccctattctccggcacctgaatagataggagttcagcacatgctccaaatagcgcgcccggggacctgggaaaggtgaactgttaacckgcagcgggcctgcctagccttcaaaggtcagatgacatgaaatgctcctcggtgtttgaagatattagtcacatagtaaacaaaaatacagagattcttg

SEQ ID NO: 117083 - DNA, 201 bp, Homo sapiens
tcccttctatggttccacactgctccacattgagaccaatcaagggtggccttctccttagtgtttgcaagataatgatggcgtattctgaatagaacacwgtggtctccctctgacacagctcttgacaatgacaggagatggtgtaaaccaaaaataaaattctaacctccccaactgactgaatggaccccctctctt

SEQ ID NO: 117084 - DNA, 201 bp, Homo sapiens
tgacaatgacaggagatggtgtaaaccaaaaataaaattctaacctccccaactgactgaatggaccccctctcttggccaaggggtcccaaagaaacccraaaaactagtttgggccatgacaggaagcagggggtgttgaaaatgcctccctttggagtttaggcaaaactgaccaggattcacattaaaacagatctt

SEQ ID NO: 117085 - DNA, 201 bp, Homo sapiens
attgtattaatataatgttaatataaaatataaatgtataaatttgaagttattaatatagtctaataaacttcaatatgtgaatttgaagttattgatayagtttaataaacttaataaactagttttataaaaaagtttataaagtttaaaaacaggcaaaacaattattgtcttagaagtcaataatgtgattacctt

SEQ ID NO: 117086 - DNA, 201 bp, Homo sapiens
gctggaggtcgtattatcagtagagcagtagagtctgcctaggagggaagccaacagaaacaaaagtatagcagagagagagagagagagagagagagagrgagagggagagacagatgcagtttagatccctgaatccagttatacctaaagacatatctccttacaaacttttcaattttaggaaccaatacattttct

SEQ ID NO: 117087 - DNA, 201 bp, Homo sapiens
ggagggccatagaactgctggaggtcgtattatcagtagagcagtagagtctgcctaggagggaagccaacagaaacaaaagtatagcagagagagagagrgagagagagagagagggagagggagagacagatgcagtttagatccctgaatccagttatacctaaagacatatctccttacaaacttttcaattttagg

SEQ ID NO: 117088 - DNA, 201 bp, Homo sapiens
tgaaagcatactaagtttatacacattactgggacatttgagagactacaagaatcattatatttgtaatatatttattataattacttaagcatatactyaggaaagttcaaacagttgtaaaattggaaataaaatcaaaaatttatacatgcagtgtaaagtgcttcaaggaaataaattaattgagtttttaaatgg

SEQ ID NO: 117089 - DNA, 201 bp, Homo sapiens
catctttgtagatgtgtaggtggaaactcaaagtgagctataaacttttttttttttttgagacagagttttcctcttgtccaggctggagtgcaatggcrcaaacttggttcactgcaacatttgccaccctggttcaagtgattctcctgcctcagcctcccaggtagctgggattacaggtatgcatcaccgtgccag

SEQ ID NO: 117090 - DNA, 201 bp, Homo sapiens
tccaagtctagctccaccattccatgagcaaaatgatagcaacatctttgtagatgtgtaggtggaaactcaaagtgagctataaactttttttttttttkgagacagagttttcctcttgtccaggctggagtgcaatggcgcaaacttggttcactgcaacatttgccaccctggttcaagtgattctcctgcctcagc

SEQ ID NO: 117091 - DNA, 201 bp, Homo sapiens
acaatttagtttaggcaagtgttctaaagcttacttgtctggcatcagcgggaccttacatttaataattagtcttcaatataggattatgagtttgtggwtccctataatgaagacatagtggacaacgatggctattggagcaacgataaaagtaatgaaaaccacctaggagcatctattgtctaccaggcaaaagta

SEQ ID NO: 117092 - DNA, 201 bp, Homo sapiens
gtggcgcgatctcggctcactgcaacctctgcctcctgggttcaagcgatctcctgcctcagcctcctgagtaactgggattacaggcacatgccactgcrcctggctaatttttgtatttttagtagagatggggtttcaccatgttggccaggctggtcttgaactcctgacctcaagtgatccacccaccttggcctc

SEQ ID NO: 117093 - DNA, 201 bp, Homo sapiens
ccagaactctcagtcaggagcatttcctcaccatactactacctgttcctttcttgcttctcctctgaacatgattgacccagaccctaactaggaaggastggtttctgcagtgggatctacacaggctacattggaacagccagggtgaggcaacattcttcctgttgagggattttgctctggaagccttgccctttg

SEQ ID NO: 117094 - DNA, 201 bp, Homo sapiens
atgacaggtcaatatgaagagggggacctccccattggggagatgaccacaattccatgggaagaacattttcctgcctctgggaatgcatctattctagrtcatggcaaggactagaaatatcaagggttacatgtgaccactgggctgccctcccacaactgtattggtctattaccttatttttaatttgtctttagc

SEQ ID NO: 117095 - DNA, 201 bp, Homo sapiens
tacctttatcagaatatcctttgtagtttgtagaaagaggtcttaacatttttataagttctcatggctttaaatgatgctttttttttttttttttttttgagatggagccttgctcttttgctcaggctggagtgcagtggcgcgatctcggctcactgcaacctctgcctcctgggttcaagcgatctcctgcctcag

SEQ ID NO: 117096 - DNA, 201 bp, Homo sapiens
aaagagagtcttgttgatcagaaacattcagaatttacatgaacaaaaataaaccttggttatattactctactgagatttgggggtttatccactcatcrctggtaatctcgtagttaatacaacagttctaggttttttgcttagatttagttcttattttccgtttccagactagcaccgtcgttaagaccatgagct

SEQ ID NO: 117097 - DNA, 201 bp, Homo sapiens
ttgttgctatgcacattcagtgatgtgtggaaaccaaataaccaaaagtcatgggattaaacagcacagttgcctagctggggctctagaagaagggacasagtcttagtttcttgaaacgcaacttacctgcagagaacgaatgaagaatgatggcttttcaacatgtctaggcaacattccagcatatgtgacaaagca

SEQ ID NO: 117098 - DNA, 201 bp, Homo sapiens
ctgggattacaggcaggagccactgcgcccaggcagctttatttcaccttatgacaaatatggtaaaagctaccacagtgctaggtggagcctagaaaacytgggcctgtgaaatatggccttgcgttaccatgaggctaaagaggtgattaaggcagcctgtgcaatcagccagaagtctgtccaagagtcatcagtcca

SEQ ID NO: 117099 - DNA, 201 bp, Homo sapiens
aacccagcagtttgaggctgcagtgagctatgatacaccactgcactctagtctaggggacagaggaagaccctgtctcaaaaaaaacccaaaaaaaaaaacaaaaaacaaaaaaacagaacaagacacaacacaaactaaaacaaaccccaaaggaaattattactgatgagtttgcctttaggttatgtgctaatgatt

SEQ ID NO: 117100 - DNA, 201 bp, Homo sapiens
ttgaggccaggagtttgagaccagcctgagcaacatagggagaccccatatgtactaaaaacaagaaaatagccaggtgtggtggcatgcacctgtagtcycagctcctcaggaggctgagatgggaggatcatctgaacccagcagtttgaggctgcagtgagctatgatacaccactgcactctagtctaggggacaga

SEQ ID NO: 117101 - DNA, 201 bp, Homo sapiens
cttttcatctctcacaaggaagttgtttcttccaaaagtcaaaactcctactggacataagtgatggccggctttaaggtgcacagccctgcaggcgatgytgcatttccaaagcaaggctttctgcccaactcaaaacctggtatttttttctgggctgttttcagctgtttttccttttgttgtttattattagagaaa

SEQ ID NO: 117102 - DNA, 201 bp, Homo sapiens
ggctctgctgtggtggacactagaccaagatggggaatgcagtggttgggatgatgttgcacatataaatatgagggatcaggccaggcgtgatggctcaygcctgcaatcccagcactttgggaagccgggtcaaggaggatcttttgaggtcaggagttcgagaccagtctggctaacattggtgaaaccctgtctcta

SEQ ID NO: 117103 - DNA, 201 bp, Homo sapiens
aatattgtttgcttgatgggagctgtatgttctcattctcgttttgtgtcttccttgggttgctaatgaagtacagtttttggggattgtaccacagataytgatgtactaaattgatgtttgttgattctggagtatgattcttcacttcatttatttagcaagtatttattgactaccactttgtgcatgggaaattaa

SEQ ID NO: 117104 - DNA, 201 bp, Homo sapiens
gaacccagcagtttgaggctgcagtgagctatgatacaccactgcactctagtctaggggacagaggaagaccctgtctcaaaaaaaacccaaaaaaaaaaacaaaaaacaaaaaaacagaacaagacacaacacaaactaaaacaaaccccaaaggaaattattactgatgagtttgcctttaggttatgtgctaatgat

SEQ ID NO: 117105 - DNA, 201 bp, Homo sapiens
aaacacaggaggccagacacagtggctcatgcttgtaatctcaccattttgggaggctgaggcaggaggattgcttgaggccaggagtttgagaccagcckgagcaacatagggagaccccatatgtactaaaaacaagaaaatagccaggtgtggtggcatgcacctgtagtcccagctcctcaggaggctgagatggga

SEQ ID NO: 117106 - DNA, 201 bp, Homo sapiens
tgtccagattacagaatgaagaagggttttcttgaagcaaatttcttaggtatctgattacccaagctgccactcctgggagctttcctctgacgttatasaaagcatatctattatttacacagaattgtttatcttttcatctctcacaaggaagttgtttcttccaaaagtcaaaactcctactggacataagtgatg

SEQ ID NO: 117107 - DNA, 201 bp, Homo sapiens
tcatccatccatcaatcatatactgagcacccactttgtgccaaacagctgctgggtactgaggatacagaagtgaactaaacctgtaataatccctgccstcattgagcttatgcagtagcaggaagagacagataatgaacaaatatatataaaacatggtatatcagttgctggtaagagcaatagaaaacatagagc

SEQ ID NO: 117108 - DNA, 201 bp, Homo sapiens
tgaacccagcagtttgaggctgcagtgagctatgatacaccactgcactctagtctaggggacagaggaagaccctgtctcaaaaaaaacccaaaaaaaaaaacaaaaaacaaaaaaacagaacaagacacaacacaaactaaaacaaaccccaaaggaaattattactgatgagtttgcctttaggttatgtgctaatga

SEQ ID NO: 117109 - DNA, 201 bp, Homo sapiens
cagacgtgagccaccatgcctggccatggctgactactttatccattgtttgcaggtactaattgctaggtggatcagtgggattctgaatgcatcctacygtccttagtgattattaaagatccctgagactttaaatattaagtgaggcatgaggatcactttggttttaattaacagaaatttctgactcaaaatgat

SEQ ID NO: 117110 - DNA, 201 bp, Homo sapiens
tgtaggttatgctacttaacaaagaaatcttttgaatcagaataatttggctctggaaaatttggattttctttatttacatagacatatagaggtcagcwactgaattagatgaatattcataggattgttgaactaaacatatttttagttactttttaaatgtgttgtacatggagaaaggacattagaaatatgacc

SEQ ID NO: 117111 - DNA, 201 bp, Homo sapiens
aacatggggcaaccaccacctctctgttattgggagactttttcatcactccagaacagcctgcacccattaactaatcactctctccttccctcctcccrcatcccctgggaaccattaatctgctttctgcctctatgggtttacctgcttttgatatttcatatgaaaggaatcatacaatgtgtgactttttgtgtc

SEQ ID NO: 117112 - DNA, 201 bp, Homo sapiens
tctaataataacataaaattactgtacttttcagtttccagcatttgctaaggatgcaacaactaagaatacagcagaacatagtgcaagaataattgttraacaaaaagccttttttttttttttttttttgctttcacaaaagcagaattgcatagtgctccacaatggccattcagttgccaaggaatttaaccattt

SEQ ID NO: 117113 - DNA, 201 bp, Homo sapiens
gattgtaggcaactgtaacacaagggaaagtattgtgtatataaatatgaaaaagatatagtgaaagtacagtataaaagataaaaaatggtagacctgtwtagagcacttaccatgagtgaagcttgcaggactggaagttgctctgggtgagtcagtgggtgaacggtgagtgaatgtgaagtcctggacattcacatt

SEQ ID NO: 117114 - DNA, 201 bp, Homo sapiens
aaatcacttcctatcattttaaccacaggaaggagaggttgttagcctgctatacttgctttaaatgtctaactgtggcttccattacaaacaaaaattaygaaacacactcatccactgtcatgaacttttgactattaaaaacaagtacataataaaaccttttactttcaagcttaattttaaaaccaggtgtgaggg

SEQ ID NO: 117115 - DNA, 201 bp, Homo sapiens
tgatgcctctcagctccacggggacagaagctcctgtgcttgggaccggtccagacctcatcatgtttgtctccatctggctgtttattttatcctttaaratacactttgtaataaactggtaaacttaagtaagtgtttccctgagttgtgagccactctaacaaattaaaccccaaaaaggggaaccccaacttgaag

SEQ ID NO: 117116 - DNA, 201 bp, Homo sapiens
ctacatgggacccacagaagggctttcaggacatgcaaagagaatccctggtagatccatttttcacttccatgggtcagagtggctcctgggacataacyaaaaaacgcattgtggcctccatccggagatgggggtggcagagagagtttggcccagatatatcggttggaaggctgtttcaggaattcaggtgagaac

SEQ ID NO: 117117 - DNA, 201 bp, Homo sapiens
ttctagaatattcctgcacagtgtcactggtggccagctatcaatcacatctccaaagccttcccctggacctttgcacacagtttttcttctgttgtgawtgccgtcacttactctttcctttttttttttccaatctggtcctcaaaatgtaagcatatgttactttatttgggaagatttcctaggtactgtacttct

SEQ ID NO: 117118 - DNA, 201 bp, Homo sapiens
caggtgtgtgtgtgtgtgtgtgtgtgtgtgtatacttaccataaatagtccccaaacttgactttcctttccctgaagtgggataggaaagaggaaatcartatcagttgaatctgcatagtgcatggattggtgctggggatagaaactcttttttcaattctcacatttcatcaaagctagtagtaaacagaagttact

SEQ ID NO: 117119 - DNA, 201 bp, Homo sapiens
gcccggctttcaaagaacaacaaggggcagttgtagatagtatacaagtttaagtcatcaaaatccaaaatgcgggcacatttaatatcatttacatgtgkattgtaatgtcttctctccttactaattcttaattacaggttatcttatttactgaaaactccaaaatctttattaacttatatgtttggcaatggctaa

SEQ ID NO: 117120 - DNA, 201 bp, Homo sapiens
tatttctgaaagaaaatttttaaaaagccaagagtatttcttggtcaaatgagcttgggaagtaatgagataagcttttttctttttttttcttttgaggmggagtcttactctgttgcccaggctggagtgtagtgaagcgatctcggctcactgcaacctctacctccagggttcaagcaattctctgcctcagcctcc

SEQ ID NO: 117121 - DNA, 201 bp, Homo sapiens
gtagctgggatgtgccaccatgcccggctaatttttgtattttaagtagagatggggtttcaccatgttggccaggctggtgtcgaactcctgacttcagyctcttaaagtgctgggattataggtgtgagccattacgcctggcaaagataattactttgaagggattctgttgtctccaaggtaactaaactcaagctt

SEQ ID NO: 117122 - DNA, 201 bp, Homo sapiens
ctatatcacgtagcggtgaggtctgggcttttagcgtaaccatcaccccaacagtgagcattgtgctgaataggtaatttttcaaccctcaccccgccatyactctccagagatagggaattttctgaaagatctctggaaatgttgcctcctgagacgattcagtgttaggactacaccatctgatttcagctcctatcc

SEQ ID NO: 117123 - DNA, 201 bp, Homo sapiens
tgttatttgcaatagttagctttctataaagtcactatgaacaccaaattagcaaatactgaaccattgcttccagaagatgtacagggttaggtattggygagcttgtggtcacatttagttaactgatcaatagatcacattattttataggtttctgttgaaagacagtttatttagtatgcagtattaattcattaa

SEQ ID NO: 117124 - DNA, 201 bp, Homo sapiens
ggggctgaggggaaacagacagctggacttgggtgaaccttcactccctccttattatcctcccctctccgcccacagcaacttaaatcattaaaatcccrtataattaaaatttcatccaagttataccagttatgtttgctggccacagtggagtgtataaatatcttagaaaggcataaagacagaggctgcttcctg

SEQ ID NO: 117125 - DNA, 201 bp, Homo sapiens
agcacacgagaaggaggtgagttgctggatttccatgtgtgctttgcgtggagcttgcagctgaccagacagcaagaccagagaagcagttgagagcatgsgctctggagagagactgcctgggttcctatcctgacgccgccactcacctctctgagcctcagtttcctcccctgtaaaatggcaataacaagcacatgc

SEQ ID NO: 117126 - DNA, 201 bp, Homo sapiens
tcctaccttcaacagtgaaccttgagaccttcctctggaatgctggttttcctagggggctgaggggaaacagacagctggacttgggtgaaccttcactycctccttattatcctcccctctccgcccacagcaacttaaatcattaaaatcccgtataattaaaatttcatccaagttataccagttatgtttgctggc

SEQ ID NO: 117127 - DNA, 201 bp, Homo sapiens
aagcagggtgtgtgaatggcatgttctcctcaaagactgcatactccccttcttctccactcctggggtgggtgctcagtgtgtggacagtggacccaccyacatgggacccacagaagggctttcaggacatgcaaagagaatccctggtagatccatttttcacttccatgggtcagagtggctcctgggacataacta

SEQ ID NO: 117128 - DNA, 201 bp, Homo sapiens
tgcagtggtgcaatctcagctcgctgtaacctccgcctcctgggttcaagcgcttcccatgcctcagcctcccaagtagctgggattaccggcacataccrccacacctgtctaatttttttgtatttttagtagagacgaagttttgccatattggccaggctggtctcaaactcctggcctcaagtgacccatctacct

SEQ ID NO: 117129 - DNA, 201 bp, Homo sapiens
taggttaggaggattaattgtgcatatatatatatatttttttctgcgacaaaatcttgctctatcacccaggctggagtgcagtggtgcaatctcagctmgctgtaacctccgcctcctgggttcaagcgcttcccatgcctcagcctcccaagtagctgggattaccggcacataccgccacacctgtctaattttttt

SEQ ID NO: 117130 - DNA, 201 bp, Homo sapiens
tgtaagtgttctgagcatagaagctagggtcagctaagctatcatattgagtaggttaggaggattaattgtgcatatatatatatatttttttctgcgayaaaatcttgctctatcacccaggctggagtgcagtggtgcaatctcagctcgctgtaacctccgcctcctgggttcaagcgcttcccatgcctcagcctc

SEQ ID NO: 117131 - DNA, 201 bp, Homo sapiens
ggctaatgtaagtgttctgagcatagaagctagggtcagctaagctatcatattgagtaggttaggaggattaattgtgcatatatatatatatttttttytgcgacaaaatcttgctctatcacccaggctggagtgcagtggtgcaatctcagctcgctgtaacctccgcctcctgggttcaagcgcttcccatgcctc

SEQ ID NO: 117132 - DNA, 201 bp, Homo sapiens
caactgtaggctaatgtaagtgttctgagcatagaagctagggtcagctaagctatcatattgagtaggttaggaggattaattgtgcatatatatatatwtttttttctgcgacaaaatcttgctctatcacccaggctggagtgcagtggtgcaatctcagctcgctgtaacctccgcctcctgggttcaagcgcttcc

SEQ ID NO: 117133 - DNA, 201 bp, Homo sapiens
caatggcgtgatcttggctcactgcaacctccgcctcccgggttcaagcaattctcctgcctcagcctcctgagtagctgggattacagacatgcactacyatgcccggctaattttgtctttttagtagagatggggtttcttcatgttggtcaggctggtctcaaactcccgacttcaggtgatccatccgcctctgcc

SEQ ID NO: 117134 - DNA, 201 bp, Homo sapiens
gaggtaatacatcgaaattgcatagcacagtgcctgtcacaaaataagctcttaatagttgttagttatgatgatgacttactttgctgtaatttaccaaactattctcccactgtggaatatttgcattgcttctattttttttttcctatcatagctaaccctggtagaaaatgtaaaaatcaaaacacaagagatgac

SEQ ID NO: 117135 - DNA, 201 bp, Homo sapiens
aaagatctgtggaaagtctggttcatgggatatagagagcagaattttctatattttgggtgtgcgaatcctgcatgtctactgtaaaaatcccttatgarcactgttaaattataataaaaccgggacccagcaaaatgaccccataaaaagttctgtacttttaaaataaaatcagaaatattatcaaatgtctcctac

SEQ ID NO: 117136 - DNA, 201 bp, Homo sapiens
cgccccctgggttcacgcccttctcctgcctcagcctcccacgtagctgggactacaggcgcctgccaccttgcctggctaatttttttgcttttttttttcagtagagacggggtttcaccatgttagccaggatggtctcgatctcctgaccttgtgatctgctcacctcggcctcccaaagtgctgggattacaggca

SEQ ID NO: 117137 - DNA, 201 bp, Homo sapiens
ctttgttaaaactcctggtctgtctgtgtcacctatttcctgctggtgaggcaggagaatagggtctgcaggcaggaaacctaaggccgattcacgctgayttcctagaactaaatcaaaaggaagaccccaactttccacacctaagtaacaaaaaaacaccttgctactcaccgccaactgctgcccgcccattttttg

SEQ ID NO: 117138 - DNA, 201 bp, Homo sapiens
ccaagcatggattgttggcattgtggaaaagggaaatcggacagcctggatcattgacaagcctcgagttattgaggtccttcctcgtggggccactgcccactgcccctgctcttgctcctgcacattccaatgtgtcctcagagcctagctcatgaaatgaagtggcacaagttgtttagagcttagggcctttgtaaa

SEQ ID NO: 117139 - DNA, 201 bp, Homo sapiens
tgagctgcctgcatggtggtttccagttgtctccccaggaaccaattaccgtttttgtgagtactctggttacaaagctgcataggtttgaagtggtctgyctaatcctatttttctcggaaaggcagtaataagtgtgtgatttttgagaatgttgaggtatattcaggtatgcctatgttgcaatctagcagaaatgtt

SEQ ID NO: 117140 - DNA, 201 bp, Homo sapiens
ttgtaaggatgcctcattcaaacacattctatcatacatctagccgtataacaccaccctttccccagtttattctgccctcaggtagaggtgctgttacrggattattttaaaggctttttgttttccttaagagtctagatctccaggttatctccacgtatatctgtcttctaaatcaattccattcttatgtgtatt

SEQ ID NO: 117141 - DNA, 201 bp, Homo sapiens
catgctccaaatagcgcgcccggggacctgggaaaggtgaactgttaaccggcagcgggcctgcctagccttcaaaggtcagatgacatgaaatgctcctmggtgtttgaagatattagtcacatagtaaacaaaaatacagagattcttggaggaggtagtggttgaagtattagaagcagacatgtcagaacagaagta

SEQ ID NO: 117142 - DNA, 201 bp, Homo sapiens
ctccttctctcctctcctcttctccccttccctctcctcccctcccctccttattctaacctatcccatcttatgtcatcccatcccatcccaccctatcytattctatctgtatcccaagtgctagtcatgactcactacatttatattacgacactttaatatctgatggatctacttccagcaaataaaaccagcaat

SEQ ID NO: 117143 - DNA, 201 bp, Homo sapiens
cgtgatcttggctcactgcaacctccgcctcccgggttcaagcaattctcctgcctcagcctcctgagtagctgggattacagacatgcactaccatgccyggctaattttgtctttttagtagagatggggtttcttcatgttggtcaggctggtctcaaactcccgacttcaggtgatccatccgcctctgcctcccaa

SEQ ID NO: 117144 - DNA, 201 bp, Homo sapiens
aaactcagggtttgggatctgctgcatggaaaggaaaaattttaaactagcctctttcatcttgattgagggtggaaacataaacgggagtgtttgtgctygaacctcttgaaaccagtttcttggaaagtaatagttaagtgttttcttaaaacatcatttgcaattgaaaatgcaaaccgtagggctcattagtttgtc

SEQ ID NO: 117145 - DNA, 201 bp, Homo sapiens
tattactgcctgaataaaaagcaacattgtccacattttgtgcaaatgggaagtgagtccaggtattcacagtgcatatccagtgagctgaccagagcagracccataaggaatttgcctgggagcagcgagggcgtcatgctggccgaccacagcaacctttaaacctgtggtggtaaaactcagggtttgggatctgct

SEQ ID NO: 117146 - DNA, 201 bp, Homo sapiens
ttgttaggggaaataaacattcagtccatagtctccttcaggagagggaggtaggtaggttttaaaaaaattattatttttatatgtttgggtgtacaagrgcagctttgttacatggctatatcacgtagcggtgaggtctgggcttttagcgtaaccatcaccccaacagtgagcattgtgctgaataggtaatttttc

SEQ ID NO: 117147 - DNA, 201 bp, Homo sapiens
cttggcagcaacacctaggctagtgtttgatcaagtactggatactgtagccttgccgtgttgacctataagactaaccattaccgctggtggtgaaaacwcctcctcggtttgaacagaattatctgaaagtgttgctcggtgtatccactacaaatggcatcagtcctgaaggcctggactgcatggtctggcctccaa

SEQ ID NO: 117148 - DNA, 201 bp, Homo sapiens
cctccccaaaacctctcctccaaataacatcacattgagtattagggcttgatgaatttcttgttaggggaaataaacattcagtccatagtctccttcargagagggaggtaggtaggttttaaaaaaattattatttttatatgtttgggtgtacaagggcagctttgttacatggctatatcacgtagcggtgaggtc

SEQ ID NO: 117149 - DNA, 201 bp, Homo sapiens
ggcctcaagtgacccatctaccttggcctcccaaagtgctgggattacaggcgccccaaagtgctgggattacaggagacttaacaatattttaaactcaygatgggttgatcaggatgtaaccccatcataagttacacagcaaacctccccaaaacctctcctccaaataacatcacattgagtattagggcttgatga

SEQ ID NO: 117150 - DNA, 201 bp, Homo sapiens
cccttctatggttccacactgctccacattgagaccaatcaagggtggccttctccttagtgtttgcaagataatgatggcgtattctgaatagaacacaktggtctccctctgacacagctcttgacaatgacaggagatggtgtaaaccaaaaataaaattctaacctccccaactgactgaatggaccccctctcttg

SEQ ID NO: 117151 - DNA, 201 bp, Homo sapiens
ctgtatatatatatatatatatatatctatatatatatatctcacagtttctttatccattcatccatcagtggacagtggcctgttttcatacctggctrtagtgaataatgctgcaatgaatgggagtgcaaatctcttcacaaggtagcattctttgcttttaattactgtctcttgggatcagtcagctccagtaac

SEQ ID NO: 117152 - DNA, 201 bp, Homo sapiens
ctctgtgtatatatatgtatatgtgtgtgtgtgtgtatatatatgtatatgtgcgtgtgtgtgtgtgtgtgtgtataagtgtctcacaaaaagacttattrtaaggaattggcttgtgtgattatggaggctagcaagtcccaaatttgtgatatgagctggcaggttcaagactcaggagagccaatggtgcagatgaag

SEQ ID NO: 117153 - DNA, 201 bp, Homo sapiens
cctcagtccaatgggcttttagcttacatgttagttaccttgtctataggatggtattgttttataatccctatttacttttatctttggtgcttttaagwttttctatttgtctttggttttttactttcactctaatgtgtctagatgtggattttttaaaaaaaattctgtttgaactttgttaggacttatattttg

SEQ ID NO: 117154 - DNA, 201 bp, Homo sapiens
aaaatcttagtaaccaggcaatctgaaaagcaccatttccacttctagcctcagtccaatgggcttttagcttacatgttagttaccttgtctataggatrgtattgttttataatccctatttacttttatctttggtgcttttaagattttctatttgtctttggttttttactttcactctaatgtgtctagatgtgg

SEQ ID NO: 117155 - DNA, 201 bp, Homo sapiens
gatgtctggcactgaaatgaaacatctgtcagcatttgattgtgtcatagacaatgcccttgccacacccatacattaatgctcgaagaaaaactgtggcrtgtatataatggaatgtaggtgggccaaatgaaaacaaagatttaaggattctggagatcatatttatacttttgttactatttctttttttgaaatgtg

SEQ ID NO: 117156 - DNA, 201 bp, Homo sapiens
agtagagacgaagttttgccatattggccaggctggtctcaaactcctggcctcaagtgacccatctaccttggcctcccaaagtgctgggattacaggcrccccaaagtgctgggattacaggagacttaacaatattttaaactcacgatgggttgatcaggatgtaaccccatcataagttacacagcaaacctcccc

SEQ ID NO: 117157 - DNA, 201 bp, Homo sapiens
  misc_feature (1)...(201): n = A,T,C or G
cagcccatacttaccgtaggagataagccagatgtctggcactgaaatgaaacatctgtcagcatttgattgtgtcatagacaatgcccttgccacacccntacattaatgctcgaagaaaaactgtggcgtgtatataatggaatgtaggtgggccaaatgaaaacaaagatttaaggattctggagatcatatttatac

SEQ ID NO: 117158 - DNA, 201 bp, Homo sapiens
ccccagaagctaagcagatgccaacatcatccttcctgtacagcctgcagaattaagagccacttaaacttcttttttattataaattacccagtctcagrtatttctttacagcgatgcaggaatggactgatacaagcaacttttctttaatatattgaaaattgtgacacctgtaatcccagcactttgggaggctga

SEQ ID NO: 117159 - DNA, 201 bp, Homo sapiens
gagggccttcttaaagcgtcatctcatggtggaaggtagaagggtaagaaagtgcaagagaccaatggggcagaactcacttgtatgacaaaaccactctytcaataatggcattaattcattcatgacagtagagccctcgtgactgaatcgcttcttaaagttcccacctctcaacaccattgcattggggattcaatt

SEQ ID NO: 117160 - DNA, 201 bp, Homo sapiens
cagctttagggtagatttcatataatcactggtgaagtattgcttctcaatcctttcctcctacactgcaaagcccatctttgaagggttccaaccttatsaacccataggtctgcttaatccattggagctgccaaccttgcagggggtgtgatatgagggctaacctagcccaatgctttatcactctagcctcgccaa

SEQ ID NO: 117161 - DNA, 201 bp, Homo sapiens
cagcctggccacagagcgagactccatctcaaagaaaaaaaaaaattaacttaatggaaattcactatacaattactatcttggcagacatagatgtaaamaatttaaaaatttttgtacatcattttggcagttttcctcttcacttttgtaatacatattttgtgtcatcttgatcatttccatcagcatataagcatg

SEQ ID NO: 117162 - DNA, 201 bp, Homo sapiens
ccttctgatcgggtttgtggggacaattctgctgaatgccacattttctcatttgcctttttcttacacttacataagggatgccagctttagggtagatytcatataatcactggtgaagtattgcttctcaatcctttcctcctacactgcaaagcccatctttgaagggttccaaccttatcaacccataggtctgct

SEQ ID NO: 117163 - DNA, 201 bp, Homo sapiens
atcaatttgatactgagtgtggccaagacagagctgcctagtgggtttaggttcacacaaagaccagggtgaagaggagctggtttcagtccagagctttygggccattcttgtgcaccgtctccactccagacttcctaccaatgaggcagcctgggaccctctcacttttaccagggcccaccaagcgtgggaaagtcc

SEQ ID NO: 117164 - DNA, 201 bp, Homo sapiens
cctctacacactgaaaggatgtgaagtaaatacaataatgcgtggaaacatatccttagaccaacgatcacgtctaggtttgaattaagtcatgatcctargttgtcttaggtaatgttctttctgcatagatcccttataaaaaattcctttctcagtgacagatgacaagagctcacctgtcaaaaactgttctgtaaa

SEQ ID NO: 117165 - DNA, 201 bp, Homo sapiens
tattgacacagccagtgcccatagccagtagctagaattatgtggctgtctcctaccttcaacagtgaaccttgagaccttcctctggaatgctggttttyctagggggctgaggggaaacagacagctggacttgggtgaaccttcactccctccttattatcctcccctctccgcccacagcaacttaaatcattaaaa

SEQ ID NO: 117166 - DNA, 201 bp, Homo sapiens
cctaacaaaaaacaatacggttttactgcctgatagatgattttcagatttttgaaaattatcaaaaagtcaaaatagcaatttaaaattttaaaaaatgyggaaaagcctttgtaaatatttgaataggctcaggggctaatgaatgtgggtgtcaacctcagtgtggagtggattgaacttcatggtcttgagtgtctt

SEQ ID NO: 117167 - DNA, 201 bp, Homo sapiens
cccaggctggtctcgaactcctgacctcgtgatcctcccacctcggcctcccaaagtgctgggattataggcataaaccactgtgcccagccctcatttctattatcaaattagaatcaacatttttggttatgaaagattcatttcacattgtgatttagaacacaaccgcagttgtgtgtgtgcacacatgcttgcaca

SEQ ID NO: 117168 - DNA, 201 bp, Homo sapiens
aatctcttctttttttcagtagaccaaattagattgccatctttatcttgtggcagacatgtgtttccaagtgcaaatggtcacctaacaaaaaacaatayggttttactgcctgatagatgattttcagatttttgaaaattatcaaaaagtcaaaatagcaatttaaaattttaaaaaatgtggaaaagcctttgtaaa

SEQ ID NO: 117169 - DNA, 201 bp, Homo sapiens
gcccaggctggtctcgaactcctgacctcgtgatcctcccacctcggcctcccaaagtgctgggattataggcataaaccactgtgcccagccctcatttctattatcaaattagaatcaacatttttggttatgaaagattcatttcacattgtgatttagaacacaaccgcagttgtgtgtgtgcacacatgcttgcac

SEQ ID NO: 117170 - DNA, 201 bp, Homo sapiens
tgcccaggctggtctcgaactcctgacctcgtgatcctcccacctcggcctcccaaagtgctgggattataggcataaaccactgtgcccagccctcatttctattatcaaattagaatcaacatttttggttatgaaagattcatttcacattgtgatttagaacacaaccgcagttgtgtgtgtgcacacatgcttgca

SEQ ID NO: 117171 - DNA, 201 bp, Homo sapiens
ttgcccaggctggtctcgaactcctgacctcgtgatcctcccacctcggcctcccaaagtgctgggattataggcataaaccactgtgcccagccctcatttctattatcaaattagaatcaacatttttggttatgaaagattcatttcacattgtgatttagaacacaaccgcagttgtgtgtgtgcacacatgcttgc

SEQ ID NO: 117172 - DNA, 201 bp, Homo sapiens
tctcatttctattgtcaacctcatttcttcttcttctttttttttttttgagacagagtctgactctgtcgcccgggctggagtgcagtggcacgatctcrgctcactgcaaactccgcctcccgagttaaagcaattctcttgcctcaacctcccgagtagctggggttacagtcatataccaccacacctggctaattt

SEQ ID NO: 117173 - DNA, 201 bp, Homo sapiens
ctaacagagtgagaaatcacttattaccatggagagggcaccaagccatttatgagagatccacccccctgacccaaacacctcccaccaggctccatctscaactttgggattcacatttcaatatgagatttggaagggacaaacatccaaaccctattagctacacagtgtcccagtgaggccacactgcacagattc

SEQ ID NO: 117174 - DNA, 201 bp, Homo sapiens
caaactcctgggctaaagtgatcctcttgccttagcctcccaagtagctagtactgcaggtgtgtgccaccactcccagctaatttgttgttgttgtgttgtagagatgggggtcttactatgtttcctaggctggtcttgaactcttggcctcaaactatcctcccaccctggcttcccaaagtgccggaatcacaggta

SEQ ID NO: 117175 - DNA, 201 bp, Homo sapiens
cctcaaactcctgggctaaagtgatcctcttgccttagcctcccaagtagctagtactgcaggtgtgtgccaccactcccagctaatttgttgttgttgtkttgtagagatgggggtcttactatgtttcctaggctggtcttgaactcttggcctcaaactatcctcccaccctggcttcccaaagtgccggaatcacag

SEQ ID NO: 117176 - DNA, 201 bp, Homo sapiens
gctaatttttatattttcagtaagatggcatttcactatgttggccaggctggtctcgaacccctgacctcaggtgatccacccaccttggcctcccaaaktgctgggattacaggcatgagccaccatgcctggcctaaatgatttttaaaaatataattcatctgttctttaggtttttctttagttttctttaaacta

SEQ ID NO: 117177 - DNA, 201 bp, Homo sapiens
ggctgaccatttggagtagggtgtatttttgggagtcaaccaccgagaccactgcaataaggcagattggaaggaaggatggagccacctgacactatgtwacctccattcaaactctgcagagtggactctttgtaaggctgcttggttgatggagatagcagcacatctgccattttgtacttcttgttacaaggcgga

SEQ ID NO: 117178 - DNA, 201 bp, Homo sapiens
aatatgagaactgggactattggattagaattttaaaaatatactatgatttaccaagtaaaggatttttttattgaagtgaaactcacaagacacacaamtagccatttcagagcacacaattcagtagcattttgtgcattcacaacatggggcaaccaccacctctctgttattgggagactttttcatcactccaga

SEQ ID NO: 117179 - DNA, 201 bp, Homo sapiens
gaatattcctgcacagtgtcactggtggccagctatcaatcacatctccaaagccttcccctggacctttgcacacagtttttcttctgttgtgattgccrtcacttactctttcctttttttttttccaatctggtcctcaaaatgtaagcatatgttactttatttgggaagatttcctaggtactgtacttctgacat

SEQ ID NO: 117180 - DNA, 201 bp, Homo sapiens
taacatcaactgactgtagatgctaaccacatccacaaaataccttggcagcaacacctaggctagtgtttgatcaagtactggatactgtagccttgccrtgttgacctataagactaaccattaccgctggtggtgaaaacacctcctcggtttgaacagaattatctgaaagtgttgctcggtgtatccactacaaat

SEQ ID NO: 117181 - DNA, 201 bp, Homo sapiens
tagaggctatgacagcaatggcattctgtgcagctggaccctcaggggctccagtttccctggcggctatctggggtgggatgccacctggacgttagcakaattacttgcactgtgaggtaaaccttagcaatgtgggacaggaggcaagaagaaactggcaggtcaattgccggcctcccttccgccatatttcctgag

SEQ ID NO: 117182 - DNA, 201 bp, Homo sapiens
aaaatcagttattaaaagaatcagaaaaaagatgttagaatattctttttccaaaaggatgttagaagaatttatcttaatgtaacagaaacagttaactktaaggaaaaagaaacaaaacaaaacaggctgagactgaaaaacaataggagaatctgaaagtggaaatgagtgagaagaaggagttttaataaattaaac

SEQ ID NO: 117183 - DNA, 201 bp, Homo sapiens
agccatctggagtctgtcaggccagagctgatgctgctgtctacaggcggaattttccttcctctgggaaacctcagttttgctctgaaggccttcatcarattggatgaggctcaaccagattattgaggataatctcctttctttaacatcaactgactgtagatgctaaccacatccacaaaataccttggcagcaac

SEQ ID NO: 117184 - DNA, 201 bp, Homo sapiens
tttgaaagtaatggcaaaaaccacaattacttttgcatcagcctaataactcctttttgtccctttctcctttatccatccccagtcattaactctggcaygtagcagcagaagagggcattggaaagagtccagtggagcagagaaaggtggggagtggacgatcaagggcagccaggtcttgatttggaaaagatgccc

SEQ ID NO: 117185 - DNA, 201 bp, Homo sapiens
aggcattataatttttcgctttgtgtaagcccctttaactccagggagattttagaattcagtatagatataaagaaaataaaaacataatagttttgacrtaatttgtgtacatttgttatgctaattacctgtagagtataagaataccttacatattattgtgtcaataagttaaccttgtgatttcagcttagaaat

SEQ ID NO: 117186 - DNA, 201 bp, Homo sapiens
gatctttccattgtcacaataaccagggggaccaggtggctttgacgccctgtatctcctatgtggctccacagtcccacagtcaataggaaactgagaasgtgttgccaatgcattctctgattatctttattcctctgccactgcccctgcaagctgcaggagtgaaccccctttcatcctcctctgatctttggggtt

SEQ ID NO: 117187 - DNA, 201 bp, Homo sapiens
gcatttccagggtggccaactcttcttagatttaagagtgtgacatttgcaattctgggatcctatttccagtccagttcaggtctctctacctccatgawggtttctctccttcttggcttctttctttgctgggttcctatgtctcttcacctcaatacaggtaggaaggagggtgatgtgattgagatggtatcactg

SEQ ID NO: 117188 - DNA, 201 bp, Homo sapiens
tgggtggggacagagccaaaccatatcagtgggacatacctagcaacaaacatctggttaaatatttgtcaaacaattaacacttgccagacctagtgctyggcacaggggacaaaccaatgaaccaaacagtaatctcacaaactttattttccctacatatggtgcctctagcactagtgagcacttaatactattttt

SEQ ID NO: 117189 - DNA, 201 bp, Homo sapiens
gactctgagttagagtcacaggttggattctccagaagcagcggttaacatggagttcgaggtgcaagattttatcagaaatctgcagccgtgaatggaakggtgagatctgagcagaggaagctgtgaaatgatgctgtaggcccaagaaatctggctagagttgtcttccctgggccaaaatggtggcatcttcttgct

SEQ ID NO: 117190 - DNA, 201 bp, Homo sapiens
tctatatttcttaagaaatatatccttaagatatatttctaggaagaaatgccggccagacaggttcaaaatgtatgggcatttttaaggcaattgatacrcattatcaaactggtttcccaaaaggttgaatcaatttaagcctctttaattgggtatcaagtcgcctgaactcaccccacctctatagcaaatttgttt

SEQ ID NO: 117191 - DNA, 201 bp, Homo sapiens
atagaccaagtgatgaaataaaaatgatcctccaggaggaataagttctagtatcctatagtattacgggatgactataataaacaacaatttattgtacrttttcaaatagctatttattgtacattttcaaatagcaagaagaacagattttgaatgttctcaacagaaagaaataataaatgtttaaggtgatggtta

SEQ ID NO: 117192 - DNA, 201 bp, Homo sapiens
ttctatatttcttaagaaatatatccttaagatatatttctaggaagaaatgccggccagacaggttcaaaatgtatgggcatttttaaggcaattgataygcattatcaaactggtttcccaaaaggttgaatcaatttaagcctctttaattgggtatcaagtcgcctgaactcaccccacctctatagcaaatttgtt

SEQ ID NO: 117193 - DNA, 201 bp, Homo sapiens
agatcatcgtggctgaccatttggagtagggtgtatttttgggagtcaaccaccgagaccactgcaataaggcagattggaaggaaggatggagccacctkacactatgtaacctccattcaaactctgcagagtggactctttgtaaggctgcttggttgatggagatagcagcacatctgccattttgtacttcttgtt

SEQ ID NO: 117194 - DNA, 201 bp, Homo sapiens
agtgtacaagtcttttacctccctggttaattttattgcaaggtttttattcttttggatgcaattgtaaatggaattgttttctttcgttttttttttttctaatattagcaggggttgacaggaaggaaacgttttcttaatttcctctttgaattgttgttgctgatgtataaaatcccagcttatttttgcatgtga

SEQ ID NO: 117195 - DNA, 201 bp, Homo sapiens
gtgcaaagtagtatattaaaagtctttttgtgtgatcgttggctatacatgtactttctttagaggcgtgtctatccaaattctttgtccatttttaaatkggattttttgtctttttgttcttgagtaataacagtggtttatatatatgattcaaaaatattttctcattctgtaagttgactatttactttcttgata

SEQ ID NO: 117196 - DNA, 201 bp, Homo sapiens
cattaatttcctgaaggatgatttgagaggttttcacctttcggctattgtaaatagtgttgctataaacattactgtgcaagtttttgtttgaacatctstttttgattgtcttgggtaatacctaggaatggaattgctgggtcaaacaatgttctatgtgtaacattttgaggaactaccaaactgttttccacagtg

SEQ ID NO: 117197 - DNA, 201 bp, Homo sapiens
atgccacaatttgtcatccattaatttcctgaaggatgatttgagaggttttcacctttcggctattgtaaatagtgttgctataaacattactgtgcaartttttgtttgaacatctctttttgattgtcttgggtaatacctaggaatggaattgctgggtcaaacaatgttctatgtgtaacattttgaggaactacc

SEQ ID NO: 117198 - DNA, 201 bp, Homo sapiens
cgagaggttgaggctacagtgagctatgatgatgccactgcactccagcctggctgacacaatgagaccctgtctcaaaaaaaaaaaaaaaaaaaaaaaaraaaaagaaaagaaaagataacatgatgtttattgctttttaaagttttccctgaaagtgatttttaaaaggccaatgtgactgataatgtgactgatatt

SEQ ID NO: 117199 - DNA, 201 bp, Homo sapiens
gtagtcccagctactcagaatcccgagaggttgaggctacagtgagctatgatgatgccactgcactccagcctggctgacacaatgagaccctgtctcaraaaaaaaaaaaaaaaaaaaaaaaaaaaagaaaagaaaagataacatgatgtttattgctttttaaagttttccctgaaagtgatttttaaaaggccaatg

SEQ ID NO: 117200 - DNA, 201 bp, Homo sapiens
cctgagtaactgggattacaggcacccaccaccacgcccagctaatttttgtatgtttagtagagatggggtttcaccatcttggccaggctggtcttgawctcctgacctcatgatccacccacctcggcctcccaaagtgctaggattacaggcatgagccactgcacccagccctgagatacgcttttatttatctat

SEQ ID NO: 117201 - DNA, 201 bp, Homo sapiens
ggtatttactttaggctgaagccttctattatttctcctttgctttttacaaattgtatatacttaaggtgcacaacatgatgttttgataggcatatacwtagtaaagtggttacaaccgtcaagcaaattaacatccactatctcacatagtaacctattttttttttgcgtggcaagaggacctataatctactcttt

SEQ ID NO: 117202 - DNA, 201 bp, Homo sapiens
ttcttggtcaaatgagcttgggaagtaatgagataagcttttttctttttttttcttttgaggcggagtcttactctgttgcccaggctggagtgtagtgragcgatctcggctcactgcaacctctacctccagggttcaagcaattctctgcctcagcctcctgagtaactgggattacaggcacccaccaccacgccc

SEQ ID NO: 117203 - DNA, 201 bp, Homo sapiens
tgggaacagcagttgcttcatatgcatttgtaaaaatattttctaactgttcaagttcagagcatgtttcttgccttttaattttgtttttaatatagttrgggaaggcagagatctctgatagacactattcttccactgtgctttggaattaaaaaagatgagagtggtagatacttctttcactgaagtcaccttttg

SEQ ID NO: 117204 - DNA, 201 bp, Homo sapiens
ccacactctggagtgtactttcagtaagtttctgcttttgttgcttcattctttccttgttttgtttgtgcattttgtccaattctttgttcaagatgccmagaacctagacaccctccaccggtaacatagctacttactctcactttgaacaagttatccaatcttactaaactttatttatagagcttttttctttct

SEQ ID NO: 117205 - DNA, 201 bp, Homo sapiens
gatatagtttgaattatgccattgaggccttttatttaatagcttccctttttgtaaaacagaaaaattaacatcaatcccagcttcccagcatctgactktgtatggaaaggacaggtaaaacaaaaggtagacatggtttgagttttatgaaaaaaaggcggtcaggcggggtggctcacgccagtaattctagcactt

SEQ ID NO: 117206 - DNA, 201 bp, Homo sapiens
ggctcacagtggttggacaacattgagagcagtagtgaggttgcgtaagtgcagtgatgagaaccctgggggcaacagttggaagaactgagatatagttwgaattatgccattgaggccttttatttaatagcttccctttttgtaaaacagaaaaattaacatcaatcccagcttcccagcatctgactgtgtatggaa

SEQ ID NO: 117207 - DNA, 201 bp, Homo sapiens
atttaccaaactattctcccactgtggaatatttgcattgcttctattttttttttcctatcatagctaaccctggtagaaaatgtaaaaatcaaaacacmagagatgactagaattgggattacttctatgcctttgtatctgaagttgacaaaatcaacttaattttctatctatgtttgaagtggttgctgaaaaatt

SEQ ID NO: 117208 - DNA, 201 bp, Homo sapiens
aaaacatcatttgcaattgaaaatgcaaaccgtagggctcattagtttgtccatgggtggtcttcagaggctggaccaaggctggatgtttgggtgttgtyctgtgtgagctgactgaggtatgggaaggcctagacacattgtttttggggaaacttaaaaataagtaagtcccatgatttgtctgctttcacctccgtt

SEQ ID NO: 117209 - DNA, 201 bp, Homo sapiens
tgaaacagagatttaagagttttcttttcatatagattctaattacgcatgtgcattttattgaaaaggcaatttcccccctcattggactgatgtgtcayctttgtcaaaaatcaagtgacagtttctgcactctcttttctattccataggcctattggtgtatcaggaacttatactatgaccctcttaattgctgta

SEQ ID NO: 117210 - DNA, 201 bp, Homo sapiens
cctcggcctcccaaagtgctgggattacaggcatgagccactgcgcccggctgagatgatttttaaatactcctaactcaagtcattaatggcattaactkttcccccgtctgttgggaacagcagttgcttcatatgcatttgtaaaaatattttctaactgttcaagttcagagcatgtttcttgccttttaattttgt

SEQ ID NO: 117211 - DNA, 201 bp, Homo sapiens
tgatgggagctgtatgttctcattctcgttttgtgtcttccttgggttgctaatgaagtacagtttttggggattgtaccacagatattgatgtactaaaytgatgtttgttgattctggagtatgattcttcacttcatttatttagcaagtatttattgactaccactttgtgcatgggaaattaatggaaattgaagg

SEQ ID NO: 117212 - DNA, 201 bp, Homo sapiens
ggcatcatctcagctcaccgcagcctccatctctcaggctcaagccatcttatttcctcagcctcccaagtacctgggactacaggtgtgccaccatgccyagctaatttttgtatttttagtagagacagggttttgccatgttgctcaggctggtcttgaactcgtgagctccagtgatccacctgccttggcctccca

SEQ ID NO: 117213 - DNA, 201 bp, Homo sapiens
ccatagatgtttggtttatttctggaccgttaattccattccattgttctgtatctatgttgatgacagcacgacactgtttggattactgtagctttgtygtaagtttgaaatcaatcagtgtgagtcttccaactttattttttcttctttcaacattattttggctatttgtaattccatatggatttgaggattgac

SEQ ID NO: 117214 - DNA, 201 bp, Homo sapiens
acctaaaatgaaggaaaattgtttctaattctggatgatgtcatttgtgacaactccatcagggtttaggtaggattacatttccttataaatagcatacmtagtttaaatgaacctaaataatggacctaaataacttccttatatttttttctttacttcaaaacatcagaaagcaagcgacattttaccttgttctct

SEQ ID NO: 117215 - DNA, 201 bp, Homo sapiens
tcaatcacatctccaaagccttcccctggacctttgcacacagtttttcttctgttgtgattgccgtcacttactctttcctttttttttttccaatctgrtcctcaaaatgtaagcatatgttactttatttgggaagatttcctaggtactgtacttctgacattgcacttagacaaggtattatagttatgtttattt

SEQ ID NO: 117216 - DNA, 201 bp, Homo sapiens
ggaagctacattcacttcagtgaaggcttgacgtcatcaggcagcattagcatcacctgggacttttcaagcctcacctcagacctactaaatccgagtcwgcattttaagaagctccccaggtgattaatccccacaataaagtttcagaagcattgatttaaaggatccacgtgtcctgttgtgtccggaattggtggg

SEQ ID NO: 117217 - DNA, 201 bp, Homo sapiens
agaaacatttctatcgttccgtttcctgaaggaaatatgtgagaactcatagctgccactattaattgggataatcttctggtaaattcctggtctgggcygggcaaggtggctcatgcctgtaatcccagcagattactcgaggtcaggagtttgagaccagcctggccaacatggcgaaaccctgtctctactaaaaat

SEQ ID NO: 117218 - DNA, 201 bp, Homo sapiens
cgggtccaagaatgtgcatttctaacaagttcccaggtgatgctgacggttggggacccactttgggaaacaccactctaaagagcaccctctgcattcaytggctttgcttgctctttttccattcactacccaacctgctgtcacctgtctgctgccccacaccactgacctccaaaggtcaaatccagtggagctttg

SEQ ID NO: 117219 - DNA, 201 bp, Homo sapiens; identical to SEQ ID NO: 19960

SEQ ID NO: 117220 - DNA, 201 bp, Homo sapiens
aagcagatgccaacatcatccttcctgtacagcctgcagaattaagagccacttaaacttcttttttattataaattacccagtctcaggtatttctttayagcgatgcaggaatggactgatacaagcaacttttctttaatatattgaaaattgtgacacctgtaatcccagcactttgggaggctgaggtgggtggat

SEQ ID NO: 117221 - DNA, 201 bp, Homo sapiens
taaaaaaaatgaacatgtttagaatttagacaaaatgtggcgatgcctaccaaaaaggatgactgttcaaagagatgatgcatgttcattgttttgccacrtgcctggtatacctgaagcatttattactgtgaatactatcttttcctttgaaagggttcacttgttttcggtctgtgggttgtatattcctaaggacat

SEQ ID NO: 117222 - DNA, 201 bp, Homo sapiens
cccacctaagtgaatcttaattcaagttacttaaacattttcccaaatgggttttatgagataccacaggttattttgtaaaaaaaaaaaaaaaaaaaaaatactagtcatgattttttttgccctttaaattgtgttttaggccaggcgcagtggctcacgcctgtaattccagcactttggaaggccaaggcaggcgga

SEQ ID NO: 117223 - DNA, 201 bp, Homo sapiens
gattccccaaattagcacataggacagaacaacagaaaaggtaaggaagaagacacattgtcttgatcacatatttccagaacagaatccagagaaaggargggtgctactggagctgaggggaatgctgagagcttggggcttttggtccattttaatgtttgtagccctgggaggagatcacctcaagagttgctccct

SEQ ID NO: 117224 - DNA, 201 bp, Homo sapiens
atctatttatctactttcatctatctatctatctatctatcatctatctatctatctatctatctatctatctatctatctatctatcatctatctatctatctttcagagacaggatcttgctctgtcactcaggctggagtgcggtggtgcaatcgtagctcactgcagacttggcttcctgggctcaggcaattctcc

SEQ ID NO: 117225 - DNA, 201 bp, Homo sapiens
ctactatccatctatttatctactttcatctatctatctatctatctatcatctatctatctatctatctatctatctatctatctatctatctatcatcyatctatctatctttcagagacaggatcttgctctgtcactcaggctggagtgcggtggtgcaatcgtagctcactgcagacttggcttcctgggctcagg

SEQ ID NO: 117226 - DNA, 201 bp, Homo sapiens
gcggatcccttgaggtcaagagttcgagaccagcctggccaaaatggtgaaaccccgtctgtatggaaaatacaaaaaaattgctgggcatggtggcaggygcctgtaatcccagctactggggaagctgagcagaagaaacatttgagcccaggaggggaggctgcagtgagtggagatcacaccactgtactccagctt

SEQ ID NO: 117227 - DNA, 201 bp, Homo sapiens
tatctactatccatctatttatctactttcatctatctatctatctatctatcatctatctatctatctatctatctatctatctatctatctatctatcatctatctatctatctttcagagacaggatcttgctctgtcactcaggctggagtgcggtggtgcaatcgtagctcactgcagacttggcttcctgggctc

SEQ ID NO: 117228 - DNA, 201 bp, Homo sapiens
ttgtcatctatctactatccatctatttatctactttcatctatctatctatctatctatcatctatctatctatctatctatctatctatctatctatctatctatcatctatctatctatctttcagagacaggatcttgctctgtcactcaggctggagtgcggtggtgcaatcgtagctcactgcagacttggcttc

SEQ ID NO: 117229 - DNA, 201 bp, Homo sapiens
agggcttctgttcggtccagccaatgccagacaaagcagggaatacgaaggtgggagaagagcgaggtgggcccactgcttttttttttttttttttttttgttgttgttgtttgttttttttgagacagagttttgctcttgttgcccaggctggagtgcaacggcgcaatttcggctcaccgcaacctccgcctcccag

SEQ ID NO: 117230 - DNA, 201 bp, Homo sapiens
taagggaaaactcttttctcttggctcttattctctcttgtctgccaccatgtaagatgtgccttttgccttctgctatgactgtgaggcctccccagccrtgtggaactgtgatgtcattaagccactttttctttataaattacccagtcttgggtatgtctttatcagcagcaggagaatggattaatacaacctgtc

SEQ ID NO: 117231 - DNA, 201 bp, Homo sapiens
tcacatcttcaaagtcccttttaccatgtaaactagcatattcacaggttctaaggattagaatgtgaacatctttagggaacgaactatcatttggcctrtcatactatgtaacttcttgatattatccaactaattgacaacatgagaaatatatccatctccagaaaacctcttatagacagcagggaagaaattaag

SEQ ID NO: 117232 - DNA, 201 bp, Homo sapiens
cgagatcacgccactgcactccagcctgggcaacagagtaagaccctgtcaaaataaataaataaataaatttaaaggagttgaattgagcaatgaacacrtgaatcgggcagcctcctaagccagagtaggctcagagactccagcacagccacgtggtagaagatttatggacagaaaaaggaaagtgatgtccagaaa

SEQ ID NO: 117233 - DNA, 201 bp, Homo sapiens
tctctctatgtacgtgtatgtttggacctcactgaaattttcctaaattgaatctgttttttcgtatttgagtgaagccaaataaattcccaactgcacamtaaaggtgaaggccaacctcttagcttctaggtctctgttcacacatcagttgagaactcattgaatacatttcaaagaagaattttatttggttactca

SEQ ID NO: 117234 - DNA, 201 bp, Homo sapiens
aggtgcctgccagcacgcccagctaattttttgtatttttagtagagacagggtttcaccatgttagccaggatggtctcgatctcctgacctcgtgatcygcccgcctttgataaaattttctgaagcctacattcaagtatgtgacaatcctaggtgaatcactgaaactctcaagctgtataattttatatgaaaaca

SEQ ID NO: 117235 - DNA, 201 bp, Homo sapiens
ctcactctgtcaccacgctggagtgcagtggcgtgatatcagctcactgcaacctctacctactgagttcaactggttctcttgcctcagcctcccaagtwgctgggactacaggcgcgtaccactacgcccggataattttttttgtatttttagtagagatagggtttcactgtgttagccaggatggtcttgatctcc

SEQ ID NO: 117236 - DNA, 201 bp, Homo sapiens
aactcagggaaaaacaaagcatctttaatcctatcgtcctggaaaacttgagtatctcaatgcagaaaggcatgaaaatatctttttttatttttttttcragatggagtctcgctctgttgcccaggctagagtgcagtggcatgatcttggctcactgcaaactccacctcccggattcacgccattctcctgcctcag

SEQ ID NO: 117237 - DNA, 201 bp, Homo sapiens
gactggcagttggttgaaagaggtaagctttgcctgaagaagtaaaatcagcataaagaaatgcttggattaagataagggggcggatcccttgaggtcargagttcgagaccagcctggccaaaatggtgaaaccccgtctgtatggaaaatacaaaaaaattgctgggcatggtggcaggcgcctgtaatcccagctac

SEQ ID NO: 117238 - DNA, 201 bp, Homo sapiens
ttgttgcctggggtcttgatcaagtgagctgagaagaaattaccagcagagtttaaaatatgcccctttgccttcaaatgctcagaatctagttcattccrtgaggcaagagggaaatgacattttcacacttattttctttttctgtttttttttttttttttttttttgagatggagtctcactctgtcaccacgctgg

SEQ ID NO: 117239 - DNA, 201 bp, Homo sapiens
ttatacattttagggggacagaagttacaggcaaagacataaatcaatacatggaaggtgtacatttgtttggcacagaaaggtgggacatctccaagggyagggaggcttcctgctcacgggatgattcaaatatttcctgactggcagttggttgaaagaggtaagctttgcctgaagaagtaaaatcagcataaagaa

SEQ ID NO: 117240 - DNA, 201 bp, Homo sapiens
tcagtctccagaagagcaatgtatctaatattgggtctcttccagctttgtgaatgaagagttcatctcccagacatttcttgaatgctgctcactgcctrtgggagagctttggcttttgaatgtgctagacaaggctggccacatcattcatagggctcagtgcaaaatgaaaacgcaggaccccttgctttcaaaaag

SEQ ID NO: 117241 - DNA, 201 bp, Homo sapiens
gcaaaatcagatgttgtagttctgctgaatagaattatgtgatagtttaaaaagggccttttgagtgtaaaccaaagtatctgagacaggtctcaatttaraggtttattttgccaaagttaaaggccatggcctgtgacacagcctcaagaggctctgagaacatgtgctcaaaatggttttattataggttgcttttat

SEQ ID NO: 117242 - DNA, 201 bp, Homo sapiens
tcttaaagggaagaaaaaatattgaggaatttcagacatccctagttttgctctagagtatatatttgaggaacaatgttgccctctagtgttcatctctrtgtttttattccatgctgggaagggtagagaagagtccaggcaaagtcaagtctgccttcttatttctggtcctagtgacacttttataagtgaggtttt

SEQ ID NO: 117243 - DNA, 201 bp, Homo sapiens
tgactaaagtttggtccagcaaagaatcactgtccactgagagagggggtaaatattagagacatttagaaatagaatcagggccgggtacggtggctcaygcctgtaatcccagcactttgggaaggccaaggcgggcagatcatgaggtcaggagatggagaccaccctggctaacatggtgaaaccccatttctgcta

SEQ ID NO: 117244 - DNA, 201 bp, Homo sapiens
atcatgaggaaggcttggacaaattattgcagatggtgttaaagaaaaagctattcgctgatacttgttaaagcacaatatggaagacttcagtctggackgtcaccataggtatagggaccatggcaatgggattttgcagtggcagagagagataggactcaattccaaatatggcacaggcaagtggcaatttagagc

SEQ ID NO: 117245 - DNA, 201 bp, Homo sapiens
acagcaaagttatttgccttaaggacttttccaaacccattactttcctataaaatatcctcaattgaaataatacacttctcgttacgtagttactttcmttgctggagactcaaaaatacttgaaaaatcttttaaactcctcttcaaggactatttttaccactgtaaaatttacatatggtgatatatagcaactgt

SEQ ID NO: 117246 - DNA, 201 bp, Homo sapiens
actctataattcatatgaagtgttctttattattactttttaaagaaagagcaatgtttcctggcatttgtgggtggtgtgttcactagaggcagttactrtaacagacaggccattgaacctgatcaactcctcactgacagagcaggttcctcacagtagttgcttatgccaaaaaaaaaaaattgttgccatcaactg

SEQ ID NO: 117247 - DNA, 201 bp, Homo sapiens
aatgaaacatgaagatgcagtacaattcataggacaaaagcggagtggagcttttaaaagcaagcaacttttgtatttggagaagtatcatcctaaaatgyggctgcgcttcaaagattccaatagtcatataaacaactgttgcattcaataaaactggggtgcctaatgctattggaagtggaacttgagataggacct

SEQ ID NO: 117248 - DNA, 201 bp, Homo sapiens
aaaaaagacaagtcattatatgaaaaatacacttgcacacacatgtttatagcagcacaatttgcaattgcaaaaatatggaaccagcctaaatgttcatmagccaatgagtggataaagaaaatgtgatatatatatatatatatgcgccatggaataccactcagccatataaaagaatgaaataatggcattcacagc

SEQ ID NO: 117249 - DNA, 201 bp, Homo sapiens
aaatgtttgcttctgttgttattattagaaaatggatatccggaactttttaggggaatgctcccaactttaaaggcagacaacttactgaagctttaagaaaaaaaaaaaaaaaaaaaaccactgtgtgggccaagtaaaacacgtcagcagacttgacttggcccatgggtcatccgcttgcagcttctgctcaatgcg

SEQ ID NO: 117250 - DNA, 201 bp, Homo sapiens
ggactaaataaagaaaatgtgggcctggcgcggtgactcatgcctgtaatcccaacactttgggaggccgaggcgggcagatcacctgaggtcgggagttygagaccagcctgaccaacatggagaaaccctgtctctactaaaaatacaaaattagccgggcgtggtggcacatgcctgtaatctcagctatttgggagg

SEQ ID NO: 117251 - DNA, 201 bp, Homo sapiens
taggagtagggtatttggggaggagtagatgtatttgtgggggcaggtggcaaagatcaggaatctcaaggtttttttcctgcagaggtgagaactctgasagggaggcccctgagcgcagctgggctcttctgtctgtgtctctggggtccactggagcagaggaagctttgttggtgccggtctcattgtattgtgtct

SEQ ID NO: 117252 - DNA, 201 bp, Homo sapiens
ccagctttcctggtggcccccccaccccccgtgatcttgccccagcatcaggaattgggggcgatctggtcaggcaagtctcctacagcacttaaacccaygtttccgaattggattcaatgggaggcagcttcccagttaaaagtccagggcctggagctggggggtgacaaggtgggcctcccaaagacactgatgact

SEQ ID NO: 117253 - DNA, 201 bp, Homo sapiens
gtgtgggcaggcagtggattcggccccctcccactgcgcttagtaaacaggatcacggtggccccagggaggagtgtgcattctggggaagacaagctacmcccccaatgaggatgggacccccacggcaagcctcaggcccaagccacagccggtatttgaaactgtccttgtttcaaaacacaaagcatcctgttcagg

SEQ ID NO: 117254 - DNA, 201 bp, Homo sapiens
gttcctgtgctcacaccccaccagggactcgtcgtgacatctggaggccactggctctggagttaggctgcctgggttccagctgtgtaaccttgaactcktgaggtctccatttcccctgctaacgcctcacggggctgatgagaggacgaaatgcgcacacgcctaaaggtctgagaatgactggaggaaatggtcatg

SEQ ID NO: 117255 - DNA, 201 bp, Homo sapiens
aatgcaaaattcagtggcaaaggaattatcccagaaaaattccatgtctaaatctgaaatggccccaaggaactctgtccctctctagtcatttaagtgamgttttgctctagggtgtggctaaagatcggggccagccaacctggggagaaacaaagacaatgaggaaacttgtttattggggtccttaaaatgttaaca

SEQ ID NO: 117256 - DNA, 201 bp, Homo sapiens
ttgggaggccgaggcaggtgaattgcttgagtccaggagttcaaaaccagcctgggcaagatggcgaaaccccattgctaataaaaatttaaaaagtagcyaggcatggtggcacatgcctgtaatcccagctactcgagaggtagaggcaagagaatcgcttgaacctggaaggcggaggttgtagtgagccaagatcat

SEQ ID NO: 117257 - DNA, 201 bp, Homo sapiens
gcaagatctcatttataatctttttaatagcttttttaaatctcaatttcctatggctccagccagtataaccccaagactccaccttcgtggtggactcsaacctccaggtggcctgtcagcagcgcctgctcagatccagccttatttttagcactttctccagacaacccaagggaaaagaaagctgttttgaggtca

SEQ ID NO: 117258 - DNA, 201 bp, Homo sapiens
ataataataataaataaaataaaactagttttacatcccattatactttcttttaaaaagcatggaaggaaagctaggaatcctaggcttctgcatgtggrcaaagatatcatttgcaaaatggtcttggctgcactggtggaaatagtaaatgattggaagcaacctgaattccatcaagagaagaatgtttaaataaaa

SEQ ID NO: 117259 - DNA, 201 bp, Homo sapiens
ccctggcaccaaggaggcaggaagggcgtgcaggagaggcaggaccagaggagagggagccccaggaggagggcgccatgagcacggccaacactgaggcycctccgcaggcggacagtggttcctccacttcccccatcattccccttccacagaagtgcggtgacacggaagagaccacacagtaagaagacaccaggg

SEQ ID NO: 117260 - DNA, 201 bp, Homo sapiens
caccaagctgttttccacagtggctgcaccatttacgtttccaccagcagtgcacgagcgttcctgtttctccacatcctcgccaacatttattttctgcsttattaaaattcaaaagaattatagccatcctagagtagagagtgtttatttttatttatttattttttttgagacagggtcttgctctattgcccaggc

SEQ ID NO: 117261 - DNA, 201 bp, Homo sapiens
ctgatgcatattttggttgtgtgggcacatttgggttgtgaatagcgctgctatgagcatttgaatacaagtatttgagtcttcacttctcttgggtctayacgtccaggggtggaactcctgggtcatatgttaactccatgtttatcatgaggaaccaccaagctgttttccacagtggctgcaccatttacgtttcca

SEQ ID NO: 117262 - DNA, 201 bp, Homo sapiens
gggcaacagagcaagaccctgtctcaaaaataaataaataaataaataagataaagacagaaaaaaagagtggattccctatttcctcaatatcactggcracacagctaccggaatgtcaatcacttttcttatttgccccctatcttctatccctctttttaaaaattgaggtaaaattgaccaaatgtcagccatttc

SEQ ID NO: 117263 - DNA, 201 bp, Homo sapiens
gtgacacggaagagaccacacagtaagaagacaccaggggctggggctccctgctcctctgacctgactcagttcacccctgggatcctcacgcagcaccycccaccagaggtgtggtctgaaggtagggagaagccaccatgaacccctcacatgaagcagaagtagtgtgcgacgtgcctacctggtggcccccggtaa

SEQ ID NO: 117264 - DNA, 201 bp, Homo sapiens
taagaacccagctaatgaacaagttagtgctggagactggatttgaacacaagtttagctccaggacctgagcttttaactggaaggttggctcctacatkaatttaattcagaaacacgagtttaaaggctgtaggagacttgccttcccaggttccttccaattctctgatgctggggccaggtgggggatcactgggg

SEQ ID NO: 117265 - DNA, 201 bp, Homo sapiens
aagagactgtttcaaatattcactgaagcgtttttgaacgttaaaaaatgagaaatcatccatgtggccattgttatgggttgaatggtgtcctccccacyaaagatgtggaaatcctaagcagagtatctgtgaatgtgatcttatttggaaacagggggctggacgcagtggctcatgcctgtaatcccagcactttgg

SEQ ID NO: 117266 - DNA, 201 bp, Homo sapiens
gatcaacgctgggccagattcccaggccagtgctctcttttgccttgccagccctcctggcagagctatagcaggccctggctaacacacagggatccccsacttgtgcctgctatgcctcagtttcctcctctgcaaaatagagataacgataacagcacttacctcagagggatcatgtgaagaggaaaggaactaata

SEQ ID NO: 117267 - DNA, 201 bp, Homo sapiens
tggggtttacagtggcccccatcttctgtgaggctgggggaagaagtaactgtgacctggattaataactgggcagtggggaaaagagccatgtgcaaccyaccctctgtggcccgtgccaggcacggctcatgtaaccctcctagcaaacctctagggtagctccactgtgattactgccagcattttacaggcaacggc

SEQ ID NO: 117268 - DNA, 201 bp, Homo sapiens
gccggatactgcagctccatcacacatatgatgttgtcctcatgggagctcacagtcatgtgggaaagccagacgccctcacaaaaaatcatcacaaccgycccccaaaaaagtataccaagaaaaaaacaaactctctgctcttttgcttaccagctgtatgtgtctttgattgatttaccgtcaagtggagtcgtcata

SEQ ID NO: 117269 - DNA, 201 bp, Homo sapiens
tgaagttggtgaacatcctccttcctcttctgggctgatgtgaagccagcccattctctagctccagcagtgggaagggaggagaggggaagctgattcaygttcagccgcctgtgatgctggggagccgaatgatagctccccaccctctctgcttacaggagacgagggagggcaacaagggaacgtgaagtgccagcc

SEQ ID NO: 117270 - DNA, 201 bp, Homo sapiens
ggaagggaggagaggggaagctgattcatgttcagccgcctgtgatgctggggagccgaatgatagctccccaccctctctgcttacaggagacgagggakggcaacaagggaacgtgaagtgccagcctctcccccttcccttctcactgtcaccaaataaataagtctggaatcgctgagaaagtactacagaggactc

SEQ ID NO: 117271 - DNA, 201 bp, Homo sapiens
agtagctgggaccacaggggcacaccaccacacctggctaattttttattttttatttgtgttttcatagaaacagggcctcgatatgttatcctggttgkacccaaactcctagactcaagcagtcctcccacctgagcctcccaaagtgctgagattataggtgtgagcctaccacacccagccaaatcaacgttactg

SEQ ID NO: 117272 - DNA, 201 bp, Homo sapiens
tgcactgcctttccccataaatagtttaggagtacacaactgtagatggttgaggggtcttcccacctcctggatccatgctctgggatgcagctggggargatgcaggctgggctggcagtggcgactgtgcggaagtggcgactgtgcagaagggggtagtttgtagctatcagcactgatggggctcagagctgaagg

SEQ ID NO: 117273 - DNA, 201 bp, Homo sapiens
ctgcattgagccatgagtttggcaaagtgacttctcagtgcctcagttttctgtgctgtaaaatggacagaatgatactaccttcttcctacggctgttgyaaggatgaattgagttaacacatgaagggctgaagatgggctccgtcacgtaggttttcaataggagatccgttatcaccattgagagcagtcaacaggg

SEQ ID NO: 117274 - DNA, 201 bp, Homo sapiens
agcccagtgtaaccacagggtccttataagaggcggcagggacaggcccggtagctcatgcctataatcccagcactttgggaggccaaggagggtggatmacttgcggtcagtagttcgaaaccaccctggccaacatggtgaaacgctgtctctgctaaaaatacaaaaattagctaggtgtggtggcgcacacctata

SEQ ID NO: 117275 - DNA, 201 bp, Homo sapiens
ccatgagtttggcaaagtgacttctcagtgcctcagttttctgtgctgtaaaatggacagaatgatactaccttcttcctacggctgttgcaaggatgaaktgagttaacacatgaagggctgaagatgggctccgtcacgtaggttttcaataggagatccgttatcaccattgagagcagtcaacagggttaaagatgg

SEQ ID NO: 117276 - DNA, 201 bp, Homo sapiens
aaacgttttttgtttctctaacattttttgtttaacaaacaaaatattttttgtttctctcacatttttttttgttttttagtagagatggggcttcactrtgttgctcaggctggtcttgaactcctgggctcaagagatgctccttgctgggcccggtggctcatgcctataatcccagcaatttgggaggccgaggca

SEQ ID NO: 117277 - DNA, 201 bp, Homo sapiens
ggcaagagtcccaggctgggaaatccctgagcaccccacctctagcccaagggagcgtgcactgcctttccccataaatagtttaggagtacacaactgtrgatggttgaggggtcttcccacctcctggatccatgctctgggatgcagctggggaagatgcaggctgggctggcagtggcgactgtgcggaagtggcga

SEQ ID NO: 117278 - DNA, 201 bp, Homo sapiens
ggtttcaccacgctagccaggctggtctcaaactcctgacctcaggtgatctgcccacctcggcctcccaaagtgctgggattacaggcgtgagccaccaygcctggcctcagatggagatttgaagctgagagagcttgggtaagttacctgacctctataacctgtttccctatccacaaaatggagataatattacct

SEQ ID NO: 117279 - DNA, 201 bp, Homo sapiens
tctgttgcccaggctggtctggaactcctggattcaagtgatctttctgccccagcctctcaaatgcttggatttacaggcgtgagccactgtgtctgggmttatccctcacttttaaaagcagagctgagataccacttggccccacctctacagatccagttgaggaaatgggtttttcaagtccagtgcccttggtag

SEQ ID NO: 117280 - DNA, 201 bp, Homo sapiens
acacctagtctgtggtattttattatggcagctcttgtcaactaacacaccttgtaaagttaacaatgttcaaataatcttccctgcaatttagctcttasatataaatgttaggcctttgttactcaaactgtgattcctgaactggtagcatccacgtcaactgcaagctccttagaaatgcagaatcttggccccacg

SEQ ID NO: 117281 - DNA, 201 bp, Homo sapiens
cttaccactccctctgcccctgtaaaagccttgcttccttccactgtgctacatgtgagtggctttcaaaggatggcctgttccggaagcttgagggaatrcccacgcaatgtgtctccctgaccagccttcgccttcccaagagtgaagtggagactggccctgggatactttctggggtgggggggaagggcagtggca

SEQ ID NO: 117282 - DNA, 201 bp, Homo sapiens
gaggagaggggcagagaagtcttctgtaaacaggtgactttgatgttgtgtcctggaggatgagaagttggtagctgggcatagtgttagggggagatgcrgtaccaatgtcctgagagagccccatggctgcagcccaaggtaagggacttcttgcagggtctcagagggcatgtgcaaagtttgggtttcattctcaat

SEQ ID NO: 117283 - DNA, 201 bp, Homo sapiens
ccggaagcttgagggaatgcccacgcaatgtgtctccctgaccagccttcgccttcccaagagtgaagtggagactggccctgggatactttctggggtgsgggggaagggcagtggcagagatggctagcgtggcccatgccaacaccctattctggcctcctctcccttctcaataataaaaatcctgctgtggggtgg

SEQ ID NO: 117284 - DNA, 201 bp, Homo sapiens
gagggcgccatgagcacggccaacactgaggcccctccgcaggcggacagtggttcctccacttcccccatcattccccttccacagaagtgcggtgacayggaagagaccacacagtaagaagacaccaggggctggggctccctgctcctctgacctgactcagttcacccctgggatcctcacgcagcacctcccacc

SEQ ID NO: 117285 - DNA, 201 bp, Homo sapiens
cttccaaaatgagttaccctcaggcctggccacccccagaaccacattcagtccaccagcagttctgcaaagacaagcactggtcgactccctccccgccygccccccatggctggaggcagggcagccaggctggcagggcctaggcacagagactgtcctgggctggctcccctggcaccaaggaggcaggaagggcgt

SEQ ID NO: 117286 - DNA, 201 bp, Homo sapiens
ccagcctgcaggagtcagggtgggttttctggaaaaatgaataatgcatggagacttgaagaaagagaagcctcctagatgaaaaggagaggaagggtccrggcaccatggctcacgcctgtaatcccagcactctgggaggccgaggcggatggatcacctgagctcaggagttcaagaccagcctgggcaacatggtga

SEQ ID NO: 117287 - DNA, 201 bp, Homo sapiens
gattcggccccctcccactgcgcttagtaaacaggatcacggtggccccagggaggagtgtgcattctggggaagacaagctacacccccaatgaggatgrgacccccacggcaagcctcaggcccaagccacagccggtatttgaaactgtccttgtttcaaaacacaaagcatcctgttcaggctcctacccgccaccc

SEQ ID NO: 117288 - DNA, 201 bp, Homo sapiens
cagaggccagttcaccagacaaacctgtcattttctgcattctttgctggcggtgtctccttgtttgagccaggttccaaaggatgacgtgtgccctcacytgaactaccgctttcgttcaacagcccactgtggggtcaccccgggccacactggtggaggacccactcgatcaactcaatgctaggagctgggatgcca

SEQ ID NO: 117289 - DNA, 201 bp, Homo sapiens
ctagacgacgtagctcatgccagtaatcctagcactttgagagaccaagattggagcatcacttgaggccaggagaccaacactagcctgggcaataaagsaacatcctgtttctacaaataataaaaataaagtaaaataaaataacatgatggaagatgaagaacaagtctgggaagctacgtgtttcctcatggagag

SEQ ID NO: 117290 - DNA, 201 bp, Homo sapiens
gagccctgacctccacgctggggctggggtcttttcattcatcttcaccgtctcctaaagatccttagggagcctgagaagctgaacttggctgacgtcgsgaagtaaggacaaaaggaaagaaggggtgggagggagaagaaacaggaaatgggagaaactcttggattcctgtaaatggagattatctatgaagatgtt

SEQ ID NO: 117291 - DNA, 201 bp, Homo sapiens
tgttctataagagtatgtagttgtacaagtacaaaaatatgcacaagaataaacatcaaagtcggggcagagaaaaggaagggtttgaaatcagagaacgrtacatcaggtattgcaactggaatggtttatttcttccgctgagtggttacactgaaatattattttataccctgctttgcatggctgaaacagatcatc

SEQ ID NO: 117292 - DNA, 201 bp, Homo sapiens
acagtagggagagagggagggagggtaagtcagtgacagacaactcaacttaaggagcagcagctggactcccacagtcaccttgccctctccaagcccgrggggtacaaagtccacgcccacaagctctgagcaggggggaacctgagtacagtgggctaggaggctgggggagtggagaggccgtgcccagcctgaagg

SEQ ID NO: 117293 - DNA, 201 bp, Homo sapiens
ttctgccccagcctctcaaatgcttggatttacaggcgtgagccactgtgtctgggcttatccctcacttttaaaagcagagctgagataccacttggccycacctctacagatccagttgaggaaatgggtttttcaagtccagtgcccttggtagagaaggatcgttggtgtcaatggccgggggccggtggaagcagc

SEQ ID NO: 117294 - DNA, 201 bp, Homo sapiens
gggactacatgcatgtgccaccacacttggctaatttttaaatttgttgtagagactgctgggggtcggggggaggtgggtggtcgcgttctgttgcccakgctggtctggaactcctggattcaagtgatctttctgccccagcctctcaaatgcttggatttacaggcgtgagccactgtgtctgggcttatccctcac

SEQ ID NO: 117295 - DNA, 201 bp, Homo sapiens
acaactcaacttaaggagcagcagctggactcccacagtcaccttgccctctccaagcccggggggtacaaagtccacgcccacaagctctgagcaggggrgaacctgagtacagtgggctaggaggctgggggagtggagaggccgtgcccagcctgaaggggtggccacacaggaacatgggcacagccaggagtgccc

SEQ ID NO: 117296 - DNA, 201 bp, Homo sapiens
gtctccagttttatttcataggatggaaaaaaaaaaaaaaagacctattttaaaaagaagaagaaagggaaaaagaaaaccaacaaagacaaattcaaaarcgcaccactgttgacttgggcaacagcctctgccgggtcaaagaggaaaacagctcagtcctgaaatccgtcccagacatggaaattacagagcggcccc

SEQ ID NO: 117297 - DNA, 201 bp, Homo sapiens
atgctcaggttcctgagagcagggcccatgttggggcaccctaggacagggcatggcatgtagctgacactcaacggtgtcaagtgagtggctgtgatcastgcctacaagacccaggggacccctggggagatgggccactcctccacgcatggggcacgccacacacaggataccagaacgggcggccagatgagccac

SEQ ID NO: 117298 - DNA, 201 bp, Homo sapiens
ctatgtgtatgtacaccaatcataacactcccttttctttcccaagaaaggatttctttttgtactgatctcaggagtttcagggctacagcgaagagatsacatgaggaagtcaagaattgtgtttacttacaaactatatggaaccaatatttaatcattttctacttacaaaatcccaattttggctgggcacagtgg

SEQ ID NO: 117299 - DNA, 201 bp, Homo sapiens
ccagaaccccagccaccacagccagcaggctgcacgtgcaaagaaggctctggacccaagctgcctggacggggcgcctggatggggcacctcttgaaccrctggggctctctcccagcatccctgcggcgcctttgtctcaaatgtggaagcagcagagagctgaggccaggggccgctttatttccctattgctttcaa

SEQ ID NO: 117300 - DNA, 201 bp, Homo sapiens
ctgtcaggcaaggcaagagctcccagtgagggccagaggaaatgcaggagatcactgaggcctgctctttacctgctgctgctgtcagacaccagacaagrtcaagggtgcagcagacaggaggaccccaaagaaggccctcctcatccctccccatcccatcctccaagacattcagggaaatgttcaaacagaactggc

SEQ ID NO: 117301 - DNA, 201 bp, Homo sapiens
ccctcctcatccctccccatcccatcctccaagacattcagggaaatgttcaaacagaactggcctggtggctctgatactcccacggcagcctggctgtygggtgttattatcccattttccaggtagagtttaactaacgtaatcagaatgtaaataacatgctcaacttaatttcaataactaacttgcccaatgtca

SEQ ID NO: 117302 - DNA, 201 bp, Homo sapiens
tggtggtgcactcctgtgatcccagctactggggaggctgggatgggaggatcgcttgagtctgggaggttgagaatgcagtaagccgtgatttcatcacygtactccagcctgggaaatacagcaatactctgcctcaaaaaaaaaaaaaaaaaaaaagaaggccaggcacggtggctcacacctataatcccaggactt

SEQ ID NO: 117303 - DNA, 201 bp, Homo sapiens
aggctgctctatgttaagcccctgcctcactaggcaggctttgtcccaccttcccaacggggcagaaggttgtcaagcgcctcatctgggatgggaacacmaggctggggcactcagactggttgcgggatgtgcccaggtcccagagtgagtgttagggaccggtgacaaacatgggtccacgtccagcccaagggcgtg

SEQ ID NO: 117304 - DNA, 201 bp, Homo sapiens
gggcactcagactggttgcgggatgtgcccaggtcccagagtgagtgttagggaccggtgacaaacatgggtccacgtccagcccaagggcgtgggcccayatcacacaacctcgcctaagccccttgcctggtgggatggaaactcgctcaactaaaaaaaacttctagagcccaagaagatccttgttcctgcccagcg

SEQ ID NO: 117305 - DNA, 201 bp, Homo sapiens
tccctgcaatttagctcttacatataaatgttaggcctttgttactcaaactgtgattcctgaactggtagcatccacgtcaactgcaagctccttagaartgcagaatcttggccccacgcggacctcctgaattggagcccgcattttaactttgactttttgtttagttttgtttgtttttgagactgagattcactc

SEQ ID NO: 117306 - DNA, 201 bp, Homo sapiens
ccagctcaaaaaaacaaacaaacaaacaaacaaaaaaccaaaaagcctggcacctcccacctcccctctccttgctccctctcttgccatgtgacgccgtrtgacgcacctgctcccccttcacctctcgccatggctaccagctccctgaggctctcgagccgatgctggtgccatgcttgtatggcctgcagaaccgtg

SEQ ID NO: 117307 - DNA, 201 bp, Homo sapiens
attccagacatcctccatgcagcccagtacagtggttgatttgtaaacattaagtaggacataccgtgataataatgaccggtacccaagcaccagatacyatgctggaggccttatgtatttgttctcgtttattcctccccaccagcctaggaggtaggaactattaccatccccatcttaagtgaggaagttgaggct

SEQ ID NO: 117308 - DNA, 201 bp, Homo sapiens
tagaaaatgtaagacaatatttccataaccttggtatagggaggcatttcttaaacaagatgagccttgaagcttgaagcatttgactatattaaaattayagaaaaaaaacccctgaacatcaaagggtaccataaacaagtaaaaagacaagctctagaccagcacaaaagtctagcaatgcaaattagtaaccaggat

SEQ ID NO: 117309 - DNA, 201 bp, Homo sapiens
ctacaggtgcgtgccaccacgactggctaattttgttgctgttgtttgtttgtttttgtaaagacagggtctcactgtgttgctcaggctgttcttgaacygctgggctcacacaatcttcctgtcttggcctcccaaagtgctggaattacaggtgtgagccactgtgcctggcccaagagattgtttttattgtgattg

SEQ ID NO: 117310 - DNA, 201 bp, Homo sapiens
gctcactgcaacctcttcctcccgagttctagaggttcttgttcctcagcctcccgagtagctgggattacaggctactcaagcacgcaccaccacgcctsgctaatttttgtatttttagtagagacagggtttcaccatgttggccagggtggtctcaactccttagcctcatgtgatccacctgcctcgtcctcccaa

SEQ ID NO: 117311 - DNA, 201 bp, Homo sapiens
tagagatgcggtttctccatgttggtctcgaactctcaacctcaggtgatccgcctgccttggcctcccaaaattctgggattacaagcgtgagccactgygcccggccttacttttgttctttaaggaatctccacactgttttccatggttatattagtttagtataactatgttttccatggttatactagtttacat

SEQ ID NO: 117312 - DNA, 201 bp, Homo sapiens
gaggaagtcacagggagaaggtggccggccgatcccctgccgtgagaaggaagacacagggcaaacgagcctatgcttttcatctcccagttttcgtgccyctttcaataggggtctaccccgtcggcacccctaaatcccccaccccatcacccactacagacttttagtgcattttttatttagaattcattgatccca

SEQ ID NO: 117313 - DNA, 201 bp, Homo sapiens
ttttatttagaattcattgatcccacaataatcaattaaaataatattatttattcaaattattcaaatattattcaaattattttaatggttggaagtastcttcctgcttatgtattgatttattggctagtatttgggtgcacagaaccactcccgctaacagctctccctggagtggccatggtatgccccattctc

SEQ ID NO: 117314 - DNA, 201 bp, Homo sapiens
ataacattcttggccaggcgtggtggctcacgcctgtaatctcagcactttaggaggccaaagtaggaggatcccttgagcccaggagtttcagacaagcrtgggcaacgtagtgagaccatctctacaaacaatttacaagttagccaggtgcagttgcatgcacctgtagtcccagctactcagggggctgagggggga

SEQ ID NO: 117315 - DNA, 201 bp, Homo sapiens
atacatacatatatatataaaataaaatccttaaagcctggcacaagatgacttctcaacaaatgtgggggcgagacgcggtggctcacacctgtaatccyggcactttgggagaccgaggtgggcgggtcatctgaggtcaggagttagagaccagcctggacaacatggtgaaaccctgtctctactaaaaatacaaaa

SEQ ID NO: 117316 - DNA, 201 bp, Homo sapiens
ctgggtggttcttttgctggtcttgtctgaggtcactcacagcctcagttgtctgtcatcaggtggcttgagagggactagtctgaacaattagacttacttttttttttttttaagttgaatttactttaaatgcagaaaccaaagcatttcacagaaacctccagctgaaaaatcagaaggtacggccatcctgagccc

SEQ ID NO: 117317 - DNA, 201 bp, Homo sapiens
aggcagagaagaccatcacaaaaggctacttactgcgtggcttcatttatatgtgtccagaactggcacattcctagagacgaacagcaggttactggttsccaaaggctggggagagggggaatgagagtgactattcatgggtacgggatttcctttgagggtaacaaaaaaataccttttggaattcgatcaatgaac

SEQ ID NO: 117318 - DNA, 201 bp, Homo sapiens
ggcagagaagaccatcacaaaaggctacttactgcgtggcttcatttatatgtgtccagaactggcacattcctagagacgaacagcaggttactggttgscaaaggctggggagagggggaatgagagtgactattcatgggtacgggatttcctttgagggtaacaaaaaaataccttttggaattcgatcaatgaacg

SEQ ID NO: 117319 - DNA, 201 bp, Homo sapiens
gaatcacttgaggcagaggttgcagtgaggtggtgtcacgccactgcactccagcctgggcaacagagcaagactccatctcaaaaaaacaaaacaaaacmaaacaaaaaacaaacaaaaaggaatagaagatagggaacataaaagagaaacaatcaacactgcggtagctacgttgctggtgatattgaggaaatgagg

SEQ ID NO: 117320 - DNA, 201 bp, Homo sapiens
agacaaagtgagaaaacagcatgctgtaccggggtagggacagcgactggggcagtctctctacctgggcctcagtttcgccaactgtgaaatcaaggcayctgccccatcggaccagatgtggagcctgtgaccagatgtcatctttcctctcttcagtctcacagctaattctaggaaggtgctggcactaggaagagc

SEQ ID NO: 117321 - DNA, 201 bp, Homo sapiens
agagatcgagaccatcctggccaacatggtgagacccccgtctctacaaaaaatataaaaattagccagggtggtgcgcacctgtggtcccagctactcgrgaggctgaggcagaagaattgcttgaacctgagaggcagaggttgcagtgagccgagatcatgccaatgcactccagcctgggcaacagaggaagattcc

SEQ ID NO: 117322 - DNA, 201 bp, Homo sapiens
acagctaattctaggaaggtgctggcactaggaagagctctggcttagccagccacctctcactgtgcccacgccacttcccctgggagactccttttctyacctgtgaaatgcggagactaatgacaaagctactgtctctacccctgcttcccttacacactggctgcggctccctcagaagatcacaaaggtgaggtg

SEQ ID NO: 117323 - DNA, 201 bp, Homo sapiens
aacctgagaggcagaggttgcagtgagccgagatcatgccaatgcactccagcctgggcaacagaggaagattccagctcaaaaaaacaaacaaacaaacraacaaaaaaccaaaaagcctggcacctcccacctcccctctccttgctccctctcttgccatgtgacgccgtgtgacgcacctgctcccccttcacctct

SEQ ID NO: 117324 - DNA, 201 bp, Homo sapiens
ctgggagactccttttctcacctgtgaaatgcggagactaatgacaaagctactgtctctacccctgcttcccttacacactggctgcggctccctcagargatcacaaaggtgaggtggatggagccctagcttcttccctgagctggctgcctggaaaaagccaccccggccaggtaactcaagggactaggaaaatcc

SEQ ID NO: 117325 - DNA, 201 bp, Homo sapiens
atcatgccaatgcactccagcctgggcaacagaggaagattccagctcaaaaaaacaaacaaacaaacaaacaaaaaaccaaaaagcctggcacctcccayctcccctctccttgctccctctcttgccatgtgacgccgtgtgacgcacctgctcccccttcacctctcgccatggctaccagctccctgaggctctcga

SEQ ID NO: 117326 - DNA, 201 bp, Homo sapiens
cagctttcagatgaggaaactgagagctggatcacaccactggttaaatggcctcatatgaaatgtctggatcaaaaagcctggccagccctcctaatcamcctgcccgatcactgtcctgttttagggaaggactgacctgggcaggcaggggatttaacgcctccacctccctgcaagacgtaatggggaaacagtgtg

SEQ ID NO: 117327 - DNA, 201 bp, Homo sapiens
tccttggccttcggccctgtgccctgctccagcctctgtgttggttgtcacatctctctctgaccctcccgcctccttgataaggacttttgtgactgccrtgggccctgatagcgtttggatgtctattccctccaaatctcatgttgaaatgtggtccccagtgttggcgatggggccggtgggaggtgtttgggtcat

SEQ ID NO: 117328 - DNA, 201 bp, Homo sapiens
gtatcacgggttgttacaactgtggggagcagtgggccagcacctggcaggtggaggccaacctagaataaaagctcctcctgctccctgtgtacctatgycacacgcactcatttaggagaaagggtagatggctccaccccacatggttaatacgggtgatttccaggtggtgggattctgggaggatttttttcttct

SEQ ID NO: 117329 - DNA, 201 bp, Homo sapiens
tcatcgtccaggaggcccggtgtccaatgctgggctggaatcaaggcgtcagcagggctgcttcctcctggaggctctcgggagaatcttttccttgctcyttgcagcttctggagctgctgcatccttggccttcggccctgtgccctgctccagcctctgtgttggttgtcacatctctctctgaccctcccgcctcct

SEQ ID NO: 117330 - DNA, 201 bp, Homo sapiens
gccacaggggagcaagccctggctccaactggggaaggtagccctggaaaaccactgactggcgggggggtcggaggggttccaagcagaaagaagaggcrtgtgccaaaggtcagaggcatggggaagctgaggccagaagccagacagggcgggacgctcgctccacagtagactttgaacttcgtgctcactgtgatc

SEQ ID NO: 117331 - DNA, 201 bp, Homo sapiens
tattgggaaattgttggtggatgttaagtaggaagtaatgtgatcagatttgcattttagaaaaatcagtctggctgcagagtggatggtggaagggagcrgggcaaggctggagccagggaggacagttaggagactgctggggccatcagggtgtacgtgtgtgttggggagggggcagtggtggtctgagtcatccag

SEQ ID NO: 117332 - DNA, 201 bp, Homo sapiens
actggcgggggggtcggaggggttccaagcagaaagaagaggcgtgtgccaaaggtcagaggcatggggaagctgaggccagaagccagacagggcgggasgctcgctccacagtagactttgaacttcgtgctcactgtgatccagtcctcaccaccggctgtgacagagcgctctgcagggtcaggtggtctcaggcga

SEQ ID NO: 117333 - DNA, 201 bp, Homo sapiens
ctgggccccccatggttgggctctggctgtcactcagagggatgaggctggagtgccaggccccagccagatcaggaaaggcctcagaactcacattaagragcttgaatttcatcccgagtttattgggaaattgttggtggatgttaagtaggaagtaatgtgatcagatttgcattttagaaaaatcagtctggctgc

SEQ ID NO: 117334 - DNA, 201 bp, Homo sapiens
tgatccagtcctcaccaccggctgtgacagagcgctctgcagggtcaggtggtctcaggcgaggaggctgaggtgaccaccccaggttcaacgagggcagrtgagaagcgatcctctgccacggctcctccggagatgggtctgcaggaagctggcccaggaagctcccggaaggggccccagtgcagtcagggtagaccc

SEQ ID NO: 117335 - DNA, 201 bp, Homo sapiens
cgcaggggcatcgtgaggattagatgaatgtacatctgcacaaagggctctagtagtgtctggcataaaacaggttctgggtaagtgctcactatccttaytgttgccttgctggtgattcggcccttgctgccagggttcctgtgctcacaccccaccagggactcgtcgtgacatctggaggccactggctctggagtt

SEQ ID NO: 117336 - DNA, 201 bp, Homo sapiens
gaagtggaggggtagagatctgggcttgcgcctccctctccgtgggtccctctccccttccaacaggacggacctcccaactaggcaagctgttcattcawccaaactatgtctgttgaggggcagtgcctcagtgtccccatcggtaaaatggagagagtaacagtatctaactgggttgtacggatcactgataaaacc

SEQ ID NO: 117337 - DNA, 201 bp, Homo sapiens
ttctttaagagttgagatctcactctgttgcccaggctggagtgcggtggttcaagtgatcctcccggcttagtctcctgagtagctgggactacaggtgygtgccaccacgactggctaattttgttgctgttgtttgtttgtttttgtaaagacagggtctcactgtgttgctcaggctgttcttgaactgctgggctc

SEQ ID NO: 117338 - DNA, 201 bp, Homo sapiens
acacactggggcctgtcagcagcggggtgtgaggtgagggaaagcatcaggataaatggctaatgcatgtggggggctcaatacctaggtgatgggttgayaagtgcaggaaaccaccatggcacacgtttacctatgtaataaacctgaacattctgcgcatgtatcccggaacttaaaataaaataaaattttaaaaag

SEQ ID NO: 117339 - DNA, 201 bp, Homo sapiens
aaaccaaatactacgtgttcttgcttataagtgggagctgaacattgagaacacatggacacagggaggggaacaacacacactggggcctgtcagcagcrgggtgtgaggtgagggaaagcatcaggataaatggctaatgcatgtggggggctcaatacctaggtgatgggttgataagtgcaggaaaccaccatggca

SEQ ID NO: 117340 - DNA, 201 bp, Homo sapiens
tgctgagtaagggttgaaagccaggccattgggttttgtagtggcctaggaggggaagacagacaaatcaaagaccatgcgccacctcaaggaagcccccmgtgtgttatttttgatgaaagtagctgatgctcagtgctggtcaggactggtgagtgaggcaggaccaggcggaccctgtgtcagtatcgagctgactgt

SEQ ID NO: 117341 - DNA, 201 bp, Homo sapiens
tattcactggttctaggagtagggtatttggggaggagtagatgtatttgtgggggcaggtggcaaagatcaggaatctcaaggtttttttcctgcagagrtgagaactctgacagggaggcccctgagcgcagctgggctcttctgtctgtgtctctggggtccactggagcagaggaagctttgttggtgccggtctca

SEQ ID NO: 117342 - DNA, 201 bp, Homo sapiens
cccacctctagcccaagggagcgtgcactgcctttccccataaatagtttaggagtacacaactgtagatggttgaggggtcttcccacctcctggatccrtgctctgggatgcagctggggaagatgcaggctgggctggcagtggcgactgtgcggaagtggcgactgtgcagaagggggtagtttgtagctatcagca

SEQ ID NO: 117343 - DNA, 201 bp, Homo sapiens
ttatcccattttccaggtagagtttaactaacgtaatcagaatgtaaataacatgctcaacttaatttcaataactaacttgcccaatgtcacacatagtragttctctgaagaactgtgaatccacagttcaggcaaagcctgaacttaagaaggtctgactccaaagcctgacgtcacctgccctgggaagccctctct

SEQ ID NO: 117344 - DNA, 201 bp, Homo sapiens
ttcatatggctgaataacattccattgatgggcagactgtatttcgcttatccactgatgcatattttggttgtgtgggcacatttgggttgtgaatagcrctgctatgagcatttgaatacaagtatttgagtcttcacttctcttgggtctatacgtccaggggtggaactcctgggtcatatgttaactccatgttta

SEQ ID NO: 117345 - DNA, 201 bp, Homo sapiens
attgtgcgaggcagccttcttgggacagtgagtgttagggactggtaacaaacgtacggggtccagtctggggacagagaacaggaaaaggaagcaagcayagcaggacacagcgtcagacacggggtgcatcctgcccctatcaaggacgcaacctggtggtagtgaaagtccagctggcatcccctccctccacagcag

SEQ ID NO: 117346 - DNA, 201 bp, Homo sapiens
gaacccttggctgttcaacaactgagccagtttcagaaaaggtctgtcccctctccagagacacaggccggactgtgacatcattatgtgtgtggatgttrgaaatggccttgaatcccagctctgccctctgcattgagccatgagtttggcaaagtgacttctcagtgcctcagttttctgtgctgtaaaatggacaga

SEQ ID NO: 117347 - DNA, 201 bp, Homo sapiens
ttctccacatcctcgccaacatttattttctgccttattaaaattcaaaagaattatagccatcctagagtagagagtgtttatttttatttatttatttwttttgagacagggtcttgctctattgcccaggctgaaatgcagtggtgtgatcatggctctctgtagccttgacctcctggcatcaagcaatcctcccac

SEQ ID NO: 117348 - DNA, 201 bp, Homo sapiens
ctcgtcgtgacatctggaggccactggctctggagttaggctgcctgggttccagctgtgtaaccttgaactcttgaggtctccatttcccctgctaacgyctcacggggctgatgagaggacgaaatgcgcacacgcctaaaggtctgagaatgactggaggaaatggtcatgattaccccgcggtcccctccactcacc

SEQ ID NO: 117349 - DNA, 201 bp, Homo sapiens
atagccatcctagagtagagagtgtttatttttatttatttattttttttgagacagggtcttgctctattgcccaggctgaaatgcagtggtgtgatcayggctctctgtagccttgacctcctggcatcaagcaatcctcccacctcagcctcccaagtagctgggactacatgcatgtgccaccacacttggctaatt

SEQ ID NO: 117350 - DNA, 201 bp, Homo sapiens
gctgagataccacttggccccacctctacagatccagttgaggaaatgggtttttcaagtccagtgcccttggtagagaaggatcgttggtgtcaatggcygggggccggtggaagcagctgacccacccttcagaggaaacccaatcttccccttggcccagtaaccacggagacaaccccaggagacaactcacacccc

SEQ ID NO: 117351 - DNA, 201 bp, Homo sapiens
gggggatcacttgagcctggaagatagaggctgcagcgagttgtaatcaagctgtgatcatgccactatgctccagtgacagaatgagaccctctctcaaaaaacaaaacaaaacaaaacaaaacaaaacaaaaaaaactatgaggtaggcgctattattttgcagccgaggacactgaaatgaggtctagaggtgtcgag

SEQ ID NO: 117352 - DNA, 201 bp, Homo sapiens
tacctgttggatgctaggagcatccgcaagtcataacaaccaaaaatttctctggaccttgtagctgggactacaggcgtccaccgccactcccggctactttttttttttttttttttttttgtattttttagtagagacggggtttcactgtgttagccagaacggtcttgatctcctgacctcatgatccgcccacct

SEQ ID NO: 117353 - DNA, 201 bp, Homo sapiens
ggggatcacttgagcctggaagatagaggctgcagcgagttgtaatcaagctgtgatcatgccactatgctccagtgacagaatgagaccctctctcaaaaaacaaaacaaaacaaaacaaaacaaaacaaaaaaaactatgaggtaggcgctattattttgcagccgaggacactgaaatgaggtctagaggtgtcgagt

SEQ ID NO: 117354 - DNA, 201 bp, Homo sapiens
tgttgaggggcagtgcctcagtgtccccatcggtaaaatggagagagtaacagtatctaactgggttgtacggatcactgataaaacctgcatagcatagmccctggcaagaggaaacacactaatcacacgagtggccgctgcacggtcactactgtgactaactgcctggtcctggcgactcggagatccctgcactcc

SEQ ID NO: 117355 - DNA, 201 bp, Homo sapiens
gggatcacttgagcctggaagatagaggctgcagcgagttgtaatcaagctgtgatcatgccactatgctccagtgacagaatgagaccctctctcaaaaaacaaaacaaaacaaaacaaaacaaaacaaaaaaaactatgaggtaggcgctattattttgcagccgaggacactgaaatgaggtctagaggtgtcgagta

SEQ ID NO: 117356 - DNA, 201 bp, Homo sapiens
ctgtctcctacaaagaagtccttcctgaaactccccacccccatgatggcgtctcttcctccgtccaaacacaggacaagacataaacctctctaagcaaygtgctttgttcaatggtgtatcataattgtaatacccccatttaactatgagtcccttgggagggaagagtatgtctgactttccaagtgccatgcctga

SEQ ID NO: 117357 - DNA, 201 bp, Homo sapiens
ggatcacttgagcctggaagatagaggctgcagcgagttgtaatcaagctgtgatcatgccactatgctccagtgacagaatgagaccctctctcaaaaaacaaaacaaaacaaaacaaaacaaaacaaaaaaaactatgaggtaggcgctattattttgcagccgaggacactgaaatgaggtctagaggtgtcgagtaa

SEQ ID NO: 117358 - DNA, 201 bp, Homo sapiens
ctttctagggaagcagctctgctcttggcaccctggagacctcaagatctgctgctgcatcccaaggatgctggggtgggagtagtcatcgcttccatgcwctcctcttcctcccagacgcacatgtaaaccatgttcccaagtcttcccctgcactccgtgtggccgtgtgtctgagttctagccaaccaagcggccaga

SEQ ID NO: 117359 - DNA, 201 bp, Homo sapiens
cacagatgatctcctccctcagggcctttgcaattgctgttccctctacctggaacgctcttccccctggaagtcctatcacccgcttccctgaccactawgtacaaagcagcccaccactcgccccaccctgcttgcttttctccacgatccctgtcatcggattttataattacttgctcttaacttagttgtttgtcc

SEQ ID NO: 117360 - DNA, 201 bp, Homo sapiens
gatcacttgagcctggaagatagaggctgcagcgagttgtaatcaagctgtgatcatgccactatgctccagtgacagaatgagaccctctctcaaaaaacaaaacaaaacaaaacaaaacaaaacaaaaaaaactatgaggtaggcgctattattttgcagccgaggacactgaaatgaggtctagaggtgtcgagtaat

SEQ ID NO: 117361 - DNA, 201 bp, Homo sapiens
aggctcctgttttcttccgagtgcctagaacggtgacacttaactgctgaatggaggcatgaaagcaccgccaggcctcacctcatttaccctgacatcartgctaagaggaagtttctctgatcctcgctttacagataaggacacaggctaggggacctgcccaaggtcaccacctgggacactgcagaggcaggattc

SEQ ID NO: 117362 - DNA, 201 bp, Homo sapiens
ctgcagcgagttgtaatcaagctgtgatcatgccactatgctccagtgacagaatgagaccctctctcaaaaaacaaaacaaaacaaaacaaaacaaaacaaaaaaaactatgaggtaggcgctattattttgcagccgaggacactgaaatgaggtctagaggtgtcgagtaatttacccaagattccctctgtcaccac

SEQ ID NO: 117363 - DNA, 201 bp, Homo sapiens
atgctccagtgacagaatgagaccctctctcaaaaaacaaaacaaaacaaaacaaaacaaaacaaaaaaaactatgaggtaggcgctattattttgcagcygaggacactgaaatgaggtctagaggtgtcgagtaatttacccaagattccctctgtcaccacatccctgaatgtagattaaaaaaaaaaaaaattcctg

SEQ ID NO: 117364 - DNA, 201 bp, Homo sapiens
atggatatccggaactttttaggggaatgctcccaactttaaaggcagacaacttactgaagctttaagaaaaaaaaaaaaaaaaaaaaccactgtgtggsccaagtaaaacacgtcagcagacttgacttggcccatgggtcatccgcttgcagcttctgctcaatgcgtccctgcgtccccgcgtcccccaaaggcagg

SEQ ID NO: 117365 - DNA, 201 bp, Homo sapiens
ctgggcaacacggtaagactccatctctaaaaaaaaaaaaaaaattggaaggaaaaaaagaaataaaacaaaatgcagattctggtctggaaggtctgggrcggggctgagactgggcatttctcacaagctcctggggctgctgctggtctgagaaacgtacttggaggcacaaggaacaaagccaccatcctccaccca

SEQ ID NO: 117366 - DNA, 201 bp, Homo sapiens
aaggaaggaaacaacagacaccagttcctacttgagggtggagggtgggagaagggtgaggattgaaaaactacctgtcacttattatgctaattacctgrgtgacaaaaatcatctgtacaccaaacctccaagacacaaaatttacccatgtaacaaacttgcacatgtaccccttgaacctaaaataaaagttacaaa

SEQ ID NO: 117367 - DNA, 201 bp, Homo sapiens
agtaatgcagaagtagaaaaccaaatactgcatgttcttatgagtgggagctaaacattgagtacacatggacataaggaaggaaacaacagacaccagtkcctacttgagggtggagggtgggagaagggtgaggattgaaaaactacctgtcacttattatgctaattacctgagtgacaaaaatcatctgtacaccaa

SEQ ID NO: 117368 - DNA, 201 bp, Homo sapiens
gctattatcctaagcgaagtaatgcagaagtagaaaaccaaatactgcatgttcttatgagtgggagctaaacattgagtacacatggacataaggaaggraacaacagacaccagttcctacttgagggtggagggtgggagaagggtgaggattgaaaaactacctgtcacttattatgctaattacctgagtgacaaa

SEQ ID NO: 117369 - DNA, 201 bp, Homo sapiens
aaacactgtctcaaaaaataataataataaataataataataataatagctaagacccatatagggctcaccatgggccagccactttagtaagcaccttrcatgtatttaatcctacaaaatgattaacttaattaatcatttaaattaatccttacaaaaacttgatgaagtttatcttgtccgttgtgcagatgagga

SEQ ID NO: 117370 - DNA, 201 bp, Homo sapiens
ttctgatgtagagctacgaaaaggaagtaacacatacggagcgcctgttctgagctaagcactctcactgcaccacttagaagagcctcattaatcctccrgcaactctggcaggtgagcaccatggtctccatttttacagagaaggaagcaaactcaggaaggagaactgccttgcccaaggtcacagcgctaataatt

SEQ ID NO: 117371 - DNA, 201 bp, Homo sapiens
cagatcacctgaggtcaggagttcgagaaacatacagtgctaggtggtgaaaccccacctctattaaaaaaattaaaaaattagccaagtgtggtggtgcrtgcctataatcccagctacccaggaggctgaggcaggagaattgctggaacccaggaggtggaggctgcggtgagttgagatcccaccacagcactccag

SEQ ID NO: 117372 - DNA, 201 bp, Homo sapiens
agttgagatcccaccacagcactccagcttgggtgacagagggagattccgtctcaaaaaaaaaaaaaaaaaaaaaattagcccagcttggtggcggatgyctgtaattccagctactcagaaggctgaagtatgagaattgcttgaacccgggaggcggaagttgcagtgagctgagatggcaccaccgcactccagcct

SEQ ID NO: 117373 - DNA, 201 bp, Homo sapiens
gctcaggtacttcaataggcaaactcatagagacagcaagtagaacagcagtgaccaggggctgggacgaggagagaatgggtacagagtttgtgctgggratgatgaaaaagttctgggtgtagacagtggtgactgtgaatgtatttaatgccactgaattgtacacttacaaatggataaaatgataagtattgtgtt

SEQ ID NO: 117374 - DNA, 201 bp, Homo sapiens
cgtgggatctgtgactaccctggaggacatagattttaattcttaggtagaaaccaagccatgtggatgtgtaactcttagctcagcaagtgacacacagyaggcatgcagtaagcctgtgctaaacaaagtccaagttcagaaaacaccagactaaagaaaccaatgagaatgaaggtggcttctcctttcccatccata

SEQ ID NO: 117375 - DNA, 201 bp, Homo sapiens
ggtgcacaaaccccaatgcactgcactgtaccctccaagcgggcagggttcattctggttttgctcaccactgtatccagggtcgtgttcaatagtcagcmtgctgaaaaaaggaaagcctgatctataaagtttgacaatttccctggtgcaaatacaaccaccatggccaattattatacaagctaccaacatgtgtcc

SEQ ID NO: 117376 - DNA, 201 bp, Homo sapiens
agggtcgtgttcaatagtcagcctgctgaaaaaaggaaagcctgatctataaagtttgacaatttccctggtgcaaatacaaccaccatggccaattattrtacaagctaccaacatgtgtccttggacatggagttaggaagacatgcaccccacggcagagtttccaccacacagatacaatacaccagcaaggggcca

SEQ ID NO: 117377 - DNA, 201 bp, Homo sapiens
tttccctggtgcaaatacaaccaccatggccaattattatacaagctaccaacatgtgtccttggacatggagttaggaagacatgcaccccacggcagastttccaccacacagatacaatacaccagcaaggggccagattcagccatggactgcaaagcctaaaatattcactctctggcccctttacagaaaaagtt

SEQ ID NO: 117378 - DNA, 201 bp, Homo sapiens
tgcaaaatttctgaaaaattaacaatcagctgtcatgagccattacagatcggcttcaggacaccgctgcttgtttctccagggcatgtcacaaagtaaaygcaccatgattatctgttgaatggctggatctagctgagacgccagtgtcctaactcctgagctacattaccctgcttcattccttcttttatttgattc

SEQ ID NO: 117379 - DNA, 201 bp, Homo sapiens
acttttaaaagcagagctgagataccacttggccccacctctacagatccagttgaggaaatgggtttttcaagtccagtgcccttggtagagaaggatcsttggtgtcaatggccgggggccggtggaagcagctgacccacccttcagaggaaacccaatcttccccttggcccagtaaccacggagacaaccccagga

SEQ ID NO: 117380 - DNA, 201 bp, Homo sapiens
tggcaggcgcctgtagtcccagctactcgggaggctgaggcaggagaatagcgtgaaccggggaggcggtgtttgcagtgagctgagatcgcaccactgcmctccagcctgggcgacagagcgagactccatctcaaaaaaaaaaaaaaaaaagattatttgaatgaacaaaggcactaaaaaagagctctagctgggatt

SEQ ID NO: 117381 - DNA, 201 bp, Homo sapiens
attacagatcggcttcaggacaccgctgcttgtttctccagggcatgtcacaaagtaaatgcaccatgattatctgttgaatggctggatctagctgagasgccagtgtcctaactcctgagctacattaccctgcttcattccttcttttatttgattccattaaacacctgtttattagcaccgaattgagtggcaggg

SEQ ID NO: 117382 - DNA, 201 bp, Homo sapiens
agccttttgtgacagtcttctttcccttcccatggcattttgcaggtttatccctattgtcacacgggtcagcaccccattccttcatatggctgaataayattccattgatgggcagactgtatttcgcttatccactgatgcatattttggttgtgtgggcacatttgggttgtgaatagcgctgctatgagcatttga

SEQ ID NO: 117383 - DNA, 201 bp, Homo sapiens
ttacagatgtgagccaccactcccatccgtataatgacttcttttcctctgggtagatatccaggagcggaattgctggatcaaatggtagatctactttyagttctttttttttgagatggagttttgctcttgttgcccaggctggagtgcaatggcgtgatctcagctcactgcaacctcctcctggattcaagtgat

SEQ ID NO: 117384 - DNA, 201 bp, Homo sapiens
gtccttatgaaaagggaaattttggacacagagacagaaatgcatagaaggaaacgactgacaggctcaggggggatgccatttccaggccagggaatggytgaggctacctactggaacccaggggaggcgtgaaacagatcctctctcgctgcccgcagaaagaagcagtgctgccggcacctgactgcagtcttcagc

SEQ ID NO: 117385 - DNA, 201 bp, Homo sapiens
gatgtgagccaccactcccatccgtataatgacttcttttcctctgggtagatatccaggagcggaattgctggatcaaatggtagatctactttcagttstttttttttgagatggagttttgctcttgttgcccaggctggagtgcaatggcgtgatctcagctcactgcaacctcctcctggattcaagtgattctcc

SEQ ID NO: 117386 - DNA, 201 bp, Homo sapiens
caggagagcattcctgaacctcatttataacaggaatcaggtactagcgtaagggaacagacactccgtactgatggcgtttaatgtgctgatcaaataayaaaatgtgctcattctcccggtgtaaaaagaggagtcgtgttttgtgaagttggtgaacatcctccttcctcttctgggctgatgtgaagccagcccatt

SEQ ID NO: 117387 - DNA, 201 bp, Homo sapiens
tttttgttttagtagagatgcggtttctccatgttggtctcgaactctcaacctcaggtgatccgcctgccttggcctcccaaaattctgggattacaagygtgagccactgcgcccggccttacttttgttctttaaggaatctccacactgttttccatggttatattagtttagtataactatgttttccatggttat

SEQ ID NO: 117388 - DNA, 201 bp, Homo sapiens
gcgcgcctgtggtcccagctgcttggaaggtggagacaggaggatggcttgagcctgggaggtcgaggctgcagggagccatgattgtgctattgcactcyagcctgggtgacagatcaagaccctgtctcaaaaacaaaaaatgattctcgacctcactaaaaagtattagggggtacaaattaaacgacagtgatactc

SEQ ID NO: 117389 - DNA, 201 bp, Homo sapiens
tctcactctgttgcccaggctggagtgcagtgacgtgatctcaactcactgcaacctccacctcccaggttcaagcgattctcctgcctcagcctccccartagctgggattacagacacccaccaccacatccagctagtttttgtatttttagtagagatgaggtttcaccgtgttggccagactggtctcaaactcct

SEQ ID NO: 117390 - DNA, 201 bp, Homo sapiens
caccatgttggccagggtggtctcaactccttagcctcatgtgatccacctgcctcgtcctcccaaagtgctgagattacaggtgtgagccaccacgcccrgccccctgcccacaccttcgaccaaaacggtgagaaaagaaatttccggtgtttaagacacctagtctgtggtattttattatggcagctcttgtcaact

SEQ ID NO: 117391 - DNA, 201 bp, Homo sapiens
tagctgggattacagacacccaccaccacatccagctagtttttgtatttttagtagagatgaggtttcaccgtgttggccagactggtctcaaactcctracctcaaatgatctacccgcctcagtctcccaaactgctaggattacagatgtaagccactgcgcccagcctcttttcctttcgaaatcaatgttatttt

SEQ ID NO: 117392 - DNA, 201 bp, Homo sapiens
tgggctttgtcatttaagaatctcttaaggcactgctaccagggctattcttcactatttattgggaggcagccaggtttgcaaaaaaaaaaaaaaaaaamcaaaacaaaaaaaaaacaaaagaaaaaacacacaacagaagcaaaagaatggaagctttacggggcaaggagctgcctgtgtgtccatcacctcgcacat

SEQ ID NO: 117393 - DNA, 201 bp, Homo sapiens
tcctgacctcaggtgatccacccgcctcggcctcccaaagtgctgggattataggcgtgagccaccacgcacttttttttttttttttttttttttttttwaaaaagagatgcggtcttgctgtgtagcccgggctgccaggctggagtgcagtggctattcacaggtgtcattgagctgtaaagcctcgaattccttggc

SEQ ID NO: 117394 - DNA, 201 bp, Homo sapiens
aattttttaaacagataataacagctccacagagcaggaggaaggaaactgacaatcatagaacatgtaccaggtgcaagccactttactgggtgatttcyacagatgatctcctccctcagggcctttgcaattgctgttccctctacctggaacgctcttccccctggaagtcctatcacccgcttccctgaccactat

SEQ ID NO: 117395 - DNA, 201 bp, Homo sapiens
gccgggcgtggtggcacatgcctgtaatctcagctatttgggaggctgaggcaggagaattgcttgaacccgggaggcagaggttgcagtgagccgagacrgtgccattgcactccagcctgggtaataagagcgaaactctgtctcaaaagaaaaagaaaaagaaaaaaaaagaaaacgtggtacacatgcaccatggaa

SEQ ID NO: 117396 - DNA, 201 bp, Homo sapiens
gaacccgggaggcagaggttgcagtgagccgagacggtgccattgcactccagcctgggtaataagagcgaaactctgtctcaaaagaaaaagaaaaagaraaaaaaagaaaacgtggtacacatgcaccatggaatactatgccaccataaaaaacaacaaaatcaggcccggcgcggtggctcacacctgtaatcccag

SEQ ID NO: 117397 - DNA, 201 bp, Homo sapiens
tgtgcatgtgtgtatgcatatgtgtgtgcctatgtgtatgtacaccaatcataacactcccttttctttcccaagaaaggatttctttttgtactgatctyaggagtttcagggctacagcgaagagatcacatgaggaagtcaagaattgtgtttacttacaaactatatggaaccaatatttaatcattttctacttac

SEQ ID NO: 117398 - DNA, 201 bp, Homo sapiens
cgaaggtgttctagtggggctgtgtttggttcaccccacagcccagccctcagccgggcacctgacacccagaagaccctgagcgaaggtctggagcgagsgaactcacagggccctgctgtctgagccagggccacaggcacaacccctgcctttcccacaggtgacagcaaggacagctcaccgtgctgggtcactctg

SEQ ID NO: 117399 - DNA, 201 bp, Homo sapiens
agggccacaggcacaacccctgcctttcccacaggtgacagcaaggacagctcaccgtgctgggtcactctgcccagtcaccaccacaggcgaaatggtckagccagagaggccctctcacggttcagctgagccaggcccaaggtcagctcgctggggaatttctctcattcgttcattcaatcgatcatttcttattag

SEQ ID NO: 117400 - DNA, 201 bp, Homo sapiens
agtactctcagccctggttgcaaatccacctgggagattgattgtaattaaccaattagagcaggactgcctctaattggtctcaggtggagcccaaacamgggcgtttgtggaatctccccaggtggttctcatgttcaagcaaaggtgtaaagtgccaggccagagcctccaccgcagggctggtgtcctgggtgccca

SEQ ID NO: 117401 - DNA, 201 bp, Homo sapiens
ccaattagagcaggactgcctctaattggtctcaggtggagcccaaacacgggcgtttgtggaatctccccaggtggttctcatgttcaagcaaaggtgtraagtgccaggccagagcctccaccgcagggctggtgtcctgggtgcccaggacagtgggcggcagctggcaggtgccaggaaatgctgaatggctgcttc

SEQ ID NO: 117402 - DNA, 201 bp, Homo sapiens
ccgagattgcaccactgcactccagcctgggcaagacagccagaccctgtctcaaaattaaattaaaatttaaagggctacaggccactggaccatatgasctcgttatgaaaggtagaaaaaaatttaaacccacttgccacacctatgttatgccatgccgtgccaccaaagatgaatatactgcctcttttcatgtga

SEQ ID NO: 117403 - DNA, 201 bp, Homo sapiens
tcgcccttggtgtctacattgcttgttactcagcatcgggagtttagatgtcatctcccatcagttaggagggaggtcacccactcagacctaggtcatckgctctgaaataaagatgggctttgtcccattctgaaattccctaatccaaacatgaagtcatcccagccctgcctttggaagttccactcaggactgagc

SEQ ID NO: 117404 - DNA, 201 bp, Homo sapiens
gcgttttcaaagttctgctgggctttgtcatttaagaatctcttaaggcactgctaccagggctattcttcactatttattgggaggcagccaggtttgcaaaaaaaaaaaaaaaaaaacaaaacaaaaaaaaaacaaaagaaaaaacacacaacagaagcaaaagaatggaagctttacggggcaaggagctgcctgtgt

SEQ ID NO: 117405 - DNA, 201 bp, Homo sapiens
cgttttcaaagttctgctgggctttgtcatttaagaatctcttaaggcactgctaccagggctattcttcactatttattgggaggcagccaggtttgcaaaaaaaaaaaaaaaaaaacaaaacaaaaaaaaaacaaaagaaaaaacacacaacagaagcaaaagaatggaagctttacggggcaaggagctgcctgtgtg

SEQ ID NO: 117406 - DNA, 201 bp, Homo sapiens
gttttcaaagttctgctgggctttgtcatttaagaatctcttaaggcactgctaccagggctattcttcactatttattgggaggcagccaggtttgcaaaaaaaaaaaaaaaaaaacaaaacaaaaaaaaaacaaaagaaaaaacacacaacagaagcaaaagaatggaagctttacggggcaaggagctgcctgtgtgt

SEQ ID NO: 117407 - DNA, 201 bp, Homo sapiens
ccctggtttcaaggaagatgtttatttctccctctcagctggcagaggatgctgtggtgtcagccacctcctcatcagtcatcctgtgggtcacagtctcrggagatcatattgttcacactcgtgccctgacacgttcctcctcagatgccacttatggggtctagtaacaaactggcttctagccaactttatcagacc

SEQ ID NO: 117408 - DNA, 201 bp, Homo sapiens
aatgttatttttgtttggtttggttttgggggacttttttgaaacagtcttactctattgcccaggctagtgatatagcaaaactctgtctgcagtggtgygatcatggctcacttcagcctctacctcctgggcccaagcaatcctcccacctcagcctcccaagtagctgggaccacaggggcacaccaccacacctgg

SEQ ID NO: 117409 - DNA, 201 bp, Homo sapiens
atctctctgaacctcagactcctatctgtgaaatggagattgaattgtgatacaattgagctaagcagataatgcatgaaggtgctcaggacaagatgtcrgaagaagtcagttctcaatataatggtagggagaaatggcttctcaacccttgggctcctttcttgagctacagcatgaagttggaactgactccagcct

SEQ ID NO: 117410 - DNA, 201 bp, Homo sapiens
tccagcccctggccttcctgacaggctgcctctgcttctgtgtctggccccgggccccaataggccacttcagcccagttgcccagggtgaagtggtcacyatctgctggttttccacctctaaatgtcgggataaggggtctgaagggcctgtgatctctttttttttttttttttttttgagacagagtctcgctctgt

SEQ ID NO: 117411 - DNA, 201 bp, Homo sapiens
ggctgcctctgcttctgtgtctggccccgggccccaataggccacttcagcccagttgcccagggtgaagtggtcaccatctgctggttttccacctctawatgtcgggataaggggtctgaagggcctgtgatctctttttttttttttttttttttgagacagagtctcgctctgtcacccaggctggagtgcagtggc

SEQ ID NO: 117412 - DNA, 201 bp, Homo sapiens
cctagtagctgggactacaggcgtctgccaccatgcttggctaattttttttttttttgtattttttagtagagatggggtttcgccgtgttagccagaayggtctcaatctcctgacctcgtgatccgcctgcctcggcctcccagagtgctgggattacaggcgtgagccaccgcgcccggcatggcctgtgatttcta

SEQ ID NO: 117413 - DNA, 201 bp, Homo sapiens
gctggagcacagtggcaccatcttggctcacagcagcctctgcctcccgggttcaagcaattctcctgcctcagcctcccgagtagctgggattacagggstgcaccaccacacccggctaacttttgtatttttagtagagactgggtttcaccatgttggccaggctggtctcgaactcctgagctcaagtgatccacc

SEQ ID NO: 117414 - DNA, 201 bp, Homo sapiens
gctgaggcaggaagattgctggagcccacgagttcatgaccagcctgggcaatatagtgagaccccatctctacccccaaaaaaagaacccattttaaaasaatagattgacaagttttgacacatatatacacacatgtgaccatcacctcaatcaagacatggacctggaactttcccacagactcaaaaaataccttc

SEQ ID NO: 117415 - DNA, 201 bp, Homo sapiens
cgggtgtggtggtgggcatctgtagtcccagctactcgggaggctgaggcaggagaacggcgtgaacccgggaggcggagcttgcagtgagccgagattgmaccactgcactccagcctgggcgacagagggagactccatctcaaaaaaaaaaaaaaaaaaaaaaaaaaagaacaaaatcatgtcctttacagcaacatg

SEQ ID NO: 117416 - DNA, 201 bp, Homo sapiens
gggtgtggtggtgggcatctgtagtcccagctactcgggaggctgaggcaggagaacggcgtgaacccgggaggcggagcttgcagtgagccgagattgcrccactgcactccagcctgggcgacagagggagactccatctcaaaaaaaaaaaaaaaaaaaaaaaaaaagaacaaaatcatgtcctttacagcaacatgg

SEQ ID NO: 117417 - DNA, 201 bp, Homo sapiens
aagatgggctccgtcacgtaggttttcaataggagatccgttatcaccattgagagcagtcaacagggttaaagatggtgacagtcaacccctcacctccscacctgcgaagtgccaccccccatagacagggcgtccctctgtctcaggcactggtttctggctgagattcagttagcaactctccctcaccccaaagat

SEQ ID NO: 117418 - DNA, 201 bp, Homo sapiens
ataagaagatacagataaattaaaaagccaataataatcagttcaagaatattaattaggtacatactatagtctaaacactatgtacttagcttatttgrtcctcaaaataagagaaattctatagggcaatgacatagtgtcttcaacaaataaatggcaagaaaaaaatgtgaaagggggatagtattttggatgaaa

SEQ ID NO: 117419 - DNA, 201 bp, Homo sapiens
tctactaaaaaatacaaaaattagccaggtgtagtggcgcacactatagttccagctattcaggaggctgaggtaggagaatcgcttgaacctgggaggcrgaggttgcagtgagccaagattgtgccactgcactccagcctgggcaacacggtaagactccatctctaaaaaaaaaaaaaaaattggaaggaaaaaaag

SEQ ID NO: 117420 - DNA, 201 bp, Homo sapiens
gctgtaaaatggacagaatgatactaccttcttcctacggctgttgcaaggatgaattgagttaacacatgaagggctgaagatgggctccgtcacgtagkttttcaataggagatccgttatcaccattgagagcagtcaacagggttaaagatggtgacagtcaacccctcacctccgcacctgcgaagtgccaccccc

SEQ ID NO: 117421 - DNA, 201 bp, Homo sapiens
gaggtaggagaatcgcttgaacctgggaggcggaggttgcagtgagccaagattgtgccactgcactccagcctgggcaacacggtaagactccatctctaaaaaaaaaaaaaaaattggaaggaaaaaaagaaataaaacaaaatgcagattctggtctggaaggtctggggcggggctgagactgggcatttctcacaa

SEQ ID NO: 117422 - DNA, 201 bp, Homo sapiens
tgcactccagcctgggcaacaagagcgaaacactgtctcaaaaaataataataataaataataataataataatagctaagacccatatagggctcaccaygggccagccactttagtaagcaccttacatgtatttaatcctacaaaatgattaacttaattaatcatttaaattaatccttacaaaaacttgatgaagt

SEQ ID NO: 117423 - DNA, 201 bp, Homo sapiens
cccaaaggctaattaaatgagactccctgggttggggactgggctttggcattttttaaaagctctcagaagattctaaagtgctgctgagattgggaagbgctgtcttagagctgtgagtcacctgggaggcccccaaagctcacaggggctcgggcatcttggggcagactacgacatggccattgtagtttcctctag

SEQ ID NO: 117424 - DNA, 201 bp, Homo sapiens
ggtacctcagaacgtaaagtataataaaaataaataaatgaataatttaaacaaacaaaaacatgcacgggaagagaaataccaggttttatctggagagyggtgacacgtcccttgagagagaaaacctggatgtaaaagaaccccttgaaatcaggggtttccgctgtattctataatgttgtgtttcttggaaaggat

SEQ ID NO: 117425 - DNA, 201 bp, Homo sapiens
ctcagcgtctgtttagtgagcacctaccatgtgccagcctgatgccaggcacgaggaagctgtgtgatgaagggctcacatggtgtccatgtgtggggcawccgggtccctggcatttggcagcctctgatttgccacttgtgtttagcagccgtgggtacaaagtagggggcccagagtctgtgcagctgccctttaatc

SEQ ID NO: 117426 - DNA, 201 bp, Homo sapiens
ggatgacttgaggttaggagttcgagaccagcctggccaacatggtgaaaccccatctccactaaaaatataaaaaaaattggctgggcgcggtggctcayacctgtaatctcagcactttgggaggccaaggcgggcggatcacaaggtcaggagtttgagaccagcctggccaatatggtgaaaccccgtctctactaa

SEQ ID NO: 117427 - DNA, 201 bp, Homo sapiens
ggaacagaaaaagaatgatgcatgccttgggtgcctgcaactttgtaaaatgcttctgattgagggcaaggctggaacagattacgctgaatgggaggtgytgtgggaataaaggaaggtttttagaagttataagtagtggctgggcccagtggccctcaccttccagcaccttgggaggctaaggcaggaggattgttt

SEQ ID NO: 117428 - DNA, 201 bp, Homo sapiens
taaacgactgacccaaaatcacacttgaactgggccaatctgataccaggcctgctctctcagccaccatgccatattgcctattttagcctcagtcatattttttttttttttttgagatggagtctcgctctgtgtcacccaggctggagtgcagtggcgcgcgatctcggctcactgcaagctccgcctcccgggttc

SEQ ID NO: 117429 - DNA, 201 bp, Homo sapiens
tgcttctgattgagggcaaggctggaacagattacgctgaatgggaggtgttgtgggaataaaggaaggtttttagaagttataagtagtggctgggcccrgtggccctcaccttccagcaccttgggaggctaaggcaggaggattgtttgaactcagaagtttgagaccagcctgagcaatgtagtgagacctcatctc

SEQ ID NO: 117430 - DNA, 201 bp, Homo sapiens
gtttcctcatggagagattggatcaccctcatctccagcttggtgtcttgtgacaagaggatggcaccgcaaatgtttgttgacctaaacatttatttatwcactcttcaaaagatatttattgagcgcctactgggcattgtatgagcactgggaaatggaaaagaaacaagactgacaaggtccatgggctgatggagc

SEQ ID NO: 117431 - DNA, 201 bp, Homo sapiens
gatctgtatttgaattatctttttcaagtactaccaatctttgtaggtttattgtctctggacagcgcagtaagagggaactagagaaatctgctttctgyagatggaattctgcctcatattaccaagcccttaatatcaaggtcctctagtcctccgaaatctattttctctctgtcttctgaggaaagccaatttgaa

SEQ ID NO: 117432 - DNA, 201 bp, Homo sapiens
  misc_feature (1)...(201): n = A,T,C or G
ccacgtcaggtgacatattcactggttctaggagtagggtatttggggaggagtagatgtatttgtgggggcaggtggcaaagatcaggaatctcaaggtntttttcctgcagaggtgagaactctgacagggaggcccctgagcgcagctgggctcttctgtctgtgtctctggggtccactggagcagaggaagctttg

SEQ ID NO: 117433 - DNA, 201 bp, Homo sapiens
ttcctcatggagagattggatcaccctcatctccagcttggtgtcttgtgacaagaggatggcaccgcaaatgtttgttgacctaaacatttatttattcrctcttcaaaagatatttattgagcgcctactgggcattgtatgagcactgggaaatggaaaagaaacaagactgacaaggtccatgggctgatggagctg

SEQ ID NO: 117434 - DNA, 201 bp, Homo sapiens
ggccacacaggaacatgggcacagccaggagtgcccggttaaaggcctgcctctgcttctttagctgtagaatggggatgatcacaggaagcaccacctcrgaactgtctggggatcccaggagcaaagggatgggagtcgtctagagctgagccaggcctgtggtaagtcacatagaaatgtttgcttctgttgttatta

SEQ ID NO: 117435 - DNA, 201 bp, Homo sapiens
actgctgggggtcggggggaggtgggtggtcgcgttctgttgcccaggctggtctggaactcctggattcaagtgatctttctgccccagcctctcaaatrcttggatttacaggcgtgagccactgtgtctgggcttatccctcacttttaaaagcagagctgagataccacttggccccacctctacagatccagttga

SEQ ID NO: 117436 - DNA, 201 bp, Homo sapiens
gggttgtgaatagcgctgctatgagcatttgaatacaagtatttgagtcttcacttctcttgggtctatacgtccaggggtggaactcctgggtcatatgktaactccatgtttatcatgaggaaccaccaagctgttttccacagtggctgcaccatttacgtttccaccagcagtgcacgagcgttcctgtttctccac

SEQ ID NO: 117437 - DNA, 201 bp, Homo sapiens
ttggttgtgtgggcacatttgggttgtgaatagcgctgctatgagcatttgaatacaagtatttgagtcttcacttctcttgggtctatacgtccaggggkggaactcctgggtcatatgttaactccatgtttatcatgaggaaccaccaagctgttttccacagtggctgcaccatttacgtttccaccagcagtgcac

SEQ ID NO: 117438 - DNA, 201 bp, Homo sapiens
ctggacacttaaataaatgaagccacgcagtaagcagccttttgtgacagtcttctttcccttcccatggcattttgcaggtttatccctattgtcacacrggtcagcaccccattccttcatatggctgaataacattccattgatgggcagactgtatttcgcttatccactgatgcatattttggttgtgtgggcaca

SEQ ID NO: 117439 - DNA, 201 bp, Homo sapiens
ataataataacaataataataataataataaataaaataaaactagttttacatcccattatactttcttttaaaaagcatggaaggaaagctaggaatcytaggcttctgcatgtggacaaagatatcatttgcaaaatggtcttggctgcactggtggaaatagtaaatgattggaagcaacctgaattccatcaagag

SEQ ID NO: 117440 - DNA, 201 bp, Homo sapiens
ctcaagaccagcctggccaacatggagaaaccctgtctctaccaaaaatacaaaaattagccgagtgtggtggcacgcgcctgtagccccagttactcagsaggctgatgcaggagaatcgcttgaacctgggagagggaggttgcaatgagctgagatcctgccactgcaccccagcctgggcgacagagggagactcca

SEQ ID NO: 117441 - DNA, 201 bp, Homo sapiens
gcacgcgcctgtagccccagttactcagcaggctgatgcaggagaatcgcttgaacctgggagagggaggttgcaatgagctgagatcctgccactgcacyccagcctgggcgacagagggagactccatctcaaaaaaaaaaaaaaaagaaaagaaaaacccacaaatttttacaaattaaaaatcaaacataaaaaata

SEQ ID NO: 117442 - DNA, 201 bp, Homo sapiens
gtgggacagcagattcgcctaccaagagctaggggaatctcatgttaaaaaatgctttgatgtgcaatgaccaaaaagaggcttttgtgtttagcacacamaaaaaagctggtacacaggaattcccaggaactttccagcagcagttgggattttggcagggatcacgcacgcctgcctgccggggtgggggtggggatg

SEQ ID NO: 117443 - DNA, 201 bp, Homo sapiens
tggactggtttctatcatccccaaaggcatctcgcctttgaggcacaaaagtgctcaaaaacacagttgttggatgaatcttaaagtatcaaaatcccagragaccttgaagatcatctccttccaaacattcagtttacaggtgggaaactgaggctcagagaggctaaagtgtggcttgtagacattgagtgacccagg

SEQ ID NO: 117444 - DNA, 201 bp, Homo sapiens
ggaaactgaggctcagagaggctaaagtgtggcttgtagacattgagtgacccaggaaggagatgcctgggccccctgcttctcccaataccccctcttgwtcctcgtctgtggcaaccaatgcagggtgactccagatctgcttgggactagaaaggagctgaagtcaatagagccagatcctgtcctgggtgagctgga

SEQ ID NO: 117445 - DNA, 201 bp, Homo sapiens
ttgttttagtagagatgcggtttctccatgttggtctcgaactctcaacctcaggtgatccgcctgccttggcctcccaaaattctgggattacaagcgtragccactgcgcccggccttacttttgttctttaaggaatctccacactgttttccatggttatattagtttagtataactatgttttccatggttatact

SEQ ID NO: 117446 - DNA, 201 bp, Homo sapiens
ctaaagtgtggcttgtagacattgagtgacccaggaaggagatgcctgggccccctgcttctcccaataccccctcttgttcctcgtctgtggcaaccaaygcagggtgactccagatctgcttgggactagaaaggagctgaagtcaatagagccagatcctgtcctgggtgagctggaccagggccagctcggtggtgg

SEQ ID NO: 117447 - DNA, 201 bp, Homo sapiens
ggtggccactggacatggagtctcttctggcctccagccgtgccaggtgcccatagccttggcagcaatggcgaggtgcagaagaggagggtggcccacaygcatctgtgcacgcacctgctctgttcccttctatgcatctgtagttgctcggctcacacggagctcagcaaatgtcgggggattgggcatgtgatcgtg

SEQ ID NO: 117448 - DNA, 201 bp, Homo sapiens
gctctgttcccttctatgcatctgtagttgctcggctcacacggagctcagcaaatgtcgggggattgggcatgtgatcgtgggctacaggccaggccctragctgggtgccctagggaggcagtcaggagtgaggaaagcctgagccccgcctgggagatgctgatgtcaaaggctgggaaacaggttcaaacatcacag

SEQ ID NO: 117449 - DNA, 201 bp, Homo sapiens
aggccgaggcggatggatcacctgagctcaggagttcaagaccagcctgggcaacatggtgaaaccccgtctctactaaaaatacaaaaaattggctgggygtggtggctcatgcctgtaatcccagcactttgggaggccgagatggatggatcagctgaggtcaggagttcaaaaccagcctggccaatgtggtgaaac

SEQ ID NO: 117450 - DNA, 201 bp, Homo sapiens
cattatgaaggaatggggcgctgacccatgtgacaatagggataaacctgcaaaataccacacgaaggcagagaagaccatcacaaaaggctacttactgygtggcttcatttatatgtgtccagaactggcacattcctagagacgaacagcaggttactggttgccaaaggctggggagagggggaatgagagtgacta

SEQ ID NO: 117451 - DNA, 201 bp, Homo sapiens
tttgtccacactgcatgtcctagctgcctgtgagtcactcagcagccctctctgtactcaattccactgccatggtatcatggtgcttgtgttcaagtcamccttattttatgtataaattaaactttatcaccagtatgtacgcgtaggatgaaacagagtctatgtagggttcagtactctccaccatttcaggcatct

SEQ ID NO: 117452 - DNA, 201 bp, Homo sapiens
cgggaaacctgttctatcagccatggtcaaccccactgtgttctctgacatcgctgtcaacggcgagcccttgggccgcatctccttcgagctgtttgcaracaagtttccaaagacagcagaaaactttcacgctctgagcactggagagaaaggagttggttataagggttcctgctttcacaggaacattccagggtt

SEQ ID NO: 117453 - DNA, 201 bp, Homo sapiens
tgcaggctggtgtgtgagcctcccggcagctcttccaggatcagctggtccccacttaaagacagctgtggcttggaggggttaagtgctccagaatccaygcacaatttgttggagtgtgaagctatccatacctcttctagtctgtctatatggcagaataagatgcggctgaaacatcaggcaggggcccaagagact

SEQ ID NO: 117454 - DNA, 201 bp, Homo sapiens
atcagattgatagaaaataaaaagtttgacacagccaaagaccggtgagaactggagaggcctcgctggcagatggacatcagcagtggaagtacttcctycacctggtcttatggactgaactgtggcccccaaattcaaatggtggagatctatccctcggcacctcagaatgagaccatatttggaaatagggccttg

SEQ ID NO: 117455 - DNA, 201 bp, Homo sapiens
gagagacgtcccagcactgtttcagaggcagcactgtggggtctcagggctggattccggctcgggggcagggtaacttgtgtctgggtggactgttcatsggctgcccaccctcacatgtggacaaagaactcagttcctgctgttcagcccggagccgccacctcagacctgctcatgctgcaaatggagggaaggtgg

SEQ ID NO: 117456 - DNA, 201 bp, Homo sapiens
ccagccgtgccaggtgcccatagccttggcagcaatggcgaggtgcagaagaggagggtggcccacacgcatctgtgcacgcacctgctctgttcccttcyatgcatctgtagttgctcggctcacacggagctcagcaaatgtcgggggattgggcatgtgatcgtgggctacaggccaggccctaagctgggtgcccta

SEQ ID NO: 117457 - DNA, 201 bp, Homo sapiens
ggtggtgggcgcctgtagtcccagctactcaggaggctgaggcaggagaatggcatgaacccgggaggcagagcttgcagtgagccaagatcacaccactrcactccagcctgggcgacagagtgagactccatctcaaaaaaaaaaaaaaagagaaaaaaaaaaatatatatatatatatatacacacacatacacacac

SEQ ID NO: 117458 - DNA, 201 bp, Homo sapiens
caaagtgctggaattacaggtgtgagccactgtgcctggcccaagagattgtttttattgtgattgttctcggaatcttgttgaggtttgataaagacacyggatgtcatggagctcatttgatccaaaaaacagttctttttttattcattcactcaacaaatatttactgagagcctactatgtgccaagccctgctct

SEQ ID NO: 117459 - DNA, 201 bp, Homo sapiens
aatcttcctgtcttggcctcccaaagtgctggaattacaggtgtgagccactgtgcctggcccaagagattgtttttattgtgattgttctcggaatcttrttgaggtttgataaagacaccggatgtcatggagctcatttgatccaaaaaacagttctttttttattcattcactcaacaaatatttactgagagccta

SEQ ID NO: 117460 - DNA, 201 bp, Homo sapiens
accacgactggctaattttgttgctgttgtttgtttgtttttgtaaagacagggtctcactgtgttgctcaggctgttcttgaactgctgggctcacacartcttcctgtcttggcctcccaaagtgctggaattacaggtgtgagccactgtgcctggcccaagagattgtttttattgtgattgttctcggaatcttgt

SEQ ID NO: 117461 - DNA, 201 bp, Homo sapiens
ggaaggaaggaaggaagaaagaaagaaaaaagaatgaaagaaagaaagaaagaaagaaagaaagaaagaaagaaagaaagaaagaaagaaagaaagaaaagaacatgtgaaggaagacctggcagggtgggggcaggacctgacccactagccaggttgctctcctggaaacagggttgtccctactggggttggaaattt

SEQ ID NO: 117462 - DNA, 201 bp, Homo sapiens
caaaaagaggcttttgtgtttagcacacaaaaaaaagctggtacacaggaattcccaggaactttccagcagcagttgggattttggcagggatcacgcamgcctgcctgccggggtgggggtggggatggagcctgcatcctccacgcctgccacaggcaccagcactgaccctgaacttggtttgctttcagcctgtgc

SEQ ID NO: 117463 - DNA, 201 bp, Homo sapiens
gcatgaacccgggaggcagagcttgcagtgagccaagatcacaccactgcactccagcctgggcgacagagtgagactccatctcaaaaaaaaaaaaaaakagaaaaaaaaaaatatatatatatatatatacacacacatacacacacacacatatatatacacatatctatacacacacatatgtatacacacacatat

SEQ ID NO: 117464 - DNA, 201 bp, Homo sapiens
caaatttttacaaattaaaaatcaaacataaaaaataatggtgggacagcagattcgcctaccaagagctaggggaatctcatgttaaaaaatgctttgaygtgcaatgaccaaaaagaggcttttgtgtttagcacacaaaaaaaagctggtacacaggaattcccaggaactttccagcagcagttgggattttggcag

SEQ ID NO: 117465 - DNA, 201 bp, Homo sapiens
gtgagccaagatcacaccactgcactccagcctgggcgacagagtgagactccatctcaaaaaaaaaaaaaaagagaaaaaaaaaaatatatatatatatmtatacacacacatacacacacacacatatatatacacatatctatacacacacatatgtatacacacacatatatatgcacatatatacacacacacaca

SEQ ID NO: 117466 - DNA, 201 bp, Homo sapiens
ggaggtgggtggtcgcgttctgttgcccaggctggtctggaactcctggattcaagtgatctttctgccccagcctctcaaatgcttggatttacaggcgygagccactgtgtctgggcttatccctcacttttaaaagcagagctgagataccacttggccccacctctacagatccagttgaggaaatgggtttttcaa

SEQ ID NO: 117467 - DNA, 201 bp, Homo sapiens
agcctgggcgacagagggagactccatctcaaaaaaaaaaaaaaaagaaaagaaaaacccacaaatttttacaaattaaaaatcaaacataaaaaataatsgtgggacagcagattcgcctaccaagagctaggggaatctcatgttaaaaaatgctttgatgtgcaatgaccaaaaagaggcttttgtgtttagcacaca

SEQ ID NO: 117468 - DNA, 201 bp, Homo sapiens
tgagccaagatcacaccactgcactccagcctgggcgacagagtgagactccatctcaaaaaaaaaaaaaaagagaaaaaaaaaaatatatatatatatayatacacacacatacacacacacacatatatatacacatatctatacacacacatatgtatacacacacatatatatgcacatatatacacacacacacat

SEQ ID NO: 117469 - DNA, 201 bp, Homo sapiens
agccaagatcacaccactgcactccagcctgggcgacagagtgagactccatctcaaaaaaaaaaaaaaagagaaaaaaaaaaatatatatatatatatayacacacacatacacacacacacatatatatacacatatctatacacacacatatgtatacacacacatatatatgcacatatatacacacacacacatac

SEQ ID NO: 117470 - DNA, 201 bp, Homo sapiens
ccaagatcacaccactgcactccagcctgggcgacagagtgagactccatctcaaaaaaaaaaaaaaagagaaaaaaaaaaatatatatatatatatatayacacacatacacacacacacatatatatacacatatctatacacacacatatgtatacacacacatatatatgcacatatatacacacacacacatacac

SEQ ID NO: 117471 - DNA, 201 bp, Homo sapiens
agatcacaccactgcactccagcctgggcgacagagtgagactccatctcaaaaaaaaaaaaaaagagaaaaaaaaaaatatatatatatatatatacacwcacatacacacacacacatatatatacacatatctatacacacacatatgtatacacacacatatatatgcacatatatacacacacacacatacacata

SEQ ID NO: 117472 - DNA, 201 bp, Homo sapiens
atatatatatatatatacacacacatacacacacacacatatatatacacatatctatacacacacatatgtatacacacacatatatatgcacatatatacacacacacacatacacatatatatacacacacacagatatatatatatatctgtatgtgtgtgtgtttatgcaagaagcattgggtctgaacgctcgca

SEQ ID NO: 117473 - DNA, 201 bp, Homo sapiens
tatatatatatatatacacacacatacacacacacacatatatatacacatatctatacacacacatatgtatacacacacatatatatgcacatatatacacacacacacatacacatatatatacacacacacagatatatatatatatctgtatgtgtgtgtgtttatgcaagaagcattgggtctgaacgctcgcaa

SEQ ID NO: 117474 - DNA, 201 bp, Homo sapiens
tatatacacacacatacacacacacacatatatatacacatatctatacacacacatatgtatacacacacatatatatgcacatatatacacacacacacatacacatatatatacacacacacagatatatatatatatctgtatgtgtgtgtgtttatgcaagaagcattgggtctgaacgctcgcaaggccctgtat

SEQ ID NO: 117475 - DNA, 201 bp, Homo sapiens
tctcccaataccccctcttgttcctcgtctgtggcaaccaatgcagggtgactccagatctgcttgggactagaaaggagctgaagtcaatagagccagaycctgtcctgggtgagctggaccagggccagctcggtggtggccactggacatggagtctcttctggcctccagccgtgccaggtgcccatagccttggca

SEQ ID NO: 117476 - DNA, 201 bp, Homo sapiens
aaaaactgcacttgctctatggagcaagtcaccgtcagaggccaggaggctggggtgtgggtatgagaccaggcagaaggaggttggccaggggatccccygtgatggtctcagagacagaccatttgtgagtgcccagcaatgaggcagtagactagcaatgaaactgagatttaagcaccattttattctatttgtaat

SEQ ID NO: 117477 - DNA, 201 bp, Homo sapiens
taaataaatgaataatttaaacaaacaaaaacatgcacgggaagagaaataccaggttttatctggagagcggtgacacgtcccttgagagagaaaacctrgatgtaaaagaaccccttgaaatcaggggtttccgctgtattctataatgttgtgtttcttggaaaggattgaaaagaattagatagaattcatttgatt

SEQ ID NO: 117478 - DNA, 201 bp, Homo sapiens
ccggggcctatcggggggtcgggggctaggggagggatagcaataggagaaatacctaacgtagatgacaggttgatgcgtgcagcaaaccaccatggcasgtgtatacctatgtaacaaacctgcacgttctgcacaggtacctcagaacgtaaagtataataaaaataaataaatgaataatttaaacaaacaaaaaca

SEQ ID NO: 117479 - DNA, 201 bp, Homo sapiens
atatacacacacatacacacacacacatatatatacacatatctatacacacacatatgtatacacacacatatatatgcacatatatacacacacacacatacacatatatatacacacacacagatatatatatatatctgtatgtgtgtgtgtttatgcaagaagcattgggtctgaacgctcgcaaggccctgtatc

SEQ ID NO: 117480 - DNA, 201 bp, Homo sapiens
cccaccccccgtgatcttgccccagcatcaggaattgggggcgatctggtcaggcaagtctcctacagcacttaaacccacgtttccgaattggattcaakgggaggcagcttcccagttaaaagtccagggcctggagctggggggtgacaaggtgggcctcccaaagacactgatgactgagaatcagactgcaaaggc

SEQ ID NO: 117481 - DNA, 201 bp, Homo sapiens
gattaggtggaaaattccagacaattctttagtcttcaatcccacactgtcctgctgcatcttgtccaggacgtgagtcctccctctgtccagtttgtccmcactgcatgtcctagctgcctgtgagtcactcagcagccctctctgtactcaattccactgccatggtatcatggtgcttgtgttcaagtcacccttatt

SEQ ID NO: 117482 - DNA, 201 bp, Homo sapiens
ctcaatacctaggtgatgggttgataagtgcaggaaaccaccatggcacacgtttacctatgtaataaacctgaacattctgcgcatgtatcccggaacttaaaataaaataaaattttaaaaagtggaatttgggggtgtcacagttcctgcctgggccccccatggttgggctctggctgtcactcagagggatgaggc

SEQ ID NO: 117483 - DNA, 201 bp, Homo sapiens
tcaatacctaggtgatgggttgataagtgcaggaaaccaccatggcacacgtttacctatgtaataaacctgaacattctgcgcatgtatcccggaacttaaaataaaataaaattttaaaaagtggaatttgggggtgtcacagttcctgcctgggccccccatggttgggctctggctgtcactcagagggatgaggct

SEQ ID NO: 117484 - DNA, 201 bp, Homo sapiens
caatacctaggtgatgggttgataagtgcaggaaaccaccatggcacacgtttacctatgtaataaacctgaacattctgcgcatgtatcccggaacttaaaataaaataaaattttaaaaagtggaatttgggggtgtcacagttcctgcctgggccccccatggttgggctctggctgtcactcagagggatgaggctg

SEQ ID NO: 117485 - DNA, 201 bp, Homo sapiens
aatacctaggtgatgggttgataagtgcaggaaaccaccatggcacacgtttacctatgtaataaacctgaacattctgcgcatgtatcccggaacttaaaataaaataaaattttaaaaagtggaatttgggggtgtcacagttcctgcctgggccccccatggttgggctctggctgtcactcagagggatgaggctgg

SEQ ID NO: 117486 - DNA, 201 bp, Homo sapiens
gtggcttgtagacattgagtgacccaggaaggagatgcctgggccccctgcttctcccaataccccctcttgttcctcgtctgtggcaaccaatgcagggygactccagatctgcttgggactagaaaggagctgaagtcaatagagccagatcctgtcctgggtgagctggaccagggccagctcggtggtggccactgg

SEQ ID NO: 117487 - DNA, 201 bp, Homo sapiens
atacctaggtgatgggttgataagtgcaggaaaccaccatggcacacgtttacctatgtaataaacctgaacattctgcgcatgtatcccggaacttaaaataaaataaaattttaaaaagtggaatttgggggtgtcacagttcctgcctgggccccccatggttgggctctggctgtcactcagagggatgaggctgga

SEQ ID NO: 117488 - DNA, 201 bp, Homo sapiens
acctatgtaataaacctgaacattctgcgcatgtatcccggaacttaaaataaaataaaattttaaaaagtggaatttgggggtgtcacagttcctgcctgggccccccatggttgggctctggctgtcactcagagggatgaggctggagtgccaggccccagccagatcaggaaaggcctcagaactcacattaaggag

SEQ ID NO: 117489 - DNA, 201 bp, Homo sapiens
taacttgcccaatgtcacacatagtgagttctctgaagaactgtgaatccacagttcaggcaaagcctgaacttaagaaggtctgactccaaagcctgacrtcacctgccctgggaagccctctctggcccctcagaccttgggtgtagtcaggtcccctcctctgtaatcttggtaacagtagcaatgacagtggtaacg

SEQ ID NO: 117490 - DNA, 201 bp, Homo sapiens
gcaacggcacaggtgcacaaagggcttacccttgccacggtcacagcggcgggaccccggcctcagcagcgggacaccaaagtctgagctcaggctcagasagacgtcccagcactgtttcagaggcagcactgtggggtctcagggctggattccggctcgggggcagggtaacttgtgtctgggtggactgttcatggg

SEQ ID NO: 117491 - DNA, 201 bp, Homo sapiens
gcaaatggagggaaggtggccctgacctgggtgggtgcagaggcggcgcagcttccccaaggcaggcatggaccagaccgagctctgacgctgaaggtcaygggcagccccgagtcagggccatgaagggtgcgggggacccggcccaccatgcctctccaccatcgccagtgtccagcgatcccttccgcaccggacctg

SEQ ID NO: 117492 - DNA, 201 bp, Homo sapiens
ggcctgcggtctgatgccaggacggcctcaggggtttggtgacgggactgggaggaagtcacagggagaaggtggccggccgatcccctgccgtgagaagkaagacacagggcaaacgagcctatgcttttcatctcccagttttcgtgcccctttcaataggggtctaccccgtcggcacccctaaatcccccaccccat

SEQ ID NO: 117493 - DNA, 201 bp, Homo sapiens
agcgagttgtaatcaagctgtgatcatgccactatgctccagtgacagaatgagaccctctctcaaaaaacaaaacaaaacaaaacaaaacaaaacaaaamaaactatgaggtaggcgctattattttgcagccgaggacactgaaatgaggtctagaggtgtcgagtaatttacccaagattccctctgtcaccacatcc

SEQ ID NO: 117494 - DNA, 201 bp, Homo sapiens
gtataagaatcgctggaacccaggaggcagaggttgcagtgatccgagatcgcatcaccgcactgcagcccaggcgacagagcaagatcctgtctcaaaaraacaacaacaaccacaacaacaacaatccactgtgtttttcagattaattacatctgtctcccacaccagttttagcagtgaggctgctcaaattgacca

SEQ ID NO: 117495 - DNA, 201 bp, Homo sapiens
caaaagatatgcccactcagaatctgtgaatgtggccttatttggaaaaagggtctgagcaaatggaattaagtgaaggacctcaagataaatcatctttrgatggactctaaatctgatgacaagttattagaagagcaggggaaacaagaccgaggcccagggaagaaggcaaaggaagacagaggcagagccaggagt

SEQ ID NO: 117496 - DNA, 201 bp, Homo sapiens
ggagctggaaggaagtgcacggtgtcaagggaacatggttgttgaaggagcgctttcccaccatcgtcactaggagctttccttcccatttcacaaacagwtcctacagtgggctgaatgttggtttccccctcaaaagatatgcccactcagaatctgtgaatgtggccttatttggaaaaagggtctgagcaaatggaa

SEQ ID NO: 117497 - DNA, 201 bp, Homo sapiens
aaagtataataaaaataaataaatgaataatttaaacaaacaaaaacatgcacgggaagagaaataccaggttttatctggagagcggtgacacgtccctkgagagagaaaacctggatgtaaaagaaccccttgaaatcaggggtttccgctgtattctataatgttgtgtttcttggaaaggattgaaaagaattagat

SEQ ID NO: 117498 - DNA, 201 bp, Homo sapiens
aacatgagcgagtattaacaatataaaaacacgcacacagggaggggaacatcacacaccggggcctatcggggggtcgggggctaggggagggatagcawtaggagaaatacctaacgtagatgacaggttgatgcgtgcagcaaaccaccatggcacgtgtatacctatgtaacaaacctgcacgttctgcacaggtac

SEQ ID NO: 117499 - DNA, 201 bp, Homo sapiens
ccgggaggcggaagttgcagtgagctgagatggcaccaccgcactccagcctgggcaacagagtgaaactgtgtctcaaaaaaaaataataaaaaaaaaawaggcaatagggtatttggaggtgatcaagttgagtcattaggataggccccaattcaatatgcctggtgtccttatgaaaagggaaattttggacacaga

SEQ ID NO: 117500 - DNA, 201 bp, Homo sapiens
aggaaattttaaaaaatggcagattgggcaaaatttatccaataaaggagctggaaggaagtgcacggtgtcaagggaacatggttgttgaaggagcgctytcccaccatcgtcactaggagctttccttcccatttcacaaacagatcctacagtgggctgaatgttggtttccccctcaaaagatatgcccactcagaa

SEQ ID NO: 117501 - DNA, 201 bp, Homo sapiens
tttttaatataagtaacaatgcaacaacaaaaagaggtaatttttttcccctatactcatgaatcattttcttaagataaatttctaagagtgggagaackcatcactgcacttgtgggagcaggaggaaattttaaaaaatggcagattgggcaaaatttatccaataaaggagctggaaggaagtgcacggtgtcaagg

SEQ ID NO: 117502 - DNA, 201 bp, Homo sapiens
aatgttgcatgaataaatgttattgaagtaattaagtaattacctcctctcctgggggttgtttccaactttttaatataagtaacaatgcaacaacaaaragaggtaatttttttcccctatactcatgaatcattttcttaagataaatttctaagagtgggagaacgcatcactgcacttgtgggagcaggaggaaat

SEQ ID NO: 117503 - DNA, 201 bp, Homo sapiens
tttgcaggtagggagaactaaggctcaaagaagggaagaagaagccttccccaagaccacacgggtgacagatggcaaaaccaggttcggcattcctggcsccccagctcagacctcccccaactgatctcctccttttttcctctggcctctgatggagcctgccaaaggcctgtgtatttctcacctgcctgcttatca

SEQ ID NO: 117504 - DNA, 201 bp, Homo sapiens
actcccactggcctgtgaccacctggggccgagatccgcagctgctaggctgttaccctgcatctgcatacagcaggtgctggataccgtttgtggttgcygagaaaatgtgtatctcgcactacagctttcaaagcacttccaaagacagggaaagagatcagttaaaatattgcccctgtgaaaccttcaagaaggtaa

SEQ ID NO: 117505 - DNA, 201 bp, Homo sapiens
ctgacctcaagtgatccgcccacttcggcctcccatagtgctgggattacaggcatgagccaccgtgcccagccatagaataagtttcttaatagcttctsactttcttatctcttctcatcctaggaatattctgaatgtaatgactaagtttagcaacctctccacagggcctggtaggggaggtgtttgatgaatgct

SEQ ID NO: 117506 - DNA, 201 bp, Homo sapiens
aacagacaccagttcctacttgagggtggagggtgggagaagggtgaggattgaaaaactacctgtcacttattatgctaattacctgagtgacaaaaatyatctgtacaccaaacctccaagacacaaaatttacccatgtaacaaacttgcacatgtaccccttgaacctaaaataaaagttacaaagaagtccgggtg

SEQ ID NO: 117507 - DNA, 201 bp, Homo sapiens
tttcctctcttcagtctcacagctaattctaggaaggtgctggcactaggaagagctctggcttagccagccacctctcactgtgcccacgccacttcccytgggagactccttttctcacctgtgaaatgcggagactaatgacaaagctactgtctctacccctgcttcccttacacactggctgcggctccctcagaa

SEQ ID NO: 117508 - DNA, 201 bp, Homo sapiens
gtatacatatgtgtgcacctatacatatttatgtgtgcatatgtgtgcgtgtgggtacatttatatgcatatattgtgcctgtgtgtacaagcaagtatayatggtatgtgtatatgtatttctatgtgtgcatgtatgtgtacatgtatgtgtgtgcgcatgtgagtatatttatatgcatgtattgtgcctatgtgtat

SEQ ID NO: 117509 - DNA, 201 bp, Homo sapiens
tttaatgccatttatttttaaagaaactcacagagactttatgaagagctcaaatgccaggctgccattgactcgtgaacgtggggcatggctacacagartggaaggccatggatcatatttttaaaaataaaaaacctgtggggctgggcacagtggctcatgcctataatcccagtactttgggagaccaaggtgaga

SEQ ID NO: 117510 - DNA, 201 bp, Homo sapiens
aaatgaagccacgcagtaagcagccttttgtgacagtcttctttcccttcccatggcattttgcaggtttatccctattgtcacacgggtcagcaccccaytccttcatatggctgaataacattccattgatgggcagactgtatttcgcttatccactgatgcatattttggttgtgtgggcacatttgggttgtgaat

SEQ ID NO: 117511 - DNA, 201 bp, Homo sapiens
ggtccttgcctaggaagacctcctggtggaagccgcgattgaggtgcccgtccatctccagcttcaccccgttcaggtggtctgggggcaggatctcattmtcctccctgttggctactctctctcgagtggacgagtggttggcaggccgtgcagacgcgtccatcagaaggactgcccccaggagccagaggcagcacg

SEQ ID NO: 117512 - DNA, 201 bp, Homo sapiens
actcagcaaagacttccccaagcacgtctatcctgcaacatgaaacatatcctcgattcacaggatccagacatgtggcatcgccttctccagaccacacrtggcactgccttctccagaccacacgtggcattgttttctccgggccacacgtggcatttgttttctctggaccacacgtggcatttgttttctccggac

SEQ ID NO: 117513 - DNA, 201 bp, Homo sapiens
atcagaaggactgcccccaggagccagaggcagcacggagccaggccaatgaggggaccccacctggacgccatcgccacccagggccagaccatggggcrggctgcagggtgtgggccaggtgctgggaggggcaggggcaggggcagaggaggaagtgaggtcctggctccaatccaatccccgggcaccacggagggc

SEQ ID NO: 117514 - DNA, 201 bp, Homo sapiens
ctcgcaggtcccaggaggcccagggtgttctctcacctgcacctcggctccctgcccggcaccctggctggcctgggggactcacgggcacgccctgaccmtgctctgcctccaggggtgaggccagcgctgagtgcaagtaggttccagggccacaccgcagggcaccccggccgtgccgtaaggagtaaggcgcccgtg

SEQ ID NO: 117515 - DNA, 201 bp, Homo sapiens; identical to SEQ ID NO: 19971

SEQ ID NO: 117516 - DNA, 201 bp, Homo sapiens
ccagcttcaccccgttcaggtggtctgggggcaggatctcattctcctccctgttggctactctctctcgagtggacgagtggttggcaggccgtgcagaygcgtccatcagaaggactgcccccaggagccagaggcagcacggagccaggccaatgaggggaccccacctggacgccatcgccacccagggccagacca

SEQ ID NO: 117517 - DNA, 201 bp, Homo sapiens; identical to SEQ ID NO: 19970

SEQ ID NO: 117518 - DNA, 201 bp, Homo sapiens
gtgggttggtcagctcaccaccaagtgaactcaggccacgcaaggacccccgaaccgtaccatctgaggagaggtgcaaggggacaccacacctggtgccmaggtcctccagctggcaccgtgcctccgtcccaccagctcacctgtgctccgcccgaaagcctggatcctcagggccctcccgcctggccctcagcccaa

SEQ ID NO: 117519 - DNA, 201 bp, Homo sapiens
gacctcctggtggaagccgcgattgaggtgcccgtccatctccagcttcaccccgttcaggtggtctgggggcaggatctcattctcctccctgttggctrctctctctcgagtggacgagtggttggcaggccgtgcagacgcgtccatcagaaggactgcccccaggagccagaggcagcacggagccaggccaatgag

SEQ ID NO: 117520 - DNA, 201 bp, Homo sapiens
ggtggtctgggggcaggatctcattctcctccctgttggctactctctctcgagtggacgagtggttggcaggccgtgcagacgcgtccatcagaaggacygcccccaggagccagaggcagcacggagccaggccaatgaggggaccccacctggacgccatcgccacccagggccagaccatggggcgggctgcagggt

SEQ ID NO: 117521 - DNA, 201 bp, Homo sapiens; identical to SEQ ID NO: 19972

SEQ ID NO: 117522 - DNA, 201 bp, Homo sapiens; identical to SEQ ID NO: 19973

SEQ ID NO: 117523 - DNA, 201 bp, Homo sapiens
gcacctttaatgagtcagatagatgcacaatgggtgtgggagcagttggacttgtgggcacaaagtctagcaagaagctcagacttgcaaacaactgtagkacgtgcaaagcaagctggcattggagcttgccgggcacagctgctcaggaataggcagctggttttccctttgatccctgagattccaaaggttactttc

SEQ ID NO: 117524 - DNA, 201 bp, Homo sapiens
tccaaatggcttctaattgttgcccatggcttgaaataaagttccatatagctaaagccccagcacaaaaacacttgaagacagccattaggtagaatttyttttcttttttagaggtcttatattggaaatgtaacagttgcaaagatatctaatgtttcaccttaaaatgtgagttataaattcacatttcacattgcc

SEQ ID NO: 117525 - DNA, 201 bp, Homo sapiens
cagaaacatgttacatatacctcttgttttacaccatcttctactttttgtacctctgtgttataaaccctctatcaagtgttgcttctaaagacaatgtmcagaatgggacgtaggaactgccactgggcaacaggcagacactgggttatatcgtcatcctgtttctgaatcctggtttttcttattattattcaacca

SEQ ID NO: 117526 - DNA, 201 bp, Homo sapiens
taactcatgggttttgaaatgggtcatcttttaaaatgggtcactttggctagaatcattgcacttggtgactttcacattgtaaagggtccagttctttytgaggcccaattgcactagaatctgcatttcagaacacaggaggtatcaggaagaaactgggagaaattcagagggaaattgtctcttctcagagtaaca

SEQ ID NO: 117527 - DNA, 201 bp, Homo sapiens
gccccagcacaaaaacacttgaagacagccattaggtagaatttcttttcttttttagaggtcttatattggaaatgtaacagttgcaaagatatctaatrtttcaccttaaaatgtgagttataaattcacatttcacattgcctccttcctccttgagcaaacagactaggcaattagtaccaaatagtaactagttat

SEQ ID NO: 117528 - DNA, 201 bp, Homo sapiens
ccagaaaggtttccattctgtacttaacctgcttgtccttctcactcttccttatcctcccgcacacgctctgagcattgactgagcactctgaggaggasgctgactcaggctgacccttcccggccctgcaaggctctaaggtagaaccagtgttatcacaggaaaggcccaagccaaagctcagagcagctgttcctg

SEQ ID NO: 117529 - DNA, 201 bp, Homo sapiens
tacaccgatgtggtaaccgcacagtggccgatggtggcctgaggctcatatttatggtaattatctgatgaaagtacatccatcagaattggatttgtgcstctgtgcctttattttgggaaaccttgcctgttccctgtgggggatgggagaggaatgtgaaaagccgaagttgacccagaaaaggatgattgaaggtag

SEQ ID NO: 117530 - DNA, 201 bp, Homo sapiens
gccaccatcagaaactgatattttctgacgtctttctcaccttcctctagagcattcagtccagaaatgaccagcctgtccaaagggggaaattactgatdttgatctgttccttagagcagtgtttcagtcttttttttttttttgagatggaatctcattctgtcacccaggctggagtgcagtggcacgatctcggct

SEQ ID NO: 117531 - DNA, 201 bp, Homo sapiens
aaatctgccatcaagaattctgttaccttgctttaagcctccagttccttccagatgtatggtggaggaggccagagggcccttgttttggggcttcagargatggttgttatctggatgagcactgtggaaagactgagagagcaactgagagaaagtgggcccctgaatgaaagtgatttcgcaaattttaggcagatg

SEQ ID NO: 117532 - DNA, 201 bp, Homo sapiens
ttttattcctgatctctctcaacaaggcagtttggcttctgaagattggtcctagctatacttaacaggaaacagatgacgagaagaagccaggaaaaaawacttggaatatagaacaaaatgcagcataaagatggtacagaagattttatctttctttcctttagttatgtgtggacaggaactaaaaactctcccacg

SEQ ID NO: 117533 - DNA, 201 bp, Homo sapiens; identical to SEQ ID NO: 19980

SEQ ID NO: 117534 - DNA, 201 bp, Homo sapiens; identical to SEQ ID NO: 19981

SEQ ID NO: 117535 - DNA, 201 bp, Homo sapiens
gcattagtgccttggacagttgaggaccactccatcctctccacagcatcccctccactccagagttgggtggcacggattttcaactggctaaccttggyttccacaactgaatttttttcagacccccattcttcatgctggaaatgagattactggacttggcagttttctttcccctcatctttcaccaggaactgg

SEQ ID NO: 117536 - DNA, 201 bp, Homo sapiens
tatcttttcttgcataactacaaatgttatgactggtcatagtgaccagacttccaaaaaaaaatccagccacagtatttgactctatgactgcctctggyggtaaattccttagactagctacatgctgtgcaaaaagctatttcctttgatttattcatttcccagttcttaactccatcaggtgcccccttgatctca

SEQ ID NO: 117537 - DNA, 201 bp, Homo sapiens
attcactaacttcttaggactccaatgtatccgaccaaatttttaaaaaaatttgttctctgagggaggttggtttaaatggactattctgccataaacaraagcaaatccccatttataaatattttattatcacaaatacttgtccattcatggtagtatgctgggggcatagcagcacacataataaatttcatataa

SEQ ID NO: 117538 - DNA, 201 bp, Homo sapiens
ggcggatcacctgagttcgggagttcgagaccagcctgaccaacatggtgaaacccccatctctactaaaaatacaaaattagctagggcgtggtggcgcrtgcctgtaatcccagctacttgggaggctgaggcaggagaatcgcttgaacccgggagatgaaggttgcggtgacctgagatcgtgccacagcactctag

SEQ ID NO: 117539 - DNA, 201 bp, Homo sapiens; identical to SEQ ID NO: 19983

SEQ ID NO: 117540 - DNA, 201 bp, Homo sapiens; identical to SEQ ID NO: 19984

SEQ ID NO: 117541 - DNA, 201 bp, Homo sapiens; identical to SEQ ID NO: 19985

SEQ ID NO: 117542 - DNA, 201 bp, Homo sapiens; identical to SEQ ID NO: 19986

SEQ ID NO: 117543 - DNA, 201 bp, Homo sapiens; identical to SEQ ID NO: 19987

SEQ ID NO: 117544 - DNA, 201 bp, Homo sapiens; identical to SEQ ID NO: 19988

SEQ ID NO: 117545 - DNA, 201 bp, Homo sapiens; identical to SEQ ID NO: 19989

SEQ ID NO: 117546 - DNA, 201 bp, Homo sapiens; identical to SEQ ID NO: 19990

SEQ ID NO: 117547 - DNA, 201 bp, Homo sapiens
aacagcaatgaaggcaagcataaaaagagaggaggcgagagtagattcagctaccagaaaaccaagaaagttaagtccataatctttaaaaacattagcamgaaatcatctgatagcaggcagttctgtcactgaagatacacctttctttcatcttgaataagtgtcctgaggtggagtttttcccctttgctctaacaa

SEQ ID NO: 117548 - DNA, 201 bp, Homo sapiens; identical to SEQ ID NO: 19993

SEQ ID NO: 117549 - DNA, 201 bp, Homo sapiens; identical to SEQ ID NO: 19992

SEQ ID NO: 117550 - DNA, 201 bp, Homo sapiens
cctttattttccaccgtcaatattattataaaataaaagagctgaatatataatatactgccgagagggtaatgagcaggattcaatcacacatttaaatraatttttaagaaatctgaaccatgtccaagttcttccatctaagcatcacttaagaatctgtttgttcagttgagtttcatctctgcagctgccaagaca

SEQ ID NO: 117551 - DNA, 201 bp, Homo sapiens; identical to SEQ ID NO: 19995

SEQ ID NO: 117552 - DNA, 201 bp, Homo sapiens; identical to SEQ ID NO: 19994

SEQ ID NO: 117553 - DNA, 201 bp, Homo sapiens
atcactattttgcattactatatttcagtctcaaactcatctctgatgtctcctatgtcttcaatcccatatctccaataagccattatatcctattgaattttctttgaaattgctctcacttcttttttcacatgcctttcacatggcggcctccctaatcaagacctttatttagctctcgtctgttctattgcaata

SEQ ID NO: 117554 - DNA, 201 bp, Homo sapiens
tcatcggaatctccagcttagcctcgcgcctccttagagggagatcctgagatgagagaggatatttaggcgtgactgaggtggaagccaggtctctgcaytcccattcccctgtatgaagtaggaggtttcagagggctgaggagagtagagaaggtttgaaacagtcataatgagccgtgagactgggaattgacatgt

SEQ ID NO: 117555 - DNA, 201 bp, Homo sapiens; identical to SEQ ID NO: 19999

SEQ ID NO: 117556 - DNA, 201 bp, Homo sapiens
gggcatggtggcgggcacctgtagtcccagctacgcgggaggctgaggcagaagaatcacttgaaccctggaggcaaaggttgaagtgagctgagattgcrccattgcactccagcctgggtgatagagccagactctgtctccaaaaaaaaaaaaaaaataataataataataattaaataagggccaggtgcagtggct

SEQ ID NO: 117557 - DNA, 201 bp, Homo sapiens; identical to SEQ ID NO: 20000

SEQ ID NO: 117558 - DNA, 201 bp, Homo sapiens
aatcacttgaaccctggaggcaaaggttgaagtgagctgagattgcaccattgcactccagcctgggtgatagagccagactctgtctccaaaaaaaaaawaaaaataataataataataattaaataagggccaggtgcagtggctcatgcctgtaatcccagcactttggtaggccgaggcaggtggaccacaaggtca

SEQ ID NO: 117559 - DNA, 201 bp, Homo sapiens
gaaagaccaattaagagatgatggatcacacaaagctagagaggaaaagcacaatgtggattgatgaatggtggcgtcttgttggggggagagttaatgayggaggcatatttaagagatatttgcatggtagacttatggggctaggatgtctgattggatgtggtgcccgagaaagggagaggcatgcccaaagatgac

SEQ ID NO: 117560 - DNA, 201 bp, Homo sapiens; identical to SEQ ID NO: 20002

SEQ ID NO: 117561 - DNA, 201 bp, Homo sapiens
cacttgaaccctggaggcaaaggttgaagtgagctgagattgcaccattgcactccagcctgggtgatagagccagactctgtctccaaaaaaaaaaaaawaataataataataataattaaataagggccaggtgcagtggctcatgcctgtaatcccagcactttggtaggccgaggcaggtggaccacaaggtcagga

SEQ ID NO: 117562 - DNA, 201 bp, Homo sapiens
ttcagggtctgcacataacaaaaaagttcctctttgttgtttttctgcaccctcccactttctcttttttttcttttcctttctttctttttttcttttcttttcttttttttttttttgagacagtcttattctgttgcccaggctggagtgcagtggcatgatctgggctcactgcaacctccgcctcccgggtttaag

SEQ ID NO: 117563 - DNA, 201 bp, Homo sapiens
attttattttatttttagattgaatcttgctctgttgcccaggctggagtgcggtggcacgacctcagctcactgaaacctctgcctcctgggtttaagcrattctcgtgcctcagcctcctgagtagctgggattacaggcgcctgccactatgcctggctaatttttgtatttttagtagagacagagtttcaccatgt

SEQ ID NO: 117564 - DNA, 201 bp, Homo sapiens
gggtctgcacataacaaaaaagttcctctttgttgtttttctgcaccctcccactttctcttttttttcttttcctttctttctttttttcttttcttttcttttttttttttttgagacagtcttattctgttgcccaggctggagtgcagtggcatgatctgggctcactgcaacctccgcctcccgggtttaagcaat

SEQ ID NO: 117565 - DNA, 201 bp, Homo sapiens
catccacaaagtgtggtttcagtttaggatgctgggagaagaccccataaggacacagccgttgcaaaggacgctcaagcccttcctcagcccatttgttstggaggtggtccaggaggaaggctgttacaataggctggaaagtcatccagctggtggtaacaggacttgctgaatactcggaaatctcagctctctcaa

SEQ ID NO: 117566 - DNA, 201 bp, Homo sapiens
cgcctgtaatcccagctactcgggaggctgaggagagaggatcacttgagcctgagaggcagaggtttcagtgagctgagatcacaccactgcgctccatrcttggcgacagagtgagtcacagtctcaaaaaaaaaaaaaaaaattaaaagagggcaaaatagaaacagagactggctaggcagtttctacagtgctcta

SEQ ID NO: 117567 - DNA, 201 bp, Homo sapiens
ggtctgcacataacaaaaaagttcctctttgttgtttttctgcaccctcccactttctcttttttttcttttcctttctttctttttttcttttcttttcttttttttttttttgagacagtcttattctgttgcccaggctggagtgcagtggcatgatctgggctcactgcaacctccgcctcccgggtttaagcaatt

SEQ ID NO: 117568 - DNA, 201 bp, Homo sapiens
tctcttgctataataaagaatatcactaacatggatataataaaggaaaaaaacacatttttcagggtctgcacataacaaaaaagttcctctttgttgtytttctgcaccctcccactttctcttttttttcttttcctttctttctttttttcttttcttttcttttttttttttttgagacagtcttattctgttgcc

SEQ ID NO: 117569 - DNA, 201 bp, Homo sapiens
ctcagccccttctgcatttgggggtcactttgcttatatagccctttcatgaaacatgtgtactagcaaaatactaaagatttatagaaaggggttgggcrcagtggctcatgccagtaatcctagcactttgggaggccaagatgggtggatcacttgaggtcaggagttcgagaccagcctggccaacacggtgaaacc

SEQ ID NO: 117570 - DNA, 201 bp, Homo sapiens
actaacatggatataataaaggaaaaaaacacatttttcagggtctgcacataacaaaaaagttcctctttgttgtttttctgcaccctcccactttctcttttttttcttttcctttctttctttttttcttttcttttcttttttttttttttgagacagtcttattctgttgcccaggctggagtgcagtggcatgat

SEQ ID NO: 117571 - DNA, 201 bp, Homo sapiens
tgtggtttcagtttaggatgctgggagaagaccccataaggacacagccgttgcaaaggacgctcaagcccttcctcagcccatttgttctggaggtggtscaggaggaaggctgttacaataggctggaaagtcatccagctggtggtaacaggacttgctgaatactcggaaatctcagctctctcaagtgctaagcgc

SEQ ID NO: 117572 - DNA, 201 bp, Homo sapiens
cataaggacacagccgttgcaaaggacgctcaagcccttcctcagcccatttgttctggaggtggtccaggaggaaggctgttacaataggctggaaagtsatccagctggtggtaacaggacttgctgaatactcggaaatctcagctctctcaagtgctaagcgccagcaccaacttttagcatctgtgaagtagtttt

SEQ ID NO: 117573 - DNA, 201 bp, Homo sapiens
agcttaacctgggttaacagataagcttagatattaacatcatccacaaagtgtggtttcagtttaggatgctgggagaagaccccataaggacacagccrttgcaaaggacgctcaagcccttcctcagcccatttgttctggaggtggtccaggaggaaggctgttacaataggctggaaagtcatccagctggtggta

SEQ ID NO: 117574 - DNA, 201 bp, Homo sapiens
acacagccgttgcaaaggacgctcaagcccttcctcagcccatttgttctggaggtggtccaggaggaaggctgttacaataggctggaaagtcatccagstggtggtaacaggacttgctgaatactcggaaatctcagctctctcaagtgctaagcgccagcaccaacttttagcatctgtgaagtagttttggtggtc

SEQ ID NO: 117575 - DNA, 201 bp, Homo sapiens
tattaatgaagagggattttgttgttgttacagaaccagggtttcagagtgatttcagaagctggctaactaatttttctcccagtaatcaaatggttttyttagtcagtttctgaaattgctaggaagtctgtgttctttcctgatttccagagtgatggaaggtaaggcacagggtgacttgtcacatcttaacaaaaa

SEQ ID NO: 117576 - DNA, 201 bp, Homo sapiens
gtgggtggattgccagagctcgggagttcaagaccatcctgggaaacatagtgaaaccctgtctctactaaaaatacaaaaaattacccacgtgtggtggygcgcacctgtagtcccagttacttgggaggcagaggcacgagaatcatttgaacctgggaggcagaggttgcagtgagctgagatcgtgccgctgcactc

SEQ ID NO: 117577 - DNA, 201 bp, Homo sapiens
gtgccctcagctcaactgaggagagaggccacatgtgaattaacctgagtaacttctggatggtccatacccaatggccaggatttggcagtgagggagtyagtgaagttttttctggtctgggtaggggccgtagcaccctgaaccaagtcaccaaggacctaggccctttctatcttttacatcttggctttcattcac

SEQ ID NO: 117578 - DNA, 201 bp, Homo sapiens
tcaaagattgaagaaagtatgattaaaatgctaaaagcgcgtcttcctgagttattctgctgtagccccaggagcctcagccgagccaagtgcttgcaatycaggctccatagacccagaatgaacccagaatgaagtttccctttgatggcaatgaggctattagtaggtcaaccagctgcatttagggcctggctggtc

SEQ ID NO: 117579 - DNA, 201 bp, Homo sapiens
ctggcaacatttagcacttggttagtcattgacaaaaccatcctgagttaatgccaagtttgtttccggtctttaaagccacccaagtgaagagctcaacmtgttgcacaaagaaacaatgacagattttttttttttttactttttattttgaaataattatataggccgagtgtggtggctgatgcctttaatcccagc

SEQ ID NO: 117580 - DNA, 201 bp, Homo sapiens
caagccatcatctaggttttaagccccgcgtgcattagatatttgtcctaatgctctccctcccattgccccacaccccctgacaggccccagtatgtgaygttcccctccctatgtccatctgttctcattgttcagctcccacttatgagtgagaacatttgctgtttggttttctgttcctgtgttagtttgctgagg

SEQ ID NO: 117581 - DNA, 201 bp, Homo sapiens
acgccgctggagatggatgccgacggcgccacgtagcctcccatccctgtccccggcacggatccgggtaaggtggcccggggcaaggcagggaccgggastggtcttccgggagcctggaatggcctggggagggggaagtgtaggggggagggtaccatgctggatcccattctatcagatcaggtccaagaggatggg

SEQ ID NO: 117582 - DNA, 201 bp, Homo sapiens
gaccaaggaatgagaatcatctgaacccaggaggcggaggttgcagtgagccaagatcacgccactgcactccagcctgggtgacagtgagactctgtccaaaaaaaaaaaaaaagaaaaatctggattggcagatattttctttcagcacttgaaaactgtcgtgtcacctccttctgacccccatgctttcagatacaa

SEQ ID NO: 117583 - DNA, 201 bp, Homo sapiens
ctgagtcttgtaattcgtattcctctttgttggttttcatgttattgctgttcagatcttctgcaggttcaattctttttgcagaagtcctcagacttctyttcatgatgaccaagggttcgggtgatttgcctctcaccctgggagcaaccctctctgcttcttgctggctggcagctcctctatgatttcctctggtgc

SEQ ID NO: 117584 - DNA, 201 bp, Homo sapiens
agttcgataccagcctggccaacatggtgaaaccctgtctctactaaaaatacacaaattagctgggcgtggtggtgcacgcctgtaatcccagctactcrggaggctgaggcacgagaatcgcttgaacccaggaggcagagattgcagtgagccgagatcattgcactgcactccagcctgggtgacagagctagactc

SEQ ID NO: 117585 - DNA, 201 bp, Homo sapiens
tggtttctcagccccttctgcatttgggggtcactttgcttatatagccctttcatgaaacatgtgtactagcaaaatactaaagatttatagaaaggggytgggcacagtggctcatgccagtaatcctagcactttgggaggccaagatgggtggatcacttgaggtcaggagttcgagaccagcctggccaacacggt

SEQ ID NO: 117586 - DNA, 201 bp, Homo sapiens
tccctctacccagaactgatttttaaaaagaagtaatttttctccctgggctgggaaaaccctaatgaactgaaacacacttttactttaaaatttttctrtctggcgtttttgtaatcatactattaaatgactctggagtcatgttaatgacaggatttgttttgtttggatgcagttcaattgcatggtttgggtaaa

SEQ ID NO: 117587 - DNA, 201 bp, Homo sapiens
aaggacacagccgttgcaaaggacgctcaagcccttcctcagcccatttgttctggaggtggtccaggaggaaggctgttacaataggctggaaagtcatscagctggtggtaacaggacttgctgaatactcggaaatctcagctctctcaagtgctaagcgccagcaccaacttttagcatctgtgaagtagttttggt

SEQ ID NO: 117588 - DNA, 201 bp, Homo sapiens
tttttgtgtgtgtctgtcacagttggcatttctggcttgctggcttctttagcacacaacattcaggatatagaggcagcaaaaagaaaactcagggtcayagtattcctcagttgccaaggttcctagtcagttggccttcttctctccacccttcagactcttatctttgttttatacataatattcggagtttttagt

SEQ ID NO: 117589 - DNA, 201 bp, Homo sapiens
ggctttatccagatgacagatcaatcacaaatctttcagaaaccctttttactactgttgattctcactctagttagtggactaattgggtgatcccggcyatctcagcactcaccgtagccctgagatatcacctctacatggccatatctcagaagcccatgaaagaaaagactgctttggacaaaggagaaaaaaaag

SEQ ID NO: 117590 - DNA, 201 bp, Homo sapiens
cctttcaaaggaaggcgagagggagatggggagaaggagactcggagacttctctattaaagccgcgctgaactctagccttctggcaagccgcggcaagycgccaatttgaagtgtgtgagctttaatctgctcctagcctgatgggctcccgtgtccacagggagctgggaggcatccattacgccggaccaaggagat

SEQ ID NO: 117591 - DNA, 201 bp, Homo sapiens
  misc_feature (1)...(201): n = A,T,C or G
aatgggatttaaactgtactgtttgtttcctcttcactagctttcacttgctcttgaaggaacgtgtcataagtctatatctctccatctctggcatctcncaccctgcctgccatagagtaaccactaggtaaatgtcagataaatgaatgaaatctaattatacaaccctttccccatttcaaaaatatcttccatttt

SEQ ID NO: 117592 - DNA, 201 bp, Homo sapiens
ctgagagctgtcagtgcaactaggcatgaattactatctaataattcccctgctgaaatgtcttattgagattatagcattttattagtaaaggttattcytttaaaaatgtttttgtatgctaattgagaacagggggctcaggaagggaaaagcttctcggctttccccagtagccatttctgaaacttctctttgagg

SEQ ID NO: 117593 - DNA, 201 bp, Homo sapiens
tagaaatttcaaaggtaaagttggaagtcatggaattatatgtgcaagaagctgcatctgttggcaaatccatatcccaggaattaaacccagtcatccartatcaagaagagccatttggcatcttgttttttgccgtgtaagctgaggaatcactggagactggtcatctcagggagaaagtaagcccagtgctaagta

SEQ ID NO: 117594 - DNA, 201 bp, Homo sapiens
gtcaggcccattctgctgctcctaagtcatagcctctatgagctatagtatgccaaagtaccagatacaattatatatgggggaaagaaatttctattttkgtctcaagaaaattatgtgattttgcttaagttcaattttaaaacatggaatatgactgaacttaatgttagtacttaagaaaaatgttcacggtaatta

SEQ ID NO: 117595 - DNA, 201 bp, Homo sapiens
taagaaatggatttgcttgcagttggatgacctttgtactttgtaatgtcatcagaaatgagaaaaaggcgtgagagatcacaaggtactgtggaatagtrgggctgggtgggtgatggggggaggatacactgaatattaagtagtttcattctttcctgaaaagaaagagactccaactaaaatatgccggcgtcctac

SEQ ID NO: 117596 - DNA, 201 bp, Homo sapiens; identical to SEQ ID NO: 20004

SEQ ID NO: 117597 - DNA, 201 bp, Homo sapiens
gatacactgaatattaagtagtttcattctttcctgaaaagaaagagactccaactaaaatatgccggcgtcctacctgtctgtcagcccttgattaaatmtaaaagcaggcatcccatctgtttgcccaaatgaaaagtgtaatattctactaactactttatattattactcaacttcagagtttcctgcaaaatgatc

SEQ ID NO: 117598 - DNA, 201 bp, Homo sapiens
tggaacacttatatgtttcaagctaaggaaccagtataattccagtacagaaaaaatgtattatttaatgatattttttattttttaatttttgtcctaayaaagttctaaaaatatagttagaattatgttcagaaccagaaatatatttcaaaattgaaattgtgatgtttaaaacagaaacaatgagttgcttcctag

SEQ ID NO: 117599 - DNA, 201 bp, Homo sapiens
ggtaatacccacccccataactcagtcatctcccaccaggtcccttccgaaacacgtgggaattatgagagctacaagatgagatttgggtgggaacataragccaaaccatatcagacctcaaatcgtgaaactaccacctgaaaacattggggaaactctccatgacattgtctggggcaaaattttcttgagtaatac

SEQ ID NO: 117600 - DNA, 201 bp, Homo sapiens
aataaaaattgtaaattttaaaataaataaaaaattgtaattggattatttataacacaaaggataaatgcttgaatggatgatacctcattttccatgaygtgattatcacgcattgcatgcttctatcaaaacatttcatgtactccataagtatatacacttacgatatatccataaaaattaaaaataaaacatttt

SEQ ID NO: 117601 - DNA, 201 bp, Homo sapiens; identical to SEQ ID NO: 20005

SEQ ID NO: 117602 - DNA, 201 bp, Homo sapiens
tttatatgaacattaaaatggtagaattgacttaaatcaattaggctcgaacgttgcatattagaatcacctggggaggtttttacacaccctccccagtrcaggcagtactctatatgatgtatctcaattatcagtatttttaaaacccaagtggttccaatatgcagccaattttgaggaaccatgacttaaagataa

SEQ ID NO: 117603 - DNA, 201 bp, Homo sapiens
tgggccggtaagccattgaaaatgtctattattaaatataaaaggaagattgcatacagagaaaagaccacacaagtttccaggttgtaggtttgccaacmtatttggattacctctttatgactgtcattatttttatcatttactagttatacagagacaatagcagctcaagcctgatacacaatgaagacataatta

SEQ ID NO: 117604 - DNA, 201 bp, Homo sapiens; identical to SEQ ID NO: 20006

SEQ ID NO: 117605 - DNA, 201 bp, Homo sapiens
aagattcagaacactggtgattactgtgatctgtgtggaggggagaaattttccactttggctgagttggtccggcattacacagaacatcacgggcaatkaaaagagaagaatggagatgttattgagcttaaatatcctctgaactgtgcagatcctgcctctgaaaggtggtttcagggacacctctctgggaaagaa

SEQ ID NO: 117606 - DNA, 201 bp, Homo sapiens
gcctgtttttggaaccagcacttggggaaactgatcttgtgaggatggatgtgtttagggactcagggcttttgaaagcagcaccaccccactggggcacycccagacttgggaaatgtgactctttcttaatgccactggtttttagtcaggccacagtgagaaggaacagccctaacaggcctccagccaggttgaacg

SEQ ID NO: 117607 - DNA, 201 bp, Homo sapiens; identical to SEQ ID NO: 20008

SEQ ID NO: 117608 - DNA, 201 bp, Homo sapiens
gcaagaggaaaggtcatgaatatacaaatattaagtattctctagcggaccagacgagtggagatcagagcccccccccccgccttgtactccaactccaygctgtgcagaaatgagagcagacagtgctagagtgtatgaaaacgtgggcctgatgcaacagcagaagagtttcagatgagaaaatctgccaaaacttca

SEQ ID NO: 117609 - DNA, 201 bp, Homo sapiens
acaggtgtgagccaccgcgcccggccgcatatataaatgtttttaaacctgtttttaaatatgaaattaacatgtgttcactataaaaattaagaaaaacrgaaagaaactaaccctttctgtagggaaaaccactgaagccattgtgatgattggctgcctgccttctgtgtacagcgcacggaggcacagctttaagca

SEQ ID NO: 117610 - DNA, 201 bp, Homo sapiens
caggacacagctcctcaggatgtggcagccgctgatgtacatggtactcgcgcggcttctcagcagcttagaagctgcccagcgtgtgtcaatgggcaacrgctaaggaaatgtcttaaaaatcctaacctggccaggtgcggtggctcacgcctgtaatcctagcactttgggaggccgaggtgggcggatgacttgagc

SEQ ID NO: 117611 - DNA, 201 bp, Homo sapiens
ttgggaggtggggtctgagaggcagttgggccgtgacagcagagtgaatggcttaatgtcatgatcaagggagtgggtttgttacacaaggagtttggccygttttgtgctctctctcgccctctagccttccaccatgggatgacacagcaagaaggcccttgccagatgccagcactttcatatggaacttcccagacc

SEQ ID NO: 117612 - DNA, 201 bp, Homo sapiens
aggccacatcaggacacagctcctcaggatgtggcagccgctgatgtacatggtactcgcgcggcttctcagcagcttagaagctgcccagcgtgtgtcartgggcaacggctaaggaaatgtcttaaaaatcctaacctggccaggtgcggtggctcacgcctgtaatcctagcactttgggaggccgaggtgggcggat

SEQ ID NO: 117613 - DNA, 201 bp, Homo sapiens
atatgagactctaggccccttggggcctcgggttgatgggttgctgtgcacctttcccattgtccggtggtttctgctgcactgaagggtccttcgctctmctctcttgagctttgcaggagggtggcccaggatttgggaaacccaggcagcgagccctgcgttacacatctaggcccttcatctgcaagctgatgcctg

SEQ ID NO: 117614 - DNA, 201 bp, Homo sapiens
ggccagcgcaggccacatcaggacacagctcctcaggatgtggcagccgctgatgtacatggtactcgcgcggcttctcagcagcttagaagctgcccagygtgtgtcaatgggcaacggctaaggaaatgtcttaaaaatcctaacctggccaggtgcggtggctcacgcctgtaatcctagcactttgggaggccgagg

SEQ ID NO: 117615 - DNA, 201 bp, Homo sapiens
tcttcccgccttggcctcccaaagtgctaagattataggcatgagccactgtgctgggctgcggctctcagcttctttgaaggccgcgtgtggactgaccmcatgacctggagcagtacagcggcacctgatttttggatggtctgagagatggcagaaatgctgtgaggcaggggagacattgattttatgctgctgttg

SEQ ID NO: 117616 - DNA, 201 bp, Homo sapiens
tgtgttccgttcgcatgggaatccctgatctatttcctcagagcccagacggctaaacaggccgtggacacagatgacatcattcccggtggtcactcagmgtgtagcatgacctgtgccatgaagggaatatgggagccggtggggagtctgtggagggggagggaggcctgaggacagagggaaggttggccagcgcag

SEQ ID NO: 117617 - DNA, 201 bp, Homo sapiens
gttgttgagactcgaggcatcttccggtgctcaggtggtttgtttttgtttttgttttctttaaaccaatgtttttcaattgggggatgcgttgtaagaawtactgaagccagccaggcgcggtggctcacgcctgtaatcccagcactttaggaggctgaggcaggcagatcatgaggtcaggagatccagaccattctg

SEQ ID NO: 117618 - DNA, 201 bp, Homo sapiens
cctgggctcaagcagtcctcctgcctcggcctcccacagtgctgggattacaggcttgggccactgcactcggcttagtctcatgactttttactcaaaaygttaatgttttccacattatcattagcgacttacaaccttctctgtctggtcatcacaactgtttgcgggctgcttttcctgcatcttgcttagcagctt

SEQ ID NO: 117619 - DNA, 201 bp, Homo sapiens
ttctgtgggaccagagtaaatatcattatgccacagccaggcttaagcaatctatctgcagtgccgttcccgcagcgcacactgctccctctgtctctgcygatgaccttcgaggctgtcctaggcaggttctccctgaggagctccccacaccaagcctccctaactctgcaaagcagccggagcaacagagagcagcgg

SEQ ID NO: 117620 - DNA, 201 bp, Homo sapiens
tatgaagtcggggcagtgggagcagaaaagagggctgagtgagaatcagtcttgatggggcacatggatgttggtacatttcacgaaaacggagtaaagargaggctcaggttttggggatgatggtaaagtgcatttgggttatgttaatcagtatccaggttcctctaggtgatgtgttcagtgtccagttgactgtgg

SEQ ID NO: 117621 - DNA, 201 bp, Homo sapiens
ggcctgggtttctgctggtttcaccatccagccacgtccctggggccgggctgacccatgtttaccttcagccccaggttcagctccttgagcgaacggcrcatttcgttggtcaggatgttcattctttcacattcttgaaaggcgactaccacatagggggtcttttccgctgcctttgccatgatctcagccatgttg

SEQ ID NO: 117622 - DNA, 201 bp, Homo sapiens
ctgaagatgtttacctggctcaagccacggaggcggaaacaactcactttccctttttaatcgtgttcctgcccagtagagggtccagcacggggtccacrgtttcgccgatgttctcaatgagcaacgtgtccccttccgagatggcctgctcgatgacatccaggtagctgcgggcacaacacggaagctggttcatgg

SEQ ID NO: 117623 - DNA, 201 bp, Homo sapiens
acagccgacggtcccagtcatctgtgatgtggccgccatacatgatttcaccaaaaaggtagcggagatcgtcccagggcacctgaggaaggatgacagcrggtaggggaaagtgcccctgtgccccttctctgccatgagagggtcaggctcaggcaggcagggcgtgggaacccagccattggtgctgtgtccttctcg

SEQ ID NO: 117624 - DNA, 201 bp, Homo sapiens
atctctgcgttggggtgcaggccatacagatagggactctcagggggcaggttctcatcgatgtattcgtggtaaccctgaaaaagagggcagtttgtaarcagaggcaaagctgtgcaggctgaaacccatgtcctgttggttaagcattccttgccagaacgttcacccacaccttgctgtctgtacagatcccacttg

SEQ ID NO: 117625 - DNA, 201 bp, Homo sapiens
ggatgacagcgggtaggggaaagtgcccctgtgccccttctctgccatgagagggtcaggctcaggcaggcagggcgtgggaacccagccattggtgctgygtccttctcgccctccaggtcagcctcctggccatttaccttcagggtcaccaggccccagggccacctttctttccattccgcgccaccagacgccaat

SEQ ID NO: 117626 - DNA, 201 bp, Homo sapiens
cataacatcacttccactgtgcgctggccggaagagctgtcatcaaataccagtgggagttcattgaataagaatcagttgatgaatcaatcatctgattwggtctcatgaatttatatacatatgtatatattttttaggttgcttatttttgagatggagtctcgctctgttgcccaggctggagtgcaatggtgcagt

SEQ ID NO: 117627 - DNA, 201 bp, Homo sapiens
aagagatcattccaacatgtaattgggataaaaataagataattgattcttttttggtacccagcatgtgaaatcctgccgctcacagtcagcttcttccygcttccgcacacctgttctttccctgaagtttgcagctcctgaagggcgaggcagatgttttcataacatcacttccactgtgcgctggccggaagagct

SEQ ID NO: 117628 - DNA, 201 bp, Homo sapiens
gccgccgttcccactcccttcatgcttccttgcagtctcacgtcacacctttgctctggaacattcttcttcctacaaagcctggctcatgggcggcctcrccatgaagccaggcccttgttcttcccgcctccatgtgcccgttttggagcctctttctcctgcacagcgcagttcagcagaaggacggtgggagccacg

SEQ ID NO: 117629 - DNA, 201 bp, Homo sapiens
agtatggctcatcatcactcttttttttttcttctttgagatggagtcttgctctgttgcccaggctggagtgcagtggcaccatctcagctcactgcaayctccgcctcccaggtttaagcgattctcctgcctcaggctcctgagtagttgggataacaggcatctgcatcatgcccggctaatttttttgtattttta

SEQ ID NO: 117630 - DNA, 201 bp, Homo sapiens
atgcgtctctacaaatatcggaacgagctacgaagagcagagcaagagaaggctccaggctgctgcaggatctgttacaagggggctcagggagggcctckctgaggagtagacactcgggcagttggcctgagtgaagagggagcatccatgccaccgtctggggccggagtttcctggcagaggggagagaaatgagga

SEQ ID NO: 117631 - DNA, 201 bp, Homo sapiens
gatgacagcgggtaggggaaagtgcccctgtgccccttctctgccatgagagggtcaggctcaggcaggcagggcgtgggaacccagccattggtgctgtrtccttctcgccctccaggtcagcctcctggccatttaccttcagggtcaccaggccccagggccacctttctttccattccgcgccaccagacgccaatg

SEQ ID NO: 117632 - DNA, 201 bp, Homo sapiens
cagagcacacgccaggcgaccacacgcttcccaccccgccgccgttcccactcccttcatgcttccttgcagtctcacgtcacacctttgctctggaacaytcttcttcctacaaagcctggctcatgggcggcctcgccatgaagccaggcccttgttcttcccgcctccatgtgcccgttttggagcctctttctcctg

SEQ ID NO: 117633 - DNA, 201 bp, Homo sapiens
gggagcatccatgccaccgtctggggccggagtttcctggcagaggggagagaaatgaggagcctcctcgaccacatggggcttgcagaacagcaggggcrctgggagtggtgggcactgagattggagggtgggcagggcctattggaaagggcccagaagccatggcacgctgccatggaggccaggagtgccgaggcc

SEQ ID NO: 117634 - DNA, 201 bp, Homo sapiens
gggaggcgccgatcgcccgtggcccagcctcccaagccctggctgccagggcacgtcaccgaggcagctctgaccttctcctcgatctcgctggctgtgtrcttggtggtctccagattctccaccaaggccgtgtctcccagaaagttccccgacgcagccgacagacgggccaggagcgaatcttccagctctttcaga

SEQ ID NO: 117635 - DNA, 201 bp, Homo sapiens
cctcctggccatttaccttcagggtcaccaggccccagggccacctttctttccattccgcgccaccagacgccaatgtccggcccctttggcttctctcmcaaggggctgtgtggcacctccctccaccttggacagcgcttccacagccggcatgctctgcacctcccgtggggcaggtgtttctgctgtgcctcactg

SEQ ID NO: 117636 - DNA, 201 bp, Homo sapiens
accagagcacacgccaggcgaccacacgcttcccaccccgccgccgttcccactcccttcatgcttccttgcagtctcacgtcacacctttgctctggaayattcttcttcctacaaagcctggctcatgggcggcctcgccatgaagccaggcccttgttcttcccgcctccatgtgcccgttttggagcctctttctcc

SEQ ID NO: 117637 - DNA, 201 bp, Homo sapiens
atgaggaggccccttaactcagcctggagggtgggaggctcctggcctgtggcttctgactctgccacgggttatttccctgaagtggctttgataaacgkgagctgactccccagttaccgctgaaacagaaacacccaacctgcttttctggggcgtcttgccttttcccggactgatgtgcttctgccactccctctc

SEQ ID NO: 117638 - DNA, 201 bp, Homo sapiens
ggcaggtgggaggaagctcctgtctcaggtctgaggctggcggacgcctgccttgcaccttgtcttgccagctccatgctctggggaagagggggtgggakgggggctctgtgtacgaggggccatgagtgctgttcggcttggaccaacctgggcagcgtgagccatctggatcagagccaccaggggaagggggcagcc

SEQ ID NO: 117639 - DNA, 201 bp, Homo sapiens
tgcctccagggtctttgcagtcacatagagggtttgagcaagtgacttatctgacctaggctgcccaggccttagggaacgaagaccaaactcggcagtgkggaccagagcacacgccaggcgaccacacgcttcccaccccgccgccgttcccactcccttcatgcttccttgcagtctcacgtcacacctttgctctgg

SEQ ID NO: 117640 - DNA, 201 bp, Homo sapiens
cttgggcgccaggaggggaggatttttcttttccctccgatagccctactgggcgctaagattgttgtgaatcattaccctcagaatttggactttctagrtgcttcttaacccatgatttaggtgagtaaacttggaaaaatgtttttgcaaaacttgatgatcaagctgaacgtagaacgatattcctaatgggtgtgt

SEQ ID NO: 117641 - DNA, 201 bp, Homo sapiens
acctgaggaaggatgacagcgggtaggggaaagtgcccctgtgccccttctctgccatgagagggtcaggctcaggcaggcagggcgtgggaacccagccwttggtgctgtgtccttctcgccctccaggtcagcctcctggccatttaccttcagggtcaccaggccccagggccacctttctttccattccgcgccacc

SEQ ID NO: 117642 - DNA, 201 bp, Homo sapiens
atcctctcttattttggctgcctgggttcttgctcaattattgacactccatttgtgctggcaggctctcaccgggaggcacgagccttcattacgttgarctcctgtttaacttgtcatccttaccttgtagtccaggttgggggggatctgaaagccgggggccagcaggacgtctccctccagcatctccgtccggat

SEQ ID NO: 117643 - DNA, 201 bp, Homo sapiens
gcactctgctgtcagcacagcactctctgggagccaggcaacaagaggcttcacggagtgactgtgttgaacttgctggtggccccatgagtgtggtgatrcaaggaagagcagcgtggggggaagaggcaccttctcatgtaaaatgaccccgtggctcagcagctgccagtggatttcagtgcagtctggtgacagaaa

SEQ ID NO: 117644 - DNA, 201 bp, Homo sapiens
cctgagtagttgggataacaggcatctgcatcatgcccggctaatttttttgtatttttatttttagtagagatggggtttcaccatgttggctaggcttrtcttgaactactgacctcaggtaatctgcacgcctcggcctcccaaagtggtgggattacaggcgtgagccaccgtgcgcggccacggctcatcatcact

SEQ ID NO: 117645 - DNA, 201 bp, Homo sapiens
atgtcctgttggttaagcattccttgccagaacgttcacccacaccttgctgtctgtacagatcccacttgtttcccagccccctttgtgggctgcccccygtgctcccagcgacataaaggaaaattccattcccccttccctgaggctgcatttctttctttaaaaaaaaaaaaaaaaaaaaaaaggttgtttgtatta

SEQ ID NO: 117646 - DNA, 201 bp, Homo sapiens
ccgaagcctgcagctgccacgtctgaggacctgctgaccagcctgcgggccataccccagtgtttctgatacccaagcccgaggctggggcagagtgtacstcaccagcaagttcccctgtactgccgccagtccctgtgaccccctcctcagttctagatcctcccccttcctctcgcttgggagcagtttcaaagatcc

SEQ ID NO: 117647 - DNA, 201 bp, Homo sapiens
tcatgcccggctaatttttttgtatttttatttttagtagagatggggtttcaccatgttggctaggcttgtcttgaactactgacctcaggtaatctgcmcgcctcggcctcccaaagtggtgggattacaggcgtgagccaccgtgcgcggccacggctcatcatcactcttgagaggagctcatttgctcccgtctct

SEQ ID NO: 117648 - DNA, 201 bp, Homo sapiens
gtctgggcccgtacgctcacccgaagcctgcagctgccacgtctgaggacctgctgaccagcctgcgggccataccccagtgtttctgatacccaagcccraggctggggcagagtgtacctcaccagcaagttcccctgtactgccgccagtccctgtgaccccctcctcagttctagatcctcccccttcctctcgctt

SEQ ID NO: 117649 - DNA, 201 bp, Homo sapiens
tgtcttggcaagtagcactggctctggaagcttctgcagacagacaagagccctccttaccttccatgaagagtccgtacacgtaggagccctctcgcggrggagcggtcatgtcctctcggtttttcttggtcacctcgacagacagacacatcttgtccaggggccactcgttcttcctggccatggactgcatgatgg

SEQ ID NO: 117650 - DNA, 201 bp, Homo sapiens
ccatgtttaccttcagccccaggttcagctccttgagcgaacggcgcatttcgttggtcaggatgttcattctttcacattcttgaaaggcgactaccacrtagggggtcttttccgctgcctttgccatgatctcagccatgttgaaagtctccggaatcttctccaggatgtcgtccagcacggccttcacctggaagc

SEQ ID NO: 117651 - DNA, 201 bp, Homo sapiens
tccgatgtgcttggttacaaagcacctgattatttaagagaacgaaaaaccaccaccagttcctgtaaagaataagtcacaggtgcacaggtgaagggctkagttgtggtccagccccagggagtgtgggctgtgaggcaggagcgagctaaacctgtaggagcagcgccacggctgccaggatccacttcgctgccttct

SEQ ID NO: 117652 - DNA, 201 bp, Homo sapiens
tccttcctggttctcatccttccagtagctcccgtgcctccagggtctttgcagtcacatagagggtttgagcaagtgacttatctgacctaggctgcccrggccttagggaacgaagaccaaactcggcagtgtggaccagagcacacgccaggcgaccacacgcttcccaccccgccgccgttcccactcccttcatgc

SEQ ID NO: 117653 - DNA, 201 bp, Homo sapiens
tggtcaggatgttcattctttcacattcttgaaaggcgactaccacatagggggtcttttccgctgcctttgccatgatctcagccatgttgaaagtctcyggaatcttctccaggatgtcgtccagcacggccttcacctggaagccagtccccggacagcccctgtcactgcaaagagcccaccccacccactgcaggg

SEQ ID NO: 117654 - DNA, 201 bp, Homo sapiens
tttctcatcctctcttattttggctgcctgggttcttgctcaattattgacactccatttgtgctggcaggctctcaccgggaggcacgagccttcattaygttgagctcctgtttaacttgtcatccttaccttgtagtccaggttgggggggatctgaaagccgggggccagcaggacgtctccctccagcatctccgt

SEQ ID NO: 117655 - DNA, 201 bp, Homo sapiens
gaacccagccattggtgctgtgtccttctcgccctccaggtcagcctcctggccatttaccttcagggtcaccaggccccagggccacctttctttccatyccgcgccaccagacgccaatgtccggcccctttggcttctctcacaaggggctgtgtggcacctccctccaccttggacagcgcttccacagccggcatg

SEQ ID NO: 117656 - DNA, 201 bp, Homo sapiens
ctttgccaagagctagttttatcttgtcttggcaagtagcactggctctggaagcttctgcagacagacaagagccctccttaccttccatgaagagtccrtacacgtaggagccctctcgcggaggagcggtcatgtcctctcggtttttcttggtcacctcgacagacagacacatcttgtccaggggccactcgttct

SEQ ID NO: 117657 - DNA, 201 bp, Homo sapiens
ggggtttaatcacgttggccaggctggtctcgaactcctgacctcaagtgatcctcccaccttggcctcccaaagtgctgggattacaggtgtgagccacygcgcccggccgcatatataaatgtttttaaacctgtttttaaatatgaaattaacatgtgttcactataaaaattaagaaaaacagaaagaaactaaccc

SEQ ID NO: 117658 - DNA, 201 bp, Homo sapiens
tttatcatcttcaggtgcttgacccttgcacagagagaagcttcctgggctacagggcatggcagcctgtcctttcggggagtgagattagatttagtccytgcactttgcctctctagaagcagcttctcgcctttccctcccgagggctggcaggagtcactgtcagtcacccttcatggggtctgaaaggttgcatgg

SEQ ID NO: 117659 - DNA, 201 bp, Homo sapiens
tcggtgcccttcctggcgctcagctagggaagctggaagactgcagggtggagggctgggatgctctcggagccgcatccacacccccaaggatccctttkgtctgggcccgtacgctcacccgaagcctgcagctgccacgtctgaggacctgctgaccagcctgcgggccataccccagtgtttctgatacccaagccc

SEQ ID NO: 117660 - DNA, 201 bp, Homo sapiens
ggtgtgtggacaggggaagcccagaggggaggtgtccccagagttcagagcggtcctcagtggtcctcggggccccaagggatggatgccaggccgtggcrtgggatggggaggcagcccgagcaggcgtggccctacctgggtgaacaggtccagggccttgtgcaagttggcgtgcatgcccgtggggggctcgttggt

SEQ ID NO: 117661 - DNA, 201 bp, Homo sapiens
ctggacgttccacgccaaaggtgcgcagcggctggctggaggacgttccagtgtgggacagccacaaacatgggcagggggtggggagccctggcgcctasctgttagagtgctgtacttctcccttcctaccttcccagcagcccttgcaggcacatcatagctgtcccatgacttggggagaggcgagcattcatctcc

SEQ ID NO: 117662 - DNA, 201 bp, Homo sapiens
ctgttgtgctggccaggccagggtggggaatggtcggtgcccttcctggcgctcagctagggaagctggaagactgcagggtggagggctgggatgctctyggagccgcatccacacccccaaggatcccttttgtctgggcccgtacgctcacccgaagcctgcagctgccacgtctgaggacctgctgaccagcctgcg

SEQ ID NO: 117663 - DNA, 201 bp, Homo sapiens
aggtaatctgcacgcctcggcctcccaaagtggtgggattacaggcgtgagccaccgtgcgcggccacggctcatcatcactcttgagaggagctcatttkctcccgtctctccctgctccagcttttctttccgagtctgattttgattgattgagacagggtctcgctgtgccacccaggctggaatgcaatggcatga

SEQ ID NO: 117664 - DNA, 201 bp, Homo sapiens
tacctgcctgcacatccggctgcccggtgcgagctgctactgctgttgtgctggccaggccagggtggggaatggtcggtgcccttcctggcgctcagctrgggaagctggaagactgcagggtggagggctgggatgctctcggagccgcatccacacccccaaggatcccttttgtctgggcccgtacgctcacccgaa

SEQ ID NO: 117665 - DNA, 201 bp, Homo sapiens
cttttttggtacccagcatgtgaaatcctgccgctcacagtcagcttcttcctgcttccgcacacctgttctttccctgaagtttgcagctcctgaagggygaggcagatgttttcataacatcacttccactgtgcgctggccggaagagctgtcatcaaataccagtgggagttcattgaataagaatcagttgatgaa

SEQ ID NO: 117666 - DNA, 201 bp, Homo sapiens
agagatgattgtttctctgggacaacagttcaaccagcaactcagtttcttgggcattaagacagaagtttttgctttgtaatcctcggaaataatgcctrtggtaggactgaggataaatgctttgaccggtattgagtggtagtgtaggtttctgagcctttctttgccttattcggtttgcagttcttttctgattcg

SEQ ID NO: 117667 - DNA, 201 bp, Homo sapiens
acagttcaaccagcaactcagtttcttgggcattaagacagaagtttttgctttgtaatcctcggaaataatgcctatggtaggactgaggataaatgctktgaccggtattgagtggtagtgtaggtttctgagcctttctttgccttattcggtttgcagttcttttctgattcgttgtggccttggtgttcgagttat

SEQ ID NO: 117668 - DNA, 201 bp, Homo sapiens
gtgatccccctgcctcggcctcccaaagtactggccactgtgtgcggccacgggcctagacttcgattctttttttttttttttgagacggagtctcgctstgtcacccaggctagagtgcagtggctcaatcttggctcactgcaagctccgcctctcgggttcacgccattctcctgcctcagcctcccgcatagctgg

SEQ ID NO: 117669 - DNA, 201 bp, Homo sapiens
agctgcctccctctcacctgggtctcctatgtatcttttgggggtttgacctatggtagcactgccattctttgtacccctgcctccttctctggggtggrgctgctagggagaggccccctggctgttaggactgatttggggtatcatcttggggcactgatgtgttctgctcatgtgtctatatacctgtccatctat

SEQ ID NO: 117670 - DNA, 201 bp, Homo sapiens
tggtgaggagagcttgaagaggtctggtctgggccttctaggcctcactggcagtgtcctcctacccacacagggccccaggcagctctgtctgccagttsagggcttggccgactgtggcctgccacctgttatggtgtagactgtgagctaagaaagaatggtttttacattttcaaataattggggaagagaaaaaat

SEQ ID NO: 117671 - DNA, 201 bp, Homo sapiens
cccctgtactgccgccagtccctgtgaccccctcctcagttctagatcctcccccttcctctcgcttgggagcagtttcaaagatcctgccttctcctcgmgggacactcccgtgcctgcccccgagtccgtctcttttggctgcatttccaggacagtgcggaacagcttctctgaggtgaccgtcagaaagccaatctc

SEQ ID NO: 117672 - DNA, 201 bp, Homo sapiens
cattcatttgtgtattgtctgtggtcactttcatgctgcagtggcagaacggggtagttgtgacagtgcccatttggcccgtaaagctccaaatatttacyctctggccgtttacacaaaaggctttctgaccctgtactagacaaacggacctgagtgcaagttgggctggctggctcgttctgccaagggctggtgtca

SEQ ID NO: 117673 - DNA, 201 bp, Homo sapiens
tcttgtcttggcaagtagcactggctctggaagcttctgcagacagacaagagccctccttaccttccatgaagagtccgtacacgtaggagccctctcgyggaggagcggtcatgtcctctcggtttttcttggtcacctcgacagacagacacatcttgtccaggggccactcgttcttcctggccatggactgcatga

SEQ ID NO: 117674 - DNA, 201 bp, Homo sapiens
ttagactttttgtagagatggggtctcactatgttgcccaggctggtctcaaactcctgggctcaagtgatcctccccaaagtactgggattacaggtgtsagccactgcacctggccatcagagggtaattctattagggacatgagtgtcctttgggaaacctggctgctttcaggttacttggagaaatgaaaagggg

SEQ ID NO: 117675 - DNA, 201 bp, Homo sapiens
gtgggaggggcatgggctaggcccttctggccctgatctgacagaggacaggcccccaggagcctcctggccatgctcctgcaggctctagggtgtggggygtgccgagctctgggcactcggtccccgagtcttaggaagcctctcagagaaaacggcacttaccctgatgcggagcagcaggtctgcgtaccaggccgc

SEQ ID NO: 117676 - DNA, 201 bp, Homo sapiens
ctccaagacgctcagacccataaacaattacaagaagtaggtagaaggtcatggcagtaccttggagaggtcatggaaggcttcctggtgcagtggctcakagctgttttgaaggaggggtcggagtagttaggctcggtgaagaagagggggagtggatgttcaagaagtgatagtgacatggactgcagcgaaaggcaa

SEQ ID NO: 117677 - DNA, 201 bp, Homo sapiens
tctacagacacatgccaccacgtccggctaatttttgtatctttagtagagacagggtttcaccatgttggccaggctggcctcgatctcctgaccttgtwacctgcccacctcggcctcccacagtgctgggattacaggtgtgagccactgcgcccagccacttttttgttttttggtggtgggaggggcagtgtggca

SEQ ID NO: 117678 - DNA, 201 bp, Homo sapiens
tgtaatcatcagacttctgccagacttacccttctgctaggtgtcttttagtggtggctgcaggcaaatatttttgaggtagattcattagaacgttgccrtgtggtagctaaccatgtggtagcttttatgagtttacttgtggatgctctaaatttggttcctgagttgtttggaattaaagtttgggatttatctata

SEQ ID NO: 117679 - DNA, 201 bp, Homo sapiens
gggataaaccttttctgagcaaattcccaggagttacattgtggaaagccgggaactgacccccatggggttctgtctgatgtgaaagaaaaaaataggtmcctgagcagcgagcagtatagtttcagagcaagaactggctccttctgtcctggctgatgtgttgcagttagatggtgatgatggtgatgatgatgatga

SEQ ID NO: 117680 - DNA, 201 bp, Homo sapiens
taaccacagcctctgcctcctcacgtctcttggggctttgggactgggccatgtgctttcttggtaagtaagcctccctgggatgggggaattgagcttgygcaggtggtcagcccctggaggctgggattattatgcagtgggggctgctttagcatggggataaaccttttctgagcaaattcccaggagttacattgt

SEQ ID NO: 117681 - DNA, 201 bp, Homo sapiens
cctcctcccgtgtgaccaaacttcaggccattaccttcagctgttccagatctgggcgctctttggccaccacagcggccaagagttggtcctcgagtccrtccctggtgaccaggaagttgatgagggtgcactgagcctgcatctctggcttgtagtgtgggttgaagtacttggtgtgtaggatcaggcggaacttgg

SEQ ID NO: 117682 - DNA, 201 bp, Homo sapiens
ccttgagggagaactggtagacggggttgattttgttgagatcgttcagtatgaagtagagcagagatgccctctccgcagccgggcggtagttctctctygcttcgttgattttaacttctgtgatttttgcctccaccacctcgacacaaacaaaaggggtgtgaatgacacagcagatgggcagtgccatgagcaggt

SEQ ID NO: 117683 - DNA, 201 bp, Homo sapiens
ggagcctcctggccatgctcctgcaggctctagggtgtggggcgtgccgagctctgggcactcggtccccgagtcttaggaagcctctcagagaaaacggmacttaccctgatgcggagcagcaggtctgcgtaccaggccgccaggcccatcatggaggggtaggcccgggccacccacgtatcaggcacggtgtcatag

SEQ ID NO: 117684 - DNA, 201 bp, Homo sapiens
tagtcacgtctgtttcaatctccttgcttttaagtgaccccctccctatacaatcagggcagtaaatctgctttgctccacgtcatagaaatgtgaaacaygtcaatgctgagggatgatctgcgctcatgggtgtttgggatggtccaaggccaccgcagagcacgcaaatgcttccgcagtgggtggctgtttccttct

SEQ ID NO: 117685 - DNA, 201 bp, Homo sapiens
acggtggtgggcagggcaaagtctgtcgtccaggcctcgagttcctgcaaggacacacgagccgctaggaggagaggacatagaatgacatgggaacgacmgggccttggccgttctgagcaggggtcacgccagaaccttccacgggccactcagcgagctagaagtgctggacagagtaggggccatggagcccagcca

SEQ ID NO: 117686 - DNA, 201 bp, Homo sapiens
cgcggctgtcagtgcttgcaacagtgcctgacacgagacacccttggccagtgctggctttgttattagtcacgtctgtttcaatctccttgcttttaagygaccccctccctatacaatcagggcagtaaatctgctttgctccacgtcatagaaatgtgaaacacgtcaatgctgagggatgatctgcgctcatgggtg

SEQ ID NO: 117687 - DNA, 201 bp, Homo sapiens
ctacaaaagcccccaactctttctaacatgaccccaataagtctggggtcagtcggggtctcggctaatcctcccatggaggaccgagtgatgttctggcrgtctttggatcaggtgttggcctttcttctgtgatcacagagggctgagcttactgtaatgtataaagaatgaatcacctgagctaagattagtaaactt

SEQ ID NO: 117688 - DNA, 201 bp, Homo sapiens
gaggccagccttggaaggcacccagggtcaactgcggggggtgggggcgctgagaaggaaggaagttcagattagagcaaagctttggtgagcctaaaaamgtcaaagaaaaaagcaacttcagatgatataaacacctctctctacaaaagcccccaactctttctaacatgaccccaataagtctggggtcagtcgggg

SEQ ID NO: 117689 - DNA, 201 bp, Homo sapiens
ccgagtcttaggaagcctctcagagaaaacggcacttaccctgatgcggagcagcaggtctgcgtaccaggccgccaggcccatcatggaggggtaggccygggccacccacgtatcaggcacggtgtcatagaagagagccgtggacagatcttccacgtcggtcgtgatggtcagttctccctaggagacacacagatg

SEQ ID NO: 117690 - DNA, 201 bp, Homo sapiens
atatattttttaggttgcttatttttgagatggagtctcgctctgttgcccaggctggagtgcaatggtgcagtctctgctcactgaaacttctgcctccygggttcaagcaattctcctgcctcagcctcctgagtagctgggattacaggtgcacaccaccatagccagctaatattttggatttttagtagagatgag

SEQ ID NO: 117691 - DNA, 201 bp, Homo sapiens
gtttcaccgtgttggccaggctggtcttgaactactggcctcaagtgatctgcccaccttggcctcccaacgtaccaggattacaggtgagagccactgtrcccggccttgttgtctttgagagacagggtgttgctctgttgccccggctggagtgtagtgctgtgatcatggctcactgcagccttgaactcttgggct

SEQ ID NO: 117692 - DNA, 201 bp, Homo sapiens
tccctccaccttggacagcgcttccacagccggcatgctctgcacctcccgtggggcaggtgtttctgctgtgcctcactgtgcctcagaggccacagggmtgaatcggaactcgctccctctgcctctcccactctgtgttaccatctgagactctgcccttcacggtccaatttcaacacaagtggtttgattctgtgt

SEQ ID NO: 117693 - DNA, 201 bp, Homo sapiens
ggtttcaccatccagccacgtccctggggccgggctgacccatgtttaccttcagccccaggttcagctccttgagcgaacggcgcatttcgttggtcagratgttcattctttcacattcttgaaaggcgactaccacatagggggtcttttccgctgcctttgccatgatctcagccatgttgaaagtctccggaatct

SEQ ID NO: 117694 - DNA, 201 bp, Homo sapiens
tggtgctgtgtccttctcgccctccaggtcagcctcctggccatttaccttcagggtcaccaggccccagggccacctttctttccattccgcgccaccaracgccaatgtccggcccctttggcttctctcacaaggggctgtgtggcacctccctccaccttggacagcgcttccacagccggcatgctctgcacctcc

SEQ ID NO: 117695 - DNA, 201 bp, Homo sapiens
cctctccttgcttggtggcggcctcagtcctggctcgccgcttggtcagagcggttcagatgtgggtcttcctcaagatgatgggaagaaactttcctccyctccccaaggcaccctgctgaggacctctctcagtcaggggtcctcagcacttaggcccagcccattcctcagttcagggaatttgcctgcagattccac

SEQ ID NO: 117696 - DNA, 201 bp, Homo sapiens
ctgggaggcggaggttgcagtgagccgagatcgtgccattgcactccagcctgggcaacgagagcaaaactccgtctcaaaaaaaaaaaaaaaaaaaagtrgaggtacccaggaggcagcacagagccacccagacaagcgagaatttgttcagaacactggcatcccctgaactcttctaatcctttgagcagtaacagg

SEQ ID NO: 117697 - DNA, 201 bp, Homo sapiens
tctcaaatgacatatttgggatattttctttttcttcccaaacctgaatctcaggggcttttgcctgtgggagggtggagggtggtaggtctgctactgtrgctcttccattctttagggatagactgatttctctgcctgtgaaacgcagaaatatgtttccagataattccacctatgcttatatactgggacggcagc

SEQ ID NO: 117698 - DNA, 201 bp, Homo sapiens
cgggtctgaccggagctccagaccgctcaggcctagagcgagggagatgaaacagaactaaagggctcctgctttttttttttttttttttttttttttttgagatagggtttctctctgttgcccaggctggagtgcagtgggggtaatcttagctcactgcaggcttgacctctgtaagggcttttagattccccttct

SEQ ID NO: 117699 - DNA, 201 bp, Homo sapiens
ggccttggatcccttggtgccgtgtctctggccttgctccctgtagttctgttgcgctgattcggtcgtgaaggaaggtgctgccaggccgcttcacctgyatcgccttggctttgggaggtggggctgagtgggcatctgggttggatctcaggcaggtggcagttcctctgattcatggttgtcagtttcctgttgcct

SEQ ID NO: 117700 - DNA, 201 bp, Homo sapiens
ctccttgagcgaacggcgcatttcgttggtcaggatgttcattctttcacattcttgaaaggcgactaccacatagggggtcttttccgctgcctttgccrtgatctcagccatgttgaaagtctccggaatcttctccaggatgtcgtccagcacggccttcacctggaagccagtccccggacagcccctgtcactgca

SEQ ID NO: 117701 - DNA, 201 bp, Homo sapiens
ttggctttgggaggtggggctgagtgggcatctgggttggatctcaggcaggtggcagttcctctgattcatggttgtcagtttcctgttgcctggccctygctcctcgcccagtaggtgtggtgggacaaggttctgggagctggggtagaatttggactcttaacgggaagtgcctcgtgctgccgcagacacatctgg

SEQ ID NO: 117702 - DNA, 201 bp, Homo sapiens
gcggaaacaactcactttccctttttaatcgtgttcctgcccagtagagggtccagcacggggtccacggtttcgccgatgttctcaatgagcaacgtgtycccttccgagatggcctgctcgatgacatccaggtagctgcgggcacaacacggaagctggttcatggcagagggcctcgtgatggaacggtgcgcacgc

SEQ ID NO: 117703 - DNA, 201 bp, Homo sapiens
ggtagatgtgaagctgcctccctctcacctgggtctcctatgtatcttttgggggtttgacctatggtagcactgccattctttgtacccctgcctccttytctggggtggggctgctagggagaggccccctggctgttaggactgatttggggtatcatcttggggcactgatgtgttctgctcatgtgtctatatacc

SEQ ID NO: 117704 - DNA, 201 bp, Homo sapiens
gtatcttttgggggtttgacctatggtagcactgccattctttgtacccctgcctccttctctggggtggggctgctagggagaggccccctggctgttargactgatttggggtatcatcttggggcactgatgtgttctgctcatgtgtctatatacctgtccatctatgtttcaagagtgattcgtgcccagtatgga

SEQ ID NO: 117705 - DNA, 201 bp, Homo sapiens
ttataatcatcacccccacaaacatctgttttaattggtaacaaaacaaaggaaatagcaaccttgggaagttgctttgttttttccttgtccggaagcckttcctagtgattgttcatgtttctgtctagtcaagttgcctgtcttcctgtgttgacaatgcagggtgggctgtgttgttccttctcatagggaagcagg

SEQ ID NO: 117706 - DNA, 201 bp, Homo sapiens
tggctccactggctttaatctgccccacctcttccacaccaacctccaccctctggttccgatgtgcttggttacaaagcacctgattatttaagagaacraaaaaccaccaccagttcctgtaaagaataagtcacaggtgcacaggtgaagggctgagttgtggtccagccccagggagtgtgggctgtgaggcaggag

SEQ ID NO: 117707 - DNA, 201 bp, Homo sapiens
taaaataaccgtatggttcctaggccaggtgaggcaccttggtggggcgcgtggaggttgaaatcacactgggggccgagggctgctgcgcgtccctgagygaatagattggcagaagggagtggggtgggggccttggatcccttggtgccgtgtctctggccttgctccctgtagttctgttgcgctgattcggtcgtg

SEQ ID NO: 117708 - DNA, 201 bp, Homo sapiens
  misc_feature (1)...(201): n = A,T,C or G
ggaaagattcttgtgtgataaccatttgccgatcgttcaacagcctgatacacctcttttgcatactatgctgatttcttaacatattttatctatcaatnaatcagtctatcatgtatctctatcacatttcaataaattgagctgtttcaaagaaccagaggaacactcaactatttaaaggcatgcactagagacttc

SEQ ID NO: 117709 - DNA, 201 bp, Homo sapiens
gccccatgagtgtggtgatgcaaggaagagcagcgtggggggaagaggcaccttctcatgtaaaatgaccccgtggctcagcagctgccagtggatttcartgcagtctggtgacagaaaattcagagggctggcctttattcttaagggttttctgtgttgtcaagtattgccaggactgtctggcagttgcttagatgc

SEQ ID NO: 117710 - DNA, 201 bp, Homo sapiens
tagcttttctaaggaatgtttgacagtggcaacttgtagggcctggccttgcctgccaccagagcaccctgggaatctctgggccaggtagacatgggaastcagggttttctgggctggcctgaggggctgggctggggccagccggccatgtggtgtggtgctggaggggactcctcactattcctgtctgttcctctt

SEQ ID NO: 117711 - DNA, 201 bp, Homo sapiens
aattgggggatgcgttgtaagaattactgaagccagccaggcgcggtggctcacgcctgtaatcccagcactttaggaggctgaggcaggcagatcatgargtcaggagatccagaccattctggctaacacggtgaaaccctgtttctactaaaaaaatacaaaaaattagcggggcgtggtggcgggcgcctgtagtcc

SEQ ID NO: 117712 - DNA, 201 bp, Homo sapiens
tccccggtttccgggcccatttctgcctcccggggctcggcgcctgacctatgtgcttcttcactggccttcttgagggagggtgggcggctcgtgctccrttatcggccgggtccagccggcgggcctcctgcgcagcccggccagtccttgctccccgtctacaccgtgcttgttggcgagccccggccaccgtgcact

SEQ ID NO: 117713 - DNA, 201 bp, Homo sapiens
tcgaggcatcttccggtgctcaggtggtttgtttttgtttttgttttctttaaaccaatgtttttcaattgggggatgcgttgtaagaattactgaagccrgccaggcgcggtggctcacgcctgtaatcccagcactttaggaggctgaggcaggcagatcatgaggtcaggagatccagaccattctggctaacacggt

SEQ ID NO: 117714 - DNA, 201 bp, Homo sapiens
gcttcctgccgcgccggggtgggggtggaagagtgagtcctggtgtggcctgtccgccgctctgcagcagcccctcgtgtccaggcacccagggcaggccrcctttctcttagattgcagcagcgtgtggagaggactttggtagatgctgtgctcatttcctgtctgcacgtttccttttccccgcaggcctctggctgt

SEQ ID NO: 117715 - DNA, 201 bp, Homo sapiens
tatcagacaatcaactttggacagttgatattctccatttttgtatcattttcattctagtaatttctattcatatatatatatatacacacacacacacatatgtatgtatatatttttgagatggagtttttgctctcgtcacccaggctggagtgtggtggcacgatctcagctcactgcaacctctgcctccgaggt

SEQ ID NO: 117716 - DNA, 201 bp, Homo sapiens
ccagaggtgaatggcttctttggggccaagggggtggccggcgccatcccagcggcctatgtgcacatcgagcgacagttcttcagtgaggtgtgcagcckgggacagcaggagcgggtccagcttcaggagtactggcggaggggctggacgttccacgccaaaggtgcgcagcggctggctggaggacgttccagtgtg

SEQ ID NO: 117717 - DNA, 201 bp, Homo sapiens
ttatcagacaatcaactttggacagttgatattctccatttttgtatcattttcattctagtaatttctattcatatatatatatatacacacacacacacatatgtatgtatatatttttgagatggagtttttgctctcgtcacccaggctggagtgtggtggcacgatctcagctcactgcaacctctgcctccgagg

SEQ ID NO: 117718 - DNA, 201 bp, Homo sapiens
tgagggtggccctggcactgcccgatggctgtgtgggcaacaggcctggctgtggagcccagatgcagccccaccttgagggaggcacccagccccagctkcagggcgcaccttgagggagaactggtagacggggttgattttgttgagatcgttcagtatgaagtagagcagagatgccctctccgcagccgggcggta

SEQ ID NO: 117719 - DNA, 201 bp, Homo sapiens
tcctcatccctgagcgcttcaacgagaccatcggcctccagcacattaaggtgtacctcttcgacaacagcgtcatcttgagcgggtgagtgcttcccacygtcagtgcttttgccctcctgctctgcaggctggagggcagtggaataggaacagtgggaaacccgttcccctcagtcttggagaacctgcttgtaggtc

SEQ ID NO: 117720 - DNA, 201 bp, Homo sapiens
tgagtttgtccctctcgaagagtccccgggccgtgtacatgtagacggagtaggtgatctcgtccgtcaggttgatcacccgctgcttcacctcgttggcrggggtggtcctctggatggctttctcaaacaccacgttgaaggcctggggatccgccaccgagagccatggaggcgtgcagagatggagcccttcaccac

SEQ ID NO: 117721 - DNA, 201 bp, Homo sapiens
gatttgggaaacccaggcagcgagccctgcgttacacatctaggcccttcatctgcaagctgatgcctgtgagtgtcatcaccccctctagagacgggggyggggggggaacagctgtttcccacctctgcactgggtggccacggccagtcgcagacttccaggatccacagaggcagcaccttctgctgttgactaagg

SEQ ID NO: 117722 - DNA, 201 bp, Homo sapiens
gttactgtcaccccctcatccccaggcagagtcaaggctatttgaagatcatccaagctggcccagggctgcctgattgtgtgagttaggatttttttctkcagcaagtgactgaaagcccaactaaaaacagcttaggcaggagccgagtgcagtggcatgccctgtagtcccacttgcgtgggaggctgaggtgggagg

SEQ ID NO: 117723 - DNA, 201 bp, Homo sapiens
ggctggtcttggactcctgacctcaggtgatccacctgcctcggcctcccaaagtactggaattataggcgtgagccaccgtgctcggcccctttttttttgagacgaagtctcactctgtcactcaggctggcatgcagtggtgcaatcttggctcactgcaacctccgcctcctgggttcaagcgattctcctgcttca

SEQ ID NO: 117724 - DNA, 201 bp, Homo sapiens
gggtgttggcatcaacaggctagactcctgcatgggatggtccttctctttgttctgtagcccagccctgaaaggcactgagtgtctgttcctgcccccarctcagaccatgcaagccagcaaggatgacctgggacagccctccttccctgtttcacttccctgatcagccttgccaaagccttgttgttttatcaatcc

SEQ ID NO: 117725 - DNA, 201 bp, Homo sapiens
gtgatttggggtttggccgtgtcaccaggattcatcccctagctgtttcctttgggctggcttccttctcaggctctgtgtggtggcccctggtggcttargcttgtctccccatgacaccttgtcttttggaagagtctgattccatgagaatcgggtcaaagctcctgactggcctgacggtggcatgcccagctggga

SEQ ID NO: 117726 - DNA, 201 bp, Homo sapiens
ttgtcaccgatcttaatgtacctggcggttggtggaggaaagggttagtgggcctcccagtgaccaggggagaggaacacaagtacagaccacctttcacyccagccccaggccaggccgccaccttgaaccctcccttctggtccctggaagagcactgcacctctccttgtctgttcctcctccctggcctgtgacgtg

SEQ ID NO: 117727 - DNA, 201 bp, Homo sapiens
gacactccatttgtgctggcaggctctcaccgggaggcacgagccttcattacgttgagctcctgtttaacttgtcatccttaccttgtagtccaggttgsgggggatctgaaagccgggggccagcaggacgtctccctccagcatctccgtccggatgtattcagccaggtaggtcctgcacagccgacggtcccagtc

SEQ ID NO: 117728 - DNA, 201 bp, Homo sapiens
ccttgtcttttggaagagtctgattccatgagaatcgggtcaaagctcctgactggcctgacggtggcatgcccagctgggagcttggagtgtgccgagtwgcccagcccaggcctgcgtgctccctcatggagctgggggtgaggggcaaggtgggtagggtcgtcttcacccagagcagaaatgctgcgagtgggtggg

SEQ ID NO: 117729 - DNA, 201 bp, Homo sapiens
agaggcagttgggccgtgacagcagagtgaatggcttaatgtcatgatcaagggagtgggtttgttacacaaggagtttggcctgttttgtgctctctctygccctctagccttccaccatgggatgacacagcaagaaggcccttgccagatgccagcactttcatatggaacttcccagaccccaggaccatgagaaat

SEQ ID NO: 117730 - DNA, 201 bp, Homo sapiens
tgctgtgcccgtgcaaattgcttgcttcaggctgagcacacacaccagcctgtgggcccttacagtttctcagagctgtactaatgtcagagcaggtgagygcttatcctgtaaggataagcctgtgatgtcttctgtcccctccgtgtttttactggagtctgagaaccctgtaagatttattgcagaatactgtgggag

SEQ ID NO: 117731 - DNA, 201 bp, Homo sapiens
gcttatcctgtaaggataagcctgtgatgtcttctgtcccctccgtgtttttactggagtctgagaaccctgtaagatttattgcagaatactgtgggagygcttgagggaggagtatgtgttcatgcatgtactcttaaaatgttcatacacttctgccttagaactgcaaaggcctggcgtggtggctcacacctataa

SEQ ID NO: 117732 - DNA, 201 bp, Homo sapiens
cgatctcgctggctgtgtgcttggtggtctccagattctccaccaaggccgtgtctcccagaaagttccccgacgcagccgacagacgggccaggagcgartcttccagctctttcagaacaatcttaaattcgttttgagacttggtgaggtttgcctgcaaggggaggtgcaggagtcactgcattgcctggctctgtc

SEQ ID NO: 117733 - DNA, 201 bp, Homo sapiens
cggaggcggaaacaactcactttccctttttaatcgtgttcctgcccagtagagggtccagcacggggtccacggtttcgccgatgttctcaatgagcaasgtgtccccttccgagatggcctgctcgatgacatccaggtagctgcgggcacaacacggaagctggttcatggcagagggcctcgtgatggaacggtgcg

SEQ ID NO: 117734 - DNA, 201 bp, Homo sapiens
ggttaagttgaacaagttgaacttgccctctcctgggttgctatgtgccaaggagtgtttcctcttcttccttttttttttttttttttttttgcggggggacagagtcttcctctctcacccaggttggagtgcaatggtgtgatctcggctcactgcaacctctggcgcccaggttcaagcagttctgcctcagccacg

SEQ ID NO: 117735 - DNA, 201 bp, Homo sapiens
ttgttgagggttaagttgaacaagttgaacttgccctctcctgggttgctatgtgccaaggagtgtttcctcttcttccttttttttttttttttttttttgcggggggacagagtcttcctctctcacccaggttggagtgcaatggtgtgatctcggctcactgcaacctctggcgcccaggttcaagcagttctgcct

SEQ ID NO: 117736 - DNA, 201 bp, Homo sapiens
atatgtgcttacatgatggctttgttgagggttaagttgaacaagttgaacttgccctctcctgggttgctatgtgccaaggagtgtttcctcttcttccytttttttttttttttttttttgcggggggacagagtcttcctctctcacccaggttggagtgcaatggtgtgatctcggctcactgcaacctctggcgcc

SEQ ID NO: 117737 - DNA, 201 bp, Homo sapiens
ttgaatgtgttccccaaaaagcatatgttggaaactgaatcctcagtgcaacagtgttgggaggtggggtctgagaggcagttgggccgtgacagcagagygaatggcttaatgtcatgatcaagggagtgggtttgttacacaaggagtttggcctgttttgtgctctctctcgccctctagccttccaccatgggatga

SEQ ID NO: 117738 - DNA, 201 bp, Homo sapiens
ctgaggcggctgaagtgggaggattgcttgagtccaggaattcaaggctacagtgaactatgattgcaccactgcactctagcctgggtgacagagtgagwttgtctcaaaatagcagcagtagcaacaacaacaaaaactagtgtttccaaccatacttatggcacagtgtaaaggaaattgcagaggggctgtactatg

SEQ ID NO: 117739 - DNA, 201 bp, Homo sapiens
acggggtttcaccatgttagctaggatggtctcgatctcctgacctcgtgatccccccgcctcggcctcccaaagtgctgggattataggcgtgagccacygtgcccggcccacagaatggccttgttacttggagtagatgagaccaagtgggaaatgtatcatgaaggcattagttcctaatcttgaacttgcctacta

SEQ ID NO: 117740 - DNA, 201 bp, Homo sapiens
agcctctttctcctgcacagcgcagttcagcagaaggacggtgggagccacggattgaggccacatgtgtcattttaaattttgtggcagccactttaaaagagatcattccaacatgtaattgggataaaaataagataattgattcttttttggtacccagcatgtgaaatcctgccgctcacagtcagcttcttcctg

SEQ ID NO: 117741 - DNA, 201 bp, Homo sapiens
ccatactaatatacctcgattgactttacgttttgccacagaggtactcaaagtcctcgaatgctgatgggtttgccattgttttctccctcaaaacatcytaaaaggaccccatttgtatggcctcagtgcttattcacgtccacacttgacatcttactttcaatgtaggaggctcatgtggggagtcttttcttccta

SEQ ID NO: 117742 - DNA, 201 bp, Homo sapiens
aaagtactgggattacaggtgtcagccactgcacctggccatcagagggtaattctattagggacatgagtgtcctttgggaaacctggctgctttcaggytacttggagaaatgaaaaggggagaagccagacaggccacaggtgctctgaggacagaccccaggctcgtttctgtgctaaacgtcacctccttccttca

SEQ ID NO: 117743 - DNA, 201 bp, Homo sapiens
aaaaagttcaggggatcaactcaagtccacagagagtctagcacagccgctcggtcaagcttccatcaggcctgggcctcgggggcggggcccccggcgcrgcgggacactcacttgatagcgtaggtcatgcgatctggccgcaggcagcgcaccatgcacagcttctgcagggccgtcttgttcttccactccttgggg

SEQ ID NO: 117744 - DNA, 201 bp, Homo sapiens
gcaggaatgactctagatcacctttgctaattacttggccaggccaaatggtcatcggctgtggatgaattaatgatgcagaagcatgcaggctgggttgstcagacctcaccacctctgacatggtggctttgacaaaggagtgctggagccggctggtgacagctttcagcagaccccggcaactagtgcaaccggcca

SEQ ID NO: 117745 - DNA, 201 bp, Homo sapiens
ggcaggaatgactctagatcacctttgctaattacttggccaggccaaatggtcatcggctgtggatgaattaatgatgcagaagcatgcaggctgggttsctcagacctcaccacctctgacatggtggctttgacaaaggagtgctggagccggctggtgacagctttcagcagaccccggcaactagtgcaaccggcc

SEQ ID NO: 117746 - DNA, 201 bp, Homo sapiens
gagcgacagttcttcagtgaggtgtgcagcctgggacagcaggagcgggtccagcttcaggagtactggcggaggggctggacgttccacgccaaaggtgmgcagcggctggctggaggacgttccagtgtgggacagccacaaacatgggcagggggtggggagccctggcgcctacctgttagagtgctgtacttctcc

SEQ ID NO: 117747 - DNA, 201 bp, Homo sapiens; identical to SEQ ID NO: 20011

SEQ ID NO: 117748 - DNA, 201 bp, Homo sapiens
gaactgctcgtccctgggcaggtgaacgcccgagtgctctgagagtctgggtcgactttcagaaggctctgctcacactcatgccacccagcacacctcasctcctctggttcaaccagcaatcagccggctattgcctgtccatgcccttgggactttctggggacacctggatctgctattcctttccctgcactggcc

SEQ ID NO: 117749 - DNA, 201 bp, Homo sapiens
cggggcgctcggggtgggctgtggcccaggcaggggggccattttttggtggactttcttcagcgggacaaggcctgtggcaggagagcagagtctttacygggctttcctttctgcgagggattggccttgtttgcctcgggcaccctttctttcccgaggggccccgcactgtgctcctccttggagcagcctaagcag

SEQ ID NO: 117750 - DNA, 201 bp, Homo sapiens
tgaggacagaccccaggcagatgcagaagtgggatcccagccaaggagggtcctcgagccccaggtgccaggcaggccctcaccctccgtcctggaggcamccagcagccactacagctgttagcagaggaggaccgggctccctagctagctgtgttttgccagctgttcctgctgatggtgggtcagaggggggctgaa

SEQ ID NO: 117751 - DNA, 201 bp, Homo sapiens
aggaacagtgaggctagacattacctgaaacgtaacttgtgccaggaaaatgagtttgtccctctcgaagagtccccgggccgtgtacatgtagacggagwaggtgatctcgtccgtcaggttgatcacccgctgcttcacctcgttggcaggggtggtcctctggatggctttctcaaacaccacgttgaaggcctgggg

SEQ ID NO: 117752 - DNA, 201 bp, Homo sapiens
cacaccctgtggtggcaggattctgggggaatcctcatccaggtgcaagaggggcaggtggcgtggagtgtgctaacaagcagaagagctgtccaaaagcyggctcctgcaggaggtgggggcaaaggactggaccatcttaattacagcaggctggagagatcacagatggtgctgcctttcaagttctctttggtttgt

SEQ ID NO: 117753 - DNA, 201 bp, Homo sapiens
ggggcccaacaatctgcctttccacaaagctcccaggggtcagtgacaccgctggtccacggaccacactaggaacagtgaggctagacattacctgaaaygtaacttgtgccaggaaaatgagtttgtccctctcgaagagtccccgggccgtgtacatgtagacggagtaggtgatctcgtccgtcaggttgatcaccc

SEQ ID NO: 117754 - DNA, 201 bp, Homo sapiens
aaggtgcgcagcggctggctggaggacgttccagtgtgggacagccacaaacatgggcagggggtggggagccctggcgcctacctgttagagtgctgtasttctcccttcctaccttcccagcagcccttgcaggcacatcatagctgtcccatgacttggggagaggcgagcattcatctcctcaagggaatttttttt

SEQ ID NO: 117755 - DNA, 201 bp, Homo sapiens
gctggagtgcaatggcacgatctcggctcactgcaagctccgcctcccgggttcaagcgattctcctgcctcagcctccggagtagctgggaatacaggtrcccgccaccacccccggctaatttttttttgtaattttagtagagacggggtttcaccatgttagctaggatggtctcgatctcctgacctcgtgatccc

SEQ ID NO: 117756 - DNA, 201 bp, Homo sapiens
gtactggcggaggggctggacgttccacgccaaaggtgcgcagcggctggctggaggacgttccagtgtgggacagccacaaacatgggcagggggtgggragccctggcgcctacctgttagagtgctgtacttctcccttcctaccttcccagcagcccttgcaggcacatcatagctgtcccatgacttggggagagg

SEQ ID NO: 117757 - DNA, 201 bp, Homo sapiens
ttatttaagagaacgaaaaaccaccaccagttcctgtaaagaataagtcacaggtgcacaggtgaagggctgagttgtggtccagccccagggagtgtggsctgtgaggcaggagcgagctaaacctgtaggagcagcgccacggctgccaggatccacttcgctgccttctctttggtcttcaagttaaaggtccagaca

SEQ ID NO: 117758 - DNA, 201 bp, Homo sapiens
tgtaccttacggttaaagaagggcccctggaccttcagaccacgcctctgagggacactgaattaccgacctgtgtttggtatggagagcgcaacttctgycctgttcagtgaggacagccctccagctttaccgtactctttcatcaaagtcctacataccctgttttgaaaaaaccccaagaagttggcctgttacatg

SEQ ID NO: 117759 - DNA, 201 bp, Homo sapiens
gtactctagaaaagtcactccaagcaaagtttccttcaaatctcaaggtctccattctcttagacttcacgcggggctcacgaggtaggtggcatgcaagyctggcccctcctgcttcctgtgtcagatcctcagtcccaagaggggttactgtcaccccctcatccccaggcagagtcaaggctatttgaagatcatcca

SEQ ID NO: 117760 - DNA, 201 bp, Homo sapiens
tcacgaggtaggtggcatgcaagcctggcccctcctgcttcctgtgtcagatcctcagtcccaagaggggttactgtcaccccctcatccccaggcagagwcaaggctatttgaagatcatccaagctggcccagggctgcctgattgtgtgagttaggatttttttcttcagcaagtgactgaaagcccaactaaaaaca

SEQ ID NO: 117761 - DNA, 201 bp, Homo sapiens
caggtccctttccattcctggaggcctgggccgatcaggcccctgggtgcttcttctgatgatcatgaaggtgctctcagacagatagcttttgtggtgtyggtgtccgagtgctgatggcacaaacctatctttggagaagatgacgagggcactagccgatggggcgatttgtttttctttaaatacacacacctcttt

SEQ ID NO: 117762 - DNA, 201 bp, Homo sapiens
catctcccgcaggtttttagtcattgagcagcagaaatgaagttctgtgggcagaaattcatctccttcagccttggcctcagtggagtgtggagtccgcyggggtgcagctttatgtggtcgagctaacactggccagaaatggtgtgtgaccccaccaaacaggatgtgtctgatggtgaatgagtatggctcatcatc

SEQ ID NO: 117763 - DNA, 201 bp, Homo sapiens
tggagcccagatgcagccccaccttgagggaggcacccagccccagctgcagggcgcaccttgagggagaactggtagacggggttgattttgttgagatygttcagtatgaagtagagcagagatgccctctccgcagccgggcggtagttctctctcgcttcgttgattttaacttctgtgatttttgcctccaccacc

SEQ ID NO: 117764 - DNA, 201 bp, Homo sapiens
tccacgaacttgctgcccatcttttcctccacgaagttcctaggggtggagtgcatcagaggcagcggaacctgaggctctgggccagggcggggcgctcrgggtgggctgtggcccaggcaggggggccattttttggtggactttcttcagcgggacaaggcctgtggcaggagagcagagtctttaccgggctttcct

SEQ ID NO: 117765 - DNA, 201 bp, Homo sapiens
agagctctggagagggagcagtaccatgctgatccggggcctgtgctaggcctgggttgccagaggcctgggtttctgctggtttcaccatccagccacgkccctggggccgggctgacccatgtttaccttcagccccaggttcagctccttgagcgaacggcgcatttcgttggtcaggatgttcattctttcacattc

SEQ ID NO: 117766 - DNA, 201 bp, Homo sapiens
gtccggtggtttctgctgcactgaagggtccttcgctctactctcttgagctttgcaggagggtggcccaggatttgggaaacccaggcagcgagccctgygttacacatctaggcccttcatctgcaagctgatgcctgtgagtgtcatcaccccctctagagacgggggtggggggggaacagctgtttcccacctctg

SEQ ID NO: 117767 - DNA, 201 bp, Homo sapiens
cctgggttctctccagacactgacagagccgtggtgaggcctgcagcccgggaagccctgcttgtcctccccactgagtcccagctcacaccctgtggtgscaggattctgggggaatcctcatccaggtgcaagaggggcaggtggcgtggagtgtgctaacaagcagaagagctgtccaaaagccggctcctgcaggag

SEQ ID NO: 117768 - DNA, 201 bp, Homo sapiens
cattctcataatggacacagcactcccttctatccggggaggttttttgtccctcctgctccaaacctgggttctctccagacactgacagagccgtggtraggcctgcagcccgggaagccctgcttgtcctccccactgagtcccagctcacaccctgtggtggcaggattctgggggaatcctcatccaggtgcaaga

SEQ ID NO: 117769 - DNA, 201 bp, Homo sapiens
catacgctaccatctggtcccaaacctgtgccctctgctgtgcaccttgctctgtgccccgacctgtgcctcctgctgcagaccgtttacggaggatgtgyggctttctactcagtcctctgtggcagtctgcatgcgcctttatgcattctcataatggacacagcactcccttctatccggggaggttttttgtccctc

SEQ ID NO: 117770 - DNA, 201 bp, Homo sapiens
gattcatacgctaccatctggtcccaaacctgtgccctctgctgtgcaccttgctctgtgccccgacctgtgcctcctgctgcagaccgtttacggaggaygtgtggctttctactcagtcctctgtggcagtctgcatgcgcctttatgcattctcataatggacacagcactcccttctatccggggaggttttttgtc

SEQ ID NO: 117771 - DNA, 201 bp, Homo sapiens
gggggatgtgtccctgcagctgcagggggacgacacggtgcaggtggtggatgggatggtgcatccttacaaaggtaggggctgccgctgacacccttctrtggctgtgggtggggtggagtgagggcccgggagagcacaactctaggtggttctgccacaggcataggggacttgggtggcaaggcttcattctgcttt

SEQ ID NO: 117772 - DNA, 201 bp, Homo sapiens
ttctgggcgaggggctcctgggcctgtgccaggcttagcctgagtcaaagcttcgtaagaaccgtgcgtggtgagcactaccgctctctccagtttatggwtggggtggccaagccttaggagaccatagatggggctgcagggcctagcagggtacgtgctgcttacagagggccccctccagcgaatagcaggtctggg

SEQ ID NO: 117773 - DNA, 201 bp, Homo sapiens
ggcccttgtcttgggcaaactatatccccagaggagcctcgctctgggcttggggtcctgggcccactcagcgagtgttcagtgaacatccagttgtagcrtctgcacttgcctatcacatgccctgtcccctgagctgggcagagtccagaccctccatttctcttcccttcactcttctttcacgtcttccccagggga

SEQ ID NO: 117774 - DNA, 201 bp, Homo sapiens
cgggccctgcctgaggagggtgggcttgcagagagcaggaaggggcagagaggcttgcctcagcaggccgagaagaccccagggcctcctttccctgccatctgggctgaagtgtgggcagattcttctggtttgtgtcacaccgagtagcacgtgtttcttcccagggcgcacagcgagaagggaggacagtgctggttt

SEQ ID NO: 117775 - DNA, 201 bp, Homo sapiens
cagggtttataggggtgtgcaccgccctctgccttctgggcgaggggctcctgggcctgtgccaggcttagcctgagtcaaagcttcgtaagaaccgtgcrtggtgagcactaccgctctctccagtttatggttggggtggccaagccttaggagaccatagatggggctgcagggcctagcagggtacgtgctgcttac

SEQ ID NO: 117776 - DNA, 201 bp, Homo sapiens
tcccccccaaggaattatcccaaaggtaaccactatcctgatttctctccctgtcagtttgtcttgcctggttttgagcttgtttgtaattggaatgataygtcgacatgcctttcacttctgcctgagtgtgggctactgtggaccaggcccttgtcttgggcaaactatatccccagaggagcctcgctctgggcttgg

SEQ ID NO: 117777 - DNA, 201 bp, Homo sapiens
ggcatgtgccaccacgcccatctaattttgtatttttagtagagacgcggtttctccatgttggtcaggctggttttgaactcctgacctcaggtggtccrcccacctcagcctcccaaagtgctgggattacaggggtgagccaccgtgcccggcctagactttcttacattgtagtggcaggtcacttgttcaacgtgt

SEQ ID NO: 117778 - DNA, 201 bp, Homo sapiens
ccagggtccatgtcgctattgatttggaggccgagagtgaggaggaggacccagggtttataggggtgtgcaccgccctctgccttctgggcgaggggctyctgggcctgtgccaggcttagcctgagtcaaagcttcgtaagaaccgtgcgtggtgagcactaccgctctctccagtttatggttggggtggccaagcct

SEQ ID NO: 117779 - DNA, 201 bp, Homo sapiens
atctcctcttctcagctacactgtcggctccttgagaggaggaggctgtgggtcactttgctgtgtcaccttggatcaactctggctttgtcttttgcacrtgttcattgctgagtagctatttgttaactgcatcttgacctgagtttgtcacccccctgctagttcacctgagacctgggtcaccaggacacgctgctg

SEQ ID NO: 117780 - DNA, 201 bp, Homo sapiens
gccccacgtaggcagcagccctcctgggcagctgagtgcagctttcttcccatccccctcccagtctgtaagagggtgcccggaccttgctctctctgagscagggtccatgtcgctattgatttggaggccgagagtgaggaggaggacccagggtttataggggtgtgcaccgccctctgccttctgggcgaggggctc

SEQ ID NO: 117781 - DNA, 201 bp, Homo sapiens
cctgcactttgcctctctagaagcagcttctcgcctttccctcccgagggctggcaggagtcactgtcagtcacccttcatggggtctgaaaggttgcatrggctcacctggtcttagacaaggacagttgcagcttccgcaccaggcagacctgcagtttgagtggctggggataggtggagcggcggcctggccacagt

SEQ ID NO: 117782 - DNA, 201 bp, Homo sapiens
tgcactccagcctgggcgacagaatgagattgtctcaaaaaaaaaaaaagccctgtgtggttagttgactttctgtgtctgcatctcctcttctcagctasactgtcggctccttgagaggaggaggctgtgggtcactttgctgtgtcaccttggatcaactctggctttgtcttttgcacgtgttcattgctgagtagc

SEQ ID NO: 117783 - DNA, 201 bp, Homo sapiens
gccctgggagtcctccaaccccgaggccccacgtaggcagcagccctcctgggcagctgagtgcagctttcttcccatccccctcccagtctgtaagaggktgcccggaccttgctctctctgagccagggtccatgtcgctattgatttggaggccgagagtgaggaggaggacccagggtttataggggtgtgcaccgc

SEQ ID NO: 117784 - DNA, 201 bp, Homo sapiens
ctgctctgcaggctggagggcagtggaataggaacagtgggaaacccgttcccctcagtcttggagaacctgcttgtaggtctggctgctgtgcacctgcrgcacctccccgacactgtctctgccactgaggctagaattccccgggggctgactggaagccactgttgacagggcacttagtctgtgctggccactcag

SEQ ID NO: 117785 - DNA, 201 bp, Homo sapiens
ttctccagaatgccctgggggatgatgtgggtctcggggctgggggcaggctccgcgctgatgaacacccggtagtcctcatggctgcccgtgctgtagcrctccagcttcttgtccagtgttcccagccaccgggccaccaggtggatattctgcagccaagactagaggctggttacacactttgcccagctcctggcc

SEQ ID NO: 117786 - DNA, 201 bp, Homo sapiens
ggtccagtgacttgctggaggtctcagtgaatgagtagcagagcaggcttcaaacgtgcccccccccccccgaccccggtgccagcaccgtttctcaccaygtcacatccaggccctgggagtcctccaaccccgaggccccacgtaggcagcagccctcctgggcagctgagtgcagctttcttcccatccccctcccag

SEQ ID NO: 117787 - DNA, 201 bp, Homo sapiens
aatagcgtgatctgatttatgtaaacgggtcgattttgagggtgctgggagtcaggctgactgaagccctttggagtcatagaacatgcgattggttctcrtcaggcactttgatgtgcctggtgcatttggccacccaggctgtattgtgggttataaatatattttggatttctggcccccaatgtaatcgacttcctt

SEQ ID NO: 117788 - DNA, 201 bp, Homo sapiens
ctcctgctctgcaggctggagggcagtggaataggaacagtgggaaacccgttcccctcagtcttggagaacctgcttgtaggtctggctgctgtgcaccygcagcacctccccgacactgtctctgccactgaggctagaattccccgggggctgactggaagccactgttgacagggcacttagtctgtgctggccact

SEQ ID NO: 117789 - DNA, 201 bp, Homo sapiens
ggcacaggtgaaggcgaggccacgtggaggtggctcctcattgggggcaggacgccttcctgttgtgagtcaggtgccgttttctctgtccatgttcaggycggaagaactcccgcacaatgctgctcccactcctgcggaggttcccagagcaggtccgagtctccctctttcacacgccgcacctccgtgggctgcttc

SEQ ID NO: 117790 - DNA, 201 bp, Homo sapiens
caggtggacggcacaggtgaaggcgaggccacgtggaggtggctcctcattgggggcaggacgccttcctgttgtgagtcaggtgccgttttctctgtccrtgttcaggtcggaagaactcccgcacaatgctgctcccactcctgcggaggttcccagagcaggtccgagtctccctctttcacacgccgcacctccgtg

SEQ ID NO: 117791 - DNA, 201 bp, Homo sapiens
aatatgaaattaacatgtgttcactataaaaattaagaaaaacagaaagaaactaaccctttctgtagggaaaaccactgaagccattgtgatgattggcygcctgccttctgtgtacagcgcacggaggcacagctttaagcatcagatgacgattctgtcgtgtgtgtgtatttcgtgtccagcttcctttgcctgccg

SEQ ID NO: 117792 - DNA, 201 bp, Homo sapiens
tgtgtaaaatggggagaagaaaaaagttcaggggatcaactcaagtccacagagagtctagcacagccgctcggtcaagcttccatcaggcctgggcctcrggggcggggcccccggcgcggcgggacactcacttgatagcgtaggtcatgcgatctggccgcaggcagcgcaccatgcacagcttctgcagggccgtct

SEQ ID NO: 117793 - DNA, 201 bp, Homo sapiens
gtagccaggactctgtggattctagatccttgcccctcagacagcactctgctgtcagcacagcactctctgggagccaggcaacaagaggcttcacggartgactgtgttgaacttgctggtggccccatgagtgtggtgatgcaaggaagagcagcgtggggggaagaggcaccttctcatgtaaaatgaccccgtggc

SEQ ID NO: 117794 - DNA, 201 bp, Homo sapiens
ccattggccacctcagtgcggggagcccttaccctgcagtgctggccccctcgtacctgcagaatgacccagtgtcctttctctgcagccacgtccagggmgttctcagccaccacctcttgtccctgccccagggacacattatggagttttccattgtctatggtaaaccctagtttttttcctaaagaaaagaaaaac

SEQ ID NO: 117795 - DNA, 201 bp, Homo sapiens
ttccacgccaaaggtgcgcagcggctggctggaggacgttccagtgtgggacagccacaaacatgggcagggggtggggagccctggcgcctacctgttaragtgctgtacttctcccttcctaccttcccagcagcccttgcaggcacatcatagctgtcccatgacttggggagaggcgagcattcatctcctcaaggg

SEQ ID NO: 117796 - DNA, 201 bp, Homo sapiens
tcaggagtactggcggaggggctggacgttccacgccaaaggtgcgcagcggctggctggaggacgttccagtgtgggacagccacaaacatgggcagggrgtggggagccctggcgcctacctgttagagtgctgtacttctcccttcctaccttcccagcagcccttgcaggcacatcatagctgtcccatgacttggg

SEQ ID NO: 117797 - DNA, 201 bp, Homo sapiens
ccctgtcactgcaaagagcccaccccacccactgcagggtcagggagcctgcccaaaatgttcccagccccaagtcctggagaggagggaagaggcaagtrgagttgccagaaatgcagggtcatgggtgcagccacacatttgatgaggagagggagccttggccagcggctccgagcattctgatctcactacaagtcc

SEQ ID NO: 117798 - DNA, 201 bp, Homo sapiens
gagaagatgtggaagggacgtctaaaggtgcagtgtagaccgcggtgtaattccctggtgtttgcttgtcttcagtggcatcccttctctgagaagcgggygcccggtagggcctccaggcgctgttgacacgcgctgaggagaaaggcgaggggtgccagtgttttccatgaagcagagcacgcgcagctgcagaacggt

SEQ ID NO: 117799 - DNA, 201 bp, Homo sapiens
cccaggccctgaggtggaggcccatgaggaagcaggcttagcggtccagtgacttgctggaggtctcagtgaatgagtagcagagcaggcttcaaacgtgsccccccccccccgaccccggtgccagcaccgtttctcaccatgtcacatccaggccctgggagtcctccaaccccgaggccccacgtaggcagcagccct

SEQ ID NO: 117800 - DNA, 201 bp, Homo sapiens
acgtgttctctgacaccgggagaagatgtggaagggacgtctaaaggtgcagtgtagaccgcggtgtaattccctggtgtttgcttgtcttcagtggcatyccttctctgagaagcgggcgcccggtagggcctccaggcgctgttgacacgcgctgaggagaaaggcgaggggtgccagtgttttccatgaagcagagca

SEQ ID NO: 117801 - DNA, 201 bp, Homo sapiens
ggcgagagccacatgttacaggcttttgaatgccagttgctaaaatgtttagatttcattctctaagaggagggcggagttccctgctattgtagatgttyggattcggcactctctaagagcagtgcaatgcctataaaggctcttgagcagggagagacaggttcagacttgtgcttagggaaggtaacagtgcatctg

SEQ ID NO: 117802 - DNA, 201 bp, Homo sapiens
aacactgtaacaatggctatggggcttatgagccaaaaactggatgaaaacctgcacacatcacacacacacacacacacacacacacacacacacacacagtaatatcacaactagtaaataagtcgaccatagtaatatgtagagccaaatagcctaccatttattgatttacagtattatacttgtcagatggtatgc

SEQ ID NO: 117803 - DNA, 201 bp, Homo sapiens
gtacttctctggctcaatcaatcctcccagttcagcctcctaagtagctggcactacaggtgtgcaataccacactcacctaattttttttttttttttttggtagagacagggtttccctgtgttgcccaggctggtcttgaactcctgggatcaagcgatcctcccacctcagtcccctagagtgttgggattacaggc

SEQ ID NO: 117804 - DNA, 201 bp, Homo sapiens
ctggaacggacgcttgagattaccctgtaagtcaaatttacttccagtacagacaggtagactggtgtgtacaggcaagaaggcctgaatgcccagccagkgggattctgatccttctaagctctggccaaccctttcccctctcggtggctgctaccaatgccctgaaaagactagggaaccaggttagctctctttatt

SEQ ID NO: 117805 - DNA, 201 bp, Homo sapiens
tctgtctcaaaaagaaaaaaaaaaaggaaaagaaaaagcaacttgaatgaaatggagataatacagagagatacgaacttataaaaatcattaagcatatmcttaaagagataaaagataatactgtagccatgaacaaaaacaagaaggtgtaaaaaggtaaacattcagagaactagaaacagcacttggaaataaaca

SEQ ID NO: 117806 - DNA, 201 bp, Homo sapiens
cctggctcacaaccaggagcccacagtgagtacgtcagctaaagtcttcctgtgtgcccagcctgtgccaagctggtctgtgaaggagaaggggaaggaartcatgggggctctgagaccagccagggctccgacgcctgagctgagaggctgggaagagagtctggtgggtggagcagtcaggaaaggccccctgggaga

SEQ ID NO: 117807 - DNA, 201 bp, Homo sapiens; identical to SEQ ID NO: 20019

SEQ ID NO: 117808 - DNA, 201 bp, Homo sapiens
gctgctccgcgggctgcgaggcgagtgtgagctgggaacctctggcgccctgctgctcccaggggcgtctagcaccggccacgacttgggggacaagatcmtggcgctgaagatggagctggtgagtgctgaatccatgggccaaggggacgagtccctagtgtagggccgggagggacgaactcatgctcccagagttaa

SEQ ID NO: 117809 - DNA, 201 bp, Homo sapiens
aattcagagaattgagggagtgtttgaggttgacttgctgataactacatagcaaactaggcaatataataataataataattctaaggataaaatgttgtaagaaataaaaagtaactatagtaaactacatggcttagctgtgaagagcatttccaaatcctaataaagtaaacactgagtaattttattgcctattag

SEQ ID NO: 117810 - DNA, 201 bp, Homo sapiens
agtgccccagcattataacaaacactgtaacaatggctatggggcttatgagccaaaaactggatgaaaacctgcacacatcacacacacacacacacacmcacacacacacacacacacagtaatatcacaactagtaaataagtcgaccatagtaatatgtagagccaaatagcctaccatttattgatttacagtatt

SEQ ID NO: 117811 - DNA, 201 bp, Homo sapiens
aaattcagagaattgagggagtgtttgaggttgacttgctgataactacatagcaaactaggcaatataataataataataattctaaggataaaatgttgtaagaaataaaaagtaactatagtaaactacatggcttagctgtgaagagcatttccaaatcctaataaagtaaacactgagtaattttattgcctatta

SEQ ID NO: 117812 - DNA, 201 bp, Homo sapiens
ttcctgaagcctatttctgagtgccccagcattataacaaacactgtaacaatggctatggggcttatgagccaaaaactggatgaaaacctgcacacatcacacacacacacacacacacacacacacacacacacacagtaatatcacaactagtaaataagtcgaccatagtaatatgtagagccaaatagcctacca

SEQ ID NO: 117813 - DNA, 201 bp, Homo sapiens
cttcctcgaggaggtgacatttgagctggggcttgaagaatgaataaagtcagtgggaattccagttcaagataccagattgagggccggcacggtggctyatgcctgtaatcccagcattttgggaggccgaggcgggcggatcacctgaggtcaggagttcgagaccagcctgaccaacatggtgaaaccccatctcta

SEQ ID NO: 117814 - DNA, 201 bp, Homo sapiens
gaaattcagagaattgagggagtgtttgaggttgacttgctgataactacatagcaaactaggcaatataataataataataattctaaggataaaatgttgtaagaaataaaaagtaactatagtaaactacatggcttagctgtgaagagcatttccaaatcctaataaagtaaacactgagtaattttattgcctatt

SEQ ID NO: 117815 - DNA, 201 bp, Homo sapiens
tttcctgaagcctatttctgagtgccccagcattataacaaacactgtaacaatggctatggggcttatgagccaaaaactggatgaaaacctgcacacaycacacacacacacacacacacacacacacacacacacacagtaatatcacaactagtaaataagtcgaccatagtaatatgtagagccaaatagcctacc

SEQ ID NO: 117816 - DNA, 201 bp, Homo sapiens
ctcaaaaaaaaaaaaaaaaaaaaagaggagttgatcaagttgaaatatttcagaaactagagcaagtatagaaatagatgtgactgggtgctgtggctcaygcctgtaatcccagcactttgagaggccaaggcaggtggatcacaaggtcaggagattgaaaccatcctggctaacatggtgaaaccctgtctgtactaa

SEQ ID NO: 117817 - DNA, 201 bp, Homo sapiens
acatttttcaaatacaaaaaacatttactgtgtttgtgtgacctgcgggatctgacctgtatatgtaaatacacatacacacataatgacgttttggtcartgtcagaccatgtataacataaacaaccatgtaaatttttttttttttttttgagacggagtcttgctatgtcatccaggctggagtgcagtggcgcgat

SEQ ID NO: 117818 - DNA, 201 bp, Homo sapiens
cttgaacctgggaggtagaggttgcagtgagccgagatcgtgccactgcactccagcctgggtgacagaatgacattctgtctcaaaaagaaaaaaaaaaaggaaaagaaaaagcaacttgaatgaaatggagataatacagagagatacgaacttataaaaatcattaagcatatccttaaagagataaaagataatact

SEQ ID NO: 117819 - DNA, 201 bp, Homo sapiens
aaacactgtaacaatggctatggggcttatgagccaaaaactggatgaaaacctgcacacatcacacacacacacacacacacacacacacacacacacacagtaatatcacaactagtaaataagtcgaccatagtaatatgtagagccaaatagcctaccatttattgatttacagtattatacttgtcagatggtatg

SEQ ID NO: 117820 - DNA, 201 bp, Homo sapiens
caaacactgtaacaatggctatggggcttatgagccaaaaactggatgaaaacctgcacacatcacacacacacacacacacacacacacacacacacacacagtaatatcacaactagtaaataagtcgaccatagtaatatgtagagccaaatagcctaccatttattgatttacagtattatacttgtcagatggtat

SEQ ID NO: 117821 - DNA, 201 bp, Homo sapiens
acaaacactgtaacaatggctatggggcttatgagccaaaaactggatgaaaacctgcacacatcacacacacacacacacacacacacacacacacacacacagtaatatcacaactagtaaataagtcgaccatagtaatatgtagagccaaatagcctaccatttattgatttacagtattatacttgtcagatggta

SEQ ID NO: 117822 - DNA, 201 bp, Homo sapiens
aagatggttggctgataaagatgacactgagtaactcttcagaactggattaacttatgagtgaagaagtgtatgagacatacataaaatctattgaggarcgataatggaacccctaaataaactagtatgaaattatgcaacccagcagaattgtcttaaattagcggtggttagaagacttagaatagcaacttttag

SEQ ID NO: 117823 - DNA, 201 bp, Homo sapiens
ttgaaccaggagccggaggtcacagtgagccgagatcgcgctattgcaccagcctgggcaccaagagcgaaactcctgcgaacatggccctgcaagcagcrcggagcatgcgggccgtgctctgcagcctgcgcgcgctctgggcacccgccgtgccctgcctgccaaggccctggcagctgggggcgggcgccatctgga

SEQ ID NO: 117824 - DNA, 201 bp, Homo sapiens; identical to SEQ ID NO: 20023

SEQ ID NO: 117825 - DNA, 201 bp, Homo sapiens
cttctgtcctgaggaccctataacatagcttattattttgcttgattattgttttttaagtttaaaaatgggtttaattttaagttagtaagtaaataatratacatatcatagcagtacaggatacaggtcagagatagtatagaggagaaatgaagatgaatgctacatcaaattgcctaaggttgaatcctggttcta

SEQ ID NO: 117826 - DNA, 201 bp, Homo sapiens
tcacaatcaccagttaaatgtttttataacatttttcttcacagtgtgtataaagaagtatttaaatattttgatgcttcctgtattgaactgaaatactwatttttacttaactaaagggatgaaggaactaactatatgtacgtttgtttttaatcaacattaattgaggtaaatgtattcagttttgtgtggagcgta

SEQ ID NO: 117827 - DNA, 201 bp, Homo sapiens; identical to SEQ ID NO: 20024

SEQ ID NO: 117828 - DNA, 201 bp, Homo sapiens; identical to SEQ ID NO: 20025

SEQ ID NO: 117829 - DNA, 201 bp, Homo sapiens
ggcaaatgggcatatagacaggaaagccgagaaagcatagtcaagtgaaccagcggtgtaattaaatagttctttgtaacctgtttcataaaatatgcaartgcatgagacattctatatgttgctctgactatatatttttaccgtttatagatttcatgatcctttggctgcatggagaaaatgggacagggcctgcta

SEQ ID NO: 117830 - DNA, 201 bp, Homo sapiens
atctttggctttgcttaccatcatggacatcttattccttcataaacagaattagatcaaattaaaattcttcttaaaagaatcattcagcaagtaggtgyctactgttgtttggcacagtaggggattaaaatgttgaaaaaaaatacccttatgttttttcacagacatttattatgttaaatgtctttctccttaggt

SEQ ID NO: 117831 - DNA, 201 bp, Homo sapiens
gctgatggcccatttatttcatgctgtgttttacatagtatgaatctggttcaaccaaaaaaagtctatagattatcactgagtgaattgttaatactatratgagagtctattttcacttttttcctgaagatccactgttaaagaccatttctttgagttcattttattcatgtgatttttaaaaataagacttccttg

SEQ ID NO: 117832 - DNA, 201 bp, Homo sapiens
cctgagatatcctggcattaccctaggaattcaggaagaaatgggattataaagacattatttctagtattccttggcccagttatgttcttgaattgagrgacatcctggttctacagtcctggctgattcagataccattttttagagataatgagttctcagtttctgtaagtagtgccattatcacagctgttctca

SEQ ID NO: 117833 - DNA, 201 bp, Homo sapiens
tagcaggaaagaaggtgaagatgcactttttcagcagcagaaaatacaatttgggatgtttctgaagtcttatttgaggattattaaagccatgtttttgyctataacatttttgaggttttcctagtagaaaagtgatgttacaacagcaggttttataagacattcttttaggatctacttcaagtgagctctgtcatt

SEQ ID NO: 117834 - DNA, 201 bp, Homo sapiens
agtacagagctattacggatttgtaaagccggctttggaaccgagggctttacaaatgtaattcccacgacaccgtgctgagtctcaaatttggcgttaaygtaacttaatttctatttgtactggaaacgtatcaagatataaactcctccattacacgtgaaaattcaaaccaatttggcaatcctaggacccttattc

SEQ ID NO: 117835 - DNA, 201 bp, Homo sapiens
gctaagttcaacatacctcacagtgttacacttgattcagctggtcgggtacaaatacagcgtcattgtgtctgggactttgtgtctgaatatgtttgtgktgtgtgtgtgtgtgtgtgtgtgtgtgtgtgtgtgtctgggcatgtatatatagattgtggtatacatgtgtgtctgggcatgtggatacatgtgtgttag

SEQ ID NO: 117836 - DNA, 201 bp, Homo sapiens; identical to SEQ ID NO: 20031

SEQ ID NO: 117837 - DNA, 201 bp, Homo sapiens
atttatattctagttggagagacagaggaaattgagaggaaaaatgggattttggttaacatttatggtatacattaacacttagttggttaagcaaatayccattttcagtgttcttctgcctttccttccactactgtaacgactggaagagctgggtgctcacttcctcagcctgctagcaactagaggtagctctgt

SEQ ID NO: 117838 - DNA, 201 bp, Homo sapiens
ttaacaaactttattttgtacttctgtggaattaagaaatttaacaagggctggacgccgtggctcacgcctgtaatcccagcactttgggaggccgaggmgggcggatcacgaggtcaggagatcgagacgatcctggccaacacggtgaaacccccgtctccactaaaaatacaaaaaaaaaaaaaaaaaatcagccag

SEQ ID NO: 117839 - DNA, 201 bp, Homo sapiens
ctaagttcaacatacctcacagtgttacacttgattcagctggtcgggtacaaatacagcgtcattgtgtctgggactttgtgtctgaatatgtttgtgtkgtgtgtgtgtgtgtgtgtgtgtgtgtgtgtgtgtctgggcatgtatatatagattgtggtatacatgtgtgtctgggcatgtggatacatgtgtgttagt

SEQ ID NO: 117840 - DNA, 201 bp, Homo sapiens; identical to SEQ ID NO: 20026

SEQ ID NO: 117841 - DNA, 201 bp, Homo sapiens
tgttcttacctagacggtaaactaaatctgaattgtctgattttgtttaaggttttgaggaactttacttttgcagtttcctggagaactgagaaaattckttaccggctggatgtgggttggcctaagcacccagaatattttaccggaacaacattttgtgttgcagttgactccctcaatggattggtttacataggt

SEQ ID NO: 117842 - DNA, 201 bp, Homo sapiens; identical to SEQ ID NO: 20029

SEQ ID NO: 117843 - DNA, 201 bp, Homo sapiens; identical to SEQ ID NO: 20030

SEQ ID NO: 117844 - DNA, 201 bp, Homo sapiens
gggccccgggcagaccctctgtgccgctgcaaaccgttgcagcctgaggctgtcaggtcctcccccagacacctgcggaccctccctctcctggcttcccrtctggtcatggcgagattctgggtctgcgtagccggtgctggcttctttcttgcatttttggttttgcattcgcgtttttgtggctctccagtgagttgg

SEQ ID NO: 117845 - DNA, 201 bp, Homo sapiens
agatctcacttctttgaggttaccttttcacaacgaaaccgccaccaaaaaatttgtatattagtttctcctgctcttttcctatagcagcctgtacttcrtatcatagtaactatcatgctatattataatcatttgtctgtctcccctaatagatgtcaggctgttgaaagtgcttactgaatctcttttgctttattt

SEQ ID NO: 117846 - DNA, 201 bp, Homo sapiens
ggatctacttcaagtgagctctgtcatttggaggctgtgtagtcaatttatcaattagtaactgaatttggttgataacagttgaaagggaaatgtagaataaggataaagcaagaatccaaaaaattgaatgaaagaaacaacgaaatctaggagacagattgaatataagtgtattagtttcctgtggttgccataaca

SEQ ID NO: 117847 - DNA, 201 bp, Homo sapiens; identical to SEQ ID NO: 20040

SEQ ID NO: 117848 - DNA, 201 bp, Homo sapiens; identical to SEQ ID NO: 20041

SEQ ID NO: 117849 - DNA, 201 bp, Homo sapiens; identical to SEQ ID NO: 20042

SEQ ID NO: 117850 - DNA, 201 bp, Homo sapiens
tggagtctttcagtgttcctcagtcagcactgaagttaatgtcccttccagtcccacagggtgggaacccccagagagcacccctgagcttctctttcccrggcccctcactcagtccaggccctacaccacagccacgatgactgagggccccactcttctgcctctgccacactaatgcagtcagctaccccagccaca

SEQ ID NO: 117851 - DNA, 201 bp, Homo sapiens; identical to SEQ ID NO: 20043

SEQ ID NO: 117852 - DNA, 201 bp, Homo sapiens
gatgttggaagattctcagtaatgggaacatagggaacacagggagaggatggagccagagaccagtggaaatgaggatgagaaagggcagcagaagataygggaagagaaggataagagcaaagaactgcatgccattaaggagcattacctgggtggcatcaaaaagcggcaccaaacaagacatctcaatgaccgaaa

SEQ ID NO: 117853 - DNA, 201 bp, Homo sapiens; identical to SEQ ID NO: 20045

SEQ ID NO: 117854 - DNA, 201 bp, Homo sapiens
gtggaagagcagcagaggatgcttgtagaggagaggaagaaaaggaaacagttccaagacttgggcaggaagatgttggaagattctcagtaatgggaacrtagggaacacagggagaggatggagccagagaccagtggaaatgaggatgagaaagggcagcagaagatacgggaagagaaggataagagcaaagaactg

SEQ ID NO: 117855 - DNA, 201 bp, Homo sapiens
cttctggccaagaaaaaggctaaggaagaagctgaggttaagcccaagttcctctccaaagcagaacaagaggctgaagctctaaagcaacggcagcaggrggtggaagagcagcagaggatgcttgtagaggagaggaagaaaaggaaacagttccaagacttgggcaggaagatgttggaagattctcagtaatgggaa

SEQ ID NO: 117856 - DNA, 201 bp, Homo sapiens; identical to SEQ ID NO: 20047

SEQ ID NO: 117857 - DNA, 201 bp, Homo sapiens; identical to SEQ ID NO: 20048

SEQ ID NO: 117858 - DNA, 201 bp, Homo sapiens; identical to SEQ ID NO: 20049

SEQ ID NO: 117859 - DNA, 201 bp, Homo sapiens; identical to SEQ ID NO: 20050

SEQ ID NO: 117860 - DNA, 201 bp, Homo sapiens; identical to SEQ ID NO: 20051

SEQ ID NO: 117861 - DNA, 201 bp, Homo sapiens
aactcctgacctcggttatccacctgccttggcctcccaaagcgctgggattagaggtgtgaaccaccgggcctggccagaaactgttcttcaataccagstgacctctgagctgagtctcactgaagagggccagcctcatggcatctgaaacttaggaaaaaaggtcttgggccaggcagctgcagctcgaaacttggc

SEQ ID NO: 117862 - DNA, 201 bp, Homo sapiens; identical to SEQ ID NO: 20052

SEQ ID NO: 117863 - DNA, 201 bp, Homo sapiens; identical to SEQ ID NO: 20053

SEQ ID NO: 117864 - DNA, 201 bp, Homo sapiens
tgctgcatggcaggtccaccaatgagccccgtcaagtgctttccttatccatattgccccagctccttgttgatgcccacagaggccagatgaccttcackttctgggcacctgagcctcaccaccgggtgcactgcctctcacctcctcttgtatgcctccgcgagcgcctgcatggtgcccagctccccctccagccga

SEQ ID NO: 117865 - DNA, 201 bp, Homo sapiens
tcgggcagtctggctgcagagcttttgctcatacagacagtgctgcatggcaggtccaccaatgagccccgtcaagtgctttccttatccatattgccccrgctccttgttgatgcccacagaggccagatgaccttcacgttctgggcacctgagcctcaccaccgggtgcactgcctctcacctcctcttgtatgcctc

SEQ ID NO: 117866 - DNA, 201 bp, Homo sapiens; identical to SEQ ID NO: 20054

SEQ ID NO: 117867 - DNA, 201 bp, Homo sapiens; identical to SEQ ID NO: 20055

SEQ ID NO: 117868 - DNA, 201 bp, Homo sapiens; identical to SEQ ID NO: 20056

SEQ ID NO: 117869 - DNA, 201 bp, Homo sapiens
tgtgcacagccctgcaccaaggagtgctgtgtgctctaggcatcccttccccaggggattttctaagtagatggggggacagggtgaactgactgtgtccyttgtcactgaatgaaatctctgttttctattctctgagaagatgtttgtatgttctgagaataaatatatgaatatttttaaaaagtgacttgaaaatga

SEQ ID NO: 117870 - DNA, 201 bp, Homo sapiens; identical to SEQ ID NO: 20058

SEQ ID NO: 117871 - DNA, 201 bp, Homo sapiens; identical to SEQ ID NO: 20059

SEQ ID NO: 117872 - DNA, 201 bp, Homo sapiens
tgcctttcgcaagacattaggggttagtggtagtgccgacttgggatggcaggagaccctgcttcaatctggtctttgattcggcttggaaaacaaatccwaatctccttgttgacagaacttgagatggtccaacagagctccttggaggtatgaggcctgaggcctgaagcctgaagggaccagcaggtaactgggcac

SEQ ID NO: 117873 - DNA, 201 bp, Homo sapiens
atttattgcatttatttcttggaaatggtttttgattgttgttttgagacaggtctcactgcaaactgcacatcctgggctctaaaaaacctctaacctcagccccacccccaatagctgggactacaagtgcacaccaccacacctggctaattttttttttttttttagcgtgtaaccttttttttttttttttaattt

SEQ ID NO: 117874 - DNA, 201 bp, Homo sapiens; identical to SEQ ID NO: 20060

SEQ ID NO: 117875 - DNA, 201 bp, Homo sapiens
cattattatttaggttaacttgatcacttggttaaggtggtatctccattgtgcagttgctatttttccctttccaaattctatgcattagaagtgagtcrctgagtccaggcaatactgaataagagagaaattgagctgtacttcccagagggagatgaatcaaagaatatgtgttctttctttctttatttatttaga

SEQ ID NO: 117876 - DNA, 201 bp, Homo sapiens
gagatggtccaacagagctccttggaggtatgaggcctgaggcctgaagcctgaagggaccagcaggtaactgggcaccacagcctgaggccaatcagccycaagcaagagcatcctgcttcctcagagggtttgtttgcttgaggaaagcgaaggctggcagtcatattccttcaggatcttccaaaaatgttggcaagg

SEQ ID NO: 117877 - DNA, 201 bp, Homo sapiens; identical to SEQ ID NO: 20061

SEQ ID NO: 117878 - DNA, 201 bp, Homo sapiens; identical to SEQ ID NO: 20062

SEQ ID NO: 117879 - DNA, 201 bp, Homo sapiens
ctgacccactcactatgtgcatatctctaaagggacaggcctgaccaaataagatggagctgcctttcgcaagacattaggggttagtggtagtgccgacktgggatggcaggagaccctgcttcaatctggtctttgattcggcttggaaaacaaatccaaatctccttgttgacagaacttgagatggtccaacagagc

SEQ ID NO: 117880 - DNA, 201 bp, Homo sapiens
ttcggcttggaaaacaaatccaaatctccttgttgacagaacttgagatggtccaacagagctccttggaggtatgaggcctgaggcctgaagcctgaagkgaccagcaggtaactgggcaccacagcctgaggccaatcagccccaagcaagagcatcctgcttcctcagagggtttgtttgcttgaggaaagcgaaggc

SEQ ID NO: 117881 - DNA, 201 bp, Homo sapiens; identical to SEQ ID NO: 20063

SEQ ID NO: 117882 - DNA, 201 bp, Homo sapiens; identical to SEQ ID NO: 20064

SEQ ID NO: 117883 - DNA, 201 bp, Homo sapiens; identical to SEQ ID NO: 20065

SEQ ID NO: 117884 - DNA, 201 bp, Homo sapiens
aatgctaaccagtcctcgagaaagacacagaagactgggagaggggtgtgtgtatatggggtgggggtgggggagccctggggctatgtgagctcttagcrgaagagttgcagcccctgtcctgggaatcacatgtagtgattcctgagtgtagaacagccattgtgtatcctggggtcacagggaacagagatcttctcc

SEQ ID NO: 117885 - DNA, 201 bp, Homo sapiens; identical to SEQ ID NO: 20066

SEQ ID NO: 117886 - DNA, 201 bp, Homo sapiens
ggattacattcttgttgttactgttatttgtgtttatagacttatttaacattatacttacagaagcttctgtggggagtttttagtttatagataaggayatcaggaccgtcaattacagtaaactgcctgagctgttctcttatgctgtgtaccattaagaataaaagaaaatttgtttttttctgaattgctgtcaca

SEQ ID NO: 117887 - DNA, 201 bp, Homo sapiens
agacttgaataccacaatagatcaaatgtcctaactgataaatacaaaacattacttccaatagcagcagagtaaacattcttctcaagcttacatggaayattctccaggatagataatatgttaggccacaaaacaagtcttaacaaatttaggaagattgaaatcatatcaagtatcttttccaaccacaatgttatg

SEQ ID NO: 117888 - DNA, 201 bp, Homo sapiens
aggttaagcaaatgtttatcctacagctcccagcttattcttactaaagccatcgggccaactctcaaagacagggtaggcgaaaagcctcacacctagcrgttgcattatccatctgccgagtgaatgaaatattggaatctcaaatcctagagatgcgagtcatttttctactccttggctttttggagcttaagagtt

SEQ ID NO: 117889 - DNA, 201 bp, Homo sapiens
aaaataaaagaataaaacctttttgtttaaacaaatgctggttttctaatggcacaaaggtcaatcatttgcttatgtctagtaaaaatgaggattacatrttatctcttttagaactagaaaacaagattatattagaatgcagattgttggaaatgaggcatttttgatgtatgtatctgtttaattctctcattcaac

SEQ ID NO: 117890 - DNA, 201 bp, Homo sapiens
cccacaataggttgtctgcaagcttgaggagcaaggagggccagtccaagtcccaaaactgaagaacttggagtccgatattcaagggcaggaagcatccrgcacgggagaaagatgtaggctgagaggctaggccagtcttatcttttcacgtttttatgcctgctttatattcagtggaagctgattagatgatgccca

SEQ ID NO: 117891 - DNA, 201 bp, Homo sapiens
cactggtcattcaggagcatattgtttaatttctgtgtatttgtagagtttccaaaattcctcttgttttattccattgtagtcagggaagatacttgacrttatttcaagtttttttaatttttaaagacccattttgtggcttaacgtacggtctttcctttagagtgatctacctgctgagaagaatgtgtattctgc

SEQ ID NO: 117892 - DNA, 201 bp, Homo sapiens; identical to SEQ ID NO: 20067

SEQ ID NO: 117893 - DNA, 201 bp, Homo sapiens; identical to SEQ ID NO: 20068

SEQ ID NO: 117894 - DNA, 201 bp, Homo sapiens; identical to SEQ ID NO: 20069

SEQ ID NO: 117895 - DNA, 201 bp, Homo sapiens; identical to SEQ ID NO: 20070

SEQ ID NO: 117896 - DNA, 201 bp, Homo sapiens; identical to SEQ ID NO: 20071

SEQ ID NO: 117897 - DNA, 201 bp, Homo sapiens
ctttgtaaaaacagcaagggaggtgtcacagtattccatttagagcgacaactttaagttcttgccatggaaaattcagagaagacagaagtggctctctktgcttgtggttcctttaattctatcaccaacaagcacctcaggttgtttgagctggccaaggattgcatgaatggaacaggaagatatagagttgtcaaa

SEQ ID NO: 117898 - DNA, 201 bp, Homo sapiens
gtgtggctgtcagtagacagaaaattactcggaggaaacatcaggggtaaagtggattctggctaaaccagcctaacagaattgtagctgaagacaggccmgggtgatcagatgttgcctgggggatggtggaggatgaggaatctgatcagaatccaacagtgatcagatagctagggtgagaggtccttgccaaactga

SEQ ID NO: 117899 - DNA, 201 bp, Homo sapiens
tttctataggtccagctgcagatgtagtcccacagctactttcccccccaaatttatagaataaaaagtatacagtgtggcagatctagaaacccaggaaygtatctgtgctgcagcccttaggcaaacccagatgagttgctgggactggttggggtggtggtagcatttgtctcaacaatgagaaaagaatcataaatc

SEQ ID NO: 117900 - DNA, 201 bp, Homo sapiens
gaccgctagaggaagaggtagctccacaggaggtacagctgcttacacatctctcctcagagctgtcccttgacttgggggtgaatttcaggccaacaggscttcctgggatacaagagcgttctccatggatctgccttactaccatggacgtctgaccaagcaagactgtgagaccttgctgctcaaggaaggggtgga

SEQ ID NO: 117901 - DNA, 201 bp, Homo sapiens
gaatggagacacttgtgctggaaggtctgaggcttggcttataaagagatctcctattttgttaggagggctccctgtagtaccccagcctttaaagatayaactttcaggtggcatcaacatggctctgtgcctggggaggggtcttctttcctttgagtggggttgtttgatatgacttctgggtgtggtctcatggct

SEQ ID NO: 117902 - DNA, 201 bp, Homo sapiens
gatggaaagaaggtacaaatgtcagaggtcctgtcctccagagatctgtttatttggtatggaaaaggctaggggttcttcaagaaatttcaatctgaaasacttattctgcagcatctgcttgcaatacgtaaactataaatacaatcatatttcacattttgttagatttgtgaaggacttcaatattcgtcatttcct

SEQ ID NO: 117903 - DNA, 201 bp, Homo sapiens; identical to SEQ ID NO: 20078

SEQ ID NO: 117904 - DNA, 201 bp, Homo sapiens; identical to SEQ ID NO: 20080

SEQ ID NO: 117905 - DNA, 201 bp, Homo sapiens
gagtgagactccgtctcaaaaaaaaaaaaaaaaaaaaaaaagtacgtggtgtatagctggtaaacagaaaacatctatttacaacttaactgagttgtgtwgccattcccactttctatttacattgggacttttttggttttgttttgcccacatggagattgtgaattcatcaagtatacaaattgtgtattttaaatt

SEQ ID NO: 117906 - DNA, 201 bp, Homo sapiens; identical to SEQ ID NO: 20081

SEQ ID NO: 117907 - DNA, 201 bp, Homo sapiens
acctcaagtgatccacccacctcggcctcccaaagggctgggattacaggcatgagccactgagcctagccagaaaattcttttcattttaaaattatttytaaaaggttatattagaaaatagtgcttggtgggccaggcatggtggctcccgcctgtaatcccagtactttgggaggctgaggcaggcagatcatgagg

SEQ ID NO: 117908 - DNA, 201 bp, Homo sapiens; identical to SEQ ID NO: 20082

SEQ ID NO: 117909 - DNA, 201 bp, Homo sapiens
atgtggttgcatgcagcaatagttcatttttttgcattgctgaatagtgctccattgtagggatgcatcccaaattgcttactcatttatagctattacarctaaagttgctatgaatatttgtgactaagtctttgtgtgggtgtatgctttcatttctcctgggtaaataatcaggattggaacagctaagttgtgtgt

SEQ ID NO: 117910 - DNA, 201 bp, Homo sapiens
taagaacgtaatatatggttattaactatagtcatcatgttgtacaatagatctcttgtttaactgaaattttgtatcctttgaccaatatctccctaatyctccccctctcactgacaaggcctgagaactctcattctactctttagttttatgatatcaactttttttagatgccacgtatgagtgagaccatgtggt

SEQ ID NO: 117911 - DNA, 201 bp, Homo sapiens
gtccctgtccccccatccccatgaagggcagtgtgtactcatggacacaaaaaaatcactttctataggtccagctgcagatgtagtcccacagctactttcccccccaaatttatagaataaaaagtatacagtgtggcagatctagaaacccaggaacgtatctgtgctgcagcccttaggcaaacccagatgagttgc

SEQ ID NO: 117912 - DNA, 201 bp, Homo sapiens
gaaggttctaggcttgggttctactttttttgttgttgttttgttttttttagacggagtctcgctctgtcgtccaggctggagtgcagtggtgcgatctyggctcactgcaacctccgcctcccgggttcaagcgattctcctgcctcagcccccgcccccccaagtagctgggactacaggcgcgcgccaccaccccca

SEQ ID NO: 117913 - DNA, 201 bp, Homo sapiens
gttgtttgatatgacttctgggtgtggtctcatggctggtcttctgctttttttttccctccaaagaacagtaacagcgattatgtggatgtcttgccttraagataaggctgccggacaaagcaagttgaagagatgagtaacagttctcactgatgacccacttctgcaggcataggtccagagcaccaaactctagtg

SEQ ID NO: 117914 - DNA, 201 bp, Homo sapiens
aacctggtttttccctgaagagaaataggaaggttctaggcttgggttctactttttttgttgttgttttgttttttttagacggagtctcgctctgtcgyccaggctggagtgcagtggtgcgatctcggctcactgcaacctccgcctcccgggttcaagcgattctcctgcctcagcccccgcccccccaagtagctg

SEQ ID NO: 117915 - DNA, 201 bp, Homo sapiens
ctggccaaacacaccagcctggactccaagcaaaacctccgttgaattagaagactcaacaatgatgcaagatggagctagaaagggacggtggaaagagktcagagtgtttagggagtcaagtgtgcccaatagttgtacgaaaatatagtgggaagcatcagatagctgaaagtcttagggtttgtttaatttttctgg

SEQ ID NO: 117916 - DNA, 201 bp, Homo sapiens
ctgccttactaccatggacgtctgaccaagcaagactgtgagaccttgctgctcaaggaaggggtggatggcaactttcttttaagagacagcgagtcgayaccaggagtcctgtgcctctgtgtctcgtgagtagcctcatcttgcacacatctgacatcgtatgttgaatgtggcaatggctgccacacagtacaggaa

SEQ ID NO: 117917 - DNA, 201 bp, Homo sapiens
aggaggcagaggttgcagtgagccgagatcgcgccattatactccagcctgagagacagagaaagactctccatctcaaataaaataaacaaagagtggawaagatctgcttacatgtaaatgggatggagggcattttaggaaggggaggaggtaggaacaggagtctagaagtgggatattttaaaggatttacataca

SEQ ID NO: 117918 - DNA, 201 bp, Homo sapiens
aggctgaggtgggctgatcactgaggtcaggagttcaagaccagcctggccaacataatgaaacccccatctactaaaaatacaaaaattagccaggcatrgtgggtgcagttgtatcccagctacttgggaggctgaggcatgagaatcgcttgaacccaggaggcagaggttgcagtgagccgagatcgcgccattata

SEQ ID NO: 117919 - DNA, 201 bp, Homo sapiens
cactgcaatgagctcttgcggcacagaaaagagactggactcaactctgaatccagcatggacaagtgggaatttatggccaaggagcagtgtggctgtcrgtagacagaaaattactcggaggaaacatcaggggtaaagtggattctggctaaaccagcctaacagaattgtagctgaagacaggccagggtgatcaga

SEQ ID NO: 117920 - DNA, 201 bp, Homo sapiens
caaaacaaaacaaaaaaacaattacatgattctacattcaaaactctacagcaggctgggcgcagtgggtcacatctgtaatcccagcactttgggaggcygaggcaggcagatcacttgaagtgaggagtttgagaccagcctgggccacatggtgaaaccctgtctctactaaaaatacaaaaattagctagtcatggt

SEQ ID NO: 117921 - DNA, 201 bp, Homo sapiens
ctccagcctgagagacagagaaagactctccatctcaaataaaataaacaaagagtggaaaagatctgcttacatgtaaatgggatggagggcattttagraaggggaggaggtaggaacaggagtctagaagtgggatattttaaaggatttacatacaaggttcctaaaatgtagtttggaaaccagcttttggaaaag

SEQ ID NO: 117922 - DNA, 201 bp, Homo sapiens
gtagctgaagacaggccagggtgatcagatgttgcctgggggatggtggaggatgaggaatctgatcagaatccaacagtgatcagatagctagggtgagrggtccttgccaaactgacttagtagggttctttgctaaaactggattttacaaggaagtacacaaatgggccttggaataggctcagaagtctgattata

SEQ ID NO: 117923 - DNA, 201 bp, Homo sapiens
gcagatcactaggtcaagagattgagaccatcctggccaacatggtgaaactctgtctctactaaaaatacaaaactaattagctgggtgtggtggcatgygcctgtagtcccagctactcaggaggctgaggcaggagaattgcttgaacccaggaggcggaggttgcagtgagccaagatcgcaccactgcactccagc

SEQ ID NO: 117924 - DNA, 201 bp, Homo sapiens
cattggtaatacagtgataaatactactggcaatgtttctgccctcatgaagttaatttcagtaagaggagaaaatatgatgaaaatgaaacagagtcatrtgacagggagagacacagctgctgctttccattgggtacaggaaaggtttctctgaagaggtcacatcaaccaattcatgcttcaagatacaaccctttg

SEQ ID NO: 117925 - DNA, 201 bp, Homo sapiens
cttatttgtcatttgcaatccctttgcggtaggcgacatgatcactattttgtgagaaaataaactgtagcttcttatttaatagcttgcctagggccaarttgctaatatgttattacattccctctcttaccaatgtccccagcttcactgaaatatgtttcaggtaatcaccttggatctgtgttataaaatgcccaa

SEQ ID NO: 117926 - DNA, 201 bp, Homo sapiens
tgacacagaaaaagttaccatgtaggtattatctatgagccaaacattttgctaagcatggtacatgcattatcttatttgtcatttgcaatccctttgcrgtaggcgacatgatcactattttgtgagaaaataaactgtagcttcttatttaatagcttgcctagggccaaattgctaatatgttattacattccctct

SEQ ID NO: 117927 - DNA, 201 bp, Homo sapiens
tctgaaatcaccatttttaatattttggcatacatctctccagacttctctgcgcatctataaaccaatatatgtacataaatggttcattatacatgatsgcttgcaacctgttttctccataattgtaggtctctttccccatcaaagaaagcaggtcatccccttatgactgcttagtattttattgatttgatatat

SEQ ID NO: 117928 - DNA, 201 bp, Homo sapiens
gagtggactctgatatgcagtgtccccttcttctctgctgcattaaaatgggtctcccctggacacccagctttaaaatttctctgttttgtactctttcyctttatttcttagactggccgacacttagggagaatagaaaagaacctacgttgaaatattgggggctggttcccccgatacttcaggactttcacagag

SEQ ID NO: 117929 - DNA, 201 bp, Homo sapiens
gtgctggggcaagcagtgggaagggaaaaaacaagaaggtgcaaggacagacattggccaggatctcagggtatatggtcaatatgggattctcttccttyctttctttctttttttttttttagacagggtctcactccagctcctaggctggagtgcagtggtgcgatcatggctcactgcaacctcaaccttctgggt

SEQ ID NO: 117930 - DNA, 201 bp, Homo sapiens
aaatatagagaaaggtataaaaaacaaaacaaactatatcagtctcaccactctgaaatcaccatttttaatattttggcatacatctctccagacttctstgcgcatctataaaccaatatatgtacataaatggttcattatacatgatcgcttgcaacctgttttctccataattgtaggtctctttccccatcaaag

SEQ ID NO: 117931 - DNA, 201 bp, Homo sapiens
caacagaaactgttgtgtctctggacgggagacggtgaagagctagttgtgctggggcaagcagtgggaagggaaaaaacaagaaggtgcaaggacagacmttggccaggatctcagggtatatggtcaatatgggattctcttccttcctttctttctttttttttttttagacagggtctcactccagctcctaggctg

SEQ ID NO: 117932 - DNA, 201 bp, Homo sapiens
tcctgtattccagcctttttgaacctcaactgagaaattaatgcctaagatttttaaatgttttttataagtccagtgtatttctcataaatgacgacaaygatttccatagaataaacaaaaaggtaggctccactgggtatcagtctcacacagagagtcaagacaccacatatttattgagaacataactgcaaaaat

SEQ ID NO: 117933 - DNA, 201 bp, Homo sapiens
tccctagttaggataaaatcctagatgtttaaaaaaatcttcatgcacactgaaaaattagtaccacaaaaggttgcaccaagatacactgagatcaggarcagtgataaggccagaggtcaaaagtcttaaaatatttctttgttgacttggatttcccacttgcatcatggcatggaaaaatgcagaacacattgttga

SEQ ID NO: 117934 - DNA, 201 bp, Homo sapiens
tgtatgctttcatttctcctgggtaaataatcaggattggaacagctaagttgtgtgttctatgtaggcttatcttttttaagaaactgccaaactgtttyccaaagtgatcatgcgatctcactattcccatgggcattacatgagttctgattgctctacatccttaccaacatgtggaacggtcagtcttttacattt

SEQ ID NO: 117935 - DNA, 201 bp, Homo sapiens
atagagtaaaacaattcaaagatatgggaaaacttagaggtcctgtattccagcctttttgaacctcaactgagaaattaatgcctaagatttttaaatgwtttttataagtccagtgtatttctcataaatgacgacaatgatttccatagaataaacaaaaaggtaggctccactgggtatcagtctcacacagagagt

SEQ ID NO: 117936 - DNA, 201 bp, Homo sapiens
ggaggcggaacttgcagtgagctgagatcacaccactgcactccagcctgggccacagagtgagactccgtctcaaaaaaaaaaaaaaaaaaaaaaaagtmcgtggtgtatagctggtaaacagaaaacatctatttacaacttaactgagttgtgttgccattcccactttctatttacattgggacttttttggttttg

SEQ ID NO: 117937 - DNA, 201 bp, Homo sapiens
tctgtgaccttgtgcagacgattcaagtttgagaataaatgggcaaatgggcagattttcaaatgagaaaatcactctagcccttcaagccctccccaaarcgtatactgttacactttgctcaatatttgctaagcattcatttataaagtgctgggtgtcaaattatgtcagatacatttttaaaggcattaagccgta

SEQ ID NO: 117938 - DNA, 201 bp, Homo sapiens
tatttacattgggacttttttggttttgttttgcccacatggagattgtgaattcatcaagtatacaaattgtgtattttaaattcataaagtatacaaawtgcatattttaaagacatggaatcaacctaaatgcccatcagtgatagactggataaataaaatgtggtacatatacaccatggaatactaagcagccta

SEQ ID NO: 117939 - DNA, 201 bp, Homo sapiens
tagtcccttaagatagcaaagcccgcctgtaggtacagacgtaagcccttacaggggtacccttcacagtgtatctgcgagaactgccccaggtaaacttsccaaggatggggttcacttgatactatggactgcgctgggatcccttgattgcaaatcctctttactcagagtggctcaagtcagaggttggtcttagaa

SEQ ID NO: 117940 - DNA, 201 bp, Homo sapiens
cctggggaggggtcttctttcctttgagtggggttgtttgatatgacttctgggtgtggtctcatggctggtcttctgctttttttttccctccaaagaamagtaacagcgattatgtggatgtcttgccttgaagataaggctgccggacaaagcaagttgaagagatgagtaacagttctcactgatgacccacttctg

SEQ ID NO: 117941 - DNA, 201 bp, Homo sapiens
caaaaaaaaaaaaaaaagaaaaagaaaaacaaattccaggccacagtatcaaagagacctagctgaaggaacttgtttatgcccagtttagaaagcaatcytgaacagaaatcactagaaacctcctatctttatgtatgttcctctttgtaaagtagggaccactgaaccttttattatacctgtaacagaaattaaaat

SEQ ID NO: 117942 - DNA, 201 bp, Homo sapiens; identical to SEQ ID NO: 20074

SEQ ID NO: 117943 - DNA, 201 bp, Homo sapiens
ccagcactttgggaggccgaggcgggcagatcactaggtcaagagattgagaccatcctggccaacatggtgaaactctgtctctactaaaaatacaaaamtaattagctgggtgtggtggcatgcgcctgtagtcccagctactcaggaggctgaggcaggagaattgcttgaacccaggaggcggaggttgcagtgagc

SEQ ID NO: 117944 - DNA, 201 bp, Homo sapiens
gaaggctgaggtgggagaatcgctttaacctgggatgcagaggttgcagtgagctgagattgcgccattgggtgacagagcgagactccgtctcaaaacaaaaaaaaaaaaaaaaaaaataactgggaagctgaagtggtctttttaggttgcctgagtggtaacatgtgcttttcttctaaccttccggcccaagatgac

SEQ ID NO: 117945 - DNA, 201 bp, Homo sapiens
tcacgtgaggtggaagacagggagggggtttcaaaagaatccacattaccattcacagacccagaatgcatcatgtaaacacagtgggaaggacagatgcrcgctgcctgttctgtctggggcatccaggtggggagccccaaaggccgtctgtaatggagtcagtcagctgggggcctcatgagtactggggttgtcttg

SEQ ID NO: 117946 - DNA, 201 bp, Homo sapiens
tctgtctaaaaaaaattagccaggcatgatggcgggtgcatgtaatcccagctactcagaaggctgaggtgggagaatcgctttaacctgggatgcagagrttgcagtgagctgagattgcgccattgggtgacagagcgagactccgtctcaaaacaaaaaaaaaaaaaaaaaaaataactgggaagctgaagtggtctt

SEQ ID NO: 117947 - DNA, 201 bp, Homo sapiens
gtgaagattgagggagccatagggtcccatgggacagtgctcacaggatacagcaggttgaagacttgggtgctgggccgccattgcaaatttctgtgccyactgcaagagaagacagaagatggtgagtggaaccacctgtgcacaccagccctattccttccctcctgcctggtgtgacctctaccaacccctgcagga

SEQ ID NO: 117948 - DNA, 201 bp, Homo sapiens
cgggcagaagaggagaggaggatagcagcagaagagaagaagaagcaggatgaactgaaacggattgccagagaattggcagaaggtacgagtgacactgsctcttatagattgtccctcccaggtttgtgcagggataaggaaaatggaggaggacatttaagcagagctaagtagatgcggattgtttaaaaatgggga

SEQ ID NO: 117949 - DNA, 201 bp, Homo sapiens
tgccccagtcagctcggaacacccgtgaaccactcgccttgtacacgaatgtgcacacgaagtcgatgaagcccacttgcagcttggggagctcggccgcyttgttccggtccatcataggctggtgggaggaacagagggcgggagaacagtgaccagggaggcagctcctggggccccgcccagccccccgaccccctc

SEQ ID NO: 117950 - DNA, 201 bp, Homo sapiens
gggcttcctaacctcttgtagcaaatagccacaggcagaacccaaatcctagtgggtgaagattgagggagccatagggtcccatgggacagtgctcacasgatacagcaggttgaagacttgggtgctgggccgccattgcaaatttctgtgcctactgcaagagaagacagaagatggtgagtggaaccacctgtgcac

SEQ ID NO: 117951 - DNA, 201 bp, Homo sapiens
gcagaacccaaatcctagtgggtgaagattgagggagccatagggtcccatgggacagtgctcacaggatacagcaggttgaagacttgggtgctgggccrccattgcaaatttctgtgcctactgcaagagaagacagaagatggtgagtggaaccacctgtgcacaccagccctattccttccctcctgcctggtgtga

SEQ ID NO: 117952 - DNA, 201 bp, Homo sapiens
cgcgactccagcccgcgcccccttgcctgctcccagccaccctgccccagtcagctcggaacacccgtgaaccactcgccttgtacacgaatgtgcacacraagtcgatgaagcccacttgcagcttggggagctcggccgccttgttccggtccatcataggctggtgggaggaacagagggcgggagaacagtgaccag

SEQ ID NO: 117953 - DNA, 201 bp, Homo sapiens
agaaggctgaggtgggagaatcgctttaacctgggatgcagaggttgcagtgagctgagattgcgccattgggtgacagagcgagactccgtctcaaaacaaaaaaaaaaaaaaaaaaaataactgggaagctgaagtggtctttttaggttgcctgagtggtaacatgtgcttttcttctaaccttccggcccaagatga

SEQ ID NO: 117954 - DNA, 201 bp, Homo sapiens; identical to SEQ ID NO: 20093

SEQ ID NO: 117955 - DNA, 201 bp, Homo sapiens; identical to SEQ ID NO: 20094

SEQ ID NO: 117956 - DNA, 201 bp, Homo sapiens; identical to SEQ ID NO: 20095

SEQ ID NO: 117957 - DNA, 201 bp, Homo sapiens
ttaaacaattgttccatgagaacattgtttcttgtagagaagttatttacaattgagaacacatcttttctggcatattttctgtaactggttcaccaaakaacagcacttgttatgttttattatctaagcagaagctacatttgtacttcacccagctgtaaagcaagcactacttgatttgtttccatacttgtttct

SEQ ID NO: 117958 - DNA, 201 bp, Homo sapiens; identical to SEQ ID NO: 20096

SEQ ID NO: 117959 - DNA, 201 bp, Homo sapiens
gcctctcatctccaaattgcaggatacaattgaaaacataggtcatttttgctacctagggcagagggtagctctactgtggagccagaggggcagcccamgtacagcaaggtcttgggccaagctgctcttaggactggctgatagctcttgccttctgaggaagcaggagtcagcaaagggcaagagaggatgctggtg

SEQ ID NO: 117960 - DNA, 201 bp, Homo sapiens; identical to SEQ ID NO: 20097

SEQ ID NO: 117961 - DNA, 201 bp, Homo sapiens
tagatttgcaagttaaccttaaaaaaatactgtaacatatgccattattaaaaagttttctaaaataaaaaaagtcaagatctatcacatattccacttgktagagtagtattggataatataaaaaacaaacaactaaaggaatttgggtgtcttaaaagtttattctaatgagactgtgacctgtatgccttaatgtat

SEQ ID NO: 117962 - DNA, 201 bp, Homo sapiens
agctgacgtggtacaacacacctctcatagcctccatgtacaaagtggcacaatctcagtggcgtaaatgcacaattgcttcatgaggtaggcttttctgmagtgaaattagagctaagtctaactcccaaaccatcacttcagacagtgtgcttgtgtcttgcgtgagggaacttaatgactctgagccctgcacactgt

SEQ ID NO: 117963 - DNA, 201 bp, Homo sapiens
ggaagttctgtatttcttgaaaaatctgatagtatgacaacacagagcctgcatccccagctggagacaactgaccagagctgcatactaacagtccccaktaggaggcaaggactccattttctcacagtcttcagcatcccagcaggagccccactatgattcctttatcttcttaaggccaggctgcatctgattcct

SEQ ID NO: 117964 - DNA, 201 bp, Homo sapiens
gtagggctgtggcagatttgggtgcaactgcctgagttcttaattagccttgagtatattgatttctggaattcaatgaacctgaaaatctgggaaaaaawttttttgagacagtgtttctcaggctcaatttaactcaatttttcttatttctacccacttctaaacattacatatagcctgtgtcttgtctttttttct

SEQ ID NO: 117965 - DNA, 201 bp, Homo sapiens
aaaaatcggaagttctgtatttcttgaaaaatctgatagtatgacaacacagagcctgcatccccagctggagacaactgaccagagctgcatactaacartccccagtaggaggcaaggactccattttctcacagtcttcagcatcccagcaggagccccactatgattcctttatcttcttaaggccaggctgcatct

SEQ ID NO: 117966 - DNA, 201 bp, Homo sapiens
tttacgcttgtatctattcttccatcgtagactgacctggtcatttctttggagtgttttttggttgattcaaatcagtgtctgcatctccagagtattcrtagcaacacattttcctcatcaagttattcttggagtaattggtggtaaatatgatcacttacctttagctgtgtcctttgaaagctttagtttcattat

SEQ ID NO: 117967 - DNA, 201 bp, Homo sapiens
caggtagttctcgagagaaaatctttctaaattaactaccatagatgaaaggctaatcacagactctgaggtgctgaagagcaggaagtttaatttttaaktggaagacaaaatgtatttgatatcattcacatcctgatttaaggataagacatttctgaagaaaatgagtattatgaattacgtagatcaaacactttt

SEQ ID NO: 117968 - DNA, 201 bp, Homo sapiens; identical to SEQ ID NO: 20111

SEQ ID NO: 117969 - DNA, 201 bp, Homo sapiens
ctaaataactatgatgggcccaggggcagttccaggttttgtgaaatctaaagcccctgttaaatggctttatataggcccctctataaagcccctgttayataggccctctctttaataaaaagaaaataaactcgtgaatgcactctaaactatcagtaaccacctgccttttttttttgacagagtctcactctgtag

SEQ ID NO: 117970 - DNA, 201 bp, Homo sapiens
agaatcatgatgctatgtcacagttagaagattcttctgagaaggatcatctgatgtcaccccctctaattttgagtgatccagtttctttgctttttacrcttgtatctattcttccatcgtagactgacctggtcatttctttggagtgttttttggttgattcaaatcagtgtctgcatctccagagtattcatagca

SEQ ID NO: 117971 - DNA, 201 bp, Homo sapiens
tcatatcatatatttttcatacccagatatttattcaaccattttcctcaaagacccaataaaatagagagccacagcctatcttaaattaaaatgcaggrctttatgggctatttgacatgcaataattatttgcaaagtcttttcaccaaacatagaaattgctaatgtctgaccttggaggaaatgaactgtacaaaa

SEQ ID NO: 117972 - DNA, 201 bp, Homo sapiens
atattgatttctggaattcaatgaacctgaaaatctgggaaaaaaattttttgagacagtgtttctcaggctcaatttaactcaatttttcttatttctayccacttctaaacattacatatagcctgtgtcttgtctttttttctgagttactcataattttcatggggaatatgctattctattattcatttctgatct

SEQ ID NO: 117973 - DNA, 201 bp, Homo sapiens
ggtccaagaaactcagatttacccaaatcactcaagtccatgccttgaacagttccctactacatgtgaaacaggtccaggtaagctattacagcaggctscagttactgaagatcttccaatagagaatcattacacagggttatcatctaggaactgatattatatagggtagtaaagaaaatctcatgagtgaggatg

SEQ ID NO: 117974 - DNA, 201 bp, Homo sapiens; identical to SEQ ID NO: 20100

SEQ ID NO: 117975 - DNA, 201 bp, Homo sapiens
gatcagtgctctgtctaaaaagcgggttgtcagtcagtgccaccaactccagaacgatccttctggactagtatgaataatgaaaacaccgtgggcaaacytgcatttttagttactgcctaaaaaaggctttggaaaatggatagaacctctgtgtctaatgccctttgtcattgaaaactgtggcaaatctttaatgca

SEQ ID NO: 117976 - DNA, 201 bp, Homo sapiens
aggcatgctggtggcagaggcctttgaacacactccaggcatccaaacggccagtctgggcacatacctgaagaccaacctctttctcttcctgtttgcasttggcttttacctgcttcttagggtgctcaacattgacctgctgtggtccgtgcccatagccaaaaagtggtgtgctaaccccgactggatccacattga

SEQ ID NO: 117977 - DNA, 201 bp, Homo sapiens; identical to SEQ ID NO: 20108

SEQ ID NO: 117978 - DNA, 201 bp, Homo sapiens; identical to SEQ ID NO: 20109

SEQ ID NO: 117979 - DNA, 201 bp, Homo sapiens; identical to SEQ ID NO: 20110

SEQ ID NO: 117980 - DNA, 201 bp, Homo sapiens
tggtacaacacacctctcatagcctccatgtacaaagtggcacaatctcagtggcgtaaatgcacaattgcttcatgaggtaggcttttctgaagtgaaawtagagctaagtctaactcccaaaccatcacttcagacagtgtgcttgtgtcttgcgtgagggaacttaatgactctgagccctgcacactgtgccattct

SEQ ID NO: 117981 - DNA, 201 bp, Homo sapiens
acaacacagagcctgcatccccagctggagacaactgaccagagctgcatactaacagtccccagtaggaggcaaggactccattttctcacagtcttcarcatcccagcaggagccccactatgattcctttatcttcttaaggccaggctgcatctgattcctgttgacattttagtggggaccacagccatatccagt

SEQ ID NO: 117982 - DNA, 201 bp, Homo sapiens
tcattgtcagtgtctctttccaatcctcaggcatgctggtggcagaggcctttgaacacactccaggcatccaaacggccagtctgggcacatacctgaaraccaacctctttctcttcctgtttgcagttggcttttacctgcttcttagggtgctcaacattgacctgctgtggtccgtgcccatagccaaaaagtggt

SEQ ID NO: 117983 - DNA, 201 bp, Homo sapiens
cacacagtcattgtcagtgtctctttccaatcctcaggcatgctggtggcagaggcctttgaacacactccaggcatccaaacggccagtctgggcacatmcctgaagaccaacctctttctcttcctgtttgcagttggcttttacctgcttcttagggtgctcaacattgacctgctgtggtccgtgcccatagccaaa

SEQ ID NO: 117984 - DNA, 201 bp, Homo sapiens; identical to SEQ ID NO: 20107

SEQ ID NO: 117985 - DNA, 201 bp, Homo sapiens
gctatttgacatgcaataattatttgcaaagtcttttcaccaaacatagaaattgctaatgtctgaccttggaggaaatgaactgtacaaaaaatttcaarcaaacatgatccaactgttcgcacaaaagggaggttgcataagaaattcattgtgtttctatccaaatttccccctcgaattgccacagatcagcatgta

SEQ ID NO: 117986 - DNA, 201 bp, Homo sapiens
ttcctgaagcagtgttcaccatgactcagtttccattgttcagcaccaccttacctttcaaaggctaattggctatggcaattgaaatgttaattgcaagyacctagatcagtgctctgtctaaaaagcgggttgtcagtcagtgccaccaactccagaacgatccttctggactagtatgaataatgaaaacaccgtggg

SEQ ID NO: 117987 - DNA, 201 bp, Homo sapiens
cagctttgctgcagtttctgtagcactggaatatgacagtttttaatacagaaagtcttgtctaaaaattaattttagtgcagttttagtcaatgaataamatgtgcttattctattctttcatagacaaaataacaaaatgaatagaaaactaatattttgctttaagataatagcctaattagctcatagctatttcca

SEQ ID NO: 117988 - DNA, 201 bp, Homo sapiens
tttttcaaagtctcttaatcatgaactttcacaattaaccctgcgcttgagtcattttttataggaaagaattgctaatctccaattaaataatagctgtrtatttaaatatatatgcatgtttataattctttaaatacaggatattatttggtcatcgaccttactggtgggtccaagaaactcagatttacccaaatc

SEQ ID NO: 117989 - DNA, 201 bp, Homo sapiens
tttttttatgttttttgtgcattgctgtttttaatccaaagtgtataacctataggtcaattcccctgttctctattttctgtgtctcaaaaaaaaaaaaacaaacaaaacaaaacccaaaacaaaagaaaaaaaaaaaacaagaaacaaggacttttgaaaatctgtgcaattaaacccaatgaaaaaatttgccccaga

SEQ ID NO: 117990 - DNA, 201 bp, Homo sapiens
ttcatgggaaaccagggtgccaaaataccaaatggctaccacctttaataatgtgtgagagaccaagacctaagttttttcaaagtctcttaatcatgaaytttcacaattaaccctgcgcttgagtcattttttataggaaagaattgctaatctccaattaaataatagctgtgtatttaaatatatatgcatgtttat

SEQ ID NO: 117991 - DNA, 201 bp, Homo sapiens
atttgcaaagtcttttcaccaaacatagaaattgctaatgtctgaccttggaggaaatgaactgtacaaaaaatttcaagcaaacatgatccaactgttcrcacaaaagggaggttgcataagaaattcattgtgtttctatccaaatttccccctcgaattgccacagatcagcatgtacttcactctttgccaccaatt

SEQ ID NO: 117992 - DNA, 201 bp, Homo sapiens
tgtaacatatgccattattaaaaagttttctaaaataaaaaaagtcaagatctatcacatattccacttgttagagtagtattggataatataaaaaacamacaactaaaggaatttgggtgtcttaaaagtttattctaatgagactgtgacctgtatgccttaatgtatttattgcccaacccaaaacaacaacataaa

SEQ ID NO: 117993 - DNA, 201 bp, Homo sapiens
gaaaggtaaggacttctcaatgttactatagccagtaaagactatttctaaccctagaacaatctctttaaaacatattttttctctgtacacaagtaggmttcttgggccacttcttttttattctaggtaagattctgtatgagtataaaatctttattgtgatagttgattctaagactgttttaaaaagttttttga

SEQ ID NO: 117994 - DNA, 201 bp, Homo sapiens
attttgataactcataaataagtcgtctaaaattatacagcataaggaaacatttttgcatgcacattcccttgctttaaaattaactggaagttttgagmatcatcattctccttgactgcatcagtttattcagtaaaattatgcttccttcttcgaatagccaatgcttttgatttcagtaacatatattccagcttt

SEQ ID NO: 117995 - DNA, 201 bp, Homo sapiens
tagaatcatgatgctatgtcacagttagaagattcttctgagaaggatcatctgatgtcaccccctctaattttgagtgatccagtttctttgctttttaygcttgtatctattcttccatcgtagactgacctggtcatttctttggagtgttttttggttgattcaaatcagtgtctgcatctccagagtattcatagc

SEQ ID NO: 117996 - DNA, 201 bp, Homo sapiens
atatcctttagagtttgacttctcagcccaaggaaaataagccaactgaagatccaatacaagcattagggtggtgcaaaagtaattgcggtttttgccaytactttcaatggcaaaaaccgcaattactcttgcattaacctaatacttttgcttgtcaattaaaaacaaccaaatattgaagaatgagtagggctgtgg

SEQ ID NO: 117997 - DNA, 201 bp, Homo sapiens
gacatgcaataattatttgcaaagtcttttcaccaaacatagaaattgctaatgtctgaccttggaggaaatgaactgtacaaaaaatttcaagcaaacaygatccaactgttcgcacaaaagggaggttgcataagaaattcattgtgtttctatccaaatttccccctcgaattgccacagatcagcatgtacttcact

SEQ ID NO: 117998 - DNA, 201 bp, Homo sapiens; identical to SEQ ID NO: 20103

SEQ ID NO: 117999 - DNA, 201 bp, Homo sapiens
cagagtattcatagcaacacattttcctcatcaagttattcttggagtaattggtggtaaatatgatcacttacctttagctgtgtcctttgaaagctttrgtttcattatgtttaagggtatcagattgtccccggtaatcaactttccaatttcagaggtaattctgtgaagtcactgatactaaatgctaccccggga

SEQ ID NO: 118000 - DNA, 201 bp, Homo sapiens
agttagaagattcttctgagaaggatcatctgatgtcaccccctctaattttgagtgatccagtttctttgctttttacgcttgtatctattcttccatcrtagactgacctggtcatttctttggagtgttttttggttgattcaaatcagtgtctgcatctccagagtattcatagcaacacattttcctcatcaagtt

SEQ ID NO: 118001 - DNA, 201 bp, Homo sapiens
atagcctccatgtacaaagtggcacaatctcagtggcgtaaatgcacaattgcttcatgaggtaggcttttctgaagtgaaattagagctaagtctaactyccaaaccatcacttcagacagtgtgcttgtgtcttgcgtgagggaacttaatgactctgagccctgcacactgtgccattctctctgaaacatgtgaagt

SEQ ID NO: 118002 - DNA, 201 bp, Homo sapiens
ggctttgcccatcctggtctccggtcctcagccaacatgtgtgaaagatcaattcactgcaaaggtttctcctccattgccctcattcttctcccccttaygttattagtcaataaggaatatttcttggctatggggaagtcataatggatagcattggtcttggaacaccttggtcttttaatgctagagagtgacctt

SEQ ID NO: 118003 - DNA, 201 bp, Homo sapiens
  misc_feature (1)...(201): n = A,T,C or G
cctagaaatctccattcagcacatggcatgtgttttgaaattactaaaaaaaaatgttatattatgttccagctgttgaatatatatacacacatgatatncagtgaaaatgataaacttggttgctccttaaatttttcacgatttgaagaaactttaactttctttagactcctaaagaaaaatggaagcataactcca

SEQ ID NO: 118004 - DNA, 201 bp, Homo sapiens; identical to SEQ ID NO: 20114

SEQ ID NO: 118005 - DNA, 201 bp, Homo sapiens
acagtttattttccctttccgaacattgcagttgcgaactttggagatttggcaacatcaggcaaggatgctgccagcaagaggagagatccaggacaacygtgcgtgggtcatcccttgctcagatctcacagcaatcttgccttgtatggcactggaaaaatagagcctctttcttcagatgaagtcttctcttagtgc

SEQ ID NO: 118006 - DNA, 201 bp, Homo sapiens
taccagaacatgctagtaagcctggtatttgactgccaaagacaacataattccaaggtaaagaatgtgagcagagatgctgcctgccttctggaaagagrctttattttaacagagctcttcagatgatagttccatgtcaacccaaagcaagtttaaaatcaaacctaagagagatataggatgatagaatctccaaga

SEQ ID NO: 118007 - DNA, 201 bp, Homo sapiens
cttctttgggtttaagaatatagatagatggatgatagatagatagatagatagatagatagatagatagatagatagatacatagatacatagatacacwgatacatagatagttttcactgatttcctgacaggaaagaattgaattattgatggcccttttagtatatgtttaatatacttccacttttatatttaag

SEQ ID NO: 118008 - DNA, 201 bp, Homo sapiens
ttaactatgcagcaaccaataaaatctgcatgggagacttattccatatatactcccttagtacaatttattaaaataatgtagactattaacgtttaaastaaatgtaatatatatatttaatataaaaattctcattactgtgattaataaaatttttggtgtaagctgatatttagttagagaaaatgaacaagataa

SEQ ID NO: 118009 - DNA, 201 bp, Homo sapiens
aagctgataccactgagctccttttgcagtgtgttccaccagaccacctataatacaacaagcagcccatgtaccacaaagccatctacgaagtcctgccrgtggccagcagtgtacaggggagctgttctcagggagccatgacagtgatgagagtgacactgccaaggatacagaggtgcagagcaagcagatattcag

SEQ ID NO: 118010 - DNA, 201 bp, Homo sapiens
atgtaggatcacatacataccactgataattctaacatatttaaggaatcaaaaagtagacccactatcaaaattacaattaaatcactaatggtctttcttttttttttttttttttttgagatggagtctcgctctgttgcccagactggagtgcaagtggtgtgatcttggttcatcgcaacctctgcctcctaggtt

SEQ ID NO: 118011 - DNA, 201 bp, Homo sapiens
ctgcagtggcgggatgactggccctctcagctccagatgttcttccccaataaccctaaccaggaatttgaccctctggaagtctactcgcctgtcccagytgagaaaaggaagccgcccatccaggtgctgtctctttttgacgggattgatatgaggctcctggtgctgaatggcttgggcatttaggtagatcactac

SEQ ID NO: 118012 - DNA, 201 bp, Homo sapiens
aacacagaagagtagttagtgtacaaggtgaggaagaagtgccagaacatcaaggacctttgtgtctcttgtgagagcctcaatgtcactctggaacagcycctcttcatgctaggaatatgacgacattgcaagaactgcttcctggaatatgcataccagtatgatgaagaaggctatcagttctgctgcaccatctgc

SEQ ID NO: 118013 - DNA, 201 bp, Homo sapiens
ctttttctatattatcctgcttcccacagtgaggtagaaaatgggacatgggaagactccaactccatgttcattttttgacattaactcattaaaagagaaaaaatctcctaaaccaacaagtagtgccaaagaaagtcactgatgctccctccttaggctctatcgggttatttttaaagggtctgcttgagaatgact

SEQ ID NO: 118014 - DNA, 201 bp, Homo sapiens
ttttgtaattcttaaaccaggaggagaacctgaacccagcctgaattatcgcccaatctccttaataaatgtggacagggaaatctcagtaaaggtgctgrctaataggctggaacagatattcccacaccaaatccatcccaatcaggtagatttatttggaacagacagtgaggcaataatgggaagcaattattaaat

SEQ ID NO: 118015 - DNA, 201 bp, Homo sapiens
cctccttaggctctatcgggttatttttaaagggtctgcttgagaatgactgaagctacaagtatagccagaaacacagctactttcagagggcaagatcraagtgaaaagatgaaaatttgccccctaaaagtagtcactctctgaaatgcaccaagagccctgatgtttgataatctggtttcataccccaaagcaagg

SEQ ID NO: 118016 - DNA, 201 bp, Homo sapiens
ggtagaaaatgggacatgggaagactccaactccatgttcattttttgacattaactcattaaaagagaaaaaatctcctaaaccaacaagtagtgccaargaaagtcactgatgctccctccttaggctctatcgggttatttttaaagggtctgcttgagaatgactgaagctacaagtatagccagaaacacagctac

SEQ ID NO: 118017 - DNA, 201 bp, Homo sapiens
caataccatcaacaacaaatgagacagtgactcctagaacaaaagcactgctctttggtggctggattatgcacttgtggtgagtttaggacttggggagwcccagaaacatgtctgcaactagcagagtagctggcagtgtgaagattccatttctgagaagaacagagaactttttctatattatcctgcttcccacag

SEQ ID NO: 118018 - DNA, 201 bp, Homo sapiens
tatattagaggtgagtgttaaagttagcaattgtagaagtcctagaaatctccattcagcacatggcatgtgttttgaaattactaaaaaaaaatgttatrttatgttccagctgttgaatatatatacacacatgatattcagtgaaaatgataaacttggttgctccttaaatttttcacgatttgaagaaactttaac

SEQ ID NO: 118019 - DNA, 201 bp, Homo sapiens
agagtgaattgagcaccagtactggggtctgatggatctgtgcttgagtctcagcttactgactgcatggcactgggtaagtatttagtctctttaagtcytagctttcatctctactaagtgggatgaccaataattgtacttactaaaagggtttttgtgaatactaaatggttactgcagataaagtgcttacaagtg

SEQ ID NO: 118020 - DNA, 201 bp, Homo sapiens
cacttcaaaagtcttcccaagaccatggccttgaatccaccctattgctcttttccgctctccttgtcttctgtgctgatggcattctgctgacccctacrttgtgccgtgatggttaaggactaaaaggtggaagaggagagtgaattgagcaccagtactggggtctgatggatctgtgcttgagtctcagcttactga

SEQ ID NO: 118021 - DNA, 201 bp, Homo sapiens
gggttaagtgagatgggtagaaacagtccagccttcagttgctacctctcagagctggatgcctctgcagctgcctctgaaaatgttgattgactagttgycttcaagcattagcacacagccagtgtggccaaattatcttctacacttcaaaagtcttcccaagaccatggccttgaatccaccctattgctcttttcc

SEQ ID NO: 118022 - DNA, 201 bp, Homo sapiens
gataaacttggttgctccttaaatttttcacgatttgaagaaactttaactttctttagactcctaaagaaaaatggaagcataactccatccacacacaytgaaattataactattactattattgctgagcagaagataacagattatctggcccaatccctcatgaggtgtgtgaggaaactgagttgagagcccttt

SEQ ID NO: 118023 - DNA, 201 bp, Homo sapiens
aatctacttgcccttcttccttactgaaaaccagactaaacatttctgaatgtctgcatttaaaaatttccaacagtaatgaatcgactgtacttgggttrctctagccggatcccctcactgttagcaggtctaaccttctactgatataattgcatcaccacactcatggcctttctggtcctttccttggattttcca

SEQ ID NO: 118024 - DNA, 201 bp, Homo sapiens
tatgaacttcaccataacccacagcaatctttgtctttattcgcaattaagaaattagaaatatgtgaactagctcctgacacccccactagattcttagyatttgtatgtctggagaagaaaacctcagagaagaaatcaaattgtgttgctttccgtgctctccatctttaccaatcaacttttaaaagttctggatat

SEQ ID NO: 118025 - DNA, 201 bp, Homo sapiens
ccttgtgtgtgaaaacaagtgggacagaggaagatggcagcacattctctttgcatctgacagtcaccaaaaattagaagtcaaatttttcatatttgagtttttttttgtacttgcaaagtgaacaaatagtatatttagttttacatctttaggtgaaaattaggaaggcaggacagataataaaatgagcacagtttt

SEQ ID NO: 118026 - DNA, 201 bp, Homo sapiens
aattcagcttgatgtctgctcttgtaaagttttattgtcacacagccatacccatttccatactgttgtctagtggctgctttctaaacccataagagtasagttgaaccgttccaatgagaattgtattagccataaagcttaaaatattttagcatcaacgagagcccctgacaggaaagatgtgccaaccctgaccta

SEQ ID NO: 118027 - DNA, 201 bp, Homo sapiens
agttactatgttccaagtacatactgtgtattaatactaagcacctttactttttttatttaatattcacaaaaaccccatgaaatagatgtattagtctkttctcacactgctataaagatactacccaagactgggcaatttataaacaaagaagctgtaactgactcacaggtccacatggctggagaggactccaga

SEQ ID NO: 118028 - DNA, 201 bp, Homo sapiens
gtacccagatgaagctgctgaacagaaactgatttaagaaaagatcatgggacaaaaatatattttttaaggagtccagatcaacttgacttgccaagaarattcaggtggtcccatattgttgagctacatctgcctgtggggtgccaagttgagagggtgaacaagttcattctttagaaaaaggctttagtaactttg

SEQ ID NO: 118029 - DNA, 201 bp, Homo sapiens
tgttgtgaatttcaaaataaaagaatgaaactggaacattcatagcacaaagaaagaataaatgcttgaggtgatggatacctcatttaccctgatgtgaytattactcattgtgaacatctcatttacctcataaatatatacatctactatgtacccccaaattaaaaatttaaaaaacacaacaacaacaacaaaata

SEQ ID NO: 118030 - DNA, 201 bp, Homo sapiens
tccaacaagaatgtgctgggaggtcaaccatcggtatttaggtgtctcttccaaatcccaaccacttatcagcagagcagtcctgagcacacaaatggcamcttagtgcttggattgccttgtgtgtgaaaacaagtgggacagaggaagatggcagcacattctctttgcatctgacagtcaccaaaaattagaagtcaa

SEQ ID NO: 118031 - DNA, 201 bp, Homo sapiens
cgtcatcaccatcctcatcatttctgcaggagctattctttatatactttgtatacatatatagtatgttttatatacttccactgatatctttaagaaaragaaaagataaaggtggaagtatataaagcatatactaaaaggaaaagaaaatcacaaattcttttaccttccaaaaattcattgacttctaaaaactta

SEQ ID NO: 118032 - DNA, 201 bp, Homo sapiens
agattcagttccatttctgattctgctttgatgcaaacattaagccagaaaaaaagatgagcgattcccttgttgttactcaattattcataaattgtttyaagaagcaggctctgatatttcttctggcaccacccctcaaaataacctgagattctctagaatggcatcagctgctgagaatatagggaatctgtgtat

SEQ ID NO: 118033 - DNA, 201 bp, Homo sapiens
aaccagactaaacatttctgaatgtctgcatttaaaaatttccaacagtaatgaatcgactgtacttgggttactctagccggatcccctcactgttagcrggtctaaccttctactgatataattgcatcaccacactcatggcctttctggtcctttccttggattttccaatataattaaagtccatgtaaagcactg

SEQ ID NO: 118034 - DNA, 201 bp, Homo sapiens
tgctgtttgccttgcaccacatgattaattgtgtttaaagaccagttttattaggaccagaatggtgacaataaaattaaaggagcgcagattcaacatcwccttaaccaaaaggaaaaatgaaaacgccacacacaaacacaaaacgcaaacacacgcccaaatgcagaggcaaaaaataaaacctttcccctttcctca

SEQ ID NO: 118035 - DNA, 201 bp, Homo sapiens
agattttaaaaactagaaaatcaggtttatcaaaatcaaaattacccagagcctaaattatatcagagcctctaacaatgaatggtgttttcaagtgatayagaaatatttggtactcattctatttccattactgagcttgtaaacaaatttgagattccctcctttagccttgcctaaatataaactatatatttattt

SEQ ID NO: 118036 - DNA, 201 bp, Homo sapiens
aaattaagttatgtgtaacgttcataaagggccaagtgaattcaaaattaaacatttcaaagtgtttatattcaaattcatatgtcaatcaacacaattaytctctccactggcatcaagtcatgattgcttggttccaggctcagccctgagtggacctgcagctgtgacagcttagacatgcccttctgtccctcttcc

SEQ ID NO: 118037 - DNA, 201 bp, Homo sapiens
acatcaaagcaggtgacgatgaaccagagtacaaggacagctggggctttggcaatggggagctggtgtgaggaaaactgcagggcttctcctggtggccrcattgtgtcttggtggatgacaggccaaagccgagcagctgaaggcacccactgtgtcatgtggcttggagaggtgagttctcagtgctgtgtgtagaga

SEQ ID NO: 118038 - DNA, 201 bp, Homo sapiens
ttaagtaaaaaactgagctttgtgtttctttccagacttagaattatctataacacagttggacccattaggtaactctccctttcattcaacctatgcakcccattttcagcagaggatcaatcaatgtgctctttctctgcttcaattctactatcctaaaagtattagccatcccacagttctactgtattcaactga

SEQ ID NO: 118039 - DNA, 201 bp, Homo sapiens
tggggtcacacatccctgaatgatgattcctgttattcttgagagggcttgcaagtattcaaccctcaaagtctatgataaatcaacaaggaagtttcccmggaacacccagggttagtctgtggttaggcagctgcctgaataataatttttcattattcatgaagcagctttaatatccagagctaaaaggatcccagg

SEQ ID NO: 118040 - DNA, 201 bp, Homo sapiens
aagataatacttctgaaccctacaaggcaggccaaactcatttaaaatgacagctgtcattaatacagatgtttattgacttgttgggggaggggagtgayactaagtgttgggtggggggcagaatgacctggaatatctaacaatagcaatatgtagaccctgactctactctatgcacaaaaggacagccatgacgta

SEQ ID NO: 118041 - DNA, 201 bp, Homo sapiens
tgagagtcacaaacgatcacccaaagaaatccaaagaagaaaagctccaaggtagaaaaaatgagcttggtgttacctgtctagtttatgaccttttcccttttttttttcctttttttttttttttaaactgtccttcaagggggctgaaaaccaattttcatgctatagctctaaatatcagtttatccctctgacagg

SEQ ID NO: 118042 - DNA, 201 bp, Homo sapiens
gcagtgtgttccaccagaccacctataatacaacaagcagcccatgtaccacaaagccatctacgaagtcctgccggtggccagcagtgtacaggggagcwgttctcagggagccatgacagtgatgagagtgacactgccaaggatacagaggtgcagagcaagcagatattcagatggacctttggggggttccagcct

SEQ ID NO: 118043 - DNA, 201 bp, Homo sapiens
gcgggtccttgtttgaatctacttgcccttcttccttactgaaaaccagactaaacatttctgaatgtctgcatttaaaaatttccaacagtaatgaatcsactgtacttgggttactctagccggatcccctcactgttagcaggtctaaccttctactgatataattgcatcaccacactcatggcctttctggtcctt

SEQ ID NO: 118044 - DNA, 201 bp, Homo sapiens
agagtaataattgtttctatttatgcgacactaagtactcatcagtctcttatttatgttgtcttaacttcttaaactcttccaactattctgtacagtasgtactatttttaatcctcattttctaagtgagaaaactgaagtttagagagcgtaagaaacttatcctggttaatggtatagctgggatttgaacctaga

SEQ ID NO: 118045 - DNA, 201 bp, Homo sapiens
atggtttctaaccctcggcactattgaaatttggggtcatggaggggctgccccatgagttgtaagatgcttagcagcatccactaggttgccagcagcamccccaccccgagttgtgacaacagaaacatctcccgacattaccaaatgttccctgggtggggggtgtggggcataaacaattgagaattgctaggttaa

SEQ ID NO: 118046 - DNA, 201 bp, Homo sapiens
tcaactgcagacacttgagcttggtggcaccccccagggatggagcaggtggcacagcagtgacagaacagcagcaggaggaaacctgcttctaccacatygttattaaggctgatgaacaactctgatcatcacacagttgaaaattatgggattcaggaccaaagctaagggatttgtttcaaatcggtaaatccccac

SEQ ID NO: 118047 - DNA, 201 bp, Homo sapiens
atttattattaataaatgaccgctattattactatgtttattacttcctgcataaacatggtggatgattctcagataagccatagctaggtttaccatgyaatttgttgacactggctcttaaaaataaataacaaagtgacccttactaacaaagtgacccttacaaactctacatttcttgtttccaaccatttccat

SEQ ID NO: 118048 - DNA, 201 bp, Homo sapiens
acagagaagggcccgtggctgccattccacctccttctctgaagggcctttgatcacctagccactctgcccctccccttcattcagcaataatttggacygaaggcagcattgttcagggggagctctcaggactcacaagtcctccccgcccctctcagtaacaaactagttaataggacttgcgtcatcacctttgtc

SEQ ID NO: 118049 - DNA, 201 bp, Homo sapiens
tttctattattaataaatgagtaatttattattaataaatgaccgctattattactatgtttattacttcctgcataaacatggtggatgattctcagatragccatagctaggtttaccatgcaatttgttgacactggctcttaaaaataaataacaaagtgacccttactaacaaagtgacccttacaaactctacat

SEQ ID NO: 118050 - DNA, 201 bp, Homo sapiens
ggcgctacgtttgctacttttatgtaataaaagtaatacaccatttctattattaataaatgagtaatttattattaataaatgaccgctattattactaygtttattacttcctgcataaacatggtggatgattctcagataagccatagctaggtttaccatgcaatttgttgacactggctcttaaaaataaataac

SEQ ID NO: 118051 - DNA, 201 bp, Homo sapiens
aagagcagctagattgtctgtggtatcaattccttgacagcaagaactgcatcttgtttacttttcaatctcacacagagtaggtattgatggtactggaygaagacagtgaaagaaagaggcagaaggaaggaaaagagttgctggactcagtgacttgtcatacccatccagtgtaggcagtcatgtgatagagaaata

SEQ ID NO: 118052 - DNA, 201 bp, Homo sapiens
aaagtgattaaaaccagcccttgcaagaaggcagagataaccatcttggggtttgagtctcctttagttcccccatccaatcccctcacccccaccactgscttgagttttatagagttttccggagctttaatatactttttttcatctggtcacgttcttctttcctccctttacccttctctgatacttgagcttgtt

SEQ ID NO: 118053 - DNA, 201 bp, Homo sapiens
gtgtctctacacgtgtataataaaaaattatagagagaaatggagagtctaatgttttcagaaactgaacattatatttagtctgggcaagttctgaatgmtggaagccagggtaggcagtagctttgctgtgatagtcctggcatggttgaaatttattgagggcatcccaggagctcaaaactgtgcccaggttcagtg

SEQ ID NO: 118054 - DNA, 201 bp, Homo sapiens
gcttagcagcatccactaggttgccagcagcacccccaccccgagttgtgacaacagaaacatctcccgacattaccaaatgttccctgggtggggggtgkggggcataaacaattgagaattgctaggttaaaataaagatataatatagatgtgtgtctctacacgtgtataataaaaaattatagagagaaatggaga

SEQ ID NO: 118055 - DNA, 201 bp, Homo sapiens
ccaaagaataataaaggcacatatacacatgtgtgtccacattttagtctggttaaaatggtttctaaccctcggcactattgaaatttggggtcatggakgggctgccccatgagttgtaagatgcttagcagcatccactaggttgccagcagcacccccaccccgagttgtgacaacagaaacatctcccgacattac

SEQ ID NO: 118056 - DNA, 201 bp, Homo sapiens
gcaatggggagctggtgtgaggaaaactgcagggcttctcctggtggccgcattgtgtcttggtggatgacaggccaaagccgagcagctgaaggcacccrctgtgtcatgtggcttggagaggtgagttctcagtgctgtgtgtagagaagctgataccactgagctccttttgcagtgtgttccaccagaccacctata

SEQ ID NO: 118057 - DNA, 201 bp, Homo sapiens
accagaacatgctagtaagcctggtatttgactgccaaagacaacataattccaaggtaaagaatgtgagcagagatgctgcctgccttctggaaagaggytttattttaacagagctcttcagatgatagttccatgtcaacccaaagcaagtttaaaatcaaacctaagagagatataggatgatagaatctccaagat

SEQ ID NO: 118058 - DNA, 201 bp, Homo sapiens
tatatatgcaatttcattataaggtgctatttaagggtcaatggcatgggctctgaagacagactccctgatttaaattctggacccaacatgtatcagckgggcatatgatttaggcttcctgtcttcaagatccttagctgtggaatgggaatcatgtagtatgaacttcactgggggggttgtacgaatcaaacaagc

SEQ ID NO: 118059 - DNA, 201 bp, Homo sapiens
gttgcttcacagtgttgtatttctccagaaccacacatccaccttcatgaacagagggcagtgtgagggatcctttctagtcaccgggaatgacagacatmatcaacagttagccaggaaatcacaaataaaacagctacccctaagaaggcagaaaccaaaaaagcatcaaagcagctttttgcagcaagaagatccaca

SEQ ID NO: 118060 - DNA, 201 bp, Homo sapiens
  misc_feature (1)...(201): n = A,T,C or G
gcctggtgacagagcaagactctgtttcaaaaaaaaataaaaaaaaaagctcgacatcaaggagattgttgatgaacacagaagagtagttagtgtacaangtgaggaagaagtgccagaacatcaaggacctttgtgtctcttgtgagagcctcaatgtcactctggaacagcccctcttcatgctaggaatatgacgac

SEQ ID NO: 118061 - DNA, 201 bp, Homo sapiens
ttcatcaaagcgtcgtgctcccacctcatgctaagtaaagcagctggtgaatgttatgtcgtgcactgcagatggattggtggtggcaggcccagagctcrccacatctacttaaacaggtgtttgattctgcattttccaggtagccagaaggaacctgattattcggtgagagtaggagccacgcgggagaggaattgc

SEQ ID NO: 118062 - DNA, 201 bp, Homo sapiens
cctgcccacgaaggaccctacaagggcactggccagcaattctttgagttttctcacctgtgcatcatgcacagcccaaggagggagatgatcacccttcytgtggctccttgagagtgtggtggccatgggcactagtcaaaagagagacatctcacaatttttttattcgaattccatgatgattaatgccaaggaagt

SEQ ID NO: 118063 - DNA, 201 bp, Homo sapiens
aatctccttaataaatgtggacagggaaatctcagtaaaggtgctggctaataggctggaacagatattcccacaccaaatccatcccaatcaggtagatytatttggaacagacagtgaggcaataatgggaagcaattattaaatgcagtacagtgaactcctggagacagagaagggcccgtggctgccattccacct

SEQ ID NO: 118064 - DNA, 201 bp, Homo sapiens
aaagtcagtgccatcgtgagtaaatgggctaagagtaaagaggtatggtaaccccaaagcaagttgggtactctcgacatgtaagcagcacggatactacrgagcaaaatttcctctagtacactctagcccctagaacaacaacctttacgtcccttaaactttaccaacttcctttatgccactcatttagggcttacc

SEQ ID NO: 118065 - DNA, 201 bp, Homo sapiens
ccttaaaaatctcattgtttcagtttttttgtttgtttgtttttccttttcaactgcactagggctgtgtgtgtgtgtagggaagagacaggggcaggagrtcagaggcagagaggaagagaaagagagaaagtaacagacacagagaaagggagaggcagattccatgctgtttctgtgcattatctctctttatataga

SEQ ID NO: 118066 - DNA, 201 bp, Homo sapiens
tgccccttgtgcctcctccccttatctagagatactatcctccgtcaaattcccacctcccttcaaggccagccacatgctcagtaggtctcatgttggtrgcctgggggcctgagtccattttctcacctcctatccatgtgatcatggactggatctgagaaatgtgcttgataatattactgacctggtagggttgtt

SEQ ID NO: 118067 - DNA, 201 bp, Homo sapiens
tcttgggttatcccctaacaaagctttattgaaaagccttaagttgcatctatttcatgcccaatgattatattatctttttcgcactttccattagctgatatatatatatatatataatcatgcccgtgtctctatcatttaacttctggttaatgtgtcagttcctctgcatttgctcttcctcctgtcaatatttcc

SEQ ID NO: 118068 - DNA, 201 bp, Homo sapiens
cttgggttatcccctaacaaagctttattgaaaagccttaagttgcatctatttcatgcccaatgattatattatctttttcgcactttccattagctgatatatatatatatatataatcatgcccgtgtctctatcatttaacttctggttaatgtgtcagttcctctgcatttgctcttcctcctgtcaatatttcct

SEQ ID NO: 118069 - DNA, 201 bp, Homo sapiens
ctcagtttcaggtatggaatctgtgcctcagatttctgtaaattgcccctacttctaagtaaagagtcttctttgggtttaagaatatagatagatggatvatagatagatagatagatagatagatagatagatagatagatagatacatagatacatagatacacagatacatagatagttttcactgatttcctgaca

SEQ ID NO: 118070 - DNA, 201 bp, Homo sapiens
cctgtcaacacttggctgtctctgccatctctccaaaggccggcccctggagcactttctgtctgtaccatttggttgtcacttaatcaaacactccctcwtctagcctgttgcttcatgtgccttagccttcccttgccaacacaaacataagttccttaagtaaaaaactgagctttgtgtttctttccagacttagaa

SEQ ID NO: 118071 - DNA, 201 bp, Homo sapiens
agtttcaggtatggaatctgtgcctcagatttctgtaaattgcccctacttctaagtaaagagtcttctttgggtttaagaatatagatagatggatgatvgatagatagatagatagatagatagatagatagatagatagatacatagatacatagatacacagatacatagatagttttcactgatttcctgacagga

SEQ ID NO: 118072 - DNA, 201 bp, Homo sapiens
tcaggtatggaatctgtgcctcagatttctgtaaattgcccctacttctaagtaaagagtcttctttgggtttaagaatatagatagatggatgatagatvgatagatagatagatagatagatagatagatagatagatacatagatacatagatacacagatacatagatagttttcactgatttcctgacaggaaaga

SEQ ID NO: 118073 - DNA, 201 bp, Homo sapiens
tcagctcctatgatttctgacaattaaattgttctgtcacttggggactctcattaatctcaacttgtcatccttgtttatgcaggttataatgggctatrtgtataagtgaaatgagatgctaaaaggctttggctttttacctctttgatgaaagtaaaattgaaataatttattaaagtggtgactttgaattgcaca

SEQ ID NO: 118074 - DNA, 201 bp, Homo sapiens
gtaaattgcccctacttctaagtaaagagtcttctttgggtttaagaatatagatagatggatgatagatagatagatagatagatagatagatagataghtagatagatacatagatacatagatacacagatacatagatagttttcactgatttcctgacaggaaagaattgaattattgatggcccttttagtatat

SEQ ID NO: 118075 - DNA, 201 bp, Homo sapiens
tccatccactggggctttttatgaaatgagcctcaatgccaatgcagtgtacaatgatacttctaaaatgaacccaagaaactcaaaagactttaacgggaaaaaaaacaagggaaaatagcacaatactaagaggaaaaagcacacaactgtagaaaccaagactagaagaaaccccggcaaggacttcccaagagaaca

SEQ ID NO: 118076 - DNA, 201 bp, Homo sapiens
attgcccctacttctaagtaaagagtcttctttgggtttaagaatatagatagatggatgatagatagatagatagatagatagatagatagatagataghtagatacatagatacatagatacacagatacatagatagttttcactgatttcctgacaggaaagaattgaattattgatggcccttttagtatatgttt

SEQ ID NO: 118077 - DNA, 201 bp, Homo sapiens
gaattaaacaagttgaaaagtaatacagtaatactgcttggttttcctccttaaaaatctcattgtttcagtttttttgtttgtttgtttttccttttcawctgcactagggctgtgtgtgtgtgtagggaagagacaggggcaggaggtcagaggcagagaggaagagaaagagagaaagtaacagacacagagaaaggg

SEQ ID NO: 118078 - DNA, 201 bp, Homo sapiens
tcttctttgggtttaagaatatagatagatggatgatagatagatagatagatagatagatagatagatagatagatagatacatagatacatagatacayagatacatagatagttttcactgatttcctgacaggaaagaattgaattattgatggcccttttagtatatgtttaatatacttccacttttatatttaa

SEQ ID NO: 118079 - DNA, 201 bp, Homo sapiens
ccctgactctactctatgcacaaaaggacagccatgacgtacatcacaatgagagtcacaaacgatcacccaaagaaatccaaagaagaaaagctccaagrtagaaaaaatgagcttggtgttacctgtctagtttatgaccttttcccttttttttttcctttttttttttttttaaactgtccttcaagggggctgaaa

SEQ ID NO: 118080 - DNA, 201 bp, Homo sapiens
acacctggacaatctggttttctccagggaatgtactaactctggatttttttatccatctgaagtccaccatatggaacaactgtgtcattaaaatgggygttaaaaagatttgttcactcagctacatttagacagataataatatttggcaattttatatagtgcctttcacctgtccatctcaaagtaagcaattta

SEQ ID NO: 118081 - DNA, 201 bp, Homo sapiens
ttaggctgcgctcctgcagcctccctcccatcccccagcctgggcaaaccttggcagactccaggttgcaagcctgtgcctccccactgatgtggaaatcrttggactcagtggtggtttaagtgtgttgttgatgctttcatcaaagcgtcgtgctcccacctcatgctaagtaaagcagctggtgaatgttatgtcgtg

SEQ ID NO: 118082 - DNA, 201 bp, Homo sapiens
tctccatggctgcttccacagaatgccctcatttttctagaatccaaatgctggcttagccaagccacagtctgctcccgaagaaggattgctgcagcccraggtctcaggaggtcagcagcgggcccaggctcacttgggcttaggctgcgctcctgcagcctccctcccatcccccagcctgggcaaaccttggcagac

SEQ ID NO: 118083 - DNA, 201 bp, Homo sapiens
ttctaaaccgatacaagcatgggattccagcagtctgggatgcagcctggtttgccagctctcaacccagatggccctgattcacagcctgtctccagcamttgctggcaatgtgacctttgagaagttacttaacctctctgtgcatctgatttttcaactgtaaaactgacatatctcccttgtagcctggtgaagatt

SEQ ID NO: 118084 - DNA, 201 bp, Homo sapiens
agatgaaaggcttattattatgatataatctgtaatacactgtaatttaataaaagtcttcataatcaaatttctattgtttcttaccttaaaatgctaartattatataacaaaacttggaaactttcattttaaatcaatcttcaacatttttattctaatgatttccatagtgtgtgaaaacaatgattagaatgact

SEQ ID NO: 118085 - DNA, 201 bp, Homo sapiens
ttatttcaggaaattcttctagtgccagcgtttcctcgtcagtaactagtggcttaactggatgggcagcttttgcagccaaaacttcctctgctggtccytcaacagcaaaattgagttcaacaacacaaaacaatactgggaaacctgctacttcgtcagctaaccagaaacctgtgggtttgactggtctggcaacat

SEQ ID NO: 118086 - DNA, 201 bp, Homo sapiens
agagtgaattaaatttttgaaatgatccctagttatttggagaaaagtctaaaagaattagatgtttaactaaggtcgataatactttgttgggtaaaaastatgttaaagcactaaatctggttttcagatatagcttagaattgaatctaaaagcaattcccaaaaaggaatttcatatattttcttttggaatcatta

SEQ ID NO: 118087 - DNA, 201 bp, Homo sapiens
gtactaccagcaaaactacttcagaatccagcagctctccctcagcatcccttaaaggcccaacttcacaagaatcacagctcaatgctatgaagcgattrcagatggtcaagaagaaagctgcccaaaagaaactcaagaagtaatgtggccaagtaggtttttgtatcatattagcctaaagatgaaaggcttattatt

SEQ ID NO: 118088 - DNA, 201 bp, Homo sapiens
taattactaaaggtgggttttcttttgtgaagttttttgaaagatcatttaaccatatggcagacagttttatgtttaatagcaagaaaaggaaaaaaaawtaggtctttcataactgaaaattaaaggtttacttcttgactaactttttctctcattgctggtatatattcctctaggaataaatggtttatgtagttt

SEQ ID NO: 118089 - DNA, 201 bp, Homo sapiens
ctgtgggtttgactggtctggcaacatcatccaaaggtggaataggttccaaaataggttccaataacagcactacgcccactgtacctttaaaaccaccyccacctctaaccttgggtaaaactggccttagtcgctcagttagttgtgacaatgtcagcaaagtaggtcttcctagtccaagtagtttagttccaggaa

SEQ ID NO: 118090 - DNA, 201 bp, Homo sapiens
cttaactggatgggcagcttttgcagccaaaacttcctctgctggtccttcaacagcaaaattgagttcaacaacacaaaacaatactgggaaacctgctrcttcgtcagctaaccagaaacctgtgggtttgactggtctggcaacatcatccaaaggtggaataggttccaaaataggttccaataacagcactacgcc

SEQ ID NO: 118091 - DNA, 201 bp, Homo sapiens; identical to SEQ ID NO: 20120

SEQ ID NO: 118092 - DNA, 201 bp, Homo sapiens
acaactgggccagaacagggcccacccagactcatcactgaggcaggtggggtcattctcacttcacagacacaaaaactaagtgctgcactgcacagtgycccccactgtccctgggatcaccttcctgtctggaggccagagcaaggaagtgtccatcaacctcaatgccattaacaagtgccccctcctgaagccctg

SEQ ID NO: 118093 - DNA, 201 bp, Homo sapiens
gccgtcttgaaagaaaaagaaagaaaagaaagaaaaagaaagaaagaaagaaagaaagaaagaaagaaagaaagaaagaaagaaagaaagaaagaaagaaagaaaagaaagagaaaatgctagtgtgtcaatgtcctggcccactatgccagcatctgccagcagaatggcattgtgctcttcgtggagcctgaggatcct

SEQ ID NO: 118094 - DNA, 201 bp, Homo sapiens
agaaagaaagaaagaaagaaagaaaagaaagagaaaatgctagtgtgtcaatgtcctggcccactatgccagcatctgccagcagaatggcattgtgctcwtcgtggagcctgaggatcctccccagtggggaccatgacttgtagtactgccagtatgtaaccgagaaggtgtggctgctctacaaggctctgagtgacc

SEQ ID NO: 118095 - DNA, 201 bp, Homo sapiens
cgccgtcttgaaagaaaaagaaagaaaagaaagaaaaagaaagaaagaaagaaagaaagaaagaaagaaagaaagaaagaaagaaagaaagaaagaaagaaagaaaagaaagagaaaatgctagtgtgtcaatgtcctggcccactatgccagcatctgccagcagaatggcattgtgctcttcgtggagcctgaggatcc

SEQ ID NO: 118096 - DNA, 201 bp, Homo sapiens
gacgccgtcttgaaagaaaaagaaagaaaagaaagaaaaagaaagaaagaaagaaagaaagaaagaaagaaagaaagaaagaaagaaagaaagaaagaaaraaagaaaagaaagagaaaatgctagtgtgtcaatgtcctggcccactatgccagcatctgccagcagaatggcattgtgctcttcgtggagcctgaggat

SEQ ID NO: 118097 - DNA, 201 bp, Homo sapiens
catggtgaaatcccatctctactaaaaacacaaaaatgagctaggcgtggtggcacacacctgtagtcccagctacttgggaggctgaggcaggagaatcrcttgaacctgggagacagaggtcgcatgagctgagattgcaccactgcactccagcctgggtgacagagtgagacgccgtcttgaaagaaaaagaaagaa

SEQ ID NO: 118098 - DNA, 201 bp, Homo sapiens
gcggcgcgcctgcgcagaagaaggcagcgcccaaggcgcatgcgcagcggtcactcccgctgtatattaaggcgccggcgatcgcggcctgaggctgctcycggacaagggcaacgagcgtttcgtttggacttctcgacttgagtgcccgcctccttcgccgccgcctctgcagtcctcagcgcaggtgagggcccgcgc

SEQ ID NO: 118099 - DNA, 201 bp, Homo sapiens; identical to SEQ ID NO: 20123

SEQ ID NO: 118100 - DNA, 201 bp, Homo sapiens
cttatcccgagtcccccaggcctttctgcagaaagcaggcaaatctctgttgttctatgcccaaaactgccccaagatgatggaagttggggccaagccakcccctcgggcattgtccactgcagcagtacactaccaacagatcaaagaaacccctccggccagtgagagtaagtgtcattgacaatgaaggagcaggta

SEQ ID NO: 118101 - DNA, 201 bp, Homo sapiens
attcttatcccgagtcccccaggcctttctgcagaaagcaggcaaatctctgttgttctatgcccaaaactgccccaagatgatggaagttggggccaagycagcccctcgggcattgtccactgcagcagtacactaccaacagatcaaagaaacccctccggccagtgagagtaagtgtcattgacaatgaaggagcag

SEQ ID NO: 118102 - DNA, 201 bp, Homo sapiens
attaacaactgttgatgtcactcttcatcagtctttccacaggagccagcatacttcctgaacatggagagtgttgttcgccgctgcccattcttatcccragtcccccaggcctttctgcagaaagcaggcaaatctctgttgttctatgcccaaaactgccccaagatgatggaagttggggccaagccagcccctcgg

SEQ ID NO: 118103 - DNA, 201 bp, Homo sapiens
ccaagtctatggccaagtaagattcagagctgggtttgaaacccatgcccaactccactatccagttctttctgctttggctttggctctgatcacccccmaaaaaaccctatgagggccaggcgcagtggctcatgcctataatcccagaactttgggaagctgagggtgatcacttgaggtcaggagttcaagaccagc

SEQ ID NO: 118104 - DNA, 201 bp, Homo sapiens
aagaaagaaaagaaagaaaaagaaagaaagaaagaaagaaagaaagaaagaaagaaagaaagaaagaaagaaagaaagaaagaaagaaaagaaagagaaaatgctagtgtgtcaatgtcctggcccactatgccagcatctgccagcagaatggcattgtgctcttcgtggagcctgaggatcctccccagtggggaccat

SEQ ID NO: 118105 - DNA, 201 bp, Homo sapiens
attgcaggcgtgagccaccgtgcccggcccctttggctttttaaagtagtgattttttttttcttaaaagtttttgttctgttgtggtaaaatgcccaagraaaattaccattttaagcacttaaaaatgtgcagttcagtggtacattcatattgttgtgtcaccaccaccatccatctccagaacttttttcatcttcc

SEQ ID NO: 118106 - DNA, 201 bp, Homo sapiens
gaaaaagaaagaaaagaaagaaaaagaaagaaagaaagaaagaaagaaagaaagaaagaaagaaagaaagaaagaaagaaagaaagaaagaaaagaaagagaaaatgctagtgtgtcaatgtcctggcccactatgccagcatctgccagcagaatggcattgtgctcttcgtggagcctgaggatcctccccagtgggga

SEQ ID NO: 118107 - DNA, 201 bp, Homo sapiens
aaagaaaaagaaagaaaagaaagaaaaagaaagaaagaaagaaagaaagaaagaaagaaagaaagaaagaaagaaagaaagaaagaaagaaagaaaagaaagagaaaatgctagtgtgtcaatgtcctggcccactatgccagcatctgccagcagaatggcattgtgctcttcgtggagcctgaggatcctccccagtgg

SEQ ID NO: 118108 - DNA, 201 bp, Homo sapiens
gaaagaaaaagaaagaaaagaaagaaaaagaaagaaagaaagaaagaaagaaagaaagaaagaaagaaagaaagaaagaaagaaagaaagaaagaaaagaaagagaaaatgctagtgtgtcaatgtcctggcccactatgccagcatctgccagcagaatggcattgtgctcttcgtggagcctgaggatcctccccagtg

SEQ ID NO: 118109 - DNA, 201 bp, Homo sapiens
cgtcttgaaagaaaaagaaagaaaagaaagaaaaagaaagaaagaaagaaagaaagaaagaaagaaagaaagaaagaaagaaagaaagaaagaaagaaagaaaagaaagagaaaatgctagtgtgtcaatgtcctggcccactatgccagcatctgccagcagaatggcattgtgctcttcgtggagcctgaggatcctcc

SEQ ID NO: 118110 - DNA, 201 bp, Homo sapiens; identical to SEQ ID NO: 20131

SEQ ID NO: 118111 - DNA, 201 bp, Homo sapiens; identical to SEQ ID NO: 20132

SEQ ID NO: 118112 - DNA, 201 bp, Homo sapiens
cagagcaatgcttctaccagttgaggctggcactcaccatttcaggctccttacacaaaatcactaaacaagcaaataatgggtaggggcaggggggaggrgcagtgttaccattttatctgaggtcattgatcctgagcatcaagggaaaataggatttgtactacatgaaacaggcaggtaggaatgtttggaaattag

SEQ ID NO: 118113 - DNA, 201 bp, Homo sapiens; identical to SEQ ID NO: 20129

SEQ ID NO: 118114 - DNA, 201 bp, Homo sapiens
gtagtaatgacatagtagaagggtatgacttatgaatgagtagacatggaggacaggaggtcttttgggggctgaagaaatcaagggatgggatgggtcaytcatgtggcattaaggatccaagaatgaccacagaaggaacaagagaaaaaggctggaagccaggtgccagagttatcaacgaaggaggaggggtggtag

SEQ ID NO: 118115 - DNA, 201 bp, Homo sapiens; identical to SEQ ID NO: 20124

SEQ ID NO: 118116 - DNA, 201 bp, Homo sapiens; identical to SEQ ID NO: 20135

SEQ ID NO: 118117 - DNA, 201 bp, Homo sapiens; identical to SEQ ID NO: 20136

SEQ ID NO: 118118 - DNA, 201 bp, Homo sapiens; identical to SEQ ID NO: 20137

SEQ ID NO: 118119 - DNA, 201 bp, Homo sapiens
ataagggatagtggcatggctgttcaggttggagatgtgaagatagagtaagggtctatgttgaccttgcacagccagaaagtgaactgcagggaactccrtcatttgagcctactttgagtctttcaaacacactctccccactttaatcactccccaagtgttaatccttcatccctcatatagaataatttttatata

SEQ ID NO: 118120 - DNA, 201 bp, Homo sapiens; identical to SEQ ID NO: 20138

SEQ ID NO: 118121 - DNA, 201 bp, Homo sapiens; identical to SEQ ID NO: 20127

SEQ ID NO: 118122 - DNA, 201 bp, Homo sapiens
cactgagaatctcccctcctcacagtttccatccagaccccctgaagagggaggggtctagggagccccaccttgtcatgtaccaccaataaagtcctctkctcagccaaaaaaaaaaaaaaaaaagatactctagtcagcaggattccatgattttcaccaacaatattcagctgctaggtataggtacaggtagagact

SEQ ID NO: 118123 - DNA, 201 bp, Homo sapiens; identical to SEQ ID NO: 20140

SEQ ID NO: 118124 - DNA, 201 bp, Homo sapiens; identical to SEQ ID NO: 20141

SEQ ID NO: 118125 - DNA, 201 bp, Homo sapiens
tacttaggaggttgaggtgggaggatcacttgagaccaggagttcaggaccagcctaggcaacatagggagatcctctctctcttaaaaaaaaaaaaaaaraaaagaaaagactgagaaagagaagggaagcttgtcatcaataggaaatgggaatctcatccccatcttctagaagccagatcccagcaaaatcaaattg

SEQ ID NO: 118126 - DNA, 201 bp, Homo sapiens
acttaggaggttgaggtgggaggatcacttgagaccaggagttcaggaccagcctaggcaacatagggagatcctctctctcttaaaaaaaaaaaaaaagaaaagaaaagactgagaaagagaagggaagcttgtcatcaataggaaatgggaatctcatccccatcttctagaagccagatcccagcaaaatcaaattgg

SEQ ID NO: 118127 - DNA, 201 bp, Homo sapiens
gaataaggcaaacaggaaagagtctatgtataaaatgaccctgatagtcactttactggccattagacatgtcactgtccagggctgccactagcccaaayggtgcccacctctgggctgatctagacgtgcaccaaaggcatgttcttttcaagtggagcaaggggcggattttagccagatggccccctgcacctccaa

SEQ ID NO: 118128 - DNA, 201 bp, Homo sapiens
cacatgtgtgtttattgcagcactgtccacaatagcaaagacttggagccaacccaactgtgcatcagtgatagactggataaagaaaatgtggcacatayacaccatggaatactatgcagccatgaaaaagatgggttcatgtcctttgccaggacatgcataaagctggaaaccataattctcagcaaactaacacaa

SEQ ID NO: 118129 - DNA, 201 bp, Homo sapiens
gttcttttcaagtggagcaaggggcggattttagccagatggccccctgcacctccaatgccacgctaactgatcttactttaacccatactatccactcrtaccactcttttttatgatgacaaggatttatttatggcacaatcagcttaacaaaagacagtggcccagttgttggcttctatttagcaatgggggttt

SEQ ID NO: 118130 - DNA, 201 bp, Homo sapiens
caaggatttatttatggcacaatcagcttaacaaaagacagtggcccagttgttggcttctatttagcaatgggggtttatgatacacttcagttaaaatktctctatctgttaaagatggtcattttcagaatcccattgcaattcttggaccagactgctgcagtgacacctagtacaccatagtaaaatttttcattt

SEQ ID NO: 118131 - DNA, 201 bp, Homo sapiens
ggagatggcactgggactgaacttatgctgcctgtcaagattatgttcagacatctgtgtgtgcctgtggactttgagggaatgtcagtgacctccacctytgcctcacatgaagaggaaattcataatgccatcatggcagttcattgaaaccgtgtggctttgaagagtagcgttaaaactgacgacaccctgccacca

SEQ ID NO: 118132 - DNA, 201 bp, Homo sapiens
tgaattattatctagatccaaaatagttgtattttctactatataacacattacatcatctgtctagctatctctctcacaaagtagaatgtctgtgaaayagaacacaaggaaggagagagaattatgacccaagcaagaatcatgggtccagaattccacccaaggaagctagttcaaagccagagaaagagcacagct

SEQ ID NO: 118133 - DNA, 201 bp, Homo sapiens
actgatttttttcccattaaattgaaatgccataaaaattttttgtttaaattgaggacaattttatctaaatgaattgaggacattcttatctattttartccacaattctcccttctctacgatattatatactgaataaatcagagctgtttgtggagtcctggggctttcccagagcttggcacactgattttctct

SEQ ID NO: 118134 - DNA, 201 bp, Homo sapiens
tccatcagcgaagtgtggtgggcagcacacagtgactatgattcctggagatggcactgggactgaacttatgctgcctgtcaagattatgttcagacatstgtgtgtgcctgtggactttgagggaatgtcagtgacctccacctctgcctcacatgaagaggaaattcataatgccatcatggcagttcattgaaaccg

SEQ ID NO: 118135 - DNA, 201 bp, Homo sapiens; identical to SEQ ID NO: 20143

SEQ ID NO: 118136 - DNA, 201 bp, Homo sapiens
tggcaggtgcccctctgggacaaagcttccagaggaaggaacaggcaacagtctttgctgttctgcagcctctgctggtgatacccagggaaacagggtcwggagtggaccttcagcaaactccagcagacctgctgcagaggggcctgactgttacaaggaaaactaacagaaaggagtagcatcaacatcaacaaaaag

SEQ ID NO: 118137 - DNA, 201 bp, Homo sapiens
catttgtgggagggggagagcatagtgattctgagatattgcattgaactcaattctgccttgtcacagcagaagacaaaactgggctgaactttagtaayaccagcccacggagggagtatttaaaccagccctagccagaggagaatcaccatcccaacagtcagaacttgagttactgcaagcctcagcaaagcgggc

SEQ ID NO: 118138 - DNA, 201 bp, Homo sapiens
tgatacccagggaaacagggtctggagtggaccttcagcaaactccagcagacctgctgcagaggggcctgactgttacaaggaaaactaacagaaaggartagcatcaacatcaacaaaaaggacatccacacagaaaccccatccgaagatcaccaacataaaaaaccaaaggtagataaatccatgaagatgaggaaa

SEQ ID NO: 118139 - DNA, 201 bp, Homo sapiens
tacaaggaaaactaacagaaaggagtagcatcaacatcaacaaaaaggacatccacacagaaaccccatccgaagatcaccaacataaaaaaccaaaggtrgataaatccatgaagatgaggaaaaaccagtgcaaaaaggctgaaaattccaaaaacaagaatgcctcttctcccccaaagcatcacagctcctctccag

SEQ ID NO: 118140 - DNA, 201 bp, Homo sapiens
taaagaagactaaagccctcaagtcagtaaaacagttggttggcaggctgcctctctttcctgagaaaatgtctgtactgcatttgttggataatttcatyttagcctttatcagtttactgtgctttgtttacaattctggtgttataaaaaatggcatcaacaagttgtctgatttttctctaaattactccttctctt

SEQ ID NO: 118141 - DNA, 201 bp, Homo sapiens
gggagatggtctcttcctccagtgctgtgggggaggtggcatcccgctatcctcagctcaccttagaagacatgattgtggagaatgccacaatgcagtgmgtatcccagccccaacagtttgatgtcatggtaatgctcagtctttatggcaatgttatcaacagtgtctgcacaggtttgattggtggggcaggccttg

SEQ ID NO: 118142 - DNA, 201 bp, Homo sapiens
gccctttctactatattctgttgatcaaattaggcaataatagggtagaccagatttaagaatgggggaacaaattctgactcttgatgagagaatgacarggtcacattacaaaggggcacataggtgaggagcactattgatgtgaccatttttggaaacatgctctaccaccatgaaaatgtatttaaaactcttggg

SEQ ID NO: 118143 - DNA, 201 bp, Homo sapiens
gacaaggaatttcaaatgaagttatgtttaactacttaaggctggtactagagcacacctatggtacttcatctagttttgatattttaaatttataaaayatgtaatttctgttgaaggtgtacagtgtcactttatgataagcttcagaaaaagatgttgaaaaacctcatgattaaatgaactgttttctccaaggta

SEQ ID NO: 118144 - DNA, 201 bp, Homo sapiens
actctttctgctttaaaaaccctagccagcttagctactgcagactccacaagaaaccagcttatcctttaattcacaagcagggcagggtgggggcctgygtgaaccaaaactgatttttttcccattaaattgaaatgccataaaaattttttgtttaaattgaggacaattttatctaaatgaattgaggacattctt

SEQ ID NO: 118145 - DNA, 201 bp, Homo sapiens
atcctgattttatggttgagaaaactgagggacaaaggtgttaagaaatttacctgaggtcacacaactaacaggagttgaggccacctttaaaagtcaargggtttggctctaaaacccaagtatttaaatggtcatgagtgtttgtacattgtgaattttcacacatttatgtgaaagtggactaggtttcagcgacag

SEQ ID NO: 118146 - DNA, 201 bp, Homo sapiens
gtcctggggctttcccagagcttggcacactgattttctctttatcttggtcattaacattcagcaaaccagcctgcagagaagcctggcttctctctagmggtcgttaatgagttaattagtgcaataaactttgcctaaaaaatatacattgtaacttttctaataaataggacaacatacagcagagctgacatagaa

SEQ ID NO: 118147 - DNA, 201 bp, Homo sapiens
gacccctgtgcctcctgactgggagacacatcccaggaggggttgagagacacctcatacaggaaagctctggctggcatatggcaggtgcccctctgggrcaaagcttccagaggaaggaacaggcaacagtctttgctgttctgcagcctctgctggtgatacccagggaaacagggtctggagtggaccttcagcaaa

SEQ ID NO: 118148 - DNA, 201 bp, Homo sapiens
cctgccacttctgtccccatagtgtaccctttgttggttcccttcattcatctagtttattctgtgcttataccatctcaaggactatttaaaaagttgtygaactagtctcaaatttgaacttctttatttcacattttgtcttgtattaattggacatctacttgagtttagccttaatgaatcatatgtaccttgaga

SEQ ID NO: 118149 - DNA, 201 bp, Homo sapiens
acctcatccattcattctttgactcctttacttgtctctcaatgttctttgtcttccattgaatacttgctttgagccataaactgtgcaagcactgagaytgcagctctgaaaattgttgtgctttctctcaaggagcccacagggctgagagaatcaacaataatcaggcaattataatggagcataataagtattgta

SEQ ID NO: 118150 - DNA, 201 bp, Homo sapiens
tgcctggaatttcagcattttggaaggcctaggtgggaggatcacttgatgtgaggagtttgagatcagcctgggcagtatagtgagaccctatctctacaaaaaaattaaaaaaaaaaatagcttggcatggcagcacatgcctgtggtcctaggaactcaagagactgaagcgggaggatcactggggccctggtattt

SEQ ID NO: 118151 - DNA, 201 bp, Homo sapiens; identical to SEQ ID NO: 20144

SEQ ID NO: 118152 - DNA, 201 bp, Homo sapiens
ggatttatatctgactctgccatttaatcctgttccttgggcaagtaactttatcttgagccttcaggttcctagtctgtaaaacagggctaagagttacrcagcagaaatgatagtagatgctaaatattccaagactcctttgaatttcccagcctcccttgcagaaggttagagggttgggatcatgtgactagttcc

SEQ ID NO: 118153 - DNA, 201 bp, Homo sapiens
gaggggagagaaattggcctatgaccagcaccctcgctccctccacctcccccgcccgtgccccttccgatggcctcagtcctgggctcgcttccctcccsaaactgctcacaggcaaacccaccctgcatgctctggtttctcctcctcttcttccacctcctctcactgtctagtgattcttccaggcacgagggctct

SEQ ID NO: 118154 - DNA, 201 bp, Homo sapiens
gcagttgctggccccttgccttcaaatttgccactttcctaagcagtcaacaatacttctcaagtatctaacggtcatgggggtatgggcaaaggaagccrgtgaagcagtacaaggaagtatccatccccaggcctcctctccagttcacaaatggtctgcgtggatgggtcgctagtcagccaaggtagcagaacacac

SEQ ID NO: 118155 - DNA, 201 bp, Homo sapiens
gagctaggcctggctctgctactcaccagctgagttactgggagaagtccctgccctctctgggcctcggtttcctcaactgaaaataaaggttctgaacyagttgtttttgaggaaaccggaagatctctggcttaagaaaaaaaaaagccatgcccataatattttgtacagaattccaggggcttcaccacccctcag

SEQ ID NO: 118156 - DNA, 201 bp, Homo sapiens
acctaaagggagggaagtccttcctaaccggcaaagcaggggggtctctgggagaagagcattcaaggtggagggaacagccagggcaaaggtctgggggyggaaatgtgctggcatattcaaggaatagcaaagaggagtaagagagagtggaaatcatgggagatgagctcagagagataaatggaacacagttacaat

SEQ ID NO: 118157 - DNA, 201 bp, Homo sapiens
gaccggtgctggcaggccatggtacaggacttggagtcaggagcagagctaggcctggctctgctactcaccagctgagttactgggagaagtccctgccytctctgggcctcggtttcctcaactgaaaataaaggttctgaaccagttgtttttgaggaaaccggaagatctctggcttaagaaaaaaaaaagccatgc

SEQ ID NO: 118158 - DNA, 201 bp, Homo sapiens
ctgagtttaaatcctgacttttccacaccctatctttgtgacttcaagcaggtcatcatggctctctgagccttagtttcctcatctacaaggagaggctraagtacctaccccaccaggctgttgggaagattatgtggtcctggcaaggagagtgtgcagtccagcatggttgtcactcgcttttaggaatgcagggag

SEQ ID NO: 118159 - DNA, 201 bp, Homo sapiens
ttttttttttttttttgagacggaatctcactctgtcacccaggctggagtgcagtggtgcaatctcggctcactacaacctccgcctcccgggttcaagygattctcctgcctcagcctcctgagtagctggggttacaggcacgtgccaccacgcccggctaatttttgtatttttagtagagacggggtttcatcatg

SEQ ID NO: 118160 - DNA, 201 bp, Homo sapiens
actttctccaacaaaatacaaccttttggtaagaaagctggagagtgcagtcacctccccctccactgtcctaaggcctgtactatttggggaggtgagcrggcatgggggctagtgtgggagaaggccagaagtgggggcagcagggagtgttgggtggaagatgtctcggaggaaagagagaacaacctggtcctggaa

SEQ ID NO: 118161 - DNA, 201 bp, Homo sapiens
ggggggtggatcacctcaggtcaggagttcaccaccagcctagccaacatggtgaaaccccgtctctactaaaaatacaaaaaattagccaggcgtggtgsggcgcgcctgtaatcccaactactcgggaggctgaggcaggagaatctcttgaacccgggaggtggtcgttgcagcaagccaagatcatgccactgcact

SEQ ID NO: 118162 - DNA, 201 bp, Homo sapiens
tcattacaaatgatgctgcaaggaactatatattggcatatatgggaatatttctgtaggaaaaattcctagaagtggaattattagatcaaagaggtgtrttagttattgccaaatttcccttttaagaagtttcatcaatctttgctcttaccaataatattttcccacaccttgaccaacccactgtattacaaaact

SEQ ID NO: 118163 - DNA, 201 bp, Homo sapiens
gaggtggtcgttgcagcaagccaagatcatgccactgcactccagcctgggtaacaagagcgaggctccgtctcaaaaaaaaaaaaaaaaaaaaaaaaaagaaaagaaaagaaaagaaaaaaaagaaaaaaaaaggttgaatgggaaggcagatagatgtatctttcattctgtgtgtgtgtggttttttaactgtaataa

SEQ ID NO: 118164 - DNA, 201 bp, Homo sapiens
gcctaaagcctaatcttcatggaggtaagggagggcagtggcatttttgggaggcatactttttttgttttgttttggctagggaagacacaggcaatactttttttttttttttttagagacaggggtgttgcccaggctggagtatagtgctatgatcatagctcactgtaaccccaaactcctaggtttaagtgatcc

SEQ ID NO: 118165 - DNA, 201 bp, Homo sapiens
taagtgatcctcccacctcagcctcctgagtagctgggactataaggtgcacaccaccacacccagctaattttttttttttttttttttgtagagacaasggtatcactatgttgtccaggctggtctcaaactcctggcctcaagcaaccctcctgccttggcctcccaaagtgctaatattacaggagtgagccacca

SEQ ID NO: 118166 - DNA, 201 bp, Homo sapiens
ggtatcactatgttgtccaggctggtctcaaactcctggcctcaagcaaccctcctgccttggcctcccaaagtgctaatattacaggagtgagccaccayacctgcctataggcaatagttttgctggagtgcagtgatgcaatcatagctcactacagcctcaatctcccagactcaaatgatcttcccacctcaacct

SEQ ID NO: 118167 - DNA, 201 bp, Homo sapiens
agtgagttggacagacgaacctagtggactcaacagaatggtagagcaattgatggatcataagtggacaatgaaaccaatttggtgcatcctaaccagcttttttttttttttttttttttgagacggaatctcactctgtcacccaggctggagtgcagtggtgcaatctcggctcactacaacctccgcctcccgggt

SEQ ID NO: 118168 - DNA, 201 bp, Homo sapiens
gtgagttggacagacgaacctagtggactcaacagaatggtagagcaattgatggatcataagtggacaatgaaaccaatttggtgcatcctaaccagcttttttttttttttttttttttgagacggaatctcactctgtcacccaggctggagtgcagtggtgcaatctcggctcactacaacctccgcctcccgggtt

SEQ ID NO: 118169 - DNA, 201 bp, Homo sapiens
agggcccctacagtctggaatcccgcccgtgcgagcctgagcgcctttcctccctccttcccttccgcaggcgtcctcgccctccacgtccctcctccgcsggggtggcctggggcgccgggtcacgtggccggggaagaggttttatcccgcggcccctcggaaccccgccgctgctctgccgcccaggcccatggccgc

SEQ ID NO: 118170 - DNA, 201 bp, Homo sapiens
tgagttggacagacgaacctagtggactcaacagaatggtagagcaattgatggatcataagtggacaatgaaaccaatttggtgcatcctaaccagcttttttttttttttttttttttgagacggaatctcactctgtcacccaggctggagtgcagtggtgcaatctcggctcactacaacctccgcctcccgggttc

SEQ ID NO: 118171 - DNA, 201 bp, Homo sapiens
tggtggcgcgcgcctgtattctcagctacttggaggggggctgaggcaggagacttgcttgaacccaggaggcgaaggctgcagtgagcccagatcgcgcyactgcactacagcctgggtgacacctcaaaaacaaatttttttttaataataataaattgaatatatttacctttaacaaaaacactactacattatcct

SEQ ID NO: 118172 - DNA, 201 bp, Homo sapiens
cctgtctcaaaaagaaaaaaaaaagtgatttgcagctgtaaaaactgaaaagatttcaaataggaagtagaagactaacttcaccctctcccggtaacctkcgccacctccaggcacttttccctatagtggctgctgtagcatggcttgttcagcttttctttcatctccttctggtgtcccttcctgcactgcagggca

SEQ ID NO: 118173 - DNA, 201 bp, Homo sapiens
caggggctgctaaccctgacacgcagttgctggccccttgccttcaaatttgccactttcctaagcagtcaacaatacttctcaagtatctaacggtcatgggggtatgggcaaaggaagccagtgaagcagtacaaggaagtatccatccccaggcctcctctccagttcacaaatggtctgcgtggatgggtcgctagt

SEQ ID NO: 118174 - DNA, 201 bp, Homo sapiens
tacagcctcaatctcccagactcaaatgatcttcccacctcaacctcccaagtagcttgggactacaggtgcaccaccatgctggactaatttttaaaaawttttttgtagagaccaggccttgctatgttgctcaggctggtcttgaactcctgagctcaagcgatcttcccaccttggcctcccaaagtgctgggatta

SEQ ID NO: 118175 - DNA, 201 bp, Homo sapiens
tcccttgcagaaggttagagggttgggatcatgtgactagttccagcaggtggtttgtgagtggagaaggcaggtcttccatggagaccttggatgctagtttttttttttttttttgagacagggtctcactctgttgcccatgctggagtgcagtggcacgatcataactcactgcagcttcagcctcccgagtagcca

SEQ ID NO: 118176 - DNA, 201 bp, Homo sapiens
ggctggagtatagtgctatgatcatagctcactgtaaccccaaactcctaggtttaagtgatcctcccacctcagcctcctgagtagctgggactataagrtgcacaccaccacacccagctaattttttttttttttttttttgtagagacaagggtatcactatgttgtccaggctggtctcaaactcctggcctcaag

SEQ ID NO: 118177 - DNA, 201 bp, Homo sapiens
gagtgagaccctgtctcaaaaagaaaaaaaaaagtgatttgcagctgtaaaaactgaaaagatttcaaataggaagtagaagactaacttcaccctctccmggtaacctgcgccacctccaggcacttttccctatagtggctgctgtagcatggcttgttcagcttttctttcatctccttctggtgtcccttcctgcac

SEQ ID NO: 118178 - DNA, 201 bp, Homo sapiens
tcccagagctgaggttgctagcgggggaaataaattatttttaaacatataaataagatgatttcagagagtcataagtgttgtgaacaaagtacaaccasgtgatggggactgctctgctggtgtccaggaagtcttcagcctgaggcaggagggggaggcagccgggcaaagagtgcaggacagggtgctctgggcaga

SEQ ID NO: 118179 - DNA, 201 bp, Homo sapiens
gggaggtggaggttgcagtaagccaagatcacacaactgcactccagcctgggtgatagagtgagattttgtctcaagaaaagaattccaggccaggtgcrgtggctcacgcctgtaatcccagcactttagaaggctgaggtgggcagatcacgaggtcaggaaatcaaaaccatcctggttaacacggtgaaaccccgt

SEQ ID NO: 118180 - DNA, 201 bp, Homo sapiens
gaggcaggagaatctcttgaacccgggaggtggtcgttgcagcaagccaagatcatgccactgcactccagcctgggtaacaagagcgaggctccgtctcaaaaaaaaaaaaaaaaaaaaaaaaaagaaaagaaaagaaaagaaaaaaaagaaaaaaaaaggttgaatgggaaggcagatagatgtatctttcattctgtg

SEQ ID NO: 118181 - DNA, 201 bp, Homo sapiens
gtagagacagcccaggtctgtcttactccaggcctggtactcttggttctggtccccaagaagtttaagtccccatccttcctgcatcctggtgactcccrattctcatacccactccctgcagaccaagggagctaccaacatcatctgcccttgccggatgggcttgacgtgcatatccaaggacttgatgtgttcccg

SEQ ID NO: 118182 - DNA, 201 bp, Homo sapiens; identical to SEQ ID NO: 20146

SEQ ID NO: 118183 - DNA, 201 bp, Homo sapiens
gtttgtttcgagatggagtctcgctctgtcacccaggctagagtgcaatggcatgatctcggctcactgcaacctctgcctcctgggttcaagcgattctygggcctcagcctcccgagtagctgggattacaggggtgcaccgctatgcctggctaattttcgtatctttggtagagatggggttttgccatgttggcca

SEQ ID NO: 118184 - DNA, 201 bp, Homo sapiens
ggcagatgccctggcagcccgcccctttcccacaccgcctccccggcacacgccgcacctgtcagccctctgagctccgaggtgcggtgcaggctgagccrctgcctgagccgctgctccacgtcctgggccttagcttcccgctgcagacctgccggccgattcttcgctgccctcccggtctcatgaagccgctggtcg

SEQ ID NO: 118185 - DNA, 201 bp, Homo sapiens
aggcaggagaatctcttgaacccgggaggtggtcgttgcagcaagccaagatcatgccactgcactccagcctgggtaacaagagcgaggctccgtctcaaaaaaaaaaaaaaaaaaaaaaaaaagaaaagaaaagaaaagaaaaaaaagaaaaaaaaaggttgaatgggaaggcagatagatgtatctttcattctgtgt

SEQ ID NO: 118186 - DNA, 201 bp, Homo sapiens
gtaccctggggtcagaccctcagcagaccatgtatctccctaactggccatgtcttttctctgcctctcccagtggttggaactcttcaagggcagggatygcatcatattcatctatgaagcacctacccccagcttagtatctgcacatagtaggtgctcaataaatgcttattgttgtttgtttgtttgtttcgagat

SEQ ID NO: 118187 - DNA, 201 bp, Homo sapiens
aacccgggaggtggtcgttgcagcaagccaagatcatgccactgcactccagcctgggtaacaagagcgaggctccgtctcaaaaaaaaaaaaaaaaaaaraaaaaagaaaagaaaagaaaagaaaaaaaagaaaaaaaaaggttgaatgggaaggcagatagatgtatctttcattctgtgtgtgtgtggttttttaact

SEQ ID NO: 118188 - DNA, 201 bp, Homo sapiens
tattccccaccaagacaggattcctcggttcatttcttaagcgaaacttcaaaagcagaagcaggctgggagtggtggctcacgtctgtaatcccaccacwttgggaggccgaggcaggagaatctcttgagcccatgagttcaagaccagcctggacaacataaggacaacctgtctctataacaaatattaacaataca

SEQ ID NO: 118189 - DNA, 201 bp, Homo sapiens
ggtgcggtggctcacacctgtaatcccagcactttgggaggctgaagcaggaccatcacttgaggccaggagttagagaccagcctgggcgacatggggaracccccgtctctacagaaatttttaaaattatcccggcgtggtggcgcacacctgtagtcccagctactcgggaggctgaggcaggaggatcacttgaac

SEQ ID NO: 118190 - DNA, 201 bp, Homo sapiens
gaatttcccagcctcccttgcagaaggttagagggttgggatcatgtgactagttccagcaggtggtttgtgagtggagaaggcaggtcttccatggagaycttggatgctagtttttttttttttttttgagacagggtctcactctgttgcccatgctggagtgcagtggcacgatcataactcactgcagcttcagcc

SEQ ID NO: 118191 - DNA, 201 bp, Homo sapiens
ccttgaactcctgagctcacgagatcctctcagccgggcatggtgactcccactggtaatcccagcactttgcggaggttgcagtgagccgagattgtgcyattgcacttcagcctgggcaatagcgtgagactctgtctcaaaaaaaaaaaaaaaaaaaaaaaaaaaaaaaaccaaaaaaacccccaaaacaactgatcc

SEQ ID NO: 118192 - DNA, 201 bp, Homo sapiens
tccatgaccatgttggccaggctagtctcaaactcctgacctcaggtgatccacccgcctcggccttccaaagcgctgggattacaggggtgagccaccgygcatggcctaaagggtctttttattatcaccacttgatctgctctatctcatttagtcctcacaacaaccctatgaggggggttactattactgtcccca

SEQ ID NO: 118193 - DNA, 201 bp, Homo sapiens
cctgtcctcacagacagagcagggcaaccccaccctcaccctgcacccctggctcaatggctcaggtccccctgctctgactctagcattgccaccaccarcccagctttccactgaggagccacctcaacaggggctattcccacagaccctcaagttcctttgcacgctgaccgccccatctccaatctgtatccccaa

SEQ ID NO: 118194 - DNA, 201 bp, Homo sapiens
gtatggtcttaagcagagcaatcctccgtgtatggcaacttgggatgttgtgggcacctataattctgcccactcagcatccatgtcctattcctcaggaracagcaaccccctatatccctgcctttggggagctgccctgttcaggttccatgaggttctggtccctagtccccctggtcttctaggaatttctagatg

SEQ ID NO: 118195 - DNA, 201 bp, Homo sapiens
ttcactttcccctggtggcctcagaggggagagaaattggcctatgaccagcaccctcgctccctccacctcccccgcccgtgccccttccgatggcctcrgtcctgggctcgcttccctccccaaactgctcacaggcaaacccaccctgcatgctctggtttctcctcctcttcttccacctcctctcactgtctagtg

SEQ ID NO: 118196 - DNA, 201 bp, Homo sapiens
agtgcagtggctcgatcgcagcgtactgcagcctcaaccccctgggctcaaaagatcctcccacgtcagcctcccaagtaactgggactacaggtgtgtgmcaccatgcccggccaattttttttctttttctttttctttttttttttttaatagagacagggcctcactgtattgccctggctggtctcaaactcctgg

SEQ ID NO: 118197 - DNA, 201 bp, Homo sapiens
aggctggtctggaactcctgacctcgtgatctgcctgcctcagcctcccaaagtgttgggattacaggcatgaaccaccatgcccagcccctaaccagcayttttaaaagatgaaatagaaaagaatagaaaatctcagataagatcacatatggtaaatgtaagtattgttttgtgaaactttagttccatacacacacc

SEQ ID NO: 118198 - DNA, 201 bp, Homo sapiens
agatgctattaataatagcatctatctcaggtgataagcaaggaaagggaaaataagaatcgagctgtgggagtggtggtgtgagaagggtttgcaggtgttttttttttttttctttttctttttcttttttttgggacagagtcttgctttgtcacccaggctggagtgcagtggggcaatctcggctcactgcaaact

SEQ ID NO: 118199 - DNA, 201 bp, Homo sapiens
tatcacagctaaggtgtgtgttcctgggactgcagtgatgactacctacctcctcacctgcctgatggcagcaggggtagtagctcccctggtagcacagytctgcagggttgttttgttttgttttttaagtcattcctggaggctcagtctggtttccactcttgcagtcatttcaatgtcttcgtcagccctcaatta

SEQ ID NO: 118200 - DNA, 201 bp, Homo sapiens
ataatctttcatggcagcttcctgaacccgatatcacagctaaggtgtgtgttcctgggactgcagtgatgactacctacctcctcacctgcctgatggcrgcaggggtagtagctcccctggtagcacagttctgcagggttgttttgttttgttttttaagtcattcctggaggctcagtctggtttccactcttgcag

SEQ ID NO: 118201 - DNA, 201 bp, Homo sapiens
gatgctattaataatagcatctatctcaggtgataagcaaggaaagggaaaataagaatcgagctgtgggagtggtggtgtgagaagggtttgcaggtgttttttttttttttctttttctttttcttttttttgggacagagtcttgctttgtcacccaggctggagtgcagtggggcaatctcggctcactgcaaactt

SEQ ID NO: 118202 - DNA, 201 bp, Homo sapiens
atgctattaataatagcatctatctcaggtgataagcaaggaaagggaaaataagaatcgagctgtgggagtggtggtgtgagaagggtttgcaggtgttttttttttttttctttttctttttcttttttttgggacagagtcttgctttgtcacccaggctggagtgcagtggggcaatctcggctcactgcaaactta

SEQ ID NO: 118203 - DNA, 201 bp, Homo sapiens
agacaccactgcccactctgtccttcaggccaaagccctagggtcaaagggccagcccagtccaggaggaggcggcaggtcagctccctcttctccctccrggcctgtctttctcccaagctgagctgatagcctctcagcagggccagcctgtcccgggaagaagtaaaatgagaagtgtgtgttctgagccctgcccct

SEQ ID NO: 118204 - DNA, 201 bp, Homo sapiens
acagaggttgtagggagccctccttggcccgtctgaggaaggcccctgtcataggctaagctgcttggaaaagctcagtcccctcccatgggtgaaggcawtggggcagcacacctggccgccagacaccactgcccactctgtccttcaggccaaagccctagggtcaaagggccagcccagtccaggaggaggcggcag

SEQ ID NO: 118205 - DNA, 201 bp, Homo sapiens
ttttaaggcaattttaatctttcaaactacatctcacctagtggctggaaagtataggtaagacaaattaagttttttatgtacttttttttcgtcacagragagagttaattaagagacataacttcatcttagttatggtgctcactaaacaaagaagcgtatcaagctatttttttttattcaaaaagactattcctt

SEQ ID NO: 118206 - DNA, 201 bp, Homo sapiens
ggaccagtggagataaccatcagtttattaaagagggaaatggatcagacaatggctgtcagtgctcaaaagagtacatctttgatcgatggatgggtttmcaagaaatcaagacaaccttcaaggttggaacaacggaccgggcgcagtggctcacgcctgtaatcccagcactttgggaggccaaggggggtggatcac

SEQ ID NO: 118207 - DNA, 201 bp, Homo sapiens
acatgcctgtaatcccagctactcaggaggctgaggcaggagaatcacttgaacccaggaggcagaggttacggtgagctgagatcgcaccattgcactcyagcctgggcaacaagagtgaaactccgtctcaaaaaagaaaaaaaaaaaaatcaactcaaaatggatcaaagatctaaatggaagacctgaaactataaa

SEQ ID NO: 118208 - DNA, 201 bp, Homo sapiens
atccaagtactgcttcagcatctcccgcagcttcccattgatatctagcagctgggctcgtctatgttggaggctcagttgctccagtttcactttgttgyaccttttccagaaattctccattcctatgtagtccaccatcacctgggagtggagttacagggagaaggtgtgcagcgagacccattagcaaatgctgcc

SEQ ID NO: 118209 - DNA, 201 bp, Homo sapiens
tcgtaggtggagcccccagaaccatgtgccgagcccgctgcttttggagacacgcttcacatacactacacggtgaggggtctggggggccggggcggggyctgggagggggcggcgccctgctgaaacacgtcagctttggcttggacacgtggcaagcggttcgggagaagaaactcggggctctggggtcgtcgagca

SEQ ID NO: 118210 - DNA, 201 bp, Homo sapiens
ggccacatgggtctgctgcctgtgccaccacctttcccagaacactggacttctttcctgcccttttctacaactctacgctgtgtcagctgtacagccaccccccaccccttcctttcagcctccatcagggaagagacagtaaaaataatcacagtcaagtgattcaaaacaaaacaaaaagcaactgttaaagccaag

SEQ ID NO: 118211 - DNA, 201 bp, Homo sapiens; identical to SEQ ID NO: 20151

SEQ ID NO: 118212 - DNA, 201 bp, Homo sapiens
tctgccagttcctacctggcacggagaagtgcagggtggagagatctccgagaagcgccagccttctggggcttcctgttccttacagcggtaaggggaaygctaggctgccgcactaagggggctgccgccgcccagcggtccaggtgtgtgttgcgcgcctgctgggagggagagggtgctagatgtatgctcttgatg

SEQ ID NO: 118213 - DNA, 201 bp, Homo sapiens
gttccagcttagaggaaggcctggaaggagggtagggggaccaaggagaaacttttacccaaagccctattacctccccattcccagtgctgcttatttgyacctcttctgcccactcatttctgttccacctgcccctttacttcttaagcagcatcctcatccttcttcctcttcagctcttatgttgaaactcctgtt

SEQ ID NO: 118214 - DNA, 201 bp, Homo sapiens
tttctcggccatcctcactccttaagcaggagaatgtggaataaaggaccctgcttcccactggacaggtccaggtcagtgggacctctgagggcattcaragcctctgtgcctcttgcgctgttgcttttgtcgggggagttgaggcacatggggagatggacacctttgctggccagcctgtttggtgttcaggtggaa

SEQ ID NO: 118215 - DNA, 201 bp, Homo sapiens
ctgcctttctttgtttctttctttgtttctttctttgtttctttctttctttctttctttctttctttctttctttctttctttctttctttctttctttmaatagaaacaaaacataattcagttggtcacataacatatactatttgttatttaaacctggtaatgatcaggctgattggcacaattcagttgcaacat

SEQ ID NO: 118216 - DNA, 201 bp, Homo sapiens
tttaaaagggctcagaaagtggatgatttttggttgtaaaactgggtcgtacattttctttccaaatattgttaaagtgactgaatatttagagataacartcatctgacatttcaaaaaagaaaaatcttagtaattggggagaggataaataaataaacatatacatatatgtacatatggatagatttagattttcca

SEQ ID NO: 118217 - DNA, 201 bp, Homo sapiens
gtctttttcctcaaaactatgactaacagaaaattaaatctctccacaggtcttctagagtgcactaaagcagaagataacgtaacatttttatcttaccrtgaaagtattatctgaaggacagttaaagctttgtgttgttcaaccagtacatctcacttcatggctccttatattttttattctaaagtctatctcttg

SEQ ID NO: 118218 - DNA, 201 bp, Homo sapiens
gccttcatcatacaatgtcagtgttccaaagaccaccaggagcacacctgcagttaaattagtttactttatcagttattgtgggaagggagggtgcacaycatgggaagccatggggtgtctcagtaagagggtattaggaggaaactatcatatgatttaggttttggctgagtgacttggtgaagagtctaagaaggc

SEQ ID NO: 118219 - DNA, 201 bp, Homo sapiens
ataaatgttttccattagagtattagtgcgtattttgacaaagattttacttttgcaccatctttaatgaaacatgtttttcatacctaattttatagttwtacttaccatgatggtcaatacaagaggactgtttgttggaataagtattgcagattttaggaagcatgcaacatttaaaagggctcagaaagtggatga

SEQ ID NO: 118220 - DNA, 201 bp, Homo sapiens
tacctccaacatcactcatgaggtgaaggaggaaggaaaaaaagtctctgttgtgaacttctattcataccacccagaaaaatcagtgaaaaataattgartgaagaataataggaagtcagtaccgtctgaaaggttttaaaaagttatctaggccgggtgcagtggctcacacctgtaatcccagctctttgggaggtt

SEQ ID NO: 118221 - DNA, 201 bp, Homo sapiens
tggagtgtaatgatgcaatctcggctcactgcaccccccacctcctgggttcaagcgattctcctgcctcagcctcccaagtagctgggtttacaggtgcycacccccccccacccagctaatttttgtacttttagtaaagacggggtttcaccatgttggacaggctggccttgaactcctgacctcaggtgatccacc

SEQ ID NO: 118222 - DNA, 201 bp, Homo sapiens
tctgccaaaatataaaaattaactttggcatggtggcacacacttgtagtcccagctactcaggaggctgaggtgggagaattgcttgagcccaggaggtmgaggttgtagtgagctgatattgtgccactacacttcagcctatctctatctcaaaaacaaacaaacaaaagaaatgtatgtgtagcaaccatgtaagat

SEQ ID NO: 118223 - DNA, 201 bp, Homo sapiens
ggagctatgtctaccatctgccatgtaaggtgcacctccagttcaccagaacaaacagttcaccagttctctttcaactacagtgtcttccctgagacactgagaacaataataacattccaagataggagaagagaatcacttggtaactttgtaataaatgaaccaggatgttctatggtggtgatgagggagccgacc

SEQ ID NO: 118224 - DNA, 201 bp, Homo sapiens
gagctatgtctaccatctgccatgtaaggtgcacctccagttcaccagaacaaacagttcaccagttctctttcaactacagtgtcttccctgagacactgagaacaataataacattccaagataggagaagagaatcacttggtaactttgtaataaatgaaccaggatgttctatggtggtgatgagggagccgacca

SEQ ID NO: 118225 - DNA, 201 bp, Homo sapiens
tgtttgctcatacatgtggaagcagaattgtctagccacttaaacaaaaaaattctagggaaagtagtgggtattttaatctttgttttgttttttttttytcttcaagatggagttttttgttcttgtcacctaggctggagtgtaatgatgcaatctcggctcactgcaccccccacctcctgggttcaagcgattctc

SEQ ID NO: 118226 - DNA, 201 bp, Homo sapiens
agggctcaaggctgctattcagattttttgacccacggggtgttctcttgctgtagtattctcccccttttcctatggatgtggtttccagagagctgagyggtagtgattgttatctctcttctgtatctagccacctagctggtctgccaggcttcaggctggcactgagggttgtctgcacagagtcctgtgatgtaa

SEQ ID NO: 118227 - DNA, 201 bp, Homo sapiens
gtaatgatgcaatctcggctcactgcaccccccacctcctgggttcaagcgattctcctgcctcagcctcccaagtagctgggtttacaggtgctcacccmcccccacccagctaatttttgtacttttagtaaagacggggtttcaccatgttggacaggctggccttgaactcctgacctcaggtgatccaccctcctc

SEQ ID NO: 118228 - DNA, 201 bp, Homo sapiens
ctctcttctgtatctagccacctagctggtctgccaggcttcaggctggcactgagggttgtctgcacagagtcctgtgatgtaaaccatctgcaggtctstcagccatggataccagcacctgctctggtggaggtggcagcagggtggaatggactctgtgaaggtccttagttttggttgcttaatgcactatttttg

SEQ ID NO: 118229 - DNA, 201 bp, Homo sapiens
actctttttttccgagtggcaagctatttccaagtgttttaaactataagtgtacccaccattgtaccctattgactttaaaaatctgcccatgatttttwtttttttttttagatggagtttccctctgtctcccaggctggagtgcagtggcgcgatttcggctcactgtgacctctgcctcccgggttcaagtgattc

SEQ ID NO: 118230 - DNA, 201 bp, Homo sapiens
aaatacatgcaaattaatgattagttaaatattacatttgatgtttcaacaaagtttttttaaattatactttaagttctgggatacatctgcagaatgtrtgggtttgttacgtagctatacatgtgtcatggtggtctgctgcaccaatccacctgtcatctacattaggtatttctcccaatgctgtccctcccctag

SEQ ID NO: 118231 - DNA, 201 bp, Homo sapiens
taacctgaaagggaaattagtttaaaccaaaatctctttccttgttgaaagtcacaagacaattgcccagaaaaaaaaaaaaaaactttaaaaactgataytgtaaaacctttttttgagtgttagacaataaaagtgtcagataaagagacttatctctcaagtattaatattaagtgcccaatggcaaaatagcattta

SEQ ID NO: 118232 - DNA, 201 bp, Homo sapiens
agggaaattagtttaaaccaaaatctctttccttgttgaaagtcacaagacaattgcccagaaaaaaaaaaaaaaactttaaaaactgatattgtaaaacstttttttgagtgttagacaataaaagtgtcagataaagagacttatctctcaagtattaatattaagtgcccaatggcaaaatagcatttacagttctgc

SEQ ID NO: 118233 - DNA, 201 bp, Homo sapiens
gtgcgatctcggctcactgcaacctccgtctcctgggttcaaatgattctcctgtctcagcctccgagtagctgggattataggcgcccaccaccacgccyggctaatttttttttgtattttcagtagagacggggtttcactgtgttgaccaggctggtctcaaactcttgacctcgtgatctgcccgcctgggcctcc

SEQ ID NO: 118234 - DNA, 201 bp, Homo sapiens
aatcacttgaagctgggaggcagaggttgcagtgagccaagatgacaccactgcactcgagcctggttcaaagagtgagactccatctcaaaaaaaaaaaraaaagaaaaaaaaaagatttatatggctcttcaaatttctctcagctgagatttttttttactccaggaaagattcctagttttccccaatccacattaa

SEQ ID NO: 118235 - DNA, 201 bp, Homo sapiens
tggaagcaagcaatataaccttttttgagtatccctcctgatatggtttggctctgtatccccacccaaatctcatctcaaattatcatcccatatgttgygggagggacctgtaatccccatgtgtggagggagggaagtgatcagattatgcaagcagtttcccccatgctgttctcctgataatgcatgagttctcac

SEQ ID NO: 118236 - DNA, 201 bp, Homo sapiens
gtgtttatccatttacttaggccttcttaaatgtctttggaggaagttttgtgaattacttaaaatttttttacagcagtgtccaaggcctgagaaatacyatgaggtttggctggtgacacctggtggttagacgtgataattacacacaacatgtagcacaggctttactacaagccacaaaagcaccttgtattggtc

SEQ ID NO: 118237 - DNA, 201 bp, Homo sapiens
atatctatttattatttgagtctttttcctcaaaactatgactaacagaaaattaaatctctccacaggtcttctagagtgcactaaagcagaagataacrtaacatttttatcttaccatgaaagtattatctgaaggacagttaaagctttgtgttgttcaaccagtacatctcacttcatggctccttatatttttta

SEQ ID NO: 118238 - DNA, 201 bp, Homo sapiens
tctcctcccacccttgcaccttttggagtctccaatgtctattattgcactctgtatggccatatttacccatcgtttagctcctacttatcagtaaaaaygtgatattttactttctgtttctgagttatttcacttaaggtaatggcctcctgttccatctgtgagatgtgcttttaaaaattaacaacaggagtttcc

SEQ ID NO: 118239 - DNA, 201 bp, Homo sapiens
atacattcaaatcttaatttgctccagaaaacggcctagatccctgttaatctttaaacattaaaacaataaccctttaagattataaaatcaaaattctstctgctaaaaccttacctttgtctgtcttaaccatattgcagaaaattccagcgactttaccatgactggatgagtcataaataaaacccattaggtcag

SEQ ID NO: 118240 - DNA, 201 bp, Homo sapiens
ataatactaatcagtttcttcaagcttatcatcagtgttcctaccgaacacctcctaaaccattaaccactgttaattttcttttaccatagatagtaacyaatcaataattagcttttaataatcaaatgtcagaatagagccttaacttaaagctctggctgatagtgttcatttccattaaaaaaaatcattcttatt

SEQ ID NO: 118241 - DNA, 201 bp, Homo sapiens
atgtatattttacccaacaggtcatttcttatccctcactctcctcccacccttgcaccttttggagtctccaatgtctattattgcactctgtatggccrtatttacccatcgtttagctcctacttatcagtaaaaacgtgatattttactttctgtttctgagttatttcacttaaggtaatggcctcctgttccatc

SEQ ID NO: 118242 - DNA, 201 bp, Homo sapiens
atataggttttcatgtgtttgaattgtattagaagtacaggacccaggacagttgatggaaattaacaggaaaatccagaaggctataatacttggtagartggtggcataagatgatttgacaataaatgatggactatgattcaggctctaacacaaccaaggaaggccccacatacctgaatggtagctgagggcagc

SEQ ID NO: 118243 - DNA, 201 bp, Homo sapiens
gaggagcaatatttctttgatacactatattgggtggttgaagaactggctacaatcctaggctggagttcctcctgcctttgtcaagagaattccagaaygaccttattgcatccttagtctaacccaaaatctatgattggaacatttccaaatttccttattgtattaggaaattctctcaagattacatctggaaat

SEQ ID NO: 118244 - DNA, 201 bp, Homo sapiens
ttccagagagctgagtggtagtgattgttatctctcttctgtatctagccacctagctggtctgccaggcttcaggctggcactgagggttgtctgcacasagtcctgtgatgtaaaccatctgcaggtctctcagccatggataccagcacctgctctggtggaggtggcagcagggtggaatggactctgtgaaggtcc

SEQ ID NO: 118245 - DNA, 201 bp, Homo sapiens
agggcatcctagtcttgtgctgcttttcaaagggaatgcttccagcttttgcccattcagtatgatattggctgtgggtttgtcataaatagctcttattrttttgagatacattccattaataccagtttattgtttttagcatgaagaggtgttgaattttattgaaggccttttcggcatctattgagataatcatgt

SEQ ID NO: 118246 - DNA, 201 bp, Homo sapiens
ggcatcctagtcttgtgctgcttttcaaagggaatgcttccagcttttgcccattcagtatgatattggctgtgggtttgtcataaatagctcttattatwttgagatacattccattaataccagtttattgtttttagcatgaagaggtgttgaattttattgaaggccttttcggcatctattgagataatcatgtgg

SEQ ID NO: 118247 - DNA, 201 bp, Homo sapiens
tttctgatggtagtttgtatttctgtgggatcagtggtgatactccctttatcattttttattgtgtctatttgattcttctctcttttcttctttattastctggctagcagtctattttgctaaccttttcaaagaaccagctcttggattcattgtgtttttgaaaggtttttcatgtctctatttccttcagttctg

SEQ ID NO: 118248 - DNA, 201 bp, Homo sapiens
attggtttcaaagaacttatttatttctgccttcatttcattatttacccagaattcattcaggaggaggttgttcagttcccacgtagttgtgtggtttkgaatgagtttcttaatcctgagttctaatttgattggactgtggtctgagagactgtttcttatgatttatgttcttttgcatttgctgaggaatgtttt

SEQ ID NO: 118249 - DNA, 201 bp, Homo sapiens
ctaagaaagcttagtcacacgatttatttcagccttgcttgtaaattagaattcagtttgaggatggaaagaagagctcttgttgaaatatgaatacttaratttttgttgctgttgttgagacagggtctcactctgtcactcaggatggagtgcagtggcatgatcactgctcactgcagccttgaactcctgggctca

SEQ ID NO: 118250 - DNA, 201 bp, Homo sapiens
aattgatccctttaccattatgtaatggccttccttgtctcttttgatctttgttggtttaaagtctgttttatcagagactaggaatgcaacccctgccktttttgcttattcctccattcctttattttgaacttatatgtgtctttacacgtgtgatggttctcctgaatacagcacaccaatgggacttgactcttc

SEQ ID NO: 118251 - DNA, 201 bp, Homo sapiens
tgttagtctgatggacttccctttgtgggtaacctgacctttctctctggctgcccttaacattttttccttcattttaaccttgggtaatctgacaattktgtgtcttggggttgctcttctcgaggagtatctttgtggtggtttctgtatttcctgaatttgaatgttggcctgccttgcttggttggggaagttctc

SEQ ID NO: 118252 - DNA, 201 bp, Homo sapiens
tgtgcttttccaagaaatctgttgatcttggctgtaagaaatttcaagtcctaaaagaggagtaatacttagacaaagaccaagtgtatactttaatacaragataatttaaacctctttcagattgtatttcttaaaactgcaaaatttgcttgcttcattaaaaacgaggcctttcagactgaataatatagtgaattt

SEQ ID NO: 118253 - DNA, 201 bp, Homo sapiens
attgatctcactgggagctgcagaccagagctgttgctattgggccatcttgccagctgcctttctttgtttctttctttgtttctttctttgtttctttstttctttctttctttctttctttctttctttctttctttctttctttctttctttcaatagaaacaaaacataattcagttggtcacataacatatacta

SEQ ID NO: 118254 - DNA, 201 bp, Homo sapiens
gggagctgcagaccagagctgttgctattgggccatcttgccagctgcctttctttgtttctttctttgtttctttctttgtttctttctttctttctttstttctttctttctttctttctttctttctttctttctttctttcaatagaaacaaaacataattcagttggtcacataacatatactatttgttatttaa

SEQ ID NO: 118255 - DNA, 201 bp, Homo sapiens
ccagagctgttgctattgggccatcttgccagctgcctttctttgtttctttctttgtttctttctttgtttctttctttctttctttctttctttctttstttctttctttctttctttctttctttctttcaatagaaacaaaacataattcagttggtcacataacatatactatttgttatttaaacctggtaatga

SEQ ID NO: 118256 - DNA, 201 bp, Homo sapiens; identical to SEQ ID NO: 20154

SEQ ID NO: 118257 - DNA, 201 bp, Homo sapiens; identical to SEQ ID NO: 20155

SEQ ID NO: 118258 - DNA, 201 bp, Homo sapiens; identical to SEQ ID NO: 20157

SEQ ID NO: 118259 - DNA, 201 bp, Homo sapiens; identical to SEQ ID NO: 20158

SEQ ID NO: 118260 - DNA, 201 bp, Homo sapiens
gccagcagtggtttgaagattcttgatgctgctgctatgtgcttttatcccctctgagagcactccatttgcctcattaaccataggacttgaattaatakgaattattaaagcaatttcttgttgtctgctttttaaaaagcatttggctaaacatcattgttcttttcacaggaaatgttgattaaccctttagcataa

SEQ ID NO: 118261 - DNA, 201 bp, Homo sapiens
cacaaaacagagacagcaggtatcagtaatattttgttatagtagcacaaaatgaaccaagacagcaggtaagcaaatcatggaacaatggccatgacagrgtgttgcaagccaacttggcttgtgctcatctaagcactgtccacagagaagagagttttagccaatggtcttctgctattccagattcattaacaaagt

SEQ ID NO: 118262 - DNA, 201 bp, Homo sapiens
tatattccatggccttgaatttgagtctagctaactggcccctgtggggctaatgcccatgactttggccttttttactatacttaatagtacagaaatayagattcattcggctcctgaaggattagagctttctccatctagcctcctcttcaatacctatgctgaattttttctttttttgctttcaaggatctaaat

SEQ ID NO: 118263 - DNA, 201 bp, Homo sapiens
gtttatcccgagtgtaaagtatgaatagtaggtggttagggggtattttggacttacagtaccctttgccagcagtggtttgaagattcttgatgctgctrctatgtgcttttatcccctctgagagcactccatttgcctcattaaccataggacttgaattaatatgaattattaaagcaatttcttgttgtctgcttt

SEQ ID NO: 118264 - DNA, 201 bp, Homo sapiens; identical to SEQ ID NO: 20156

SEQ ID NO: 118265 - DNA, 201 bp, Homo sapiens; identical to SEQ ID NO: 20159

SEQ ID NO: 118266 - DNA, 201 bp, Homo sapiens; identical to SEQ ID NO: 20162

SEQ ID NO: 118267 - DNA, 201 bp, Homo sapiens; identical to SEQ ID NO: 20161

SEQ ID NO: 118268 - DNA, 201 bp, Homo sapiens; identical to SEQ ID NO: 20160

SEQ ID NO: 118269 - DNA, 201 bp, Homo sapiens
ttgatgctgctgctatgtgcttttatcccctctgagagcactccatttgcctcattaaccataggacttgaattaatatgaattattaaagcaatttcttrttgtctgctttttaaaaagcatttggctaaacatcattgttcttttcacaggaaatgttgattaaccctttagcataattgtttaaagaaaacataatat

SEQ ID NO: 118270 - DNA, 201 bp, Homo sapiens; identical to SEQ ID NO: 20164

SEQ ID NO: 118271 - DNA, 201 bp, Homo sapiens
ctagactaagctacaaaaatggacaatcctccttatgtcttgcccaagaaaatgtttctgtgtaatctacaataatcatgttttcacttacgagaagccamaattcctacagcaaccttaaaatgaaaccaagaggcgacaataaaaacattgctttaaaacaactgttcttgaaaaatccctttggatctggaatccatt

SEQ ID NO: 118272 - DNA, 201 bp, Homo sapiens
tattcaagttgataaagcaaaatttcaaaaaccaaatgtggcaaaatcatgtgaaaacactttcaatgttcctgtttattctttaaatgcatacatcatcyggttaaagtgagtaatctaaaaattaattactcacacttgaaccatgttacaagaggaggtaattcatcttagcaataagaaactttaccactgttttta

SEQ ID NO: 118273 - DNA, 201 bp, Homo sapiens; identical to SEQ ID NO: 20165

SEQ ID NO: 118274 - DNA, 201 bp, Homo sapiens
accttgaagcctccctcagctgaagaacaggatcttattcttttaaatctgcctgtttttatgtagcctattaaaaggaaaagacttcagtaggttatttkagatatagtataatcatttaaaaactctttttaaaaaccaaggtgtgactaatacagtcatattgaaactatggaagagatacaatggtctactccagtg

SEQ ID NO: 118275 - DNA, 201 bp, Homo sapiens; identical to SEQ ID NO: 20168

SEQ ID NO: 118276 - DNA, 201 bp, Homo sapiens
aggaagacctaatcctggttttactgccagcagaaataaaataatatatgcctcaaacctgattaacagtgcaagatactgttattcacacattaaatgcytgaagttacttacatgaggttacttgctactctggagcaatcaagaaaacatggccagcacggatcagcaagatttaatgtttcacagtacagtatcttt

SEQ ID NO: 118277 - DNA, 201 bp, Homo sapiens; identical to SEQ ID NO: 20169

SEQ ID NO: 118278 - DNA, 201 bp, Homo sapiens; identical to SEQ ID NO: 20170

SEQ ID NO: 118279 - DNA, 201 bp, Homo sapiens; identical to SEQ ID NO: 20171

SEQ ID NO: 118280 - DNA, 201 bp, Homo sapiens; identical to SEQ ID NO: 20172

SEQ ID NO: 118281 - DNA, 201 bp, Homo sapiens; identical to SEQ ID NO: 20173

SEQ ID NO: 118282 - DNA, 201 bp, Homo sapiens; identical to SEQ ID NO: 20174

SEQ ID NO: 118283 - DNA, 201 bp, Homo sapiens; identical to SEQ ID NO: 20176

SEQ ID NO: 118284 - DNA, 201 bp, Homo sapiens; identical to SEQ ID NO: 20179

SEQ ID NO: 118285 - DNA, 201 bp, Homo sapiens; identical to SEQ ID NO: 20180

SEQ ID NO: 118286 - DNA, 201 bp, Homo sapiens
tgaaagttccatgtccccagatactgaaattaactttgataaactgaatcatattcactctgtttcaataatgttgctcgctgaatattcctgttgaacarttgttgcacattgatttgatcttttgttgtttccatcacctatataaaaataataaaatataaaaatcttctatttatattgatttactctaattattaa

SEQ ID NO: 118287 - DNA, 201 bp, Homo sapiens; identical to SEQ ID NO: 20182

SEQ ID NO: 118288 - DNA, 201 bp, Homo sapiens; identical to SEQ ID NO: 20183

SEQ ID NO: 118289 - DNA, 201 bp, Homo sapiens; identical to SEQ ID NO: 20184

SEQ ID NO: 118290 - DNA, 201 bp, Homo sapiens; identical to SEQ ID NO: 20185

SEQ ID NO: 118291 - DNA, 201 bp, Homo sapiens; identical to SEQ ID NO: 20186

SEQ ID NO: 118292 - DNA, 201 bp, Homo sapiens; identical to SEQ ID NO: 20188

SEQ ID NO: 118293 - DNA, 201 bp, Homo sapiens; identical to SEQ ID NO: 20189

SEQ ID NO: 118294 - DNA, 201 bp, Homo sapiens
tgttggaaccagatgtgttgttttcccccaacagaaagctctgggagagagactaatactaatctataatattacatgcataaacagaaactttcctcttgaaaaatttgcttccctttcctgttcattcacccaagctactttaatgaggtttcttgaggctatcattcattaagcccttctgttcaccagcagattgta

SEQ ID NO: 118295 - DNA, 201 bp, Homo sapiens; identical to SEQ ID NO: 20163

SEQ ID NO: 118296 - DNA, 201 bp, Homo sapiens
aactttgataataatccttctgagacaccatttcctcacctgctttaataacccaccagataattgttgaaagatcacccccttacgagtctcccaagtakactgaaaataataactacaagagattatttagcagtaaattacagctgatctacagaagttctttaaagcaaaaaaaaaaaaaaacaaaaaaaaaacact

SEQ ID NO: 118297 - DNA, 201 bp, Homo sapiens; identical to SEQ ID NO: 20166

SEQ ID NO: 118298 - DNA, 201 bp, Homo sapiens; identical to SEQ ID NO: 20167

SEQ ID NO: 118299 - DNA, 201 bp, Homo sapiens
gtcggtgtcagccactctcacctcccattccctagttttcctcctttgctcccgtctagtcacttcgcaccttcggctagtctttattcacagacacattscaggagtcccctctcccagagcaacaaagacagatttccaaagctacacatcccagagagaacggattcttgggaaatgtggttctttcagctgacgcat

SEQ ID NO: 118300 - DNA, 201 bp, Homo sapiens
tacaactccttccttctgagccttgcattaaagaaaatgagaccacaaaagagtacctcaaagttaaaatgaatagcactggtattagtggtctctgcttyaggacaaatactttctcatttgattcaaaatagtgtttatttaaaccatagaaactatatgtatttcttctgtgtttttctaaaatgttcttaattttta

SEQ ID NO: 118301 - DNA, 201 bp, Homo sapiens
catagttgctcagatgccttccctcatgtaggcttgggtaggccatgatataaataaaacactgcctagattattttataagcagggcagtttgctgaatrtacaactgagggagacaggcttgttttcataactttgataataatccttctgagacaccatttcctcacctgctttaataacccaccagataattgttga

SEQ ID NO: 118302 - DNA, 201 bp, Homo sapiens
gagccaaaagcagagcatcaaagggaaaacaggtcaaaagccctgtttcaaaaatctttaggggcctagactaagctacaaaaatggacaatcctccttaygtcttgcccaagaaaatgtttctgtgtaatctacaataatcatgttttcacttacgagaagccacaattcctacagcaaccttaaaatgaaaccaagagg

SEQ ID NO: 118303 - DNA, 201 bp, Homo sapiens; identical to SEQ ID NO: 20175

SEQ ID NO: 118304 - DNA, 201 bp, Homo sapiens; identical to SEQ ID NO: 20177

SEQ ID NO: 118305 - DNA, 201 bp, Homo sapiens; identical to SEQ ID NO: 20178

SEQ ID NO: 118306 - DNA, 201 bp, Homo sapiens; identical to SEQ ID NO: 20187

SEQ ID NO: 118307 - DNA, 201 bp, Homo sapiens
caaaaaccaaatgtggcaaaatcatgtgaaaacactttcaatgttcctgtttattctttaaatgcatacatcatctggttaaagtgagtaatctaaaaatyaattactcacacttgaaccatgttacaagaggaggtaattcatcttagcaataagaaactttaccactgtttttagggccttgaaattatgaaatgagcc

SEQ ID NO: 118308 - DNA, 201 bp, Homo sapiens; identical to SEQ ID NO: 20197

SEQ ID NO: 118309 - DNA, 201 bp, Homo sapiens
cttgaagttaatataaatgaaaatttgggtctggccttcattcacaatgtaatgttgtaatgtttcatccacaatagtttccctttctattgccgaggggrtataccattgtatgcagatgccacagtttgatcatctgttctgttgatattgggctgttgccagttcttggctattgggataaagctgtcctgagtctgc

SEQ ID NO: 118310 - DNA, 201 bp, Homo sapiens
taattctctgtgaaactgaccagttctcacccttgccattcattagacttgattctgccacatttaattcagtgatcttgggcaagttattcttcacctgmgcctcattttacacatctggttttggggatggtggtgtttgctctgcaagattatttctgaggacaaataggatgtttgccaaactcctagcactgcacc

SEQ ID NO: 118311 - DNA, 201 bp, Homo sapiens
tgcttcccatgactgtcatggccttgtaggttacaattgctggaggtccatccctctccagaaaggaggtagagatgccccattttgggataagggtgcargagggataatgggtctgctgcggaagaagatggcaccctcacctggaagcactgctcaatcccacacacctgcacacccatgagtctgctgcctttggtg

SEQ ID NO: 118312 - DNA, 201 bp, Homo sapiens
tttgagagtcataacatgtatcttgtgcaattttagctttaggtattttcatatataactttaagaatgttacacattattttctgtgcatctataacttaaaaaaaacaaaaaccattttctgatgtggctacagagggggaaattcccagtagccaggaaattgatactttctacttttcattctgtggcattttaaaa

SEQ ID NO: 118313 - DNA, 201 bp, Homo sapiens; identical to SEQ ID NO: 20195

SEQ ID NO: 118314 - DNA, 201 bp, Homo sapiens
ttcttcagaggaaagccagagttcaaatgtcacctaccaggactggtgatctgccctcctcctcctacctcccttctccccctcatttcactccaggcacraggcccccagctttcctgcctctggcctttgtggtgactgctccccctgcctggaactatcctcacctcttctctgagaagaggttttctctgatcaccc

SEQ ID NO: 118315 - DNA, 201 bp, Homo sapiens
tttaatttgaacatgaaggctaaaagtaatggctgggaaccaaattccttaaatctagctgacaatagttctgtgacttacagactggagagcagaggtaraccatcatcttagctgagtgccagcctcttggtgagggagtccagggagtcctgaggctcccttgccccggtgaaaacccaggccaggcctctttccgca

SEQ ID NO: 118316 - DNA, 201 bp, Homo sapiens
tgcggagggttcccaggcagaggcatcctgatcaggagcagataccctgactcctgggcaatgaggctggtgtttaggctggggcatacccttgggcaggwaatctctaagagaaagaagtgatgaaaccctgagttcaacctctgggaatggagaagaaaggagttctagaaaacaacagacacatagctagagttaggc

SEQ ID NO: 118317 - DNA, 201 bp, Homo sapiens
aaaaattagttgggtgtggtggcacatcccagctgctcgagaggctgaggtggaaggatcgcttgggcctgggaggttgaggctgcagtgatcaggcaackgtagtctagcctgggcgacagcggagaccctgtctcaaaaacaaaaaatgattgtcccaccttaggtaagtagatgcccccaggttgcaaatctgtacta

SEQ ID NO: 118318 - DNA, 201 bp, Homo sapiens
aaaatatgtacatttataacctgggttggcgaggcggcgctcttctgcccaaaacgtaggggtggttagtttgtagagtgggcttagctcacaggtgcctragctgtatccccgtggccgcctcagccaccccaacttctcagaaagattgtttagaacaattaaactatattcttttgcccttctcttgttggaacccta

SEQ ID NO: 118319 - DNA, 201 bp, Homo sapiens; identical to SEQ ID NO: 20196

SEQ ID NO: 118320 - DNA, 201 bp, Homo sapiens
aacgtaaccagtccctgtttctacattttaaaatctcaaagtttttcaaatgaaatagaagagaacttgagagtgaatgacatggaactgcacacaatgcrtcacacatgtaaatagagttttgtgtatgtatgtgtatactaaacacagtataaaaatgtatttgttataatttaggcaaatcggtttgccaagcactgt

SEQ ID NO: 118321 - DNA, 201 bp, Homo sapiens
tcttcccctgtgaactgaatctgctttagagaaattaagtcttcgggacaacaaaaccaactaaagttgtaatcaatgggcatccaacttggagttcttcrttttttcccttatttcatgttcctatgtgatgtggtcagttttctgttttaagtagaggggacaggaaagaaaacacattcctccagtccatccagcagc

SEQ ID NO: 118322 - DNA, 201 bp, Homo sapiens; identical to SEQ ID NO: 20199

SEQ ID NO: 118323 - DNA, 201 bp, Homo sapiens
tagtagctgggattacagacatgagccaccatacccggctaatttcgggccattggctcttctgtttttatgttgatagcccagaatggaagctatagacygtgagaaaaagactttgttactaatgataattttgactactggactggactccccagtcccctgggacacgtggtagtaatcctggttctcttccccagg

SEQ ID NO: 118324 - DNA, 201 bp, Homo sapiens
cctagcagccctgggccccaccagctcctccctgcccttctagtgtggcctcagaagctgtctgtccatgaactggctgtgtccatctctgcctgcagacrctctgtgccgtaccccatgtcttgcctgccctgcttctctctacatttctgaaatttgccctgttggaagccccactaaggtcctgccttgacccctgct

SEQ ID NO: 118325 - DNA, 201 bp, Homo sapiens; identical to SEQ ID NO: 20192

SEQ ID NO: 118326 - DNA, 201 bp, Homo sapiens
cccctcatttcactccaggcacgaggcccccagctttcctgcctctggcctttgtggtgactgctccccctgcctggaactatcctcacctcttctctgasaagaggttttctctgatcacccggcataaagcagcctttccttatcccctgtgcagtgcttcatatttcatctaagtgtttatcaaccttacagcagtca

SEQ ID NO: 118327 - DNA, 201 bp, Homo sapiens
ccatgcctggctaattttgtatttctagtagagacagggtttctccgtgctggtcaggctggtctcgaactcccaaccttaggtgatccacctgccttggyctcccaaagtgcctggtagaaattttctaattgtttattttctttgagaagcacttaacatccaactggttctccaaagtacttcttttttgagtcttga

SEQ ID NO: 118328 - DNA, 201 bp, Homo sapiens
gatgattctttattttcatctctaccccactcacgactaggggcccatgggcaccatctagagagggagagagaagaaggtcacaatggaccacagagtgrgcagccatcaatttagagatagcggaggctgggggagaagattggacgcccccagggagagtgacaggcagaccggcgagattggaagcccgtggcactg

SEQ ID NO: 118329 - DNA, 201 bp, Homo sapiens
ggagaatcacttgaacccgggaggcaggggttgcagtgagccgagatcgcaccactgactccagcctggatgacagagcaagactccatctcaaaaaaaawaataataataataggagtacagtattcactgtcagtgtggatgacttcatgctcttgggtatacaacgagaggataaatcagtgtgacctttctttttgg

SEQ ID NO: 118330 - DNA, 201 bp, Homo sapiens
cctcatttcactccaggcacgaggcccccagctttcctgcctctggcctttgtggtgactgctccccctgcctggaactatcctcacctcttctctgagargaggttttctctgatcacccggcataaagcagcctttccttatcccctgtgcagtgcttcatatttcatctaagtgtttatcaaccttacagcagtcaac

SEQ ID NO: 118331 - DNA, 201 bp, Homo sapiens
tcctagcagccctgggccccaccagctcctccctgcccttctagtgtggcctcagaagctgtctgtccatgaactggctgtgtccatctctgcctgcagacgctctgtgccgtaccccatgtcttgcctgccctgcttctctctacatttctgaaatttgccctgttggaagccccactaaggtcctgccttgacccctgc

SEQ ID NO: 118332 - DNA, 201 bp, Homo sapiens
tgagaagaggttttctctgatcacccggcataaagcagcctttccttatcccctgtgcagtgcttcatatttcatctaagtgtttatcaaccttacagcartcaactctgacttggttctttgctgcctgttttcaacactgcttggtttaagtaggcgtttgacatttgttgagttaggccacttcattaaagttagtct

SEQ ID NO: 118333 - DNA, 201 bp, Homo sapiens
tagcagccctgggccccaccagctcctccctgcccttctagtgtggcctcagaagctgtctgtccatgaactggctgtgtccatctctgcctgcagacgcwctgtgccgtaccccatgtcttgcctgccctgcttctctctacatttctgaaatttgccctgttggaagccccactaaggtcctgccttgacccctgctgt

SEQ ID NO: 118334 - DNA, 201 bp, Homo sapiens
gggcttccaatatgcattaagctccccaaaaagggactgcttgcattccggtgttttttttctaaaatgactgtcagctggggcaacatgaggagacctcstctctacaaaaaaatttaaaaaattagttgggtgtggtggcacatcccagctgctcgagaggctgaggtggaaggatcgcttgggcctgggaggttgagg

SEQ ID NO: 118335 - DNA, 201 bp, Homo sapiens; identical to SEQ ID NO: 20194

SEQ ID NO: 118336 - DNA, 201 bp, Homo sapiens; identical to SEQ ID NO: 20198

SEQ ID NO: 118337 - DNA, 201 bp, Homo sapiens
ctccacccctttattccagatatgagaaatgagtgttggacgtcgaagaataaagttgttgggtatcctgatgatggcaaatgtcttcatttattttattrtggaagtctccaaaagcagtagccaagaaaaaaatggaaaaggggaagtaataatacccaaagagaagttctggaagatatctacccctcccgaggcata

SEQ ID NO: 118338 - DNA, 201 bp, Homo sapiens
agagaaagactcctggtgggtgtaaaggaatttggaaaccaactaagggaggttaggagaagggccatgacacaggtatattggggcattttttagcataygggatatgggagtctgtagtgatgtctaggggacaagaatagggggtaagggaagacccagcaatagacttgggcccagaactgtggagcaagtccattt

SEQ ID NO: 118339 - DNA, 201 bp, Homo sapiens
ttagtcttagtagaggggaaactgagggctcaaaccagggcagggatagtacaagattgaaatatgtatgtgtgttgtttggaagaggtgggtgagagaargactcctggtgggtgtaaaggaatttggaaaccaactaagggaggttaggagaagggccatgacacaggtatattggggcattttttagcatatgggata

SEQ ID NO: 118340 - DNA, 201 bp, Homo sapiens
ttaataaatggtggtcattgctgtaatcaatagagaagttcctcctggcatcgacttccccttaccaaaaacagtaaccctgtggtagccttttagatttscctgtctgagactgaaatcagccacatttggcagatgcacatcagaaggttcttaaaacctaagtagtattttgaggaaaataagcatgatttgcttgtt

SEQ ID NO: 118341 - DNA, 201 bp, Homo sapiens
gtactgggtcaagggctcactttagcattaggagaattgtcccaagttagagagaaccttttctttttgagaagtatttgagaaataactggagttatcayggaagtctccaaaggtatgaggttaggtttttcaagagtagttttgtgggcaggggaccagggagtgggtgctgctgattggctgtggatgcaatcaaag

SEQ ID NO: 118342 - DNA, 201 bp, Homo sapiens
ccggaggtggtggggagggaaagggcagagtgaacgtgctcctctggcctcgtgatatggcagggggcttgggctctttctgaggatttgtgtgtcctgtyggagcaggaaagtgaacaggaaccaggatgccctctagagatggaggctgctagctctgacactcctggggtttagtcagaagcttggatttccagcccc

SEQ ID NO: 118343 - DNA, 201 bp, Homo sapiens
ctctcataggagcccacaagcctctggtgacttcattaccactgccacaccagctattccagccccagcctctcctcagagccccagaccctgcagccaamcacctgttcaacatctccacccggacatctcacaggcacctcaaacctactttgaccaaatttgaaccttgagagggttctccaactcagaaaatggcac

SEQ ID NO: 118344 - DNA, 201 bp, Homo sapiens; identical to SEQ ID NO: 20190

SEQ ID NO: 118345 - DNA, 201 bp, Homo sapiens; identical to SEQ ID NO: 20193

SEQ ID NO: 118346 - DNA, 201 bp, Homo sapiens; identical to SEQ ID NO: 20227

SEQ ID NO: 118347 - DNA, 201 bp, Homo sapiens
agctcagtaaacactcagagtagtcaactttaatcataaacaatcacaaaacaaaccttaaagcatttatatcaatgtgaagctttgtaggaaattgtttwcccaaagtattgtggatgattattatgaataaaataaatgaggtaaagtaatgttacaataatgatctggaactgtgagtcaaatgagttaagattaaag

SEQ ID NO: 118348 - DNA, 201 bp, Homo sapiens
ttactggaaagaggtacataactgaatcaactctatcagagaattgctatcacaaagtccctatggagatgctttcctgatatcctgccttggcaaccacktctgcggtctactcagagtctccgaagtggggatgagactcctaccttagttttttcctagctatcttcatacaattgttggtcaatctagatcacagtg

SEQ ID NO: 118349 - DNA, 201 bp, Homo sapiens
ctgcctccttcctcactatttccagccccgatacgccatagaagctgtatacttaaaatttgctaacaaacatttaattaccaaatacattttgttcatcwtttttactacaaaagtaataaatgttcaaatgccacactgatagcagtaaaatgtaacagtcctccttcattctcaactctcacaacctactcccctctc

SEQ ID NO: 118350 - DNA, 201 bp, Homo sapiens
ccatttcttatcccatttctgagtttatcctattcatgaacccaacacattaaggaagcccagaagtgtggtgagaaaatctcttaaattatttggttatyttacaatatgaaaaaaatgatgatttggttttaggctaaataaaaacaccctggtatccaaatgtcaggcacacaattagcaagatataaatggttgatc

SEQ ID NO: 118351 - DNA, 201 bp, Homo sapiens
ctttctgggaaaagtttttgttttgaaagcaaaaaactttccagtctcatgtttgggattttgttctttattgtagttgcttggtaaaagagaaaaaaaawgcaaatattttgtagtacttttaaatttttcctttattctgataaatctcaaagaaaaggcttgaaagtgtatagttgataaggccctacttggaaattc

SEQ ID NO: 118352 - DNA, 201 bp, Homo sapiens
tttgttgcctaccccatttcttatcccatttctgagtttatcctattcatgaacccaacacattaaggaagcccagaagtgtggtgagaaaatctcttaawttatttggttatcttacaatatgaaaaaaatgatgatttggttttaggctaaataaaaacaccctggtatccaaatgtcaggcacacaattagcaagata

SEQ ID NO: 118353 - DNA, 201 bp, Homo sapiens
ataacaaagctacttccctgacactactaatggttcatttctttctgggaaaagtttttgttttgaaagcaaaaaactttccagtctcatgtttgggattwtgttctttattgtagttgcttggtaaaagagaaaaaaaatgcaaatattttgtagtacttttaaatttttcctttattctgataaatctcaaagaaaagg

SEQ ID NO: 118354 - DNA, 201 bp, Homo sapiens
ttaaaacatagctgtttatttgagtttataataatacctcattcaatatataaaactacctttttatagctaagtaatgtttttcacagacattgctgaaycttacccatctttgttgcctaccccatttcttatcccatttctgagtttatcctattcatgaacccaacacattaaggaagcccagaagtgtggtgagaa

SEQ ID NO: 118355 - DNA, 201 bp, Homo sapiens; identical to SEQ ID NO: 20226

SEQ ID NO: 118356 - DNA, 201 bp, Homo sapiens
tacctattgatgaacatttgttggttcccatattttgcttttataaacaattctagggcaattactatttgtcatgcacaatttttataccctagaagtartataatacctgacatataggaggtgttcacaaaatatttattgcatgaatgaatacagctacactactatgtagccatatatatttggggtgcttgtgaa

SEQ ID NO: 118357 - DNA, 201 bp, Homo sapiens; identical to SEQ ID NO: 20228

SEQ ID NO: 118358 - DNA, 201 bp, Homo sapiens
gcatatgtatatacaataaattatttggtaatttacctattgatgaacatttgttggttcccatattttgcttttataaacaattctagggcaattactayttgtcatgcacaatttttataccctagaagtagtataatacctgacatataggaggtgttcacaaaatatttattgcatgaatgaatacagctacactac

SEQ ID NO: 118359 - DNA, 201 bp, Homo sapiens
taacactcagaattaaagccacatttctgaatcacaaaaatttctcctattctatttgtttcactcagctttatttagttgctatatacacatttattgtwtaaaacgacagatttccaaccaaaagctcagtaaacactcagagtagtcaactttaatcataaacaatcacaaaacaaaccttaaagcatttatatcaat

SEQ ID NO: 118360 - DNA, 201 bp, Homo sapiens; identical to SEQ ID NO: 20229

SEQ ID NO: 118361 - DNA, 201 bp, Homo sapiens
aaagcttatataatcaagtctgttaaactgcctttgctatagcaagtctttatcccaaatgttatataaaactcactagtgttttcttctagacttagattttttttttttttgtattttaacattttagtctatctggaatttatatttgaagagatgtgaggaagaaatctaagttaactatttctctatgtattttga

SEQ ID NO: 118362 - DNA, 201 bp, Homo sapiens
aagttggatatgccaggggattttcaacaataaataggttattaaagatgaagaagacagaaaagggcactgcagcttcacttggaatttaccgaaattgtttttttttttttcatatttttccattctttttttctacttatattgagctgagattttttaatggcacaaagtggggacagaatgaggtatctttgataa

SEQ ID NO: 118363 - DNA, 201 bp, Homo sapiens
caggcaagaggcaaccaataatgatgtgttgaccatgagaggggtgtgtttgctgattttcccttccctcaccttcccctctgtacaaaacacacacacasacagagagagagagagagagagagagagagagaacagagagtagcatggctgggctcattcaagaagacccagaacatctgcacattgcctttatcagac

SEQ ID NO: 118364 - DNA, 201 bp, Homo sapiens
agagagccaaatcatgagtgaactcccattcacaattgcttcaaagagaataaaatacctaggaatccaacttacaagggatgtgaaggactttttcaagragaactacaaaccactgctcaatgaaataaaagaggatacaaacaaatggaggaacattccatgctcatgggtaggaagaatcaatatcatgaaaatggc

SEQ ID NO: 118365 - DNA, 201 bp, Homo sapiens
tcagtgttggacatgattaatgagagggcttgtgtggtatctggttagagtagtcatgtaggctgtttagaacatgtatctcctgttctaaagctcaggaraaaattctggagtgggaaaaatcaggaactcaaaggcataaagaggcaaatgcaagccatgggaatggaggagaactctcagagagagcttgtagaaaga

SEQ ID NO: 118366 - DNA, 201 bp, Homo sapiens
ccacttataagtcagaacatgcagtgttttgttttctgtccttgtgttagtttgccaaggataatgacctccagctctatctgtgtccctgcaaaggacakgatctcattcttttttgtggctgaatagtattccacagtgtaaatgtaccacattttcttcatccagtctatcattgattggcatttaggttgattctat

SEQ ID NO: 118367 - DNA, 201 bp, Homo sapiens
tatttttcactttctggaagagatccagaaagctatctattttttgtttttttctcattttcatgctcatgtcattatggtctagccattctgaacacttkgtgcgttccttaactctttattcaaggtttattgtgtgaccttttttttttctgttaaagatgttttttatgacatttatatcaactttgattcaacttc

SEQ ID NO: 118368 - DNA, 201 bp, Homo sapiens
tgaggtcacagctcctgcagtgtcactcctactccatcctgttgacgaaagcacatcacaagacctgtccagatacaaggggtaaggaagtccattccacytcttgagggaggaattgcaaagtaacattgcagaggaacatgtaggttgaaagaaattgttgagtcttttattgtttcaagatctatcctttgcccaaaa

SEQ ID NO: 118369 - DNA, 201 bp, Homo sapiens
tgtaggctatttaaaaatatttgattccttgaaggacccagatatttgttacggatttagagaagtgtatttttcactttctggaagagatccagaaagckatctattttttgtttttttctcattttcatgctcatgtcattatggtctagccattctgaacacttggtgcgttccttaactctttattcaaggtttatt

SEQ ID NO: 118370 - DNA, 201 bp, Homo sapiens
tctgattgaggcctcacctcatttgttcagcaatgattcattgtactggggaaacaactatgattatggcgcaatccctaccctcaaggacatcagagctstgtgagggagaaagatgggtaagggatgcatttcaacaaaatgcaattggggctgtggaggaagcagagtatggaaagccacaggaacacagaagaggga

SEQ ID NO: 118371 - DNA, 201 bp, Homo sapiens
cactccggccacttgtgaaaagcactaaatacaacactgtatttaagaaacatggaatacatctgaatctatgctatatttttttctcccagacgtttttktctttgaatgtgatacaaagcagaaattgaaccacgtaaaagtttaattttgctccacctgttggactttctggtgttctggcaagactgcttgaagtgc

SEQ ID NO: 118372 - DNA, 201 bp, Homo sapiens
attcctttcatgttgctaatctaccacccctccccaactaaaataagagtcctttgaaagtagaaataggacattctaatttataactttaagcataggcrtaacactgagtttctaccaggcatttagtatattcttagtggcttgcatttttttttttttttttttatgagacagaggctggctgcaactcccaggctg

SEQ ID NO: 118373 - DNA, 201 bp, Homo sapiens
gaagaactatacagaaacagaatgggctaatatctttattttttatctgtgtcacttctctctcctgaaaaagtcttgctcccccttttcccaattatccrtaaaattcctatccattcttcaagattatcccgagccttcatccctccataaactcttccctgactactcaaattgtattgattcctttcatgttgctaa

SEQ ID NO: 118374 - DNA, 201 bp, Homo sapiens
gtgggtagctgcagtttatctaggctgggttcaactaggtagcactacttctaatgaaaacctgctagttggctggggagtcactggtctgtgtgtctttyacccttgttcacagttcagcatgctggctgtcgcatattttttactatagcaacggtagaagggcaagagaacagtggtaacatctgaagtctcttgaga

SEQ ID NO: 118375 - DNA, 201 bp, Homo sapiens
cacattattagtagcatggatttctccttctctatgcaacagactgtgcagtggccttctctggttgatcaatctgtatggattcaataatatccaccatrtgcctggcattaggaccctgaggagggaaaaagtaaaagtccctactctaaagacatgcattgtttaattaaagaaatatttacataaataataatattt

SEQ ID NO: 118376 - DNA, 201 bp, Homo sapiens
cagactacagattctctaagttcaatccatttctattaggtgtgaattagccatatttttcagggttcagattgctcattataggcaactaattttagagscttaaggcttcccttggttgtaaaagcatgttatccttgtagaatgtattgatctctttattaaatacggaggtttggagttttcattggagtaggcaat

SEQ ID NO: 118377 - DNA, 201 bp, Homo sapiens
tcccacactcccaccttatggagtctccaatgtctattattccacattccatatccatgtgtacatattatttagctcccatttataagagagaacatgtwatatttgactttctgttcctaaaatatcaaatttttaaagaaggcaggatcagtattattgattttcctttggcttcaggctccaacttggctcagagca

SEQ ID NO: 118378 - DNA, 201 bp, Homo sapiens
gcaggcagcttagaaaatacatcttctcttttccactcttacaccattatgtctttgtgcatgtgccctgaatttaaaggtaaagcgaaaatgaacagagmaattatcatgtagagtggaggaaattaagctgagtaaaagcttttagttaactatgtgattcccagtcacccgcacggcagcagcaacagagagctcagg

SEQ ID NO: 118379 - DNA, 201 bp, Homo sapiens
cagtgatatacagaaccttaaacagccactgggaaagattaagtgcccatgcttcgctccagttgtaaatcaagctccaaagccatttattgtgagtgttytataaagcagtagaagttattgccactatcctgcaaaatataacgtcagataagaaagtaaagacagggtaaattttgttgtgaaggttttaaagtgatg

SEQ ID NO: 118380 - DNA, 201 bp, Homo sapiens
ccctaaacattatataacattcaatttctataacattttcgaaatgacaaaattttagaaatgaagaacagatcagtgattacaggttttagggaatgggwggagagagttataaaagggcaacatgtagggtctttgttgggatggatctgtttagtatcttgactggcttggtgaatacaccaatgtacgtcagataaa

SEQ ID NO: 118381 - DNA, 201 bp, Homo sapiens
atttcttatgattctgtatgttgaccaggtggctttttctggaagcccactcatgtgatgcattaatttgggagcagggagagtgtcatttaagtactgarctcagctggaataggtgggatggccaggcttctctttcagcccaggtttctttagggttaggattctcagggcagttcttcaagagggcaaaagcagaag

SEQ ID NO: 118382 - DNA, 201 bp, Homo sapiens
cagccaattgggatcagagtaggtaaatgtagatagtgtctttacttggtttttctttgctataagcattatcactgcatgtttggggttgtatggctttrtatgtaatgggctttcattaaaaaatatttcacatgttcaccaaggaagttttaggccacaggtgtgctgtcttcaaaaggcaattccagatggaacaat

SEQ ID NO: 118383 - DNA, 201 bp, Homo sapiens
tgcaatagtgatatttttctattaccattttttccctagatttcaacaatggtttcctagaaagcattagttgaacaagatagctagctagctagctagatacatacatacatacatacatacatacatacatacatacatacatacatacatattcccatgcctagaataaatactagaacaataggtggggaaaataat

SEQ ID NO: 118384 - DNA, 201 bp, Homo sapiens
gcaatagtgatatttttctattaccattttttccctagatttcaacaatggtttcctagaaagcattagttgaacaagatagctagctagctagctagatacatacatacatacatacatacatacatacatacatacatacatacatacatattcccatgcctagaataaatactagaacaataggtggggaaaataatg

SEQ ID NO: 118385 - DNA, 201 bp, Homo sapiens
gagagcttgtagaaagaaaagaagaatgagtgcctaggtttgagctgagaggaagttcagtatttgaatgtcatacagcgcaagacaccattctccaacayggagaatggtaggaggtaaactagatgtggtgttgcagaagccaaaggaacagaaaggatttcaggaagggtggagtcatcaactctatttactgcttct

SEQ ID NO: 118386 - DNA, 201 bp, Homo sapiens
catttgggttgattccatgtctttgctattgtgaatagtgctgcagtgaacatacaagtacgtgtatctttataatggaatgatatatattcctttgggtrtatacccagtaatgggattactgagtcaaatggtatttctggttctaaatctttgagaaatcgccacactgttttccacaatggttgaactaatttacat

SEQ ID NO: 118387 - DNA, 201 bp, Homo sapiens
agctcagtgtatggccaagagaaagactgaagtgcctgattatgcattcttggtttagaggaaaggaaaggaaactaggacaggcttcacacataaggggwcataggtgttgttgacctgtgagggctgagtaaggaggtagacacattaccagttactgactaatatgagctaatggaaaatgtgcagctgtccatctcc

SEQ ID NO: 118388 - DNA, 201 bp, Homo sapiens
ggcaagaggcaaccaataatgatgtgttgaccatgagaggggtgtgtttgctgattttcccttccctcaccttcccctctgtacaaaacacacacacacasagagagagagagagagagagagagagagagaacagagagtagcatggctgggctcattcaagaagacccagaacatctgcacattgcctttatcagacag

SEQ ID NO: 118389 - DNA, 201 bp, Homo sapiens
ttttatttcatttgctgcgcctaaaacaaacattttataaattaacagctgattaatgtaaactattggattcattaacatcaatgagagaaatggttctrtgagaacttcaatattaacatttactaatgtgaatatgcatgtttatgccctttggtttcttaccaagttataggtattttttgtacagtatagcacaag

SEQ ID NO: 118390 - DNA, 201 bp, Homo sapiens
gttatcaccagggcgaattaggaagaagctgcaactttgtctaggccagggaaggggggaaggatctggaggactgggtgagagcacacagatgggagagmagagcagtctggagatccagcaatagctggggtttcaggtggtctgcaccatcactccttttaccagcagggataattaggagatgactgtatgtgtaaa

SEQ ID NO: 118391 - DNA, 201 bp, Homo sapiens
aaattaacattttatgaagactaagctacagtcacaaaatcaatgcctctttaaacactgtgatcaccagcagtgcatccaatttgtcatggctaaattgygtattagatgaaatctttggtcgtatgttttggattttgtattgctaattactttttgttttctttacagattttcctgcatggaaacaatttaaacagc

SEQ ID NO: 118392 - DNA, 201 bp, Homo sapiens
acacatcctataatgcaatgcacgtgaagcatacgtcctcgaatctggagagagaatgctcacccaagctgatgaaaaggtaaggcctgggttatcagagccccccccccagtcagaggtcaatggaattttttatttggacctattgtgaattattaattaaagacctttatgggcagagaacttgaataaaataaattg

SEQ ID NO: 118393 - DNA, 201 bp, Homo sapiens
catttttgggttccaaaaccatatgctcattccaaaaatcatgctcctccatatgcagcagattctcaaaggagcagctggcccggtgtctctctcctttstggtgtgggagccacacacagttctcccacactgaggtcagggctgacaaacacgccgagggaccccccaaccttcccctgccccctggctctggctcag

SEQ ID NO: 118394 - DNA, 201 bp, Homo sapiens
aatttctataaagttttatggaatattaacaacaatgtaaaacaaaccttttgctcattactgcttatgtgaaatggctgggatgaaagctcaaggccccyaactttgagtcttggggatttttctgtgctgtttgcttttccaaaagcctagtgtcttgcacgtagcatatgttccttacatagctaatattttagttta

SEQ ID NO: 118395 - DNA, 201 bp, Homo sapiens
gaatttgtagtctactaagggagtggtgcaacttaatctataacttattatttattcagcaaattcttgttgaaaactatcacagaatctatcctagcagwgctgtgaatatagctatgaataaaaaagaccaaaatgtctgcccagataaaggatacattgtgcatacatacactggggagaggcagacaaaaaaacaat

SEQ ID NO: 118396 - DNA, 201 bp, Homo sapiens
cttaactgtagccatgggacttgcttctttggtaagtagtaatattaaaaccattttaaattgaagttttgcagaaagcatactatttggggactggccaraaaaaaaaaaaaggtgtaattccaaagaaagtggaaaagtaccacatagactggataaaatggaaaattatatttgtgtgacctactgtgttaccaaaag

SEQ ID NO: 118397 - DNA, 201 bp, Homo sapiens
tccaccaaaagtctcacctcaattttcggtgtcaagctcaaaggccatgttttgcatcagatccagaagtggacaaggcttctctggtgcagtgtcttgaragcagtaactcttttttttttcaacttttattttaagttcagggttacaagtgtagctttgttacataggtaaacttgtgtcatgggggtttgttgtaca

SEQ ID NO: 118398 - DNA, 201 bp, Homo sapiens
caccaaaagtctcacctcaattttcggtgtcaagctcaaaggccatgttttgcatcagatccagaagtggacaaggcttctctggtgcagtgtcttgagarcagtaactcttttttttttcaacttttattttaagttcagggttacaagtgtagctttgttacataggtaaacttgtgtcatgggggtttgttgtacaga

SEQ ID NO: 118399 - DNA, 201 bp, Homo sapiens
gttttttctcactttccctaataatcttctttcttttaatttaatttttatcaagataataatgtaagtcattttgaaagtcaaataataaaaacctttaragagtaggcagcatcttcctacccctcctcatctctctctctctctctctctctctcatctccttgctcatgggcaaataattttcactggcctaactgt

SEQ ID NO: 118400 - DNA, 201 bp, Homo sapiens
catctagggaaattaactgtaaatggtgagttattgcacatgcacacacacagtgatacatactctatttctccgcagaaacacaaatgaaaaaatatccwggcagattggaatttaaaagctttagtttcagtgtcattttaagtggtggatatgaatgctttgcactctagtgtctatatccagagatggataggcctg

SEQ ID NO: 118401 - DNA, 201 bp, Homo sapiens
cacatcctataatgcaatgcacgtgaagcatacgtcctcgaatctggagagagaatgctcacccaagctgatgaaaaggtaaggcctgggttatcagagccccccccccagtcagaggtcaatggaattttttatttggacctattgtgaattattaattaaagacctttatgggcagagaacttgaataaaataaattgc

SEQ ID NO: 118402 - DNA, 201 bp, Homo sapiens
agctgaatggagcgataccacaccccacgaggtgctgccctctgcctgtgacacagcagcacagccacccaggccaaacagtctgaggaaaagcagaggtrgagtgacctcgaagaatcatgcagaggtcttctaatgtgggcagaatcccaggagagagcaatggccagcctatcctggccatgaccactcaacaaatat

SEQ ID NO: 118403 - DNA, 201 bp, Homo sapiens
cactccccagtgagatgaacccggtacctcagttggtaatgcagaaatcacccatcttctgcgtcgcttctgctgggagctgtagactggagctgttcctrttcatccatcttggctccaccctcagggcaagtcttaagagtgagattagactagggtacagaagggtttttaggtaagatgatacagacgtgcatgggc

SEQ ID NO: 118404 - DNA, 201 bp, Homo sapiens
tggacctattgtgaattattaattaaagacctttatgggcagagaacttgaataaaataaattgcaatgcattctcagctgatttcactaaaactgaaaayaaatggggcttggctggcccagcactatagttgtccccattgtatcaaaggaatagttaaaggctaggacttcactcatgccacaattatagccctggtc

SEQ ID NO: 118405 - DNA, 201 bp, Homo sapiens
atgtcttatcttcttagtgcctcaaactagattgtgttcagacatgctataacaagttagcacaagtttattttggtacaaaaattttttgaactccatgmataattttttataatatgcgttttccatgaactttgtgaagacccctcatagaccatgtgtttaatactgcatgccattttagaacatggatataccaca

SEQ ID NO: 118406 - DNA, 201 bp, Homo sapiens
tgaggtgtgtggcattctctgctctggtactaaatgaccctgagttttatatttttaactttttattcctgttttttcttgttgttgttattgttgtttgrgacagagtctcgttctgttgccaggctggagagcagtggtatgatctcggctcactgcaatctccgcctcccgggttcaactgaccctcctgcctcagcc

SEQ ID NO: 118407 - DNA, 201 bp, Homo sapiens
ggctggagagcagtggtatgatctcggctcactgcaatctccgcctcccgggttcaactgaccctcctgcctcagcctcccaagtagctgggactacaggyatgcaccaccacgcccagctaatttttttgtatttttaatagagacagggtttcaccatgttgaccaggatggtctcgatctcttgactctcatgatcca

SEQ ID NO: 118408 - DNA, 201 bp, Homo sapiens
cgcctcccgggttcaactgaccctcctgcctcagcctcccaagtagctgggactacaggtatgcaccaccacgcccagctaatttttttgtatttttaatrgagacagggtttcaccatgttgaccaggatggtctcgatctcttgactctcatgatccacctgccacagtctcccaaagtgctgggattacaggcgtgag

SEQ ID NO: 118409 - DNA, 201 bp, Homo sapiens
taatttttttgtatttttaatagagacagggtttcaccatgttgaccaggatggtctcgatctcttgactctcatgatccacctgccacagtctcccaaartgctgggattacaggcgtgagccaccatgcctggccttattccttattttattttatttttcagaagtccacttctttgctcccacatcatcagctgttt

SEQ ID NO: 118410 - DNA, 201 bp, Homo sapiens
gttttctgttcttaggagtgtatgtgtgaagcacctcactttctcctacctaatttactccttgaatatgttttaggcttggagaataggtaacccaacaytaaaactgtccaacaaagaatagtaaataagctttgtattagttatgattattttcactgcaagaaagaagaaaacccaaatgaactgctttaaactatg

SEQ ID NO: 118411 - DNA, 201 bp, Homo sapiens
taaacattctccacaaaaagtttatatagaatacattttattattcttcttattagcggcttttgaaagtttagatctggaggaagtccttagatgtcatytagggatcgtcagactttccaccactaaggacctcttctgtcccccacagggtatgtgtgtgcagtgaaagacgctggctaccgaaaacattgcatttgt

SEQ ID NO: 118412 - DNA, 201 bp, Homo sapiens
tttatcctctttgtttcctggaggcccctccctggtgcaaaatcatctgcatttcaacctgagctcagtctgatatcccagccatataagtaaaagtactaaaaaaaaaaaaaaaaaaaaaaggtagttactatgtgctatttcagcctcattcagctcatggacttaccaaataaacattcatgtctcagcactgaaaga

SEQ ID NO: 118413 - DNA, 201 bp, Homo sapiens; identical to SEQ ID NO: 20230

SEQ ID NO: 118414 - DNA, 201 bp, Homo sapiens
tacaaaagaaatggttctaaattttgccttgagaaatgtttttgtttgctgattacggtttattatgactgctatttacaaattaagccctcatcattcamagaactaagttaccaaccacactagctcaaagagttaggttcctgtaactggattatgtccaccacgtatgtttaagttttcagacctttttaagttggt

SEQ ID NO: 118415 - DNA, 201 bp, Homo sapiens
gcacattgaaagtaaatgtttttcagatgtgttcaaatgcatttttctcttcctcatttcaagaggtgtcacaaggccactgactctacacctaagtgtcyttgtacctgtgtcaggactagactcagtggcttaccccaacctatcaacatttaagacccctcacattattagtagcatggatttctccttctctatgca

SEQ ID NO: 118416 - DNA, 201 bp, Homo sapiens
ttattatggataaaacagtgaataagaaatttcaaattacttttagtactattatttgaatataaatattttctcttctaaataggtgctttaaaggcaamgtctacatattatctactttcccgtcactagttcagatcattacatttagttggccctcaatatttgctgaattaaatcaaatggagattcaagttcaaa

SEQ ID NO: 118417 - DNA, 201 bp, Homo sapiens
aggctaatttcctgtgagcttttgtgcttgataatttctgagccagcagaaatttctccacatgtgtttgagatgatctgttcttgtttctaggatgcttktagccaaatctgttcctaaatgttgtgcagaccactgatgactccttttctatctatgctccttaaaatagtatcaaaggtcttagacaaagttccatat

SEQ ID NO: 118418 - DNA, 201 bp, Homo sapiens
tacgtatatcaaattatcatctgtacacctttaatatgtacaactttgtcaattttacctcaataagagaaataacctatgtttgcagctgagtagtgttmtatagaacattgaaggcccagaaggctctttgcattttggactagcagtctattttgttccaagctattagtgtttttatcattgtgactctcttaaaaa

SEQ ID NO: 118419 - DNA, 201 bp, Homo sapiens
tacagaaacagatgtgttcttctctaatattcattacaggcatgtagaatggaaatatggtagatccctttggagactgatgtggatccttggcaagctcyttcaagttctgatagacataagaaaggaaaagtgcacattgactataaattggtgtcatccttccaaagattctgagcctcacatgagggatgagagatg

SEQ ID NO: 118420 - DNA, 201 bp, Homo sapiens
cttgctttagggaggtgagaatctgaagcacaatgtgcttaggctaaattctccaggaaaaaaaatactttgtagatgaggaaggacattaatcaatcagmcacaacatctcatttaaggataaactgtcctggaggtactgaaacacttattcactcattcaaacattttgactactttctttattcatgtattctaggt

SEQ ID NO: 118421 - DNA, 201 bp, Homo sapiens
aagcaaatttatttcacatattatagattggaggcatagctatatgtggaagcaggccatgaaaaatgcaacctcaactttccttttgaacccatagtaawttatctcagaaacattgttgagttccctgaactgtaaggtaagtaacttgccccatgctttaaatcttctgtagggaataagtcatgcctgtgccttgtg

SEQ ID NO: 118422 - DNA, 201 bp, Homo sapiens
gctgaatggagcgataccacaccccacgaggtgctgccctctgcctgtgacacagcagcacagccacccaggccaaacagtctgaggaaaagcagaggtaragtgacctcgaagaatcatgcagaggtcttctaatgtgggcagaatcccaggagagagcaatggccagcctatcctggccatgaccactcaacaaatatt

SEQ ID NO: 118423 - DNA, 201 bp, Homo sapiens
ataaataaatgagaataatagatcataaaattaccaaattgatttcatttgaattatcatagttttctgaaaatatttttatgcttaaactctttgattcrtaaggaatacagtgtatgtttgtagatgtactttcctaatactaaattctgtatgaggaaatacaaaaggatttttttctaatgtaaacttgagatgaaa

SEQ ID NO: 118424 - DNA, 201 bp, Homo sapiens
acgaggtgctgccctctgcctgtgacacagcagcacagccacccaggccaaacagtctgaggaaaagcagaggtagagtgacctcgaagaatcatgcagargtcttctaatgtgggcagaatcccaggagagagcaatggccagcctatcctggccatgaccactcaacaaatatttactgagcattttctctgggctgag

SEQ ID NO: 118425 - DNA, 201 bp, Homo sapiens
cagtctcatgggcatgcagtacctttgtgactgaccttaacagctcagtcctcagccttccaccattccctcttgttaccaggccccaccacttacttacycaaagttagtctttgggtcaggggtttcctcagtattgtcccttcatggttcatcagaaagatgttaccagaaagtggtcccaattcagaccccaagaga

SEQ ID NO: 118426 - DNA, 201 bp, Homo sapiens
cctcaccattacttgtacatctggccgagatagatgtcctgcttacatacagctttcttttctgtggcataaatgaaaggaccatctccttacaagcacawcctgtacagctgtgtaacattggagtgaaagaaaatctatataatgaatttagttaataagagaatgaatggggctagttaaaatgttgggtacaggggc

SEQ ID NO: 118427 - DNA, 201 bp, Homo sapiens
tttgaaaaagacaggcctggaacccatgcacaattttaaagttatgcatggagtcaaagggagagaagggagacaaggggaataaagacatccttaacaaytaggaagtgagtgtgttttcttcctctcctcatcctgaagctagagcttctaccaggcaggaaaaacaggttgttctttggggcattggtcctgctggtc

SEQ ID NO: 118428 - DNA, 201 bp, Homo sapiens
gttagggtcagaaggcagcagagtgagaaagtcaactgcagagcaccacagaaaaacagcatgatggctattacctttctttccttcccagcgttgtgtaraaggcttgccattttgtcacggttttgatttctttccaaataaaagttttctcactaaaaatgaaaaatcctaactccctagtagagaagcaggtaatga

SEQ ID NO: 118429 - DNA, 201 bp, Homo sapiens
ttatactgcctctttccctcttctttgccttagtttttgcatagggtcaatacaaggcttttgtacccttggagccctgcacccagagcatggccaagcaygttgggagcgggccacagaaagcaaagccaagaagagggaggaattagcagcacagcacccctacctcccttcctcctggtcagccaagagggctttgtg

SEQ ID NO: 118430 - DNA, 201 bp, Homo sapiens
ttccctcttctttgccttagtttttgcatagggtcaatacaaggcttttgtacccttggagccctgcacccagagcatggccaagcatgttgggagcgggycacagaaagcaaagccaagaagagggaggaattagcagcacagcacccctacctcccttcctcctggtcagccaagagggctttgtggttacaggagccc

SEQ ID NO: 118431 - DNA, 201 bp, Homo sapiens
gtatatacccagtaatgggatggctgggtcaaatggtatttctagttctagatccctgaggaatcgccacaccagcttccacaatggttgaactagtttasagtcccaccaacagtgtaaaagtcttcctatttctccacaccctctccagcacctgttgtttcctgactttttaatgatcgccattctaactggtgtgag

SEQ ID NO: 118432 - DNA, 201 bp, Homo sapiens
ccaagatcacaaagcaagtgatggacccatcattcttcaagcccaggccagagcttctctggggaatttccttgatacttaaagttatttgggggaaaaawctgagcagaattacttagaattatttgaagacacctttataaaaacttatttcttcctgtttagaagcctttacataggctcactattaggcaattctgt

SEQ ID NO: 118433 - DNA, 201 bp, Homo sapiens
ggcatttagtgctataaatttccctctacacactgctttgaatgtgtccctctacacactgctttgaatgagattctggtgtgttatgtctttgttctcaytggtttcaaagaacatctttacttctgccttcatttcattatgtaccctgcagtcattcaggagcaggtttttcagtttccatgtagttgagcggttttg

SEQ ID NO: 118434 - DNA, 201 bp, Homo sapiens
tgaatgtgtccctctacacactgctttgaatgagattctggtgtgttatgtctttgttctcactggtttcaaagaacatctttacttctgccttcatttcrttatgtaccctgcagtcattcaggagcaggtttttcagtttccatgtagttgagcggttttgagtgagtttcttaatcctgagttctagtttgattgcac

SEQ ID NO: 118435 - DNA, 201 bp, Homo sapiens
tattctgttgatttggggtggagagttctgtagatgtctattaggtccacttggttcagagctgagttcaattcctggatatccttgttaactttctgtcttgatgatctgtctaatgttgacagtggggtgttgaagtctcccattattattgtgtgggagtctaagtctctttgtaggtctctaaggacttgctttatg

SEQ ID NO: 118436 - DNA, 201 bp, Homo sapiens
attttattttcaaatattttctcttgtttcttataagaaatctactttagagggagatatatcttcaatcttctctccttcaagtttttgctctgctgtcrtattctcagtgagacttaccttgaccactcaagttagcattgcaatccctcttcctacttgtactccagattcccctgatgctattttttcttttccata

SEQ ID NO: 118437 - DNA, 201 bp, Homo sapiens
ctacctagagcatttctttgtttcagccaacatttcccatattgcttcggctgatgactctcttgttactcttgttcagcagtagtgctatacaggtctaygcagttcctcctaccagggtgaccctcttcacatcagcttcttaaagttccagagatgtcatatcctctgggattatttaaaaaatgataaattagtaaa

SEQ ID NO: 118438 - DNA, 201 bp, Homo sapiens
agacaatcctagatctgtactaaattaactcttacagtaaatacaaaattagtagttttaaaaccatttgaattagttcatttgggtttctattacaaaawaccataaactagcatctaaacaacagaaatgtatttctcacagttctggaggctgggaagtccaagatcaaggtactaacagattcagtgtctggcgagg

SEQ ID NO: 118439 - DNA, 201 bp, Homo sapiens
ctcattccaatctacttttaacatttcttgagagcaggaccaaatgggagcaaatgattgtgtgcttctttgctgttttaaagggagccaagggagtctamacaatgagtatttatgtggcaagagttagtcctaggctaggactaagctaaaggtggtgaaaggtgaactgtgtagcatgggctaaattctggtcacgtt

SEQ ID NO: 118440 - DNA, 201 bp, Homo sapiens
tattgtggtcacttcattaggttactaaatgttgtcttagttcacttgtgtgctactataacaaaatacctggggcttggtaatttataaacaacagaaayttatttctcagagttctggagcctgggaagcctaagatcaaggggctgacaagttacgttgtctggtgagggttattctctgcttccaagatggtgtcct

SEQ ID NO: 118441 - DNA, 201 bp, Homo sapiens
gactcagggttgtaaaggtgagggatagggcaaaatttaagggggcaccaagaaactcagtaattaaataaataatattgtaataaaatattttaaaaacycacaatgcaaaaaaattctttatgaacaaaatatccaaattttatttatttactttgtaaagaaagcatgcttacatttgccttttattgctagattttt

SEQ ID NO: 118442 - DNA, 201 bp, Homo sapiens
ctgacttagctgttatgtaccccgaatatttacctggatacagcataattataatatcaacaagaatttacagttaaagtaaagtagatcttttcctttcmcaagcagttttaccaacattatttcacagaattttacctcagcacttcccagggaattatctttcttctgtctattgcaggatccctgtaacaaagaaaa

SEQ ID NO: 118443 - DNA, 201 bp, Homo sapiens; identical to SEQ ID NO: 20231

SEQ ID NO: 118444 - DNA, 201 bp, Homo sapiens
gcaacccctgcctttttttgttttccatttgcttagtagatcttcctccagccctttattttgagcctatgtttgtctctgcatgtgagatgggtctcctraatacagcacactgataggtcttgactctttatccaatttgccagtctgtgtcttttaattggagcatttagcccatttacatttaaggttaatattgtt

SEQ ID NO: 118445 - DNA, 201 bp, Homo sapiens
tagttgggaagatgagagccagaactaatgccaaatcagaggaaaactggctctatcctatagatgtttggctatggaaaaggaggagtaacattcatgasggttgggctcaacttcttccaaagtcctgttaatgtggatattttgacctcctcccatgaatcttgaatgttctagaatggcatccagaatggtgaatcc

SEQ ID NO: 118446 - DNA, 201 bp, Homo sapiens
ccctttgtgggtaacccaacctttctctctggctgcccttaacattttttccttcatttcaactttggtgaatctgacaattatgtgtctttgagttgctmttctcgtggagtatctttgtggcattctctctatttcctgaatttgaacgttggcctgcctcgctatattgcagaagttctcctggataatattctgaag

SEQ ID NO: 118447 - DNA, 201 bp, Homo sapiens
ctatttcctgaatttgaacgttggcctgcctcgctatattgcagaagttctcctggataatattctgaagagtgttttccaacttggttccattctctccrtcactttcaggtacaccaatcagatgtagatttggtcttttcacatagtcccatacttcttggaggctttgttcatttctttttttattcttttttctct

SEQ ID NO: 118448 - DNA, 201 bp, Homo sapiens
ttggtgtataaaaaataaaatagggggaggttccaagatggctaaatatgagcagctccagtctgcagctcccagtgtgagcgacgcagaagatgggtgawttctgcatttccaactgaagtactaggttcatctcactggggcttgtcagacagtgggtgcagcccacagagtagagtggggcatcacctcacccaggaa

SEQ ID NO: 118449 - DNA, 201 bp, Homo sapiens
ttactgtaaattcttatgggagatactgggtccagcagctttcctgttcataaaatgttttagtagctagcattttgttctgcaaatgtattagtgctatraagaatgattacaatttttcttcctcccataactttgggtgataactgctaactgcatcacctgtaaagctggaaaagcattcttctttggaaataacac

SEQ ID NO: 118450 - DNA, 201 bp, Homo sapiens
cacagagcctcactcactgctagcacagcagtctgagatcaaactgcaaggtggcagcgaggctgggagaggggcgtctgtcattgctgaggcttgagtasgtaaacaaagaggctgggaagctctaactgggtggagcccaccgcagctcaaggaagcctgcctccctctgtagattccacctctgggggcagggtatag

SEQ ID NO: 118451 - DNA, 201 bp, Homo sapiens
tgagagtggacagtctgcctcctcaagtgggtccctgacccctgagtagtctaactgggagacatctcccagtaggggccgactgacacctcatacagctrggtgcccctctgagacgaagcttccagaggaaggatcaggcagcaacatctgctgttctgcaatatttgctattgtgcagcctccactggtaatacccag

SEQ ID NO: 118452 - DNA, 201 bp, Homo sapiens
cgacaaaattcaacaaccttcatgctgaaaactctcaataaattaggtattgatgggagtatctcaaaataagagctatttatgaaaaacccacagccaayatcatactgaatggacaagaactggaagcattccctttgaaaactggcacaagacagggatgccctctctcaccactcctattcaacctactgttggaag

SEQ ID NO: 118453 - DNA, 201 bp, Homo sapiens
actgctataaagacacatgcacacgtatgtttattgcagcactattcacaatagcaaagacttagaaccaatccaaatgtccaccaatgatagattggatkaagaaaatgtggcacatatacaccatggaatactatgcagccataaaaaatgatgagttcatgtcctttgtagggacatggatgaagctagaaaccatca

SEQ ID NO: 118454 - DNA, 201 bp, Homo sapiens
gcagccataaaaaatgatgagttcatgtcctttgtagggacatggatgaagctagaaaccatcattctgagcaaactattgcaaggacagaaaaccaaacmccacatgttctcactcataggtgggaattaaacaatgagaacacttggacatgggtggtggggaacatcacacactggggcctttcgtggggtgggggca

SEQ ID NO: 118455 - DNA, 201 bp, Homo sapiens
aggagatatacctaatgtaaatgacgagttaatgggtgctgcataccaacatggcacatgtatacatatgtaactaacctgcacgttgtgcacatgtaccytacaacttaaagtataattaaaataaataaataaataaataaataaataaataaataaaataaatgggagagtgatgcctccagtggggtcagagggaat

SEQ ID NO: 118456 - DNA, 201 bp, Homo sapiens
gtgccttaaatattatcaattgaagttgttatttaagtagcagtctattcagacttctggtatgaagaatttgcctttaatggaaaatatctatgttatcytaagttatgaaacccagtgaccctggcttaagcattctccccagaagcttctactgtgtgctgagcacagaataaagatatagattgaagcaaatttatt

SEQ ID NO: 118457 - DNA, 201 bp, Homo sapiens
gttttactgattaattataagatgcattttccatcacattaaaaatccctgaaatgaagacatgtcctacaattgatgacatctgaaattcacggaatttaaaaaaaaaaaaaaaaaaaaaagaccagaaacattggagagcagaaagcgagggggaaaatgacgggggtgatgcacaggggcccaccgtgcagagctgca

SEQ ID NO: 118458 - DNA, 201 bp, Homo sapiens
aaaaaaaagaccagaaacattggagagcagaaagcgagggggaaaatgacgggggtgatgcacaggggcccaccgtgcagagctgcatagggcagatatgaatatcggactttgtcctataagcaatggacagtttcagaaaagtttttgcaaatgagtgcaatgaatagataagtttattaaaattttcactctgttgtg

SEQ ID NO: 118459 - DNA, 201 bp, Homo sapiens
tagggcaacttggtaatcactggctgttttgtggttgataatttggggtggggctgtctaatcttggaaaggtatttgcatatttcaacactatcagtctrgaatttggtcaggactccacctgggcctgggctacctttccgtgtttctactctgttattctgtaatgatatggaataacatatcatatatcatatcata

SEQ ID NO: 118460 - DNA, 201 bp, Homo sapiens
gatccatcttctctcactttattttgtgtccctacaatgccagacacagagcctccatttctgcaaatatttcagttaaactgaattgttataggtttgarcaattttttaaaactctatgcttctttatttcagaataggaaaatggaaaaaaaaagaggctgtcatttgccacgcatttaccatttcagatattgtaat

SEQ ID NO: 118461 - DNA, 201 bp, Homo sapiens
atattaatgacaagctctgctaagcataaatatatattacctcatttaacccacctgagaactttgcatggtagatattagtactatgacccctcttttayctttgatgacataaggcttttagaagttaaggagctcactcatgttacacaactagtgaatacggagtgggagttgggcaatggtagtctgatgtgagag

SEQ ID NO: 118462 - DNA, 201 bp, Homo sapiens
aaaatgaatcctgtttcacatgttggtaagtccgtcattctgtctggagggaactgggtctgaaaattgcactgggactgaaattggacggcagcatgaarctgttaaagataatagacctgtgttaaaacccacaaatgaatggaggcattctctggcctgcagaagagcgctcattgtcctctgcggtccattttccac

SEQ ID NO: 118463 - DNA, 201 bp, Homo sapiens
gtgaggaggaacaaaaatctcatactttataagttggcattcccctcaactccttgcattatttgccccaaagaaaactgcaaaatggttctagaatcctstgtcacataggtccttcttccctgagttgcagtctgttctaattctgacctggcatctattttggttacaaaagttttcagtgtctctactctgatggag

SEQ ID NO: 118464 - DNA, 201 bp, Homo sapiens
aaatgacgagttaatgggtgctgcataccaacatggcacatgtatacatatgtaactaacctgcacgttgtgcacatgtaccctacaacttaaagtataattaaaataaataaataaataaataaataaataaataaataaaataaatgggagagtgatgcctccagtggggtcagagggaatgggaacaagaacacagac

SEQ ID NO: 118465 - DNA, 201 bp, Homo sapiens
atgacgagttaatgggtgctgcataccaacatggcacatgtatacatatgtaactaacctgcacgttgtgcacatgtaccctacaacttaaagtataattaaaataaataaataaataaataaataaataaataaataaaataaatgggagagtgatgcctccagtggggtcagagggaatgggaacaagaacacagacaa

SEQ ID NO: 118466 - DNA, 201 bp, Homo sapiens
gagttaatgggtgctgcataccaacatggcacatgtatacatatgtaactaacctgcacgttgtgcacatgtaccctacaacttaaagtataattaaaataaataaataaataaataaataaataaataaataaaataaatgggagagtgatgcctccagtggggtcagagggaatgggaacaagaacacagacaaggagc

SEQ ID NO: 118467 - DNA, 201 bp, Homo sapiens
agttaatgggtgctgcataccaacatggcacatgtatacatatgtaactaacctgcacgttgtgcacatgtaccctacaacttaaagtataattaaaataaataaataaataaataaataaataaataaataaaataaatgggagagtgatgcctccagtggggtcagagggaatgggaacaagaacacagacaaggagct

SEQ ID NO: 118468 - DNA, 201 bp, Homo sapiens
ctaagtgagtcctgacatgctgtgtcactaacaaggtcctgggttctgctgccactgctgatgcatggaccaccctttgagaagccagggcaaagaaaagtttttttttttttaatattctcacttttacgtctgactattaaataataagacccattctaaaatgaaacaaaaaccactccatgttctgaagaaataaga

SEQ ID NO: 118469 - DNA, 201 bp, Homo sapiens
cagtacacacaattgtctcttgtaagtcttttagtggtgccatggaaattttgagtttgattcatgctttgtggctaaatttgcaaatgaatatcaatcartatttctggaccttaattttcttatctgcaaatagagaagaataataagagctaaaaagaataaatgtgtatacccagctgacacagagctaaacacttt

SEQ ID NO: 118470 - DNA, 201 bp, Homo sapiens
ttaatgggtgctgcataccaacatggcacatgtatacatatgtaactaacctgcacgttgtgcacatgtaccctacaacttaaagtataattaaaataaataaataaataaataaataaataaataaataaaataaatgggagagtgatgcctccagtggggtcagagggaatgggaacaagaacacagacaaggagctca

SEQ ID NO: 118471 - DNA, 201 bp, Homo sapiens
acagtaaatacaaaattagtagttttaaaaccatttgaattagttcatttgggtttctattacaaaataccataaactagcatctaaacaacagaaatgtwtttctcacagttctggaggctgggaagtccaagatcaaggtactaacagattcagtgtctggcgagggcctgtctcctggttcatagatggtaccttcta

SEQ ID NO: 118472 - DNA, 201 bp, Homo sapiens
atttaacgtttagaaatttatggaagtcaggctgggcacagtggctcacacctgtaatcccagcactttgggaggccaaggtgggtggatcacttgagatygggagttcaagactagcctggccaacatggtgaaaccccatctctactaaaaataaaaaattacctggatgtggtggtgcactcctgtagtcccagctac

SEQ ID NO: 118473 - DNA, 201 bp, Homo sapiens
gaaattccctcctccattttccctgggctttattattattattattatttttaacttttgttatttgaatgtttgatttcctggaattgccttcccaattaaaaaaaaaaaactcttttcttgccaattttggtttgtctttttgttctatcttcaggagatttcctcaacatgatcgtcctgtccttctctgcacttttc

SEQ ID NO: 118474 - DNA, 201 bp, Homo sapiens
aagactagcctggccaacatggtgaaaccccatctctactaaaaataaaaaattacctggatgtggtggtgcactcctgtagtcccagctactcggttggytgaggcaggagaatgctttgatgctttgaacctgagaggcagaggttgcagtgagccaagattgcgccactgcactccatcctgggcaacaaaagcaaaa

SEQ ID NO: 118475 - DNA, 201 bp, Homo sapiens
gggagagagagaaagagagaaagagggaaggagggagagagaaagagagaaggagggagggagaaagagagggaaggaaagaaaacaagaaagagaaaaargagaggaaggaaaggagggaaagaaagagcgagaaaggaaggaaggaagaaaaagaaatagaaaaaagaaatagagaaagagaaggagggagggagaaag

SEQ ID NO: 118476 - DNA, 201 bp, Homo sapiens
gacggcagcatgaagctgttaaagataatagacctgtgttaaaacccacaaatgaatggaggcattctctggcctgcagaagagcgctcattgtcctctgyggtccattttccacacgtacaatgtgttcacagctggctgttctttctcttttggggacacttgtgaatatgcatgtcccaaatcataggcacagcttaa

SEQ ID NO: 118477 - DNA, 201 bp, Homo sapiens
aaggcagaggttacagtgagccgagatcgcaccactgcactccagcctgggcaacagagccagactccatctccaaaaaaaaaaagaaaaaaaaaagaaaraaagaaattattttgactcatgaagcctaaatgtattgggcacatcctaactttaggaaaggccaaacttctgtaattttgagactttctaggcttttct

SEQ ID NO: 118478 - DNA, 201 bp, Homo sapiens
aaagggataaattcaagattatctgttatacaacatgttgtacatgtttgttagatgtttatacatgtttattttattagctcaatttggccattccatatatatatatatatatatatatatatatatatatatatatatatatatatcctgaagtatacattgtggaatagccaaattgagctaattaacatgggactt

SEQ ID NO: 118479 - DNA, 201 bp, Homo sapiens
tacaacgtgttttatcagcaaggactttatgatctgtatcttttgctaacctcctatctcattctgtgactaagaatgccttaaccttctgggaatgcatytcagcaggctttagccttattttacccagcccctatttaagatggagttgctctggttcaagcacctctgacactcttactgccttaaaagggtcaaact

SEQ ID NO: 118480 - DNA, 201 bp, Homo sapiens
aagggataaattcaagattatctgttatacaacatgttgtacatgtttgttagatgtttatacatgtttattttattagctcaatttggccattccatatatatatatatatatatatatatatatatatatatatatatatatatatcctgaagtatacattgtggaatagccaaattgagctaattaacatgggacttg

SEQ ID NO: 118481 - DNA, 201 bp, Homo sapiens
gggataaattcaagattatctgttatacaacatgttgtacatgtttgttagatgtttatacatgtttattttattagctcaatttggccattccatatatatatatatatatatatatatatatatatatatatatatatatatatcctgaagtatacattgtggaatagccaaattgagctaattaacatgggacttggt

SEQ ID NO: 118482 - DNA, 201 bp, Homo sapiens
gataaattcaagattatctgttatacaacatgttgtacatgtttgttagatgtttatacatgtttattttattagctcaatttggccattccatatatatatatatatatatatatatatatatatatatatatatatatatatcctgaagtatacattgtggaatagccaaattgagctaattaacatgggacttggtag

SEQ ID NO: 118483 - DNA, 201 bp, Homo sapiens
acacttaagatctactcagccaatttcaaataaacaatacaatattattacttattacagtatccatactgtacattaggtctccaaaatctattctcatyctatataactgaaactttgtcctctttttccagtgtctctccatttccccctactctcagctcctggcaaccacccttctattctatacttctatgattt

SEQ ID NO: 118484 - DNA, 201 bp, Homo sapiens
taaattcaagattatctgttatacaacatgttgtacatgtttgttagatgtttatacatgtttattttattagctcaatttggccattccatatatatatatatatatatatatatatatatatatatatatatatatatatcctgaagtatacattgtggaatagccaaattgagctaattaacatgggacttggtagtg

SEQ ID NO: 118485 - DNA, 201 bp, Homo sapiens
tgacctttaaaatacggcagatgaagcatgtcactttcggagccagctttaagagcttaggtatgattcttccatgtggttttcctgggctatgtcaagcwgcactgctccagatggaggaggctgcatctctggctgcaggcaaatcaagcagggcaggacatttagtgtgagcaggaaattaatcaggaaagacaaaaa

SEQ ID NO: 118486 - DNA, 201 bp, Homo sapiens
tttctatcctatttgctttcctttgtttttaactatgaatgtaagcttcccttttcataacaaaaattactcaaatacttgtactgatttacatttactargaagccagtgcactttttttaagttgtgcccttaaaacaacactcagaccaatgaaatacacaaataagtgtgtcaagactgttgcaaagtctatatacc

SEQ ID NO: 118487 - DNA, 201 bp, Homo sapiens
aatcattaatttatgtttatattgaatactcaaaaacatatgcggccaggcacggtggtcacacctgtaattccagcacttcggtaggctgaggcgggcgratcacctgaagtcaggagtttgagaccagcctgcccaacatggtgaaacgccatctctactgaaaatacaaaaattagctgggcatggtggcgggcacct

SEQ ID NO: 118488 - DNA, 201 bp, Homo sapiens
taaaaattggggtatcaactgccaatgacttcttatggggatagttgaatagcctacgaaacattccagtctaatattctatgactcaacaattatttccmtatatattaactttgtttaagatacattgaggtgtaaggtaaatgctacttcaattaaagactttttctaccaaacacagtgaggaggaacaaaaatctc

SEQ ID NO: 118489 - DNA, 201 bp, Homo sapiens
aggaagcacaactaatctgttttaaaaattggggtatcaactgccaatgacttcttatggggatagttgaatagcctacgaaacattccagtctaatattmtatgactcaacaattatttccctatatattaactttgtttaagatacattgaggtgtaaggtaaatgctacttcaattaaagactttttctaccaaacac

SEQ ID NO: 118490 - DNA, 201 bp, Homo sapiens
acttttagttctccaagaggcctgatagcctaatccttctgggatgcagataatatagcagaacagtgggttggagcattgaccttgagaacaagcggacrtggattacaatcccagctgcccaaataattcaggcatgttacttaatttctttatgagtcagttttcctggaaaaatgggaacaatacaagtactccctc

SEQ ID NO: 118491 - DNA, 201 bp, Homo sapiens
acaaattaacttaaagtgtgaattgtagaattttgaaaaataaaatctaattattttcaagaacaattggtgattgtagtccagtctagtagtatgcacaraaacttgtggctaaaaaatgtgatcttgttcaagatcattgttttacatgggatcagagtagctgtgtgaactgcttcatactggcacagcaagttagtg

SEQ ID NO: 118492 - DNA, 201 bp, Homo sapiens
aggttccaaaattgtcaccatgaattgtttgtaattctgtctttttccctcccctcttgttagatctcagtctgtggtagaagctgggaccctgaaacatgaggagaagggagagaatgagaacacccagccactcctggctctggactgaaccctgagtcaccccaatgctcctgcacactggccttcagtggtatcagc

SEQ ID NO: 118493 - DNA, 201 bp, Homo sapiens
ggttccaaaattgtcaccatgaattgtttgtaattctgtctttttccctcccctcttgttagatctcagtctgtggtagaagctgggaccctgaaacatgaggagaagggagagaatgagaacacccagccactcctggctctggactgaaccctgagtcaccccaatgctcctgcacactggccttcagtggtatcagcc

SEQ ID NO: 118494 - DNA, 201 bp, Homo sapiens
gttccaaaattgtcaccatgaattgtttgtaattctgtctttttccctcccctcttgttagatctcagtctgtggtagaagctgggaccctgaaacatgaggagaagggagagaatgagaacacccagccactcctggctctggactgaaccctgagtcaccccaatgctcctgcacactggccttcagtggtatcagcca

SEQ ID NO: 118495 - DNA, 201 bp, Homo sapiens; identical to SEQ ID NO: 20232

SEQ ID NO: 118496 - DNA, 201 bp, Homo sapiens
cctaggagactgcctagtcgttccaacacaatttatggaaacgtttattttcccccttctgattatactttccatctccatcatatgccatatatacttgkgtctattcatgtagagataccatgctgctttaattattgaggtttaaaaataagttgtaacatccggtagatcgactttctttacataattctacataat

SEQ ID NO: 118497 - DNA, 201 bp, Homo sapiens
tatagcttcattttacacttaaattctttatccatttgcagtttatcatactgtacagtgtgagatgttttgtttttgtttttgtttttgtttcctaggaractgcctagtcgttccaacacaatttatggaaacgtttattttcccccttctgattatactttccatctccatcatatgccatatatacttgtgtctatt

SEQ ID NO: 118498 - DNA, 201 bp, Homo sapiens
acatagcttctggattttctcctaaaattatatagcttcattttacacttaaattctttatccatttgcagtttatcatactgtacagtgtgagatgtttkgtttttgtttttgtttttgtttcctaggagactgcctagtcgttccaacacaatttatggaaacgtttattttcccccttctgattatactttccatctc

SEQ ID NO: 118499 - DNA, 201 bp, Homo sapiens
tttgtgctatgaattgcaaatgtttctcaattttctttcatttgtcctggctttacttgcagaggtttttttttttttttttttctttgtttttgctaggwaaaaggatattttgttgtagtatttatcagtcttacatagcttctggattttctcctaaaattatatagcttcattttacacttaaattctttatccatt

SEQ ID NO: 118500 - DNA, 201 bp, Homo sapiens
gtctactaagggagtggtgcaacttaatctataacttattatttattcagcaaattcttgttgaaaactatcacagaatctatcctagcagtgctgtgaayatagctatgaataaaaaagaccaaaatgtctgcccagataaaggatacattgtgcatacatacactggggagaggcagacaaaaaaacaatgtagtttga

SEQ ID NO: 118501 - DNA, 201 bp, Homo sapiens
tacatcttctcttttccactcttacaccattatgtctttgtgcatgtgccctgaatttaaaggtaaagcgaaaatgaacagagcaattatcatgtagagtrgaggaaattaagctgagtaaaagcttttagttaactatgtgattcccagtcacccgcacggcagcagcaacagagagctcaggggcatctagtcatttcc

SEQ ID NO: 118502 - DNA, 201 bp, Homo sapiens
aggagcaggttcctcaagttagttatgttcaagaagaggctgcacaactccttactgaagatttcctatcaggttggtctagatgagtcactgtttccctytaactctgtggctgtggttctcatgccatgttgtgaaataaagtgaagtcatatgacagaaggtaaatggagtttaaggtctgtaaaagtagatggccat

SEQ ID NO: 118503 - DNA, 201 bp, Homo sapiens
taagtttttgtagattcactatagaaatatatgcttccaagaatgtgtgtaggagaaataaacataaaggacataaggaaaaagaaaaaataaaaaagtcrttgttcaggttccagaggttgttgcttggctttgagcaaagcactgaattcctcctgtctgcaaggcagcctctgcccaccctggccctgtgctgtgaag

SEQ ID NO: 118504 - DNA, 201 bp, Homo sapiens
ggaggagcaggttcctcaagttagttatgttcaagaagaggctgcacaactccttactgaagatttcctatcaggttggtctagatgagtcactgtttccytctaactctgtggctgtggttctcatgccatgttgtgaaataaagtgaagtcatatgacagaaggtaaatggagtttaaggtctgtaaaagtagatggcc

SEQ ID NO: 118505 - DNA, 201 bp, Homo sapiens
aaatgattatggctaagccatctaaaggtaaaaaactttattcaaacacatcaaaataatcaactgttccatagattctcccctccttgtcatcaaaaatkcctgggcaactgctcatgggatcacagagcttccaggatgttagcagaactgtagtattccaggggccttagagcagcatcttccacgggtgccggtaaa

SEQ ID NO: 118506 - DNA, 201 bp, Homo sapiens
atagaagtttagaaagggcagagctgagttcaatgtaaggaagaattttctagctgagttgactgtttaggggcatggaggagcaggttcctcaagttagytatgttcaagaagaggctgcacaactccttactgaagatttcctatcaggttggtctagatgagtcactgtttccctctaactctgtggctgtggttctc

SEQ ID NO: 118507 - DNA, 201 bp, Homo sapiens
tgtgattacaatgagcccatctatgcaggaacaaaccttcactgacccctcaggcaagtagcttcccccaggcctgcttggacaaaacatgtgcaatcaayggacagagcttccacctagtaatgcaagaatggaaaaggggtaacctgagcaaccatggaaaccttccttgatgcagttgccagctgaagcagctccact

SEQ ID NO: 118508 - DNA, 201 bp, Homo sapiens
ccagctagttgatgaagagatacaggatagtgctaaggtggccagttttagaaaccttggcacaagaggaatctggctagccttggctgggcaggtgtggsagggctaaaaggtacttgtgtctactctggtggctccaggagaaagaatcagaaattgtacatagaagtttagaaagggcagagctgagttcaatgtaag

SEQ ID NO: 118509 - DNA, 201 bp, Homo sapiens
ttctaagaataatttcctaaccccttgatatttgctgttcacctattagcattattaaataagcttgtgaatattggctttatggtaaagagcaagtaacytacctgttatttatacaagtctggaacctttaaaactgattattattatctaatatctttcaataactttcctcccttttatttcatggaactcatactc

SEQ ID NO: 118510 - DNA, 201 bp, Homo sapiens
aaatttctgtgttacttctaaaaatttaaagatattaagtaaggtaataaggttagcttttatgtgaaattattttatcaattattttgattttttaaaayactagacttcatccattttgaaatgttagtttttcatttattaatcacattacataatgtgtcagtacacacaattgtctcttgtaagtcttttagtggt

SEQ ID NO: 118511 - DNA, 201 bp, Homo sapiens
tcgaatgcattatagtagaaagaaacgtcgtagctttacacagttgaaaacaaccataactatattgcactgaagctacataaataattattaagcagatrgaaatttctgtgttacttctaaaaatttaaagatattaagtaaggtaataaggttagcttttatgtgaaattattttatcaattattttgattttttaaa

SEQ ID NO: 118512 - DNA, 201 bp, Homo sapiens
gtttttctttgctataagcattatcactgcatgtttggggttgtatggctttatatgtaatgggctttcattaaaaaatatttcacatgttcaccaaggamgttttaggccacaggtgtgctgtcttcaaaaggcaattccagatggaacaatagaattgtaacattagagttgtaagagaccttagaagtcattattctt

SEQ ID NO: 118513 - DNA, 201 bp, Homo sapiens
atgaagagtttggtagctgaacagaagaatacatgtcctacaaatattccttaagactccttatcaaggtcactatcgaatgcattatagtagaaagaaaygtcgtagctttacacagttgaaaacaaccataactatattgcactgaagctacataaataattattaagcagatggaaatttctgtgttacttctaaaaa

SEQ ID NO: 118514 - DNA, 201 bp, Homo sapiens
aggtggttggggtatagcttagttttatatattttagggaggaggcatgagacatcaatcaaatacatttaagaaatacattgatttggctcagaaaagcrggacaactcaaagaggggggcttccaggctataaataaatttgaacattttctggttggcagttggttgagtttatctgaagagctgagattaatggaaa

SEQ ID NO: 118515 - DNA, 201 bp, Homo sapiens
cagtgcagctcttcatgaaagccacgcacttccatcctttctgaaggtgcacatgtttttttgggggggtctttcttctttgttacaagatgggcagtcartgtccaagcccactgcattttggtagaaatacatgatacatgagttatagtacatataggcaagagctgggaattgaatatttggctcactctaaaaata

SEQ ID NO: 118516 - DNA, 201 bp, Homo sapiens
agtagaactggttagagaaggcaagaaaggggataaaaatcacagagggccctggtcactaaagtacactttaaagaatatgccaactgttcgtcatgtastagatactcataaatatgtgctgaattgaagacgtgcaagacgtgaactaattgttaaggcaagaattgaatacactaaacatatcattatataattgct

SEQ ID NO: 118517 - DNA, 201 bp, Homo sapiens
catttttttggtactaaaagtcattaaaatttggtgtgtacattaccttttacagtccatcttcattcaaccttgcccaagttcaagtcctcagtagcctyttgtggtcagggctgtataccggacagtgcagctcttcatgaaagccacgcacttccatcctttctgaaggtgcacatgtttttttgggggggtctttct

SEQ ID NO: 118518 - DNA, 201 bp, Homo sapiens
gaggtgtccaacctgcaagtcttgaagcattatggctgtgaagtttagcaaatgtattttcagtccctttgggtacaggacgccagtgtgaccctccaggyggggttcatggagcagtggcatgcggaggccagcactgttgcacgcaacatgctatcacctgctcatattcacacacagctctcctttctgctctggctg

SEQ ID NO: 118519 - DNA, 201 bp, Homo sapiens
aacccatagtaaattatctcagaaacattgttgagttccctgaactgtaaggtaagtaacttgccccatgctttaaatcttctgtagggaataagtcatgsctgtgccttgtgctttaagcactgtgctccatggcttggaactgtgaacattacctggcatgcttgctttagggaggtgagaatctgaagcacaatgtgc

SEQ ID NO: 118520 - DNA, 201 bp, Homo sapiens
ttcatgtattctaggtctatttactgagcatctacttcatcgcaggcactgtatgaggcactgaggatgtggtggtgaatgcaatgaagtcgctctgcccrtggagctgactcttttggccacaccctgtatcagggatacacagatgaattaaatccaggccttctctgtaaggtgttctggataaagagagagaaagga

SEQ ID NO: 118521 - DNA, 201 bp, Homo sapiens
gatgtgcaaaaattgggaacagaattggaagagaccttacaggtcatctcttccagtctctcacctgacagagaggtctgttctccagcacagaacatcarccagcctccgcttgcaccgtccagagacaggcaggcacctttctgggcagcgtgttccctgtggtgtggccttgttaaaaagcacttgcttattctgagt

SEQ ID NO: 118522 - DNA, 201 bp, Homo sapiens
cccaggtttctagcgtgggaaactgcatggaagatgatgtcattcactaaaagacaaagacggaggagcaaattcaggataaggaactatgattagtttakttttgaacagatcgagtttgtgttgtctgtgagtcaagtaagtggagatgttcagtaggctgtagaatgtgcagtctgaagatctgaaaggagctacgga

SEQ ID NO: 118523 - DNA, 201 bp, Homo sapiens
aattggaagagaccttacaggtcatctcttccagtctctcacctgacagagaggtctgttctccagcacagaacatcagccagcctccgcttgcaccgtcyagagacaggcaggcacctttctgggcagcgtgttccctgtggtgtggccttgttaaaaagcacttgcttattctgagtaagatgacataggtctgccctc

SEQ ID NO: 118524 - DNA, 201 bp, Homo sapiens
ctagatgctaatgatggatattaatcaaggagtgacatgagcatatttcaactgtaatatagagaataggttgaaatgcagagaacggactggcagcaagygtatcaatagggagaatgtcacaggactaaacagatgagtagtgatgcagtctaaacaaagacggtgatcatggggatggaaataactgggaaagtttga

SEQ ID NO: 118525 - DNA, 201 bp, Homo sapiens
tgactggggagatgattgtgaattcagtgttggacatgattaatgagagggcttgtgtggtatctggttagagtagtcatgtaggctgtttagaacatgtwtctcctgttctaaagctcaggagaaaattctggagtgggaaaaatcaggaactcaaaggcataaagaggcaaatgcaagccatgggaatggaggagaact

SEQ ID NO: 118526 - DNA, 201 bp, Homo sapiens
catagcccagtgctcttagtttatctacctctcagagggcccttatcatgagcagccagtcatctgcagtcataaagttaatgttaattttgctataacawcttcaaaaagaacttattttttaagtagtttatattacttcctgaagctttttaaataagaaatgcataatttattaagagagattaaattcaaactttc

SEQ ID NO: 118527 - DNA, 201 bp, Homo sapiens
ttgaacaaattaacttaaagtgtgaattgtagaattttgaaaaataaaatctaattattttcaagaacaattggtgattgtagtccagtctagtagtatgmacagaaacttgtggctaaaaaatgtgatcttgttcaagatcattgttttacatgggatcagagtagctgtgtgaactgcttcatactggcacagcaagtt

SEQ ID NO: 118528 - DNA, 201 bp, Homo sapiens
ttcaactgaagtagcacttttaatgctcctttgcattcacaacttggttaactgtttcatgcaagaggcctagctttcagactttctgagctttcagtgtrccttcctccccaagcttaatcatgtctagcttttggtttaaaatgagagacgtgcaactcttcctttcacttaaacacttagaagccattgtaaggttat

SEQ ID NO: 118529 - DNA, 201 bp, Homo sapiens
gggagaccgaggcaggagaattgtctgagctcgggagttcaagatcatcctgggcaacatggtgaaaccccgtatctactaaaaaaatacaaaaaaaaatyagccaggttttgcggtgggtgcctatagtcctagctactcaggaggctgaggtaggagaattgcttgaacctgggcgggtggaggttgtagcaatgagtc

SEQ ID NO: 118530 - DNA, 201 bp, Homo sapiens
gtttgggtagtattccatggcatactacattttctttatttactcgttgattgatggacatttgggctgattccatatttttgaaattgcaaattatcccrctataaacatgcatgagcaagtgtctttttcttataatgacttcttttcctctgagtagatactcagtgggattgctggatcaaatggtagatctacttt

SEQ ID NO: 118531 - DNA, 201 bp, Homo sapiens
gaatatttagatgctggggcagagtgtggctagaatacatatgtcccttttaccaagagaagagatcactgcaaagattattccagtactccaaaatgctkttttgccgtaaaaatgtggtttagcaagcaaaagaagtaagaaaaacagagatacgaaagggaatatattatgtagttattttgagtgtctttatttctt

SEQ ID NO: 118532 - DNA, 201 bp, Homo sapiens
gaccccttgcacttcccaggtgaggtgatgcctcaccctgctttggctcatgcatggtgtgctgcacccactgtcctgcacccactgtccggcactccccrgtgagatgaacccggtacctcagttggtaatgcagaaatcacccatcttctgcgtcgcttctgctgggagctgtagactggagctgttcctattcatcca

SEQ ID NO: 118533 - DNA, 201 bp, Homo sapiens
actggcagctctttgtgccagtctaattctaatggaagatgactgttcaaagcgggtggtgtaagcacctgtagtcattttctgttatgattggtagtagwaaaaaagcttccagaaatatccacgtgattgaaatgcatggatttaacactccttctgaccatctcagaacacctgaacccacaccaaaaacgtatgtag

SEQ ID NO: 118534 - DNA, 201 bp, Homo sapiens
atgcacagaaacttgtggctaaaaaatgtgatcttgttcaagatcattgttttacatgggatcagagtagctgtgtgaactgcttcatactggcacagcargttagtgacatgagtgacaagaagaggtgcccaaaccatagcccagtgctcttagtttatctacctctcagagggcccttatcatgagcagccagtcatc

SEQ ID NO: 118535 - DNA, 201 bp, Homo sapiens
cctactttttaccggtaacactagccatccttttcaaactcatcctgcagagggaatgagtcatcaacatttcgtcagccattgccaacttctggcatttytctacctgcttcagaacaccacagtttgttctaccaaagtaactgcactgagcatgtgcaccccagctttagagggagtatgataattagggatgctgtg

SEQ ID NO: 118536 - DNA, 201 bp, Homo sapiens
cttaaactactattttggatgtatgttctcattcgtggcagcccaaattccatcctgtctttaagacagttgaaaagcaaattcctccatcacaattttcrtgcactgcactgttccccaaaccccatccctagtggggaggatacagatatacaagaagaaaatttatatttaggctaatctggcaatgccaaagaagat

SEQ ID NO: 118537 - DNA, 201 bp, Homo sapiens
gtaactgtgatttgaaaaagacaggcctggaacccatgcacaattttaaagttatgcatggagtcaaagggagagaagggagacaaggggaataaagacayccttaacaattaggaagtgagtgtgttttcttcctctcctcatcctgaagctagagcttctaccaggcaggaaaaacaggttgttctttggggcattggt

SEQ ID NO: 118538 - DNA, 201 bp, Homo sapiens
tttttggggattcacttttgcttaaactactattttggatgtatgttctcattcgtggcagcccaaattccatcctgtctttaagacagttgaaaagcaarttcctccatcacaattttcgtgcactgcactgttccccaaaccccatccctagtggggaggatacagatatacaagaagaaaatttatatttaggctaat

SEQ ID NO: 118539 - DNA, 201 bp, Homo sapiens
atttgtgtattcactcattcattcttcagtggtttatagagtatcttttttggggattcacttttgcttaaactactattttggatgtatgttctcattcstggcagcccaaattccatcctgtctttaagacagttgaaaagcaaattcctccatcacaattttcgtgcactgcactgttccccaaaccccatccctagt

SEQ ID NO: 118540 - DNA, 201 bp, Homo sapiens
ttctctgtaaggtgttctggataaagagagagaaaggaaaatggcagtagaatattgtgtgggactgctttgacttctgaaggccaggaagggtttcctgyggaaatgagtttcaagtttacttctgaagggcaaagaggagtcaatcagtggttattctagacagagagagtgcagcttttaccaaggcacacaaaggtg

SEQ ID NO: 118541 - DNA, 201 bp, Homo sapiens
aactgtggatagaatacatctttgcagttgaataatgaagtgtagtgttgaaaatggaggagttgaggaggtaagtgtggatcaatagcagaaaggaagcrttgaattcttgctccaggtgaaagaatgaggaggaataactggtcctgctacaggtgcatcacattgctggagactcctcttggtggaggtacatcctca

SEQ ID NO: 118542 - DNA, 201 bp, Homo sapiens
ttattttgaaattaacctttaatttgaaccaatgtaaaacaatgattcaaactgaatctcaataatccttcacgtaccttaaactgtggatagaatacatmtttgcagttgaataatgaagtgtagtgttgaaaatggaggagttgaggaggtaagtgtggatcaatagcagaaaggaagcattgaattcttgctccaggt

SEQ ID NO: 118543 - DNA, 201 bp, Homo sapiens
actgacctggaggtattactgtaaaatctgacttttacgttattttgaaattaacctttaatttgaaccaatgtaaaacaatgattcaaactgaatctcartaatccttcacgtaccttaaactgtggatagaatacatctttgcagttgaataatgaagtgtagtgttgaaaatggaggagttgaggaggtaagtgtgga

SEQ ID NO: 118544 - DNA, 201 bp, Homo sapiens
tgatataaaatgctttgaaatactacgtacacacatacatatacatatttttagatgagacattgctgatataattctgaccttttcctgatatattgtakgtgtttctgaagattataataaaataaataaatgagaataatagatcataaaattaccaaattgatttcatttgaattatcatagttttctgaaaatatt

SEQ ID NO: 118545 - DNA, 201 bp, Homo sapiens
ggtaatttactagagaggaaagaaagttggtaaacaatttgattagagtcattgtaagaaggccaaggatccaggaggttctttctccccagaatacagarcaagggccgaaaggttggattgaagatgaagaagtatgaggaaggacctcagactcagggttgtaaaggtgagggatagggcaaaatttaagggggcacc

SEQ ID NO: 118546 - DNA, 201 bp, Homo sapiens
gatgatgctgtaggtggctgaaggaccacgcttgataaaccccggacttcataaatctttacaacccttctcatcttctaatgctatgaatctgtaatttyacctatacagaaatagccttagagcctaggtcaggatgggaaataggtttgctctcacatatcaaatttaaacaattagaatgcagtattgagaagaatt

SEQ ID NO: 118547 - DNA, 201 bp, Homo sapiens
agtgggttgcaatttaaagtagggtcattgtggttggccttattgaggtgacattggagtcaagacttggaagaagaaaggttgttggccacacagctatwgagggaaaaatgttccagatagaagaaacagtcagggcaatgccttgggatggaatcatgcatagagtattcacagaatagcaaggaagctctagttcta

SEQ ID NO: 118548 - DNA, 201 bp, Homo sapiens
tgggaacaagaacacagacaaggagctcagctttgaaagaggtactcaatgggacaggtggcatgtttgctttttgcttagttttttttctcatgccttgytcagagtcaggccaaaaataaatgtccagtacggattctattaatgaagaataaatgaaggaattaatgggcaaagagggacaatgttagtagaactatt

SEQ ID NO: 118549 - DNA, 201 bp, Homo sapiens
cctgacacatctggtcctgccaattaactctcatatttacagtgctctaggctccaaatgactttggaaacctccaaaggggacttttctgcccaagttawtcacatactcacttctagaagaagtgttggtagcatttgcagaaagcttttctcctcaggggaatatatttaacctggttttgaaggatgatcaagccac

SEQ ID NO: 118550 - DNA, 201 bp, Homo sapiens
tgattgcttagagaatttccaagtgataattcgggatgtaattaaggaaaagaaaccaatgttttctttcaccactttcataaaataatttcccagtgagkcatcagagcttctgtgggtaatgttacctggtagagcaaaattaactctccaaacacacagaactttggataggaaaagtcaaccagtccattggatttt

SEQ ID NO: 118551 - DNA, 201 bp, Homo sapiens
aaaaatagattcactttagtacaagttccactgattctcaagaaagaaattgaatgttcaataaataagtaattaaataagccgtttaagttaaatatgcyttataatgcatattgaagcttttaaacaatactaaaaatatgagagaattcttttttaattctgaatttcagggatctcaataattgtattaagtgtggt

SEQ ID NO: 118552 - DNA, 201 bp, Homo sapiens
ctcccaaagtgctgggattacaggtgtgagccaccacatccagacaaatttcattattaaaactgacatttgtgggcactgagaaccttgttctcctcctrcgcttgtgctctcctcctatttgtcagatggacaaatgcagtgctttttaaagcttccacatgtgggggacctatatctgcattctaggctgttggatcc

SEQ ID NO: 118553 - DNA, 201 bp, Homo sapiens
aggcctccagggctccacgtacacagcccagcatcctgatcttgctggcttgtttcagccttgtgactttgaggccatgattacactggtcttttcctttstatgtgtcttcattttcctatctggtcattttcttatactggttatttataataccttgggcaggccatgtaaccttgctgagtctcagcttccttgact

SEQ ID NO: 118554 - DNA, 201 bp, Homo sapiens
tgcggcaggagaatcgcttgaacccaggaggcgaaagttgcagtgagccgagatcacgccactgcactccagcctgggtgacagagcaagactccgtctcaaaaaaaaaaaaaaaaaaaatatttaaaaggtgttgtggtgaaaatgagaaagaaaataatgagggaaaatggggaattttttccaagagagttgaagatg

SEQ ID NO: 118555 - DNA, 201 bp, Homo sapiens
aagaataagcaaaactatggagaaatttgaaagtttaataaagtttttacatacccagtggcaaataggtaaacaccatagtaagaagtacctacaaccaraaaactcctttacgtatcaaagctcagtcagtgaattgtgacagttgttaaatctttacaggccacagatctttatagggtcctataaagatttcaagaa

SEQ ID NO: 118556 - DNA, 201 bp, Homo sapiens
ccactgccctcaccccacaacaggccccagtgtgtgatgttccccttcctgtgtccatgtgttctcattgttcaattcccacctatgagtgagaacatgcrgggtttggttttttgtccttgtgatactttgctgagaatgatggtttccagcttcatccatgtccctacaaaggacatgaactcatcattttttatggct

SEQ ID NO: 118557 - DNA, 201 bp, Homo sapiens
gcaggagatcatgcctttttcatgtttatgtctttggtgcatggcgcaatatccaatgaatgttgaatgagaaagaataatgaatcaatttccaaaacatyacctatgaattgagctttcacagagatataatcattaacattcttatgtttcacggggagacatgggtttaacctaaaaatatatcaacccccataacca

SEQ ID NO: 118558 - DNA, 201 bp, Homo sapiens
ctgtgcatgtggcaccccaaagctgagaagttcccgaggactctattttcccagtgaagcagggcaagtctttttttttatatatatactttaagttttawcgtacatatgcacaacgtgcaggtttgttacatatgtatacatgtgccatgttggtgtgctgcacccgttaactcgtcatttagcattaggtatatctcc

SEQ ID NO: 118559 - DNA, 201 bp, Homo sapiens
agtgcctaggtttgagctgagaggaagttcagtatttgaatgtcatacagcgcaagacaccattctccaacatggagaatggtaggaggtaaactagatgkggtgttgcagaagccaaaggaacagaaaggatttcaggaagggtggagtcatcaactctatttactgcttctgagaagccaagtaaggtgaagatttaaa

SEQ ID NO: 118560 - DNA, 201 bp, Homo sapiens
ggaggagaactctcagagagagcttgtagaaagaaaagaagaatgagtgcctaggtttgagctgagaggaagttcagtatttgaatgtcatacagcgcaaracaccattctccaacatggagaatggtaggaggtaaactagatgtggtgttgcagaagccaaaggaacagaaaggatttcaggaagggtggagtcatcaa

SEQ ID NO: 118561 - DNA, 201 bp, Homo sapiens
ttccagttagaatttaaataacaacagtgatactaaggacatgggtctcctatcatgggggcaggaggagggttttgtgagtgtcagtttgagaactaaaygagctaatacatggaaagggtttagaacagcgagtgctagtgatgacagacactgatgttgtcaccaaaactctttaacatgactatagatttctaagta

SEQ ID NO: 118562 - DNA, 201 bp, Homo sapiens
aaactgttcaaataatcaaagaagattttcttgcttggaaaatagtgtgaactggatgattctacctcagttctgagtgtgattccttttgccaggttgatttttttttttttgaagaacattttttctccagttttaaaggccctcaaaagtagagtggattacattcaactttctaattagaagcaagaaaaaaaactt

SEQ ID NO: 118563 - DNA, 201 bp, Homo sapiens
agaataaatctaattcattatactatgcacaaggatctgtattttggattctcaagttctaatgtatctcatcaatatgtatctcaacagtgatttttttaaaaaaaataagttttatttagacataattcacatgccacaaaattcacccatttaaagtgcacaattcaatggcttttagtgtattcacagagtattgca

SEQ ID NO: 118564 - DNA, 201 bp, Homo sapiens
tggccatgctgaggaagcactcagggctactgaagacaattctgctcttgcccacagtggatggtcaactctgcccagctacttaaaacttctcacttcargctatctgctctctggttttgggatattcagatgccccggtcaatctaccactggctctcctagcaacttttttcaggtagccattaacccctctgatgt

SEQ ID NO: 118565 - DNA, 201 bp, Homo sapiens
gctacttaaaacttctcacttcaggctatctgctctctggttttgggatattcagatgccccggtcaatctaccactggctctcctagcaacttttttcargtagccattaacccctctgatgtcttgaaaaagccgtaagtggtactaagcagagttcattcctttgtggtcagcagtactgtgcaaggagggcccaata

SEQ ID NO: 118566 - DNA, 201 bp, Homo sapiens
tataagtcagaacatgcagtgttttgttttctgtccttgtgttagtttgccaaggataatgacctccagctctatctgtgtccctgcaaaggacatgatcycattcttttttgtggctgaatagtattccacagtgtaaatgtaccacattttcttcatccagtctatcattgattggcatttaggttgattctatttctt

SEQ ID NO: 118567 - DNA, 201 bp, Homo sapiens
ctggatgcttagcaatggtgcaaacatatagatggctcactccaactgcaatagaataattctttctgagatacacaattcattggtgcaggacatcagtrtaaactagaggcaacagctgtcctcccaaaaatggcacattaacattttggattttgaaataggaaagtattgataattctggagaataattgtattagt

SEQ ID NO: 118568 - DNA, 201 bp, Homo sapiens
tgacttcatttatgcttagttgttttcagtgttctagaacttccatctgctaagacagatgaggtagagaacatcagtaaatggggacacacacataaagwaatcagccatggtaaaatattttattttgtgttaggatttggtccatgtatatcccaaagtatgttgttaagaagaggaaacaaatctcttagtaaataa

SEQ ID NO: 118569 - DNA, 201 bp, Homo sapiens
cttagttgttttcagtgttctagaacttccatctgctaagacagatgaggtagagaacatcagtaaatggggacacacacataaagaaatcagccatggtraaatattttattttgtgttaggatttggtccatgtatatcccaaagtatgttgttaagaagaggaaacaaatctcttagtaaataatccaaatgtttatg

SEQ ID NO: 118570 - DNA, 201 bp, Homo sapiens
tacaatgtagtaagtggtgggacaaataaatatataggttgccatggtgatacagaggagaggcactttccactgaggggaggggtgggcagctgagctgrgtcttaatggatggctgggatctgtccaggtgggaacacaccatttgggccaaactgtaactgcccaaggggttcaccttgccagctgcctagacagagc

SEQ ID NO: 118571 - DNA, 201 bp, Homo sapiens
tcataaccccgttacccgacccccatagttccctacatgcttcaggtccatttggattcaagtgggctttgtgcaccgaccttgggacccaatcacttttygtaatctggcttttgggcacagatggccactgtgttccaaagcactctcgacccatgctttctggtatccatgtagagtaaaagccaagactcccggaac

SEQ ID NO: 118572 - DNA, 201 bp, Homo sapiens
tcccagatggggcacgtgttccctgcactttgtgtttaggcctgagttccttgctggaggaaaacctacttgttcatcagaatttaatcagcagtgacataaaatatgctgggtgagggacacttttggaggctcacaggttgggagacaagagtcagggaatagaggaatggctgcctgagggtaaaggcacagactctc

SEQ ID NO: 118573 - DNA, 201 bp, Homo sapiens
ctttcatctcatcttgctaacatttttttttttattatactttaagttttagggtacatacaaagatgtttgtggcaatgaaattgatagcaaacttgackattcatacagcgtttagagattccttcttttttaattctattaactgagatgaacccaatctgctgaagccattcattgggagatctcgggacctggtct

SEQ ID NO: 118574 - DNA, 201 bp, Homo sapiens
acaaagtatgcctatatgtgaatgaattaatattaatgttgaatgaatattattagctccaaaacccatccgtggtacacttgtctaattgcttcaaaacygattagttggctttcagatagaaagagccaattcctcccccaaccccctgtctttaacaaggctctcatggttcttgcttgtagaatctttcatccaggt

SEQ ID NO: 118575 - DNA, 201 bp, Homo sapiens
tgcaggggagctcaggcccagtggcaacgcatggactaatttacagcccctcccttcctggctctctcaggtcagtaggcttggccaccaaagggaacackgtgtgtgtgtgtgtgtgtgtgtgtgtgtatgcatgtgagtgtgtgcctgtgtgtgtgtgtgtgtgcttcttttgaggaggctgaggatgctttgaggttg

SEQ ID NO: 118576 - DNA, 201 bp, Homo sapiens
aagccttcaaggtgtacaaagtacaatatctgcaaagggcaatgacgtgaagcacagtaaaacaaagtatgcctatatgtgaatgaattaatattaatgtygaatgaatattattagctccaaaacccatccgtggtacacttgtctaattgcttcaaaactgattagttggctttcagatagaaagagccaattcctccc

SEQ ID NO: 118577 - DNA, 201 bp, Homo sapiens
taaggaaatgttgcggctggtttgatcatctattcagacctctaaaactttctccatatcagcaataaggttgttgcactttcttagcatttgtgtgttcaactgaagtagcacttttaatgctcctttgcattcacaacttggttaactgtttcatgcaagaggcctagctttcagactttctgagctttcagtgtgcct

SEQ ID NO: 118578 - DNA, 201 bp, Homo sapiens
gagctcttgggtaaccaggagcactgtcaataagcactaatattttgaaagggatctttttttctgagcagtaagtctcgtcagtagacttaaaatactckgtaaaccgtgctataaacagatatactgtcattcaagcttcattgttctatttatagtgcacagggagagtagatttaacataattcttaaaggtcctag

SEQ ID NO: 118579 - DNA, 201 bp, Homo sapiens; identical to SEQ ID NO: 20234

SEQ ID NO: 118580 - DNA, 201 bp, Homo sapiens
cccgggtgaggcatctcatatacccgcagggagcagctcgctgctgaaccatttcctccgccagccagactccctcggctttcatctcatcttgctaacatttttttttttattatactttaagttttagggtacatacaaagatgtttgtggcaatgaaattgatagcaaacttgacgattcatacagcgtttagagatt

SEQ ID NO: 118581 - DNA, 201 bp, Homo sapiens
ccttcctctgccctatcccagcaataagtgagtccatgagtccattttgctttcaaaggttcagcttggtatataaggttggactgtttgaatggattgadagttacagtagaaataaatttttttgagacacttgtactgatttgcttcttgatttcttaattttatcctttctacagtacatacatatcttgaaaggag

SEQ ID NO: 118582 - DNA, 201 bp, Homo sapiens
cctctttgtttcctggaggcccctccctggtgcaaaatcatctgcatttcaacctgagctcagtctgatatcccagccatataagtaaaagtactaaaaaraaaaaaaaaaaaaaaaggtagttactatgtgctatttcagcctcattcagctcatggacttaccaaataaacattcatgtctcagcactgaaagagaaac

SEQ ID NO: 118583 - DNA, 201 bp, Homo sapiens
ctggaagtccactccagaccctgtttgcctgggtatcagcagcggtggctgcagaacagcggatattggtgaaccgcaaatgctgctgcctgatcattccyctggaagttttgtctcagaggagtacccggccgtgtgacgtgtcagtcctcccctactggagggtgcctccccgttaggctactcaggggtcagggaccc

SEQ ID NO: 118584 - DNA, 201 bp, Homo sapiens
attctctcttgtgtaaaataagaagtttgaactatgtaattcctgagatacctgccagctctaatggctcatgaatgtgaagcttattcagcctgatcctrtggatgggaagggacttaaaaattcactttatggtctcctaattcactagacttttcaaagtaatctctttttgcactctcccactccacatttttcaaa

SEQ ID NO: 118585 - DNA, 201 bp, Homo sapiens
acagtgtaaatctcattcatctggacccagacacatggacaaaagctcagaacagtgagcaatgggaaacactatcccgtgagggctcatgccagtctctscctgcttgggttcaacatggcaaccgaggcataggcagtgcctgggctacctgagcataaactggccttgcctgggcattggacctcagcagagagctaa

SEQ ID NO: 118586 - DNA, 201 bp, Homo sapiens
tgcttctttctaagctgcaggcttgcacttggtcataagcccagtttgccatgaatgccccagtgctggagaagaaaaactgagcataaagggacacatcrgttttttttctggatttcactcagttaaaaggaaaaaaaggttaaaattggtcaagtaattttactttttagggtctcaattgtatcaagtggaaacaga

SEQ ID NO: 118587 - DNA, 201 bp, Homo sapiens
tatgttgtcttttatccctcgcccccctcctactcttccccccaagtccccaaagtccattgtattcttacatctttgcatccttatagcttagctcaccyatcggtgagaacataagatgtgaaacctgattttttaagactaaaatccccttcagccactattctcaatctcagtctcaatcccatttcctcccaaatg

SEQ ID NO: 118588 - DNA, 201 bp, Homo sapiens; identical to SEQ ID NO: 20235

SEQ ID NO: 118589 - DNA, 201 bp, Homo sapiens
ccaacacatatgctcacactaaattaaaacaaacaaacaaacaaacaaaaaacagctttgggaacagaggattgagaacccatcttcactattgaggtctgagtatgcccagaagagaggccacccaaacagagtattagagaaagagcaatagaatgttagaatataactcaagtgatcaagacactatgaggctgggtg

SEQ ID NO: 118590 - DNA, 201 bp, Homo sapiens
tctaaaggtaaaaaactttattcaaacacatcaaaataatcaactgttccatagattctcccctccttgtcatcaaaaatgcctgggcaactgctcatggsatcacagagcttccaggatgttagcagaactgtagtattccaggggccttagagcagcatcttccacgggtgccggtaaatgctccatgctgtttgcttt

SEQ ID NO: 118591 - DNA, 201 bp, Homo sapiens
atagattctaagaggtagagggtccagcctcctccttctgcattcctccattccacaagacccccagaagggaaggtcacctttaatggcactctttgtcyttcaaaaactggacatgttgggtggaggggtacaaatgttttctctaaacaccagggctgatatttcgctccagcatgtttcatatacaaaccctctgaa

SEQ ID NO: 118592 - DNA, 201 bp, Homo sapiens
aagatggataaaatcaatgctgaggacctattcagaaggacagtgatgccagagctagttattcattgaactcattctgtgagaaatgtcagccaatcttwggtaagtatgagtaatgcgaatttgcagaggatggaaagatgagacttacttcaattcagcaactatttattcaacttaccatgtgccagaattgttagc

SEQ ID NO: 118593 - DNA, 201 bp, Homo sapiens
gagagcctgtaagccttcgttacctaacgcaatgaagaattcagattcccctcactcctcaggctgcatgagcttctgtgccaagtagaaggtcatgtaaytgtgatttgaaaaagacaggcctggaacccatgcacaattttaaagttatgcatggagtcaaagggagagaagggagacaaggggaataaagacatcctt

SEQ ID NO: 118594 - DNA, 201 bp, Homo sapiens
cttgctaacatttttttttttattatactttaagttttagggtacatacaaagatgtttgtggcaatgaaattgatagcaaacttgacgattcatacagcrtttagagattccttcttttttaattctattaactgagatgaacccaatctgctgaagccattcattgggagatctcgggacctggtcttataagactagc

SEQ ID NO: 118595 - DNA, 201 bp, Homo sapiens
gattactcatcaagattgccagtgaaaatgtaaaatagtgtcatctttctggaaagcaatttggtagtttctttaaaaaactgaaaaaaaactgtacatgrgattaccatacagaccagaaattacactctcgggcatttatctcagataaataaaaacctatattcacaaaaaagcctatacacaaatgttcacagcacc

SEQ ID NO: 118596 - DNA, 201 bp, Homo sapiens
gtgtgctgttctcctccatgtgtccatgtgttctcagcatttagctcccatgtagaagtgagaacatgtggtatttggttttctgtttgtgttagtttgckggggataatggcctccagctccatccatgtccctgcaaaagacatgatcttgttctttttatgtctgtgtagtattccatagtgtatatgtaccacattt

SEQ ID NO: 118597 - DNA, 201 bp, Homo sapiens
cttcctaaattggcatgacatatgccatagaagacctacttctgattcttatggccaaataccttcatccttatgttctgtaaatacccctcctagatccygcatggaagaattgagatgtcataatgacacggtgagccatctgatcttgggggtgggtggcaggctgagaatgcccggattaaattcaaatttctgagc

SEQ ID NO: 118598 - DNA, 201 bp, Homo sapiens
ctagggtaatcctacaacaccttttcctgacacccagggtgcctgacactagggaatagctctgagtattcaggagggactgataatgtgagggattcccygccacctcccacactctgcagggtttctaactcctagatctcagatgcttccaggtcctttagagagcattgcaatggggtagagcaggggtaatttccc

SEQ ID NO: 118599 - DNA, 201 bp, Homo sapiens; identical to SEQ ID NO: 20233

SEQ ID NO: 118600 - DNA, 201 bp, Homo sapiens
aatagtttcaggaggagaagacactttctagtcaagaagcaatatgactcatcaatgggaaaacttggctcagactcagagcttccaattacaagctcatyccaaaggcatctgaagccagtcactcagcccctgagtggttagatgtttcaaaatatccatggagcttctgaaagactgcaagtgggtttcttggcggag

SEQ ID NO: 118601 - DNA, 201 bp, Homo sapiens
tctgtatttgccgagcctccccgcctttcccccgctctttcgatgccatggctgcggcgtttcagcacttcggtatgtggacagctcccatctgcaatccstctgcactccatccctcccgcaccgcaccccgctccccgccgcctccgcggtccatcctcctcccggcgcccgctcagcctgcgcccccttacacatcag

SEQ ID NO: 118602 - DNA, 201 bp, Homo sapiens
gtgatgatcaatttttcttttgagtttgagaatgagtaaacataaactgaagagaaggacagttattacaaccataaaagcaaacaatattgagtgcttastgaggcagtaatgctcttacgtaagcactactaatagccatattttgcagatgatgaaattgaggctcagagaggttaggtgatctgtccaaggtcatac

SEQ ID NO: 118603 - DNA, 201 bp, Homo sapiens
tcttactggaaacatggtagattttactttctgatcccctggaagccaggcatgagtttgacctttaaaatacggcagatgaagcatgtcactttcggagmcagctttaagagcttaggtatgattcttccatgtggttttcctgggctatgtcaagcagcactgctccagatggaggaggctgcatctctggctgcaggc

SEQ ID NO: 118604 - DNA, 201 bp, Homo sapiens
aggatgtgagtagaactggttagagaaggcaagaaaggggataaaaatcacagagggccctggtcactaaagtacactttaaagaatatgccaactgttcktcatgtagtagatactcataaatatgtgctgaattgaagacgtgcaagacgtgaactaattgttaaggcaagaattgaatacactaaacatatcattata

SEQ ID NO: 118605 - DNA, 201 bp, Homo sapiens
ctcagtagtttgagacaacaaagtataaaccgaaaagtgaccgaggcagatctcaatcaattcagaggtttattctgcccaggttgaggatgtaggttgargaaaaagaaacacaagccgcagtaggatctgtgtcctgtgctttttccaaagagagttttgaggacttcaaaatttaaagaggaaagagcaagtaggagg

SEQ ID NO: 118606 - DNA, 201 bp, Homo sapiens
ccatatgcagcagattctcaaaggagcagctggcccggtgtctctctcctttctggtgtgggagccacacacagttctcccacactgaggtcagggctgamaaacacgccgagggaccccccaaccttcccctgccccctggctctggctcagctgtcacacctctgccccggggaggctcttcctctcagcctctgcccc

SEQ ID NO: 118607 - DNA, 201 bp, Homo sapiens
tgtagctaagttaaaagcacaaacagtagaattttagcatgagctgctgttttctctggaaccatttctatcctatttgctttcctttgtttttaactatsaatgtaagcttcccttttcataacaaaaattactcaaatacttgtactgatttacatttactaggaagccagtgcactttttttaagttgtgcccttaaa

SEQ ID NO: 118608 - DNA, 201 bp, Homo sapiens
ctgcatttccaactgaagtactaggttcatctcactggggcttgtcagacagtgggtgcagcccacagagtagagtggggcatcacctcacccaggaagcrcaaggggtcagaggattccctttcccagcaaagggaagacgtgacagatcgtacctggaaaatctggaaactcctaccctaatactacgcttttccaacg

SEQ ID NO: 118609 - DNA, 201 bp, Homo sapiens
actgacatgatgctcaaagtatatgctcattggagaatttaggattttggatttccagattaggaatgctgaaccagtatgtaatgtaaatattccaaaayttgaaaagatttgaaatctgcaacacttcaggtcccaagcattttggctaaggaatactcgacctgtactactactcaaatttatcaataaatgtttgtt

SEQ ID NO: 118610 - DNA, 201 bp, Homo sapiens
tttcccagtctgtggcatcagaactaggtacttatttctttagtgcctcatgtaatcctgatattcatatgaagttcccactgctttaacattagcagagkttagtgacactaaaaattaaagcattccttaagccaggccatgtagagaattatttaatttacagaacacttccaactaatgatgctcattagcttactc

SEQ ID NO: 118611 - DNA, 201 bp, Homo sapiens
tcttggatctcatgcaagaaagaattcaggggaagtccatagagtaaagtgaaagcaagtttattaagaaagtaaaggaataaaagaatgtctacaccatrgaaagagcagctctgagggctgctggttgcccattcttacggttatttcttgattatatgctaagcaaggggtagattattcatgcctccgctttttaga

SEQ ID NO: 118612 - DNA, 201 bp, Homo sapiens
cgggtgatttgcatgcatattaaagtttgagaagccctgccctaacacatggtattatagtagaacgtgatggatatcaactttaagcaccgcagatgccmctggagggttagttacaacccacagtgctgaccccactcccagagtttctgattccatagatctagagcagagcccaagaatttacacttcacacacact

SEQ ID NO: 118613 - DNA, 201 bp, Homo sapiens
atcttaggcaaaacaacagtgatttttatggtgaggtggaaggaacactcgatgttttagctaaacgcttctgtggcctttggtatacccaggaactgtgkgttggtaataaacctgtcaacatctccactttctatttgtgttgccttctatacatcatatgacttctcagtcccttagttttttagatggaaaaaacta

SEQ ID NO: 118614 - DNA, 201 bp, Homo sapiens
cctctcactgtttcttaaggtaattaataaaagtgcatgctattgctaatctgatcaagcactattacgttaactagtcaatggaactgaaacgttcccaracatatttcaaatatttgcatgttagattttcaagttgtctataatcaacttttgctcaatactccattttaaggataatttatcatttgttctttggac

SEQ ID NO: 118615 - DNA, 201 bp, Homo sapiens
aacatggtgaaacgccatctctactgaaaatacaaaaattagctgggcatggtggcgggcacctgtaatcccagctacccttgggaggctgaggcaggagratcacttgaacccaggaggcagaggttgcagtgagccgagatcgcaccactgcattccagcctgggcaacaagaatgaaagtccatctcaaaaacaaaca

SEQ ID NO: 118616 - DNA, 201 bp, Homo sapiens
ccaacatggtgaaacgccatctctactgaaaatacaaaaattagctgggcatggtggcgggcacctgtaatcccagctacccttgggaggctgaggcaggwgaatcacttgaacccaggaggcagaggttgcagtgagccgagatcgcaccactgcattccagcctgggcaacaagaatgaaagtccatctcaaaaacaaa

SEQ ID NO: 118617 - DNA, 201 bp, Homo sapiens
tgcccaacatggtgaaacgccatctctactgaaaatacaaaaattagctgggcatggtggcgggcacctgtaatcccagctacccttgggaggctgaggcrggagaatcacttgaacccaggaggcagaggttgcagtgagccgagatcgcaccactgcattccagcctgggcaacaagaatgaaagtccatctcaaaaac

SEQ ID NO: 118618 - DNA, 201 bp, Homo sapiens
gtcttggacaaaacgtgggtaaagtaggtttgagtgcaaatctttgttctttcagccatatctaaatctcagattcatcttttcatctaatagtaataacytacctttaaggattgctgtggaaattagactatataatatcaaagaccttggcatctaataagtactccatgaatatttgttggttttccaactttaaaa

SEQ ID NO: 118619 - DNA, 201 bp, Homo sapiens
ttttttacctaatgaatcaggtgctaacacctgttacctaacaaagccaaataaaagcaaagacaattttctcccttaccccctccattaccactcttctrctataggcaatacacattctattactaatgtatattcttctaccctttctccatactcatacaaacatagataaataaatatggtggaatttcattttta

SEQ ID NO: 118620 - DNA, 201 bp, Homo sapiens
ccagagcatttcatgttgctttggtacactgccctaaatcctaataagttgcaatgtgcttgttctacagaaaggatacagctgccaggggcagaaatctygctctcaaccagaagatctggaagggagcccggctctgcctgctactgcccctgtcacctgagcagatactggctttcccccaggttcagtttcttcaac

SEQ ID NO: 118621 - DNA, 201 bp, Homo sapiens
tcagacttctggtatgaagaatttgcctttaatggaaaatatctatgttatcctaagttatgaaacccagtgaccctggcttaagcattctccccagaagyttctactgtgtgctgagcacagaataaagatatagattgaagcaaatttatttcacatattatagattggaggcatagctatatgtggaagcaggccatg

SEQ ID NO: 118622 - DNA, 201 bp, Homo sapiens
gtttttttctttgaatgtgatacaaagcagaaattgaaccacgtaaaagtttaattttgctccacctgttggactttctggtgttctggcaagactgcttsaagtgccaaagttttctggctgcttacctgcccaactacaggtgcactgaatttctttgaccactgtgggatgtcaccactataaaatcactcctctttt

SEQ ID NO: 118623 - DNA, 201 bp, Homo sapiens
attgtatcattattcaacaccatggttactattattgtttgttattacttgcaatgaaagcctgtgcaaatttatcaaggtgttttacctgtgtctttgcycactatgaagccttgcacccgactcccctttgtgggttcatttcccttcctactgaagtaagggactgtagctagtaaactctcttaacaacctgtgtat

SEQ ID NO: 118624 - DNA, 201 bp, Homo sapiens
cacacatacacacacacagtaactatgtgaggatgtgaacatgttaggtaacttgattgtggtaatcatttcacaatgtatacgtatatcaaattatcatstgtacacctttaatatgtacaactttgtcaattttacctcaataagagaaataacctatgtttgcagctgagtagtgttctatagaacattgaaggccca

SEQ ID NO: 118625 - DNA, 201 bp, Homo sapiens
gctatgtgtgggctgactgggggttcccagacaacacttggactagagctaagaggaatcctagccacctgcagatgtggagacatgtgcttacatgacawggttatgggacttgtaaaagaagaaaataaataacaatcttcctgttttgcttaatttatggaatttgagaattatacatctatttgcaatagtgatatt

SEQ ID NO: 118626 - DNA, 201 bp, Homo sapiens
tgttttaagtctttgttacaacaaaggtacccatttgggtctgttgtgtacttttgaatagcaagctacatcaaaacttagtggcttaaaataacagtggytcattatttctcatgattatgtgacttgagtgcctggttctttcctgacttttggtgggttcactcattcgattgcatttaggtgtagagtcagctgtta

SEQ ID NO: 118627 - DNA, 201 bp, Homo sapiens
gatgttttacagtatctcctgcagtgtagctactgttaagtggcagtgataaataataaccactggctctgattgcttagagaatttccaagtgataattygggatgtaattaaggaaaagaaaccaatgttttctttcaccactttcataaaataatttcccagtgaggcatcagagcttctgtgggtaatgttacctgg

SEQ ID NO: 118628 - DNA, 201 bp, Homo sapiens
aatttgttcctagcagacctacccttaaaagccggcaaagaaatttctttaaatggaaagtaaaagatagaagaaagaatcttgaaatatcaggaagaagraacaagaggaagagtagaaacatgtgcatataataaactatcttttatctcatgagttttataaatcatatttgatgattgaaacacaaattctaacacc

SEQ ID NO: 118629 - DNA, 201 bp, Homo sapiens
ccggcaaagaaatttctttaaatggaaagtaaaagatagaagaaagaatcttgaaatatcaggaagaaggaacaagaggaagagtagaaacatgtgcatayaataaactatcttttatctcatgagttttataaatcatatttgatgattgaaacacaaattctaacaccatctgctattcaagacagtgatatttaaaag

SEQ ID NO: 118630 - DNA, 201 bp, Homo sapiens
aggatataaggaaactggattactcatcaagattgccagtgaaaatgtaaaatagtgtcatctttctggaaagcaatttggtagtttctttaaaaaactgaaaaaaaactgtacatgggattaccatacagaccagaaattacactctcgggcatttatctcagataaataaaaacctatattcacaaaaaagcctataca

SEQ ID NO: 118631 - DNA, 201 bp, Homo sapiens
ccctcttcccccaccccacaacagtccccagagcctgatgttccctttcctgtgtccatgtgttctcattgttcaattcccacctatgagtgagaatatgmggtgtttgcttcttgttcttgtgatagtttactgagaatgatgatttccaatttcatccatgtccctacaaaggacatgaagtcatcattttttatggct

SEQ ID NO: 118632 - DNA, 201 bp, Homo sapiens
tatatatatatatatatatatatatatatcctgaagtatacattgtggaatagccaaattgagctaattaacatgggacttggtagtgcaagtatttcttwgacatactgatttcatatcctttggctatatactcagaggtgggattgctgaatcatatgatagttctatttttaattttttaaggaccctacctactgt

SEQ ID NO: 118633 - DNA, 201 bp, Homo sapiens
cagctaccgttatcatagctaacattttgaatattaatgacaagctctgctaagcataaatatatattacctcatttaacccacctgagaactttgcatgrtagatattagtactatgacccctcttttacctttgatgacataaggcttttagaagttaaggagctcactcatgttacacaactagtgaatacggagtgg

SEQ ID NO: 118634 - DNA, 201 bp, Homo sapiens
cattaacattcttatgtttcacggggagacatgggtttaacctaaaaatatatcaacccccataaccattaaaaggaatttctaaagtgcctcttcacttmctcatgtcactactcttcctcttcaagatgataacagtgtagggcaacttggtaatcactggctgttttgtggttgataatttggggtggggctgtctaa

SEQ ID NO: 118635 - DNA, 201 bp, Homo sapiens
gattatctcaatagatgcagaaaaggctccgacaaaattcaacaaccttcatgctgaaaactctcaataaattaggtattgatgggagtatctcaaaatawgagctatttatgaaaaacccacagccaatatcatactgaatggacaagaactggaagcattccctttgaaaactggcacaagacagggatgccctctctc

SEQ ID NO: 118636 - DNA, 201 bp, Homo sapiens
ctgagtgtatgataataaaggcattcccaagttgctatgaaattctgagaatggaatgcataacgtgagagttggtgtgattagaattaagaaagtctccrtggctgaagttggatatgccaggggattttcaacaataaataggttattaaagatgaagaagacagaaaagggcactgcagcttcacttggaatttaccg

SEQ ID NO: 118637 - DNA, 201 bp, Homo sapiens
acattgcttcactgatgagacagatttttaggtcttatgattcattcatctttatcattcactcaacattcagtgagtatagactttgtgccagagcttgwcttagggcactgaggacagcgatgagaacatacaatccctgccggttaggaccccattgttcagctggatgcttagcaatggtgcaaacatatagatggc

SEQ ID NO: 118638 - DNA, 201 bp, Homo sapiens
ggcaggccgggcagaaaaactgcaactgattacaaacagcatgcagtttatatagtattttcccttaacaccctccccttaacaacctccatctggcaacyttcatgtaacccaaaactcaaggcttcaattccttgtatggcttgtgtttcatgggatggactgggggctcaggtgttcctcatagacaaggaacaaatc

SEQ ID NO: 118639 - DNA, 201 bp, Homo sapiens
cagatttttaggtcttatgattcattcatctttatcattcactcaacattcagtgagtatagactttgtgccagagcttgtcttagggcactgaggacagygatgagaacatacaatccctgccggttaggaccccattgttcagctggatgcttagcaatggtgcaaacatatagatggctcactccaactgcaatagaa

SEQ ID NO: 118640 - DNA, 201 bp, Homo sapiens
gacctcagaaaataggttgaattatgtcagaagctctgtataggtatctactgtggctataagaagggattactggtaggggtggggctgggaggcattcyatggcattcaagaatcttccttacttgtgcacagctcacgtgctctcaggtatgctggcagtgcatcttgtaacaaccggagatggggcagcctcctgct

SEQ ID NO: 118641 - DNA, 201 bp, Homo sapiens
aacaccttgagtttctcagatgttcttttatctagctgatagcatctactgggcaccatctaaaagctttctgaagttttaacaaagtccagcaaccatakctgtgatttgatgtttgtgttaggaccatctcatacatcgataattgtttgctatcaggagaaactgactatatgaaagagttttattttccaacccaac

SEQ ID NO: 118642 - DNA, 201 bp, Homo sapiens
accctcatcccttcctataacatactgtgagggtggaggtgggccaagtactccgtgctggaaaccgggaaaaaggcccaaggggcagggaagccttcacygagacagggtgaaggccagggctggccagtggatggaggcctggcctcttcctagcagtgatcatcttaacacacattagcaaatatttcttcagcattc

SEQ ID NO: 118643 - DNA, 201 bp, Homo sapiens
cccaaggtcaaacagctaagggagtgtggcagggcgggggtctagattctgatttgggtgacatcaggaactgacttgttctaccacatcatgcagaggamtagaaaacatcttctttatagatctcattctaaaatgacaataaagaaaacaaagattacagaaagtggtttgcctaagactatacaaatggttagtgga

SEQ ID NO: 118644 - DNA, 201 bp, Homo sapiens
tagagtaaatttcttataggcaagggcctataagaaatcttaggtatcttttattcacaaggcctggaacccactcggtaaattgatggacagacagatgkatgaatgttgagatttatgccatgttttaattaagcatacataaattaataaaaatactgacacaattctaaaattcttagcagccataaaaagcaagag

SEQ ID NO: 118645 - DNA, 201 bp, Homo sapiens
aaagaatggtaaaatgggagaaggaggtctaagaaggatgatgtaatcaacatcaaatattgagaaagctcacctacagtagctgctcacagcacagtagrtgctaaagtttgtttattggatgtagtaacaaaaatgatatctattagtagagtgaccatctgtctgagtttgcttggaacctgttgttctagtatcgtt

SEQ ID NO: 118646 - DNA, 201 bp, Homo sapiens
atggttagtctttagggttctttctactttctaaggatctgggattctatgagaagtaactcagaaaggcaatgctgcttagctttctggtgacacattaytacaaattactattactataacaaattaagggcatagtttggagacattttgaatcagtatagataaaacttctgtcccttcttaatttcataggcagat

SEQ ID NO: 118647 - DNA, 201 bp, Homo sapiens
caaaaggcctggaaaggctgacacagctttgcaaggaaatgacttcattctcaccaggggcctgagatgactgggaagtcatttgaatatctcatgtgaarggtttactaagattaaaatggttatgaatatttattaagacagtgtaaatctcattcatctggacccagacacatggacaaaagctcagaacagtgagca

SEQ ID NO: 118648 - DNA, 201 bp, Homo sapiens
ctccctctcatacaaaaataccattacctaattttctggctcactggaaaaggtgtggattggagtgaaaggaggtatcctccaccttggccttgccggaraatgtttgtgaattactctccatgcatttgaaatggtgtcaaatacagaatcatttgggactaaaccacattgcagggagatggcctctgaggcttacat

SEQ ID NO: 118649 - DNA, 201 bp, Homo sapiens
attagtagagtgaccatctgtctgagtttgcttggaacctgttgttctagtatcgttattattaacaccttgtagtgcataagtttggataataagttaawtcatcatccgtgtcattgatcagtgtgaatagtttcagcagcatgtcacagatagattgcaatgagtgtagggaagaactggagaaggaagacattgggt

SEQ ID NO: 118650 - DNA, 201 bp, Homo sapiens
agtgtaaccaccccttgaatggtgtacattgcacccaataggtaatttcttgcttcccctccccctcccacactcccaccttatggagtctccaatgtctrttattccacattccatatccatgtgtacatattatttagctcccatttataagagagaacatgtaatatttgactttctgttcctaaaatatcaaatttt

SEQ ID NO: 118651 - DNA, 201 bp, Homo sapiens
caatcaatccttcaaagagaatgacaagatctgttatctttgatctgtcatttctgccaaaggaaaatacctaaaggaagagcaaaaattagtgaatgctrgaaaaggcagagacagctagattttgaacagcaccagtcatcttccaatgaaggaaggaggaaaagatggcaactggacatctgtaaggcagagtattag

SEQ ID NO: 118652 - DNA, 201 bp, Homo sapiens
aaaataaatgcctctaagtttatttatatttagtgtgtcttctgattttggaaacttccaggttagaccaaacagatgtctgcaagagtttaagcatttayatttaaaataagatggaaacagtatgggtgttcctctgtataccattttggtggagaaatcataaaggatgtatctgaggggattaaaatatcattatca

SEQ ID NO: 118653 - DNA, 201 bp, Homo sapiens
atacttagcaggtaagcgtggaatagtaagtgaagatgcaagaagtgcttacagacagtggagagaatacagacaaagacagagacacagctcagtaggaragagaaacagaattaatttaatttttttggaatgcacaggcaccaggcaaggagcttgtttgcccctgcaccatgctaaggagtttgttctcttcctgca

SEQ ID NO: 118654 - DNA, 201 bp, Homo sapiens
gattgatcatattgtgattagtaattttgacagtcagattgggcagatgcatttcaagttagcaatattaatatattcacaccaattctgcagtccatacrtcagatatgcagacatcctgactcgtggtgtattcatccaacataaaatatgggtcagctagtcttctaaacaggagtacagcagggaaaaaagccaacc

SEQ ID NO: 118655 - DNA, 201 bp, Homo sapiens
gtggctcatgcctataatcctagcactttgggaggccgaagtgggcagatcacctgaggtcaggagttcaagaccagcctggccaacatggtgaaactccrtctctactaaaatacaaaaattagccggtcatgatggagggtgctcgtaatcccagctactctggaggctgaaatgggagaattgcttgaacccgggaga

SEQ ID NO: 118656 - DNA, 201 bp, Homo sapiens
gatatacatgactgtgatcctgccaccatggccacaattttcatatttatactgctttggtccctccagtacccagatactcacagatagggacaagggcrgggacattgacaagggtcaccagctctacaacatcatagtgggggagggaaacatgggtcgtactttcttccctcaactctgcagtggtctacatggttg

SEQ ID NO: 118657 - DNA, 201 bp, Homo sapiens
aatttgattattggaggtcaagttttcagccataggcctgtccccacccccactcttcacacatactggtggaggactcctgtgagtcatgaacactggcrgggttaaaataggggaagtattttatagttaagatgcaaatggctggctttaagaaagtgggggaagggttatttctgtgaaagatacttctgtttgaga

SEQ ID NO: 118658 - DNA, 201 bp, Homo sapiens
tatttcattacccaggtagtgagcataatactcaataggtagttttttgttcctcgccctccttctaccctccaactttaagtaggtcctggtgtctattrttcccttctttgtgtctatgtgtactcagtgtttagctcctacttataagtgagaatgtgaggtatttgattttttgttcctacgttagtttgcttaaaa

SEQ ID NO: 118659 - DNA, 201 bp, Homo sapiens
ggatcttctagaagaaccatatattctgtctttggtgttctcatctttaataagaaaacaaaaatggagttagtagatggcttaatatcaagtattttcartgcataaaataatttcttggatcctctccatgacttgaattacctctatttctcctgagtgccagacatttctatccaaatccctgctagacatttctcc

SEQ ID NO: 118660 - DNA, 201 bp, Homo sapiens
tgtatcaagtggaaacagatatctggcatatggggctgttgcaagaattaatcacaattgccctttttggtggtgtccaaaggccaaatagaaaagtgatkaagtgcacaaactctgaaccccgatggccagcttccaatcctggctcctcctaacctgccatggggtcttgagcaagttgcttaaatccttattaccctc

SEQ ID NO: 118661 - DNA, 201 bp, Homo sapiens
ccaccaatctactctctatcttcatgagattcacatttttacctcctgcatgtgagtgagaacatgaaatatttgtctttctgtgcctgaattatttcacrtaacataatggccttcagttccatccatgttgctgcaaaggacagaattcattctttttatggctgaataatattttgttgtatgtatataaactctatt

SEQ ID NO: 118662 - DNA, 201 bp, Homo sapiens
atcttcatttgaacttgaactaaaacccatttttaccaaagtggtgtcagtcctttgtattttcatttttagactttttgagctattaaagataaggcttygtctttgagcaaggatgtattggggagggggagagataaagtaacctatctttctgtttaccttttagtaccttccttgtcttccttccatacttactct

SEQ ID NO: 118663 - DNA, 201 bp, Homo sapiens
tcctttgaaagtagaaataggacattctaatttataactttaagcataggcataacactgagtttctaccaggcatttagtatattcttagtggcttgcatttttttttttttttttttatgagacagaggctggctgcaactcccaggctggagtgcaatggcgcgatctcagctcactgcaaccttcacctcctgggtt

SEQ ID NO: 118664 - DNA, 201 bp, Homo sapiens
tggctgcaactcccaggctggagtgcaatggcgcgatctcagctcactgcaaccttcacctcctgggttcaagcgattctcctgcctcagcctcccaagtrgctgggattacaggtgcccgccaccacgcccagctaatttttgtatttttagtcgagacggggtttcaccatgttggccaggctggtctcaatctcctga

SEQ ID NO: 118665 - DNA, 201 bp, Homo sapiens
aaaacaaaaacaaaaacaaaaaaacccaagaattgttagccctttatagcccaaagacaaaattccactgtacagttcctttttttttttttttttttttwaatttcaataggtttttggggaacaagtggtgtttggctacatgaataagttctttagtggtgatttctgagattttggtgcacccatcacccgagcagt

SEQ ID NO: 118666 - DNA, 201 bp, Homo sapiens
aaaagcttatataatcaagtctgttaaactgcctttgctatagcaagtctttatcccaaatgttatataaaactcactagtgttttcttctagacttagattttttttttttttgtattttaacattttagtctatctggaatttatatttgaagagatgtgaggaagaaatctaagttaactatttctctatgtattttg

SEQ ID NO: 118667 - DNA, 201 bp, Homo sapiens
actccaagtacagcagcaatagcacaggaatctctcactacatgaatacatgagtatggaattattgcaagaagctggtgtctccgtttccaaaggatatrtggcaaaatcaccagatgaagcttatgcaattgccaaaaaagtaggtacagaagaaagaaataacatgtgcaggataaactgtaactatgagtactgctg

SEQ ID NO: 118668 - DNA, 201 bp, Homo sapiens
tacatgagtatggaattattgcaagaagctggtgtctccgtttccaaaggatatgtggcaaaatcaccagatgaagcttatgcaattgccaaaaaagtagrtacagaagaaagaaataacatgtgcaggataaactgtaactatgagtactgctggcaagttctctgggactcacaagtagtaagaagcaggttcaaaaga

SEQ ID NO: 118669 - DNA, 201 bp, Homo sapiens
aaattaaaaaaaaaataattaattaactgagacctgtctcagattttcgaggttcacaaacccatggcataggtactatttttatcctcattttatagatragaaaactgaggcattaagtggttaagttacctgcctagagccacacagctagaatctgaaccccaaatggcagactagaatctgaaccccaaaaatcta

SEQ ID NO: 118670 - DNA, 201 bp, Homo sapiens
tatttcctctccttcattgccactccagtctctctcacactgattttaaaatctaaaaaaattccaggggcctgtgcggctgcaggcggtaccaagggaaygggtctcactcggaaatggcagcctccatgttctacagccagctgttggccgcagctacccttcggggccaccttctctggacagccctgcgggccactg

SEQ ID NO: 118671 - DNA, 201 bp, Homo sapiens
gaacccaagaagatgaaaatgacaaagacgctgctaaggcagatctcaactacattggcctgaaaggaaatacagactgtctagtaaatggtgctggtttggccatggcctcaatagatataataaaacttcaggggccaggagtggtggctcatgcctgtaatcccaacactttgggaggccgaggcgggcagatacctg

SEQ ID NO: 118672 - DNA, 201 bp, Homo sapiens
gagcctgggtcagagttcctcctgtctgcccaaggcctctagcctgccttgtcctcactcccccaacccccttagctggctcctggcttggcctgtggccrcaatcctggctgctcatcagaatgacccctgtgctgtgaagagggcccagaggtgtttaaaatgctccaccacaattccggcacacagccagggtgagaa

SEQ ID NO: 118673 - DNA, 201 bp, Homo sapiens; identical to SEQ ID NO: 20238

SEQ ID NO: 118674 - DNA, 201 bp, Homo sapiens
aagggaacgggtctcactcggaaatggcagcctccatgttctacagccagctgttggccgcagctacccttcggggccaccttctctggacagccctgcgsgccactgctcaggctctaggaagttatggattgttgaataaccatggactccaagtacagcagcaatagcacaggaatctctcactacatgaatacatga

SEQ ID NO: 118675 - DNA, 201 bp, Homo sapiens
tcctggcttggcctgtggccacaatcctggctgctcatcagaatgacccctgtgctgtgaagagggcccagaggtgtttaaaatgctccaccacaattccrgcacacagccagggtgagaagtgccacaaggtccttgcctgtccaacatgtgagagcagatcctgcagctgctggcagccttgcgacagaggacgcagga

SEQ ID NO: 118676 - DNA, 201 bp, Homo sapiens
ggggcctgggtcagattcttgcctctgcggcttacaagctgcatgaccttgggcagactgtttcactctcaggacctcagttttggcatttctaaaatggratgatagcatgcgccccaccgtgttgcagtgaggatagaatgcagccactcgcccagggccatggctcagtgcccggcacgcagtaagcacgcagcaagc

SEQ ID NO: 118677 - DNA, 201 bp, Homo sapiens
tcacttgaacccaggaggcggaggttgcagtgagccaagatcgcaccactgcactccagcctgggcaacagagtgagactccatctaaaaaaaaaaaaaaagcgtgttgcacctccccttctctctcttcctcctgctcaggccatctaaaatctgcctacttccccttcaccttctgccttgattgtaagtttcctgagg

SEQ ID NO: 118678 - DNA, 201 bp, Homo sapiens
gtgtcaataagtgtttgtagaaattaatgtaatttgtaagtaatgagaatgttcttagaggcagaaaaataatgcagtgctctctgctctgtactgatttwaaaaaaaaaaatcttcctatccccaattcttctagcgctggttctttaggcgtacagcctcaacataagtaaacagcagagcgggactggtttcagaatg

SEQ ID NO: 118679 - DNA, 201 bp, Homo sapiens
aggggaaggaaaggagccaagggatggacgtcttgtcattttttttctttgaataaatatcattttttgaggcaaaagaaaaaaaagtaggcaaaggacaygaacagacactttccaaaagaagacatacatgcagccaacaagcatatgaaaaaaagactcagtatcactgatcattagaaaaatgcaagtcaaaaccac

SEQ ID NO: 118680 - DNA, 201 bp, Homo sapiens
attgagaaggaatgcagaaatgtataggcatgcatgtgcacccctcacccccctacacacgcacacatgtacacacatacacacacacacacacacacacatacacagaaacccatcctgtgggtcagtttggcttcctgggcaatctgatgttatccaaccacctgacaaagcaaagcagccaacaggtaagaggtgtct

SEQ ID NO: 118681 - DNA, 201 bp, Homo sapiens
gctgcctggcgagagctggcggcttcatcagaatgtttatggaggggaattaatcaggaaactcggtggagtcgcctgtggtggggaagactgaggaaggyggcggagcttgggagggagggtgttccatctgagtaatcaatgctggaaattattctgtgaatatcaatggtctaaacatggcgtcaaggctggagggca

SEQ ID NO: 118682 - DNA, 201 bp, Homo sapiens
ctaaaatgggatgatagcatgcgccccaccgtgttgcagtgaggatagaatgcagccactcgcccagggccatggctcagtgcccggcacgcagtaagcaygcagcaagctcttggtgacagttaccatcacagtggcattcgtgggaagtggggataggggcttgtatgcgggcaggaaggaggggaaactggccctgag

SEQ ID NO: 118683 - DNA, 201 bp, Homo sapiens; identical to SEQ ID NO: 20244

SEQ ID NO: 118684 - DNA, 201 bp, Homo sapiens
aattgagaaggaatgcagaaatgtataggcatgcatgtgcacccctcacccccctacacacgcacacatgtacacacatacacacacacacacacacacacatacacagaaacccatcctgtgggtcagtttggcttcctgggcaatctgatgttatccaaccacctgacaaagcaaagcagccaacaggtaagaggtgtc

SEQ ID NO: 118685 - DNA, 201 bp, Homo sapiens
cctggcgagagctggcggcttcatcagaatgtttatggaggggaattaatcaggaaactcggtggagtcgcctgtggtggggaagactgaggaaggcggcrgagcttgggagggagggtgttccatctgagtaatcaatgctggaaattattctgtgaatatcaatggtctaaacatggcgtcaaggctggagggcaccag

SEQ ID NO: 118686 - DNA, 201 bp, Homo sapiens
gacccggaagcttgcattaaggaaaaagcatttgtgtcccaggcctctggacctgctggtcagcactatgaacctgagcaccgtggcctgtgccctccacygccgtgcacgctcactgagttcctggtgggtgctggtagccagggctgccaagctgcacaagtccaaggggggccattcacacagaagctgaggtggaag

SEQ ID NO: 118687 - DNA, 201 bp, Homo sapiens; identical to SEQ ID NO: 20245

SEQ ID NO: 118688 - DNA, 201 bp, Homo sapiens
ccagaaataaggctgtacacttaggaccatctgatctttgacaaagctgacaaaaacaagcaatggggaaaagactccctattcaataaatggtgcttggwtaactgggtagccatatgcagaagattgaaactggaccccttcctcacaccatacacaaaaatcaaatcaagatggaataaccacttaaatgtaaaaccc

SEQ ID NO: 118689 - DNA, 201 bp, Homo sapiens
aagacatttagaatcaaactcagggattttgagcctttttataactttccaagttcctctaccctctctgacctctgtgcataatcattattgtttattgrgccttactgagagccaggcatggtgccattctctcagtaaatcctgacaatccatgtttggagtagacatcattattctgaagttacaaatgtggaataa

SEQ ID NO: 118690 - DNA, 201 bp, Homo sapiens
tgggaggggggggtctcagagcagaggggctgctacttggtacaggccaagatgagaccagttgaaaccaagaagctgcccagagggacctctctggggaytggagggggaaagaacttgaccaggcctttcataaatctttcttcccatccctgttcatcccaatcttgcaattccaagagctccccagaaagcccctgc

SEQ ID NO: 118691 - DNA, 201 bp, Homo sapiens
ccggaggtgctcgtggaaggtgtaagcactggtcagcccacaggtcctcggggctcccgtgaagtgacaggtcagcagtctccaccaggcttcccgccagrcttgcccccttctctttgtcatgtttcttctcccctccctcctccgactcaggtgtgtgtgtccccctccgactcaggcgttacgtagagttcaggctca

SEQ ID NO: 118692 - DNA, 201 bp, Homo sapiens
gctacagtggtggatctgtgtcattagacatttgtccagatgcacagggtgcccaacatcaggagagaactctatgtaaactgcagacaccgggtggcaaygatgtgtcaacagaggttcatccattgtaactgatgtcccgctctgatgggggatgttaatagaggggaggcagtgcaggtgcaggggtatatgagagta

SEQ ID NO: 118693 - DNA, 201 bp, Homo sapiens
cctggataggaaataaatatcattaaaatggtcatactgcccaaagcaatttacagattcaatgctattcctatcaaactaccaatgacagtattcacagmactagaaaaaaaactactttaaaattcatatggaaggaaaaaagagcctgaacagccaaggaaatcctaagcaaaaagagcaaagctggagacatcatat

SEQ ID NO: 118694 - DNA, 201 bp, Homo sapiens
atgtttatggaggggaattaatcaggaaactcggtggagtcgcctgtggtggggaagactgaggaaggcggcggagcttgggagggagggtgttccatctsagtaatcaatgctggaaattattctgtgaatatcaatggtctaaacatggcgtcaaggctggagggcaccagaaaacaagaaagggcagactgattgagt

SEQ ID NO: 118695 - DNA, 201 bp, Homo sapiens
ccgggggagtggggtggtattttgtgcccctcaccagctttcccttggatgtgcctcagtttccctctttatgctctttccaaggccagctattttatggyataaccttgcgggcaaggtaggagtcgtgctgaaaccagagagctctgacccctgcctcagtcatctgaagtgtttttaggccagtgaaactctgtatga

SEQ ID NO: 118696 - DNA, 201 bp, Homo sapiens
taatctgtgtttaaagggatagactgtcatttcccttccccagggctgccgggccactggagcgcctgcaaactgcaggccctctgcctgccctgtcattktcggtagctggagggacccagtcctaaccagaacagggagggagacctggaaacagcaatgggaggtcagggccgggggagtggggtggtattttgtgcc

SEQ ID NO: 118697 - DNA, 201 bp, Homo sapiens
agaggtccttctttctcgcaggaagcacatggggacgttgactcttccctcacagcagggagaagaggaagccactacaccagagatcaaaattctctccrgcaacaggagcctggaatcaaggcagacgctgggggcgcatttccactcaatcatgccctttgttctctagcagaccgggggaaaccgcggcagaatcaa

SEQ ID NO: 118698 - DNA, 201 bp, Homo sapiens
attttttgtagagacgaggtttcaccttgttgcccaggctggtctcaaacttctgggctcaagcaattctcctgccttggcctcccaaaatgctgagactrcaggtgtgagccactgtgccctggcgtatggtgcattttctagataactgaaggtacctccttgaaggaatgaaatataagtggctggaagaggaagaag

SEQ ID NO: 118699 - DNA, 201 bp, Homo sapiens
cttaaccctctcaacagatgggaacacggagacccagaggggttcattgacctgcccaaggtcacctagcaaaccagtggcaccatgagcgcttgagctckcgtgactctgctccagtcggtggtagcatagcccctgcgtgccgccgtgtcctgcaaatctgagaatcccttcctcttccacctgttctttttgacacct

SEQ ID NO: 118700 - DNA, 201 bp, Homo sapiens
accctgcgtggccccagaggtttcacaagttaagtgggtcccccagcacagagttagttcatccatccccaccccaccccctgcgcccgggcagcctccarggtacttctcagctgcaaagagtattttcagctcagaccatacagccctaggctaatttgaaaatgaggctcctagcgggatcccaaataccagggatga

SEQ ID NO: 118701 - DNA, 201 bp, Homo sapiens
gagagatgccgatgtttccctcatgagggaattagtgtttggtgactgcaataatgtgaaaacaaaagtgcttcctccagtctggcagtgattgtctgacsaataaccttttgtgcaggcctcacctctcactctctgcctccctttccactgcttctttcctttctggactcagaattcctgaaggagtgggacaggctt

SEQ ID NO: 118702 - DNA, 201 bp, Homo sapiens
tatttatgcctgtctctattaaatctacagagattcataaacgcaatgtctaacatgcccgtcactcgctgtcagctgtgctgagctcccggaggtgctcrtggaaggtgtaagcactggtcagcccacaggtcctcggggctcccgtgaagtgacaggtcagcagtctccaccaggcttcccgccaggcttgcccccttc

SEQ ID NO: 118703 - DNA, 201 bp, Homo sapiens
agaatgtgtgttgccattatgggtcactgctatgaatcagatggactgctggttaagaactagaccctgaggtcaggcagacctttgcttgaaccctagcyctcatgcatgtatggctttaggcaagttacctcgtccctctgagcctcctattataatggtggtaatcataggatctgctttcacagagttaccatgggt

SEQ ID NO: 118704 - DNA, 201 bp, Homo sapiens
atacctccattgtacatgtgtgtatctgtatgtatgcacatgtgtgtatggtatgaaaagacccccccaaccctggcctcactcctccagagagtccttcycacacccaccccaagctgagtcgggggctcctccttcacgctcccccagtgagcatctcttcctgcacctgctggctcgaacccacctgtccagctgctc

SEQ ID NO: 118705 - DNA, 201 bp, Homo sapiens
aagcaaaaattggcaagtaggatctaattaagcttaagagcttctgcacaacaaaacaaactaacaacagagtaaacaggcaacccacagaatgggaaaamctatttgcaaactatgtatctgacaaaggtctgatatccaacatctataaggaacttaaacaaatttacaagggaaaagcaaccccattaaaaagtgggc

SEQ ID NO: 118706 - DNA, 201 bp, Homo sapiens
gaccccacctccagactgcccagcactcccaccttccccaaagcctctttatttttttcccccacctgcctgtggttttctcacccccaggcctggagtgycctctctctggcccctctctgtttcgtggataaccccaattcatgctccaggactccattcagcaccagtggaatagctacaatcccaaagaccaacatc

SEQ ID NO: 118707 - DNA, 201 bp, Homo sapiens; identical to SEQ ID NO: 20246

SEQ ID NO: 118708 - DNA, 201 bp, Homo sapiens
aaaaaaaaaaaaaaaaagccgcaagtctaaaatcaaggcgttggcaagcaggttcctcctggaggcactgagggaggatccgttccagcctctgctctccrgtggctggggtgtgtctcaactcatgattgcacccctcccatctctagctctgtctccccgctgctgtcttcccttagtgtctctgtttcttcttttttg

SEQ ID NO: 118709 - DNA, 201 bp, Homo sapiens
ccggaggttgcagtgagccaagatcatgtcagtgcactccagcctgggtgacagagtgagattctctctcaaaaaaaaaaaaaaaaaaaaaaaagccgcamgtctaaaatcaaggcgttggcaagcaggttcctcctggaggcactgagggaggatccgttccagcctctgctctccggtggctggggtgtgtctcaactc

SEQ ID NO: 118710 - DNA, 201 bp, Homo sapiens
agataactgaaggtacctccttgaaggaatgaaatataagtggctggaagaggaagaagagggagaaaatcaagtctctctgaaatgcaccgcttatgttytcagttatcagtttcatggtgcagcctttgacctgatgcattcctgctctgggctgtgaggtgcttctactgttttgggctctctctgtttttttgtgtg

SEQ ID NO: 118711 - DNA, 201 bp, Homo sapiens
caaagtactgtgattataggcatgagccactgcgcctgacctctctggtttggtgtcacatccctttcctcacagtctgaccattggtaccacttctcccrggggaagggacttggctctcggagtgtcacctctgctgttccgctactgcacatcctatgactggtcaccagaaggccaggtgggaaacgtgtacagtcc

SEQ ID NO: 118712 - DNA, 201 bp, Homo sapiens
cttgagccccggaggttgcagtgagccaagatcatgtcagtgcactccagcctgggtgacagagtgagattctctctcaaaaaaaaaaaaaaaaaaaaaaaagccgcaagtctaaaatcaaggcgttggcaagcaggttcctcctggaggcactgagggaggatccgttccagcctctgctctccggtggctggggtgtgt

SEQ ID NO: 118713 - DNA, 201 bp, Homo sapiens
taatcataggatctgctttcacagagttaccatgggttttcagtgagataaagcacaggaagtgcagcacagccccaacacagccttagtgctcattcacrgtggctgatgccactgctgctgatgttgatattcatgcagaattcaggcttggctctgctggaaggaggtaaaagaagcaagaactgggtcccctgagag

SEQ ID NO: 118714 - DNA, 201 bp, Homo sapiens
ggtcccctgagagctcacaactgagtggggagaaagagagcacttatggagaatatcttgaaaagcagcgcttgctaaacttggctccaagttcagtaggyggtcagaggagcaagaaggcagagtgggctgaagtggtcaagggaggcttcctggaagaggagaatctggagacaggctctaaaggatgggtcagatgag

SEQ ID NO: 118715 - DNA, 201 bp, Homo sapiens
gcagagaggttccagacaagaggaatgagggtgggtgcacatcacaaatttggagacacaagattgatttgacttttgccataatgatggcattggggccrggtgcagtggctcatacctgtaatctcagcatcttgagaggccaaggcaggaggactgcttgagcccaggggttcatgactagccaggaaaacataagga

SEQ ID NO: 118716 - DNA, 201 bp, Homo sapiens
atacacacacacacatgcacgcacacacacagatccaggggaaaattgattttcacttattttccccaccatgcacccatgttccagcaaccttgtgattmtatcatgcttctacccttgttccttgtcagcattgatatatttccaattgagaaggaatgcagaaatgtataggcatgcatgtgcacccctcacccccct

SEQ ID NO: 118717 - DNA, 201 bp, Homo sapiens
ctgccaggagctgccagacccccgtcccccacattccctggggatgcctccatggtcatctgggcccaacaggagcgtggctggagtgtggcctgctccaraggccaccagctgaccctcagccaccccacctctccctgccctccctctgggggtcagcagccatccatggccacctcacacactctcatgtgttctggt

SEQ ID NO: 118718 - DNA, 201 bp, Homo sapiens
atggctccatccaaggccttctaggggaaaccattagcctccagaaggtaggatggaacaattgctggaatcagccaccttgatctcaagaacaactcacygtgtggtcagctcattcattcagcagttattatactggggatataacagtgaaaaagacctacctgaaccttgctctcattcacccaaagacctctgttc

SEQ ID NO: 118719 - DNA, 201 bp, Homo sapiens
gcacttagggtgacacacactgtctatccctcagcctcggtctcctggtctccaccccaaaaccaaacctcacacccatcttattttttttttttttttttgagacagagtctcactctgtcacgcaggctggagtgcagtgacacaatcacagctcatttcagccttggcttcctgggctcaggcaattctcccacctta

SEQ ID NO: 118720 - DNA, 201 bp, Homo sapiens
tctccttacctaagaatgacaccggaaatgctggcatcagaaatgagaaactgtaggaaaatacaaagaaagaagaaaaatcacctgaatcccaccatccyaaggcacctgctggtgatattccagagcacgccttcctgccgtccttccaggcacctgttcatgaatggccttgtgggtacagttttacctgcccacagg

SEQ ID NO: 118721 - DNA, 201 bp, Homo sapiens
gggctcccgtgaagtgacaggtcagcagtctccaccaggcttcccgccaggcttgcccccttctctttgtcatgtttcttctcccctccctcctccgactmaggtgtgtgtgtccccctccgactcaggcgttacgtagagttcaggctcagaaatgagacagttgtgttcgatttctgactctgctttgtgaccttgagc

SEQ ID NO: 118722 - DNA, 201 bp, Homo sapiens
cctgaggctgagatgtttactgaatggacaaatgaggaaatgattgccacatctttatatttacagctgtagctgcagcccagatacctgtttgtatctayaaactccatttcgacctcctatttatgcctgtctctattaaatctacagagattcataaacgcaatgtctaacatgcccgtcactcgctgtcagctgtgc

SEQ ID NO: 118723 - DNA, 201 bp, Homo sapiens
gagactaaaaagaaaacagatgcatggagaaaagaattgtgtgaagacaggtagagattggagccatgcagccaaaagccaagcaagactagggattgccygaagccaggagaggcacgaaatagattctctctgagcctccagagggacccaaccctcccaacaccttgattttgaactctgggcctccagaactgtgag

SEQ ID NO: 118724 - DNA, 201 bp, Homo sapiens
gggatcacatgagcctaggaagttgaggctacagtgagcggtgatcgtgccactgcactccagcctgagtgagagcaagagtctgtcaaaaaaaaaaaaaatagaatgagttaacaaattgtggtagttatgtatagttcatgtgatggaatactacacagcaatgaaaaaaggatggcattcggagcatgttggtgggag

SEQ ID NO: 118725 - DNA, 201 bp, Homo sapiens
gtttgtagaaattaatgtaatttgtaagtaatgagaatgttcttagaggcagaaaaataatgcagtgctctctgctctgtactgattttaaaaaaaaaaawcttcctatccccaattcttctagcgctggttctttaggcgtacagcctcaacataagtaaacagcagagcgggactggtttcagaatgtgtgttgccatt

SEQ ID NO: 118726 - DNA, 201 bp, Homo sapiens
attgacctgcccaaggtcacctagcaaaccagtggcaccatgagcgcttgagctcgcgtgactctgctccagtcggtggtagcatagcccctgcgtgccgmcgtgtcctgcaaatctgagaatcccttcctcttccacctgttctttttgacacctctggagctgccagatcgggaggcaaaatgaaaagtgggtctgaga

SEQ ID NO: 118727 - DNA, 201 bp, Homo sapiens
tggaaggtggggctgggttggaggggcctgggtcagattcttgcctctgcggcttacaagctgcatgaccttgggcagactgtttcactctcaggacctcwgttttggcatttctaaaatgggatgatagcatgcgccccaccgtgttgcagtgaggatagaatgcagccactcgcccagggccatggctcagtgcccggc

SEQ ID NO: 118728 - DNA, 201 bp, Homo sapiens
tacaaaaatcagccgggcatggtggcacatgcctgtaatcccagctacttgggaggctaacgcgggaggattgcttgagccccggaggttgcagtgagccragatcatgtcagtgcactccagcctgggtgacagagtgagattctctctcaaaaaaaaaaaaaaaaaaaaaaaagccgcaagtctaaaatcaaggcgttg

SEQ ID NO: 118729 - DNA, 201 bp, Homo sapiens
aaattcatatggaaggaaaaaagagcctgaacagccaaggaaatcctaagcaaaaagagcaaagctggagacatcatattacccaacttcaaagtatactrcagggctacactaaccaaaacagcatggtaccagtacaaaatcaggcacatagaccaatggagcagaatagagagcccagaaataaggctgtacacttag

SEQ ID NO: 118730 - DNA, 201 bp, Homo sapiens
tcagtgcccggcacgcagtaagcacgcagcaagctcttggtgacagttaccatcacagtggcattcgtgggaagtggggataggggcttgtatgcgggcargaaggaggggaaactggccctgagtggagtaccatgaaggagctggcatttggactgggctcaggaggacccggaagcttgcattaaggaaaaagcattt

SEQ ID NO: 118731 - DNA, 201 bp, Homo sapiens
agcattctgggaggccgaggcaggcagatcacttgaggctgggagttcaagaccaacctgggcaacatgtgagacctcaaataaaaaatattttaaaatargctgaccgtgatggctcacacctgtaatcccagcactttgtgagtccaaagtgggcaggtcaccagatgtcaggaattcgtgatcaccctggccaacatg

SEQ ID NO: 118732 - DNA, 201 bp, Homo sapiens
acctcacacactctcatgtgttctggtgtctcctgctcctacctcgtaaaaacctctctttatgctgggcatgatggctcacacctgtaatcccagcattytgggaggccgaggcaggcagatcacttgaggctgggagttcaagaccaacctgggcaacatgtgagacctcaaataaaaaatattttaaaataggctgac

SEQ ID NO: 118733 - DNA, 201 bp, Homo sapiens
ccctctgggggtcagcagccatccatggccacctcacacactctcatgtgttctggtgtctcctgctcctacctcgtaaaaacctctctttatgctgggcrtgatggctcacacctgtaatcccagcattctgggaggccgaggcaggcagatcacttgaggctgggagttcaagaccaacctgggcaacatgtgagacct

SEQ ID NO: 118734 - DNA, 201 bp, Homo sapiens
aaccagtcaagcagattcccactaagctagtttgggttttttaattggctagaggcctagaatccaactggcagggatggagcagacagatgggatcctayatgaagctcctgactcattcaacttagaaagggaagaaaaccttattagtcagtttcaaagggctgcgacttcgcaggaaggcttctctggcccagccag

SEQ ID NO: 118735 - DNA, 201 bp, Homo sapiens
gcacctggggagccagtcagtgggcagctgcactatcccagtgcccccaactcactcgttattgctaaaatagctgctgttgagggcacagggatgttgcrgcagccacggaagcaggctgtgatgtaatgattgcactgaaactacacacccccctgcaaggcggtgctgtggctatcaacacttgacaagtcagcccag

SEQ ID NO: 118736 - DNA, 201 bp, Homo sapiens
cactcatggaagtgggctatagaggacctctctggttgccactaaaatccattgtgtccaaggtctcctggaccccctgggtgcctttgccagagaagtgwctccgaagaagtgaaggtaggcacctggggagccagtcagtgggcagctgcactatcccagtgcccccaactcactcgttattgctaaaatagctgctgt

SEQ ID NO: 118737 - DNA, 201 bp, Homo sapiens
actcagaattcctgaaggagtgggacaggcttccgctgagcacaggcactgaaaggacagctgccctcaccagtggttgtgcttcagcaccacggacagcwccccagacactcgccacacccttaggctcaaagtgccagtgacttccagggccccataaaagcacctgctaacccacccccaggagctggctgctgctct

SEQ ID NO: 118738 - DNA, 201 bp, Homo sapiens
ctacacagcaatgaaaaaaggatggcattcggagcatgttggtgggagagatgccgatgtttccctcatgagggaattagtgtttggtgactgcaataatktgaaaacaaaagtgcttcctccagtctggcagtgattgtctgacgaataaccttttgtgcaggcctcacctctcactctctgcctccctttccactgctt

SEQ ID NO: 118739 - DNA, 201 bp, Homo sapiens
gtttgctagggctgccataacaaaagatgacagattgagtggtttaaacaacagaaatttatttcttgcagctctggaagctggaagtccaagatcaaggygtcagcgggtttggtttctcctctctccttggcttggagacggccacctccttgctgtgtcttcacgtggcctttcctctgttatgttggcacctctgct

SEQ ID NO: 118740 - DNA, 201 bp, Homo sapiens
caaggctgcagtgagctatgatcacaccactgcactacagcctgggtgacaaagtgagaccctgtctctaaaaacatttaaaagagtaaaagtaaaaaagrgtcaatgcccttacaaaagagatttctagagcatctagtcaaattttatatatctatgtctgagcatactgaagaataagtgaaatgttatatgaaactg

SEQ ID NO: 118741 - DNA, 201 bp, Homo sapiens
ataagactgccataaactttcttgtgcaagtctttttgttgacatgtatttttatttcttttgtataaatacctgggattataattgttagattacagccrgatgtataaatttgtaagaaaatgacaagcagatttccaaatgtaacattttgcactcctaccacaaatgtatgagttttagttgctccacatcttcctc

SEQ ID NO: 118742 - DNA, 201 bp, Homo sapiens
tgacaaattcataagtgcacaatacattaatgttgcacagcagatctctaaaacttattcatcttgcataacggaaactgtacactcattagaacatgaaggtttttttaagaaattctactttgaaataactttagacttacagtaaagttgcaaaaattgtagtttctatatacacttcacccagtttattgaaatatt

SEQ ID NO: 118743 - DNA, 201 bp, Homo sapiens
tggcatgatctcggctcactgcaacctctgcccccaggtttctagagattctcctccctcagcctcctgtgtagctgcgactacaggtgcatgtgcatgcttttttttttttttttcagatggaatctcctgtcccccaggctggagagcagtagcgcaacctcggctcactgcaaccttcgcctcctgggttcaagcaat

SEQ ID NO: 118744 - DNA, 201 bp, Homo sapiens
gtctttctgaagcgtgggctttcagcagctcatttcaggctatcccagctacctcttcagaggcccgaggcacctccttcctcacagggaaagctgcctgmgaggcggccggcaaccgcctctttccccgtctaccagctgcgtagccttgggcaaggcccctccgtgcagcacttcgtcccaattccacggctgaaaaag

SEQ ID NO: 118745 - DNA, 201 bp, Homo sapiens
tgaaaaactattgtgagcaaatcattcaacatgtgaaagcactttcagaactggaaagcaccgtacaaacataaggcaatagtataacaatacgacaaatyttggtaagcattcatgcactttacatttcaggtactgaagcattcctttacaatgttattgccattattcatttaactttcctttcacggctgccacgga

SEQ ID NO: 118746 - DNA, 201 bp, Homo sapiens
ggcatgatctcggctcactgcaacctctgcccccaggtttctagagattctcctccctcagcctcctgtgtagctgcgactacaggtgcatgtgcatgcttttttttttttttttcagatggaatctcctgtcccccaggctggagagcagtagcgcaacctcggctcactgcaaccttcgcctcctgggttcaagcaatt

SEQ ID NO: 118747 - DNA, 201 bp, Homo sapiens
ctggggcttagagtttcaacacatgaatttgggaagggggagacgtcattccacccatatctacctatttgctttgaaaaactattgtgagcaaatcattyaacatgtgaaagcactttcagaactggaaagcaccgtacaaacataaggcaatagtataacaatacgacaaatcttggtaagcattcatgcactttacat

SEQ ID NO: 118748 - DNA, 201 bp, Homo sapiens
tcaaactgtaaaaagatagtaaaaccgtgcagctaaggtctgtctgcagccgagttgtaaaatctacttttcttaccccatcttcctctcacagacacttmttcctacctccatcctcagcctcacattctggggcccagctttgagtcatcttgactaaggatccatcctcagccttgggtcttggtctggtaacagggc

SEQ ID NO: 118749 - DNA, 201 bp, Homo sapiens
catgaatttgggaagggggagacgtcattccacccatatctacctatttgctttgaaaaactattgtgagcaaatcattcaacatgtgaaagcactttcaraactggaaagcaccgtacaaacataaggcaatagtataacaatacgacaaatcttggtaagcattcatgcactttacatttcaggtactgaagcattcct

SEQ ID NO: 118750 - DNA, 201 bp, Homo sapiens
caaatattaatcttctatttttctgattccttctacatgtatcagctgaaattctactgtaaggaagagctatttcttcttccctatttgtttatttggargcattttatgaggattaaatgaagtaggacatttacatggtgtctggcacacggtgaaggctcagtaggtgtgagtcatctttaatattattattactga

SEQ ID NO: 118751 - DNA, 201 bp, Homo sapiens
aggtgctggagaggatgtggagaaataggaacactttacactgttggtgggactgtaaactagttcaaccattgtggaagacagtgtggcgattcctcagygatctagaactagaaataccatttgacccagccatcccattactgggtatatacccaaaggattataaatcatgctgctgtaaagacacatgcacacata

SEQ ID NO: 118752 - DNA, 201 bp, Homo sapiens
ctttgagtcatcttgactaaggatccatcctcagccttgggtcttggtctggtaacagggctctgccttggtgcctgttttggtcctgttcatgctgttayaggtattgtcccaatactccaggtccctctgctagaacacctgggctgctcttgccaatcccctcccaaagagattcctaagctgtcaggcctatggcta

SEQ ID NO: 118753 - DNA, 201 bp, Homo sapiens
ggcctttcctctgttatgttggcacctctgctgtctatctgtgtgttctcatttcctcttctgctaaggactggtcagattgaattagggccacgctaagrgccttattttagcttgttcaagtctttaaaggccctgtgtcccaatacagtcacattctgaagtactggggcttagagtttcaacacatgaatttgggaa

SEQ ID NO: 118754 - DNA, 201 bp, Homo sapiens
caggactttcagtgctaaaaccaggacagtcctgggcaaactgggatggtcagtcaccctaggtcacatagctagtaaatgactgagctaggatttgaacytaaggcacctagcctgtacttattacacttattgagttattgaactcaatagttattattgctaatattatttaacagttattgagttattgagctcaat

SEQ ID NO: 118755 - DNA, 201 bp, Homo sapiens
ccttgggcctcatctttttcaagctgtttgcagacaaatttccaaaaacaacgaaaactttcatgctctgagcactgtagagaaaggatttggttataagrgttcctgctttcacagaattatttcagagtttatgtgtcagggtggtgacttcccatgccataatggcactgatggcaagttcatctacggggagaaatt

SEQ ID NO: 118756 - DNA, 201 bp, Homo sapiens
atttggaagatgaaagctccatacacagatttctttggtgctggcacagccctaatgaccactaggtggcagtaatgtcctaacaacaatactgctgctgrcctagaacccttagaaagtgtaacaatgaattaatatcacacaactgactacacatctgaatacacagccttagtacaaagctccaaataattcattcgt

SEQ ID NO: 118757 - DNA, 201 bp, Homo sapiens
ccaacatttaacttttttttctttctggatatccatcattcattcagcaaacatttaggaaatgactataatgtgtcaggcactgtgctaggtactgaggytagtcgcagaaaagttacaggagttcctaaggcagttaagggaatacagaatagaaaagtcattcctggaaaagaggacagcatcacatatacaagacaa

SEQ ID NO: 118758 - DNA, 201 bp, Homo sapiens
agtgcagtggcatgatctcggctcactgcaacctctgcccccaggtttctagagattctcctccctcagcctcctgtgtagctgcgactacaggtgcatgygcatgcttttttttttttttttcagatggaatctcctgtcccccaggctggagagcagtagcgcaacctcggctcactgcaaccttcgcctcctgggttc

SEQ ID NO: 118759 - DNA, 201 bp, Homo sapiens
tcagagttgtcctgaactcttgtactctttgtaccagagtttgtactcttgcttcaaccagcattgaatgcaggctgcccatcaaaaagggatataaagcyggttgccgtggctcatgcctgtaatcccagaacatcaggaggctgaagagagcagagatcatttaaggccaggagttcgagaccagcctggccaacatgg

SEQ ID NO: 118760 - DNA, 201 bp, Homo sapiens
tctttaggagttggcacccatggccaactggataattcggtacttttccaggaagtcttctctggctaatctcgagagaaccaatagcttctgcccctcaycttgaataaacataaggcattcaagacctcctgaggccatcctctcttattttccagtttccaattgttttccactgtgaaaatatcttagctcctattt

SEQ ID NO: 118761 - DNA, 201 bp, Homo sapiens
caaaagccaaaattgacaaatgggatctaattaaactaaagagcttctgcacagcaaaagaaactactatcagagtgaacaggcaacctacagaatgggasaaaatttttgcaatctattcatctgacaaagggctaatatctagaatctacaaagaactcaaacaaatttacaagaaaaaaacaaacaaccccatcaaca

SEQ ID NO: 118762 - DNA, 201 bp, Homo sapiens
cattttggaactgtcctcacagagtcgacaagaattgcatgctgggttctgaacagaaatatagatgtaatgaaatattaatcaagctgtaatttgatccrctttcttgttgctgaaaataacgtagcactagatattgatcattggcatccccatcgttcctatagataggatttctttttttattattattattaattt

SEQ ID NO: 118763 - DNA, 201 bp, Homo sapiens
cctatttgcattttcttttccatcactctctgtatataccctatatactaatcgacatcaatgttttctgccagcaaccactgggaagggtggagtagccktcgcttcctgagacccaggaagaagagaaaaccatgaggttatcatctctgtgctatgattaagctactgtgtgtttccttcaaagtctggttaacctaa

SEQ ID NO: 118764 - DNA, 201 bp, Homo sapiens
ccctcccaccttagcctccagggtaactgggactacaggtgcatgccaccatgctcatctaattttttttttttaattgtagaattaaggtcttgccacgwtgcccaggctggtctcaaacttctgggttcaggcgatcctcctgcctcagtctctcagcccagcctagatagtatttctggcattaggatcataagactt

SEQ ID NO: 118765 - DNA, 201 bp, Homo sapiens
agcagtggagagtggagatggctggtttactttttattaaaaagagaaggggcataatgcagtagttaagaagatagactctggaccgataatgcctgcaytcaaatccctgacttgctgcttaccaactctgtaactgtgacaacctcttctgtgcctcagtttccttatcttggaaatacagacactaaccaaacctgc

SEQ ID NO: 118766 - DNA, 201 bp, Homo sapiens
attgttatgtgactaatattttctagttagaaatgagtatttctaacatgtttaaaggtgttccaaaatggtctactatattagtttgctagggctgccayaacaaaagatgacagattgagtggtttaaacaacagaaatttatttcttgcagctctggaagctggaagtccaagatcaaggcgtcagcgggtttggttt

SEQ ID NO: 118767 - DNA, 201 bp, Homo sapiens
atattcatattaatatacatgtacatatagagaaagagaaagagagagaattatgagtattttctcctggtcagggcttgctcttccattttcttattcaygtcttttaacgaagagaggtttttccttttatgcagtgcttttttcctaaatatttgtctgccccaagttcacaaagatatgcttatttctatgcttgct

SEQ ID NO: 118768 - DNA, 201 bp, Homo sapiens
ccagatcccacagccgcgacgcagtccagcggtgcaggccgagccagctgcgcaggtcgcgctttcccccattcacacttcagggcggctttcagctctgstcggaataggactgtgcattcccaggcgtggagaggtgcccacttgaggaatgggcgtggacggggacaggggcgggcgggcaggcaggcgcctagcgta

SEQ ID NO: 118769 - DNA, 201 bp, Homo sapiens
acggggacaggggcgggcgggcaggcaggcgcctagcgtacctgtagcccctgtctcttaggtgtggggctccggggaggcctaggtttctctatcttccsgttgaacactgaccgtgaagactccagtgttctggcttgacctggggcgcccggccagattaacaggctcacgcaggcacagcacagggaggagtgcaaa

SEQ ID NO: 118770 - DNA, 201 bp, Homo sapiens
gacctggggcgcccggccagattaacaggctcacgcaggcacagcacagggaggagtgcaaacaagttgaccctgcctgcttcccttgggaggctgaaccsccttcccccagctccgctttgctgaggtcggcctgctctcagaggcccttggcttgcacagtttctccgcctaggactaacacagctgcagaaagaatct

SEQ ID NO: 118771 - DNA, 201 bp, Homo sapiens
acatttggagtagaacatgtaattgggaagggagagtgggtagagagcctcttacaaaaagtcagaattaaaacacatttttcctcctattgacaggggcrgtgtcactgtcctgttctgattctggcctttgggcagtagaaggtggcaataaacttgtttgctcagggcttctgcaggcatccaaaagcaatcttatat

SEQ ID NO: 118772 - DNA, 201 bp, Homo sapiens
ggcctactggggatatataatggagagactctggtatttgaggagagcaactggttcataattaacgtgattaaattagtttggcgctatggatttcaatycctccgtatgcacatgtgggtagaggacgtgttagacaagttcatgaggtaattttttttccttccatttaacctaagatcttttaatttaggttaaatt

SEQ ID NO: 118773 - DNA, 201 bp, Homo sapiens; identical to SEQ ID NO: 20253

SEQ ID NO: 118774 - DNA, 201 bp, Homo sapiens
atgttggccagctggtcttgaactcctgacctcaggtgatccgcctgccttggccttccaaagtgctgggattacaggggtgagccaccgtgcccggcctstgttgtctgttcttaaaattctgggtttgtgttaaagaatcagagaaggtttggagatagtcatctcattgtgatcattttgcagctgagtaaatgagac

SEQ ID NO: 118775 - DNA, 201 bp, Homo sapiens
ggtaatagctttgagtaacaacctctgctattgatggtctttcaaaaacaaaacaactcacagagctggtaaaaggggaaaatataatcttctgtttttttccctcatagcgattattggagccggaattggtggcacttcagcagcctattacctgcggcagaaatttgggaaagatgtgaagatagacctgtttgaaag

SEQ ID NO: 118776 - DNA, 201 bp, Homo sapiens
tagaggctggaaaagacagtcttccctcagagcttctagaaggaaccagccttgtgcacaccttgattttagcccggagagactgactttggtcttctaayttacagaaccgtaagattataactttttttttttttgttagtatttattaatcattcttgggtgttcttcggagagggggatttggcagggtcataggac

SEQ ID NO: 118777 - DNA, 201 bp, Homo sapiens
ttctcctgcctcagcctcctgaatagctgggattacaggcgtgcgccaccaggcccagctaatttttgtatttttagtagagacggggtttcaccatgttrgtcaggctggtctcaaactcctgacctagtgatctgcctgccttggccttccaaagagctaggattacaggcatgaaaccaccgcgcctggccttacttc

SEQ ID NO: 118778 - DNA, 201 bp, Homo sapiens; identical to SEQ ID NO: 20257

SEQ ID NO: 118779 - DNA, 201 bp, Homo sapiens; identical to SEQ ID NO: 20258

SEQ ID NO: 118780 - DNA, 201 bp, Homo sapiens
cactgcggccttgaattccggggctcaagcagtcctcctgcctcagcctcccaagtagctgggaccacaggcatacaccactatgcctggttaatttttgkatttttagtaaagctggggttttgccatgttggccaggctggtcttgaactcctgacctcaggtgacctgcccacctctgcctcccaaagtgtggggatt

SEQ ID NO: 118781 - DNA, 201 bp, Homo sapiens
ttataggctgaataatcctctcccctgctgtctgccacaagatgtccatgtcttaattcctggaacctgtgaatgtgttaccttttgaggtaaaagagackttgcagatatggttaaggatgggtagattattctggattatctaggtgggcccaatataatcacaagggtccttagagaggcaggaggatcagggtaggt

SEQ ID NO: 118782 - DNA, 201 bp, Homo sapiens
tagacacaacaaagctaggcataaatggccgtcactttattaaaaatgcgtgctggaaaggtccacctctaatgtgcccgtgagttgggcatctggaaggktgtgcaggccccttggttcctccataaagacctgtgagaatctttgggcatctggaaaaaaaatcgagttaatgtcaatatgttaattaatctactgctt

SEQ ID NO: 118783 - DNA, 201 bp, Homo sapiens; identical to SEQ ID NO: 20249

SEQ ID NO: 118784 - DNA, 201 bp, Homo sapiens
ctgggaacagtgtctgtccagattcagggagttagaccttcgctgcaggtgtcactcttcccccaccaaattgttggtaatagctttgagtaacaacctcygctattgatggtctttcaaaaacaaaacaactcacagagctggtaaaaggggaaaatataatcttctgtttttttccctcatagcgattattggagccgg

SEQ ID NO: 118785 - DNA, 201 bp, Homo sapiens
gtgattgacagcagagtgggcaagttgtgattgagccttatacttgccatgtggcctttagacaaagtattttacttctacttttttttttttttttttttgagatggagtctcgctctgttgcccaggctggagtgcagcggtgtgatctcggctcactgcaacctccgctttctgggttgaagcgattctcctgcctca

SEQ ID NO: 118786 - DNA, 201 bp, Homo sapiens
aagcgatctgcccgcctcagcctcccaaagtgctgggattacaggcatgaaccactgcgcctggctaatttttacattttgtgtacagacagagtcttgcyatgttgcccaggctagtcttgaactcctggcctcaaggtatcctcctgtcttactctgtcacccaggctggagtatattggctggctgttcacaggtgca

SEQ ID NO: 118787 - DNA, 201 bp, Homo sapiens
cctcagcctcttgagtagctgtgactacaggtgcatgctgcctcacctgggtgctgttttttagtagtatttattctgttttttcatttattattattatttttttgagatggagtcttgctctgtcatccagggtgtagtgcagtggtgtgatcttgacttactgcaacctctgtctcctgggtcaagcaattctcatgc

SEQ ID NO: 118788 - DNA, 201 bp, Homo sapiens
cccaccgtatccaatgtttgtaatgtttacttcaagtgaatctaaaaaatttctaaatttagtttatggtaaatacctcaaaatacctaaaaataggtacrtatcaaccacttaagggtgtgaaaattgtttcagattcactgctttaaagggtcttcaaatatattttctttaacagaaccttacttcattccaaattat

SEQ ID NO: 118789 - DNA, 201 bp, Homo sapiens
acctcagcctcttgagtagctgtgactacaggtgcatgctgcctcacctgggtgctgttttttagtagtatttattctgttttttcatttattattattatttttttgagatggagtcttgctctgtcatccagggtgtagtgcagtggtgtgatcttgacttactgcaacctctgtctcctgggtcaagcaattctcatg

SEQ ID NO: 118790 - DNA, 201 bp, Homo sapiens
tgtagatgtgcatttttagggggagagggtctttagctttcattagttcagtaattcttaactgggggagattttgctcccaggggccatttagcaatgtytagagacatttggagtagaacatgtaattgggaagggagagtgggtagagagcctcttacaaaaagtcagaattaaaacacatttttcctcctattgaca

SEQ ID NO: 118791 - DNA, 201 bp, Homo sapiens; identical to SEQ ID NO: 20255

SEQ ID NO: 118792 - DNA, 201 bp, Homo sapiens
cacctcagcctcttgagtagctgtgactacaggtgcatgctgcctcacctgggtgctgttttttagtagtatttattctgttttttcatttattattattatttttttgagatggagtcttgctctgtcatccagggtgtagtgcagtggtgtgatcttgacttactgcaacctctgtctcctgggtcaagcaattctcat

SEQ ID NO: 118793 - DNA, 201 bp, Homo sapiens
gtgatcctcccacctcagcctcttgagtagctgtgactacaggtgcatgctgcctcacctgggtgctgttttttagtagtatttattctgttttttcatttattattattatttttttgagatggagtcttgctctgtcatccagggtgtagtgcagtggtgtgatcttgacttactgcaacctctgtctcctgggtcaag

SEQ ID NO: 118794 - DNA, 201 bp, Homo sapiens
atcatggcccgttctcaatgagctattgggtacacctcccagacggggtggcggctgggcagaggggctcctcacttcccagacagggcggctgctgggcsgaggggctcctcacttctcagagagggcggctggtcagagaggctcctcacctcccagacgggatggcggcggggcagagacactcctcagttcccagac

SEQ ID NO: 118795 - DNA, 201 bp, Homo sapiens
aaatggagtctcctatgtccacctctttctacacagacacagtaacaatccgatctctccttcctttccccacatttcccccacttctattcgacaaaacygccatcgtcatcatggcccgttctcaatgagctattgggtacacctcccagacggggtggcggctgggcagaggggctcctcacttcccagacagggcgg

SEQ ID NO: 118796 - DNA, 201 bp, Homo sapiens
gcattccaaggcagaagaatttctcttactacagaacaaaatggagtctcctatgtccacctctttctacacagacacagtaacaatccgatctctccttyctttccccacatttcccccacttctattcgacaaaactgccatcgtcatcatggcccgttctcaatgagctattgggtacacctcccagacggggtggcg

SEQ ID NO: 118797 - DNA, 201 bp, Homo sapiens
cgagtatgctgccttcaagcatctgtttaacaaagcacatcttgcaccgcccttaatccatttaacccttagtggacacagcacatgtttcagagagcatrgggttgggggtaaggtcatagataaacagcattccaaggcagaagaatttctcttactacagaacaaaatggagtctcctatgtccacctctttctacac

SEQ ID NO: 118798 - DNA, 201 bp, Homo sapiens
aggattactgctaccactttgttccaagtcaccaccactgtctcttgtctggattgctagagtagcctcctattataggctgaataatcctctcccctgcygtctgccacaagatgtccatgtcttaattcctggaacctgtgaatgtgttaccttttgaggtaaaagagacgttgcagatatggttaaggatgggtagat

SEQ ID NO: 118799 - DNA, 201 bp, Homo sapiens
atcagcactagctagcttaatttccacttctgcacatacatttatgtagttgttctggttggatgccattcttaactaattttttttttttttttttttttgagaccaagtcttgctccgtcacccaggctggagtacggtggtgcaatcacagctcactgcagctttgacctcctggtctcaagtcatcttccagcctca

SEQ ID NO: 118800 - DNA, 201 bp, Homo sapiens
ttttttccctcatagcgattattggagccggaattggtggcacttcagcagcctattacctgcggcagaaatttgggaaagatgtgaagatagacctgttkgaaagagaagaggtcgggggccgcctggctaccatgatggtgcaggggcaagaatacgaggcaggaggttctgtcatccatcctttaaatctgcacatga

SEQ ID NO: 118801 - DNA, 201 bp, Homo sapiens
acttcatgattatattcaaaataaacaactacatcattacttcttgtcttttgcttctgttgtactatatttggaatgtagatgtacttgggaaagtcagrctagatcaaagttactattcttacaagttttgaaaattagtgttttagaagaaactcactcatgtttgtaacttctttatctgttcagtgttgaaagatg

SEQ ID NO: 118802 - DNA, 201 bp, Homo sapiens
agctcaccagattactgtgtgacatccccggatatttttatcagatggagaactgaaatttctgccttgttaattgccttacagagacgttggtaaaactsttttcctcactttcttgttagttggtactgcctgagttaggagcagttctgctgtaatgggacactagttgtctgtatcttcagttatctggaattacag

SEQ ID NO: 118803 - DNA, 201 bp, Homo sapiens
tatttcctctaggaaatccaacaaagatgtatgaagtggtctaccaaattggaactgagactcgttcagacttctatgacatcgtcttggtggccactcckttgaatcgaaaaatgtcgaatattacttttctcaactttgatcctccaattgaggaattccatcaatattatcaacatatagtgacaactttagttaagg

SEQ ID NO: 118804 - DNA, 201 bp, Homo sapiens; identical to SEQ ID NO: 20256

SEQ ID NO: 118805 - DNA, 201 bp, Homo sapiens
ttgtagtcccaggtactcaggaagctaagggaggagaatcacttgagcccaggaggttgaggctgcagcgagccacgattgcaccactgcactccagcctrggcaacaaagttgagaccttgtctccaataaataaataaataaacagacttgctctgctgctttccagctgtgtcactttgggcaagttacatggtcagg

SEQ ID NO: 118806 - DNA, 201 bp, Homo sapiens
aagaagctgaaacccagagaaatgaattagcttgcccaaggccccacagctcattagtgatagaatcagaacgtgaacccagagctgttgacacagccccrtctaattcaagaagaacctctgtgaggcaactcagggagcctcaacgggagagggaagaagggttgaggttgacagtttgggtttgaagcgggagaagga

SEQ ID NO: 118807 - DNA, 201 bp, Homo sapiens
gttcaagaccagcctgggcaacatagtgagaccctgtctctacaaaaaaatttaaaaaattagccaggcatggtgatgtgcacttgtagtcccaggtactsaggaagctaagggaggagaatcacttgagcccaggaggttgaggctgcagcgagccacgattgcaccactgcactccagcctgggcaacaaagttgagac

SEQ ID NO: 118808 - DNA, 201 bp, Homo sapiens
aaaactgcaagggagattttagcagagcatggcaatttattttctaggcagtcaggaactttgtaagcttttgagagctgcaagggtgcagtgatgagctstgtattttaaaaagtcatctttgtcagcaatgtgaggcgttgattggagccaagaagcacaatcaggaaaaaagctcaggcaatggttcaggcaattagg

SEQ ID NO: 118809 - DNA, 201 bp, Homo sapiens
agagaatgaggagagaggttaggaaaatggggccttggcaagaggccaagccatgcctttagggctaggatgctgacatcatcatctcgaacgcttatggrgtctttctgtgaggaacatgggtcagcgtagagagagtctggttctgtgtgtctctgcagtccagtggcacatgggagaacatgcactctttggtttgct

SEQ ID NO: 118810 - DNA, 201 bp, Homo sapiens
ccgtaggcccccctgaggtgctctgcttttccgtgcctttttgcctagctggccccatctcgcctttccggggagtccgcgccccattagctctttagaakcaagcagagccagagtgtcatttggcacttgaagaaactgaggtgcagtgaagcaggaactgagtctgtgaaggacccgaaactactctcctcagttcgt

SEQ ID NO: 118811 - DNA, 201 bp, Homo sapiens; identical to SEQ ID NO: 20264

SEQ ID NO: 118812 - DNA, 201 bp, Homo sapiens; identical to SEQ ID NO: 20266

SEQ ID NO: 118813 - DNA, 201 bp, Homo sapiens
ccaggtccagctctcctgaggcactctcgtcctcgacttcctctgtctctgcggttccattctcttcgctgcctgccaccttggcctgccactcctcccgyggcagcagcccatggtccacatccacacagatggccttgagcatggtgaagtaggtgtagagatcaggggcctcagcctgggcctggcccccaggcccac

SEQ ID NO: 118814 - DNA, 201 bp, Homo sapiens
ttaggaaaatggggccttggcaagaggccaagccatgcctttagggctaggatgctgacatcatcatctcgaacgcttatggagtctttctgtgaggaacrtgggtcagcgtagagagagtctggttctgtgtgtctctgcagtccagtggcacatgggagaacatgcactctttggtttgctatatggcgggtagcccat

SEQ ID NO: 118815 - DNA, 201 bp, Homo sapiens
ttgggtcaacacagccctgttttgggccaatcccagggctcaggccccagcatctgtatcaggtgatccatctgcccagagacagatctgccagccttctrcttgtcatcccagctctgcatgactgccccagcaagaacccgactcttcctctgtcagcttgctgagccagttggaaggaagcttttccctttggcaact

SEQ ID NO: 118816 - DNA, 201 bp, Homo sapiens
caggcagttcttggggtaacgcttggttagcacctgcatggttgcttcctctgacacaatgagaccagcagactgcccccgcactatttctaggctctcgrcagattgacaggatgccaatgcccagctgttgggtcaacacagccctgttttgggccaatcccagggctcaggccccagcatctgtatcaggtgatccat

SEQ ID NO: 118817 - DNA, 201 bp, Homo sapiens; identical to SEQ ID NO: 20283

SEQ ID NO: 118818 - DNA, 201 bp, Homo sapiens; identical to SEQ ID NO: 20269

SEQ ID NO: 118819 - DNA, 201 bp, Homo sapiens
cttcccagtagtatgtcactggcctcctatcagagacactgactattctgataataaccaccacagtagctttgctaagctctatggatttccagagggaraagaggagaggaactttggaagaggggtctttgaagttaactttgattatcaggcaggactgagagacagacagctttctaggcccgtggggctagtggg

SEQ ID NO: 118820 - DNA, 201 bp, Homo sapiens
aggacctctgaatggagggtgtttgatgattgagtgagtgttcaggtttagataaaactgcaagggagattttagcagagcatggcaatttattttctagrcagtcaggaactttgtaagcttttgagagctgcaagggtgcagtgatgagctctgtattttaaaaagtcatctttgtcagcaatgtgaggcgttgattgg

SEQ ID NO: 118821 - DNA, 201 bp, Homo sapiens; identical to SEQ ID NO: 20274

SEQ ID NO: 118822 - DNA, 201 bp, Homo sapiens
ctggggcaaatgggacatccatcaccccaaacattcaccccttctttatgttgggaacattcaaattcctctccttcagcaattttgaactatacaacaarttattattaactgtagtcaccctactgtactatcaataaatagaatttttttataagtttttctctcatcatctgttttttaaaacttaaccttcttgct

SEQ ID NO: 118823 - DNA, 201 bp, Homo sapiens
aaaccgagcctaacagattaacagcagcttgcccaaggtcatatggctattaagtagcagagcttggttttttttttttttttgacctctgaatggatatkggacaccagtgcttctcaaacttaatgtgcatacgaatagcataggtgtcttgttaaaattcggattctgggctgcgcgaggtggctcacacctgtaatc

SEQ ID NO: 118824 - DNA, 201 bp, Homo sapiens
gcggggaggatcacaaggtcaggagattgagaccatcttggccaacatggtgaaaccccatctctactaaaaatacaaaaaattagctgggtgtagtggcrtgcacctgtagtcccaactactcgggtggctgaggcaggagaattgcttgaatcgggaggtggaggttgcagtgagctgagatcgcgccactgcactcca

SEQ ID NO: 118825 - DNA, 201 bp, Homo sapiens
tgctatatggcgggtagcccattatggaaagcagtggctgtttggggtaagagagagtgctctgtccagttctagaacataggaatatttttcatttttaktgttttatacattttcggaaatacttttatatgcatatgtcttgttttatatgctactactgtgagaaagataggataggtctttttttgtttttttttt

SEQ ID NO: 118826 - DNA, 201 bp, Homo sapiens
ggtcagcgtagagagagtctggttctgtgtgtctctgcagtccagtggcacatgggagaacatgcactctttggtttgctatatggcgggtagcccattakggaaagcagtggctgtttggggtaagagagagtgctctgtccagttctagaacataggaatatttttcatttttattgttttatacattttcggaaatac

SEQ ID NO: 118827 - DNA, 201 bp, Homo sapiens; identical to SEQ ID NO: 20259

SEQ ID NO: 118828 - DNA, 201 bp, Homo sapiens
taaaacatatttttaaaataaatcttttatgatctttccttttatagataagaaaacatatggtgaaatttttgaaaaattccatccaatacgttgaagtyttcaaaatgcttgctccagtttcactgatacctgctgtttctgaatttgatggaacatgtttcttatgacagttgaagcttatgctaatctgtatgttga

SEQ ID NO: 118829 - DNA, 201 bp, Homo sapiens; identical to SEQ ID NO: 20261

SEQ ID NO: 118830 - DNA, 201 bp, Homo sapiens; identical to SEQ ID NO: 20262

SEQ ID NO: 118831 - DNA, 201 bp, Homo sapiens; identical to SEQ ID NO: 20263

SEQ ID NO: 118832 - DNA, 201 bp, Homo sapiens; identical to SEQ ID NO: 20265

SEQ ID NO: 118833 - DNA, 201 bp, Homo sapiens
ggttgcagtgagctgagatcgcgccattgcactccagcctgggtgtcacagcaagactgtgtctcaaaaaataaaataaaattaaaataaaataaataagycatccattgcctagtggataaaatccagactccttaggatggctcatttactccaggttagctaattgcctgtcctctggtagaaacactttacccacat

SEQ ID NO: 118834 - DNA, 201 bp, Homo sapiens
tctctattagaaatacaaaaattagccgggcatgatggcgggtgcctgtaagcccagctacttgggaggctgaggcaggagaatcgcttgaacctgggagkcggaggttgcagtgagctgagatcgcgccattgcactccagcctgggtgtcacagcaagactgtgtctcaaaaaataaaataaaattaaaataaaataaa

SEQ ID NO: 118835 - DNA, 201 bp, Homo sapiens
ctggtcgcagtggctcacgcctgtaatcccagcactttggggggccgagcggggcagatcatctgaggtcaggagtttgagaccagcctggccaacatggygaaaccctgtctctattagaaatacaaaaattagccgggcatgatggcgggtgcctgtaagcccagctacttgggaggctgaggcaggagaatcgcttga

SEQ ID NO: 118836 - DNA, 201 bp, Homo sapiens
cagcaaatctgatcacatctgtttaaaatagtcatccggctggtcgcagtggctcacgcctgtaatcccagcactttggggggccgagcggggcagatcayctgaggtcaggagtttgagaccagcctggccaacatggtgaaaccctgtctctattagaaatacaaaaattagccgggcatgatggcgggtgcctgtaag

SEQ ID NO: 118837 - DNA, 201 bp, Homo sapiens
ccaaagtcctaacctcttaatatcattatcttgggggttacatttcaatttatgaactttggggggacatgaacattcagaccacagcaggatttcaatcrtaagattagtgagtgttaattttcgtttaggaaatacaatttttaaaacatatttttaaaataaatcttttatgatctttccttttatagataagaaaac

SEQ ID NO: 118838 - DNA, 201 bp, Homo sapiens
atggtagaagaggcaaacaaggtcccctaagccgatccccctcatgaggacagagcctttgtgacctaatcacctcccaaagtcctaacctcttaatatcrttatcttgggggttacatttcaatttatgaactttggggggacatgaacattcagaccacagcaggatttcaatcgtaagattagtgagtgttaattttc

SEQ ID NO: 118839 - DNA, 201 bp, Homo sapiens
tagagatgggatttcaccatgttggccaagctggtcttgaactcctgaagtgatccgctcacttcagcctcccaaagtgatgggattacaggcgtgagtgwcggcgcctggcctcattactcaaacctttagggaacacctcctcactcagccatgtgtaaggacgtgaagacccagaggtgaaacattttagggtgctgc

SEQ ID NO: 118840 - DNA, 201 bp, Homo sapiens
ctgcaacctctgcctcccaggttccaatgattcgcctgcctcagcctcccaagtagctgagactacaggcacccgccaccacccccagccaaattttgtayttttagtagagacagggtttcaccatgttggccaggctggtctcgaactcctgacctcaggtgatccacctgtcttggcctcccaaagtgctgggattac

SEQ ID NO: 118841 - DNA, 201 bp, Homo sapiens
aactttgtttttcttaccacctgtataattgcagaatagactgggtaatatataagtaatagaaatttattgcttgcaattctggaggctgggaagtccargatcagggtaccagcacagttggtgtctgctgagggcccactctgcttcatagatgatgccatcttgctgtgtcctcacatggtagaagaggcaaacaag

SEQ ID NO: 118842 - DNA, 201 bp, Homo sapiens
gccatagtcaaggacaagaaaataaggaaattcttaggggtttgtcttagtccgtttggcctactataacaaaatgccttaaactgggtaattaaaaaaawttttttaactttgtttttcttaccacctgtataattgcagaatagactgggtaatatataagtaatagaaatttattgcttgcaattctggaggctggga

SEQ ID NO: 118843 - DNA, 201 bp, Homo sapiens
aaattttattactctttaatattcccacagccttcagtcacatatatgatatttatggtggatcagaaagatacagtttctttttttgccaaagaagagcwtaaagactagcacaaagccatgaatagtggatgtatcgggaatgcataatacccagaaccgttaaatgttagagctggaagtcatcttggatatattgat

SEQ ID NO: 118844 - DNA, 201 bp, Homo sapiens
cataaatagattttccccagtctcggcaacatagtgagacctcatctctacagaaaattaaaaaattagctgggtgaggtggcacatgcctatagacccaktgacttgggaggctgaggcaggaggattacttgagcctgggaggacaaggtgccgtgagccgtgatcacaccactgcattccagcctaggtgacagagcg

SEQ ID NO: 118845 - DNA, 201 bp, Homo sapiens
gagcctgggaggacaaggtgccgtgagccgtgatcacaccactgcattccagcctaggtgacagagcgagaccctgtctcaaaaaaaaaaaaaaaaaaaaattcttctgttaatgtaaatgcgtgatataaaacatttaaatttcattacactgaatgatctctaaggtcttatttagctctaaaattttattactcttta

SEQ ID NO: 118846 - DNA, 201 bp, Homo sapiens
tgccggatgaggcccggagcctgcccccgcccaagctgaccgacccgcggctcctctacatcggcttcttgggctactgctccggcctgattgataacctratccggcggaggccgatcgcgacggctggtgagtgctgcgcggccgggatcggctgggaggagaaggggtcgtagggctgcagactggcccggccgtagg

SEQ ID NO: 118847 - DNA, 201 bp, Homo sapiens
ggcaaggacctctgaatggagggtgtttgatgattgagtgagtgttcaggtttagataaaactgcaagggagattttagcagagcatggcaatttattttmtaggcagtcaggaactttgtaagcttttgagagctgcaagggtgcagtgatgagctctgtattttaaaaagtcatctttgtcagcaatgtgaggcgttga

SEQ ID NO: 118848 - DNA, 201 bp, Homo sapiens
gtattattcacaacgaggaaaccgagcctaacagattaacagcagcttgcccaaggtcatatggctattaagtagcagagcttggttttttttttttttttgacctctgaatggatattggacaccagtgcttctcaaacttaatgtgcatacgaatagcataggtgtcttgttaaaattcggattctgggctgcgcgagg

SEQ ID NO: 118849 - DNA, 201 bp, Homo sapiens
tctgccggatgaggcccggagcctgcccccgcccaagctgaccgacccgcggctcctctacatcggcttcttgggctactgctccggcctgattgataacstgatccggcggaggccgatcgcgacggctggtgagtgctgcgcggccgggatcggctgggaggagaaggggtcgtagggctgcagactggcccggccgta

SEQ ID NO: 118850 - DNA, 201 bp, Homo sapiens
tgtttttatagacagcaggtcctcagagattatggtttagaggaacgggtgaagcaggcctggaagtatgtttggacagccgtttggagggggtgttgcayagaagcttggtcttgtctggatgttgccaggagttcatcactggtttagtcctaaaggtgagaaggagtataataggacgaggaatagaagtttaggctg

SEQ ID NO: 118851 - DNA, 201 bp, Homo sapiens; identical to SEQ ID NO: 20271

SEQ ID NO: 118852 - DNA, 201 bp, Homo sapiens
gaggtatcccatacttgtgggttaaggtggggggatacaagaggaagaagtgaaggaggctttgggttgggaagaagggtggcaatgagatgtggctgtcrtccaggaatagtcagggtggtggataattttgttaaaacatctcaacctaataagggaactgagcaggtgggaataactaaaaaggagtgcataaaagaa

SEQ ID NO: 118853 - DNA, 201 bp, Homo sapiens; identical to SEQ ID NO: 20272

SEQ ID NO: 118854 - DNA, 201 bp, Homo sapiens
cagggtgctctatctctagtctgctatgaatctattaatagttgtaatataacttttctcacctgtgttttacacacatatacacaacacagatgtgcacmtatatgagtatctgtaggctgggagtttaactactacgacagttttttttggtttccccaggggtttggcacacatagccttattaaatgtgtaaatgaa

SEQ ID NO: 118855 - DNA, 201 bp, Homo sapiens; identical to SEQ ID NO: 20273

SEQ ID NO: 118856 - DNA, 201 bp, Homo sapiens
ttgcttgaacctgggaggtggagatttcagtgagccgagattgtgccattgcactccagcctgggcgacagactgagactctgtctttaaaaaaaaaaaaagtagtattgagtgaataagtatatgtagattacaaggaatataaaacatggtcccaatcctccaaaggtttacagaccagatggccatatccattaaaaa

SEQ ID NO: 118857 - DNA, 201 bp, Homo sapiens
aaaatacaaaaattagccaggcgtgatggcacatgcctgtaatcccagctactcgggaggcagaggctggagaattgcttgaacctgggaggtggagattkcagtgagccgagattgtgccattgcactccagcctgggcgacagactgagactctgtctttaaaaaaaaaaaaagtagtattgagtgaataagtatatgt

SEQ ID NO: 118858 - DNA, 201 bp, Homo sapiens
gaccagcctgaccaacatggtgaaaccctgtctttactaaaaatacaaaaattagccaggcgtgatggcacatgcctgtaatcccagctactcgggaggcwgaggctggagaattgcttgaacctgggaggtggagatttcagtgagccgagattgtgccattgcactccagcctgggcgacagactgagactctgtcttt

SEQ ID NO: 118859 - DNA, 201 bp, Homo sapiens
gcttcaatttccatactagtaaactggggatgagaatcttttcctacatagctgcatcaggtggttttgagattgcaatggacgtggatgttgtttacaastaatgagaccagtttgtgggagcagggctggcaggtggcacagaatcaaaactggcaggtgctgtggtccaatttctattaatactagtctttatccatg

SEQ ID NO: 118860 - DNA, 201 bp, Homo sapiens
tctatagtaggtgttcagtaagtattgagtgaggtcacgtgtggtggctcatgcctgtaatcccaacattttgggaggctgaggcgggtggatcacctgargtcaagagttcaagaccagcctgaccaacatggtgaaaccctgtctttactaaaaatacaaaaattagccaggcgtgatggcacatgcctgtaatcccag

SEQ ID NO: 118861 - DNA, 201 bp, Homo sapiens
tttgaagcaactgagtgagtcagagtgtggtttctacccactctgccatgcccagttcccactttgagcccactctgcaaaagtctaaggctctaaggaayaccactgtagaggaaaagaattagactaattaggccagggttcacatcttggctgttatttactgagtaaacttggactcattttacttctcaggcctcc

SEQ ID NO: 118862 - DNA, 201 bp, Homo sapiens
atttgatccagccatcccactactgggtatctacccagagggaaagaagtcattataccaaaaagaaacttgtacacacatgtttatagcagcaaaattckcaattgcaaaaatgtggaaccaactcaaatgcccatcagtcaacaagtggataaagaaactgtggtatatacatacaatggaatactacttagccataaa

SEQ ID NO: 118863 - DNA, 201 bp, Homo sapiens
agtagatactattatcattctctctctctctttttaatttttgagacaggaccttgctctgttgctcaggctgtagtgcagtggtgcaatcacagctcacygcagccttgatctcctgggatcaagtgatcctcccacctccgcctcctaagtagctgggactattgatgcatgccatcatgcctggctattttttaaatt

SEQ ID NO: 118864 - DNA, 201 bp, Homo sapiens
gtttttcagatcctgggcttgatgtgtcacccagactctggcctctgaaaccttaggctgcccagagtggagaagttgtcagcaatgagaacccctgcctyggcatatttgtgggtgtgaggagtagttcctgtgggaagttcctgggataacagtttctaggttgggctggtctcttcatccatcagttctagtcgctat

SEQ ID NO: 118865 - DNA, 201 bp, Homo sapiens
accatctaaagctcatatgagcttactgtgtggacccactcagaagcccagagttggaataaagattattttaaactgaagacatttgaggttcaacagaygcagagaaaagcctcctcagagcttcccttatctgactaaaagcagcaacttctggtaaatgaagctaccatagatcccttctccgggggagtttcatgg

SEQ ID NO: 118866 - DNA, 201 bp, Homo sapiens
gtggagccaatttcaaggtgaggcttgaacaatgggcaggaattatgcagctagaggagccagaggtgggtgggaagggaaggtgtgtttcaggcagaggygccaaatgtggcacagagatgagaatagcacagtgaagttgaggaactgttgaagtcgaattggaacccagagttcaaagagaagagtggagacagatga

SEQ ID NO: 118867 - DNA, 201 bp, Homo sapiens
ctaataggtgctacctttctttaccaacagaaagtgacatttctctgtggcaaagtcaatgttattgttcatcacacattgagttctaaccagaggaataygggcagaactgatgtaagtcttttccaggattgagctaaaaacattccactcaaccctccaggcttcctgaatggtggttttctaagacagctggagctt

SEQ ID NO: 118868 - DNA, 201 bp, Homo sapiens
cattccactcaaccctccaggcttcctgaatggtggttttctaagacagctggagcttgaatccctgcatccctacttggaggagcgaccccaggacaatrtcttatcttgtttcaagtcgtgataggaacaagaaaccaccgtgtgttagttaaatcactgaaattttgaggttggtaattatagaaactggcatttctt

SEQ ID NO: 118869 - DNA, 201 bp, Homo sapiens
tgatgtaagtcttttccaggattgagctaaaaacattccactcaaccctccaggcttcctgaatggtggttttctaagacagctggagcttgaatccctgmatccctacttggaggagcgaccccaggacaatgtcttatcttgtttcaagtcgtgataggaacaagaaaccaccgtgtgttagttaaatcactgaaattt

SEQ ID NO: 118870 - DNA, 201 bp, Homo sapiens
accccatctctacctcttgtcttaccccaatattttttctactttatttttgtgtgtatttatggtgtatgacatgatgttttgaaatatctataaattgyggcatttccctacttttatttccatccatatggatagaaacttgggtttccaggatgcagcacaaggagcggggatccaatgtcttagttcaatctgcta

SEQ ID NO: 118871 - DNA, 201 bp, Homo sapiens
aaacagagatatatctacacacggatacatggggcccctcaaccaagatacccatacaggcccagaaaatcactcagtaataatgataaaacaataaaacygaaattccttgaatgtcatggtctgtgctaatagttaattaaatcccacaacaaccctacgaagtagatactattatcattctctctctctctttttaat

SEQ ID NO: 118872 - DNA, 201 bp, Homo sapiens
tcctgatttttctttgttggagagtgattgcaaatttcctttgaaaataaatttatttcattacaaaaagcttgtgctcagatttatttacttttttttttggaagtaatgttagacatacagaagggtggcaaaaatggtacagggcttcctatattcccttcactctgcttccaccagtgctaacaccttacataaccg

SEQ ID NO: 118873 - DNA, 201 bp, Homo sapiens
cctataaagacccacagtcttgggaggagacccgaagtgctgcctgcaggaagagggcttgggatgaaatgtctattgtacagttcccctcgggcaacacktggagtcttggatcctcttgaggatcctcttgaggtcctcttgaagacctcacctctccagtcatgctcccaacacttctaccttcttccctttctccct

SEQ ID NO: 118874 - DNA, 201 bp, Homo sapiens
gcactttgggaggctgaggtgggtggatcacctgaggtcaggagctggagaccagcttggccaacgttgtgaaactccgtctctactaaaaatacaaaacktagccgggcatgatggcactcgcctgtaatcccagctacttgggaggctgaggcaggagaatcacttgagcccaggaggtggaggttgcagtgagccgag

SEQ ID NO: 118875 - DNA, 201 bp, Homo sapiens; identical to SEQ ID NO: 20293

SEQ ID NO: 118876 - DNA, 201 bp, Homo sapiens
cctttttgaaagagttttgctcttgttgcacaggctggagtccaatggtttgatctcagctcactgcaacctctgcctcctgggttcaagcgattctcctscctcagcctctggagcagctgtgattacaggcgcccgccaccatgcccggctaattttgtacttttggtaaagtacaaaatgttggccaggctggtctcg

SEQ ID NO: 118877 - DNA, 201 bp, Homo sapiens; identical to SEQ ID NO: 20294

SEQ ID NO: 118878 - DNA, 201 bp, Homo sapiens
aatctcagaaatcaccactaaagagcttattaatgtaaccaaacaccaccggtcccccccctctaaaacctattgaaataaaaaattaaaagtaaaaaaamcgtgtttgaacctagttataatgatttaaaattcatgggccaaaactgcaattacttttgcaccaacctagtgcaactccacccagtgagagcagaatat

SEQ ID NO: 118879 - DNA, 201 bp, Homo sapiens
agatagagaaaaagtttacctctcctatattatttatcttctgcctcctcctctaaagtctcagcttctaacccaggtaagattatctaggaatcgtcccsagaaaggcgtgtttcctaagcctaccggtaattatgagagaagaaaaattttccttctagctgcacaggtattacatggatggggtcaggataaacccac

SEQ ID NO: 118880 - DNA, 201 bp, Homo sapiens
agtgcagtggtgtgatctcggctcaccacaaccaccgcctcccggatccaagtgattctcctgcctcagcctcctgagtagctgagattatgggcatgtgycaccatgcccgactaattgttttgtatttttagtagagacggggtttctccatgttggtcaggctggtcttgaacttccaacctcagatgacccacccgc

SEQ ID NO: 118881 - DNA, 201 bp, Homo sapiens
caaacaaggggacaatagagaaacatcattaaaatactgaaagatgaatactgtctactagaattctatacttaacagacatgtctttcaaaatcaaaggytaaaaaaattcattgccaacagacccatatgctaagaaatgttagaagaagtcttctggacagaaggaaaatgatatcaagtgaaaatcagtatctacac

SEQ ID NO: 118882 - DNA, 201 bp, Homo sapiens
aagaatgatacattggactttggggactcaggggaaagggtcgggggtggtgagggataaaagactgcacattgggtacagtgtacactgcttgggtgatrgatgcaccaaaatctcagaaatcaccactaaagagcttattaatgtaaccaaacaccaccggtcccccccctctaaaacctattgaaataaaaaattaaa

SEQ ID NO: 118883 - DNA, 201 bp, Homo sapiens
agacatttctttcttttttttttttttttttgagatggagttgcccaggctgcagtgcagtggtgtgatctcggctcaccacaaccaccgcctcccggatycaagtgattctcctgcctcagcctcctgagtagctgagattatgggcatgtgccaccatgcccgactaattgttttgtatttttagtagagacggggttt

SEQ ID NO: 118884 - DNA, 201 bp, Homo sapiens
taggatttagacccaggcatcccgactcaggagtctgtccttttagccacaactcacagacaagggcacggtgacagaggtctggggatggacacacatayacacaaacacacacacacgacagagacagagagtatctggattgtccttgtcctcagcatgaacaccattccgctttcaggagagagatggccagattgc

SEQ ID NO: 118885 - DNA, 201 bp, Homo sapiens
atgactatttttactattattattattatttttgagatggtgtctcactctgttgcccaggctggagtgcagtggcataatcttggctcactgcaacctcygtctcctgggttcaagcaattctcctgcctcggcctcctgagtagctgggactacaggtgcatgccactatgcctggctaattttgtatttttagtggag

SEQ ID NO: 118886 - DNA, 201 bp, Homo sapiens
ccaatcaatactccttaataaactcccctttatatatacatctatcctacttttctgctcctctagagaaccccgactgatacaacacccacaagtcaatraatgtgatacaccacataaacagaattaaaaacaaaaaaatcacatgatcatctcaatagatgcagaaaaaatatttgacaaaatctagcaccactttat

SEQ ID NO: 118887 - DNA, 201 bp, Homo sapiens
actttacacaccattaatcagcagaatggctggcaaatgctaacccacttagcagtgatatcctagcaggtgacagctaccggagctgacagcatctggcyggagggcacacatctccaggcaggccgtctggagctctctgagttctatgtgggttactgtgaagctgaaggtgagacttccagcttcctggccaagagt

SEQ ID NO: 118888 - DNA, 201 bp, Homo sapiens
aattccaaaccatatttgaaacttttagtcattctgttcaaaatttaaatcacgaggcgagaagatctgaatggccctgtgctacgaactttaccacttaytacttacttgactctgggaaggttgtttcactgctttgtgactcagtttcctcatctgtaaaatggggacactcatagcagctacttcatagtttatgtg

SEQ ID NO: 118889 - DNA, 201 bp, Homo sapiens
gccatcatgcctggctattttttaaattttatttttgtagagatgacgcctctctatgttgccagggcttgcttctctctctctctctctctctctctctctctctctctctctctcttaacagatgggaaaactgagttcaagaggggatgagtaactttcccaaggccacataggatttagacccaggcatcccgactc

SEQ ID NO: 118890 - DNA, 201 bp, Homo sapiens
accagggcagtgcaagaagaagtcttgttcagtcacgcctgggggataaattccaaaccatatttgaaacttttagtcattctgttcaaaatttaaatcamgaggcgagaagatctgaatggccctgtgctacgaactttaccacttactacttacttgactctgggaaggttgtttcactgctttgtgactcagtttcct

SEQ ID NO: 118891 - DNA, 201 bp, Homo sapiens
atgccatcatgcctggctattttttaaattttatttttgtagagatgacgcctctctatgttgccagggcttgcttctctctctctctctctctctctctctctctctctctctctctcttaacagatgggaaaactgagttcaagaggggatgagtaactttcccaaggccacataggatttagacccaggcatcccgac

SEQ ID NO: 118892 - DNA, 201 bp, Homo sapiens
tccgctctcctatactcctatcatggggagttcactacttgttccagttaattttctttgagtgtaagcaacagaagcccactctggctaacttaagcaamgcaggatgtactgacacaaggtggggggtgttgaaggatggaagggaaggctgaagatccaggcttggcatgaaaaacgaccagggcagtgcaagaagaa

SEQ ID NO: 118893 - DNA, 201 bp, Homo sapiens
gagacaggaccttgctctgttgctcaggctgtagtgcagtggtgcaatcacagctcactgcagccttgatctcctgggatcaagtgatcctcccacctccrcctcctaagtagctgggactattgatgcatgccatcatgcctggctattttttaaattttatttttgtagagatgacgcctctctatgttgccagggctt

SEQ ID NO: 118894 - DNA, 201 bp, Homo sapiens
tgagctgagatcgcaccactgcactccagcctgatgacagagagagacagaggaaaaaaaaaaagaaagctgaaagttgtagtaactaacattgattaggmacctgcaatatgtcagactctgtggcaggtgttttgcatctgggatctcattcaatccttaggccagtcctatgagatggtgttatcacccccatttaca

SEQ ID NO: 118895 - DNA, 201 bp, Homo sapiens
actagttgatatggtttgattgatatgtctacactcaaatctcatgtcgaattgcaatccccagtgtttgaggtgggcctagtgggaggtaattggatcayggggtggatttccccctttggtgctgttcttgtgatagagttctcatgagatctggttgtttaaaactgtgcagcacctcctcctcctctctgttcctcc

SEQ ID NO: 118896 - DNA, 201 bp, Homo sapiens
atttgaattttgccagttttcccactagtgtcctttttcttgtccagatctaatccaagatcccacattgcctttactagttgatatggtttgattgatakgtctacactcaaatctcatgtcgaattgcaatccccagtgtttgaggtgggcctagtgggaggtaattggatcatggggtggatttccccctttggtgct

SEQ ID NO: 118897 - DNA, 201 bp, Homo sapiens
ttactgcagcgtttcccaagcttgagtcacggtgacccagccaccatgagacagccactttacacaccattaatcagcagaatggctggcaaatgctaacycacttagcagtgatatcctagcaggtgacagctaccggagctgacagcatctggccggagggcacacatctccaggcaggccgtctggagctctctgagt

SEQ ID NO: 118898 - DNA, 201 bp, Homo sapiens; identical to SEQ ID NO: 20295

SEQ ID NO: 118899 - DNA, 201 bp, Homo sapiens; identical to SEQ ID NO: 20292

SEQ ID NO: 118900 - DNA, 201 bp, Homo sapiens
gtgaattatatgatgtgatatagcatgtggataaagcatgtggaaatggatttggttcataatagacactcaataactattagccaatgcaagcagaccaraacagatgatgcctattctgctcaaagtcttctggtggctccccattgcctctggaattgaatccaggctccttataggcctttgaatttggctccgacc

SEQ ID NO: 118901 - DNA, 201 bp, Homo sapiens
tattagccaatgcaagcagaccagaacagatgatgcctattctgctcaaagtcttctggtggctccccattgcctctggaattgaatccaggctccttatrggcctttgaatttggctccgaccatctctctagcatcatatcctgatatcctggagcttatcccttaccccatctctacctcttgtcttaccccaatatt

SEQ ID NO: 118902 - DNA, 201 bp, Homo sapiens
tgaagctgaccatcagacagagccagatggacggagcgcctctacttggcttccccatgtgatcgctctgcgtgcgctagtttgggatggtatacagcatrgccatggggttttaagaggaagcatcccagccgggggcggtgggtcacacctggaatcccagcactttgggaggctgaggtgggtggatcacctgaggtc

SEQ ID NO: 118903 - DNA, 201 bp, Homo sapiens
gggctggtctcttcatccatcagttctagtcgctattgctgcaaaactgaggggtgtcatgcagccatttttattacatttacagattctgtaggttaggratttggacaggacccagtggggatggtgtgtctctgccccatagtgtctggggcctctgctggaaagatttgaaggcaggtgttggcggcggggggagtc

SEQ ID NO: 118904 - DNA, 201 bp, Homo sapiens
ctgggcttgatgtgtcacccagactctggcctctgaaaccttaggctgcccagagtggagaagttgtcagcaatgagaacccctgcctcggcatatttgtrggtgtgaggagtagttcctgtgggaagttcctgggataacagtttctaggttgggctggtctcttcatccatcagttctagtcgctattgctgcaaaact

SEQ ID NO: 118905 - DNA, 201 bp, Homo sapiens
ggtacagtgtacactgcttgggtgatggatgcaccaaaatctcagaaatcaccactaaagagcttattaatgtaaccaaacaccaccggtcccccccctcyaaaacctattgaaataaaaaattaaaagtaaaaaaaacgtgtttgaacctagttataatgatttaaaattcatgggccaaaactgcaattacttttgcac

SEQ ID NO: 118906 - DNA, 201 bp, Homo sapiens
ttgtctgctgagcacacgggcttagtttttcagatcctgggcttgatgtgtcacccagactctggcctctgaaaccttaggctgcccagagtggagaagtygtcagcaatgagaacccctgcctcggcatatttgtgggtgtgaggagtagttcctgtgggaagttcctgggataacagtttctaggttgggctggtctct

SEQ ID NO: 118907 - DNA, 201 bp, Homo sapiens
ttcacagaattagaaaaaaacaatcctaatattcatatggaaccaaaaaagagcccacataaccaaagcaagactaagcaaaaagaacaaatctggaggcrtcacattacccgacttcaaactatactataaggccatagtcaccaaaacagcatggtactattataaaaataggcacatagactaatggaacagaataca

SEQ ID NO: 118908 - DNA, 201 bp, Homo sapiens
tgatgtgtcacccagactctggcctctgaaaccttaggctgcccagagtggagaagttgtcagcaatgagaacccctgcctcggcatatttgtgggtgtgrggagtagttcctgtgggaagttcctgggataacagtttctaggttgggctggtctcttcatccatcagttctagtcgctattgctgcaaaactgaggggt

SEQ ID NO: 118909 - DNA, 201 bp, Homo sapiens
acctgaaactttgtcccagcagatgggttgtctgctgagcacacgggcttagtttttcagatcctgggcttgatgtgtcacccagactctggcctctgaarccttaggctgcccagagtggagaagttgtcagcaatgagaacccctgcctcggcatatttgtgggtgtgaggagtagttcctgtgggaagttcctgggat

SEQ ID NO: 118910 - DNA, 201 bp, Homo sapiens
ttctcccatgctggatgcttcctgcccactaatatcagactccaagttcttcagctttgggactcttggaccttcaatcacagactgaaggctacactgtyagtttccctacttttgaggttttgggactcgaactagcttccttgctcctcaccttgcagacggcctattgtgggaccttaccttgtgattgtgtgagcc

SEQ ID NO: 118911 - DNA, 201 bp, Homo sapiens
ttgagtgtcaacttgattggattgaaggatgcaaagtattgttcctgggtgcgccctgagggtgttgccaaaggagattaacatctgagtcagtggactgrgagaggcagacttaccctcaatttgggtgagcatcatctaatcagatgccagtgcagctaggataaaaacaggcagaggaatatggaaggactagactgg

SEQ ID NO: 118912 - DNA, 201 bp, Homo sapiens
tacttgaagcaaaaactgaggtaatttcatggaaaaaatagacaaatccacaatcttagatgtttcaattctcacttctcaataactgatagaaaaattargaaaatcaataaagatacagaagttttgaacaccatgagccaatttcactaaattcacatttagtgaattacttttgtgagtgcaaaagtaattgtggtt

SEQ ID NO: 118913 - DNA, 201 bp, Homo sapiens
gccaagaatcagaaatatgttatccacaatgaggagaaaaattaatcatttgacatcaatccagaacagcaacaaatattagaatgggcagattaagacayttaacttgttattttaactgtattccatatgataataagtagagatatgggagatacttaaaaaggccaaagtcaaacttttagagattaaaactataat

SEQ ID NO: 118914 - DNA, 201 bp, Homo sapiens
agaaaggatctctgtttccaagtaacttaactgcattacagaaacatagtttaagaatatgtataggaatacaaaaatatccagcaccccaaaaggtagayctataaaatctggcatccaataagaagttatcaggcatgccaagaatcagaaatatgttatccacaatgaggagaaaaattaatcatttgacatcaatcc

SEQ ID NO: 118915 - DNA, 201 bp, Homo sapiens
aaagagattgaggatggctcagttcaggccaccctcacttctgcagtcgcaggcgggagccgtgccctctcagtgggatatgaggagtgggggaatcagastaaaggcatcctgcatctgaacaaagacagtgccaattatggcagcttgcattctcaggttcttaacttggaaaaagccgctgtggtttcaggcacagcc

SEQ ID NO: 118916 - DNA, 201 bp, Homo sapiens
aaaaaatcaacttgatatcttggaaataaaaaatcacgattgaaactgacaaaatagaaagttgagcagattggcctcagctgaagtgtaaattagtaacytagaagactgaactgagaactttagaatgcaacactgaaccaaccaagagaaacataggaaaaaagactgatgcacgtagcataaatttagaatttctaa

SEQ ID NO: 118917 - DNA, 201 bp, Homo sapiens
gactgagctctacagactaagctctgatcataagagaacacagtgagaaagagattgaggatggctcagttcaggccaccctcacttctgcagtcgcaggygggagccgtgccctctcagtgggatatgaggagtgggggaatcagactaaaggcatcctgcatctgaacaaagacagtgccaattatggcagcttgcatt

SEQ ID NO: 118918 - DNA, 201 bp, Homo sapiens
ataatttgttgagtggtgtagcggaaacctctgctgtttacgttatgtctgtccttttggcccacttctaatttcaggtgaagctgtgtgcatgtgtgacygtagctgtggctatgcatggaggctgagcctggatcctgccctcagaccatgctgtagtcatggtcacagactgagccctcattttggtcacaggctgag

SEQ ID NO: 118919 - DNA, 201 bp, Homo sapiens
agtcccacctctgcccatgagatgagctctctgctgttactgcagcgtttcccaagcttgagtcacggtgacccagccaccatgagacagccactttacayaccattaatcagcagaatggctggcaaatgctaacccacttagcagtgatatcctagcaggtgacagctaccggagctgacagcatctggccggagggca

SEQ ID NO: 118920 - DNA, 201 bp, Homo sapiens
ctgggattacaggtgtgagccaccgcacctggcccttggtgattgtgttctgtgtctgtagtccttcttctgaaaaataatccctggtgttgctctttgcycgagtccttcagaaatgctgcaaacagtaaacaagcaactccactccaaggaggtgaatcatctgctgacgggattgcattccacatcaattctcgtgtc

SEQ ID NO: 118921 - DNA, 201 bp, Homo sapiens
tagtttctagcctcttgaggcattgagaggattgatgctgtgacctcatatgtatcatttgggttacaaatatgaatatgggatggcaggggggtggtccmtctggcctcaacctgtctttgtaacagtcgtgacattctgcatatatatactcccatatacatgagaggattaaatgagttaacccgtgtaaagcacaca

SEQ ID NO: 118922 - DNA, 201 bp, Homo sapiens
cgcccgccaccatgcccggctaattttgtacttttggtaaagtacaaaatgttggccaggctggtctcgaactcctaacctcatgtgatccacccacctcrgcctcccaaagtgctgggattacaggtgtgagccaccgcacctggcccttggtgattgtgttctgtgtctgtagtccttcttctgaaaaataatccctgg

SEQ ID NO: 118923 - DNA, 201 bp, Homo sapiens
attaaaaataataacaatgtactgcagggtttgtaacatatacaaaaggaaaatgtataataacatgaacacaaaagttgggtggggataaatggaactaygctatcgtaagtttcccataccatacttaaaatggcatcatatcacttgtaagtggactataacaggttaaatatatatatacatatataaaaaataaac

SEQ ID NO: 118924 - DNA, 201 bp, Homo sapiens; identical to SEQ ID NO: 20301

SEQ ID NO: 118925 - DNA, 201 bp, Homo sapiens; identical to SEQ ID NO: 20308

SEQ ID NO: 118926 - DNA, 201 bp, Homo sapiens
atccaaaacatggctccgaaccatatttctctgacagtttaacataaattcttccaggttctgtttaaagccatttcctcttagaaagtagctgattatcrtctgctgactattaagctatgaggtacttaatatccatttaaggtttcggtacagccaagtcaaattcagcttgcatcctggaaccttgtaacaagcagc

SEQ ID NO: 118927 - DNA, 201 bp, Homo sapiens
acaactacagattttgacatcaagtgtgtttacaaaataataggccatgtccgtatgacagcagtttatgtggaagcaataatagctcttaaacttggcasgaattttaataattttttaaaaacaatctctggaagcaagtctgcacctgactgccataaaacccacaagccaggacttgtggcttacctaaacatctca

SEQ ID NO: 118928 - DNA, 201 bp, Homo sapiens; identical to SEQ ID NO: 20313

SEQ ID NO: 118929 - DNA, 201 bp, Homo sapiens
tgctactgttttaagtcactcagtttgtggtgctttgttatggtggccccaggaatcctaaacaatatgctatcaggaaacaatggaaactgcactgaactatttatttattattattattattattattattattattattattattattattttgagacgaagtctcgctctgtcgccaaggctggagtgcagtggcac

SEQ ID NO: 118930 - DNA, 201 bp, Homo sapiens
gacccagtgaggagggatgcataaattgcccctaaaagaccaagtagaatttctggcaagtaacgttccataactggcaggtttttgggcctggcctggtmaactgtcaacagtatccaaaacatggctccgaaccatatttctctgacagtttaacataaattcttccaggttctgtttaaagccatttcctcttagaaa

SEQ ID NO: 118931 - DNA, 201 bp, Homo sapiens
gctactgttttaagtcactcagtttgtggtgctttgttatggtggccccaggaatcctaaacaatatgctatcaggaaacaatggaaactgcactgaactatttatttattattattattattattattattattattattattattattattttgagacgaagtctcgctctgtcgccaaggctggagtgcagtggcacg

SEQ ID NO: 118932 - DNA, 201 bp, Homo sapiens
ctactgttttaagtcactcagtttgtggtgctttgttatggtggccccaggaatcctaaacaatatgctatcaggaaacaatggaaactgcactgaactatttatttattattattattattattattattattattattattattattattttgagacgaagtctcgctctgtcgccaaggctggagtgcagtggcacga

SEQ ID NO: 118933 - DNA, 201 bp, Homo sapiens
tactgttttaagtcactcagtttgtggtgctttgttatggtggccccaggaatcctaaacaatatgctatcaggaaacaatggaaactgcactgaactatttatttattattattattattattattattattattattattattattattttgagacgaagtctcgctctgtcgccaaggctggagtgcagtggcacgat

SEQ ID NO: 118934 - DNA, 201 bp, Homo sapiens; identical to SEQ ID NO: 20314

SEQ ID NO: 118935 - DNA, 201 bp, Homo sapiens
tgttttaagtcactcagtttgtggtgctttgttatggtggccccaggaatcctaaacaatatgctatcaggaaacaatggaaactgcactgaactatttatttattattattattattattattattattattattattattattattttgagacgaagtctcgctctgtcgccaaggctggagtgcagtggcacgatctc

SEQ ID NO: 118936 - DNA, 201 bp, Homo sapiens; identical to SEQ ID NO: 20300

SEQ ID NO: 118937 - DNA, 201 bp, Homo sapiens
tttaagtcactcagtttgtggtgctttgttatggtggccccaggaatcctaaacaatatgctatcaggaaacaatggaaactgcactgaactatttatttattattattattattattattattattattattattattattattttgagacgaagtctcgctctgtcgccaaggctggagtgcagtggcacgatctcagc

SEQ ID NO: 118938 - DNA, 201 bp, Homo sapiens; identical to SEQ ID NO: 20302

SEQ ID NO: 118939 - DNA, 201 bp, Homo sapiens; identical to SEQ ID NO: 20303

SEQ ID NO: 118940 - DNA, 201 bp, Homo sapiens; identical to SEQ ID NO: 20304

SEQ ID NO: 118941 - DNA, 201 bp, Homo sapiens; identical to SEQ ID NO: 20305

SEQ ID NO: 118942 - DNA, 201 bp, Homo sapiens; identical to SEQ ID NO: 20307

SEQ ID NO: 118943 - DNA, 201 bp, Homo sapiens; identical to SEQ ID NO: 20306

SEQ ID NO: 118944 - DNA, 201 bp, Homo sapiens; identical to SEQ ID NO: 20309

SEQ ID NO: 118945 - DNA, 201 bp, Homo sapiens; identical to SEQ ID NO: 20310

SEQ ID NO: 118946 - DNA, 201 bp, Homo sapiens; identical to SEQ ID NO: 20311

SEQ ID NO: 118947 - DNA, 201 bp, Homo sapiens; identical to SEQ ID NO: 20312

SEQ ID NO: 118948 - DNA, 201 bp, Homo sapiens
tggagagttctgccaggcaaattttgtgcatagccatgaggtataacctgggattggacatgaggaccaccgtctatgtcaacgccattgagaaagtgttyaaagtatacaatgaagccagagtgaccttcacgtagatggctcatgggtgacttccttgctaccctcttcacctgtaacttctgcagacctaccacaggt

SEQ ID NO: 118949 - DNA, 201 bp, Homo sapiens
tatacaatgaagccagagtgaccttcacgtagatggctcatgggtgacttccttgctaccctcttcacctgtaacttctgcagacctaccacaggtttacrtgttaccacagaaatccccttctctcttgactcattagataatggacactattcttaacaaatcgatccaaatcagctccctaagaagaaagtaattaag

SEQ ID NO: 118950 - DNA, 201 bp, Homo sapiens; identical to SEQ ID NO: 20316

SEQ ID NO: 118951 - DNA, 201 bp, Homo sapiens
cctttgcagggacatggatgaagctggaaaccatcattctcagcaaactatcacaaggacagaaaaccaaacaccgcatgttctcactcataggtgggaaytgaacaacgagaatgcttcgacacagggcgggaaacatcacacatcggggcctttcagggggtggggggtctgggggagggatagcattaggagaaatac

SEQ ID NO: 118952 - DNA, 201 bp, Homo sapiens
taagatgggagaactaggagtgtgtgtgacagggaggaaatgaagtcaggagcattatggttattccagatctctacatgaatgccaaaggagagacagcrtccaactttgagtggctgaagaatctaaatcatgtcagctatggctgtttgaccttcaaatatgaaagggagtgtaactaccacttgctaatatctgttc

SEQ ID NO: 118953 - DNA, 201 bp, Homo sapiens; identical to SEQ ID NO: 20318

SEQ ID NO: 118954 - DNA, 201 bp, Homo sapiens
acaccataattatgccaggacaataggtgcaaaccaggacagtcctgggcaaatcataccttgagtcactggtgtccttggctaggacagttttggtggcrtattgagtgcaaagcccagtgtgtgtgggttcaggaaagaatggaaggaggaaaagtgaaaacagtgcgtatgaacaactgtttcaagaaggtttcttaa

SEQ ID NO: 118955 - DNA, 201 bp, Homo sapiens; identical to SEQ ID NO: 20319

SEQ ID NO: 118956 - DNA, 201 bp, Homo sapiens; identical to SEQ ID NO: 20320

SEQ ID NO: 118957 - DNA, 201 bp, Homo sapiens; identical to SEQ ID NO: 20321

SEQ ID NO: 118958 - DNA, 201 bp, Homo sapiens; identical to SEQ ID NO: 20322

SEQ ID NO: 118959 - DNA, 201 bp, Homo sapiens; identical to SEQ ID NO: 20323

SEQ ID NO: 118960 - DNA, 201 bp, Homo sapiens; identical to SEQ ID NO: 20324

SEQ ID NO: 118961 - DNA, 201 bp, Homo sapiens; identical to SEQ ID NO: 20325

SEQ ID NO: 118962 - DNA, 201 bp, Homo sapiens; identical to SEQ ID NO: 20326

SEQ ID NO: 118963 - DNA, 201 bp, Homo sapiens
tgaagaaaaacaaataataattgtacctaccacttattcagcactaactgctcaagaaaatacttttcatgcactttttaataatcaccactaccccaggwgtagataatattattactccatttatttaaatgcaaaaattcatcggcccatctctcacctggacattcctaactcagacctattcatatgcacaccctg

SEQ ID NO: 118964 - DNA, 201 bp, Homo sapiens
aaggaatagactttagtttcaagaactggaactacaaataactctttgtcctaatgaaaacacaaacaacaataacaataaaaacaaaaaataactatacwgactctcaatgaaaaggtagactaagagtctttgttgggggtttgggagggggaagccacaaccctgaatttaacaggaacacgttcctttcactgagaa

SEQ ID NO: 118965 - DNA, 201 bp, Homo sapiens
taattgtacctaccacttattcagcactaactgctcaagaaaatacttttcatgcactttttaataatcaccactaccccaggtgtagataatattattastccatttatttaaatgcaaaaattcatcggcccatctctcacctggacattcctaactcagacctattcatatgcacaccctgctctcttcaattttccc

SEQ ID NO: 118966 - DNA, 201 bp, Homo sapiens
agaggactgggtggagtattttatcatttacattgtttagaaagctggtgtaggttgacctttaacaggtttcattactggttttaaattgtctacaggcwatatacccccatatggcctgtacccagggtaggctgatgccattgtcctgcccttagtgtgtgtctgtcccaacagaacactgagcaaatgtcatgggca

SEQ ID NO: 118967 - DNA, 201 bp, Homo sapiens
cgtatgcaaagattaacacaacatggatcatagatctacatataagaattaaaactatacaactttcctagaaaaaaacataggcataaatctttataacmctggattagcaatagtttcttagatgtgatcccaaaagcacaaacaacaaaagaaaaaaattaattagtctttattaaaattaaaacatttgtgcttcaa

SEQ ID NO: 118968 - DNA, 201 bp, Homo sapiens
aaactttttattcttaaaaacattttattctgaaatattttttcttaaatatctttattcttaaaatatcatatgtccctacctcataccgtatgcaaagrttaacacaacatggatcatagatctacatataagaattaaaactatacaactttcctagaaaaaaacataggcataaatctttataaccctggattagca

SEQ ID NO: 118969 - DNA, 201 bp, Homo sapiens
cttaaaatacattcctagaaataggattactgattgaaaggatatacacatttctaaggcttttcacctcttttgccaagttaatctccatttattcagtmagcaaatatacattgattgcctattatctgtttgcttctatacctaagtctgagttacagttgggggacaacataaatacagtccttgcctttatagagt

SEQ ID NO: 118970 - DNA, 201 bp, Homo sapiens
cttatttttaaaactttttattcttaaaaacattttattctgaaatattttttcttaaatatctttattcttaaaatatcatatgtccctacctcataccrtatgcaaagattaacacaacatggatcatagatctacatataagaattaaaactatacaactttcctagaaaaaaacataggcataaatctttataaccc

SEQ ID NO: 118971 - DNA, 201 bp, Homo sapiens
agattaaaacagggcccattctatcaggctcacttatcttaatcacttctttacaggccctatctccaaatgctgtcacattctcagatactgagggttasgaattcaccatatgaatcctggagaaacacaattcaacccatgacagagggtcccaggctacaattcattaggctcctcacaaggtcctgatgggcagaa

SEQ ID NO: 118972 - DNA, 201 bp, Homo sapiens
tttttaatgtctatgacctctgaaaatgaaaaccagaaacgttaaaatccatttatcttcatataacatgcataaaagttatttggggattcctggaccaytttcaaatatgattttagttggatatttcacaatcctgttatttttgaattgcctgttggcttaaaatttatcacctagatctttatgactgttttagct

SEQ ID NO: 118973 - DNA, 201 bp, Homo sapiens
gaagccacaaccctgaatttaacaggaacacgttcctttcactgagaaaattatgatttgcaatcacattcagcctaacagtcccaggtagtcccagatastgtgtaagagtcaggcttctggacagaggtttagtaatgggatggattcgtgtttttggaagccagtaaaacttgaggacgagttaggagacatgtgaag

SEQ ID NO: 118974 - DNA, 201 bp, Homo sapiens
attgttttatgccactgagctctttgaggccatttgttacactgaaaaagctaactaatacatagagattatctctggatagtgaaattaagtgatttttwaaattatttgtgcttctaagtatttttcccaattttccactataaatatttattgtttctaatatgatttaaaaacctgaaatatttcatgccaaaatat

SEQ ID NO: 118975 - DNA, 201 bp, Homo sapiens
aaaggaccattgtaaaagaaatgtttaaaagcaggagaattaagggaataaaagttgaattcatccacaaaattatatgagcaataattttggttttttttgttgagacagggtctttctctgttgcccaggctggagtgcagtggctcaatcacagctcactgcaggctcaacttcctaggctcaagggatcctcccact

SEQ ID NO: 118976 - DNA, 201 bp, Homo sapiens
tcgcttaaactcgggaggtggaggctgcagtgagccgagatcacgtcactgcattccagtctggtgacagagcgagattccgtctcaaaaaaaaaaaaaaraagaagcttccccaaaaatgcacttacacactggaagatcaaggagtaaagagtcatgatgtctacaatttattctcatattcttcagcaataacaacaa

SEQ ID NO: 118977 - DNA, 201 bp, Homo sapiens
agcattccagcccattttggcttttatcagtcctgaaaagactgataatttactgtgttcagcagtttttgtaaatatcatgcttggcattccataacatsactccttttgttctgtgtatgactttgacctaacccctcattaaatccattatgtagaggacagaaaatatcacttatctgttgaaatgtttacttgtgg

SEQ ID NO: 118978 - DNA, 201 bp, Homo sapiens
tattaggttcccctcaatgtcagcattccagcccattttggcttttatcagtcctgaaaagactgataatttactgtgttcagcagtttttgtaaatatcwtgcttggcattccataacatcactccttttgttctgtgtatgactttgacctaacccctcattaaatccattatgtagaggacagaaaatatcacttatc

SEQ ID NO: 118979 - DNA, 201 bp, Homo sapiens
tgagaaagaggaagcatttagttaatcttatttaggtttttaaatagtaacatttaattttgatgtattaactaaattttactaattcacagagctaggcwtgaagagtcttctatttagtttttcaaggatattaagatcctagccattcttgcattgctaacaatatcatggagtttcaaagtacatcttttcttttca

SEQ ID NO: 118980 - DNA, 201 bp, Homo sapiens
ccagaagttgaattactgagtcaaagaatatgaacccacatttgctatatattgccttgttgctttctaaaagtgttatagatatttgataatttagaatyttatctgcagaatttttaatgcaatgcaagacatttggtaactgttaaactgttttctttagagttctcagttctgtgacagctggcatccacaagtgaa

SEQ ID NO: 118981 - DNA, 201 bp, Homo sapiens
tacactttgaggactactgctctaaagtctccagttggatttttttttttcttttttagacttttcttccaaaaatcactctcctgagttattttataatrctggttataaaagtttgagggctctgaaaaaggttagctgtttggtttgtaattcgtaagtcaggtgtttgcaaattggtaactatacacacattatgaa

SEQ ID NO: 118982 - DNA, 201 bp, Homo sapiens
gccaaaacaaggaggcaactcaagtgttcattaatgaatcaatggataaacaaaatgtggtgtatactatacacacaatggaatactagtgacctttaaamaggagagaaattggccaggctcagtggctcacgcctgtaatcccagcactttgggaggccgaggtgggcggatcacctgaggtcaggagttctagaccag

SEQ ID NO: 118983 - DNA, 201 bp, Homo sapiens
cctttgtatactgttggtgggaatgcaaaatggtgcagccatgtggcaaacaatatggcaatttctcaaaaaattaaaaacagaattaccaaatgatctgrcaattcaacttctggttatataaccaaaagaactgaaagcagggtctcgaagagatatttctacactcatgtttatagaagcattattcacaacagccaa

SEQ ID NO: 118984 - DNA, 201 bp, Homo sapiens
ataacttctcaccatctccattgccactaccatgcttcaagccaattcatgtcctgtctgtattactgaaataggttccaagatggtgcactgattctacmtgtacctccttgtcatctattctcaacacagaagccaaaatgagtctgttaaaacataagctaaagtggtcattcctctggacaaaatactccagtggct

SEQ ID NO: 118985 - DNA, 201 bp, Homo sapiens
aaaagtttatatttcaccaagttcttttccttatgtggtgccccctacccaaaataaatttaaaagttgtttagcaacaatactaatgtcaacaataatascttcctttgttttataattaaaggaagtttttgaagatttgtttagaattttaatatatctactgcagagatccacttttgtagagataactttgttatg

SEQ ID NO: 118986 - DNA, 201 bp, Homo sapiens
cataaaaaataatttgcttgacctcatacaaataaaaaataatttgcttgacttcataccatatgaaaaggttaactcgtaatgaatcatagatgtaaaaygagagctaagactaaaaaatatctagaagaaaatctttatgaacttgggtaggcaaagaattcttagatatgacacacaaagcatgatccttaaaataaa

SEQ ID NO: 118987 - DNA, 201 bp, Homo sapiens
gatgagaaaaggggagatggtcaaaggatacaaagtatcagttaggaggaataagttttagagatgtactgcatagcatggtgagcacagtcaataacaaygcattgtatatttcaaaactgctgaaagagtagatttttaaaattctcaccacaaaaaatggcaagtaggtgaggtgataaatatgttaataagcttgat

SEQ ID NO: 118988 - DNA, 201 bp, Homo sapiens
ctggggattcagtggggaggtagctggtgagagagatgagaaaaggggagatggtcaaaggatacaaagtatcagttaggaggaataagttttagagatgwactgcatagcatggtgagcacagtcaataacaatgcattgtatatttcaaaactgctgaaagagtagatttttaaaattctcaccacaaaaaatggcaag

SEQ ID NO: 118989 - DNA, 201 bp, Homo sapiens
aaaacacaccgcatctcactgagaacccagaaacctgttcaggactccttcctttgcacaagaaagctctcttctttctttcgcctattaaacttctgccsttaaacccactccttgtgtgtccacatcctcgatttccttggcatgagacaactaacctcgggtattaccccagacaaatgaagccgcttcaccaggatg

SEQ ID NO: 118990 - DNA, 201 bp, Homo sapiens
gcttctttgcaggctatgtatatgatacacctggtccaaccagtctttgggccctatataaatcagagaccacctccctaagctcatctataaaacacacygcatctcactgagaacccagaaacctgttcaggactccttcctttgcacaagaaagctctcttctttctttcgcctattaaacttctgcccttaaaccca

SEQ ID NO: 118991 - DNA, 201 bp, Homo sapiens
aaattcaaaaatatcacaatgtttgttactatttttctctttccttttgttctggaataatattgctttgctccagaaacaatgaatcatttgtcatctgygttatgctctcttccaaataaaatagctatgtagaatggacttatagacaaaagccttcttgagtctgaagacatgaggataatatatttaagactggtg

SEQ ID NO: 118992 - DNA, 201 bp, Homo sapiens
gtttaagattacaaatatttgacaaaatttctgtggttttgcaatttaaagataccttaatatcttttactgttaaaataatgattaaacaataagctggkcacagtggctgatgcctgtaatcccagcactttggagaccaaggaggtggatcacttgaggtcaggagttcgagactagcctggccaacatggtgaaacc

SEQ ID NO: 118993 - DNA, 201 bp, Homo sapiens
ccccttcatttctcagatgaggaaacttgctctatctacacttgaaagggaggaaatgacataaggacaactattgcaaccattcatgcgggttccccacrttaacttaaagcaatcagttaacaaactatggccttttaagacaaagaccatgcatgtgtttccctaatgtgcttatctttttctgtggtaaacagcgtc

SEQ ID NO: 118994 - DNA, 201 bp, Homo sapiens
ccactccagaaagcaaattgcactgacagatgaaatatccactcagtttatcacgttttggcctacacgaggaccataataagtagagaggaagattttamtatgtgtcccacaactcctattctcaatgtttaattactgctttttcagactctttctgaatatctggcttattggttctgtaccaatattaatttttgc

SEQ ID NO: 118995 - DNA, 201 bp, Homo sapiens
tttgtgtttcagggaacctctccacgtttcaagggaaggttgtgactaggtctggccaatcagaaattttacactgcccttgccacaatgattggttcagrgttatacacatgacccaatcagaactagtagagtcaatgctggccgattggctgaaggaactgaaagagttcacataatctcatcaggtttatcccttgg

SEQ ID NO: 118996 - DNA, 201 bp, Homo sapiens
acgcccaacaagtaaaatttctcacaggtataaaatctggggatcacaaggcaagaaacagaaaactagaaggtattgtcaaattaacaaagctggaaacrtggctggctcagccacctctctttatcctgggcaccttacacataaggtgtccaagaaatgtttgttgatttgatctgattgagagcagttcaaatcctt

SEQ ID NO: 118997 - DNA, 201 bp, Homo sapiens
atgttccaagtaattactgagtttaagaaataaagtgacatctgtgaaacaaacctaaaattggcctgtagcatgaaacagagctgcccaagcctacccayagaactataagcaagaaataattgctcattgttttatgccactgagctctttgaggccatttgttacactgaaaaagctaactaatacatagagattatc

SEQ ID NO: 118998 - DNA, 201 bp, Homo sapiens
ctcatggtaccagcctggatcccacgcctgccaagggagactgcgtggagcggtagggggtgtgtaagcgagtatggggtctggccaccgcacagtcataygtgccagctgctgcagcggagcgggcagctccaggtgccagcacaggcgccagctctctgcaaggctgcagctggaccaggtgcaccgcaagcagcttcc

SEQ ID NO: 118999 - DNA, 201 bp, Homo sapiens
tcaaaatatgactagtatggccacccagccaaaagagagaactagcttaatacaaatgtgctctcacacacatacacacaaacatgtacttcttagcattytgttattttattctatgtggaagcagcagtatgtggatgcaaatggatttttcaagtatttctcttggcattatggccatatttaatgtaacatccagta

SEQ ID NO: 119000 - DNA, 201 bp, Homo sapiens
ttctgtagcaactgcaccctttttcattctcatcaatagtgcacaagagttccagtctctccacatcctcaccaacacttgttgttttctgtttttttgaraatagccatcctaatgggtgtgaagtggtatttcattgtggttttgatttgtacttccctaatattagtgatgttgagcatcttttcatgtgcttattag

SEQ ID NO: 119001 - DNA, 201 bp, Homo sapiens
attgtacgtatatgccacattttgcatagccattcactcattgatagacattcacgttctttctagtttttgactattatgaataatgctgccagaaacaygggtgtacctcattctgtcttgaatccactctgatcaggttttcatccccatgactcctctaagactactcttaccaaggtcccaaatatccttgatgtc

SEQ ID NO: 119002 - DNA, 201 bp, Homo sapiens
ggatctcattctcctcatctgcaaaattccttggaagtttctgggaggattttataaaggatgcatatgtgaagccactttatatgttataatgctttackgaaacgtcaggccttgccttttgtcttcacagcagcccaaactgaaattagcaggtagggctgtttgggttcagtgccctaaaaaccaaaaaccctgccc

SEQ ID NO: 119003 - DNA, 201 bp, Homo sapiens
aaaaagaaggaatctatgcaagcattcttagattaataaacataattcttcataaatatgaacagacaacctaggttcacaagaacaaaacactcttggcyttatttctacctcgatttttcacctttccttcacagaaaaactcctcaaaagattctatactttctgtctccagtttctgtttctcatttctttaacttt

SEQ ID NO: 119004 - DNA, 201 bp, Homo sapiens
caaaagcaattaaaaaaaaaaaaaaaaccttttgagcagcttctagaagccaaagggaatgtgaatgatgcacgcccaacaagtaaaatttctcacaggtrtaaaatctggggatcacaaggcaagaaacagaaaactagaaggtattgtcaaattaacaaagctggaaacgtggctggctcagccacctctctttatcct

SEQ ID NO: 119005 - DNA, 201 bp, Homo sapiens
atcggcccatctctcacctggacattcctaactcagacctattcatatgcacaccctgctctcttcaattttcccactaaaaaagaaggaatctatgcaarcattcttagattaataaacataattcttcataaatatgaacagacaacctaggttcacaagaacaaaacactcttggccttatttctacctcgatttttc

SEQ ID NO: 119006 - DNA, 201 bp, Homo sapiens
ataaaagttgaattcatccacaaaattatatgagcaataattttggttttttttgttgagacagggtctttctctgttgcccaggctggagtgcagtggcwcaatcacagctcactgcaggctcaacttcctaggctcaagggatcctcccacttcagcctcccaagtagctgggactataggtgtgcaccatcacacctg

SEQ ID NO: 119007 - DNA, 201 bp, Homo sapiens
aatgtttaaaagcaggagaattaagggaataaaagttgaattcatccacaaaattatatgagcaataattttggttttttttgttgagacagggtctttckctgttgcccaggctggagtgcagtggctcaatcacagctcactgcaggctcaacttcctaggctcaagggatcctcccacttcagcctcccaagtagctg

SEQ ID NO: 119008 - DNA, 201 bp, Homo sapiens
ctgtgttgtttttatgtgcttcaatactcatcatgaacatggactagttttataatatttttgaacctgattctctggcaaattgttttataatttttttwaaaaaatgactgctcaagtgggatggaattgtacaatctctattaatttactttcaaatatttcaacaaagggaaatattaactaaatgtggccaaatct

SEQ ID NO: 119009 - DNA, 201 bp, Homo sapiens
aaattaagtggggaggtggcaaggggcagtaaaaggagcgtccacaccaatatcatcttcccattcctggtttctgatgtgagtttcttggtgatcagtgstatttgaagaagaaaacgtatcctaccctaactagtaacttagaaggggcccagtcctcactctccatcaattaaggcaccaatctggagtgctgtcata

SEQ ID NO: 119010 - DNA, 201 bp, Homo sapiens
agagttttacattgattaactcatttagtcttcatgaaaacccatgagatatgtactatttttaccctctttttacaaataaaacactgaggctgagacasattaagtaacctgcccaggtcccagagtgggtaaatgacagttgagatttcaaccctggccacatgagtctagagtccctgttcctaactgctagactat

SEQ ID NO: 119011 - DNA, 201 bp, Homo sapiens
tccagaataggcaaatctatggagacgcaaaacagaatgagtgactgccagagactacagagatgtgagaaggaaaaatcactgctgacaggtaccttttygaggtgatgaaaattttctgtaattaagtagtgatgacaattcaacgtgtgaacatattttttaaaacccactgaattatgtactttaaaagaatgaatt

SEQ ID NO: 119012 - DNA, 201 bp, Homo sapiens
agtgtggcagggcagggctgttcagagcattgcctgcaacaggttgtccacaacaagggaagggatttgtgccagcatataaatcaaagtactgctctttyggcaagaaaatctcgccaaaaaaaaaaaaaaagaaaaaaaagctgaactaaacagtatacttagtgatgtaattgattgttttaaggtactttttttgac

SEQ ID NO: 119013 - DNA, 201 bp, Homo sapiens
aagtaagagtgttgtgaattcaaaaagtttgaagagctctgctcctggtccctgcctactccatggaatttctgaggctctgtttactttgagggtcaaarctggatatcttctacccgctgaaacttggaaagttttcatcactgctgctttgcaaaagaagtcagtttcctggtgactgaggaggagaagaaaggctgg

SEQ ID NO: 119014 - DNA, 201 bp, Homo sapiens
catcttcatcctgtggcagtatatttatactcaagtataaccaagaaccactccagaaagcaaattgcactgacagatgaaatatccactcagtttatcaygttttggcctacacgaggaccataataagtagagaggaagattttactatgtgtcccacaactcctattctcaatgtttaattactgctttttcagactc

SEQ ID NO: 119015 - DNA, 201 bp, Homo sapiens
atattaagcttaggtgactttgtggctctactgattttaagattctatgaaggtatttcggaagcaatttctttctcttcttctgtttccaaattatatgrtcatcttcatcctgtggcagtatatttatactcaagtataaccaagaaccactccagaaagcaaattgcactgacagatgaaatatccactcagtttatc

SEQ ID NO: 119016 - DNA, 201 bp, Homo sapiens
tttaaaatcacaatagcaaacacttttcaaacattgaccatcaccagagactgttctaagagttttacattgattaactcatttagtcttcatgaaaaccmatgagatatgtactatttttaccctctttttacaaataaaacactgaggctgagacagattaagtaacctgcccaggtcccagagtgggtaaatgacagt

SEQ ID NO: 119017 - DNA, 201 bp, Homo sapiens
tataacaaatagctgcacttcagccaatcatagcagctgagcttcagccaattacaggctgccaactgatcagaccacatccaaataaggcaaacgctgarctgtaatcaatcaagctgtttctgtacctcatttctgttttctgtctataaatgctgcctgcctacattgcagagcagagttctctgaacttcttctggt

SEQ ID NO: 119018 - DNA, 201 bp, Homo sapiens
tattttataacaaatagctgcacttcagccaatcatagcagctgagcttcagccaattacaggctgccaactgatcagaccacatccaaataaggcaaacrctgagctgtaatcaatcaagctgtttctgtacctcatttctgttttctgtctataaatgctgcctgcctacattgcagagcagagttctctgaacttctt

SEQ ID NO: 119019 - DNA, 201 bp, Homo sapiens
cgggcagctccaggtgccagcacaggcgccagctctctgcaaggctgcagctggaccaggtgcaccgcaagcagcttccacagttggcaccagggaacacrgtggcaccctgaagcttggagatgccaggaacctcagggacccaaataccactgctatcaatattacttggcctgtcatcagcatttgacattccttgat

SEQ ID NO: 119020 - DNA, 201 bp, Homo sapiens
ttgtcacagaatttttagggtgttgcttttctggccagaaacctctgtggccagtgacacctttgcccgagttctgctcaggcccgctggactcattctgyccactcagcctggcaggtttcctttgactcatggtaccagcctggatcccacgcctgccaagggagactgcgtggagcggtagggggtgtgtaagcgagt

SEQ ID NO: 119021 - DNA, 201 bp, Homo sapiens
acagttctactttctgtgtctatgaatttaactattctaggtactttatatataagggaactcatatttgtccttttgtgactggcttatttcattttgcwtgacgtcctcaaggttcatccatgttgtaacatgcatcagaatttccttcttttttaaggctgaaaaatatttccttgtttggatataccatattttgtt

SEQ ID NO: 119022 - DNA, 201 bp, Homo sapiens
ttctgtcttgaatccactctgatcaggttttcatccccatgactcctctaagactactcttaccaaggtcccaaatatccttgatgtcactaaatccattkaatgtttcttagtcttcatattgtcacagaatttttagggtgttgcttttctggccagaaacctctgtggccagtgacacctttgcccgagttctgctca

SEQ ID NO: 119023 - DNA, 201 bp, Homo sapiens
attcaagttggacttctccatgtgccttgttttgggccatggagtatggcaggtctgatggcaggccttaagaaatatcacatttccactaatcctctgartagacatgttccaagtaattactgagtttaagaaataaagtgacatctgtgaaacaaacctaaaattggcctgtagcatgaaacagagctgcccaagcct

SEQ ID NO: 119024 - DNA, 201 bp, Homo sapiens
tcccagctactcaggaggctgaggcaggagaatcgcttgaacccatgaggcagaggttgcattgagctgagactgtgccatggcactccagcctgagcaayaagagcaaaactctgcctcgaaaaaaaataaaaaataaaaaataattaaataattaaaataatgctacaaaataacgtttattgacatggaaatgttaac

SEQ ID NO: 119025 - DNA, 201 bp, Homo sapiens
aggagaattactttcaaaaggtattttccctgcacaaaagtagaatgacatagtgcaacataatcgtccttttttttctgccatggaacataagtgatggytttctgcacctttaaaagtcatactgagagtcctgagtcattgaggtttaattgggaaagactactaaaccaccaataacagatatgatctgcaactgag

SEQ ID NO: 119026 - DNA, 201 bp, Homo sapiens
agcatttttcatgtgaaaaaaaaaaggtttttaagatagtaacatgccatggtggcaagtaattgaagaagtgagaatccagatttttaaatatttttaartgttcataaccactgacctcaaaattccatttctggaaaattatctaaagaatgtaatcagaggtgggaacaaaagtgtattatttacaatagaaaaaaa

SEQ ID NO: 119027 - DNA, 201 bp, Homo sapiens
tattgacatggaaatgttaacaaggcaattaaaaccatatgtagcaaaggaaaccatttttatcatgataaaattaacataaaatgtaccactttaaccayttctatgtgtacagttcaatggcactaggtacattcacattgttatgccccttttaccactacccatctccagaatttatctcatcttgtaaaactgaaa

SEQ ID NO: 119028 - DNA, 201 bp, Homo sapiens
tgtcttctaagtacttctacccctcacctcctccttgcatgctgaagcagtgtccctccatcattggcagtaggcacaaatctaacttttcagggcactgraaatggatgctattaaggtagtgatataaaacgatctctattacaaagtgaaaaaaaaaagcaaggcactgaaattattatagtatgctcctacttgatt

SEQ ID NO: 119029 - DNA, 201 bp, Homo sapiens
ttgagatctatattttcaactcagtaacatcaagtgtttttatatttagaagcaaaattttctctgcattggaaatatcctacctggtagttttcatgctrctaagaaaattgactaatgggtagatcgatttatcctgtggcatacagcctggttaaaaaaataagattcaggctgggcgtggtggctcacgcctgtaat

SEQ ID NO: 119030 - DNA, 201 bp, Homo sapiens
ggaggctcacacctgtaatcccagcactttgggaggccaaggtggacgcatcacttgaggtcgggagttcgagaccagcctgaccaacatggagaaacccygtctctactaaaaatacaaaattagccgggcgtggtggcacatgcctgtagtcccagctactcaggaggctgaggcaggagaatcgcttgaacccatgag

SEQ ID NO: 119031 - DNA, 201 bp, Homo sapiens
gcctggctaatttctgtattttttgtagagacagggtttcaccatgttgcccaggctggtctcaaactcctgagctcaagcaattcgcctgccttggcctsccagagtgctagattacaggtgtgagccattgtgtttggccttattattgtacacatgtgaatgttgtattgctatgctgtgatattgtaataaaataga

SEQ ID NO: 119032 - DNA, 201 bp, Homo sapiens
ctctgaaagtaaatttccgaaattaagtccgtaggctgagggaccccctttgccatctgggcaaatgtaattagcaacccgtctggtgttcagggaaccargcagccgcgctcttctcaaaccagcctggaaatgcaaaacgcagtagcattaaacacgcactcccccagaggaaggaggaaggccacaagggggcagaga

SEQ ID NO: 119033 - DNA, 201 bp, Homo sapiens
ttacaggttattttctatttcttaacccaggtggcaggttcacacatctatttttttattatataaagtgtgcatatgtgttttatacactcttatgtttrtggagttgtgtttgctcaggtcctttaagaaacagatgccaaaatggggttaaacatgcaagagacttattagggaaatgcctggaagggaccacggtgc

SEQ ID NO: 119034 - DNA, 201 bp, Homo sapiens
tcataccagattaaaaatcagttttaggtacattaaagattaaaacataaaagacaaaaaatgtttaatacccaacacaggaagatgtgacttaagatctyagagtaaggaagaattccttaaataagacacaatataggaaaaggtagatatatttgattacttctgttcatctgtacatcaaaagagtcacaaagagag

SEQ ID NO: 119035 - DNA, 201 bp, Homo sapiens
aaagaattcttagatatgacacacaaagcatgatccttaaaataaaaatattaacaaattagattttatcaaattagaaaagtctactctttaaataacawgattaagaaaatgaaaaggcaaatgacagactaggacaaaatatttgcacaccactatctcatgaagaacttttatttacaacaaataaagaattcttac

SEQ ID NO: 119036 - DNA, 201 bp, Homo sapiens
ttttgcatagccattcactcattgatagacattcacgttctttctagtttttgactattatgaataatgctgccagaaacatgggtgtacctcattctgtyttgaatccactctgatcaggttttcatccccatgactcctctaagactactcttaccaaggtcccaaatatccttgatgtcactaaatccatttaatgtt

SEQ ID NO: 119037 - DNA, 201 bp, Homo sapiens
gggggcagagaatctgcaacccaaaggaaaagcaggtttcgccccaaatagaacatactcttttgtaaattgcccaattatctaaatgtctttcagaaacsaaattaagaatgctataaagacttcaatttgttcacataaaatggtgattcacaaaattgagcatgcctttttcttggagcctagataactagggtcttt

SEQ ID NO: 119038 - DNA, 201 bp, Homo sapiens
tatttatatgcatatgtatatttctacaattcagttaataaaatgattaataaaattgcttattgcaacaatttctgagaaacattagtcattaacagctmaaattgtaagcacagtactcaaaaagcagacataatcccttaatagctactggcccttctggagattttctgtaaccctgccatttaaacctaaccacac

SEQ ID NO: 119039 - DNA, 201 bp, Homo sapiens
aatgtccacagcagcattatttatgatggctaagacgtgaaaacaatgtgcatgtctaccaactgatgaatggataaacaaaatgtaacatacccatataraagaatattaattgaagttttgatacacgctacaacgtggatgaaacttgtagacattgtgttaaacgtaagaaatcagacacaaagagctacatattac

SEQ ID NO: 119040 - DNA, 201 bp, Homo sapiens
ttgggaaaacaggctggcagtttctcagaaaagttcctcaaaagattaaacgtagtttccaaatgacccattccagtcctaggtatattcccaagagaatygaaaacatatttccacacaaaaaaacttgtatgcaaatgtccacagcagcattatttatgatggctaagacgtgaaaacaatgtgcatgtctaccaactg

SEQ ID NO: 119041 - DNA, 201 bp, Homo sapiens
aatgctcatgcattgctagtgagattgtgaaatagtacactgcttgggaaaacaggctggcagtttctcagaaaagttcctcaaaagattaaacgtagttyccaaatgacccattccagtcctaggtatattcccaagagaatcgaaaacatatttccacacaaaaaaacttgtatgcaaatgtccacagcagcattattt

SEQ ID NO: 119042 - DNA, 201 bp, Homo sapiens
agaaaaaaacataggcataaatctttataaccctggattagcaatagtttcttagatgtgatcccaaaagcacaaacaacaaaagaaaaaaattaattagwctttattaaaattaaaacatttgtgcttcaaaaaacatcatcaagaaaataaaaagacaactcacagaatgagagaaaatattatgaatcatatgtttga

SEQ ID NO: 119043 - DNA, 201 bp, Homo sapiens
agcctgggtggcagagtgagactctgtctcttaaaggtaggcaggggcaggaaaagcaaggagccagaaattagaggttggaccagtgctcaatgagttcwtgcatttagaggtgttcttcaaggtgactagtgtcacaaactgagaaatctgttatggctcattttctgtaacaaacctaacttgaacactgctggtatt

SEQ ID NO: 119044 - DNA, 201 bp, Homo sapiens; identical to SEQ ID NO: 20329

SEQ ID NO: 119045 - DNA, 201 bp, Homo sapiens
cccagtactatcagccatggtcaaccacaccatgttcttcgacgttgctgtcgacagtgagcccttggaccacgtctcctttgagctgtttgcagaaaagkttccaaagacagcagaaaacgttcgtgctctgagcactgaagagaaaggatttggttataagggtccctgctttcacagaattataccagcatttatgtg

SEQ ID NO: 119046 - DNA, 201 bp, Homo sapiens
acattatgagaaactatataagcaatcattaaaaataatgctacaggctgggcgcggaggctcacacctgtaatcccagcactttgggaggccaaggtggrcgcatcacttgaggtcgggagttcgagaccagcctgaccaacatggagaaaccccgtctctactaaaaatacaaaattagccgggcgtggtggcacatgc

SEQ ID NO: 119047 - DNA, 201 bp, Homo sapiens
attatgagaaactatataagcaatcattaaaaataatgctacaggctgggcgcggaggctcacacctgtaatcccagcactttgggaggccaaggtggacrcatcacttgaggtcgggagttcgagaccagcctgaccaacatggagaaaccccgtctctactaaaaatacaaaattagccgggcgtggtggcacatgcct

SEQ ID NO: 119048 - DNA, 201 bp, Homo sapiens
atcattaaaaataatgctacaggctgggcgcggaggctcacacctgtaatcccagcactttgggaggccaaggtggacgcatcacttgaggtcgggagttygagaccagcctgaccaacatggagaaaccccgtctctactaaaaatacaaaattagccgggcgtggtggcacatgcctgtagtcccagctactcaggagg

SEQ ID NO: 119049 - DNA, 201 bp, Homo sapiens
aaaaagaaaagccatgtcgaaatacattcaacttcatcactaatctttgaaatccaaattaaaatatctacggaatagcatttttcatgtgaaaaaaaaaaggtttttaagatagtaacatgccatggtggcaagtaattgaagaagtgagaatccagatttttaaatatttttaagtgttcataaccactgacctcaaaa

SEQ ID NO: 119050 - DNA, 201 bp, Homo sapiens
ttggcataggatatgaacagacacttctcaaaagaagacatttatgcagccaacagacacatgaaaaaatgctcatcatcactggccatcagagaaatgcraatcaaaatcacaatgagataccatctcacaccagttagaatagcaatcattaaaaagtcagaaaacaacaggtgctggagaggatgtggagaaatagga

SEQ ID NO: 119051 - DNA, 201 bp, Homo sapiens
atggcaacaaaggccaaaattgacaaatgggatctaattaaactcaagagcttctgcacaagcaaaagaaactaccatcagagtgaacaggcaacctacaraatgggagaaaatttttgcaatctactcatctgacaaagggctaatatccagaatctacaaagaacttaaacaaatatacaagaaaaaaatcaaacaacc

SEQ ID NO: 119052 - DNA, 201 bp, Homo sapiens
taaatctgattcctatttcataccagattaaaaatcagttttaggtacattaaagattaaaacataaaagacaaaaaatgtttaatacccaacacaggaakatgtgacttaagatcttagagtaaggaagaattccttaaataagacacaatataggaaaaggtagatatatttgattacttctgttcatctgtacatcaa

SEQ ID NO: 119053 - DNA, 201 bp, Homo sapiens
aaaccataaaaaccctagaagaaaacctaggcaataccattcaggacataggcatgggcaaggacttcatgtctaaaacaccaaaagcaatggcaacaaargccaaaattgacaaatgggatctaattaaactcaagagcttctgcacaagcaaaagaaactaccatcagagtgaacaggcaacctacaaaatgggagaaa

SEQ ID NO: 119054 - DNA, 201 bp, Homo sapiens
taagggagatacaaattgaaaccacaatgagataccagcacatacccatttgaatgtttttttaaaaaaaaaacaccgataataccaagtgctggtgaatkcagagatatggaaatctcttatattgccgatgggaatcaccaaaaactgaaaacaccccaaatatccttcagtgaatgatggatcaaattgtgctacaac

SEQ ID NO: 119055 - DNA, 201 bp, Homo sapiens
gggaggctgaggcaggagaatcacttgaacccgggaggcagaggttgcagtgagccgagatcgcgtcactgcactccagcctggtgacagagcgagactgygtctcaaaaactaaataaataaagttaaaaaaaaataagtgagggaaaacagccacattctctcatttaaaaagacaaacactacatgatctcatttata

SEQ ID NO: 119056 - DNA, 201 bp, Homo sapiens
cctgccatttaaacctaaccacacgggccagtaaccagtgatacaggagctaaaaaaaaacaaaaattatttaggtatttagtaagggtaagagagttctyagtggaattatcttttaacaaaaagcagcccccaaatcatttcttttctaacaaagaccagcttgtaaaattgagctacagacatagataagcaagctgg

SEQ ID NO: 119057 - DNA, 201 bp, Homo sapiens
atggtggcaggtgcctgagatcccagctgtttgggaggctgaggcatgagaatcccttgaactccggaggcagagattgcagttagccaagatcacatcaytgcaccccagcctgggcaacagagcgacactctgtctcaaaaaaagaaacagataaaaaagaatttaatatttcaaaaatcttctacaatttgatcacca

SEQ ID NO: 119058 - DNA, 201 bp, Homo sapiens
ggattaccaatctgtgtttaaacaagccctgagggtgattctgaggcaggctacactttgaggactactgctctaaagtctccagttggatttttttttttcttttttagacttttcttccaaaaatcactctcctgagttattttataatactggttataaaagtttgagggctctgaaaaaggttagctgtttggtttg

SEQ ID NO: 119059 - DNA, 201 bp, Homo sapiens
ttttccttttttcccaagacggagtttcgctcttgttgcccaggctggagtgcaatggcactatcttggctcactacaacctccacctcccaggttcaagygattctcctgcctcagcctcctaagtagctgggattataggtacccgccaccacacccggctaatttttgtatttttagtagagacagggtttcaccatg

SEQ ID NO: 119060 - DNA, 201 bp, Homo sapiens
gtgcaccatcacacctggctaatttttaaatttttggtagaaatggggtctcactatgttgcccaggctggtctcaaactcctgggctcaagcaatcctcytgtcttggcctcccaaagggctgggattatggcatgagccaccatgcccagcattgctgtctatttttgaaaagcatttaagggtattagaaaatgctta

SEQ ID NO: 119061 - DNA, 201 bp, Homo sapiens
aagcaaccattgctttacaaacatagtctgttttattttttcctatatagcaaaacacaaccaaatcaaatttgaagggggaaattcctgtttattataaytccctcataaaagatccaggaatcaaatagaaaagtataagggatatggacaaaggaatctccactaaatctgtttaatcatataagtcactctaataaa

SEQ ID NO: 119062 - DNA, 201 bp, Homo sapiens
cacaggagaaggcccggccacactcactccctaagatggcgatcacacaaccactcccttggaaaggttgcggctcacagaggccggacgtcctccgggtyctaagatgtgtgcccttcgcgcgtcgtcggcgtgacgcacacagcgcgccactgcaagtacgcgtcgcccattggtggagaagagcgccgagcccgtagc

SEQ ID NO: 119063 - DNA, 201 bp, Homo sapiens; identical to SEQ ID NO: 20331

SEQ ID NO: 119064 - DNA, 201 bp, Homo sapiens
tgagagatactttcaatgttgtcatctcaatacaaacctgcatacggcatttcactaaatccaggggaaccacagcagtgtgtgtcagaccacaacttaakaccccaccaaagccacacagtgcataatacttcgcggagccaaattcacaactgtactctgtagtaagagaagacacaccatgcattttaatataaaact

SEQ ID NO: 119065 - DNA, 201 bp, Homo sapiens
tctcactgcagttccctttgggttctatgttttccttgttcctttccatgcctagctagattgcagagttaagtttatgattatgaaataaaaactaattmacaacagcaacaaaaaaagtaccagagtctatcggttgtcaacatggcatcaatgaacacctcttgtaatcatatttaacttccagacaaaaactaaaga

SEQ ID NO: 119066 - DNA, 201 bp, Homo sapiens
tcatttacattaggtatatctcctaatgctatccctccccccatccccgaccccatgacaggccccagtgtgtgatgttccccaccctgtgtccaagtgttcccattgttcaatacccacctatgagtgagaacatgtggtgtctggttttctgtccttgcaacagtttgctcagaatgatggtttccagcttaatctatg

SEQ ID NO: 119067 - DNA, 201 bp, Homo sapiens
attattaagttaaatctttacattaaaaatataagttgagttttgcacacatcgccactgcctccaggggccccatactatcagctatggtcaaccccacyaagttcttcaatgagccctggggccgcatctccatccagctgtttgcagacaagtttccaaagacagcagaaaatgtttgtgctctgagcattggagaga

SEQ ID NO: 119068 - DNA, 201 bp, Homo sapiens
gaggtgcatcagaccccctatcccatcatggccaagcattctgttttcaaggtgactctgcattcccttggccaggaggtggtccattcagccagttgggygggggtgggggggcacttagaattttattcatatttctagataggattggccacatttgtgggaaaggcataaacaccatccagactcttcatttctttc

SEQ ID NO: 119069 - DNA, 201 bp, Homo sapiens
acgtccaccagattctgggcctctctcctatgtcacagatgggaattctttccacattattcccagtgggtcttctcactcttttccaggctccttggagktcactgccctgatgacaacatggtcttcccttcaaggaagccacgtttctaagagggctctggcatatgcattggtgagttgaagcttgacagtgttata

SEQ ID NO: 119070 - DNA, 201 bp, Homo sapiens
agttgagttttgcacacatcgccactgcctccaggggccccatactatcagctatggtcaaccccaccaagttcttcaatgagccctggggccgcatctcyatccagctgtttgcagacaagtttccaaagacagcagaaaatgtttgtgctctgagcattggagagaaaggatttggttataagggttcctgctttcaca

SEQ ID NO: 119071 - DNA, 201 bp, Homo sapiens
gtggtagctgtggtggtcttcacataggatcacaaattccttggcatttgtcccatcaagagatgaagtctaatttcatccctctttttttttttttttttctgaaatggagtcttgctgtcttgctcaggctggagtgcagtggtgcaatctcggctcactgcaacctctgcctcccaggttcaagtgattcttctccct

SEQ ID NO: 119072 - DNA, 201 bp, Homo sapiens; identical to SEQ ID NO: 20334

SEQ ID NO: 119073 - DNA, 201 bp, Homo sapiens
aaattcaggaaatatggttttaataaaaacagatacaagctgtggcacgtgcttgtagtcccagctgacgcgcaggagggaggagtgcttgagcccggaarttcagggccagcctgggcaacatagtgagacctcgtctcaacaacaaaaatgaaaaaaatcaacaacaacagaaacacagatacatctaaaattgctctg

SEQ ID NO: 119074 - DNA, 201 bp, Homo sapiens; identical to SEQ ID NO: 20336

SEQ ID NO: 119075 - DNA, 201 bp, Homo sapiens; identical to SEQ ID NO: 20337

SEQ ID NO: 119076 - DNA, 201 bp, Homo sapiens; identical to SEQ ID NO: 20338

SEQ ID NO: 119077 - DNA, 201 bp, Homo sapiens
tcccaaatgttggaggtggggtcagccgagtgggaggtatttgagtcatgagagtggatcccttatgaattgctcagtgccatcctcacagtaatgcatgrgttctcaggctattagttactgtaggatctgatttgctaaagagagcctaacacctcttcctcctctctttcttcctctctgtcacacatgtggcatgct

SEQ ID NO: 119078 - DNA, 201 bp, Homo sapiens
aattttcaattgagtgaaaagatgaggcctattatgatggctgggttcagaaggtggggagacgatcaagttttaagaggtatcttaactttttaacaagytattttctcttttcttcctgaatattaaaagaagtgcccaaaataacacctgcaactagatatagagaaggcagctgctttgaacatgtaatagggacat

SEQ ID NO: 119079 - DNA, 201 bp, Homo sapiens
tttcactctgatgatagtttcttttgctgtgcagaagctctttagtttaattaaatctcatttgtcaattttgcatcaaaagcaatggcaacaaaaacctytttttttttttttcatagccacagtctgttccataatttcctggattggctctgtcataaattctgtgaaatcaggcacaacatagtcttctccagcagg

SEQ ID NO: 119080 - DNA, 201 bp, Homo sapiens
atgcaataggtatactgaagaaagcatcaaaatctttcaattacagaattgatcaagtagaagaatcagtgaacttgaatgcaagctacttgaaaacatayggcctgaggaaccaaaagtataaagaacaaaaaagaatgaagtgtgcctacaaggactagaaaatagcctcaaatctaagagttactaaaagggaggtag

SEQ ID NO: 119081 - DNA, 201 bp, Homo sapiens
ttccaccatatgctttagttttgtatcatacaaggatccatgttgtaaaagaagtcaaaaacatcttgaaaaatgagaacccctctgctagattaacttayagcaacttgcttctggcactgcttcttccatgtctttgtttttatcttttggtactactttggaagcactcatctccaacaggtcttctccaacaggtct

SEQ ID NO: 119082 - DNA, 201 bp, Homo sapiens
ggagagtttgtctccctgtttcaggagtggcaagagttagatgagatggaggaggtagaaggggaggcagaggagccaggcacagttggggtaactttatrgaaattcatcataatatatgactttttactttttcatttctctgaaaatatttctatacagtactaatcttccttccaccatatgctttagttttgtatc

SEQ ID NO: 119083 - DNA, 201 bp, Homo sapiens
agtggtagccaggcagtacttgctgcaagccttgggtgagacagagctgtactggcttcaggtgtgagccagcacattcccagctgtggtggctagcggamgaaagaagagggaagagtaaagaggagtttgttttacagctcgggtactagttcagccacagctgggtagagcattaagtgggctgctggggtccccaat

SEQ ID NO: 119084 - DNA, 201 bp, Homo sapiens
caaggtgagatcattaggatgagccctaatccagtatgactggtgtccttatataaaaaagaatttggacacagacacacacagggagaacgtcacataaagaagaagacagagattggggtgatgcatctgtaagccaaagaacaccaaagattgccagccaaccaccagaagctgggaaagaggcttggaacagattct

SEQ ID NO: 119085 - DNA, 201 bp, Homo sapiens
aaggtgagatcattaggatgagccctaatccagtatgactggtgtccttatataaaaaagaatttggacacagacacacacagggagaacgtcacataaagaagaagacagagattggggtgatgcatctgtaagccaaagaacaccaaagattgccagccaaccaccagaagctgggaaagaggcttggaacagattctc

SEQ ID NO: 119086 - DNA, 201 bp, Homo sapiens
taaataccaataatactaatttttttaaagaataaaacaatactaatcaaattgagacaagcatcaaagttcaccaggtgccttgcgaactacttttctcyagttcctacctatccttgactaatgtatacgatgagtatactgccaacataacaacccaccttttcacaggttgtactgaagcccagtctgaaataaggc

SEQ ID NO: 119087 - DNA, 201 bp, Homo sapiens
aggcctaatgattatcagtgtggcccacatcctcagtgcacctagattggaatgacaactgtcgtactaattatctgtatgaccttggaaatgtgcaatgyctttaaactctctgaacctcaatttcttgatctataaaatgggaatgacaatgccttctcatgaagttgctgtaaggaataaatgagataatctgtgcat

SEQ ID NO: 119088 - DNA, 201 bp, Homo sapiens
aattgcttgaacccaggaggtggaggttgcagtgagctgagatctcgacattgcactagagcctgggtgacagagcaagactctatcccccacaaccccataaaaaacaaacaaacaaacataaaaccacaccaaaaatttaaatgagaaagagagtctctcaatgtctagataataatcttatctcctggattgtcactt

SEQ ID NO: 119089 - DNA, 201 bp, Homo sapiens
aaaagctctgtaggttgtgctgagcactgagcagagaaatggccccattagcttctgcatgggctgctcactagactagtttgaagtggagtttcactgaygccttgcctctaggcatcctttccttcacctcaggatgaactgctactatgatttttaaagactttttaaagagaaattacaaaaagtgccatttgtttc

SEQ ID NO: 119090 - DNA, 201 bp, Homo sapiens
cttgaaactgctgtgatttgtcaggaatgtttattgaattaatgatttttcctttgaatggggattgtggttttacaaagcaactcaaaatattgagcagraatcagttcaaaattcttgactcatgttctagtcctctactggttgagacaccagactgtagtaaatcttgacaacagattttatacataaaattttact

SEQ ID NO: 119091 - DNA, 201 bp, Homo sapiens
gttgtatgtattccacttatttatcaaatatttactgagctccacaactgacaatatgagagtggcttaagggagtgacctcagagttttaaaggataaawaagagttttccagaaatatgaaggtgaatcagaatcctaggacgaagtaagagcaggtaaagtgagtggagaaataatcaagggtctaactattacctga

SEQ ID NO: 119092 - DNA, 201 bp, Homo sapiens
taacttgtaatttttgcactaagttcttactcatcactcttaattgccaaatcttagagctatgaaaaaaatacactgccactaatcatctaatgagatctgatattgcttatctagaaaatattcactctttaacagctttcttcacttaacatttggtgaaaaagtacaataattactgaagaaatgtaaatatccttc

SEQ ID NO: 119093 - DNA, 201 bp, Homo sapiens
tttaaaggataaataagagttttccagaaatatgaaggtgaatcagaatcctaggacgaagtaagagcaggtaaagtgagtggagaaataatcaagggtctaactattacctgaggttcttgaatcacctacactaaaattacctgaagtgtttgttaaaaatgtggttactatgccttttctcatgccaagtgaatcaca

SEQ ID NO: 119094 - DNA, 201 bp, Homo sapiens
ttaaaggataaataagagttttccagaaatatgaaggtgaatcagaatcctaggacgaagtaagagcaggtaaagtgagtggagaaataatcaagggtctaactattacctgaggttcttgaatcacctacactaaaattacctgaagtgtttgttaaaaatgtggttactatgccttttctcatgccaagtgaatcacaa

SEQ ID NO: 119095 - DNA, 201 bp, Homo sapiens
gacattaaagaaatattggtaggaagaaatacctttggactaactctcagaactctcatgtgccttagggactgagtttgttcctttcttctatttgataygcttgtcgggaaagcttgagatacagtgctccagggtttaacagggaaaagggactcagattattgaggttcagcaatgacggcgattaggatgccctgt

SEQ ID NO: 119096 - DNA, 201 bp, Homo sapiens
atttttaacacaaatttttgttttaagttcaatcatttcactgaccacattatctgatcttttagtttgatatacttgtatgtattagcctccaaaattaygtctcagaaaaataaaatcacattaaagaaatgtgtttttctctaattatttttaaattgtttctataacatgagcatgtacgctttatttcgaaaggaa

SEQ ID NO: 119097 - DNA, 201 bp, Homo sapiens
cagtggcttagagacataacctagccatggtatggctgattagtcttttacttttatagattcaaattcgagcatttaatccatttgtatctctagtctawgttttcattaggccccataaggcctctgtagagaagcatttaatgatttaatgtctcatcagtatttggtgccctttcttctctattgggcagcatgcct

SEQ ID NO: 119098 - DNA, 201 bp, Homo sapiens
atgttttcatgacctgcttcaggggaaaatggcagtaaagaggtaagagaggttttcttgcttctgttgtcttctcaaatgccaagctgccatattttggmgtcaaatttcctgaacctcatggtggccattcctgtagtttggatcccagaagctgtattaaagaacttggcaaaggctaattgcccaggggacactata

SEQ ID NO: 119099 - DNA, 201 bp, Homo sapiens
attttcaattgagtgaaaagatgaggcctattatgatggctgggttcagaaggtggggagacgatcaagttttaagaggtatcttaactttttaacaagckattttctcttttcttcctgaatattaaaagaagtgcccaaaataacacctgcaactagatatagagaaggcagctgctttgaacatgtaatagggacatt

SEQ ID NO: 119100 - DNA, 201 bp, Homo sapiens
gccaatgatggtttgtgatcattaagaaagagtctaagataagaatctattaatgaaagcagtcacaaagaaaccactgtgctaaacgtctaatattacasgtactctgccagtgtttctggtaaagtgtctaaacacgagagtggtcacaggatttttttcatcatctacctaggactagagtccttgctattttcatgt

SEQ ID NO: 119101 - DNA, 201 bp, Homo sapiens
cttctcttgtgattgaacggtttccagtggcataagcaaactctgttgctctcttgtagtccaaactgtgtattgtttggtgggtcactttataagaagtwacactttctaatggttactacataaaaaggcactataagaacatgtttctagatttcctggactaaggctggtccagtttgattgatatgaaagcaaaat

SEQ ID NO: 119102 - DNA, 201 bp, Homo sapiens
cctaagctctcgcttgcccaggttaccaaggatctttaggctgccaaatcattcattctcaacctgaatctcagcaggacttgaaaatattgccctactckaaaacacttaattttcttggctctcaaaaaaagacttagtatttatttttttcagcctcctcttcttttactttactgaatccttcagaaccctgaactc

SEQ ID NO: 119103 - DNA, 201 bp, Homo sapiens
tatttgccttttcttttttatcttataagaaaataaaattatcttagtgcaaggtcatggtgcatttcatgaaacactcataatatttttcttttctcagyatccacaaaccagtgaaaatttgtcctaattactgaaagattgtcagactctggatatacacaaaataaccttctctgtaccaggtgttgagggaattgg

SEQ ID NO: 119104 - DNA, 201 bp, Homo sapiens
atgtcacaaactacaaactttttaccacaatctgcacctcaaccctctctccctgcttccaattttcccacaccaagcaaagtttattactgggtttaaaktgttatcctcaggccgaggtttgtatacattttccctccccacttcaagtgtcacaggtgctagacgccatcaggataaatgtggcatattatttgagag

SEQ ID NO: 119105 - DNA, 201 bp, Homo sapiens
gggatgtaagttgtcactttgggccgcagtttcaggctttttggcttgagggtggggttttcactgggaacctgcccttttatgcctagaatttctctgcstcctgtccccatcacttatagacctcttaaaagggatactgaaatgcatctttaagtatgtcaagccaaaacatcagaaattcacaatatggtcccctgt

SEQ ID NO: 119106 - DNA, 201 bp, Homo sapiens
taggagattttgaaactaattttgtagctgggtatcacatatccccaatgaatattaatttgaaacttatggctagaagtatggcttttgtttttagcatyacaatgctttattttcttagctgaatctttaatataaatgaatacatgattttttctgtacttttgcgaatgattacacacagtcaaaaatccatgtata

SEQ ID NO: 119107 - DNA, 201 bp, Homo sapiens
ttaagtaactctccttttcttttctgctaacctcatctaaattttgtcagattttaataccaccatatttaactcatttaatcttaatgtgagcttgcttyttccttgactttctattacattcttttcttttagaaattattcatcacttcctagtgaccaaatccaattcctcttctcactttttatcttctttattct

SEQ ID NO: 119108 - DNA, 201 bp, Homo sapiens
aattttcccacaccaagcaaagtttattactgggtttaaattgttatcctcaggccgaggtttgtatacattttccctccccacttcaagtgtcacaggtsctagacgccatcaggataaatgtggcatattatttgagagtactgacttttctttaaaaggggtttttgttaacgtgcgtgtgcttgttttgtttttaaa

SEQ ID NO: 119109 - DNA, 201 bp, Homo sapiens
gaggggacatatcctaaactgccctgcagtctaaggaaggttcagtttgccaaagcctttgtgttgtctttaagccaaagtcagctgtcggggatagctcrggtcctccaggaacagattggccttagtatccctgccatgctcattcactgcttgtgagcagctgtagcaggcacatcctcagctcaaatgaggtgatgg

SEQ ID NO: 119110 - DNA, 201 bp, Homo sapiens
gcatatattgtaaacaaaaattttctatgaattacatttgtgtattttataatgattctgaggcatgagtgtatctctatgcaatataaaataaagtggartgaaataactaatgaatagccaggcagatcattataccaaatattttggcttttcttatatatatactcatatgtttttaccatctgcaaaaatatgatt

SEQ ID NO: 119111 - DNA, 201 bp, Homo sapiens
taactcatttaatcttaatgtgagcttgctttttccttgactttctattacattcttttcttttagaaattattcatcacttcctagtgaccaaatccaaytcctcttctcactttttatcttctttattctgctatatgcaggattggaagctatctcttcttaaaatagttcctgggaccaagtatcccttcatttgtt

SEQ ID NO: 119112 - DNA, 201 bp, Homo sapiens
gcaagtttaatactggatgaagggaaggtagagatgacaatagaggggacatatcctaaactgccctgcagtctaaggaaggttcagtttgccaaagcctytgtgttgtctttaagccaaagtcagctgtcggggatagctcgggtcctccaggaacagattggccttagtatccctgccatgctcattcactgcttgtga

SEQ ID NO: 119113 - DNA, 201 bp, Homo sapiens
gaatatatatatattttacttataataccattagcacatttcatttttttagtatttctttgctcaatatttatatttggaaacatctcaacagctgcaarttatatggataagttaaattatgctatttatttgcaatcacgtggaagaaaaagcaaatgcatatattgtaaacaaaaattttctatgaattacatttgt

SEQ ID NO: 119114 - DNA, 201 bp, Homo sapiens
tcatcacttcctagtgaccaaatccaattcctcttctcactttttatcttctttattctgctatatgcaggattggaagctatctcttcttaaaatagttyctgggaccaagtatcccttcatttgttccttacgacattcgatcacttcctcaacatgtactcctcagaaatgcttcaccagtgaaaaattaaactcata

SEQ ID NO: 119115 - DNA, 201 bp, Homo sapiens
acagggagaacgtcacataaagaagaagacagagattggggtgatgcatctgtaagccaaagaacaccaaagattgccagccaaccaccagaagctgggaragaggcttggaacagattctctctcacagccctcagaaggatccaaccctgccaataccttcatctgggacttccagcttccaaaactgtgagacaatac

SEQ ID NO: 119116 - DNA, 201 bp, Homo sapiens
cttagctcttttctgttacctgtgcaatgaagtcctacttaattctcacctggttaaaacgcatagaatggtttatggttgtacctgggtggctacaggtrccgtaagtatacttccattcattgcaacaacaacaaaaaagtccctgacaaataatggtctttataccattaaattaaaaaaaaaatcctcaagattatt

SEQ ID NO: 119117 - DNA, 201 bp, Homo sapiens
ttctcactttttatcttctttattctgctatatgcaggattggaagctatctcttcttaaaatagttcctgggaccaagtatcccttcatttgttccttaygacattcgatcacttcctcaacatgtactcctcagaaatgcttcaccagtgaaaaattaaactcatacagggtactgtatgagttaggcagtactcagag

SEQ ID NO: 119118 - DNA, 201 bp, Homo sapiens
ttgagttgcaccccctcaaaaaaaatatgctggagtcctaacacgtagcacctctgaatgtgacctcatgtgaaacagggtccttagagaggtaactaaaycaaggtgagatcattaggatgagccctaatccagtatgactggtgtccttatataaaaaagaatttggacacagacacacacagggagaacgtcacataa

SEQ ID NO: 119119 - DNA, 201 bp, Homo sapiens
acgatctcggctcactgcgacttctgcctcccgggttcaagcgattctcctacctctgccttccaaatagctgggactacaggcacgtgccaccacgcccrgctaattttttgtatttttagtagagacggggtttcaccatgttagccaggatggtcttgatctcctgaccttgtgatccgcccgcctcaacctcccata

SEQ ID NO: 119120 - DNA, 201 bp, Homo sapiens
gtgactatcaaagttgtaagcagtcttactgaggaggtatttaagaggtagatattgcataaattgctgatggttcgggggtgggattatgtaagaaccayagaacataattatgactccagtgttgtttctcactctaggaggtggaaaagactggagaggaccagatttgcttactctacttgctgaagtgtaaaaggc

SEQ ID NO: 119121 - DNA, 201 bp, Homo sapiens
aagaggtgattccatgagtgtgtcatttgctatttctaagcatatgggaagcaaaatcttgtgattgactggttaatagtttggttataggttgagttgcrccccctcaaaaaaaatatgctggagtcctaacacgtagcacctctgaatgtgacctcatgtgaaacagggtccttagagaggtaactaaatcaaggtgag

SEQ ID NO: 119122 - DNA, 201 bp, Homo sapiens
tagaaatcttggcatggtgtagctgttttctcccactcagggattctcacggggccacaataagatgttggccaagttcgtagttatcttcaggttcaacyagggcaggatatactcccaatctcactaagtttttctgggtaggatttagttccttgtcagctactggactggaagtctgtctccctaagatccttggcc

SEQ ID NO: 119123 - DNA, 201 bp, Homo sapiens
ttaagacatctgctacaaaaagaggtgattccatgagtgtgtcatttgctatttctaagcatatgggaagcaaaatcttgtgattgactggttaatagttyggttataggttgagttgcaccccctcaaaaaaaatatgctggagtcctaacacgtagcacctctgaatgtgacctcatgtgaaacagggtccttagagag

SEQ ID NO: 119124 - DNA, 201 bp, Homo sapiens
taaagtacttttaagaataataatgttttatatccattgctaatataatctatggattttatcatgttaagacatctgctacaaaaagaggtgattccatragtgtgtcatttgctatttctaagcatatgggaagcaaaatcttgtgattgactggttaatagtttggttataggttgagttgcaccccctcaaaaaaaa

SEQ ID NO: 119125 - DNA, 201 bp, Homo sapiens
acagacccttgttctttctgtatcaagtgtataaactaggtacatagtgagttattgaattaaaacattgttctcatatattaaagttctattgcaaatayagcatttgcagtcagaattttaaagattaaacctgttcagtcctgaaaaactgtctcttctttgatactccatttagattgtctcccatatcaggtataa

SEQ ID NO: 119126 - DNA, 201 bp, Homo sapiens
tttacaaaatgtttccctggaaacactattctcaagaaaaaaaacaaattcttccttgggtcattaatttttaaatggtaaaatgagttaatagaaaattrtaataaataaacacatatatacatgttaacacatgttatctatatgtatatacacatgttattcatatacacatgcacacactctcatacatctctgaat

SEQ ID NO: 119127 - DNA, 201 bp, Homo sapiens
ttctggaatagctttgcttattgtaatattagagagaaactttgcttgattgtcatcatttttcaaaatatatggtactgacattgtgtcttttctccaayggagaaattcttctcagagttttatatatataacttgtaatttttgcactaagttcttactcatcactcttaattgccaaatcttagagctatgaaaaaa

SEQ ID NO: 119128 - DNA, 201 bp, Homo sapiens
atgggagtgacacttttaagataaattcagaaatacccctgtaggatcaaccatcagacatgaaatgtgaaatgctgtcacactggcatgaatgactgctrctataatcactggctcttcttttataggggtttttattaattaaatgtaaagtctgccattggccttataagagtgctcatctgttttcctttaatttca

SEQ ID NO: 119129 - DNA, 201 bp, Homo sapiens
tttggtgtggggagtgaactctctgatgcgaatgcctgattctttttctcccataaatgttgtttaaataccacaccaaaggccgggtgtggtggctctcrcctgtaatcccagcactttgggaggccaagttaggcagatctcctgaggtcaagagttcaaggccagcctggccaacatggtgaaaacacatctctacaa

SEQ ID NO: 119130 - DNA, 201 bp, Homo sapiens
taaaggataaataagagttttccagaaatatgaaggtgaatcagaatcctaggacgaagtaagagcaggtaaagtgagtggagaaataatcaagggtctaactattacctgaggttcttgaatcacctacactaaaattacctgaagtgtttgttaaaaatgtggttactatgccttttctcatgccaagtgaatcacaat

SEQ ID NO: 119131 - DNA, 201 bp, Homo sapiens
aacccaaacctgttccttccctagtcccacccatcttggataatggcactcacacttcatcaggtcaatgcaaagtaatcatccttatttcctttaactctttttttttttttttttttcatatttcatggctaatccatcagtaagcccgctggcactttactttcctatatcccaaacctgacaacttctcaccaactc

SEQ ID NO: 119132 - DNA, 201 bp, Homo sapiens
acccaaacctgttccttccctagtcccacccatcttggataatggcactcacacttcatcaggtcaatgcaaagtaatcatccttatttcctttaactctttttttttttttttttttcatatttcatggctaatccatcagtaagcccgctggcactttactttcctatatcccaaacctgacaacttctcaccaactcc

SEQ ID NO: 119133 - DNA, 201 bp, Homo sapiens
cccaaacctgttccttccctagtcccacccatcttggataatggcactcacacttcatcaggtcaatgcaaagtaatcatccttatttcctttaactctttttttttttttttttttcatatttcatggctaatccatcagtaagcccgctggcactttactttcctatatcccaaacctgacaacttctcaccaactcca

SEQ ID NO: 119134 - DNA, 201 bp, Homo sapiens
gggtgctgctgaaaagatacccaaaaatgtggaagtgactttggaccagggtaactaacaggcagaggttggaacagtttggagggctcagaagaagacargaaaatgtgggaaagtttggaacttgctagagacttgttgaacggctttgaccaaaattctgataatgatatggacaatgaaatccaggctgaggtggtc

SEQ ID NO: 119135 - DNA, 201 bp, Homo sapiens
ttctgacacagctagtatttgaactttagggactctaatctcaggattttacctaatggtacatatgaatcactgagagctactacaaaacatgcacattrtgctcaacaatgcttttctttgcattaaagaaacattctttaaggaaggcattatgaaagggttcaaccatggccttaaaaaatgacaggatttttcata

SEQ ID NO: 119136 - DNA, 201 bp, Homo sapiens
aggtagtatttggagccactttactggtatacttgcctcacaaaagaaatatgtccttttttggggagaagtatgttgtacctatttcttttttttcctctttttttttttttttttgagatgtagtcttgctctgtcaccaaggctggagggcagtggctcgatctcagctcactgcgacctccacctcccgggtttaag

SEQ ID NO: 119137 - DNA, 201 bp, Homo sapiens
aagaggaaggttactaaaattgactatattttaaaaggacagaggaggacaaaagtaaagtgtacttgattataatctgtactgcgtgcttggtcgatgtmttgtttacatgtaaacacagagaaagatgcagaggtacagtgatgagaaaaagaagagagaaaagagagagggagaaagagactgagcaagacagagccc

SEQ ID NO: 119138 - DNA, 201 bp, Homo sapiens
gatgatgagcattttttcatgtgtctgttggcggcataaatgtcttcttttgagaagtgtctgttcatatccttcgcccacttgttgatgggtttgcttgttttttttttcttgtaaatttgtttgagttctttgtagattctggatattagccctttgtcagacgggtagcttgcaaaaattttctcccattctgtaggt

SEQ ID NO: 119139 - DNA, 201 bp, Homo sapiens
tgccatgattgtgaggcttccccagccacgtggaactgtaagtccattaaaactctttgttttgtaaattgctcagtcatgggtatgtctttatcagcagygtgaaaacagactaatccaggaacttatcagctaacttacctaaaatgtccagggttagctctggctttgcatatgactggatttagtctcaaacagtgt

SEQ ID NO: 119140 - DNA, 201 bp, Homo sapiens
tttgtaaattgctcagtcatgggtatgtctttatcagcagtgtgaaaacagactaatccaggaacttatcagctaacttacctaaaatgtccagggttagstctggctttgcatatgactggatttagtctcaaacagtgtgctacatcttggttgctctgtatctaactagaaactataattagtttataatatttctag

SEQ ID NO: 119141 - DNA, 201 bp, Homo sapiens
ataaaaacaggaagagaagtatttattcaagaaaaatgactcattgtaagcactgtaatagagtatgtggcattgtagcctggggcaactcaaatcatccccagaccagatttgtggtattctagttctaccaggataaggtagactgtgaagacaatggtcctatgctggagagatgacttgatttggagcatgaaaaaa

SEQ ID NO: 119142 - DNA, 201 bp, Homo sapiens
ctctaggaggtggaaaagactggagaggaccagatttgcttactctacttgctgaagtgtaaaaggctgaggacagcaggcttagggtgggaaatcaagartttagatttgttcatattaaatgtgtgtggccaactagacatctgagtgtagctatcaatcaggttattggatacattgacctagagcttggtggagagt

SEQ ID NO: 119143 - DNA, 201 bp, Homo sapiens
aggcttagggtgggaaatcaagaatttagatttgttcatattaaatgtgtgtggccaactagacatctgagtgtagctatcaatcaggttattggatacaytgacctagagcttggtggagagtttgggaatatagatctctattctggagttgtcagccatgggccttgctgaaatcactgagagtgaatttgataaaag

SEQ ID NO: 119144 - DNA, 201 bp, Homo sapiens
atagatctctattctggagttgtcagccatgggccttgctgaaatcactgagagtgaatttgataaaagaaaaatccaaactgagtcctgggcactctgayatttagaggtgagcagtaggaggaagattaagcaacttgaatgagatcattcggtaatatgtggtgtccagcagccctcgtgaagaaattatttcaagga

SEQ ID NO: 119145 - DNA, 201 bp, Homo sapiens
atcagctctagtactatggaaaaattgaataaaatatgtcttgagaattgtccattgggtttggcaacatgaggtcactggtaatcttataaatgctttcrgaaaagtgtggataacagaatgagtgaggtggatttaaaaagaattagaaacaaggaaacagaaacagctattacagataactctaaggaagggtgtttc

SEQ ID NO: 119146 - DNA, 201 bp, Homo sapiens
tgcataatgaagcatcctaaaacttaatgacctaaaattacaatggtcatttactatcccataaggtcaggatatgtaggccaaaaatttgtgaggagctragttgaggtctggctcagtttttcatgaggtgtagttagaggtcagctgggctggcagtcatctgaaggcttgactggggctgcaggatccattccccag

SEQ ID NO: 119147 - DNA, 201 bp, Homo sapiens
agctgtgagtgtttcatataatgggagtaaaggtgatgacaatgcagagtagggccctcagcctaggatcacaaaccaggggcaaagtatacacctttttwtcttttaaccactgagatgtttgggttatttttatctctgctgactgacacatatggcaagttttataaacagtatttaagaaagggtctcatttatgat

SEQ ID NO: 119148 - DNA, 201 bp, Homo sapiens
aggtcaagagttcaaggccagcctggccaacatggtgaaaacacatctctacaaaaatccaaaaattttagccaggcatggtggtgtgcacctgtaatccyagctactcaggaggtcgaggcaggggaattgcttgaacccaggaggtggaggttgcagtgagctgagatctcgacattgcactagagcctgggtgacaga

SEQ ID NO: 119149 - DNA, 201 bp, Homo sapiens
tgactgacacatatggcaagttttataaacagtatttaagaaagggtctcatttatgatatcaactcatttatgactatattaccaatatgagggaccaaytgaaagagacaaagtgactcgtgcagaatgttaaagaaattagccaaagcttacttcgtattttgaatcttatatccacttggagagtctaaaagattat

SEQ ID NO: 119150 - DNA, 201 bp, Homo sapiens
gtggctctcacctgtaatcccagcactttgggaggccaagttaggcagatctcctgaggtcaagagttcaaggccagcctggccaacatggtgaaaacacrtctctacaaaaatccaaaaattttagccaggcatggtggtgtgcacctgtaatcccagctactcaggaggtcgaggcaggggaattgcttgaacccagga

SEQ ID NO: 119151 - DNA, 201 bp, Homo sapiens
cataggtgcaggctgagaaatagaaagtgttggaaccagagtggagaccatgggcatttaggtcattgctgtaagttggatgattgtcccccaaaatctcrtggtgaaatttgatccctaatattggaggtggggcctaatgggaggtatttaggtcataggagcatatccctcatgaatggcttagtgctgttctcatgt

SEQ ID NO: 119152 - DNA, 201 bp, Homo sapiens
aaagaaattagccaaagcttacttcgtattttgaatcttatatccacttggagagtctaaaagattattttgttatttatttatatatttggtgtttagayatggtctcgctatgttgcccagactggttttgaactcctgggctcaggtgatcctcccagattaacttccctagtaactgggactatgggtgcctggcta

SEQ ID NO: 119153 - DNA, 201 bp, Homo sapiens
ttgttaaaaagactctggcttcctcaatttcactctcctgcttcctctcttttcatgttatctctgcacatgcttggctctccttctctttccaccatgartggaagcagcctgaagccctcactagatgcagaccctggcgccatgtttcttgaataatctgcagaactgtgagctatatgaacctcttttcttcataat

SEQ ID NO: 119154 - DNA, 201 bp, Homo sapiens
taattttgtgaagtgatcaatgaagagatttatttggagatagcagttgccttgctgtgttttgccgccccatcccatacattttcaggggagggggtggrtgtgttgctaccttctgacactaaggctagctagagagcttcaagaagggatacttggaatgccttgaaatgtatttgctgaagttgagagacgcaaagg

SEQ ID NO: 119155 - DNA, 201 bp, Homo sapiens
aatggcacacatttgttctactcactttccattagctgaaattcagtcatttgcccctacccaactgcaaagcaggctggataatatgcttaagctttgcrcccaagaaaagagggaaaggatcctggtgtacaactgattacttctaccacacctggatatggccagttattagtatttgtgacctcaattaaaaagaac

SEQ ID NO: 119156 - DNA, 201 bp, Homo sapiens
ttcataatttacccaactttaggtattcctttacagcaacacaaatgcactaagatggtcatttctatatgtaacttttgccttcagggcctgcttaggcytgatcacatatctatcacttttgtttgaggatggaatgtggcagtgcctgttgaactttatggcttggtgagtcagataatacacagttcataaagagca

SEQ ID NO: 119157 - DNA, 201 bp, Homo sapiens
gaggctgtggtgggcggatcacctgaggttgggagtttgaaaccagcctgcccaacatggagaaaacctgtctctactaaaaatacaaaattagccggacrtggtggtgcaggcctgtagtcccagctactcgggaggctgaggcaggataatcacttgaacccgggaggcagaggttgtggtgagccaagatcaagcatt

SEQ ID NO: 119158 - DNA, 201 bp, Homo sapiens
aaagttgctgcaaggaataaatgagatgatctgtgcatagtagtaatcacaaacttgacatatggttgctgttcaatcatgttacaaatcattatcattaytgtacatacagcacatgaccattacacatacagcacttttgctgcgaatttgaattcctgagctcatcttcttctttcatcacttcgtccagcaacatta

SEQ ID NO: 119159 - DNA, 201 bp, Homo sapiens
tttccactggggctgtggagacttcttccactggcaaaaatactcatcaaattttaggggctcaatgtccccagcttcatcgcatcttcctacacgtctcyattccaatatataggattccattctttcccaatcaatattttcattttaacagtagatacctttagggctgggagttcaacttgcattataatttagcta

SEQ ID NO: 119160 - DNA, 201 bp, Homo sapiens
ctactgggaatgggaaggctgtttccactggggctgtggagacttcttccactggcaaaaatactcatcaaattttaggggctcaatgtccccagcttcawcgcatcttcctacacgtctccattccaatatataggattccattctttcccaatcaatattttcattttaacagtagatacctttagggctgggagttca

SEQ ID NO: 119161 - DNA, 201 bp, Homo sapiens
gattattgtaggaacaccataatcaataaatcaatgtcataggtctgcacaagtcagactatccaattgctgctttgcctttgctgtcccttacagtaagygtgcccaccttgcctttggccattgagtgcctgcctccacttacatccaattacttttattactcccagaatagaattactcctattgcatttaggtttc

SEQ ID NO: 119162 - DNA, 201 bp, Homo sapiens
ctaaactcccattctgattgataggccacagtgatgttttgggtctcctggaatttgtgtcagttaagagccagtgtctggtatgtcctgaaaggtttgaytatttcctcttcttcagtacacagttacctttgtaaaataccataggtgcctgtggaaaagggtaggataatgattgacagtataaatttttgatactgt

SEQ ID NO: 119163 - DNA, 201 bp, Homo sapiens
acctcagaggtaggacagtggaagtgtattgctgtccttgccaactgaaatcaaaatgcttctggtgatctttacaaagaggtatcaagaaaaatacattygccaggtccatagctgcataccagatatgtgttaatttaagcaaagaaaccatatctgacagaacagctgcaattatagtcgctacctgttttagcctat

SEQ ID NO: 119164 - DNA, 201 bp, Homo sapiens
caattaatgccaatgcatgaaggagtaaagtgacttgctcaagattagggaataactcagaaacaaaatcaggaggattctagaaaataagaaagtactcaaaaaaaaaaaaaaaaaacaaaaggttggtagatgtggaagggacacaggagacaatgtggaagagcgcttaatggcctaagctggaacaattcaagcact

SEQ ID NO: 119165 - DNA, 201 bp, Homo sapiens
atatagaatttttaaagacactgtagtcaatatatatatatatatttattaagtttataaaccagaaataggtctctgatgatgagaaacttaagatgaayagatatttttatttaaatggggagaagagagaaaacatttctttttggaaattttcaagtttaaacagctacagggttttaacatactttttctggtaga

SEQ ID NO: 119166 - DNA, 201 bp, Homo sapiens
taaaaacaggaagagaagtatttattcaagaaaaatgactcattgtaagcactgtaatagagtatgtggcattgtagcctggggcaactcaaatcatccccagaccagatttgtggtattctagttctaccaggataaggtagactgtgaagacaatggtcctatgctggagagatgacttgatttggagcatgaaaaaac

SEQ ID NO: 119167 - DNA, 201 bp, Homo sapiens
aaggttactaaaattgactatattttaaaaggacagaggaggacaaaagtaaagtgtacttgattataatctgtactgcgtgcttggtcgatgtcttgttwacatgtaaacacagagaaagatgcagaggtacagtgatgagaaaaagaagagagaaaagagagagggagaaagagactgagcaagacagagccctctgtc

SEQ ID NO: 119168 - DNA, 201 bp, Homo sapiens
aaaaacaggaagagaagtatttattcaagaaaaatgactcattgtaagcactgtaatagagtatgtggcattgtagcctggggcaactcaaatcatccccagaccagatttgtggtattctagttctaccaggataaggtagactgtgaagacaatggtcctatgctggagagatgacttgatttggagcatgaaaaaact

SEQ ID NO: 119169 - DNA, 201 bp, Homo sapiens
aaaacaggaagagaagtatttattcaagaaaaatgactcattgtaagcactgtaatagagtatgtggcattgtagcctggggcaactcaaatcatccccagaccagatttgtggtattctagttctaccaggataaggtagactgtgaagacaatggtcctatgctggagagatgacttgatttggagcatgaaaaaactc

SEQ ID NO: 119170 - DNA, 201 bp, Homo sapiens
aaacaggaagagaagtatttattcaagaaaaatgactcattgtaagcactgtaatagagtatgtggcattgtagcctggggcaactcaaatcatccccagaccagatttgtggtattctagttctaccaggataaggtagactgtgaagacaatggtcctatgctggagagatgacttgatttggagcatgaaaaaactca

SEQ ID NO: 119171 - DNA, 201 bp, Homo sapiens
gctctgttgcccaggctggagtgcagtggtgcgatctcagctcactgcaacctctgcctgccaggttcctgcaactctcctgcctcagccttctgagtagytgggattacaggttcacaccaccatgcctggctaattttttgtatttttagtagagatagggtttcaccaccttggccaggttggtcttgaactcctgac

SEQ ID NO: 119172 - DNA, 201 bp, Homo sapiens
gtatttttagtagagatagggtttcaccaccttggccaggttggtcttgaactcctgacctcaagtgatccgcccaccttggcctcccaagtgctgggatyatgggcatgagcaaccatgccaggccatttaacaaaaattattaaacagacaaagacactggaaggtgtgacccatatacaggaaaaaaggcaatcaaaa

SEQ ID NO: 119173 - DNA, 201 bp, Homo sapiens
aagaaagaagagggaagagtaaagaggagtttgttttacagctcgggtactagttcagccacagctgggtagagcattaagtgggctgctggggtccccartttcaggctttatttcctggatggcatttctggacctgccctgggccaaataggagcccattgtcctgaagggacaagctcaggaatggcagcattcacc

SEQ ID NO: 119174 - DNA, 201 bp, Homo sapiens
agaaaatcatctcaccaaacgaacttaataaggcaccaatgacaaatcctggagagatagagacatgtgacctttcagatggataattcaaaataactgtyttgagaaagctcaatgacatagagaaggaattcagagtcctattgataacaaatagattgaaataattaagaagaattgagcaaattctggagctgaaaa

SEQ ID NO: 119175 - DNA, 201 bp, Homo sapiens
taatctactgccttagtaaacttcaagtatataatattattaactatagtcaccatgctgtatgttagtcccctttgatgaacatcactcccattcccccmacccctcaacatctgttaaccacctttctattcttggtttctctgagttcaactttatgaattctacccataagtgagatcacatggtatttgtcactct

SEQ ID NO: 119176 - DNA, 201 bp, Homo sapiens
acgtcaagttaaaaagtttctgcacagcaaaggaaacaaccaatgaactgaagagacaacacacagaatgggagaaaatatttgcaaactagccatctgaygatgatcaataatcaaaatatataagctcaaactactcaataggaaaaaaatctaatccaatttaaaaaatagacaagagatctgaaatgatatttttca

SEQ ID NO: 119177 - DNA, 201 bp, Homo sapiens
acaacccggatttgaatcctgactccagcttttattatacaggcaagttacttaaacaacctgtgctcaattttctcatttataggttagggactttatawctacctcagaagggtattgtgaagattaaataaattattgatttattgcttagaaaagttactgacacatagtatatgctcaataaaagctagctattat

SEQ ID NO: 119178 - DNA, 201 bp, Homo sapiens
gccatgtatacctggtagtcagaaaggctgcatacatgctggggagagaccagagaggatgactacatagaccgaacttgtactcacagaaaggcaatgcwtgagaacacttgaacgtcagctaaacactgtatatctaaacattgtatgcattctccaaacattcatcagcaaaagttagaaggtataatagctcaaggc

SEQ ID NO: 119179 - DNA, 201 bp, Homo sapiens
aaaaaaaagtcatttgacatgctagaatgatcactggaaggaagaggaaggttactaaaattgactatattttaaaaggacagaggaggacaaaagtaaartgtacttgattataatctgtactgcgtgcttggtcgatgtcttgtttacatgtaaacacagagaaagatgcagaggtacagtgatgagaaaaagaagaga

SEQ ID NO: 119180 - DNA, 201 bp, Homo sapiens
aaggttgctgatattccacattttggctttacatattaaaaaacattttaaatttatgtgctcagaaatttttcttccagaaacacagcttatttggttgkccctttaaaaactttgagcaaaaatataacaactcaatcagtacagcacccatttcagtctaatgttctgaatcgccaaactaggagaactaagtgtgct

SEQ ID NO: 119181 - DNA, 201 bp, Homo sapiens
acctgttttagcctatattttcattctccaagatccatctggcttttgcacaggccaaatagcagagttgaatggagatgtggtgaggatcatcacccctrcatctttcaagtgaattttggtggcattaatttctgtaatccattcaggaatgtggtattgctttttgtttactatttttctagatagagggattttttt

SEQ ID NO: 119182 - DNA, 201 bp, Homo sapiens
tatcaagaaaaatacattcgccaggtccatagctgcataccagatatgtgttaatttaagcaaagaaaccatatctgacagaacagctgcaattatagtcrctacctgttttagcctatattttcattctccaagatccatctggcttttgcacaggccaaatagcagagttgaatggagatgtggtgaggatcatcaccc

SEQ ID NO: 119183 - DNA, 201 bp, Homo sapiens
agtagagacagggttttaccatgttggccaggatggtcttgatctctttacctcatgatctgactgcctcggcctcccaaagtgctgggtttatgtactcrgtgaataaattcttttcaaattgacattaatttatattttatatttaaagtttattataagcaataatttacatatacttcttaaaactttagttggtaa

SEQ ID NO: 119184 - DNA, 201 bp, Homo sapiens
acatttttgtcatagagatgcaattcataatagctgaggaaatgtcattttagttctaagttaccataagcaccacttggactgctacagaggtactctgyggagcaaaatttattgttttacctatactaagtacttagtgtttttaagagatctatgatgctttcattccagattaatttaaagtaatgctcgcagtat

SEQ ID NO: 119185 - DNA, 201 bp, Homo sapiens
acctcatgatctgactgcctcggcctcccaaagtgctgggtttatgtactcagtgaataaattcttttcaaattgacattaatttatattttatatttaargtttattataagcaataatttacatatacttcttaaaactttagttggtaactttgctcctaaaacttgttagtagctccaacttattaaaactaaaatc

SEQ ID NO: 119186 - DNA, 201 bp, Homo sapiens
cacatttttgtcatagagatgcaattcataatagctgaggaaatgtcattttagttctaagttaccataagcaccacttggactgctacagaggtactctstggagcaaaatttattgttttacctatactaagtacttagtgtttttaagagatctatgatgctttcattccagattaatttaaagtaatgctcgcagta

SEQ ID NO: 119187 - DNA, 201 bp, Homo sapiens
ttccttccatatgaagagaactcaaatttgtaacattcttcacctacaccgtccctttattcatcctccctcataggagggaaagaacttatttgatttgyaaatttggaaaatataacccaggaatccatttagcttacttcatctcctttaatgggctgcctgccattccactctgccttgtgggaaactttacagtat

SEQ ID NO: 119188 - DNA, 201 bp, Homo sapiens
tctccagtatagaaaacttatatttatacacattagaaactctaccagctcagtcttttaaggaacacatttttgtcatagagatgcaattcataatagckgaggaaatgtcattttagttctaagttaccataagcaccacttggactgctacagaggtactctgtggagcaaaatttattgttttacctatactaagta

SEQ ID NO: 119189 - DNA, 201 bp, Homo sapiens
cctcagcaaaactgctggtttttaatgatgtagatgtcttcaaggttcacgatgttgcaggcagagcttttcctaaacaggcacaggtgaagcaaagcttyatgtgtgagagaagacttggtaagttgcactaggctggttctccaaaattccattctgaattcagggccaataaagaagatctgaattgacaatttttaa

SEQ ID NO: 119190 - DNA, 201 bp, Homo sapiens
gctgttattttatggcattttaatttatttttaaagcttattggtttatctttttcaagtttaggattcaatgaagggaggattttcatataagccaaggmaatttttctctccagtatagaaaacttatatttatacacattagaaactctaccagctcagtcttttaaggaacacatttttgtcatagagatgcaattc

SEQ ID NO: 119191 - DNA, 201 bp, Homo sapiens
atgtgtgtaaccaacccctgctacagcaacacaccttgtttgcattaactcaatcagaacaaacatatttatttaaatacatccttccccaccaagacaaygtgcttagaagggtttccattcttcttactttgcatagaacaggaaacatagcaacttagagttgttctcgggtactagaagcaataggcagcctttatt

SEQ ID NO: 119192 - DNA, 201 bp, Homo sapiens
gaccaaaacagttcaaatcactgactacaaatcatgagggaaagaagtatgcacttaagtatgtgtaggtgtttggaaatatggcttcccaaaaccagatycttgcgagggaggaaaaatgaagaggaagagtatatcagctcagtcccttcaagcatgtagaccagttagctttctcataaatgttgctaaatattatat

SEQ ID NO: 119193 - DNA, 201 bp, Homo sapiens
gggtaggtaaacaaagtggccaggaagctcgaactgggtggaccccaccgcagctcaaggaggcctgccagcctctgtagactccacctctgggggcagascatagccaaacaaaaggcagcagaaacctctgcagacttaaatgtccctgtctgacagctttgaagagagtagtggttctcccagccccctttgagatct

SEQ ID NO: 119194 - DNA, 201 bp, Homo sapiens
attaatgataatgtcttataaaaattaatatccagtctttatgaggcagatagtcaaataaatgtccaaattcaatgacaatttaaaattaaacctagatktcaaagtcagtgtttttgaaaggaaatgtagcacacatctaccctttacatattccaggttggtaaactgtatgtattagcaaccatgatttataatgca

SEQ ID NO: 119195 - DNA, 201 bp, Homo sapiens
ccctacaaaagacagctttgcagggccatttcaaaatatggcaaagaaacacgttgtggagtaaaatattttgattttctttttgtcatgtaatgttatgycagagttaggttagaaagtaagtcatgatatatagggttaaataaaacccatctaatgagaatttatggtttgcagggcatgactctccagacccctaag

SEQ ID NO: 119196 - DNA, 201 bp, Homo sapiens
cagctcccagcatgagcgacacagaagatgggtgatttctgcatttccaactgaggtactgggttcatctcactggggcttgtcagacagtggatgcagtkcaccgaacatgagctgaagcagggtgaggcattgcctcacccgggaagcgcaaggggtcagggaattccctttcacagccaagcaaagctgtgacagacg

SEQ ID NO: 119197 - DNA, 201 bp, Homo sapiens
ctcccagcatgagcgacacagaagatgggtgatttctgcatttccaactgaggtactgggttcatctcactggggcttgtcagacagtggatgcagttcaycgaacatgagctgaagcagggtgaggcattgcctcacccgggaagcgcaaggggtcagggaattccctttcacagccaagcaaagctgtgacagacggca

SEQ ID NO: 119198 - DNA, 201 bp, Homo sapiens
actgaggtactgggttcatctcactggggcttgtcagacagtggatgcagttcaccgaacatgagctgaagcagggtgaggcattgcctcacccgggaagygcaaggggtcagggaattccctttcacagccaagcaaagctgtgacagacggcagctggaaaatcgggtcactcccaacctaatactgtgattttccaat

SEQ ID NO: 119199 - DNA, 201 bp, Homo sapiens
gcttagagaaaaaagaataaaaaatgaacaaagcctcgaagaaatatgggactatgtgaaaagaccaaatctatgtctgattggtgtacctgaaagtgacggggagaatggaaccaagttggaaaacactctgcaggatattatacaggggaacttccccaatctagcaaggcaggccaacattcaaattcaggaaataca

SEQ ID NO: 119200 - DNA, 201 bp, Homo sapiens
aattatcttactggagttgtgattaatattgaggtggtattggaagaattagtaagttaatgtttctgaaatattattggtcataaaataaaagctacatrgtaactacaaagtattatttctcatttattatatttacatggcttagtatcagtggttctaaagtatattgaaaagtccctttttaaattgtaattatta

SEQ ID NO: 119201 - DNA, 201 bp, Homo sapiens
tagagaaaaaagaataaaaaatgaacaaagcctcgaagaaatatgggactatgtgaaaagaccaaatctatgtctgattggtgtacctgaaagtgacgggragaatggaaccaagttggaaaacactctgcaggatattatacaggggaacttccccaatctagcaaggcaggccaacattcaaattcaggaaatacacag

SEQ ID NO: 119202 - DNA, 201 bp, Homo sapiens
aacactaaacatggaaaggaacaaccggtccaagccactgcaaaaacatgccaaactgtaaagaccattgaggctaggaagaaactgcatcaactaatgarcaaaataaccagctaacatcataatgacaggatcaaattcacacataacaatattaaccttaaatgtaaataggctaaatgctccaattaaaagacacat

SEQ ID NO: 119203 - DNA, 201 bp, Homo sapiens
gcaagagcaaacacattcaaaagccagcagaaggcaggaaataactaagatcagagcagaactaaaggagatagagacacaaaaaacccttcaaaaaatcmatgaatccaggagctggttttttgaaaagatcaacaaaattgatagactgctagctagacagtctatcaaagaagaaaagagagaagaatcaaatagacg

SEQ ID NO: 119204 - DNA, 201 bp, Homo sapiens
gcgtagctgggactatagatgcacaccaccatacctgggtaatttgtttttgtattgttttggtagaaacaaggtcttgttatgttgcccaggctggtctygatcttccagcctcaagtgaccctcctgcctcggcctcccaaagtgttggcattacaggtgtgagctactgtgctcagcttctgtcaccatttttaaact

SEQ ID NO: 119205 - DNA, 201 bp, Homo sapiens
tttggattggatgatttttttttttgatagggaggttgtcttgtacattgtaggatgcttagcagtgtatctgacctccacccactagatgccaatagcaygccccaagttggaataaataagaatgtctgcagacattaccaaatgtcccttgggggagagaatcaccccgacttgagaacgactgagttttacccctct

SEQ ID NO: 119206 - DNA, 201 bp, Homo sapiens
tcagcattcgaagtgcacctggtgttcagtagttgatagtcttcctttctgttacaaattactcttggtttagcaccattctcggtttagtgtattgtctsttgttttactttattgtcaattctatgaagccatgtaatttgcatatttttggccccaaatcttttaagataaatatgtattgcatttcaaacacaaatt

SEQ ID NO: 119207 - DNA, 201 bp, Homo sapiens
aaacaaaaactagaaataatgagacagaaggagcaacatacatagtttcccagttgcagtgaatagatcaacaataggctggcctgaaaagagtggttcaytgggggatgggagatgttggacatgtgagaaaggagaaggagtttatcagtacttggggttggacagacaacttctgggttttgtccatcctttcagctg

SEQ ID NO: 119208 - DNA, 201 bp, Homo sapiens
gtcagttttttagagcctaggcaaaaagtggaatctgattgggcctctcatagacctgcacaagaattcaatgttcctgagggcagagaaccagtctcgtytaatactcattctccacactacaaccattaagagtgagaactctggacccaaactaaattgattcacaatctggctacagtatttacagctctgtcatgt

SEQ ID NO: 119209 - DNA, 201 bp, Homo sapiens
agactagagagaatgaaggaagttaatgttgaaaatatagttagcatctccttactggtgagaattaaaccaataaatcacatgagtccctttgggtaatcatttaagctggcaagaataaagcatatatcattaaactttagacccccacttactttttgggtggaggttgacatacaggaaatgaagtctggagtacaa

SEQ ID NO: 119210 - DNA, 201 bp, Homo sapiens
atcatttaagctggcaagaataaagcatatatcattaaactttagacccccacttactttttgggtggaggttgacatacaggaaatgaagtctggagtayaagcagcataaaaaaaatgattttaatttttaagttgggataagggaatatccgtggaaaaacactaatgtagtgaagagtttcgaagagtgataacact

SEQ ID NO: 119211 - DNA, 201 bp, Homo sapiens
atatcattaaactttagacccccacttactttttgggtggaggttgacatacaggaaatgaagtctggagtacaagcagcataaaaaaaatgattttaatktttaagttgggataagggaatatccgtggaaaaacactaatgtagtgaagagtttcgaagagtgataacactgaaattgtcattaaatttaaccaagtcc

SEQ ID NO: 119212 - DNA, 201 bp, Homo sapiens
attgtataattatgagatcctgattttcatatttcccagtgtgccttttcagctctgctgtataaccaaattaaaggagactacacaactttacaaaattrgagtgttctgttttgtatattgctgtttgacagtactttaattttaatttgttcatcattgatcctaataaagacaaactgtcattttaaccattgcctg

SEQ ID NO: 119213 - DNA, 201 bp, Homo sapiens
tggtaattttgttattacatgggcatactgatattagaaacagttaatattccaccaaaagtcattagaagggttgtgggagggcatatataaagaaaacrtaataacatggtacagttaagaggaaactaatatattaaaacgactgcacagaggagagaagccctcattgcaatattgaatatgtagcattcattttta

SEQ ID NO: 119214 - DNA, 201 bp, Homo sapiens
attggctaggttccctagacaggctatcaatgtaaaagatcagaaaatattgcaatatatggacaacaaacttgatgctaaatataaatttccttcatgcrtcagtgagtggtggatttttgatataaaggactgcctttattttaggaagacgctcccttattaaagaaagaatacaagggttataagaagtttgaactt

SEQ ID NO: 119215 - DNA, 201 bp, Homo sapiens
tctaattgcaaataacatttctgtggtgagtacgtagatgacttcttagttctgtttggtaatcaacatagtattgaacaaggacaggacaaaaaataaaycatttgaagaaaagaacaccatcattggctctattgtccgtgaatagcttgaatcctatctagctggggggcatgtaagaggagaagctcaacagctcag

SEQ ID NO: 119216 - DNA, 201 bp, Homo sapiens
ataactaagatcagagcagaactaaaggagatagagacacaaaaaacccttcaaaaaatccatgaatccaggagctggttttttgaaaagatcaacaaaaytgatagactgctagctagacagtctatcaaagaagaaaagagagaagaatcaaatagacgcaataaaaaatgataaaggggatatcaccactgatcccac

SEQ ID NO: 119217 - DNA, 201 bp, Homo sapiens
gacagtctatcaaagaagaaaagagagaagaatcaaatagacgcaataaaaaatgataaaggggatatcaccactgatcccacagaaatacaaactaccakcagagaatactataaacacctctatgcaaataaactagaaaatctagaagaaatggataaattcctcgacatacacaccctcccaagactgaaccaagaa

SEQ ID NO: 119218 - DNA, 201 bp, Homo sapiens
aaaaagtgtgaagaagtaaatgtcatattcccacaatgcaatataaatggaattcataaaggctcagtgactcgtaagacaggttaattaaagcctccctktggcaagtagaagttaacacaaaattttcttgaccacattattttcatgactgcatagaatgaaacctttgttagaatgtctggcagagattgtgatcta

SEQ ID NO: 119219 - DNA, 201 bp, Homo sapiens
ttttgttaatttaagtagaaaaagtgataggataattttatgctataacaaatatgctggagagaaggacaatatgaagattaaacagagcagatataacwgtgagaatggtggcactggccatggaaaaaacaaagtatatttggagttcagaatatgaacagaaatctatttgtatatctcttccaatgacctttctgt

SEQ ID NO: 119220 - DNA, 201 bp, Homo sapiens
gatctagcatatcctgtagtacgttcctcatttcctccaccactgaagctgtgagtgtttcatataatgggagtaaaggtgatgacaatgcagagtagggycctcagcctaggatcacaaaccaggggcaaagtatacacctttttttcttttaaccactgagatgtttgggttatttttatctctgctgactgacacata

SEQ ID NO: 119221 - DNA, 201 bp, Homo sapiens
atttaagaaagggtctcatttatgatatcaactcatttatgactatattaccaatatgagggaccaactgaaagagacaaagtgactcgtgcagaatgttaaagaaattagccaaagcttacttcgtattttgaatcttatatccacttggagagtctaaaagattattttgttatttatttatatatttggtgtttagac

SEQ ID NO: 119222 - DNA, 201 bp, Homo sapiens
tttaagaaagggtctcatttatgatatcaactcatttatgactatattaccaatatgagggaccaactgaaagagacaaagtgactcgtgcagaatgttaaagaaattagccaaagcttacttcgtattttgaatcttatatccacttggagagtctaaaagattattttgttatttatttatatatttggtgtttagaca

SEQ ID NO: 119223 - DNA, 201 bp, Homo sapiens
gattgtcactgtcgcagacccaccactaacttccactcctccagatccagcagggtgtccactgcacttctgatccagtgagacgcccactgctgctcccratcagggtagaagctcgccattgttcctgcgggctgaatgcccgggttcatgctaactgagatgaacactagtggttgggttccacggttctcttccatg

SEQ ID NO: 119224 - DNA, 201 bp, Homo sapiens
ttaagaaagggtctcatttatgatatcaactcatttatgactatattaccaatatgagggaccaactgaaagagacaaagtgactcgtgcagaatgttaaagaaattagccaaagcttacttcgtattttgaatcttatatccacttggagagtctaaaagattattttgttatttatttatatatttggtgtttagacat

SEQ ID NO: 119225 - DNA, 201 bp, Homo sapiens
gagttgtttttaatttatacagtaagttctcacttaattgatagattcttggaaatagtgactttaagtgaaatgaagtataacaaaaccaattttaccawtggctaattgatactaaaacaagagttaaattcccacaacatattcctggtcacaaagcatcaccagactcctaaataatgacccaaaacatttctaata

SEQ ID NO: 119226 - DNA, 201 bp, Homo sapiens
taagaaagggtctcatttatgatatcaactcatttatgactatattaccaatatgagggaccaactgaaagagacaaagtgactcgtgcagaatgttaaagaaattagccaaagcttacttcgtattttgaatcttatatccacttggagagtctaaaagattattttgttatttatttatatatttggtgtttagacatg

SEQ ID NO: 119227 - DNA, 201 bp, Homo sapiens
gcaggggtgctaccgattcaagtgagggctgacaaggcagcacaaacttagaatcttccaggcttatattattaatcatagtatctgatctgggggctggkcctttgtgacaggaatctcctggcaacatacttatacataggagtcaggcagcaagcactttttttcttccaggaattcactcttgtttgaagcaaaccc

SEQ ID NO: 119228 - DNA, 201 bp, Homo sapiens
ttttaaaggataaataagagttttccagaaatatgaaggtgaatcagaatcctaggacgaagtaagagcaggtaaagtgagtggagaaataatcaagggtctaactattacctgaggttcttgaatcacctacactaaaattacctgaagtgtttgttaaaaatgtggttactatgccttttctcatgccaagtgaatcac

SEQ ID NO: 119229 - DNA, 201 bp, Homo sapiens
tggatggaacaattggatttgttttcatcttatatgcaataacatggtgtagaaatcaatgaggagtgaaagcatgggtaattaaaagacgcttcattttsattttatatgaaatgttcttattctattagaaaaatcctgccaatctaacaaacgagcaaaacacacacacacacacacacacacgcacatcatgtgaat

SEQ ID NO: 119230 - DNA, 201 bp, Homo sapiens
tatatgcaataacatggtgtagaaatcaatgaggagtgaaagcatgggtaattaaaagacgcttcattttcattttatatgaaatgttcttattctattaraaaaatcctgccaatctaacaaacgagcaaaacacacacacacacacacacacacgcacatcatgtgaattagaaaggtgctcatgttagtgcaaacaat

SEQ ID NO: 119231 - DNA, 201 bp, Homo sapiens
tcaacgatctagaactagaaacacaatttgacccagcgatcccattagtgggtatatacccaaaggattataaatcatgctactataaagacacatgcacwcgtgtgtttattgcagcactattcacaatagcaaagacttggaaccaacccaaatgtccatcaatgggagactggattaagaaaatgtggcacatataca

SEQ ID NO: 119232 - DNA, 201 bp, Homo sapiens
gacacaaaaccaaacaccacatgttctcactcataggtgagaattgaacaatgagaacacttggacacagggcggggaacatcacacactggggcttgtcrtggggtgggggcttgggggagggatagcattaggagaaatacctaatgtaaatgacgagttaatgggtgcagcaaaccaacatggcacatgtatacatat

SEQ ID NO: 119233 - DNA, 201 bp, Homo sapiens
gtaatcccagcactttgggaggctgaggtgggcggatcacgaggtcaggagaccgaaaccatcctggctaacacggtgaaaccccgtctctaccaaaattrcgaaaattagccgggcgtggtggtgggcgcctgtagtcccagctactccggaggctgaggcgggagaatggcgtgaacccaggaggcggaggttgcagtg

SEQ ID NO: 119234 - DNA, 201 bp, Homo sapiens
gggtgggggcttgggggagggatagcattaggagaaatacctaatgtaaatgacgagttaatgggtgcagcaaaccaacatggcacatgtatacatatgtracaaacctgcacgttgtgcacatgtactctagaacttaaagtataattaaaaaaaaaaaaaagaaaaggaaaaaaaaaagaaattctcccttggttattt

SEQ ID NO: 119235 - DNA, 201 bp, Homo sapiens
tagcagataacttttggtgatttaatttttctgtctttatgcttttctgcatttacaatatagaatttttaaagacactgtagtcaatatatatatatatatttattaagtttataaaccagaaataggtctctgatgatgagaaacttaagatgaacagatatttttatttaaatggggagaagagagaaaacatttctt

SEQ ID NO: 119236 - DNA, 201 bp, Homo sapiens
taatcccagcactttgggaggctgaggtgggcggatcacgaggtcaggagaccgaaaccatcctggctaacacggtgaaaccccgtctctaccaaaattamgaaaattagccgggcgtggtggtgggcgcctgtagtcccagctactccggaggctgaggcgggagaatggcgtgaacccaggaggcggaggttgcagtga

SEQ ID NO: 119237 - DNA, 201 bp, Homo sapiens
agcagataacttttggtgatttaatttttctgtctttatgcttttctgcatttacaatatagaatttttaaagacactgtagtcaatatatatatatatatttattaagtttataaaccagaaataggtctctgatgatgagaaacttaagatgaacagatatttttatttaaatggggagaagagagaaaacatttcttt

SEQ ID NO: 119238 - DNA, 201 bp, Homo sapiens
aaatcttagagctatgaaaaaaatacactgccactaatcatctaatgagatctgatattgcttatctagaaaatattcactctttaacagctttcttcacytaacatttggtgaaaaagtacaataattactgaagaaatgtaaatatccttcaaacattctcactgttctttttcacatttccttgtctattatttaaaa

SEQ ID NO: 119239 - DNA, 201 bp, Homo sapiens
agttacactttctaatggttactacataaaaaggcactataagaacatgtttctagatttcctggactaaggctggtccagtttgattgatatgaaagcaaaataaataaataaataaataaataaataccacctgaaagtctatggaaacctgctgaagacatttttatagaaaaccaaaaagaaaaaaaagaggaaata

SEQ ID NO: 119240 - DNA, 201 bp, Homo sapiens
gttacactttctaatggttactacataaaaaggcactataagaacatgtttctagatttcctggactaaggctggtccagtttgattgatatgaaagcaaaataaataaataaataaataaataaataccacctgaaagtctatggaaacctgctgaagacatttttatagaaaaccaaaaagaaaaaaaagaggaaataa

SEQ ID NO: 119241 - DNA, 201 bp, Homo sapiens
ttacactttctaatggttactacataaaaaggcactataagaacatgtttctagatttcctggactaaggctggtccagtttgattgatatgaaagcaaaataaataaataaataaataaataaataccacctgaaagtctatggaaacctgctgaagacatttttatagaaaaccaaaaagaaaaaaaagaggaaataaa

SEQ ID NO: 119242 - DNA, 201 bp, Homo sapiens
gttacttaaacaacctgtgctcaattttctcatttataggttagggactttataactacctcagaagggtattgtgaagattaaataaattattgatttaytgcttagaaaagttactgacacatagtatatgctcaataaaagctagctattattagccatgtggcttcagtagtgttattaattactttgaaatgagaa

SEQ ID NO: 119243 - DNA, 201 bp, Homo sapiens
tacactttctaatggttactacataaaaaggcactataagaacatgtttctagatttcctggactaaggctggtccagtttgattgatatgaaagcaaaataaataaataaataaataaataaataccacctgaaagtctatggaaacctgctgaagacatttttatagaaaaccaaaaagaaaaaaaagaggaaataaac

SEQ ID NO: 119244 - DNA, 201 bp, Homo sapiens
attttcccacaccaagcaaagtttattactgggtttaaattgttatcctcaggccgaggtttgtatacattttccctccccacttcaagtgtcacaggtgstagacgccatcaggataaatgtggcatattatttgagagtactgacttttctttaaaaggggtttttgttaacgtgcgtgtgcttgttttgtttttaaag

SEQ ID NO: 119245 - DNA, 201 bp, Homo sapiens
acattatggagcaggataaatattcatacctattttaaagatcaaaaacaagacattaaagaaatattggtaggaagaaatacctttggactaactctcaraactctcatgtgccttagggactgagtttgttcctttcttctatttgatatgcttgtcgggaaagcttgagatacagtgctccagggtttaacagggaaa

SEQ ID NO: 119246 - DNA, 201 bp, Homo sapiens; identical to SEQ ID NO: 20339

SEQ ID NO: 119247 - DNA, 201 bp, Homo sapiens
taaaaccaatcttgcaatgatggataaacaaagatgaattagaggaattatttaggagaagtgagaacaaaaaagaaatagcttttatgaaaacaaggatrtgtgtgtgtgtgtgtgtgtgtgtgtttgtgtgtattttagaagtagaaaagtttattgaatgctgatagaatattctttatggtatgtgtttctttttgt

SEQ ID NO: 119248 - DNA, 201 bp, Homo sapiens
tcttagagctatgaaaaaaatacactgccactaatcatctaatgagatctgatattgcttatctagaaaatattcactctttaacagctttcttcacttarcatttggtgaaaaagtacaataattactgaagaaatgtaaatatccttcaaacattctcactgttctttttcacatttccttgtctattatttaaaaaat

SEQ ID NO: 119249 - DNA, 201 bp, Homo sapiens
gtgtctgctcatatccttcaaccactttttgatgtggttgtttttttcttgtaaatttatttaagttcctgatagattctggatattagccctttgtcagmtggacagattgcaaaaatgttctcccattctgtaggttgcctgttcactctgatgattgtttcttttgcttcacagaaactctttagtttaattagatcc

SEQ ID NO: 119250 - DNA, 201 bp, Homo sapiens
ggttgtttttttcttgtaaatttatttaagttcctgatagattctggatattagccctttgtcagatggacagattgcaaaaatgttctcccattctgtakgttgcctgttcactctgatgattgtttcttttgcttcacagaaactctttagtttaattagatcccatttgtcagttttggcttttgttgccattgcttt

SEQ ID NO: 119251 - DNA, 201 bp, Homo sapiens
attagatcccatttgtcagttttggcttttgttgccattgcttttggtgttttagacatgaagtctgtgcccatgcctatgtcctgaatggtattgcctakgttttcttctagggtttttatggttttaggtcttaagtttaagtctttaattcatcttgagttaattttgtataagttataaggaaggggtccagtttca

SEQ ID NO: 119252 - DNA, 201 bp, Homo sapiens
attgcttttggtgttttagacatgaagtctgtgcccatgcctatgtcctgaatggtattgcctaggttttcttctagggtttttatggttttaggtcttahgtttaagtctttaattcatcttgagttaattttgtataagttataaggaaggggtccagtttcagttttctgcatatggctaggcagttttcccaacgtc

SEQ ID NO: 119253 - DNA, 201 bp, Homo sapiens
ttcccaacgtcatttattaaatagggaatcctttccccattgcttgtttttgtcatgtttgtcaaagatcagatgttgtagatgtgtggcattatttctgrggcctctgttctgttccattggcctatatatctgttttggtaccagtaccatgctgtttttgttactgtagccttgtagtatagtttgaagtcaggtagc

SEQ ID NO: 119254 - DNA, 201 bp, Homo sapiens
cccattaacactactgttctatcctgcagtgtcatttttctcattcttatggagataatgctccctggagatctccaatacctggaggaatgaaagagaayagcagagacaggctaactatcaaagagggagcaaacaacacagcaagaccatgaattccaacagttgaattttcaattgagtgaaaagatgaggcctatt

SEQ ID NO: 119255 - DNA, 201 bp, Homo sapiens
agcattgttctttttgcttaggattgtgcaggctatatgggctcttttttggttccatatgaaatttaaagtagttttttctaactctgtgaagaaagtcratggtaggttgatggggaaagcactgaatctatgaattactttgggccctatggccattttcacaatattcattcttcctattcatgagcatggaacttt

SEQ ID NO: 119256 - DNA, 201 bp, Homo sapiens
gaattactttgggccctatggccattttcacaatattcattcttcctattcatgagcatggaacttttttccatttgtttgtgtcctctcttatttcctcsaatggtagtttgtagttctctttgaagaggcccttcacatcccttgtaagtttattcctaggtattttattctctttgtagttaatgtgaatgggagttc

SEQ ID NO: 119257 - DNA, 201 bp, Homo sapiens
gattttttttttaatatatagtttgccctccactatctacagatttgacattagcaaccaaatgcaattgaaaatacagtattcatggaatgtaaaacccrtcgatttagatggccaactttttatatcttaggggctccacagggttgaatgcaggacattagtatatgcagattttggtatgtgcaggaagtcctggaa

SEQ ID NO: 119258 - DNA, 201 bp, Homo sapiens
tcaaggtgagatcattaggatgagccctaatccagtatgactggtgtccttatataaaaaagaatttggacacagacacacacagggagaacgtcacataaagaagaagacagagattggggtgatgcatctgtaagccaaagaacaccaaagattgccagccaaccaccagaagctgggaaagaggcttggaacagattc

SEQ ID NO: 119259 - DNA, 201 bp, Homo sapiens
aaaaatcctcaagattattcgcattttatagataggaaagattagctcagcaagaataggtaacttgcttgtaatcacgtatctcatgcatagcttacatkaggagggtgactgctaaacccagacaacccggatttgaatcctgactccagcttttattatacaggcaagttacttaaacaacctgtgctcaattttctc

SEQ ID NO: 119260 - DNA, 201 bp, Homo sapiens
atttttttttttaaaggacatcttctgtgggaacccgtagtacagatattttccaattagcatctttgtatgttctcttctggcatgagtcgggtttaggyttgacacactgggcttttaaggggagctctatctttgcagtccaggctacgtgtgacaagattaaattggcacactttactgtacagctcttgtgttcct

SEQ ID NO: 119261 - DNA, 201 bp, Homo sapiens
tgggcttttaaggggagctctatctttgcagtccaggctacgtgtgacaagattaaattggcacactttactgtacagctcttgtgttcctggcagcactrgcctggctgatacctctgagagaaggctcagctgtcactcactgacccattaacactactgttctatcctgcagtgtcatttttctcattcttatggaga

SEQ ID NO: 119262 - DNA, 201 bp, Homo sapiens
atgccctgtgaaagccaattggtgcctgctctccagcttcatgctttgaaaacttcctggaaaccagattgagtccatgcccttcacttacttattttacygctggttccaacagtcagccctactccctcctgttagaccaaacttgcatcttagcaagggctgccaattgactggagttaccaaggcccagtttttgaa

SEQ ID NO: 119263 - DNA, 201 bp, Homo sapiens
ataacttgtaatttttgcactaagttcttactcatcactcttaattgccaaatcttagagctatgaaaaaaatacactgccactaatcatctaatgagatmtgatattgcttatctagaaaatattcactctttaacagctttcttcacttaacatttggtgaaaaagtacaataattactgaagaaatgtaaatatcctt

SEQ ID NO: 119264 - DNA, 201 bp, Homo sapiens
cctgctctccagcttcatgctttgaaaacttcctggaaaccagattgagtccatgcccttcacttacttattttactgctggttccaacagtcagccctaytccctcctgttagaccaaacttgcatcttagcaagggctgccaattgactggagttaccaaggcccagtttttgaaactgctcattgaatgaagatcctc

SEQ ID NO: 119265 - DNA, 201 bp, Homo sapiens
gtaatattagagagaaactttgcttgattgtcatcatttttcaaaatatatggtactgacattgtgtcttttctccaatggagaaattcttctcagagttwtatatatataacttgtaatttttgcactaagttcttactcatcactcttaattgccaaatcttagagctatgaaaaaaatacactgccactaatcatcta

SEQ ID NO: 119266 - DNA, 201 bp, Homo sapiens
tcacactggcatgaatgactgctactataatcactggctcttcttttataggggtttttattaattaaatgtaaagtctgccattggccttataagagtgytcatctgttttcctttaatttcaagtagattaaaagtgagatttggtgttaattaaaaacttagaatttatggggtttctaattgcaaataacatttctg

SEQ ID NO: 119267 - DNA, 201 bp, Homo sapiens
cctacttaattctcacctggttaaaacgcatagaatggtttatggttgtacctgggtggctacaggtaccgtaagtatacttccattcattgcaacaacarcaaaaaagtccctgacaaataatggtctttataccattaaattaaaaaaaaaatcctcaagattattcgcattttatagataggaaagattagctcagca

SEQ ID NO: 119268 - DNA, 201 bp, Homo sapiens
aatttatttgcatggttttccctcttgggttgacatttgatttgtattctacaattttctgttgaaaattgtatcatggataataatttcattagattggygagctatgtttaaccatgttcccataggatttaaagtacttttaagaataataatgttttatatccattgctaatataatctatggattttatcatgtta

SEQ ID NO: 119269 - DNA, 201 bp, Homo sapiens
agatatgtaggcatctcgtggctcaaattgacacacaaaattaaccatcgcagtgtttcttcagcaatttatttgcatggttttccctcttgggttgacayttgatttgtattctacaattttctgttgaaaattgtatcatggataataatttcattagattggcgagctatgtttaaccatgttcccataggatttaaa

SEQ ID NO: 119270 - DNA, 201 bp, Homo sapiens
ttgttaggtaaacacataagaggtgtttaataattgttattttttctctggcctatatgttatatcctaatctcattaagtaccaccagatggcataaccrttgaaaaaagtatatttacaatatttgaaagaaaataatattttataaaagaaacttaaaatagccactctacctggtgtgaaagccccaagacagaatt

SEQ ID NO: 119271 - DNA, 201 bp, Homo sapiens
aattcttctcagagttttatatatataacttgtaatttttgcactaagttcttactcatcactcttaattgccaaatcttagagctatgaaaaaaatacaytgccactaatcatctaatgagatctgatattgcttatctagaaaatattcactctttaacagctttcttcacttaacatttggtgaaaaagtacaataat

SEQ ID NO: 119272 - DNA, 201 bp, Homo sapiens
taatcatctaatgagatctgatattgcttatctagaaaatattcactctttaacagctttcttcacttaacatttggtgaaaaagtacaataattactgargaaatgtaaatatccttcaaacattctcactgttctttttcacatttccttgtctattatttaaaaaatatgtgttattgatgccatgggagtgacactt

SEQ ID NO: 119273 - DNA, 201 bp, Homo sapiens
aattaatgataatgtcttataaaaattaatatccagtctttatgaggcagatagtcaaataaatgtccaaattcaatgacaatttaaaattaaacctagawgtcaaagtcagtgtttttgaaaggaaatgtagcacacatctaccctttacatattccaggttggtaaactgtatgtattagcaaccatgatttataatgc

SEQ ID NO: 119274 - DNA, 201 bp, Homo sapiens
cctccctgcaagagaatgatgcttttctaccagttgaactcaagcgagctcacgtaactttctttagccagataaataagatctagcatatcctgtagtaygttcctcatttcctccaccactgaagctgtgagtgtttcatataatgggagtaaaggtgatgacaatgcagagtagggccctcagcctaggatcacaaac

SEQ ID NO: 119275 - DNA, 201 bp, Homo sapiens
ttgactatgggcataataaatactccccacagaagaactgagatagaacctaggttgtgaaagccacagcaaaaagcctcagcttcctaggaattttcttrtcctagcaggggaattgaaatactaatcagtgattgggaagaaacccacttctctggcaggtcctcattactggaaggatgggagaaagaagggtgggta

SEQ ID NO: 119276 - DNA, 201 bp, Homo sapiens
ggggaaaaaaacttgcttcaacaagagcaaaactaaatctaaattaggtaattttctcttttttaaataaaccaaaaaagccaacttcaggatggaggtayagttatgcaagaggaccatttctaggagcttaaattagaatagaggaaatccccatttttaaaataggctgatatcaaaggaaatgtcccttgattcagt

SEQ ID NO: 119277 - DNA, 201 bp, Homo sapiens
atagacaagaaaagagattaaatatctgctttatttaaattcagcaggaagaaagagccctacatttacaaaatgtttccctggaaacactattctcaagaaaaaaaacaaattcttccttgggtcattaatttttaaatggtaaaatgagttaatagaaaattgtaataaataaacacatatatacatgttaacacatgt

SEQ ID NO: 119278 - DNA, 201 bp, Homo sapiens
taatttctggccacccagcatcttcaactctacttccataaatacaatgttacagtcccatatacactggcctccatgtctttgcacacattcctcagtcrtctagttcccatttccttttccaccctcattaactttctctctttccacctgttttcaatacacacatatatacacaccattgaataaatacatagataa

SEQ ID NO: 119279 - DNA, 201 bp, Homo sapiens
gggtcatgacatttttttcttttctgaagtctgtggcctgtcaggtatgactctctgttttcatgatttgggttagaattttgttcacttgacttagaacrtttttgcatatagagatcaagtaagactttagtaggcttcctatctatctgactaattgattattgtaggaacaccataatcaataaatcaatgtcatag

SEQ ID NO: 119280 - DNA, 201 bp, Homo sapiens
tagaatagaggaaatccccatttttaaaataggctgatatcaaaggaaatgtcccttgattcagtcatgacaccaatgtgatcagatgctctgatcactartgcactccagggcaaagtcatttgacatttccttcagaaatacagagagatgtttggaattatttagaagaaacagcctcatttgaaaattgtaggtctg

SEQ ID NO: 119281 - DNA, 201 bp, Homo sapiens
tgcctttgctgtcccttacagtaagcgtgcccaccttgcctttggccattgagtgcctgcctccacttacatccaattacttttattactcccagaatagmattactcctattgcatttaggtttccaaattgaatatctccatttcctactacagttgacccttgaacaacatgggtttgaactgtatgggttcacttat

SEQ ID NO: 119282 - DNA, 201 bp, Homo sapiens
ggaacaaatcccctatgtataccaagggacaactgtataaggtctggcctatggaaaacaaaaagctctttaaggatgctgggattccttccacaaatttrtttctcacagtatcagggaaaaatgttttctggaccctccctgtgtgggtgagtatgttttagatgacaaatccactctaacataacaatcctcctaagc

SEQ ID NO: 119283 - DNA, 201 bp, Homo sapiens
aaattagaaaattcaagtagttcttttggagtgtagtgcacctcctaatgggccatattttgtacctcacctttggggtctgctgggtttgagtctagttrcaggtctagaagcaaagaggggtgttacgtgtgggttctgaagagaatcagccttgtcttgcatagaaactacttctggtgaggccattaagtttcccca

SEQ ID NO: 119284 - DNA, 201 bp, Homo sapiens
gagtgtagtgcacctcctaatgggccatattttgtacctcacctttggggtctgctgggtttgagtctagttacaggtctagaagcaaagaggggtgttasgtgtgggttctgaagagaatcagccttgtcttgcatagaaactacttctggtgaggccattaagtttccccaggcaatgcagaattaatcttcttagatg

SEQ ID NO: 119285 - DNA, 201 bp, Homo sapiens
gctctaggctcaaagatgttttctcagtactttaatgggctatgctcctccccaccatctaatatgtttcctctgcttgagatacaattttttccctcttygctaatccaatttttgctcatatttcaaaattccaagtgaagtatgagaattcttttggatcacctagaatagtggttagcgattgaggaaattgccacc

SEQ ID NO: 119286 - DNA, 201 bp, Homo sapiens
taaatgagatgatctgtgcatagtagtaatcacaaacttgacatatggttgctgttcaatcatgttacaaatcattatcattattgtacatacagcacatkaccattacacatacagcacttttgctgcgaatttgaattcctgagctcatcttcttctttcatcacttcgtccagcaacattaggagcaagcaatcaatc

SEQ ID NO: 119287 - DNA, 201 bp, Homo sapiens
caaaatgcaaataatgatcccccttgagaaataatgatcaagagaatagatcaagtcctttatcaaaagttctagtagctccctgatctctacttttattscaatcttaaataaatacttttattagttatttaatattaggacaaataaaattatttattttggcagggatctttattcctgatgtttccttccatatga

SEQ ID NO: 119288 - DNA, 201 bp, Homo sapiens
agatcaaaagaaatttaatataaggtgatgactcacataattatggaagctgagaagtcccatgatctgccttctgtaagctggatacccagggaagacasgggtgtgtagtttaaaggcctctgtaccagaaagctgattctgtggaatccagtcagtgtctgaaggcctgagaataaagcatacaaagcaaaagtttga

SEQ ID NO: 119289 - DNA, 201 bp, Homo sapiens
cccccttgagaaataatgatcaagagaatagatcaagtcctttatcaaaagttctagtagctccctgatctctacttttattgcaatcttaaataaatacwtttattagttatttaatattaggacaaataaaattatttattttggcagggatctttattcctgatgtttccttccatatgaagagaactcaaatttgta

SEQ ID NO: 119290 - DNA, 201 bp, Homo sapiens
gagcagctgtagcaggcacatcctcagctcaaatgaggtgatggatttccaaatgcagtttgggacccttggttaagtcctctccctgaagtggggaggtytgcaaggcacattctcacagtccccagagatgctcctcaagtgagtgaaaaactgatatggaattcaatccttgaaaaaaaatgaaccaaatgaaaatac

SEQ ID NO: 119291 - DNA, 201 bp, Homo sapiens
ggatttccaaatgcagtttgggacccttggttaagtcctctccctgaagtggggaggtctgcaaggcacattctcacagtccccagagatgctcctcaagkgagtgaaaaactgatatggaattcaatccttgaaaaaaaatgaaccaaatgaaaatactatccaagaattgaaaaaaattcactcacctagagtgtaggt

SEQ ID NO: 119292 - DNA, 201 bp, Homo sapiens
ggctgccaattgactggagttaccaaggcccagtttttgaaactgctcattgaatgaagatcctccttgggttgtctgctctgtcttcaaggtgatctatrttattatcccaatgctttccacataaattgatttccttttaccattttatgagagacataacagttccaaattaagttatttatatctaagtgatattac

SEQ ID NO: 119293 - DNA, 201 bp, Homo sapiens; identical to SEQ ID NO: 20342

SEQ ID NO: 119294 - DNA, 201 bp, Homo sapiens
tttccaccctcattaactttctctctttccacctgttttcaatacacacatatatacacaccattgaataaatacatagataaatacaattatttcctcawtttcttcaaaattggctcaaagtcttagagaagattatccagtgacaaaaccacccaagactggagagtctattaagcactcacacaatcgggtgcatac

SEQ ID NO: 119295 - DNA, 201 bp, Homo sapiens; identical to SEQ ID NO: 20340

SEQ ID NO: 119296 - DNA, 201 bp, Homo sapiens
tttcgtggaaaccgtacaggacaggagagagtggcatgacatatttaaagtgctgaagaaaaaagaaaatcaaacatttttattccagaatagtgtatttrgtgaaaatatccttcaaacatgaaggagaaataaaaactttcccagacaaacaaaagctgaaggatttcatcaacatcacacctgtccaacgaaaaacga

SEQ ID NO: 119297 - DNA, 201 bp, Homo sapiens
tttcaaaatatagagattaatagttattacaatccccacatagaaacaagcttaggaatcatcagtcctgaacataagataatgttaaatgaatcctctaytcacttaagtaactctccttttcttttctgctaacctcatctaaattttgtcagattttaataccaccatatttaactcatttaatcttaatgtgagctt

SEQ ID NO: 119298 - DNA, 201 bp, Homo sapiens
gaatttgataaaagaaaaatccaaactgagtcctgggcactctgacatttagaggtgagcagtaggaggaagattaagcaacttgaatgagatcattcggkaatatgtggtgtccagcagccctcgtgaagaaattatttcaaggagaaatctattatcagctctagtactatggaaaaattgaataaaatatgtcttgag

SEQ ID NO: 119299 - DNA, 201 bp, Homo sapiens
tgtactatttataatccaaaattagcaaatctcttcctgaagtctctgaatcagcattcgaagtgcacctggtgttcagtagttgatagtcttcctttctrttacaaattactcttggtttagcaccattctcggtttagtgtattgtctcttgttttactttattgtcaattctatgaagccatgtaatttgcatatttt

SEQ ID NO: 119300 - DNA, 201 bp, Homo sapiens
agctgacttccggagaaagaccggaggagctgggaagaagggagaaacaggatataacttcccttctctctctgcattgggcagtgacttcagagcagctmtctcctttgtggctccctacctttgccactgtctgactcaggtagcactgctaacctcccatgtccttccagcctagcaggggtagctgctttgtgctgt

SEQ ID NO: 119301 - DNA, 201 bp, Homo sapiens
aataacttctaatttggttaaaaatctggtcttctactgctgattatcagaacagtttagaaaagcaagattgatttcttttgtggaatagtcaagagaayaccacaatggcctaaggcaccaaatgattgcaaaccatcttcctgcaattaaaatggccagagctgacctgctctttattaaacattaatctttggcttc

SEQ ID NO: 119302 - DNA, 201 bp, Homo sapiens
cttctgaatgcatcagtgagttcaaggtctggatatgtatgactcatgcaagctctgtgccattaagctgttttataggagaaaagtattcttcattgcamtgagcctgacacttgagtttctttgtataatttgaaatttggcagctcagtgtatacttaaatgaaaaatgcttttttctaaccatcatctagatgatag

SEQ ID NO: 119303 - DNA, 201 bp, Homo sapiens
acacttgagtttctttgtataatttgaaatttggcagctcagtgtatacttaaatgaaaaatgcttttttctaaccatcatctagatgatagaaacattgktttcaccatttaaataattgtacagaaaacaatgtggtctgaaaatatcatgaatatatatatattttacttataataccattagcacatttcatttttt

SEQ ID NO: 119304 - DNA, 201 bp, Homo sapiens
gttctgaagataagatattaaaaaagatgccataagggagatatgaggataatcacatcctgacagcttcttgctgggcttgtttcctgctcaaaaagacytaatcaaagtttattaagtaaaattcacagcagtagtgcaagcatccaataacatgtatgcaccatgaaaatatataacatattatagaacactgccctt

SEQ ID NO: 119305 - DNA, 201 bp, Homo sapiens
taaattattatgaattaagaattgtgccaagccatataaatcatctgatataacctcagtacaaatatacaaaataggtcatattattattaccattttayaaaagtgaaaggtgactatgattaacttcattaaaagctgagagctagtagtggcaaaaacaggataagggctattacaaaatcctaaacccttggccac

SEQ ID NO: 119306 - DNA, 201 bp, Homo sapiens
gcatgtttccaacagtgatggaccaaaacagttcaaatcactgactacaaatcatgagggaaagaagtatgcacttaagtatgtgtaggtgtttggaaatrtggcttcccaaaaccagatccttgcgagggaggaaaaatgaagaggaagagtatatcagctcagtcccttcaagcatgtagaccagttagctttctcata

SEQ ID NO: 119307 - DNA, 201 bp, Homo sapiens
gtagagagagaaagaaagattgcagtagaaagtttataaaagggataatgacagaaaacttcccaaacctagagaaagatatcaatattcaagtacaagaytgttatagaaaaccaagcagatttaacccaaataagattgtcttaggacatttaggaatctaatttctaaaggtcagggataaagaaaggatactaaaag

SEQ ID NO: 119308 - DNA, 201 bp, Homo sapiens
atacatcatatcaacagaataaaggacacaaaccatataatcattttaattgatgatgaaaaagcatttgataaaattaaatatcccttcatgataaccaycccctaaaataaaatatggctatagaaggaacacctcaacacaacaaaagtcatatacaacagacttacagctagtatcatactgaatagggaaaaacta

SEQ ID NO: 119309 - DNA, 201 bp, Homo sapiens
cactctgttaaatcttgcaactgcacactcttttggtccgtgtttgttctggctcgagctgagctttcgctcgccatccaccactgctgattgtcactgtygcagacccaccactaacttccactcctccagatccagcagggtgtccactgcacttctgatccagtgagacgcccactgctgctcccgatcagggtagaa

SEQ ID NO: 119310 - DNA, 201 bp, Homo sapiens
atttcctcattttcttcaaaattggctcaaagtcttagagaagattatccagtgacaaaaccacccaagactggagagtctattaagcactcacacaatcrggtgcatacctcctctaaagccattttcatagtgaatattaataaactgcttttatttttttactatacctccctctaaactgcaaagttgttagaacag

SEQ ID NO: 119311 - DNA, 201 bp, Homo sapiens
ccaatagcactggagttgagaaatcctgatgagaaatgcaagttttaatacttccagaaacactttgagatagataacttttatcacttccttcttccagaagaggaaactgcagcatgaggattttgagcaacaatttttagtaaaggaaccaaacaccgcatgttctcactcatagatgggaattgatcaatgagaaca

SEQ ID NO: 119312 - DNA, 201 bp, Homo sapiens
aaatcacagagaggaaaatgtcagggagcaaaataaaaacaccccaacactggccaacgggcaggcacaggtagcctggcaagcagaaatgagaacacagygacctcagcaaaggcacagcccttaacaaaggtaagaaaatcaggcagactatgggcctcagcaaaactgctggtttttaatgatgtagatgtcttcaag

SEQ ID NO: 119313 - DNA, 201 bp, Homo sapiens
gattttgtgcagggaaggaaaatctataaccacagtaagtgtctatttcagtaagaacaaaatattgcccttctatgatagaagagacccaatttaattawtttgtcagcagttagctgcctgatcacccacaagaatcagccatacaagggactcagtgttgttctctgctgctggattagacattcatcagtgccagcc

SEQ ID NO: 119314 - DNA, 201 bp, Homo sapiens
tctggaatagctttgcttattgtaatattagagagaaactttgcttgattgtcatcatttttcaaaatatatggtactgacattgtgtcttttctccaatrgagaaattcttctcagagttttatatatataacttgtaatttttgcactaagttcttactcatcactcttaattgccaaatcttagagctatgaaaaaaa

SEQ ID NO: 119315 - DNA, 201 bp, Homo sapiens
ggccagagtaacacacctgaatgagaaatatgttgcctccaaaatccaaataggcccactagccactgtgcctcttttttggttgcaggaggggccaaatrcaacaacttattctttaccttagaataaatatcttgacattttccacaccactggacctgtagaaatttccctgaagtagaaggcctctgaatttttgtt

SEQ ID NO: 119316 - DNA, 201 bp, Homo sapiens
ataaattatcttactggagttgtgattaatattgaggtggtattggaagaattagtaagttaatgtttctgaaatattattggtcataaaataaaagctamatagtaactacaaagtattatttctcatttattatatttacatggcttagtatcagtggttctaaagtatattgaaaagtccctttttaaattgtaatta

SEQ ID NO: 119317 - DNA, 201 bp, Homo sapiens
gagtcgggtttaggcttgacacactgggcttttaaggggagctctatctttgcagtccaggctacgtgtgacaagattaaattggcacactttactgtacrgctcttgtgttcctggcagcactggcctggctgatacctctgagagaaggctcagctgtcactcactgacccattaacactactgttctatcctgcagtg

SEQ ID NO: 119318 - DNA, 201 bp, Homo sapiens
cttctgcttaaatattatggaagaataggccctcaccatatggcatattgtgtgtattttaaagtgttcctcagagtaaaaagttatatttattctgatayatgccttctacctgtttctttctccttcccttcctccctctgtccctttcttccttctttccttccttcttttctttctgtctctccctaacctccactc

SEQ ID NO: 119319 - DNA, 201 bp, Homo sapiens
ttgggcacatgttctcaggatctcctgaaggctatgtcacaggccatggttactcgtatttggctcagaataaatctcttcaagtatttttcattgtgatrctttttgtcaacagaacactagagagagtcagtaggatgaaagaagtgttgggagtacattgtgtgtcccactagatatggcctcatggaagggcaagga

SEQ ID NO: 119320 - DNA, 201 bp, Homo sapiens
cactagagagagtcagtaggatgaaagaagtgttgggagtacattgtgtgtcccactagatatggcctcatggaagggcaaggaggtctcagcagaagggkctatagtcctgggatgccctggcattaaaatgaccacacagaagagaggttcatctgtcaagatgaaaggagcttcaggagaaaggggctcagcagagaa

SEQ ID NO: 119321 - DNA, 201 bp, Homo sapiens
atatataaagaaaacataataacatggtacagttaagaggaaactaatatattaaaacgactgcacagaggagagaagccctcattgcaatattgaatatrtagcattcatttttactagcatattttgtgtatactttattgctagtataataaaatcaaggttactaggggtaaatgtatgtttatttacagaataaaa

SEQ ID NO: 119322 - DNA, 201 bp, Homo sapiens
tgcttttaaacttggaaaatatgttctccactatttaacctaaatgccactataattataaccatctcaaacttatgcttataattctttctgcaagatayacaattaaaataaagtggtaatctaaacaaggaaaataaaatggaaccctgcaattacatagtcagacttttctcatgttagcacggaaagaagaaaggc

SEQ ID NO: 119323 - DNA, 201 bp, Homo sapiens
tattgaatatgtagcattcatttttactagcatattttgtgtatactttattgctagtataataaaatcaaggttactaggggtaaatgtatgtttatttrcagaataaaaatttgagacatggggttttaagtatgtgagaattaaaatctgctaagtacaagatttgcccaagaagtgtaaagattttaggagaacagg

SEQ ID NO: 119324 - DNA, 201 bp, Homo sapiens
tctttttggaaattttcaagtttaaacagctacagggttttaacatactttttctggtagactagagagaatgaaggaagttaatgttgaaaatatagttrgcatctccttactggtgagaattaaaccaataaatcacatgagtccctttgggtaatcatttaagctggcaagaataaagcatatatcattaaactttag

SEQ ID NO: 119325 - DNA, 201 bp, Homo sapiens
attagagagaaactttgcttgattgtcatcatttttcaaaatatatggtactgacattgtgtcttttctccaatggagaaattcttctcagagttttatakatataacttgtaatttttgcactaagttcttactcatcactcttaattgccaaatcttagagctatgaaaaaaatacactgccactaatcatctaatgag

SEQ ID NO: 119326 - DNA, 201 bp, Homo sapiens
aagaaacatctccattgtaccatggttgaatgaatttagaattcttaataaaggtactatgctgtaagaaatagcccttgatgcagctgaccttatatttyctgtgttacttttttattctttgactccatttcctgtctcttgcctcacacataatgagtaaaaactgcttctaaattttatattgtgcacattatttct

SEQ ID NO: 119327 - DNA, 201 bp, Homo sapiens
atataacttgtaatttttgcactaagttcttactcatcactcttaattgccaaatcttagagctatgaaaaaaatacactgccactaatcatctaatgagmtctgatattgcttatctagaaaatattcactctttaacagctttcttcacttaacatttggtgaaaaagtacaataattactgaagaaatgtaaatatcc

SEQ ID NO: 119328 - DNA, 201 bp, Homo sapiens
ttaattgccaaatcttagagctatgaaaaaaatacactgccactaatcatctaatgagatctgatattgcttatctagaaaatattcactctttaacagcyttcttcacttaacatttggtgaaaaagtacaataattactgaagaaatgtaaatatccttcaaacattctcactgttctttttcacatttccttgtctat

SEQ ID NO: 119329 - DNA, 201 bp, Homo sapiens
tgggaacactgcttctctcactttctacctactttagaggcaggaagaaatttggcaacaatcttgctctccattgattttctaaatgaatactcctctamctatgcataacatgtgtcatttaatgctctgctatcagattacatagtttacttttttcagtgctattgtcttcttccaatttcctgatctttttcctat

SEQ ID NO: 119330 - DNA, 201 bp, Homo sapiens
aaaaatctccacttttttgctcctgcaagcagtcattcaactaatgagttttatgaagacctgtcgttcatttggcctatactaaagaagtaatttaacaytgcataaacaaaaagaggctttaacaaacactataggaaaagaaaattcatccacccataaattcagtcctttactccttactaaatgaaatcttcagat

SEQ ID NO: 119331 - DNA, 201 bp, Homo sapiens
tttagcacttagaacctgaatcttgtgaaaaaaatatttcttattatttcctaaaggaaaatgaaggcttttcctcacaaaaccaagaaggacgtctacawgctaaagcagaatggttctgcttgaaagggtgggaaatatcttgcctacttgcccttttccgtttttccagaatttctcctgtgccatctgttaagagct

SEQ ID NO: 119332 - DNA, 201 bp, Homo sapiens
ttgaaacacagtaggaaagacttttgtaacttcttcagtcaatagcatgcagtagaaatgatgctgcatgactttcaggtcccagtcttaaaaggcaacamaactcccacctggctttctctctctcagacacatgccaccatgttgcaaagaagctcaggctggatggagaggccacatgtgggtattctggctgatagc

SEQ ID NO: 119333 - DNA, 201 bp, Homo sapiens
atcccataaggtcaggatatgtaggccaaaaatttgtgaggagctgagttgaggtctggctcagtttttcatgaggtgtagttagaggtcagctgggctgrcagtcatctgaaggcttgactggggctgcaggatccattccccagggatcccactatatggctggtaagttggtgctaacaaggtgcatcctctccatgt

SEQ ID NO: 119334 - DNA, 201 bp, Homo sapiens
tcatctgaaggcttgactggggctgcaggatccattccccagggatcccactatatggctggtaagttggtgctaacaaggtgcatcctctccatgtgagmctctccacagggctttttgagtgtcttcacaagatggtggctgaatttacctggagcaagtgatcagagactaagccaaaagctccagtagctttatgag

SEQ ID NO: 119335 - DNA, 201 bp, Homo sapiens
cagatgatatttaggagattaaacaggaatgggcatgggtcagtgatgaggggtctacctcacctataggaatggcatcggtgggagcaggggtgctaccrattcaagtgagggctgacaaggcagcacaaacttagaatcttccaggcttatattattaatcatagtatctgatctgggggctgggcctttgtgacagga

SEQ ID NO: 119336 - DNA, 201 bp, Homo sapiens
gcactttttttcttccaggaattcactcttgtttgaagcaaacccagtggcattgactatgggcataataaatactccccacagaagaactgagatagaayctaggttgtgaaagccacagcaaaaagcctcagcttcctaggaattttcttatcctagcaggggaattgaaatactaatcagtgattgggaagaaaccca

SEQ ID NO: 119337 - DNA, 201 bp, Homo sapiens
tagtgaatattaataaactgcttttatttttttactatacctccctctaaactgcaaagttgttagaacagttcttgatatgtagaaagagttcacattgktacttctaattattaagcagaagatcttggtataaaaaattttttaaaaacagttctatttaaaatagatggcagagatcaaggcgatgatgtttgttaa

SEQ ID NO: 119338 - DNA, 201 bp, Homo sapiens
tttcctacattttgtactggaagttgctgaaaagagtgccagttcacacaaatgcaagagccaaattcttaaacattgaactttgaaatgctctggggggraaatctctaaagatactattttctaacaaagcacagcctttcgatttttaacttcgatctaagaaaggggcacaatgggtgaataagactccttctagcc

SEQ ID NO: 119339 - DNA, 201 bp, Homo sapiens
tgaagtagaaggcctctgaatttttgttacatatatttcccactctctgataagcaaatcccttaccagtaagactagaatagttgttacgtgttgctcastaagtccaatcagcataatgccatcaatataatgaactagtatgatatcttcttgaaggaaaaggagatcaagatccctgcaaactgaattatgacttag

SEQ ID NO: 119340 - DNA, 201 bp, Homo sapiens
tttaatccacttcccattccagtaaggaaagttttaagggctgatatttaataggaaaaagcaaagtgttgcaaaaaggcaacacagtctctgtctcacaraagttgctctatcaatacccggaataccatcggagttctgtagcctaaatgaagaaaaatcagctggtgcaggaaagaaaaaacattataaatttagaag

SEQ ID NO: 119341 - DNA, 201 bp, Homo sapiens
gaaagcactgaatctatgaattactttgggccctatggccattttcacaatattcattcttcctattcatgagcatggaacttttttccatttgtttgtgycctctcttatttcctcgaatggtagtttgtagttctctttgaagaggcccttcacatcccttgtaagtttattcctaggtattttattctctttgtagtt

SEQ ID NO: 119342 - DNA, 201 bp, Homo sapiens
tttgaaaaaaccagctcctggattcattgatttttttgaagggttttcatgtctccatctccctcacttctgctctgatcttagttatttcttgccttctrctagcttttgaatttgtttgctcttgcttccctaggtcttttatgtatgatgttagggtgttgattttagatctttcctgctttctcctgtgggcattta

SEQ ID NO: 119343 - DNA, 201 bp, Homo sapiens
tgaaaagagtgccagttcacacaaatgcaagagccaaattcttaaacattgaactttgaaatgctctgggggggaaatctctaaagatactattttctaayaaagcacagcctttcgatttttaacttcgatctaagaaaggggcacaatgggtgaataagactccttctagccttacttacagttcccagtagacaattc

SEQ ID NO: 119344 - DNA, 201 bp, Homo sapiens
ttcacacaaatgcaagagccaaattcttaaacattgaactttgaaatgctctgggggggaaatctctaaagatactattttctaacaaagcacagcctttygatttttaacttcgatctaagaaaggggcacaatgggtgaataagactccttctagccttacttacagttcccagtagacaattccccaccccaccttgt

SEQ ID NO: 119345 - DNA, 201 bp, Homo sapiens
gacaaaatcacatgtctaatacttgacattatgtataaatatgaattataccccaaagaaatactcctattctccatggtaaccattagtgaatgtatttkatatacagcatttaaaaaccttagcatggggacaaaaatgttgcctgcagctgaacggtagctcctttgtcagccagacatgacctccttggcacattgg

SEQ ID NO: 119346 - DNA, 201 bp, Homo sapiens
tctggccccagttttcttctcttttttatggcacacactcatgcagtttccatgcctaggctgttaaactcatgtctatattttcagctcaaatctttccrttgagacatgatgcctactggaaaagctaactgcttcacaacacttcaaacttaatatgtgtaaaatcaaatccttaattttactgaccttttagccaga

SEQ ID NO: 119347 - DNA, 201 bp, Homo sapiens
agtgaataaattcttttcaaattgacattaatttatattttatatttaaagtttattataagcaataatttacatatacttcttaaaactttagttggtarctttgctcctaaaacttgttagtagctccaacttattaaaactaaaatccaaagtctttgcagtgtttagtgccagcccattccctctctgattatatct

SEQ ID NO: 119348 - DNA, 201 bp, Homo sapiens
ggaaaatgtcagggagcaaaataaaaacaccccaacactggccaacgggcaggcacaggtagcctggcaagcagaaatgagaacacagtgacctcagcaawggcacagcccttaacaaaggtaagaaaatcaggcagactatgggcctcagcaaaactgctggtttttaatgatgtagatgtcttcaaggttcacgatgtt

SEQ ID NO: 119349 - DNA, 201 bp, Homo sapiens
ctaacctcctaattaaaatatttttggttactaaaatgtactatttataatccaaaattagcaaatctcttcctgaagtctctgaatcagcattcgaagtkcacctggtgttcagtagttgatagtcttcctttctgttacaaattactcttggtttagcaccattctcggtttagtgtattgtctcttgttttactttat

SEQ ID NO: 119350 - DNA, 201 bp, Homo sapiens
tcccatatgcttcctcttcatgcataactgcatgttaattcgtgctcttttaataacagcaaatatatgcagtaaactttctgcataagtgttgagcttayaggacactgaatataatgcaaagtactactgataagttggttgtcttcttctgaaaaaataaatgattattatttcacatattatctttcctaatattta

SEQ ID NO: 119351 - DNA, 201 bp, Homo sapiens
cggcctgtgggaatagggtgaatttgaacaatgaggggtttgtgagttaattcaatgttccaagtaactgaatcttctttcactatattaatcctcctagwtatatgtatatatttttattttgtgagttaacgaagattagatccttttgaatgatcctttcctggtaataactgaagcctgagtcttctctgggaacac

SEQ ID NO: 119352 - DNA, 201 bp, Homo sapiens
aataaatgattattatttcacatattatctttcctaatatttattatctttggtttattttttattattttaccaggcagtgcaatttcatagggtaaatragaaaagagtcttttcctcaacatatttattttttgagctgtaaagtacctggatttcattattttgaccccttgagaacattttttaacaaatgttcat

SEQ ID NO: 119353 - DNA, 201 bp, Homo sapiens
agtggcatgacatatttaaagtgctgaagaaaaaagaaaatcaaacatttttattccagaatagtgtatttggtgaaaatatccttcaaacatgaaggagraataaaaactttcccagacaaacaaaagctgaaggatttcatcaacatcacacctgtccaacgaaaaacgataaagggagttcttcaatctgaaggaaaa

SEQ ID NO: 119354 - DNA, 201 bp, Homo sapiens
agaacattttttaacaaatgttcatttatttttcttaacagatcaattattctcaatagatcatatgtcttctttaatgcttccctgccaacattttttargacctaatttttactttatgggtgaggaaaatgattctcagaaaagtatacccaatcattttttctaataaatgtttacagaatatatagaattttatag

SEQ ID NO: 119355 - DNA, 201 bp, Homo sapiens
caaaaaatcattaatatttagcatgctacctaagttattgcaaattatgtaaataaaaattatctcttattatgtgattgctaatgagatatcaagtatgyattaggaatttatagttctataaattatttcggagtaatgctcgtttttcaacttgagaattagcatttttttgaatctctgaattttctttatgtatta

SEQ ID NO: 119356 - DNA, 201 bp, Homo sapiens
tagggacctcttaattcatcacaaaaatgaggtgcctctggagtggaacataaaagttatttaaccaacaggtttagcagccgtgataaatgatgtgtgtkatttaaatttgagtagaattgtgtttaattgaaaatttggccactgcatgaaatcttcactgcaaagattaggatgacattgaagaactgccatgggtgc

SEQ ID NO: 119357 - DNA, 201 bp, Homo sapiens
cctgtgatagaatgcaactttgattgttctgctaaagtagccagttaatttgcccttcatgctgctgtttctgttttctcttttcaacctcagcatctgasgatcatatactcttgaaacactcatgagagataggaacaggtagataaggctactttatagggacctcttaattcatcacaaaaatgaggtgcctctgga

SEQ ID NO: 119358 - DNA, 201 bp, Homo sapiens
tttcctaatgggcaacgtgacagtagtctagattggagccttatcttgtagcttcttttgacacctgaccaaagggggccaaaagcatggactcacattaraatcttcaatttttccagaaggccctgattcacatttctatcagggatggtaaattatgtcctgaaggacatgaagggtatccatgtgagaagctgcaaa

SEQ ID NO: 119359 - DNA, 201 bp, Homo sapiens
attagctgggcatggtggtggatgcctgtaatcgagctactcgggaggctgaggcaggagaatcgcttgaactcgggaggtggaggttgcagtgagctgaratcgcgtcactgcattccagccggggcaacaagagagaaaaatccatctcaaaaaaaaaaaaaaaagaaaagaaaagaaaaaaaagctaataaaaaaaca

SEQ ID NO: 119360 - DNA, 201 bp, Homo sapiens
atagaatatctggttatttctcttttcaagcaaagtaaacaaccaggtgcaccatttgaatttttgcaatttttgcccattggaaggatttcccttcactscagtccatcagggatgtcccgcaacaggggctacagagctacagttgtccacttttgagtggtaactgcatatcatgcagaaccatctgtaaaccaggcc

SEQ ID NO: 119361 - DNA, 201 bp, Homo sapiens
gacttgctcctccttgccttctaccatgattgtgagtcctccccaggcatgtgaaactgtaagtccattaatcctctttctttgtaaattgcccagtcttkgatatatctttattagcagcatgaaaatgaactaatacaagaactatcaagagtccaaggctagggtggccctggactgcatctgtgcatctgtgtattg

SEQ ID NO: 119362 - DNA, 201 bp, Homo sapiens
cagaatatatagaattttatagaatagttaaaacacaatgttttaactcatgaagtattactgtgaacaaaggagactgagtcttatatttgcaaactggwctttgtagtctagtgagagaaaaaaaatgataaataaagcaagaaaaaaatacagtcagtcagatgataagtgccaaaatcattgagagcaacttcttct

SEQ ID NO: 119363 - DNA, 201 bp, Homo sapiens
aacaaaggagactgagtcttatatttgcaaactggtctttgtagtctagtgagagaaaaaaaatgataaataaagcaagaaaaaaatacagtcagtcagaygataagtgccaaaatcattgagagcaacttcttcttccatctgcagtagcaagagttctgcttcctacactttagatattattttaatttaatttttgga

SEQ ID NO: 119364 - DNA, 201 bp, Homo sapiens
attgaactgcaaggtggcagcgaggctgggggcagggcacccaccaatgctgaggcttgggtaggtaaacaaagtggccaggaagctcgaactgggtggaycccaccgcagctcaaggaggcctgccagcctctgtagactccacctctgggggcagaccatagccaaacaaaaggcagcagaaacctctgcagacttaaa

SEQ ID NO: 119365 - DNA, 201 bp, Homo sapiens
tgaccaagaggtctatgggagtttcacattttattatttattatcttaactagagcctgttgagaaatttttttttttaaaggacatcttctgtgggaacscgtagtacagatattttccaattagcatctttgtatgttctcttctggcatgagtcgggtttaggcttgacacactgggcttttaaggggagctctatct

SEQ ID NO: 119366 - DNA, 201 bp, Homo sapiens
ttctccctttgtattcttacctgaatatttatatttatatatctattatgttctgtgtgctcattccatgattaacatttaaatttagtttttgcaaaaaytgtttaacgctcatgtgttttccaagtgtagctttttagaaggatatgatttccaagtattaatgtgtttcttctactcccaaaccaacaattcacagaa

SEQ ID NO: 119367 - DNA, 201 bp, Homo sapiens
gaaaggagaaggagtttatcagtacttggggttggacagacaacttctgggttttgtccatcctttcagctgttccacctaaaagaggctagtgccttatmtagatggcaaatttagaaagtaaaaatggaatgcttggctcaggtcctctctcttcctcttgagaatgagcttcccacgcatggcaggactttctctctg

SEQ ID NO: 119368 - DNA, 201 bp, Homo sapiens
actgccatgggtgctaagaatgtgaaataaagagccacttaagttaatatttcataaagcagtcagtgttttataaagcagagttctagaaaatatgttcyggtaccactttcatcagtatcacctgtgacatgtgttaaactgcagccccttggcctcacagtactactggatcagaatctccttacgggggaatgcagg

SEQ ID NO: 119369 - DNA, 201 bp, Homo sapiens
agaggaaaatttaattgtatgttattattgtacttctactacttaatacagaaaggggatatataaaagaaaggcacttcatgcatacatgatgaataaaygaagaataaatattttacttttttaaattagctttgtatttgcctaattccttggcctcagtttcctcttccagaaattgggaatgagacactaaaccat

SEQ ID NO: 119370 - DNA, 201 bp, Homo sapiens
aatacatcttcctgctcctcagcagccaaggcaagaatatatggcttagattcagccaactggctgcttgattctcaagggacagagtctttatggtgatrgtagaagtgatatggtttggctgtgtccccacccacatcacatcttggattctcatatgttcccattccctcccatctcattcagttacctttttttttt

SEQ ID NO: 119371 - DNA, 201 bp, Homo sapiens
aaatacactgccactaatcatctaatgagatctgatattgcttatctagaaaatattcactctttaacagctttcttcacttaacatttggtgaaaaagtrcaataattactgaagaaatgtaaatatccttcaaacattctcactgttctttttcacatttccttgtctattatttaaaaaatatgtgttattgatgcca

SEQ ID NO: 119372 - DNA, 201 bp, Homo sapiens
agaaaagaacaccatcattggctctattgtccgtgaatagcttgaatcctatctagctggggggcatgtaagaggagaagctcaacagctcaggataaacrttttaccctgatgtctggaaatttcattctttctttgaaaaatgtagatggatttggaaggatagcaataaaagtcaaaaagtcattatcaagattaatc

SEQ ID NO: 119373 - DNA, 201 bp, Homo sapiens
ttgctcttgtcactgcagaactgaatagatttgagaagtaccaaagagtttggacaggttcccaactccaattattgtggctgaaatggaacagataatayatcttcctgctcctcagcagccaaggcaagaatatatggcttagattcagccaactggctgcttgattctcaagggacagagtctttatggtgatggtag

SEQ ID NO: 119374 - DNA, 201 bp, Homo sapiens
cagatgtctatttttaagttgaatttaggatatatagggtaactgatgaccaagaggtctatgggagtttcacattttattatttattatcttaactagakcctgttgagaaatttttttttttaaaggacatcttctgtgggaacccgtagtacagatattttccaattagcatctttgtatgttctcttctggcatgag

SEQ ID NO: 119375 - DNA, 201 bp, Homo sapiens
ctgacattaaaaatcttggagatttggcaaagctgaaaataattaatcgtactaaaccatgagatagaaaattagggaaaattgtaaagtaagcaataagkgtggaaaatacatcatatcccaggctatttgtacccttgaagaccatatataagttgctggattaatctaaaataaggattgaggggtgttggagagttt

SEQ ID NO: 119376 - DNA, 201 bp, Homo sapiens
cacatttccttgtctattatttaaaaaatatgtgttattgatgccatgggagtgacacttttaagataaattcagaaatacccctgtaggatcaaccatcrgacatgaaatgtgaaatgctgtcacactggcatgaatgactgctactataatcactggctcttcttttataggggtttttattaattaaatgtaaagtct

SEQ ID NO: 119377 - DNA, 201 bp, Homo sapiens
ttcagaataccatcttttcaattaaatcaacaagtccgtcttgtgtctgcccagtttcttctgaagctttccaaatgaaatgggtcaatttgccagagaayctaagagtacaaaggctgtgggtgacaaccacaagtattaggcagtgacaagcacctggaagcaaagaggagacatggaatcaaatctgagacacttaga

SEQ ID NO: 119378 - DNA, 201 bp, Homo sapiens
gggattacaggcatgagccaccgcacccggccagggggccagtttttaacactgttactctctgcttcccatgagatgaaggaagcatctttggtgcttggcaactggcaaggctcaaggctcaatttcccacctctgatttcccaccagaaacacaggagatggaccctccaagggactgacttcttaggggcacacagt

SEQ ID NO: 119379 - DNA, 201 bp, Homo sapiens
aggtcggcctgcagagagacacgaagagtgactggaagcatgttggtaaaaacacaggcacagtgctgtccctgagctcagtcaggggaagttttttttttgttttttttgagatggagtctccctctgttgcccaggctagagtgcagtggcatgatctcggctcactgcaagctccacttcttgggttcacgccattct

SEQ ID NO: 119380 - DNA, 201 bp, Homo sapiens
aaggtcggcctgcagagagacacgaagagtgactggaagcatgttggtaaaaacacaggcacagtgctgtccctgagctcagtcaggggaagttttttttttgttttttttgagatggagtctccctctgttgcccaggctagagtgcagtggcatgatctcggctcactgcaagctccacttcttgggttcacgccattc

SEQ ID NO: 119381 - DNA, 201 bp, Homo sapiens
agataagtgtgcaaagatatattgggtttgccattactttcaatggcaagaacagcaattacttttgctccaacctacaaaaagatacaaaaatgtccatytcaggtttgtctataataggaagacttgcaaacatcctaaaaccacaataataaaggattgattaaatagtagccttctgatctagtcatttaaaatcag

SEQ ID NO: 119382 - DNA, 201 bp, Homo sapiens
ctcccttcccaccctgcgcatctcaataacactgagcatattgcattgtaattgtttgcatgcctgccttcccccaagctctttaaggagaaaaagccttmttttcattgtcatttttttgtaggtaatacatacatatagaacaacatagtgtacgaaagagaccactgtggaaaggacgtctgtttccaccctatcctc

SEQ ID NO: 119383 - DNA, 201 bp, Homo sapiens
cctagaaggtcctccatgtctgcatgctcttgaggccatgtaactctcatgggctagaagaactccaagaggaaccatctcagctgtgcctttagctctgyggtgccactgcagaaggtggcgcttaggtccctggtgaggatccaagtccagccttgggttgttgctgtacaacttttggccttgtgatttggactggtg

SEQ ID NO: 119384 - DNA, 201 bp, Homo sapiens; identical to SEQ ID NO: 20347

SEQ ID NO: 119385 - DNA, 201 bp, Homo sapiens
tgacaagcacctggaagcaaagaggagacatggaatcaaatctgagacacttagagaaggcaggagttggagccagtcctagaaggtcctccatgtctgcytgctcttgaggccatgtaactctcatgggctagaagaactccaagaggaaccatctcagctgtgcctttagctctgcggtgccactgcagaaggtggcgc

SEQ ID NO: 119386 - DNA, 201 bp, Homo sapiens
aatcattttaatacatcacgtagtagatccccagaaactgtttgctgaatgaataagtggatgctatttataaggccatgatccttgtaaattctcactakgctgcctcttgttcctgcccctgaagctgctgaagacctgcgttcccggtctgaattcactctaaactggacccagaggaggtgggagcagagaaattca

SEQ ID NO: 119387 - DNA, 201 bp, Homo sapiens
gacaaagaactgcctctcccagcctttgccttctagggagtggctatgattcagctaaagaaagaaaaagaggaataaatcaagggaaggagggggaaaawggactatggagggaggacaggagatcaaagaccaaggaagtaaggaggaagagaaagcccccgctgcttccgcaaatcaattcctggcaatgcctgcctc

SEQ ID NO: 119388 - DNA, 201 bp, Homo sapiens
ttaatgtgtgaagtcctcacgaattttttattttgtctcttgtttctctgagtctcactcatggagccttattttcttataggcttggctgtctttaacartattctggtagctgtgcttgaacaaatatattggaattattttcttatgaaagtgccttcttttacaccacattgtgtttatttctgccaggcatcagcg

SEQ ID NO: 119389 - DNA, 201 bp, Homo sapiens
ggatcgcttgagcccaggaggtcgaggctgcagtgagctgtgatcacaccactgcactccagcctgggtgacagaacgagatcctgtgtcaaaaaaaaaaraaagaaagaaagaaagaaagatagagaagaaaagaagaagaaagaaatggcattctgacacatactacaacacaggtgaacctggaggatattatgttaa

SEQ ID NO: 119390 - DNA, 201 bp, Homo sapiens
aattctggataacaacttctaagccttcttcagtgcccaccttctgcttgttgcctccagactggcccctaagccagtctggcccatctctcggccacgaygcctgcagacacatctttcttactcttttttctcactgtttcttattctgttcttttttctgtttctgccttgggtccccttccttcctttgaagtcaag

SEQ ID NO: 119391 - DNA, 201 bp, Homo sapiens
aggcggatcaaacacagtttgtgagatgcttcaaatgtattattcatctcaccaatgagatgcaatcttgggctttctcttttcgccccatcaagaggaawcctcagctactgtgaagatgccaggctccagaggggagggggtgctttcagaataccatcttttcaattaaatcaacaagtccgtcttgtgtctgcccag

SEQ ID NO: 119392 - DNA, 201 bp, Homo sapiens
agggtgccacctgctagaacagaaggtccccagggctggagttgcttgcaagcacccaccctgggggaagaatctagacagcaagtccgagacctggtatrgccgttatttataagctgatgacagatattttcaatccgctgtgttgtgagaattaaataagacatgtgcgtctgtgtttgaggatgcaggccatccatc

SEQ ID NO: 119393 - DNA, 201 bp, Homo sapiens
caagtagctgggactacaggcgcctgccaccacgcctggctaattttttgtattttgtttagtagagatggggtttcaccgtgttagccaggatggtctcratctcctgacctcgtgatccgcacctctcagcctcccaaagtgctgggattacaggcatgagccaccgcacccggccagggggccagtttttaacactgt

SEQ ID NO: 119394 - DNA, 201 bp, Homo sapiens
gaactatggggacagcaaacatcaaaatatcaactccagatatagatactggtgaatgttatagagaacatgtcacatgagtctggtcttggaaaaagggmatttcaattggaaaagatcgagaaaaagagcattccaagttgaaagaatcacatgaataaagttgagatatgaaagttcatgcacattttgagaatgtga

SEQ ID NO: 119395 - DNA, 201 bp, Homo sapiens
tgctgctagtaaataggataggaattggatttaaaacactaatgtttttcactacatacccactgaaacatgtctcatgtagtttagaaagagtgcactaygtatatttatttatttttccagttttaccgaagtataattgacaagtaaaatcgtatgtattttaagtgtacaacaggaggatttgatgtatgtacacat

SEQ ID NO: 119396 - DNA, 201 bp, Homo sapiens
gggccctcttctgggttgcagatggtaaactttatttttacttttatttttatttctggggtacacatgcaggatgtgcaggtttgttacacagggaaacrtgtgccatggtggtttgctgcacctatcaaccatcacctaggtattgagcccagaatgcattagctatttttcctaatgctcttcctcccctaccccacc

SEQ ID NO: 119397 - DNA, 201 bp, Homo sapiens
taaatgagaagtggctgctgctgctagtaaataggataggaattggatttaaaacactaatgtttttcactacatacccactgaaacatgtctcatgtagwttagaaagagtgcactatgtatatttatttatttttccagttttaccgaagtataattgacaagtaaaatcgtatgtattttaagtgtacaacaggagga

SEQ ID NO: 119398 - DNA, 201 bp, Homo sapiens
aaggtttttttttgtttgttttgattttttccttttagaggacatttttactgggccaggcccctcaactatcattgtttgtactctgttaagttttggtygtgaaaggatttgtggcgctagtcttgggcggtggccaatctgctgtgctttgcatatctgtatggtttgtgatgcaagcctccatcttgctttacatcg

SEQ ID NO: 119399 - DNA, 201 bp, Homo sapiens
atatatgtatctgtatttgtgcatgtgtgtatatacattaagtcctcactaacgttgtcaacaggttcttggaaattgatgttaagcgaaactatgtactraatgccataggaccttaactcttgtctataccagcctatgataaaattggtttcattacacagcctgtcatttttgctttaaggagtagtttccaagaac

SEQ ID NO: 119400 - DNA, 201 bp, Homo sapiens
gtaggatgctttattctgataaatataaaggtctttccctcatgtggtctttagtctagctagggaaatatgcattaacaagttatttaaaaaatacatayatagggtgatgtcaccacaatggtgcagtgtaactactggccctctttgctccccccacacacaaagaaaaacatatatagacagctttcaaaagccaaa

SEQ ID NO: 119401 - DNA, 201 bp, Homo sapiens
aatgacacttaccttagtcagtttgagctgctatgacaaaatactatagactgggtggcttttgaacaactaaaatttatttatcacagttgtagaggccraaagtctgaaataggggtgccagcatatttgagttcttgtgagggccctcttctgggttgcagatggtaaactttatttttacttttatttttatttctg

SEQ ID NO: 119402 - DNA, 201 bp, Homo sapiens
agagaaactgtactcaaaacttagttctaggccaggcacggtggctcacgcctgtaatcccagtactctgggaggctgaggcgggcagatcacgaggtcarcagttcaagaccagcctggccaacatagtgaaaccccaattcttaaaaatccaaaaaaattcagctgggtgtggtggcgggtgcctgtagtcccagctac

SEQ ID NO: 119403 - DNA, 201 bp, Homo sapiens
ccctgcctgaggggaggagccctctcaggtttgatatctgcatgttttcctagccctgtctcttaaagggccccacccagagactgggttttcttctgcckgtgtgtgtgtgtactgtgtgtattgtctgtcaaaagagctctaattaatttggcctaaagaaagaaaagcacttggatcaataatttcttttaagggaag

SEQ ID NO: 119404 - DNA, 201 bp, Homo sapiens
gttaaaacttatcagattgcacacttaaaaatgtaactgtttattgtttatctcaaagccacttttaaaaatgacagtaataccacctacattccagggtkgttatgagacttaaataagatcatttatgttaaaatgccaaaaactaacacaaaaatttaacataaaaataaccatttagtaaacagaagttctaacgta

SEQ ID NO: 119405 - DNA, 201 bp, Homo sapiens
acctacaattatgcatcaagtaggatgctttattctgataaatataaaggtctttccctcatgtggtctttagtctagctagggaaatatgcattaacaakttatttaaaaaatacatatatagggtgatgtcaccacaatggtgcagtgtaactactggccctctttgctccccccacacacaaagaaaaacatatatag

SEQ ID NO: 119406 - DNA, 201 bp, Homo sapiens
gtagcgttaataggacatgcgctctgcaatcagagctgagttctatttaagctccatgggaatatagactatgtccatcaggttcaccattatgccctcartatttagctgaatgcctggaacataagagaacctcggtaactgttaggagggttaaaaaaggaacgaaagaaaataaaaaatgaactctgcgactcccca

SEQ ID NO: 119407 - DNA, 201 bp, Homo sapiens
atactgtaaaattttgccaatggcagcacctacctttagaattgttctgtgaattagataaggtcatgtatgttagcaaccaagaatgattcaaggtacayagaagtgtactcaacaaataggggatgctattaaaatagaatttgggctgcataggagtttaatgagtttaactttactccattgcctttcctggctgca

SEQ ID NO: 119408 - DNA, 201 bp, Homo sapiens
cacacacacatatacatatatatccacacacacacacatatacatatatatccacacacacacacacacatatatatgagtgctaaataagagattataargagaatatttgacaattaataggtaaataagtgaccattgactagtagcgattattaaggcagttagcatttattttaactctccatcccaaaataacag

SEQ ID NO: 119409 - DNA, 201 bp, Homo sapiens
atatcaaatataattatgagaggtcaagttaaggaatctgcaaaggtaattgtgacattcagacatgaactcacgtcagcaatgtacctgaacaccaactstatgccatatagtgtgctaagtctatataagcagttgacaacttttagacaggaatcatgtctgatttattatttatttatttatttgagatggagtctt

SEQ ID NO: 119410 - DNA, 201 bp, Homo sapiens
aatcctgaacatgaaattttaataaaagtgccttaataaatctttaagcacgtaaggaaaagttactataatcatattggctttaaaagagattttcattmttttatttgaggtcataatagatataagacccctagggaaatataaaaatgagaaataaaaaggtattttgtacagttatggctaatattacaatagtct

SEQ ID NO: 119411 - DNA, 201 bp, Homo sapiens
acttaatgaatctccaacttatcattctttctgcagttacagccttatagctagttgctgcttgaactgaaaacttcctggttacacacccggagtgcacrttactaaaatacaggggtttttcatttccacaagttgctacaaatgtgtgtgttttacattcctcaccagaaatttaagctcacccaaagttttcatatt

SEQ ID NO: 119412 - DNA, 201 bp, Homo sapiens
gtccagaatggtattgcctagattatcttccagggattttatagttttgggttttacatttaagtcttcaatctatctcgagttgatttttgtgtatggcrtaaggaagaggtccagtttcggtcttctgcatatgactagtctgttatctcagcactatttattgaatagggagtcctttccctattgcttatttttgtc

SEQ ID NO: 119413 - DNA, 201 bp, Homo sapiens
agcctggaagcaagaaattgagtcaaaggagagtattttgaagttttaagatttaatgactgccctgttggtttttgaacttgcatggggcccatagcctytttgttttgaccaatttctcccatttggaatggaagcagttacccaatgcctttacccccattgtttctaggaagtaactaacttgttttttatttcacg

SEQ ID NO: 119414 - DNA, 201 bp, Homo sapiens
ttctccttttggatatttttcctgtctagtgttggtgtttctaatgctatgatttctactgctgtgccttatcttctctaatttcattcattcacattacwtttaccagacactgaaacatactctatatgtattacctcattactcctcattaaaaatggggtttggtatatttgttctacaaatgagaaaaccaagacc

SEQ ID NO: 119415 - DNA, 201 bp, Homo sapiens
tttagtagagacggggtttcaccatgttggccaggatggtctcgatctcttgatcttgtgatccacctgcctcagcctcccaaagtgctgggattacaggyatgagccaccgcacctggctgttctctgctcttaaactaaaattttaattttagaagatgctaaagaagatgtggctaagtgtatcaaactaatttatca

SEQ ID NO: 119416 - DNA, 201 bp, Homo sapiens
tactgaatgtaagaagaaatctttacaaatcctacgtctgataatggattaatatccaaaacaaaatgaactgctacaacacaaaagcatgcgcgcgcgcrcacacacacacacacacacacacacacacacacacacacacacataacctgattaatgaatgggctatggacttgaatagacattgctccaaagaagaca

SEQ ID NO: 119417 - DNA, 201 bp, Homo sapiens
actgaatgtaagaagaaatctttacaaatcctacgtctgataatggattaatatccaaaacaaaatgaactgctacaacacaaaagcatgcgcgcgcgcgcacacacacacacacacacacacacacacacacacacacacacataacctgattaatgaatgggctatggacttgaatagacattgctccaaagaagacac

SEQ ID NO: 119418 - DNA, 201 bp, Homo sapiens
ttccatgagagcttcagaagaatatactttctggtgttcttatatggatagtctataaaagttaattagatccagctgattggtggtgctgatcagatcayctgtaatcttactgattttctccctgctttatctatcagttatggagaggagtatctctatacctatcatagtctccaagtataatacctggtttcacta

SEQ ID NO: 119419 - DNA, 201 bp, Homo sapiens
gtaccacacatgtcaaaaacaatcttgagagagaataacaaagctgaagacacaaccctttctgatttgaaaatatactactttgctacaataattacaayagtatgggagtggcataagagaagacatagacaaatgtaaccaaatagagtgcccagaaataagctcatgtggatatgatcaaatggtcttcaacaaggt

SEQ ID NO: 119420 - DNA, 201 bp, Homo sapiens
ctgaatgtaagaagaaatctttacaaatcctacgtctgataatggattaatatccaaaacaaaatgaactgctacaacacaaaagcatgcgcgcgcgcgcrcacacacacacacacacacacacacacacacacacacacacataacctgattaatgaatgggctatggacttgaatagacattgctccaaagaagacaca

SEQ ID NO: 119421 - DNA, 201 bp, Homo sapiens
ctcctatataaaacaaactctataaatgagaagtggctgctgctgctagtaaataggataggaattggatttaaaacactaatgtttttcactacataccyactgaaacatgtctcatgtagtttagaaagagtgcactatgtatatttatttatttttccagttttaccgaagtataattgacaagtaaaatcgtatgta

SEQ ID NO: 119422 - DNA, 201 bp, Homo sapiens
ttaaaaattaattgtgtgtctatgcactaacaacaaataatccaaaaaggaaattaagaaagaaacccaattttcaatattatcacaaagaataaaatatytgggaataaacctaataaaggaggccaaagacctgtacgctgaatggtacaaaacattgttggaagaaattaaagaagacccagataaattgaaagtcat

SEQ ID NO: 119423 - DNA, 201 bp, Homo sapiens
tagtcatcagagaaatgcaaacaaaaccacaacgagatattataaccgttagaatggctatgatcaaaaagacaaaagataacaagtggtggcgtggatgyggacagatagtaacccttgaacattgttggtgaaaatgtaaattagtagagccataataaaaaaactgtaaaggttcctcgaataaataaaaatagaact

SEQ ID NO: 119424 - DNA, 201 bp, Homo sapiens
taatagagtaaccaaaaacaatcgctagtatttattgagctcctatataaaacaaactctataaatgagaagtggctgctgctgctagtaaataggatagraattggatttaaaacactaatgtttttcactacatacccactgaaacatgtctcatgtagtttagaaagagtgcactatgtatatttatttatttttcca

SEQ ID NO: 119425 - DNA, 201 bp, Homo sapiens
agttagacagaaggataaactcaagaacttatccttctaatttcagttagagctttatctttctgtctaaaattttgtggtgagtacagttaataaaaatrtatcttatatatgaaaattgctatgagaagagtgggcattaagtactctcagcatgaaaaaaataataagtatgtgaggtaataatacattaattagctt

SEQ ID NO: 119426 - DNA, 201 bp, Homo sapiens
tagccatctcacactgcatacatatatcaaaacatcatgctgtatatcatagtatataagatgttatttgtcaattgaaaactaaatttaaaaaacatatwtaattacaaatagtgatgattcacgtggatgaagtagagagtgctgtaagaatatcctctaaaggggtctgctctagactggggtaccaggaatggccta

SEQ ID NO: 119427 - DNA, 201 bp, Homo sapiens
ttattgagcacctacaattatgcatcaagtaggatgctttattctgataaatataaaggtctttccctcatgtggtctttagtctagctagggaaatatgyattaacaagttatttaaaaaatacatatatagggtgatgtcaccacaatggtgcagtgtaactactggccctctttgctccccccacacacaaagaaaaa

SEQ ID NO: 119428 - DNA, 201 bp, Homo sapiens
cagctgcaggggctgtaccctccaaagcctcagggatggagttgcacaagtcctttggcacccccgccccttgcaccactgcagcctggaagcaagaaatkgagtcaaaggagagtattttgaagttttaagatttaatgactgccctgttggtttttgaacttgcatggggcccatagcctctttgttttgaccaatttc

SEQ ID NO: 119429 - DNA, 201 bp, Homo sapiens
gtattcctaagtgtgaattgcctactactatttaatagtcctgtaggataagtctgatatcagaatttagactgcatttcatccttgttctacttggaacyttttatgatttccctcctccactcccctccaagcttaacctcatctcctttcccctctcctctcttttcatccccactcatgtacatatatactacacac

SEQ ID NO: 119430 - DNA, 201 bp, Homo sapiens
ggtggaatgatatggtttgtctctgtgtctccacccaaatctcgtgtcaaatcgtaattctcaatttttggagagggacctgatgggaggtgattggatcmtggggcagattttccccttctggtgatagtgagtgagttctcatgagatctggttgtttaaaagtgtgtagcacctcccgcctttttctcttcctcctgc

SEQ ID NO: 119431 - DNA, 201 bp, Homo sapiens
ttgtcaaggccacgatccctctgaaacctgtatggtagaatccttccttgcctcttggcttctggtggtagtggccatcaatccttggcatattttagctkgtataatgtccctccaatctcttcctctgttatctaaatcttcacacggccatcttccccttttatacatcagtcttattatatgtagtactcatcataa

SEQ ID NO: 119432 - DNA, 201 bp, Homo sapiens
aggtaaaagtagggtagagtgaggggacaattccaagcatattgaacagcatatgcaaaggccctgaggcaagaaatccttcaaatgtgatctaataactyagagaagtcgaagtatttggacagagaaagagaaaagaagcaagggagtgagtagaacaagatgagactgataagacttgcaggttcctaatcattcaag

SEQ ID NO: 119433 - DNA, 201 bp, Homo sapiens
ggctttgatgccatgacagattacatggatgtgaggttagaaatttcaagatagatcaagttcaggcagataaaggaatgtatttttcctctgagttcaaygaggcacactgacaccagcatactgtacacagtctgaaattgtcacacaaaacacttagtttttcactaaacatgacttatacactgaaaacagactgat

SEQ ID NO: 119434 - DNA, 201 bp, Homo sapiens
aaaaatagactcaatgtagattaaagtcttagatataagacttgaaactataaaactcctagaagaaacatggggaaaaactctttgacattggtcttgasaatgattttttggatgtgaccccaaaagcacaggaaacaaaagcaaaattagacaagtaggactacatcaaactaaaaagcttctgaacagctaagaaaa

SEQ ID NO: 119435 - DNA, 201 bp, Homo sapiens
ccatggttaaagtatacagaatgcattatcagctgcctcggttaaaacagaggtgtggaggaacagctgcaggtttgactctttgaatcttttatgtcaaygagaaatgcaagtaatcaaataactgaagatctaacatgctaatgatctcaagggattatgcctctcccctaaagcccatctataatatcttgaaaattc

SEQ ID NO: 119436 - DNA, 201 bp, Homo sapiens
atcaaatttcacccctgctaagacgatgtatcagatttggtatttgccaatgttcttacagagcaatttaagataactcagtcaggtaaatagttcagggmagtaaatgcttcatatttttttaaagttgtccagctgaaaagttacaaactcagtttgtctgtaattgatttatcaataacaaggacagacctaccaagg

SEQ ID NO: 119437 - DNA, 201 bp, Homo sapiens
aattacacccaacgtctgctaaccataggtaagacaaatattgtagctataaagatcccaaaccactgctcttcttcagagctctttgattgagagactayggtgctgctgagcaacatcaccgagtaaataacccccctcttcaacttgcctcaccccctgagtatcctttgatttattcctctacagagtggtggccca

SEQ ID NO: 119438 - DNA, 201 bp, Homo sapiens
aactggaaagaagggagactatgagatattttagaggtagaatccatgaaatttagtggttgactgaacgccacaatcctgcagcaaagatatatcaaatrtaattatgagaggtcaagttaaggaatctgcaaaggtaattgtgacattcagacatgaactcacgtcagcaatgtacctgaacaccaactgtatgccata

SEQ ID NO: 119439 - DNA, 201 bp, Homo sapiens
acttactatgagctaagtgatatggcaaattcatgatatcttcctgttatttaaataaggcagagatggttcctgtttatttgctgaaaatagccccatgytgtttatttcttacacatctttaaattgctttaaatatagcccaacataaacatatttttaaccatttagagcctacttactctacatatcctcataaaa

SEQ ID NO: 119440 - DNA, 201 bp, Homo sapiens
agggcagaaaaactggaaagaagggagactatgagatattttagaggtagaatccatgaaatttagtggttgactgaacgccacaatcctgcagcaaagayatatcaaatataattatgagaggtcaagttaaggaatctgcaaaggtaattgtgacattcagacatgaactcacgtcagcaatgtacctgaacaccaact

SEQ ID NO: 119441 - DNA, 201 bp, Homo sapiens
ttcaaaatgaaaggccttgtcccagtattcctttacatacatgtacatctcatgacctaactgtaatgaactacttgaccaaacatgctaaacttttcttrtacttgtgcttatattcctctccttgcttggaaggcctctctatagtccttgccttctgtgcttggctacctcctgttctccttaaagattcaggcctgg

SEQ ID NO: 119442 - DNA, 201 bp, Homo sapiens
gtttcttaccatatgctgccgccactcagcaaaaacgctggggaggtggaagcttggcatttggtatgtagatagaagaaaagaaagtaccttccaagaargcagtgaatgggtgtgagaggggaaatggaaaagaaataaaggggaatgtcttaaaaactaaggcaagttgttgatttttttaaagaggatggagtggtc

SEQ ID NO: 119443 - DNA, 201 bp, Homo sapiens
ttaatctcagcagtgttttgggagactccccccaacttgagattatacaggagacagaagggctattcagtacataaaatgtaatgatgagcctctgttckccaatgcttcatggtccttgctcagaccagcctacttcactcaaactcaggtggctctctcttcctatcatgccaagcttaagcatagaaacttcactga

SEQ ID NO: 119444 - DNA, 201 bp, Homo sapiens
aatctcatttcagccgttatagtagatcaattttagttatctcccttcatatgtaccttaacaatgaattaatgaatacgtgtcccaatgtacaagtgcamtatatatgtatctgtatttgtgcatgtgtgtatatacattaagtcctcactaacgttgtcaacaggttcttggaaattgatgttaagcgaaactatgtac

SEQ ID NO: 119445 - DNA, 201 bp, Homo sapiens
tttatactgtggactctgtcagtacctaaagctatgctgccactgaaagcattgattcaaatatgtctttcttgaacactatctctaacccttccagctarcttaaaggatcccaattgtgttaaattagtccctacttactgtgacattcagtccattcatttctctactttctccctattgatcagtcctcgacttcct

SEQ ID NO: 119446 - DNA, 201 bp, Homo sapiens
ttaagtgactttcccaaggtcatacaactggtgactatcagaatcaaaactcaaacactgattttctaattaccgaccattcactgtttttattatcacamgttacatgtctgcccaatatttatgctttataattcaaatgtgtatcacagaggtataataacatactcttacctatttacatatgtcaataggcctaat

SEQ ID NO: 119447 - DNA, 201 bp, Homo sapiens
tgctgccactgaaagcattgattcaaatatgtctttcttgaacactatctctaacccttccagctagcttaaaggatcccaattgtgttaaattagtcccyacttactgtgacattcagtccattcatttctctactttctccctattgatcagtcctcgacttccttcagagtcctctttatccagcttagattccgtgt

SEQ ID NO: 119448 - DNA, 201 bp, Homo sapiens
attcaaatatgtctttcttgaacactatctctaacccttccagctagcttaaaggatcccaattgtgttaaattagtccctacttactgtgacattcagtscattcatttctctactttctccctattgatcagtcctcgacttccttcagagtcctctttatccagcttagattccgtgttccatcaattagtattccat

SEQ ID NO: 119449 - DNA, 201 bp, Homo sapiens
tcacccaaagttttcatattctgtaggctctaattaagatggaatatatctttaaacaattaacttcatggcataaaccctttgagaagctattaaaagamactatttttctttccttttcttttcttttttttttttttttgagacgtagtctcgctctgttgccaggctggagtgcagtggcgcgatctcggctcactg

SEQ ID NO: 119450 - DNA, 201 bp, Homo sapiens
agttccttatagattctggatattagacctctgttagatgtataatttgcaaatatgtcttcccattctataggttgtcagtttgctctgttgacagtttmttttgctgtactacagaagctctttaattaggtcacacttgtcaatttttgttttcgttgcaattggttttggcgttttcatcatgaaatcttggccaga

SEQ ID NO: 119451 - DNA, 201 bp, Homo sapiens
ttgtcagtttgctctgttgacagtttattttgctgtactacagaagctctttaattaggtcacacttgtcaatttttgttttcgttgcaattggttttggygttttcatcatgaaatcttggccagatcctatgtccagaatggtattgcctagattatcttccagggattttatagttttgggttttacatttaagtctt

SEQ ID NO: 119452 - DNA, 201 bp, Homo sapiens
ttactgccaaaaagatgaataaatacacacacacaatactatcaagagttaaataatttcacctattgaggccatctcttttcagcttaattgccttaaayttggcattatattgcctggttcttcctattagatactgtttatcatgttaccttatttcttactattatctgtgttgccagagcccagagtaatatgatg

SEQ ID NO: 119453 - DNA, 201 bp, Homo sapiens
catttgatgaatttgacatccttttatgataaaatcatgcaacaagctaggaataaaagaaaattacttcaacataataaagggcatatatgaaaagcttrcaactaacatcatactaaatgttgaaaacctgaaagtgttttccctaaggtcagaaacaagataaggatactcactcttggcaattctactgaacatagc

SEQ ID NO: 119454 - DNA, 201 bp, Homo sapiens
atgtcttaaaaactaaggcaagttgttgatttttttaaagaggatggagtggtcaaaagggtaaatattgatgacagtctgataggatagcagctgatttrtgttgggctgagttgagaagaagaggggaagaactggaagcagtgagtataagcaacctatctgtaagtctggctgtacagggaagaagagtgggcatta

SEQ ID NO: 119455 - DNA, 201 bp, Homo sapiens
gctgagagagaatgaatgatctgctgtaagcctctctcctaacttctgaggtcttgctagcaatctttcatagtccttgactagtagacacatcacccccwtctctgcctttatcatcacagggcattcttcctgttcacgtctgcattcaaatttctcctttttataaggacatcagaaatataggattaggggcctaat

SEQ ID NO: 119456 - DNA, 201 bp, Homo sapiens
aggtaagtagctaaattgtggtttcatcttggctaaagttacaattaaagccagccggtcttaatttctccttaccattacagtgctcagttgttgggttkttgttgttgttgttgttgttgttgttgtttctggcctttctcctgtcagacttgaccaactgtacctgacttggtctaatctgaatgagaattccaaatt

SEQ ID NO: 119457 - DNA, 201 bp, Homo sapiens
ttttctctgtaggacatgagactttacaatctgctaaaaatgagctttcctaataacatgggacctacccatctaagaataaaccattcttgctatatcasgcaaaacctgagaccagagactcatttttttctaaaatcctgtctccagaatattttaaaacgaaaagtgtgggaaatgagaaagaaaaataaatctcaa

SEQ ID NO: 119458 - DNA, 201 bp, Homo sapiens
taattctcatgtctgtttctaccagtatatggtttctgtggcttctacttaaagcaagaagatattggctagaatccattatatttgcctgcctctgcagwtttcaggatggtatttgccctgtaacctcagttatttgattgatccaagaaaaggtgattttcagtgtattcagaagtaattttactacgatgacaggaa

SEQ ID NO: 119459 - DNA, 201 bp, Homo sapiens
ggtatgataaaagaacttttgttcttggggactttatagtcactgtcttctttgggatgcaggaaaggattatcagaaaatttgtgtgtgtgtgtgtgtakgtgtgtgtgtgtgtgtgtgtgtgtacagaatgggagaaagggtagcctcaagaatatcctcatttcagggctctgggaggagcttggagtgctcagggga

SEQ ID NO: 119460 - DNA, 201 bp, Homo sapiens
atttacttgcttccaacaaggaaggcgttttcctgcttccatgacgatggaaggcaggtaactccattctggagtttgagttcacttctgacaggcaatgtgagttttttcctgcgtctaggatggtagagagcagtcttcagcctgagacctatccctaggtaagtagctaaattgtggtttcatcttggctaaagttac

SEQ ID NO: 119461 - DNA, 201 bp, Homo sapiens
ctttgaatagaactaaaattggaaagaacaggctgaatactcaacttgacattcactaaagtacgttttcatgcttaagatttaaactgatctttacaagkctttctcttgctgattaagcatccatttgctaaaatgctgtctttccttttcttggtagctaacattgacagtgtttcccatcagtcctctttatagaga

SEQ ID NO: 119462 - DNA, 201 bp, Homo sapiens
caattcgacatatcctatcctttgtaggtttttatttccttaaatatatatatatttccttaaatatattatttccttaaatatatatatatatatatatrgatcaggccatagtgatataaatatacaactgaataaaaaataagttagatttggtagaaaacctaaaattaaaatcaacgagggagaacaggcaaatct

SEQ ID NO: 119463 - DNA, 201 bp, Homo sapiens
aagattgtttccaacagggatatggattaacaattctgaaaacactataaaagaatactgaaattgagcaattaaatagatggcagatgatgggtgccagktttctcagtgttgcagtaggagtatgaagataagcaagaggaagacctagaataaatatgtggtagtagattacaattgaaaacatcagtgtgaactcat

SEQ ID NO: 119464 - DNA, 201 bp, Homo sapiens
caagtcaacacatgtccatgtccagaaacttttctattatcgagcctgcattttaataggatgactccgaaaagtacccattttcctaattatttcagaaytacgtggacagtaattaccatcttccattagcagcactagtggtggttaggacaaaattcaaatgcatccagcaagtgctttacactaatatgtctgctt

SEQ ID NO: 119465 - DNA, 201 bp, Homo sapiens
gttgtataagagcagaaagaaaaaccggaccaaactcaactaatgcctgcccatgaagggagaatttaaaccagccctagcaagaggggaatcacgcaacyccagaggtcggaacctgagttcctgcaaacctcaccaacctgggctaaggtactctggggctctaaataaatgcgaaatgcagtctaggaaacaaggact

SEQ ID NO: 119466 - DNA, 201 bp, Homo sapiens
aggactcggccaaagaaaagtgaatggaggccctaccaaataaagagaatagcttaaaagaaagtgctgtgttagaaataaacatggtttccaatgctggsggataggcctgccggctggacaatggcttctttctggggtaagtatgaagaagcatcagatatgaaggagcttgcatgctaggctcagacgattggactt

SEQ ID NO: 119467 - DNA, 201 bp, Homo sapiens
taaaacagcaaaactgattttctggggagaaattcaagcctgctgcagaaatttgcatgagtaacgaggatccaaatggtaatagctaagacaatggggaraatgcctccagggcatttcagagacagttcaacagcccctaccatcacagatcttgaggcctaggagggaaaaacggtttcatgggccaggcctggggcc

SEQ ID NO: 119468 - DNA, 201 bp, Homo sapiens
taaatgtcatatctacttctgttcatctatagcatttaccacctgctgatacactatgtcatttatttatttatgtttattacctgttcctcatgctaaayacaattgctggggaggccaattagtgtatgtttactgtcctaaacaagaacccaaaacagggccttacctctttatatatgtgtttcaattaacataatg

SEQ ID NO: 119469 - DNA, 201 bp, Homo sapiens
ttaaaaatgagcaagcaatgcaataaaagaggatacaaacaaatggaagaacattccatgctcatgggtaggaagaatcaatatcgtgaaaatggccataytgcccaaggtagtttatagattcaatgccatccccatcaagctaccaatgactttcttcacagaattggaaaaaactactttaaagttcatatggaacca

SEQ ID NO: 119470 - DNA, 201 bp, Homo sapiens
tcatccctctgctcactgagataaatgaatatctgatagcttcttttggaaagactaatcagaaactcagaagaatgcaacccttttcctcttatctaccrattacctggaagccccctccctgctttgagttctcccgcctttctggactgaaccaatgtacatcttacatatattgattgatgtctcatgtctccctaa

SEQ ID NO: 119471 - DNA, 201 bp, Homo sapiens
catgtttaacttaataaagacatagatggttacatatagaaacagctataaggatacaaatgggttagtatacacacatacacatatggagtaacacttaygcaaaatgcttgggaccaaagggtttcaacgtttagagtttttcagattttggaatatctacattatacttaccagttgagcatctttaatctaaaaatt

SEQ ID NO: 119472 - DNA, 201 bp, Homo sapiens
catttggtgaccatgaagggactctgagtgaaggtggccctgatctttgacaaatcatcggtgcttggtaccagcttgagatatcttcatgggtcaaacarataggacatttggctgacgcctgggagcccccgctccagagaatccctgatctcccaaaatttggtcaagatctaaagttaatttttctgaacaacttat

SEQ ID NO: 119473 - DNA, 201 bp, Homo sapiens
aaataggggtgccagcatatttgagttcttgtgagggccctcttctgggttgcagatggtaaactttatttttacttttatttttatttctggggtacacrtgcaggatgtgcaggtttgttacacagggaaacgtgtgccatggtggtttgctgcacctatcaaccatcacctaggtattgagcccagaatgcattagct

SEQ ID NO: 119474 - DNA, 201 bp, Homo sapiens
cagcatatttgagttcttgtgagggccctcttctgggttgcagatggtaaactttatttttacttttatttttatttctggggtacacatgcaggatgtgyaggtttgttacacagggaaacgtgtgccatggtggtttgctgcacctatcaaccatcacctaggtattgagcccagaatgcattagctatttttcctaat

SEQ ID NO: 119475 - DNA, 201 bp, Homo sapiens
aattggatttaaaacactaatgtttttcactacatacccactgaaacatgtctcatgtagtttagaaagagtgcactatgtatatttatttatttttccakttttaccgaagtataattgacaagtaaaatcgtatgtattttaagtgtacaacaggaggatttgatgtatgtacacattgtgaaatgattgccacagtca

SEQ ID NO: 119476 - DNA, 201 bp, Homo sapiens
agcatatttgagttcttgtgagggccctcttctgggttgcagatggtaaactttatttttacttttatttttatttctggggtacacatgcaggatgtgcrggtttgttacacagggaaacgtgtgccatggtggtttgctgcacctatcaaccatcacctaggtattgagcccagaatgcattagctatttttcctaatg

SEQ ID NO: 119477 - DNA, 201 bp, Homo sapiens
ttcttgtgagggccctcttctgggttgcagatggtaaactttatttttacttttatttttatttctggggtacacatgcaggatgtgcaggtttgttacayagggaaacgtgtgccatggtggtttgctgcacctatcaaccatcacctaggtattgagcccagaatgcattagctatttttcctaatgctcttcctcccc

SEQ ID NO: 119478 - DNA, 201 bp, Homo sapiens
ccatggatcttagcaaccttcaggtcaggagatatccttgtggacccactccatcagggccttcggtctgacagatggagctatgtggattcctggcagascatcagctcaagcatgcatggagaacttggagccttacatacttgggcattctggaaaaagtagttgcagctctggaaaagtgggaggttatatccctgc

SEQ ID NO: 119479 - DNA, 201 bp, Homo sapiens
gaatgcattagctatttttcctaatgctcttcctcccctaccccaccagccaacaggcctcagtatgtgttgtttccctccctgtgtccatgtgttctcaytgattgttcagctcccacttataagtgagaacatgtggtgttttgttttctgttcgtgcgttagtttgctgaggataatggcttccagctccatccacgt

SEQ ID NO: 119480 - DNA, 201 bp, Homo sapiens
atttttagtacattttcagagctgtgcaaatatcaccacaatccaactttaaaacaattccatcctccaaaaagaaactcatgcccatttacagtaacacytgttcccatccccaaccccaggcaaccaactaatctactttctgactctgtagatttgcctatacactttctgtaacattttatcaagacaaaaagctga

SEQ ID NO: 119481 - DNA, 201 bp, Homo sapiens
ctagatggctgtaggtgtgcagcatttcttctaggctctctattctgttccattggtctatgtgtctgtttttgtaccagtaccatgctgctttggttacygtagccctgtaacagagtttggagttgggtaacgtgatgcctccagctttgttctttttgcttaggattgccttggctattcaggctcttttttggctct

SEQ ID NO: 119482 - DNA, 201 bp, Homo sapiens
gagtaaagcttacaataaacaaagtgaagagtcaacccacagaactggagaaaatatttgcaaacttcccaaattcaaacaactctatggggaaaaaaaamcgaataaatctatccccaaatcccaaaatgggcaaaagatgtgaaaagatattgctcaaaagaagacataaaaatggcaacaggcatatgaaaaggtgtt

SEQ ID NO: 119483 - DNA, 201 bp, Homo sapiens
ttttctaactttttgatgtgggtaattagtgctataaacttctctcttaacactgccttagctgtgttccagaaattctagtatattatattgctgttctyaatagttttaaagaaattcttgatttctgtcttaatttcaatatctacccagaagtcactcagaagcaggttatttaatttttatgtaattgtatggttt

SEQ ID NO: 119484 - DNA, 201 bp, Homo sapiens
ttttcctcacacaatccatcaccattcttttcctgtccttatctggaattcttggaatagactagttggcagaatactaacaaatctgctaatctttctarctatgtgtttttcttttgcattataaaaataacactgctctggctctacccctgagacatccagtggtccataccaataccctgatctccaatgattgtt

SEQ ID NO: 119485 - DNA, 201 bp, Homo sapiens
taattaagatggaatatatctttaaacaattaacttcatggcataaaccctttgagaagctattaaaagaaactatttttctttccttttcttttcttttytttttttttttgagacgtagtctcgctctgttgccaggctggagtgcagtggcgcgatctcggctcactgcaacctccgcctcccaggttcaaccgattc

SEQ ID NO: 119486 - DNA, 201 bp, Homo sapiens
gagaagagcccggtttatcgcgaggggcagtccccagggctgccgaatccagcagcgatggagagcggcaccgggccctgcggagaagagcgcccacgttwagtccagcagacgacagtcactgagggggctgccaaaatcccagcgccaacgaggtcttttataaccttgtgcaggaattcagtcgggacatgacgtgct

SEQ ID NO: 119487 - DNA, 201 bp, Homo sapiens
cgggatgcagaagttgctgtgagctgagattgagccactgcactctagcctgggtgatgaagtgagactctgtcgaaaaaaaaaaaaaaaaaaagaagaargaaagagagagagagagaaagaaacaaagaaagaaagaaaattaatattgaggttcagccaggttaatgatctaagaaccactataggctacatcatggg

SEQ ID NO: 119488 - DNA, 201 bp, Homo sapiens
atgattcaaggtgagtttatagatattttaagtccaagctaatatccatgcaataggaatcaaatcgttgagacattccaaaatcttagtgctatatacaratttctggatggaatctttttagtttgaagtctcatttttgtctgtgttctctgcttttgttttgttttgttttttttttttagagggagtcttgctctg

SEQ ID NO: 119489 - DNA, 201 bp, Homo sapiens
tcttgaggcctaggagggaaaaacggtttcatgggccaggcctggggccccactactctgtgcagcctcaggacatggtgctctgtatcccagctgctccrtctccagcagtcactaaaagggggcaatgtacagcttgggccattgcttcagagtgtgccagcgccaagccttagtggtttccacatagtgttggacctg

SEQ ID NO: 119490 - DNA, 201 bp, Homo sapiens
gggcccattaaagaatctggagcaacacagtggagcaaaataaaacccagagattatccacatagaaaggattgctagtgagatcagcatatctgaggcaycagatgactgctaggagcaaagaaaggcagaaactatcaatatcagccaagtgacaagaatcatgttggtcaccattggccttctctgcagagaacacat

SEQ ID NO: 119491 - DNA, 201 bp, Homo sapiens
ggatgcggacagatagtaacccttgaacattgttggtgaaaatgtaaattagtagagccataataaaaaaactgtaaaggttcctcgaataaataaaaatmgaactaccatatgatccagtaatttcactactaagtaaatattcacatgatattaaatcagtatgttgaaagatacctgcaatcccttgtttttgcagca

SEQ ID NO: 119492 - DNA, 201 bp, Homo sapiens
tacatcatgggccataaaacataccttaactaatgctaaagaacagaaattgtacaaaatatattatcagataacaatggaatttaaccagatatcaatascagaaaaatagatggaaaatcttcatatatttggaaagtaacatttttctaaatgatacatgcatcaaagaagtctcaagtgaaatgaaaaattatttga

SEQ ID NO: 119493 - DNA, 201 bp, Homo sapiens
tctgtatttgtgcatgtgtgtatatacattaagtcctcactaacgttgtcaacaggttcttggaaattgatgttaagcgaaactatgtactaaatgccatrggaccttaactcttgtctataccagcctatgataaaattggtttcattacacagcctgtcatttttgctttaaggagtagtttccaagaacttatggatg

SEQ ID NO: 119494 - DNA, 201 bp, Homo sapiens
gccctcaatatttagctgaatgcctggaacataagagaacctcggtaactgttaggagggttaaaaaaggaacgaaagaaaataaaaaatgaactctgcgrctccccagcaagctgcaatgtaaatttcacttcactgagcctctagcatctccaaaagggggaaaatatccatctcctagagttgggaggattgaatgag

SEQ ID NO: 119495 - DNA, 201 bp, Homo sapiens
taaaagaacttttgttcttggggactttatagtcactgtcttctttgggatgcaggaaaggattatcagaaaatttgtgtgtgtgtgtgtgtatgtgtgtrtgtgtgtgtgtgtgtgtacagaatgggagaaagggtagcctcaagaatatcctcatttcagggctctgggaggagcttggagtgctcaggggatgccccg

SEQ ID NO: 119496 - DNA, 201 bp, Homo sapiens
tttatttcacgtgctcataggtggaagggacttgtctgtctcagatgaggctttggacttggacttttgagttaatgctggaatgagttaagactttgggrggctgttaggaagtcatgattgtgtttggaaatgtgagaaggacatgagatttgggaggtgccaggggtggaatgatatggtttgtctctgtgtctccac

SEQ ID NO: 119497 - DNA, 201 bp, Homo sapiens
aatagactgaaccaataaagagatgtcggctgggcgcagcggctcatgcctgtaatcacagcactttgggaggccgaggcgggcggatcacgaggtcaagrgatcgagaccgtcctggccaacatggtgaaaccctgtctctactaaaaatacaaaaaattagctgggcatggtggcacacgcctgtagtcccagctactc

SEQ ID NO: 119498 - DNA, 201 bp, Homo sapiens
tatgatctacagccagcactcaagggggagaacaatccacacatttggagcattgagagggaacacagctgcaacagtgaggaaacataggggagccacayaactgagcaagagtctaccaactgaccaataagcctaagtgccacttgctggatcacacctcaaaacttcaacatcaaaatacctaacataagccctctg

SEQ ID NO: 119499 - DNA, 201 bp, Homo sapiens
atgagaatgaatcaatgcaagaaccccagtaactcaaatggccagagtgtgtatgtcctccaaatgatcacacctattctccaatgagagttcttaaccakgctgaactggctggaatgacagaaatagaattgagagtatggatagacacaaaaattattgagattcaggaggatggtaaaacccaatccaaggaaaata

SEQ ID NO: 119500 - DNA, 201 bp, Homo sapiens
acaatacatgaaattcacaatgcaatcacaagtattaacagcagaataaaccaagctgatgaaagaacttaaaagactggttctctgaaataggacagtcaaaaaaaaaaaaaaaagaaaaaagaataaagagcaataaacaaaaactctgcaaagtatgggattatgtaaaaggtccaaatttattaatcattggcatcc

SEQ ID NO: 119501 - DNA, 201 bp, Homo sapiens
ccctttaccggctctcattctctctcctgcctccccctgtgaagaggtgacttagccatgatggtaaatttcctgagggatttccagccatgcagaactgygagtcaattaaagctcttttctttatcaattacccagtcttcggcagttctttatagaagcgtgaaaatggactaatacaggctgccataacaaaataat

SEQ ID NO: 119502 - DNA, 201 bp, Homo sapiens
atccataaggaaattccttgtagacaaaggacagacaaaactcaaagtcatccatctgctcactgagataaatgcatctctgattgcttcctttggaaaasctagtaaaagactcaaaagaatgcaacaatttgtctcttatctacctgtgacttggaagccccctccctgctttgagtttcctacctttctggaccaaac

SEQ ID NO: 119503 - DNA, 201 bp, Homo sapiens
aaagtcagcctactgaatgtaagaagaaatctttacaaatcctacgtctgataatggattaatatccaaaacaaaatgaactgctacaacacaaaagcatgcgcgcgcgcgcacacacacacacacacacacacacacacacacacacacacacataacctgattaatgaatgggctatggacttgaatagacattgctcc

SEQ ID NO: 119504 - DNA, 201 bp, Homo sapiens
aagtcagcctactgaatgtaagaagaaatctttacaaatcctacgtctgataatggattaatatccaaaacaaaatgaactgctacaacacaaaagcatgcgcgcgcgcgcacacacacacacacacacacacacacacacacacacacacacataacctgattaatgaatgggctatggacttgaatagacattgctcca

SEQ ID NO: 119505 - DNA, 201 bp, Homo sapiens
cgtgaaaggatttgtggcgctagtcttgggcggtggccaatctgctgtgctttgcatatctgtatggtttgtgatgcaagcctccatcttgctttacatcktgggggcacggcccagtaaccacttggcaaggctttgtttagcaaccctgcctgaggggaggagccctctcaggtttgatatctgcatgttttcctagcc

SEQ ID NO: 119506 - DNA, 201 bp, Homo sapiens
gttgattagaaaccttatttctctataccaccttaattctcccttgccatgtaatataatatattcaaaacttctagggattacatcatagacatttttgrgggaaaaattattctgcataccacaacttctcaaatttctcaaactctctttcctgggaactgaatcttagtactgatccaatcacccttacacacctct

SEQ ID NO: 119507 - DNA, 201 bp, Homo sapiens
taacatacctcgactgtaccaacatggtggcgcccaggtcctaatttgagaaacgtgcatcttgactaattcggttttctgtggttacgagagaagagccmggtttatcgcgaggggcagtccccagggctgccgaatccagcagcgatggagagcggcaccgggccctgcggagaagagcgcccacgtttagtccagcag

SEQ ID NO: 119508 - DNA, 201 bp, Homo sapiens
agagaagagcccggtttatcgcgaggggcagtccccagggctgccgaatccagcagcgatggagagcggcaccgggccctgcggagaagagcgcccacgtktagtccagcagacgacagtcactgagggggctgccaaaatcccagcgccaacgaggtcttttataaccttgtgcaggaattcagtcgggacatgacgtgc

SEQ ID NO: 119509 - DNA, 201 bp, Homo sapiens
ggctcagggcgtgctctggcccaagtgacacagggaaagcagcatggacggtgctgacacccgagtgtgcaagcacagcggcttccctgtccctccgcagrgctgcaagaaatggctgtggagctgctagggctggggcgcaccctctttgtgccctccaacactatggccaacctcatctctggtgagcgcagggcgact

SEQ ID NO: 119510 - DNA, 201 bp, Homo sapiens
tgctgacacccgagtgtgcaagcacagcggcttccctgtccctccgcagagctgcaagaaatggctgtggagctgctagggctggggcgcaccctctttgygccctccaacactatggccaacctcatctctggtgagcgcagggcgacttctgtctgcctagcaggtcctcagtgcatatgggggggctctgacactcat

SEQ ID NO: 119511 - DNA, 201 bp, Homo sapiens
gtgccctccaacactatggccaacctcatctctggtgagcgcagggcgacttctgtctgcctagcaggtcctcagtgcatatgggggggctctgacactcrtggaccacattcctccatttctgttgggttggtggggagccctggaaggagatgggggaggaggacagtgggggctgcaggtctgctcctccctagctcc

SEQ ID NO: 119512 - DNA, 201 bp, Homo sapiens
caataggtttgtctgagatcacatagctaaacgcagcagagcccagtctgtgtgactgcaaaggccaagtcaggacacagggcccttccttctcctaccgygaccgaactgccccctgcctcccgggtgaccttgctggcaatggggtcagggtcagggcctggggtcacctctgctcacctcaggacctggcccaggact

SEQ ID NO: 119513 - DNA, 201 bp, Homo sapiens
aggacctggcccaggactccaggagctggtgttgtccgtctgctcagttgatcccaccttcgtggagacgaacatggtggtggtgagcatggctgggttgygggccgtgagtgctgatgagctggcccacactggccacgtggcgtgcgtgccactgttcctatggacagagcagtccgtgcttccgtgtggcaccgcgac

SEQ ID NO: 119514 - DNA, 201 bp, Homo sapiens
ggtcctcagtgcatatgggggggctctgacactcatggaccacattcctccatttctgttgggttggtggggagccctggaaggagatgggggaggaggasagtgggggctgcaggtctgctcctccctagctcctcttccgagggtccccagggcctctgggccagcgtcagggacctctccacatagccctggctccgg

SEQ ID NO: 119515 - DNA, 201 bp, Homo sapiens
ggttgcgggccgtgagtgctgatgagctggcccacactggccacgtggcgtgcgtgccactgttcctatggacagagcagtccgtgcttccgtgtggcacygcgacgtctcggtgtaggacactgaactggtgctgaggaagtgggagtttgtgctgaggccgttggagtcctgaggacggagtgaccgggaccctgtgcc

SEQ ID NO: 119516 - DNA, 201 bp, Homo sapiens
acactcatggaccacattcctccatttctgttgggttggtggggagccctggaaggagatgggggaggaggacagtgggggctgcaggtctgctcctcccyagctcctcttccgagggtccccagggcctctgggccagcgtcagggacctctccacatagccctggctccgggttcctgcagccacaccttcctctcacc

SEQ ID NO: 119517 - DNA, 201 bp, Homo sapiens
tccgtgtggcaccgcgacgtctcggtgtaggacactgaactggtgctgaggaagtgggagtttgtgctgaggccgttggagtcctgaggacggagtgaccrggaccctgtgcccgggctggggtggaagcagggagtggaggtgttcccagcaagcaggcagcagaggaggtgttacctgctcctggggctctttggtccc

SEQ ID NO: 119518 - DNA, 201 bp, Homo sapiens
ggacagagcagtccgtgcttccgtgtggcaccgcgacgtctcggtgtaggacactgaactggtgctgaggaagtgggagtttgtgctgaggccgttggagycctgaggacggagtgaccgggaccctgtgcccgggctggggtggaagcagggagtggaggtgttcccagcaagcaggcagcagaggaggtgttacctgct

SEQ ID NO: 119519 - DNA, 201 bp, Homo sapiens
tggcagcctctccaggggaggaaggaaggagagcagagccccagatttgccacgtgggggcggcagcggctggggctggccccaggcttgccgggcagacrcctgggcggtgcttggtgcctggtgccctctagtggacactcggagcactcccgcgctcccgacgggagccagacagcagcatctgaagagttaataggg

SEQ ID NO: 119520 - DNA, 201 bp, Homo sapiens
gacctgcggaggggagaaagggacagccatggagaagctggctgggatggcagcctctccaggggaggaaggaaggagagcagagccccagatttgccacktgggggcggcagcggctggggctggccccaggcttgccgggcagacacctgggcggtgcttggtgcctggtgccctctagtggacactcggagcactccc

SEQ ID NO: 119521 - DNA, 201 bp, Homo sapiens
tcctcttcctgacccacagagggctggagtgcactcccactccctcccagagctgccccactgcactctggactggctgagctggagaggatgatcacgcrgggcctccagagtccctaccaccaggtctgcgagctcatttgcctggagaactcacacagcatctcgggggtccggatcctccccatcaactacctacgc

SEQ ID NO: 119522 - DNA, 201 bp, Homo sapiens
agacttgtgtgtttaatgggatggtcttctggcacgtagcactgaggtgtcttgaaggtgctgtttccttgccggcctcaggcatttgtgagttgactgtwgccttagggctcagcctagccacgctgagcagggccacatgcctccagactcaatgccaagacctgccctccttctgtctcagtgatgtgtcactgctgg

SEQ ID NO: 119523 - DNA, 201 bp, Homo sapiens
tggcacgtagcactgaggtgtcttgaaggtgctgtttccttgccggcctcaggcatttgtgagttgactgtagccttagggctcagcctagccacgctgarcagggccacatgcctccagactcaatgccaagacctgccctccttctgtctcagtgatgtgtcactgctggcgccggggctcccagctcctccttgggca

SEQ ID NO: 119524 - DNA, 201 bp, Homo sapiens
gaaacgtgtgccccatgaggctgcaggaacaagctcgtgtgagtgccctccacctggtccttgccacccacgtgcgaggtgaggaggccgcagtgtctgarctctgctgtttaccagacactagttaggcagcagcctaactctccaagccttgcgttccttgcctgtgaaatgggagcagcggcgtctccctcgagttgt

SEQ ID NO: 119525 - DNA, 201 bp, Homo sapiens
cgcccacctacattgtggagcactgtgactctgtgtctttctgcctctccaaggtgggaaagccctgggctggcctcccacagacaggtggggtggggcgycccagcaggaggcagggttggattcctgagctccatccctggcagctggccccaggttcccctttaacacctctgcagatggggctacgcatctgtcccc

SEQ ID NO: 119526 - DNA, 201 bp, Homo sapiens
aagcactgtgatccctgattacggcaatctggggtggtgggtgcctctggcctagctgcctgccagaagtaaagatccgtcttctctggaggaaggtgacrtctcccagagcctccaatttcctctacagttattcatgtgggatgcccccactcaatcagaaataaccaggtatagaatgggacaagatgtgattgaaaa

SEQ ID NO: 119527 - DNA, 201 bp, Homo sapiens
cacctcccagggcctgggcgccccagtggggtccctggctgggaggcccaaggacttcattgaagaagcctggcgcctccaaaaagccctgggtggaagcrtgcaccaggtggggatgctggctgcggtggccctggtgggactggttgacacaaagcaggcactgtggcaagaccatgggaacgcccagagattcaccca

SEQ ID NO: 119528 - DNA, 201 bp, Homo sapiens; identical to SEQ ID NO: 20353

SEQ ID NO: 119529 - DNA, 201 bp, Homo sapiens
tgacatgtttgccctcaaagctttctagatccagtagggcatagtgaggacaaggtaaggtctgcattaaagtgcaatgtgtgtgtgtgcatgcacatgcrtgcgtgtgtgcatgtatgtgttggaggggtaggaggagggcagaggtttcttgagctatgagttgggcagtgtattagtccattctcacactgctataat

SEQ ID NO: 119530 - DNA, 201 bp, Homo sapiens
tgagtgagagaaaaaatttgctttatgctaattccaagtagaaatgaaaagtctatcaataaccatgatggtttttggaaggcttaggtcacgatgttcgrgtgatcatagtcactctgctcagctctttaatttcaccaaagccttgatacatatgttactactacttctgttttatagaagaagtctaaagtgcctcag

SEQ ID NO: 119531 - DNA, 201 bp, Homo sapiens
tggtgacaaggcaatgtagaggctttaggaagcatagctcctgggcacctggaggatggagggccacacaggagcctaggggttatcagcagatattcacrccttttggcaggttagggaaagatttgaagagtcagtgttggaatactgagaatgtgaaggaaaatattgctgagatccaccaatatggctaaagggaca

SEQ ID NO: 119532 - DNA, 201 bp, Homo sapiens
tggatggtgacaaggcaatgtagaggctttaggaagcatagctcctgggcacctggaggatggagggccacacaggagcctaggggttatcagcagatatkcacaccttttggcaggttagggaaagatttgaagagtcagtgttggaatactgagaatgtgaaggaaaatattgctgagatccaccaatatggctaaagg

SEQ ID NO: 119533 - DNA, 201 bp, Homo sapiens; identical to SEQ ID NO: 20354

SEQ ID NO: 119534 - DNA, 201 bp, Homo sapiens
cgtccaccgggaatacctgctccctgaacaccaccaccgaggtccaccattctgcggccaggttcttccgcaactctacgcccaagggtccgaagccgggrtggcacccactcagaagagaatcccggctaagctgctgcttgcttccacttaggaaatgccttctctgacagatctctaacagcgcctcgcttccctctc

SEQ ID NO: 119535 - DNA, 201 bp, Homo sapiens; identical to SEQ ID NO: 20355

SEQ ID NO: 119536 - DNA, 201 bp, Homo sapiens
aagaggttactactggtactacaacaagtacatcaacgtgaagaaggggagcatctcggggtttaccatggtgctggcagggtacatgctcttcatctacygcctttcctacaaggagctcaagcacgagcggctatgcaagtaccactgaagaagacatgctctgcactcccccagcaaccttcttggctgcaacccctc

SEQ ID NO: 119537 - DNA, 201 bp, Homo sapiens; identical to SEQ ID NO: 20357

SEQ ID NO: 119538 - DNA, 201 bp, Homo sapiens
tccacccgacacctgttttgaagcatgaaatcgtgaagcataccgtgaagaaggttctcccgtagtttcccagaagtttttaatacgttctcaagaaatgytactagctgttccttactcagctctttgtcttgcaagatttcgcgtagagtttctgcagaaactaacctgaaggcactgtccccgggtagcaaagggcct

SEQ ID NO: 119539 - DNA, 201 bp, Homo sapiens; identical to SEQ ID NO: 20358

SEQ ID NO: 119540 - DNA, 201 bp, Homo sapiens; identical to SEQ ID NO: 20359

SEQ ID NO: 119541 - DNA, 201 bp, Homo sapiens
ccatgttagctgaacttcatgtactcctggatttgtattggattgagatggataaagtcaatgagatggtttgtttctgtggaggtggaattcaacatggktttcggtcttcagtgttacataaaagctgtgggagcagagtccaggaaattgccctgtgcttccctctataagagcacttaactgttggaattgcatgtc

SEQ ID NO: 119542 - DNA, 201 bp, Homo sapiens
tgaacggttccagtgcttcatgtgcaacacagcatttaagaagatcccggccaggtgccgtggctcgcacctgtaatcccaggactttgggaggccaaggyggatggatcacctgaggtcaggagttcaagaccagcttggccaacatggtgaaaccccatctctactaaaatcacagaaattagccgggcggtagtggca

SEQ ID NO: 119543 - DNA, 201 bp, Homo sapiens
acaaagggagaaattatagtaatcagagtgttaattcaacaagaagatataacattttaaatgtatgtacttaacaacaaaccttcaaaatacataaacaygaacaaaaactgatagacttgaaggagaaaacagtcacatgaaaaattctagacggagactaaaggttttttctcagtaatcaatagaacaaataaacag

SEQ ID NO: 119544 - DNA, 201 bp, Homo sapiens
aataatgaaataaacaacagctctgagaaacttgtagagcactgatagggataatcacaaaacaaaacagtaaaattgagaccaaaatggaaatgaaaaayggagtaaataaagggcaaaacaaatagaaaacattgagtcagatgacagattttaacccaaccatatcaataatttcattaaaaggaaacggccgaaaca

SEQ ID NO: 119545 - DNA, 201 bp, Homo sapiens; identical to SEQ ID NO: 20361
  misc_feature (1)...(201): n = A,T,C or G

SEQ ID NO: 119546 - DNA, 201 bp, Homo sapiens
cagactggcttacaaactgagtaaggcacaaaaggaagaactggtgttgatagcaaagtgtcatcagagaaggcaggaaggacaccctgtcatactgcccrttggctccccagatatcactatttttttttcctcatccttgttaggaactggcaggtagttgtgcttgatgtctattagacttcatttcaattttgaggt

SEQ ID NO: 119547 - DNA, 201 bp, Homo sapiens; identical to SEQ ID NO: 20362

SEQ ID NO: 119548 - DNA, 201 bp, Homo sapiens
  misc_feature (1)...(201): n = A,T,C or G
ctttggatgtgacccagctgatggaagaatgaggctttctcataaagtgcttcagtcttcagctacaactgttgtcagaactttgaatgacagaagtagtnttgtactgggagaacctatttcacagtcatcatctaataattctcagtgatctttttaaagagaattctagaattctatgttttctagggtaatgtgcta

SEQ ID NO: 119549 - DNA, 201 bp, Homo sapiens; identical to SEQ ID NO: 20364

SEQ ID NO: 119550 - DNA, 201 bp, Homo sapiens
gttgtgcttgtgcttgttggcttgtgcattccaatccaatttgggcacaatgaggcatctgtggcccaatggagattggtattggtaggcttccttgttcrttaaaaatgaacttctttatttttgccatttctgttgagctcaatttcccagtctcttttaaatcagctttagagatttgaggattgccagtggggtgtg

SEQ ID NO: 119551 - DNA, 201 bp, Homo sapiens
ctgggtgtggtggcaggtgcctgtaatcccagctacttgagaggctgaggcaggagaatctcttgaacctgggagttggaggttgcagtgagctgagatcrcgtcactgctctccagcatgggcaaagagagtgaaactatctcaaaaaaaaaaaaaaaaaaagtaggtaaatttatgactcagggctaactagttcataa

SEQ ID NO: 119552 - DNA, 201 bp, Homo sapiens
aggattgccagtggggtgtgttatttgacctcacttaatatttgtgtttggttcagatcataaagcaaaccaaattgactgcctctgctcagtacccaatwggacttataaccaggcaaaatgtgggttgaaagatgtattcccaattgcaatgcagtggaagtgtttgtattaaacaaagtttcagagaactgcttaagg

SEQ ID NO: 119553 - DNA, 201 bp, Homo sapiens
actcatattttcttcattttcctttgaagtgtcaggagactttattatttatctgcttaactgttctcataaataacacatggaggttttttattactagrtattagtgaaggaaactaaaatcctgagtttgtgctcagaatagtcatagagtcagaatggatacttggagcatcttgagaatatcttgctgtctctaga

SEQ ID NO: 119554 - DNA, 201 bp, Homo sapiens
tctcatgagatgattctccctgttgcttttgcctttgtctcacaatgtaccatctgaaactgctaagaaagttggaaaaattaaaaaaaaaaagacttcakgctaaaaaaaaccccacacatttcagtggttagtgaaaaatgatagctaagatagcaattagatgtcctttccttttgacctaataaagactctgaaact

SEQ ID NO: 119555 - DNA, 201 bp, Homo sapiens
tctgtgtgttcgaaggtaatggcagcttaacctgagaaatgaatggtgtcttgttatgagagagacctatttttttcctctatgtcccagaagagaatagytacgtcacagatattagtcttccttgtctttaggggagtatttagaggctttgttttgatgttgcagtgtcctgtagggaggaagaggctaggctccttt

SEQ ID NO: 119556 - DNA, 201 bp, Homo sapiens
tgagctctaagaatgtaacaagaaaaggatctgactttatgaacctatctaggtggagttgtaagtcaatgccaagtggttgtatgtgaaaatctttagaytgcagttagattttcggttgagtgaaaatgtttccctggggatttcaattcaaagaattattattctacttatacattatctatgtgtctgtctatttcc

SEQ ID NO: 119557 - DNA, 201 bp, Homo sapiens; identical to SEQ ID NO: 20365

SEQ ID NO: 119558 - DNA, 201 bp, Homo sapiens
ttttgaggtccataattcaatggggatagatataaaaaggcttcctttttcattaaaagggtaattacctcgttatcagagtgctggaaagatgagagctyatggatttttcataaaattataagtttataaggagtcgggtgaagtcatcttattctgtcctcaagccagggacaaatctaattcacccttgatggatgg

SEQ ID NO: 119559 - DNA, 201 bp, Homo sapiens
tgccaagtggttgtatgtgaaaatctttagattgcagttagattttcggttgagtgaaaatgtttccctggggatttcaattcaaagaattattattctayttatacattatctatgtgtctgtctatttcccttgagagttcgtatgtgcatgttatctctctatcacctttagcgcctagctttccatagaaaaggtca

SEQ ID NO: 119560 - DNA, 201 bp, Homo sapiens
aaatgtagagaccaagtaaaagtgtgaatttagctgtgagtgataacttgtagagactcagctataaaatacctgaaatggggggagttaggcaagacctrggagtgaggagtgagagtaacagtcttggctgtggaacagggtagctagatgtttagggcttaatccgagccactactgataattaaacagcatcgataa

SEQ ID NO: 119561 - DNA, 201 bp, Homo sapiens
gattttcggttgagtgaaaatgtttccctggggatttcaattcaaagaattattattctacttatacattatctatgtgtctgtctatttcccttgagagytcgtatgtgcatgttatctctctatcacctttagcgcctagctttccatagaaaaggtcattcattcatatttatcaaacatataattatttagaagcct

SEQ ID NO: 119562 - DNA, 201 bp, Homo sapiens; identical to SEQ ID NO: 20371

SEQ ID NO: 119563 - DNA, 201 bp, Homo sapiens
agtgatgctctttagaggggctggggaacacagagattacctaaatgtgtacagctgtgaggatgctttaccatgataggtctgtgtaaaagcaaaggctrttttgcttttgatgcgcaatatctttcattctgtatgctggctcctcctcaaagatgttgttcacatccctgcctttgttttcatggttccttctgccta

SEQ ID NO: 119564 - DNA, 201 bp, Homo sapiens; identical to SEQ ID NO: 20373

SEQ ID NO: 119565 - DNA, 201 bp, Homo sapiens
ggcttcctttttcattaaaagggtaattacctcgttatcagagtgctggaaagatgagagcttatggatttttcataaaattataagtttataaggagtcrggtgaagtcatcttattctgtcctcaagccagggacaaatctaattcacccttgatggatgggacattgtttaacaaggatctctagagaataagcgttg

SEQ ID NO: 119566 - DNA, 201 bp, Homo sapiens; identical to SEQ ID NO: 20367

SEQ ID NO: 119567 - DNA, 201 bp, Homo sapiens; identical to SEQ ID NO: 20366

SEQ ID NO: 119568 - DNA, 201 bp, Homo sapiens; identical to SEQ ID NO: 20368

SEQ ID NO: 119569 - DNA, 201 bp, Homo sapiens; identical to SEQ ID NO: 20369

SEQ ID NO: 119570 - DNA, 201 bp, Homo sapiens
ggtgtggtggcaggtgcctgtaatcccagctacttgagaggctgaggcaggagaatctcttgaacctgggagttggaggttgcagtgagctgagatcacgycactgctctccagcatgggcaaagagagtgaaactatctcaaaaaaaaaaaaaaaaaaagtaggtaaatttatgactcagggctaactagttcataaaat

SEQ ID NO: 119571 - DNA, 201 bp, Homo sapiens; identical to SEQ ID NO: 20370

SEQ ID NO: 119572 - DNA, 201 bp, Homo sapiens; identical to SEQ ID NO: 20372

SEQ ID NO: 119573 - DNA, 201 bp, Homo sapiens
gtattggtaggcttccttgttcattaaaaatgaacttctttatttttgccatttctgttgagctcaatttcccagtctcttttaaatcagctttagagatwtgaggattgccagtggggtgtgttatttgacctcacttaatatttgtgtttggttcagatcataaagcaaaccaaattgactgcctctgctcagtaccca

SEQ ID NO: 119574 - DNA, 201 bp, Homo sapiens; identical to SEQ ID NO: 20374

SEQ ID NO: 119575 - DNA, 201 bp, Homo sapiens; identical to SEQ ID NO: 20375

SEQ ID NO: 119576 - DNA, 201 bp, Homo sapiens
cttatacactgtcggagggagtgtaaattagttcattgctgaaataagtatggtgattcctcaaagagctgaaagcagaactaccattcaatccagcaacytcattactggttatattcccagaggaatacaaatcattctaccttaaagatacatgtcacaaatgttcatttgcagcactactcacaatagcaaagacat

SEQ ID NO: 119577 - DNA, 201 bp, Homo sapiens
tatttagtaagagaaagcacatctattcaaagtcctaagaatattatcagaaattaaataaaacaaaagccaaaaaagataaattgttaaggaaaaaaatrttaaggtggaattagcaattccaagaactataattacacttgcaagactgtgaatctcatcaaagaagaaactaaaatgaaaaggaagaaaaacaatgta

SEQ ID NO: 119578 - DNA, 201 bp, Homo sapiens
caccatctatgagtatggagccctcaccctcaacggcgaggagtacatccaattcaagcagtttgcaggcaagcacgtcctgtttgtcaatgtggccgccwattgaggcttggcagctcagtatcctggtaagaactcacgtttcaactcttttggaagcagcattgccagatagccatattctaattccagaaggtttta

SEQ ID NO: 119579 - DNA, 201 bp, Homo sapiens
aagtggaagtagctctcatcagatgggggagccaaaagagagatggtttttccctggagcccggccaaactccatgtccttccgctgtcaatggccttccrgtgtgctcctactgtgttcaaaattggtgggtttttggcctcactgacttcaagaatgaaacccagttctttaaggcagcgtgtccagaatttgttcctt

SEQ ID NO: 119580 - DNA, 201 bp, Homo sapiens
ttaaacttaacatctagtaagaaaaaatgagttaaaaaaatcgggctttccttggctgtaaaccataggatttgagatttccataaatcttttactaaccrctatggcggttgtgagagcagtgaggagattacagaaccagctaccagtggtgttaagaaatatgtttcattttttagcttcttttaaatctctgaagtg

SEQ ID NO: 119581 - DNA, 201 bp, Homo sapiens
ttgtaaaattccaggtggattgcaacaaaggggtaacaggcaccatctatgagtatggagccctcaccctcaacggcgaggagtacatccaattcaagcaktttgcaggcaagcacgtcctgtttgtcaatgtggccgcctattgaggcttggcagctcagtatcctggtaagaactcacgtttcaactcttttggaagca

SEQ ID NO: 119582 - DNA, 201 bp, Homo sapiens
aagaccaacatttattctgacattaaattactattacgtttacccatataaattgccctttacttactcaaaaatggtgctataatcaattttatgtggtwcaactgagtatttaaaaatcccttaatttttaaatgtgtgcttacagtagacttttaatttttcttattggcaaaatgagtattagtgattctacgttaa

SEQ ID NO: 119583 - DNA, 201 bp, Homo sapiens
gtccctgtcatgcattggttccaccaggctccagtcagcacagtcaagtcagacatcctggagtacctaaagcagttcaatacccactaggaagggctagygactgacagaaataactaccctgtctcccacctgcaggaatgtctaacaaagcatccatcttcctccttctttgctccacactcgtgcctacccagcctc

SEQ ID NO: 119584 - DNA, 201 bp, Homo sapiens
tcgtggtctcgctggcttcaggagtgaagctgtagaccttcacggtgagtgttacagcttgtaaaggcagtgtggaccccaagaatgagcagcagcaagasttattgcaaagagcgaaagaacaaagctcccacagtgtggaaggggacccacgggggctgccactgctggctccggcagccgccttttattcttatctgg

SEQ ID NO: 119585 - DNA, 201 bp, Homo sapiens
acaattttttttgatcaattcatcaactaaggaagacagtggcattcaaatctgacttctctttagagtcaaacaggactcccacacaaggctaccaacgtgtgtgtgtgtgtgtgtgtgtgtgtgtgtttaaaaaaaaaaataagagttctcattggatggtaaagtgtagccaggcatgggagctactgtataagaaaa

SEQ ID NO: 119586 - DNA, 201 bp, Homo sapiens
tacaattttttttgatcaattcatcaactaaggaagacagtggcattcaaatctgacttctctttagagtcaaacaggactcccacacaaggctaccaacgtgtgtgtgtgtgtgtgtgtgtgtgtgtgtttaaaaaaaaaaataagagttctcattggatggtaaagtgtagccaggcatgggagctactgtataagaaa

SEQ ID NO: 119587 - DNA, 201 bp, Homo sapiens
caattttttttgatcaattcatcaactaaggaagacagtggcattcaaatctgacttctctttagagtcaaacaggactcccacacaaggctaccaacgtktgtgtgtgtgtgtgtgtgtgtgtgtgtttaaaaaaaaaaataagagttctcattggatggtaaagtgtagccaggcatgggagctactgtataagaaaaa

SEQ ID NO: 119588 - DNA, 201 bp, Homo sapiens
gagttctcattggatggtaaagtgtagccaggcatgggagctactgtataagaaaaacagcagccattcagatgcatttctggaaacgtgtgctctagtcttttttttttttctctactcctttgatctctgtaaccttgaatctttcccttcttagtcctcggtttattcatgtgataaatggatacattcagtgatctt

SEQ ID NO: 119589 - DNA, 201 bp, Homo sapiens
tcctgccctccgacctctgatcttttgggctcatcaagccaactcttctgggagcccatgaaggtccatgatatccgctggaactttgagaaatttctggyggggcccgatggagtccctgtcatgcattggttccaccaggctccagtcagcacagtcaagtcagacatcctggagtacctaaagcagttcaatacccac

SEQ ID NO: 119590 - DNA, 201 bp, Homo sapiens
cttaatttgtatcttgctgggaacaactttggttcactgcaggtatgtgtgtccaggtagtggctttgtccccagtttccagctctttgagaaaggggatrtgaatggagaaaaagaacagaaggtctttactttcctgaaggtgcatgagtataaacctggcatggatgggttagctagaaatgctctgaaagcagtggg

SEQ ID NO: 119591 - DNA, 201 bp, Homo sapiens
gtggggctcatgtctagggttgtggttggactccttggaaaagagatgctcagataagttcaaggctcatggcaatatctgctgtgatgctttagctttamgtagaggaaacccatgatggacaatagctctgacatggactaccctcctgtattgaatggaatgattcattcattcagcaatcatttatcagatctccag

SEQ ID NO: 119592 - DNA, 201 bp, Homo sapiens
cttcttagtcctcggtttattcatgtgataaatggatacattcagtgatctttcactgcttgaggtaggcctcctgaccagcccacccctgctattcattstccacttacagaactgaatgcactacaggaggagctgaagaattttggtgtcattgtgttggcctttccctgcaaccagtttggaaaacaagaaccagga

SEQ ID NO: 119593 - DNA, 201 bp, Homo sapiens
gtacagaggacacagacaagggagtttgggatgatgggggtggagggggtggatgccccagtgtggccctgtttggggccagcccccagctggccaagtcmggattggacccaaggatcctcaagataccccccttctgacctcctgtgcccatctgtccctccatggcagcctgcccgtctgcagggcccaggctcctcg

SEQ ID NO: 119594 - DNA, 201 bp, Homo sapiens
tttagagatcaccaaggtggggcgaggagaaataggagataggtgaggtgtctccttccagtcttggtaattgttccagggagagccctggggcctacccrgggctggccatgggcagggaaggtggaagtggggtccggagggttctggaggcacagccgacaggactgtgctcaagggggatctgggcagactggggtt

SEQ ID NO: 119595 - DNA, 201 bp, Homo sapiens
ctagttttggtctctctggatgtgactgctctagggacctcactaagtgggactgtttggcactcgtccttttgtgactgtactattcgcttggcataacrccctccaggtcagcccatgtggcagcatgtgtcagcaccgcattcctttcatggctgagtcatattccattgcatggatggccgcatacatttgcccact

SEQ ID NO: 119596 - DNA, 201 bp, Homo sapiens
agcaccacttattgtagactgtcctttccccattgaattgtcttggctccctcatcaataatcaactgaccacaaatgtaagggtttgttgctgaactttsagtgctatttcattcatctatatgtctctcctagccagcaccacacagtcttgattattgtggctgtatagtaaagttgtggtatcaggaaatgtgaatc

SEQ ID NO: 119597 - DNA, 201 bp, Homo sapiens
ctatggctgtcagagggcatcagtctttaaataaatagtcactggcactgggcaaggttgcaggggttacagaaaagcaaaaagtccccttccatgtagawctgaccttccagagtgatcaacctacacagaactcaaaagatttcagcaataaagagtgccgtggctggagctgagcagtgaaccaggaagggtggtagt

SEQ ID NO: 119598 - DNA, 201 bp, Homo sapiens
gcatggtgaccatgcttcccgtggctggcacaccacggaccacggacctgttggttgtctgctcgtgcaggtactgggagacagtggggaacaaaacttaraaatacccctgcctcgaggagcttacatttttaatatgaaaacccaagatctcagctctatgtcttctgcctctgagacaccggcgggagcagtgttggc

SEQ ID NO: 119599 - DNA, 201 bp, Homo sapiens
tgctgggggaataaaaggagtgaaggtgcaaaggagagtgctgattggtaagtacagaatcagcccatttattattgagccaaagcagcccgacagcccayaagcggctgcagttttcaattgggtgtggaattaaacagcgctgcttcttatgcagcctcctgcttttagtaaacattgaagagtccatgtgtgcccgta

SEQ ID NO: 119600 - DNA, 201 bp, Homo sapiens
ctctggtgggtgggcaaagggaggggaagtggctgctggagccaaattggtagatgctccccatgctgctgtccatcttcaggtactgctggagtgtcccragttcagaggacctccagaaagtaccgtgagaagaggcaagctggcaggtgggtggctctgcagaacaggaattggcaatcctattttgcagaaaagaaa

SEQ ID NO: 119601 - DNA, 201 bp, Homo sapiens
cagcgccagagtcagggagcccgcgctgccctgacgcgtccccctgtcccgtctcctgtcgcccacaggacccgcgctcgaccctggcgaaggtgcaccgkcagcggcgcgacctgctgaacagcgcctgtagccgccactcacgccggcagcgcctgctacagccggaggacctgcggcacgtgctggtggacgacgcgc

SEQ ID NO: 119602 - DNA, 201 bp, Homo sapiens
ggaggctgtgattggacaggcctaggccacatgcctatcccagcaggtggtggaggcgtaggggagcctatcggaatcacatgggctgaaggcctggcagscatcctcctctggtgggtgggcaaagggaggggaagtggctgctggagccaaattggtagatgctccccatgctgctgtccatcttcaggtactgctgga

SEQ ID NO: 119603 - DNA, 201 bp, Homo sapiens; identical to SEQ ID NO: 20380

SEQ ID NO: 119604 - DNA, 201 bp, Homo sapiens
gcctcactctcagctgcaccagttcagcaactccaacccaaagctagagagggttcctttgccactgattccagccaaagtcccaaggaggcatccattgrcccggtctgggtctcaagtgcccgtctctgagccagtcaggtggcaggaagggctgggaggctgtgattggacaggcctaggccacatgcctatcccagc

SEQ ID NO: 119605 - DNA, 201 bp, Homo sapiens; identical to SEQ ID NO: 20383

SEQ ID NO: 119606 - DNA, 201 bp, Homo sapiens
catctgtcccagtgtttggagtcacaggtgttcctcttggagccaggtgggcctctgcatcccatcccagcccctgctcacccctaggcaggcaaggaagmtaagactgtgggccacccaatggcacacagtggtagcctcggcgaggacaaacccaacccaattcagactcccttcagctgggagggagtgggtctgtgc

SEQ ID NO: 119607 - DNA, 201 bp, Homo sapiens
tgaggcaggcagggggcagcaggaccctggacagtgggcttcaggtacacgcagcagggttctggacaatgggctttagggttctggaggccagtgcaagkcccgtccagctgccatctattccttccacgaacctctgtttattcagcacagaccatattctgcctgccaggcactgcgctggcgcagctggtgtcaaag

SEQ ID NO: 119608 - DNA, 201 bp, Homo sapiens; identical to SEQ ID NO: 20384

SEQ ID NO: 119609 - DNA, 201 bp, Homo sapiens
tttaatatgaaaacccaagatctcagctctatgtcttctgcctctgagacaccggcgggagcagtgttggcaccagcccccttcccctattccactcccgyggctgcagggctgagcatctgtcccagtgtttggagtcacaggtgttcctcttggagccaggtgggcctctgcatcccatcccagcccctgctcacccct

SEQ ID NO: 119610 - DNA, 201 bp, Homo sapiens
tctgacctccctccctctcctgcagagcctgggaagagacagcaggtgttaggaggacggctccgaacctcccttcccagcctctgcgcaggctgggctcyccacctggcctgtcctgctcttggccatgacctcacccagcatctcagcatctctctctgtttctgtcaagcgctcttgtacctctcccatggcctgtct

SEQ ID NO: 119611 - DNA, 201 bp, Homo sapiens
agggcctggggaggcctctgcccactccccctgaccctcacactgccccttgccccttgtgtgtccagacacagcaggtcagacctggatgcctccccaakcccatgggatagggctggggtgtctctttccagcacccccacaaccccttctgtgagctgtctggtggtgttgagcagacaatctcctggcagtctgggg

SEQ ID NO: 119612 - DNA, 201 bp, Homo sapiens
tcaacgatgtctcatggttttcagtggacaggtcttatacttcctttgttaccaacttcttctttattactttattaattttgatgttgtttgattattcwttgctagtatatagaatataattgacttttgtatattaatcttgcatcgtgcaaccttgctgaacccatttattagctcttacagtttgtgaattcttta

SEQ ID NO: 119613 - DNA, 201 bp, Homo sapiens
ggttcagcagcagccagctgcccaccatcgtcctccggatgttgacttctgtcatagagctggcctcctgactataagaggactgccagggctgcagacayctcacaggagggcatcccaggcagaaagtgagtggtggggtaagggtttcccctgacttttcaccctaagggagtctttcctgggagtcatctggctaat

SEQ ID NO: 119614 - DNA, 201 bp, Homo sapiens
cataaggtggggccgttgtccctgtttacagacaaggacacaggcatggggaggcaagtgccctgcaaaggtcacagagcttctatggactagagccagcraggaatccaggcagccacactgtgggggtgaggacaggagctgtaggtgcagccccggacagtggacataggtccagctttagagtcccaaggggcctga

SEQ ID NO: 119615 - DNA, 201 bp, Homo sapiens
gcctgaggcaggcagggggcagcaggaccctggacagtgggcttcaggtacacgcagcagggttctggacaatgggctttagggttctggaggccagtgcmaggcccgtccagctgccatctattccttccacgaacctctgtttattcagcacagaccatattctgcctgccaggcactgcgctggcgcagctggtgtca

SEQ ID NO: 119616 - DNA, 201 bp, Homo sapiens
atatgatcatatataggctatattactgagaacatattaatattaattgactatgcataaaaagatattccttaaaacagattttgagtaaaggaatacayttataggtaaacggatttttacttataatagttctaggaaaactgagcagtgcagcaaggagacagacagacagacagacagcatccctgtcctcatctg

SEQ ID NO: 119617 - DNA, 201 bp, Homo sapiens
gagtctggcccttgttcctgggccttacaggatgtggcctgggcgcagagggggcctgaggcaggcagggggcagcaggaccctggacagtgggcttcagktacacgcagcagggttctggacaatgggctttagggttctggaggccagtgcaaggcccgtccagctgccatctattccttccacgaacctctgtttatt

SEQ ID NO: 119618 - DNA, 201 bp, Homo sapiens; identical to SEQ ID NO: 20381

SEQ ID NO: 119619 - DNA, 201 bp, Homo sapiens; identical to SEQ ID NO: 20382

SEQ ID NO: 119620 - DNA, 201 bp, Homo sapiens
ccttgttatttactgtctttttaaataaccatcctcatggtgttgatttctatttcactaatggctagtgatgttgcgcaccttttcatgtgcttattgcygtaggtatatctttggagaaatgtctattcagattctttgcccatttaaaaaattgagttgtcttttgttgttccattgtaagagttctccatacgttgt

SEQ ID NO: 119621 - DNA, 201 bp, Homo sapiens
caagtacttattcggacagcacatattgagcacctactgcatgcaggctgtggtcaggatgctgagatccagcagcaagcaggttggccaggtccctcccstagtggagccaccagtccagcaggggaagatgtcatctgatcaccacccacactaatacttaactaattctgctctaaaggggagtatgaggtgcaacaa

SEQ ID NO: 119622 - DNA, 201 bp, Homo sapiens
tggtttggtcatctagataatactggccttatgtaatgagttgggaagtgttctctcctcttctgttttttgaaagagtttatgaaagattggtgttaatkctttaaacatttagtaaaatttaccagtgaagccatctgatcctgggcttttgtttgtgggaatttttttttattactaattcaacatcttgacttgtta

SEQ ID NO: 119623 - DNA, 201 bp, Homo sapiens
aaggggacaccgcccggggtggggcacgccaccgcgacaatgcctcttggccttgggtggataatggcacccctgggcaaaccctaggggcggggcccagrggcgaggggcttccccaatcagtctccgccctagcgccctggacttcggccccattccattgggtgagggtgggggcacgaaaagaggaccgggcttgcg

SEQ ID NO: 119624 - DNA, 201 bp, Homo sapiens
gggatccatcctacttggtcatggtgtataaactttttcataggatgttatttttggtttgcccatattttttgagaactttgcacttatattcataaggkacatggctctgtagttcccttttcttgtgatgtctttgtctggtttggtcatctagataatactggccttatgtaatgagttgggaagtgttctctcctc

SEQ ID NO: 119625 - DNA, 201 bp, Homo sapiens
attcaatgttcttatgaactcttacggacatattaagacagccatttcacataaatggaatcgtgtcttagctggccttttatgtctggctcctttcactkaacataacgtttacaaggttcagccacacggaagcatgagccaattcttcattccttttatggccaattaatagcccatgttatggatataccacatttt

SEQ ID NO: 119626 - DNA, 201 bp, Homo sapiens
ctttccagcaggctgtggtctggccaggaaatgagaggccttatgcaagggctggcgtttccggaaggctgggagcctccgagtagcagggccctggggcrgagacaggcctgggtcggcttctcagtcactgcaactgcccctccaccccctgcccacagaacacaggctgctgagcaccagttcttcctcagtccccag

SEQ ID NO: 119627 - DNA, 201 bp, Homo sapiens
ccaagtcaggattggacccaaggatcctcaagataccccccttctgacctcctgtgcccatctgtccctccatggcagcctgcccgtctgcagggcccagkctcctcggggcagggtggcaggcagggtggggctggatggaggcggcccagccctgtaatcactggccacagctattctgagcctctctctggtacctgc

SEQ ID NO: 119628 - DNA, 201 bp, Homo sapiens
aaagcccctaggggaaggaatggggcaggacagaggccctcggaggccacgtgggaacctatgcctgctggcaggagcttgctggggcctggctgccctgyttatctcctcttgcaacactgtaacctgctggaacttattaaccagaagccgagtgtcatcatctctgcttgctggactagggagtctgcaaacagcatc

SEQ ID NO: 119629 - DNA, 201 bp, Homo sapiens
gcctgatccccagaaggaatgtccctgactctgagacatgcaggtcaccccagaaagcccctaggggaaggaatggggcaggacagaggccctcggaggcyacgtgggaacctatgcctgctggcaggagcttgctggggcctggctgccctgtttatctcctcttgcaacactgtaacctgctggaacttattaaccaga

SEQ ID NO: 119630 - DNA, 201 bp, Homo sapiens
gtagttcaatttatctattttttaaaattttgttgttttgtgcttttggtgtcatatctaatacatcatcacctaatccaaggtcatggagatttatgtcrgtgttttcacttaagagtttcatagttttaacttcaatgtttggggctatgatccattttgagttagtttttgtatgtggtatgaagatggggtacaact

SEQ ID NO: 119631 - DNA, 201 bp, Homo sapiens
aacaagtttttgtgtgaacaagttttcagttctaggaacatacttaggagaggaattgctgggttgcatggtaattctaagcttagctttttaagaaaccrccaaactgttttccctcatggatgcaccactttacatccccaccagcaatatatgagggctccaatttctccacatccttgttatttactgtctttttaa

SEQ ID NO: 119632 - DNA, 201 bp, Homo sapiens
ttttcccttctacccactggcccctgggggctgttatggtacccactttccagcaggctgtggtctggccaggaaatgagaggccttatgcaagggctggygtttccggaaggctgggagcctccgagtagcagggccctggggcagagacaggcctgggtcggcttctcagtcactgcaactgcccctccaccccctgcc

SEQ ID NO: 119633 - DNA, 201 bp, Homo sapiens
tgtcttttcattttgaaaaattcaagcatatgcaagaagaagggagaatagttcaaggaacccccaccttcccaccacctactcccacctgggatgactgygaagccagtcccagccttgtggattctgtgactatgtctgaacgtatctctaaaataataagtctccctccacccaccctttgtgaaacgttttttattt

SEQ ID NO: 119634 - DNA, 201 bp, Homo sapiens
tcctatgtctgtctgcctctgtcttttcattttgaaaaattcaagcatatgcaagaagaagggagaatagttcaaggaacccccaccttcccaccacctaytcccacctgggatgactgcgaagccagtcccagccttgtggattctgtgactatgtctgaacgtatctctaaaataataagtctccctccacccaccctt

SEQ ID NO: 119635 - DNA, 201 bp, Homo sapiens
ccagatccctgggtgtccttccagacatgctctaggcgtgtaagtagtatccactgctttgccgtgtgcttacagtaacttcttgagaatctcacctacargcatgtatgtcctatgtctgtctgcctctgtcttttcattttgaaaaattcaagcatatgcaagaagaagggagaatagttcaaggaacccccaccttcc

SEQ ID NO: 119636 - DNA, 201 bp, Homo sapiens
cttattcggacagcacatattgagcacctactgcatgcaggctgtggtcaggatgctgagatccagcagcaagcaggttggccaggtccctcccctagtgkagccaccagtccagcaggggaagatgtcatctgatcaccacccacactaatacttaactaattctgctctaaaggggagtatgaggtgcaacaagagctc

SEQ ID NO: 119637 - DNA, 201 bp, Homo sapiens
cttcggtctcagtctggcaagacgctgggtcttcaggctccatgccaacagagcccctggtgcaatgcggtcacaggttttatgggactttggtgagctgsgcggtcatggttttgaaataaatgtattttgttactttctgattttttggagtttatctgcttcattgggccattttctctgggagactgcagctgtctg

SEQ ID NO: 119638 - DNA, 201 bp, Homo sapiens
gaagagtaggtctccttgtccagcacctgtcctctcggaggccaccagatccctgggtgtccttccagacatgctctaggcgtgtaagtagtatccactgstttgccgtgtgcttacagtaacttcttgagaatctcacctacaggcatgtatgtcctatgtctgtctgcctctgtcttttcattttgaaaaattcaagca

SEQ ID NO: 119639 - DNA, 201 bp, Homo sapiens
actataagaggactgccagggctgcagacacctcacaggagggcatcccaggcagaaagtgagtggtggggtaagggtttcccctgacttttcaccctaarggagtctttcctgggagtcatctggctaatcccctgatatcgcctcaggcagagccaggccacattccccccgaacccccggacccagtgcttcagcaac

SEQ ID NO: 119640 - DNA, 201 bp, Homo sapiens
gccccgggggcacagcctctcctggcaccatgtggagctaggcttctaaggtcagtcctgacggtggaaacagggtctcccaggtgtccccatacccccayggcatagctgaacctggcagccttcccatggtgagtgtggctaagtgactgtcttatttcacttagcatgatgtcctcagggttcactgtttctcaaaat

SEQ ID NO: 119641 - DNA, 201 bp, Homo sapiens
atctggctaatcccctgatatcgcctcaggcagagccaggccacattccccccgaacccccggacccagtgcttcagcaacgacacacgaagctgaagatmtggctccctgaagctgggctcatgccctgacacagccggggtcggccagcaaggaaggaggaagactgacaggtggccggatggccaacattccctgcca

SEQ ID NO: 119642 - DNA, 201 bp, Homo sapiens
gtgccaaaggcctggcggggagtggaggacaggagagggagcacaaggggagcctggagaagtgggcagcacgcaggccctgcaggtgtgcaagggtagcrgggagccatgcaaggttttaagcaaggaaggacagcatcagattttcacccttggggtatccctactgctgtgtagagaaggatcagggtggtgttgggt

SEQ ID NO: 119643 - DNA, 201 bp, Homo sapiens; identical to SEQ ID NO: 20385

SEQ ID NO: 119644 - DNA, 201 bp, Homo sapiens
ttagatatgcaaaatcttgttccccattcagacctactgaaccaaatattatggagataggactcagaaatctgagttttaacaggacccccatgtgaaaytgattcattctaacatttgaaaacctatgattgactgaaaccattccattatgtgtatgtgaatattccacaagttacttatccatgtgtattagtctgt

SEQ ID NO: 119645 - DNA, 201 bp, Homo sapiens
tatattagtgccttattaacattgttacaaaaggtacaagttaactatctccttaggtgagctaaaccatgtgctattttttttctctacaaagtccacaractttttcattacaaagcatacaaaacagctaaattggtatttctttcagtcagacttcaagggccgcaatttaaaactttccccaataagagataaaat

SEQ ID NO: 119646 - DNA, 201 bp, Homo sapiens
aaaatattaacctattgtttgatttgattgatactacactttggtcaatatctagtttcctcaaaatggacaatgagcagcgtgtcttcagaagggagttrgtggatgttcaggggattccccttttctagagcattgctgaagagtggtttcaagtagaattgtttgaggcctgaccagatgatattctgatctctacct

SEQ ID NO: 119647 - DNA, 201 bp, Homo sapiens
actacagactgggtaatttacatagaaaaagaggtttaatggactcacagttccacgtggctggggatgcctcacaattatggtggaaggtaaaagacacrtcttacatggtggtagacaagagagaatgagagagcttgtgtagggaatctcccctttataaaaccaacagatcttgtgagatttagtcactatcatgaa

SEQ ID NO: 119648 - DNA, 201 bp, Homo sapiens
ccttaggtgagctaaaccatgtgctattttttttctctacaaagtccacaaactttttcattacaaagcatacaaaacagctaaattggtatttctttcartcagacttcaagggccgcaatttaaaactttccccaataagagataaaatgagttacattgtactttgaaatttaggtctctctccttctctctctttta

SEQ ID NO: 119649 - DNA, 201 bp, Homo sapiens
attacttacaagttacacttcccacaaaacactagaacacaatttggccaacttattttccactttataacaattaatgactttcctccaatttccaatartatgctcctcatttgtctgaaacctcatcagagtatctttaacttttaaagtattttgttcaacatatttctactaatattctgctcatgatgacagttg

SEQ ID NO: 119650 - DNA, 201 bp, Homo sapiens
tattaaattaaaaaaatagccataagcttcatggcctagttcaatcttagaattcaaatatgggagagctggaaagggattttgaaatcctctagtgcaaytttctcatatcataaatgataaacagaagaatataaatgaagaaaaattctagacattatgattcttgacctgtagctctttctgcctcatcaaggtgtt

SEQ ID NO: 119651 - DNA, 201 bp, Homo sapiens
cctggagggggaaaaggaatgacacggataatgcaaaacttttatttctactctcgtcaatgtatcttttattattattgtgctataattaggtaatgtgrtctctcacctgactttattagctcttgtggaggtacttttgtgtgtaaagagttgttcaaattgatatttctgcaagggcatgatcaccaaatagtccta

SEQ ID NO: 119652 - DNA, 201 bp, Homo sapiens
atggacaatgagcagcgtgtcttcagaagggagttagtggatgttcaggggattccccttttctagagcattgctgaagagtggtttcaagtagaattgtytgaggcctgaccagatgatattctgatctctacctatcccaaatctggaagacattttcatttgtttgtactcaatgatttgatagtgatccatatgtgt

SEQ ID NO: 119653 - DNA, 201 bp, Homo sapiens
ccactgtggctggcatggtgcttggctaaaattctgcggccactaaggctagcacagcactgaggcatgtccaaaacaccatgcccactgaggtctgcccrccactaagggctatccagagcccaaggcagctgtagttggctggtggtgataaagactgaagattaagtctacctcacaggggatacaggttccaacctg

SEQ ID NO: 119654 - DNA, 201 bp, Homo sapiens
gttgttgcagcattagtgagtcctagtgttgcagttattattttagccaagcaccatgcttggctaaaagaagcatgtgctacagttgtttcagcactagsggtaaactctaagcctggggccacggtgctgcaattgttgcagcactatgggcgacctctaagcctgggaccactgtggctggcatggtgcttggctaaa

SEQ ID NO: 119655 - DNA, 201 bp, Homo sapiens
tattgaccatccagatgtcttttttgagatacctatttaaatcttttgcctcttttcctgtaggaggtaccttctctttattattaagcgagaagttctcyatatattctggatgtgagaagttctctatatattctggatgcaaattctttgatgagaagattatatttcttatatcttaacttactgttttatttttgt

SEQ ID NO: 119656 - DNA, 201 bp, Homo sapiens
tcctaggaaaggggagaagaaagggagtggaaataaagaatacatttttgttttagatattgttacacaacttctctacagccactgattatcttatactmtttttgacagaaaagtttaaagttttgttaatattttctttccttagggatgacctggatcagtgaaatattggatttgatctttaacaatggggatgca

SEQ ID NO: 119657 - DNA, 201 bp, Homo sapiens
ttgataatgatgatttggaataacatataaccattatttattttatgtatagtgtaattttgcaaaaaaaaatttcaatttagtgtgttttggttcctggyatgaccatgtgaagggctggtgggaaaagaagaaagattatcgtatcctttacctattttatgaagacatgaaagaggtaagaagtaactgcattttatt

SEQ ID NO: 119658 - DNA, 201 bp, Homo sapiens
tatttgtaaaatctgtccagatgtcacctttctcactcttcatgtattttttaattttcttttagagataaaatatcactctgtcacccagactggagtayagtaatataagcatagctcactgcagcctcaaactcctgggctcatgtgatccttcagcctcagcctcctgagtagccggaaccacagtcatgtgccacc

SEQ ID NO: 119659 - DNA, 201 bp, Homo sapiens
attatatttcttatatcttaacttactgttttatttttgtattttcacttttctttttgtgatcgatacatatggtttttcctttatggttagggcttttwatttgtttttaaaaatgcctaccccaaatcatgagatattctcccttctgtttacgtctagaggctttattgttttagttattacctttagagccaaata

SEQ ID NO: 119660 - DNA, 201 bp, Homo sapiens
ctcttatgcttatccctttcttgaactaatagctaatcagtgtgtaagcattgataatgatgatttggaataacatataaccattatttattttatgtatmgtgtaattttgcaaaaaaaaatttcaatttagtgtgttttggttcctggcatgaccatgtgaagggctggtgggaaaagaagaaagattatcgtatcctt

SEQ ID NO: 119661 - DNA, 201 bp, Homo sapiens
tgtaatggtaattataatgtgttttcataggtctcgattttttttcattttgattaggaagtatgccatgggtaagtattgctgggaatatctggatctcrgccaggtacaattttgtctttcaggagatgtttggcaacttctgtagacatttttgattgtcacaactaggaggagactgttggcattgcatagaggcta

SEQ ID NO: 119662 - DNA, 201 bp, Homo sapiens
gaatagtcttctttttacactgaggctagcagaaacagttcctaagaaagttacaggtgaggatgataggtaaacagttggcttattatcatagtctctcrgaattgaaataagaagtaactggaaatgtttgtaggtttactattttctcaagaagttatgccagcaacagtctcaactcttagagttatatactcaagc

SEQ ID NO: 119663 - DNA, 201 bp, Homo sapiens
atttaagacattttttgagagacaggtgttttggctataggctataaagtgtaatggtaattataatgtgttttcataggtctcgattttttttcattttrattaggaagtatgccatgggtaagtattgctgggaatatctggatctcggccaggtacaattttgtctttcaggagatgtttggcaacttctgtagacat

SEQ ID NO: 119664 - DNA, 201 bp, Homo sapiens
atgccagcaacagtctcaactcttagagttatatactcaagctgttgaaaaaccctttttcagccactcccttttaatccaaatccttgtctcagactatragaactattaacagtaacttgggaatataaagtttcctattttctttgcccatcacttggggacgaaggaagttagatggaagatgttagatggaagatg

SEQ ID NO: 119665 - DNA, 201 bp, Homo sapiens
ctagagcagctaggatgcagggcaccaagtccctagcctgcacacagtaggggggcctggcctggcccatgaaaccattttttcctcctatgcatctgggyctatgatggaagggacttccacaaaagtctctgacatgctctggagacatttttcccattgtcttgatgattaacatttggctcctcattacttatgcaa

SEQ ID NO: 119666 - DNA, 201 bp, Homo sapiens
atttccatacatcctctgaaacccaggcgaaggtttccaaaactcaattcttgacttttgtgcatccacaggctcaataccacatggaggctgccaaagcytggggcttgcacccactgaagctacagcccaagctgtaccttgaccctttttagctatggctagagcagctaggatgcagggcaccaagtccctagcctg

SEQ ID NO: 119667 - DNA, 201 bp, Homo sapiens
gagatttagtcactatcatgaaaacagcatgagaaagacatgtccccatgattcaattaccccccactaggtccctcccatagcatgtgagaattatgggrgctacaattcaagatgagctttggatggggacactctccccagagccaaatcacatcattctgccccagcctctcccaaatctcatgtcctcacatttca

SEQ ID NO: 119668 - DNA, 201 bp, Homo sapiens
ttttaattcaagtgtagtatttagatagaaaagtccataaatcctatgtatgcagcttgatgtattttaacaaagtgagtgtacccatgaaatcagcaccmagataaaaaatatagaacattgctagcaccccaaaagctttgttcctgcatacttctagtcagtaacccttatcttcaaagataaccactatcctgaatg

SEQ ID NO: 119669 - DNA, 201 bp, Homo sapiens
ttatatataatcattacatatatgtataattacatataatcatataaactggggactgtctgtatgcatatatgtgtgtgtgtgtgtgtgtgtgtgtgtgtaaacagatggtccccaagttatgagggtttgacttaacgatttttccactttacgatgggtttatcatgatatggtcccattgtaagtttagagttcttt

SEQ ID NO: 119670 - DNA, 201 bp, Homo sapiens
aggaagaaaatgggaacagttaaggagatacttatttcctatgtcttatatttctttttttttagcagtgcctcaataatctgactgttgaatgtacaatyaagtataccataggcacatatgatttagatacatttctcaaataactggtgagacacaatatcataatggtcagagtatcttgatccactctactcaatc

SEQ ID NO: 119671 - DNA, 201 bp, Homo sapiens
attatatataatcattacatatatgtataattacatataatcatataaactggggactgtctgtatgcatatatgtgtgtgtgtgtgtgtgtgtgtgtgtgtaaacagatggtccccaagttatgagggtttgacttaacgatttttccactttacgatgggtttatcatgatatggtcccattgtaagtttagagttctt

SEQ ID NO: 119672 - DNA, 201 bp, Homo sapiens
gttaaaaaaaaaagtttaattgcatttaacccagcaatgtccaatcttacttgaccataaaactttttttcataaattatcatttgacatggggaaacattatatatatatatatatatatatatgcttatatgtatttatacatatatttatatatatttatatacatttatatatttatatatgtgtgtgtgtgtatat

SEQ ID NO: 119673 - DNA, 201 bp, Homo sapiens
tctaacttgaaattattaaacattttttgaggaaaccctgtggtggttgctgtgagagtgtcatcttaagttagactaatttacttcctattctgaaaggytaccaattgaataaagaatatatctgagagaaaaattaatgttgttttcttgtttttctttttaaattcaaatagaaattattaaaactgtatatatata

SEQ ID NO: 119674 - DNA, 201 bp, Homo sapiens
aacccgggaggcagagcttgcagtgagctgagatcgcgcaactgcactccagcctgggagacagagagagactccgtctcaaaaaaaaaaaaaaaaaaaaagcaacaagaagtgtctgggtctataagagggtaagaattatattgaaagaaaacttttctacgttgggccattataaggtcttcaagcaaaggaatttta

SEQ ID NO: 119675 - DNA, 201 bp, Homo sapiens
tggttgctgtgagagtgtcatcttaagttagactaatttacttcctattctgaaaggctaccaattgaataaagaatatatctgagagaaaaattaatgtygttttcttgtttttctttttaaattcaaatagaaattattaaaactgtatatatatatgttttggatacattagaatatgtatattccattatatacaca

SEQ ID NO: 119676 - DNA, 201 bp, Homo sapiens
aatcctctagtgcaattttctcatatcataaatgataaacagaagaatataaatgaagaaaaattctagacattatgattcttgacctgtagctctttctrcctcatcaaggtgttctatctgaggattttatagccacttatgaagatgatagtcttatgttgctcataggcataaaagagtcttctcagagtttatctt

SEQ ID NO: 119677 - DNA, 201 bp, Homo sapiens
aaaatcttagattatattgtaaatcatatttataattctatgtttacatggtagtttgttaattttttgtgattgtaggtgttgagcagttgcaaaacatrcagtctcctcaattagtgaaaacacacctgcctgttcaacttctcccttcttcattttggaagaataactgtaagatagcaaattttaaagagatataat

SEQ ID NO: 119678 - DNA, 201 bp, Homo sapiens
ttttgtccatagaatgtgatccttatttttattatcaaagttcaactctttattttaaattcaaatgcactcattttcctccacatccttttctttctttytttttttttttttttttgcttaataatttcttcattatgatttcaatctctctgtcaaatttcttgttctggttactcattattttccttatttctttac

SEQ ID NO: 119679 - DNA, 201 bp, Homo sapiens
ttgatgtattttaacaaagtgagtgtacccatgaaatcagcacccagataaaaaatatagaacattgctagcaccccaaaagctttgttcctgcatacttstagtcagtaacccttatcttcaaagataaccactatcctgaatgttttcatgcattactttgcctttttttgtctgtaattgtagagtatatactcttga

SEQ ID NO: 119680 - DNA, 201 bp, Homo sapiens
attgtttgcaatattcctttaatatttgtaaaatctgtccagatgtcacctttctcactcttcatgtattttttaattttcttttagagataaaatatcastctgtcacccagactggagtatagtaatataagcatagctcactgcagcctcaaactcctgggctcatgtgatccttcagcctcagcctcctgagtagcc

SEQ ID NO: 119681 - DNA, 201 bp, Homo sapiens
cactatcctgaatgttttcatgcattactttgcctttttttgtctgtaattgtagagtatatactcttgaatatttgacttcttccattcaacataatatytgtgagatctatcactgttgtgcttgctattttatttttgttttgtttcctttgatgaagcctgttggatcccaagatgggagcaaaaagctgctagtta

SEQ ID NO: 119682 - DNA, 201 bp, Homo sapiens
cactcccttttaatccaaatccttgtctcagactatgagaactattaacagtaacttgggaatataaagtttcctattttctttgcccatcacttggggaygaaggaagttagatggaagatgttagatggaagatggcttcttcctgaatgcacactcccttaggaatatatttatttcatgggtggctgagtcctcagt

SEQ ID NO: 119683 - DNA, 201 bp, Homo sapiens
ccaaggtttttattagtcatgcatcctggattcagtctaatactttcttggtgtccattaagatccatcatacagtttaccgtcatttttttcttttaatrtgatgaattacattaactgattttttttttttttttgagatggagtctcgttctggagtccaggctgcactccaggcagcctcctgagtagctgggaata

SEQ ID NO: 119684 - DNA, 201 bp, Homo sapiens
aagagacctcccacttaaaacatcaacaacaacaacaaaaaacaaaaacaagatagagagatgttcttttcttttctttttgagagataaagaaaaagtargcatgtgagagatgagaactcttcatgttaaaacaacatacaattgttgagtatcctacatcaggatatagatataaatgccaaaatcaggaaatagaaa

SEQ ID NO: 119685 - DNA, 201 bp, Homo sapiens
tcattttagtcttaaataatttgtaccattgaagccagctgaacctgaaattttctttgtctgaaaggcttttttgtttgtttgtttgtttgtttttctaygaagtcactgtagttaacagaaataggagcattctgcttatgttcctttcctgacttaatgtttggtattttgtgtctttcaaaaaaattgatctatttt

SEQ ID NO: 119686 - DNA, 201 bp, Homo sapiens
caatgagcagcgtgtcttcagaagggagttagtggatgttcaggggattccccttttctagagcattgctgaagagtggtttcaagtagaattgtttgagscctgaccagatgatattctgatctctacctatcccaaatctggaagacattttcatttgtttgtactcaatgatttgatagtgatccatatgtgtaaacc

SEQ ID NO: 119687 - DNA, 201 bp, Homo sapiens
tgaggatgataggtaaacagttggcttattatcatagtctctcggaattgaaataagaagtaactggaaatgtttgtaggtttactattttctcaagaagytatgccagcaacagtctcaactcttagagttatatactcaagctgttgaaaaaccctttttcagccactcccttttaatccaaatccttgtctcagacta

SEQ ID NO: 119688 - DNA, 201 bp, Homo sapiens
gggaccactgtggctggcatggtgcttggctaaaattctgcggccactaaggctagcacagcactgaggcatgtccaaaacaccatgcccactgaggtctkcccaccactaagggctatccagagcccaaggcagctgtagttggctggtggtgataaagactgaagattaagtctacctcacaggggatacaggttccaa

SEQ ID NO: 119689 - DNA, 201 bp, Homo sapiens
aatcactaagtccctacatttgacggagatgtttagagtacatctttaccccagcacctttaatagaaagaggaaaatagctgttctttttcatttgaaamcctgatattttcatcgttattatacaaaaagtttttatacttgtgattatgtgtgactttcttttttcctttcgaagtccaattaaaaacaagagagata

SEQ ID NO: 119690 - DNA, 201 bp, Homo sapiens
catgtgctattttttttctctacaaagtccacaaactttttcattacaaagcatacaaaacagctaaattggtatttctttcagtcagacttcaagggccrcaatttaaaactttccccaataagagataaaatgagttacattgtactttgaaatttaggtctctctccttctctctcttttaactcatgaatcgttgct

SEQ ID NO: 119691 - DNA, 201 bp, Homo sapiens
taccaattgaataaagaatatatctgagagaaaaattaatgttgttttcttgtttttctttttaaattcaaatagaaattattaaaactgtatatatatawgttttggatacattagaatatgtatattccattatatacacacacatatcagatatattggaatatacatattctatacattttgatatttaaatatttt

SEQ ID NO: 119692 - DNA, 201 bp, Homo sapiens
agagccaaatatctgtacttacaaggaatgacagtctttttaaaaatttctaacaaaatagtaattctctgtcccactctttctcccttgtacacacgcayaagtccatgtgttattttccaaatgttttctgctagtgtaaaagaaaaaatctgagacaagttaaatttaacagattttaattgagcagaacaaatttta

SEQ ID NO: 119693 - DNA, 201 bp, Homo sapiens
agttatataccactcaagggcactatcattttaatgaatttttctctttgattcttcatctgagaatatttattaaaagctctcaggaatttaaaggtaaktttaatttgactacatttcttccatacgtactttggttgtgagtcttttaggaataatcatgctaatctagaatattgaactcatatacaaaatttaaac

SEQ ID NO: 119694 - DNA, 201 bp, Homo sapiens
tattttcacttttctttttgtgatcgatacatatggtttttcctttatggttagggctttttatttgtttttaaaaatgcctaccccaaatcatgagataktctcccttctgtttacgtctagaggctttattgttttagttattacctttagagccaaatatctgtacttacaaggaatgacagtctttttaaaaatttc

SEQ ID NO: 119695 - DNA, 201 bp, Homo sapiens
ctcctgggctcagcttcctggatcttctctttctgaaacccaggctgaaattgctgcccatatgtggattatgcccaatatcatgatagagagaaagagcwagagagtcaatgaaacttataatatcttttgaaacttcttttcagatgtggtgtatgtcacatatattcaaagttcattggccaaagcatattagaaatc

SEQ ID NO: 119696 - DNA, 201 bp, Homo sapiens
ggcccctttcctacaaacaattaaaaagtttacctgggagtgatggtgcacaacttagtcccaactactcagaaagctgagatgggagaattgcttgagtycaggaggccaaggctacagtgagccatgattctgccactgcactccagcctgggcaacagagtgagaccctatgtcaaaaaacaaaaacaaaagatagat

SEQ ID NO: 119697 - DNA, 201 bp, Homo sapiens
tcatttaatcatgcagctctgtaatgaaaagccttcttttgcaaagagatataaattttaaatatgttttgtgtttattataaaccaattatgtacccagmactctattaatgcattaggaagactacagaggaagcagaatatattattgtctctttccttaaaggacttttgggttataagtgacagacagatacttca

SEQ ID NO: 119698 - DNA, 201 bp, Homo sapiens
taccctaaatcatctttctgaagttcaaagttacaaatttctagggcaggggaaaaatgccagcagtctatttgctaaaatgtaggatgtgtcacctttaytccagctcccaataagtttctcatctccatctgagaccaccttagcctggatttcattgtcattgtgtatatcattgtcagcattttcgtcaatgccatt

SEQ ID NO: 119699 - DNA, 201 bp, Homo sapiens
cccttttctagagcattgctgaagagtggtttcaagtagaattgtttgaggcctgaccagatgatattctgatctctacctatcccaaatctggaagacaytttcatttgtttgtactcaatgatttgatagtgatccatatgtgtaaacccactgatttacagattattagtcaggtctaacttgaaattattaaacatt

SEQ ID NO: 119700 - DNA, 201 bp, Homo sapiens
ttgactaaacaaataggctacaggccccattcaagtacaaaatttagtggggcagtcaaatcttaaagcttcaaaattatctcctttaactccatgtcacrtatccaggtaacagtgatgcaagaggtgggttcccatggtcttgggcagctctgtctctgggtttgcaggatagagcctccctctcagctgctttcatag

SEQ ID NO: 119701 - DNA, 201 bp, Homo sapiens
attttaagagtatatgaagtcatatagccattttaagccatatagtggggtttagaaaatcttagattatattgtaaatcatatttataattctatgtttrcatggtagtttgttaattttttgtgattgtaggtgttgagcagttgcaaaacatgcagtctcctcaattagtgaaaacacacctgcctgttcaacttctc

SEQ ID NO: 119702 - DNA, 201 bp, Homo sapiens
tctacgttgggccattataaggtcttcaagcaaaggaattttagtctcctcaaatatgagaagggaatctacatgtgctacatgtgctggaagagaacttmataattactcaagggtttatgattctctgtgtcatcaaatcaacaaatattcacattctgagcttgagcattccatccttcatcattcttaaatttaact

SEQ ID NO: 119703 - DNA, 201 bp, Homo sapiens
atatacaagcgagtgactttcatggaacttataattcctggactcacaaatggtatttttttaaatgtctcttttcactacaagagtaaattccccccccyttttttttaagatatctggaggagtcatgacagaaaatgacaagcttggacaattgaatcataagcatctgtaatagaggagtcagaatctgactgtgcc

SEQ ID NO: 119704 - DNA, 201 bp, Homo sapiens; identical to SEQ ID NO: 20403

SEQ ID NO: 119705 - DNA, 201 bp, Homo sapiens
ctttgcattctgtgtactatcattttaactttcttgacagtatccaaaaaagttttataattttttatgaaatccgagtttatctgtatttttctttagtyacttatgcttttgatgccacagccaacaaatcattgccaaatccaaggtcataaagccttctatttttttcttttagagttttatattttttagctctta

SEQ ID NO: 119706 - DNA, 201 bp, Homo sapiens
ccagcactttgggaggctgaggcgggcggatcacgaggtcaggagatacgttatatctaattgaattctaacacctttaaattctaaggacgcttttcctrtcttgctttttattatatgatactagggagtacagtattttttaaatagaaatatttatttggattcataaattaatggtttaattctcatccctgcaaa

SEQ ID NO: 119707 - DNA, 201 bp, Homo sapiens
taacttttttactttataaactttttatctttttatctttttttttacctttttgactcttttacaacacttagcttaaaacacaaattatacagctgtayaaaaataatttttatatccttattctataagctttttctatttttgaaatttttattttttatttttttactttttaaacttttctgttaaaaatgaaga

SEQ ID NO: 119708 - DNA, 201 bp, Homo sapiens
tgtccttatctggccttggtatcagggtgataatgctggtcatgtaaaaagaatttagaagtatatcctccttttcaacttctttgaaagcatttgagaawgattggtattagttctttaactgttaggtagaattcagcagtgagccaacaggtcttgggcttttctttgattggaaagaactcattattggtctgttta

SEQ ID NO: 119709 - DNA, 201 bp, Homo sapiens
gtgtgtatataagtctacaaaactaatatgtacattttaaataataataaaatggagatctgagtatccatcacccagcttaagaaatagaacattatttytacattagaagcttccatctggccaggcgcagtgggtcatgcctgtgatcccggcactttgggaggctgaggggtggatcacctgaggtcaggagttcga

SEQ ID NO: 119710 - DNA, 201 bp, Homo sapiens
tgttagccctaaaaatcttttatcttaggaaacctcccaatcctgggtgaactgggctgtagagaatgattgatgtttatttaattagatatattataaayagatgttctttcatttttagggaaaccagcagatgagggcgtaagtgaaaaagctgaagtacaattgtcatgttgttgtgcatgccattcaaaggatttt

SEQ ID NO: 119711 - DNA, 201 bp, Homo sapiens
atcctccatctccttaatcctttaaggtaactactgtaagattttatatatctattctaccagaatgtttaaaaaatgtatttgctataatgtatgtgcayatattctttaaaaaagcaatttacatgaatttaatcattctatacacgttattcaacatgtttttctcacttaacatagagagcctaatcaacacataga

SEQ ID NO: 119712 - DNA, 201 bp, Homo sapiens
gttgtgttccctggagtgcaatctcacttttccttgctgttctatttaaacttcagatggagagagacctttataaagttaatatgtttattattttcatkggtttctgtgttcatagattctcagaggattaaacagcaagcaacattgtttgttggagagtcccacaggaagtggaaaaagcttagccttactttgttc

SEQ ID NO: 119713 - DNA, 201 bp, Homo sapiens
gttatgttatcatttactacttatgttgccctaaaaagcaaagttgggctgggggcagtggctccatgcctgtaatctcagccctttgggaagccgaggcrgagggatcaccaggtctggagatcaagatcacctggctaacacagtgaaacccccctctctactaaaaatacaaaagaatagctgggcatggtggcatgc

SEQ ID NO: 119714 - DNA, 201 bp, Homo sapiens
gtaaggtttaaaaacaggtggcttggttgcaaattagtataagaaacaattagcctcctccctcacccaggtttacttctggaaaggttgaacaacagagwctctgtattcttcaacaccaggcacagctgaggacgtattaaagatggaggttaatattatatacggggattttacatactgaatgtgagaactccaccc

SEQ ID NO: 119715 - DNA, 201 bp, Homo sapiens
acataagactacaacaactagatttaagccctagaacatgtcacccactgtactccccatcattttattttttatttttgtttttattattattattattwtttttttgagagagtcttgctctgtttcccaggctggagagcagtggtgcgatctcagttcactgcaacctctacctcccaggttcaagcgattctccta

SEQ ID NO: 119716 - DNA, 201 bp, Homo sapiens
ttttctgttaaaaatgaagacatggggagcgcaatagctgaagcctgtaatccagcactttgggaggccaaggtgggcagatcacttaaggtcaggagttygatagcaacctggccaacgtggtgaaaccccatctctactaaaactacaaaaattagctggatgtggtggcaggtgcctataatcccagctacttgggag

SEQ ID NO: 119717 - DNA, 201 bp, Homo sapiens
taattccctgagtgccattatgcgtcatattacatcttctggcatccaaaagcctcttccatgagcaatcttgcctttttccagtgttatataaggtagamgtaggtctctgtcacctgctgaatgcaccattactgagtccccttattaaatcctcttaatattgactcattcctttaagaacctctgattctatttact

SEQ ID NO: 119718 - DNA, 201 bp, Homo sapiens
tgttgcccaggctggtctcgaacacctgggttcaagcagtcctctcaccttagcctcccaagtagctggaactccaggcacacgccactgtgcccagcttrctgtaacttttttactttataaactttttatctttttatctttttttttacctttttgactcttttacaacacttagcttaaaacacaaattatacagct

SEQ ID NO: 119719 - DNA, 201 bp, Homo sapiens
tgagcctgggaggtgggggttgcagtgagccaaaatcatgccactgcattccagcctgggcaacagagccagaccatgtctcaaaaaaaaaaaaaaaaaaattagcaaatcattgaagaagggttaaaacaaactataatcgtgatcctaaagaattaacaccaactaaacatttaatcatgatactccgacttctaaata

SEQ ID NO: 119720 - DNA, 201 bp, Homo sapiens
cttagctttactgaagttggagactgtgtttctgtttcctatttgtcttttaatttaaaggcagtttctctgacaggtgagggaaaaagaaatgtctgggkttttttttttttttttgacttattgaaatcagaagtctgcattactttctaagataaagcatgagttatcaaagtgctatgattccatatgtcttattcc

SEQ ID NO: 119721 - DNA, 201 bp, Homo sapiens
taattccagaatatttttctgaccccaaaaagaaactcctaactcattaacagtcactgcctactcttacctgctattccctagtatccactaatctgctrtttctatagatttgccttttctgaacatttcatctaaattgaatcatacaatatgtgactttttgtgtctggctttttcacatagtgtaatgtttccatg

SEQ ID NO: 119722 - DNA, 201 bp, Homo sapiens
ttgaacttgggagggggaggttgcagtgagccgagattgctccactgcactccagcctgggtgacagagactctgtctcaaaaaaaaaaaaaaaaaaaaargaaagaaagaaagaaagaaaagaaaaaaagcaactattcagaataataaagcaacctttttttttttttaatatctggctagagcaccaagtattataat

SEQ ID NO: 119723 - DNA, 201 bp, Homo sapiens
ttcatttgtgtgttcttttcaatttttaaaattgtggtaaaatacacatgacataaaatttaccttttaagcatttttaagtgtacaatttagtgccatcragtacattcatgatgttgtacaaccatcaccagtatccctttccaaaacttttcaatcatcccagtcagaaactgtactgatggaacaatgactcctgtt

SEQ ID NO: 119724 - DNA, 201 bp, Homo sapiens
atacatctttatgagtaatatgtataaaccattttccctgagggcatattttacattcatcactgaatgtcagatgaggaataaaatgcaaacattcctgwtcactctctagctgtagttttttaaagtattgttcagcactaaatttgtatgttaagaaatttgcagtgctactagtttgttttggttctcatttttaaa

SEQ ID NO: 119725 - DNA, 201 bp, Homo sapiens
ttatgtcatatgcataaaatcattgttaaatccaatgttacaaaaattttctcctgtgtttttttctaagagttttgcagtttcaagtcttttttttttttagacagagtctcgctctgtcgccaggctggagtgtagtggcgtgatcttggctcactgcaacctccgcctcccaggttcaagcgattctcttgcctcagc

SEQ ID NO: 119726 - DNA, 201 bp, Homo sapiens
ctttcctaaagatcttatttttaaaaaacctgttaggactaataaattgagtaaagttgcaatatgcaaaattaacatacaaaaatgagttgtatttctayacactgacaacaaactgtctgaaaagcaaattaggaaaacatttccatttgcagtagtatcaaaacaaatagaacacttaggaataaacttaaggaggta

SEQ ID NO: 119727 - DNA, 201 bp, Homo sapiens
agtataagaaacaattagcctcctccctcacccaggtttacttctggaaaggttgaacaacagagtctctgtattcttcaacaccaggcacagctgaggaygtattaaagatggaggttaatattatatacggggattttacatactgaatgtgagaactccaccccccttttcttttcagctctgagtaggctgacaatc

SEQ ID NO: 119728 - DNA, 201 bp, Homo sapiens
atactaagtgaagtgggacttcattgtggttttgacttgcagtttcctaatgactaaggatgttgagcatcttttcatgtcctttgggcctttttttttttaatcattcaagaaatgtctattaaagtcctttgcctatatttgaatatgtttggttttttcgttgttgagttgtagttctttatatcttctggatattaa

SEQ ID NO: 119729 - DNA, 201 bp, Homo sapiens
tctagtgtctttccatcctttttcatctatgttcatagagaaatgctgtacttactttatctctttaatatggcttacacaggtttctaacttctagctaygattttaacattttaagagtttcacccatctatttgggttcttgtattttatatattctcaaatatacagcagatgcaaattatagaagcgaactctccc

SEQ ID NO: 119730 - DNA, 201 bp, Homo sapiens
cgaaatactagttttaaagaagtttgacaaagtaaaatgacaatatccagataagacatgggcattctaaagtgtcttttagtttgtgagatctgactttwaaaaaaattgcctctgaggttaacaaattgaagtgatgtgaacaccaattagtaaattaaatcatctctatcactatatgttggctggtctccctatatg

SEQ ID NO: 119731 - DNA, 201 bp, Homo sapiens
tagagtgtaattcatttacattcaaggtaggtattgaaaggtaaagagttattactgccatttatttatttatttatttatttatttatttatttatttawgacagggtcttgctctgtcacccaggtcagagtgcaggggtgtgatcataggtcactataaccttgaactcctgggttgaagggatcaacctcagcctcc

SEQ ID NO: 119732 - DNA, 201 bp, Homo sapiens
accagtaatattcattgagccttcaatatctgctgagaatgaaatggtggcctgatgtggtgatattcacctgtagccccagctacttgggaggctgagayggaaggatcacttgagccgaggaggttgagggttgagaatgaagtgagtcataattgtgccattaaactccagcatgggcgagagagagagagagatcct

SEQ ID NO: 119733 - DNA, 201 bp, Homo sapiens
ccttgaggcctttctatgtttgttatgcactgcactgtaatttaaatatttttcttttggatcttattcactagattgtgaagcgatgctttctccaaaamatttctttcaagttttagagcaacaaatttacagcagattcagatggcaatacttgaaagtagtaacttttaggtaacattatagtggttgcttcttatt

SEQ ID NO: 119734 - DNA, 201 bp, Homo sapiens
ttatggactgaatgtttgtataccaccaaattttttatgttgaagccctaacccccagtgtggttatatttggagatggggcctctaaggaagtaattgcrgttaaatgaggctgtaagggccttccttatctgataggattagtgttcttataagaagagacaccagaaaacttcattgctctctctccctgttcctctc

SEQ ID NO: 119735 - DNA, 201 bp, Homo sapiens
gaccacgcccacccagcattgtgaattattttctagttgttgtgtaggtactttgtttctttatttctcttgctgtcttcctttgtgatttgatggtttcytgtagtggtatgccttgaggcctttctatgtttgttatgcactgcactgtaatttaaatatttttcttttggatcttattcactagattgtgaagcgatg

SEQ ID NO: 119736 - DNA, 201 bp, Homo sapiens
gcaatacttgaaagtagtaacttttaggtaacattatagtggttgcttcttattcatctgcttccctcagcctgaattctaatagtgcaagagcactgacytcattatagtttaattattagcccatttacagaagtatagaaaacgagttgcctttttcgcctacagttaatctattcaggaaaagaatgaaacatatag

SEQ ID NO: 119737 - DNA, 201 bp, Homo sapiens
tatttttgggaagacttttacttttaaatttaattttaaaaatgagtataggagtattcacattttctgtttctgagtcagttttagtaattagtatcttycaataaatttgtccattcaagtttttgaatttattggcataatgttcaaaatattctcttatttctttaagtgtctgtaggatttgtagtgatatgccct

SEQ ID NO: 119738 - DNA, 201 bp, Homo sapiens
ttacagattttggaaagccccatgtcttatgtattgattttcagatatattattggatgagagtgaatattataaaatttattctctagtttcctggagamaaggaaatctctgtcaatttaaacagcaaagggaaaataaaaaagtctttttgaaagataaacatgatcatttgttagcaggaaaaatactcaataagag

SEQ ID NO: 119739 - DNA, 201 bp, Homo sapiens
gtattctgttgctcttgaatgggatattctgtacaggaataccttattttattgtgctttgctttatcgcactttgcaaatattctgggttttttttttttcataaattaaaggtttgtggcaaccctgtgtcaagcaagtctattgtcaccatttttccaatactatgtactcacttcatgtctctgtgtcagcattttt

SEQ ID NO: 119740 - DNA, 201 bp, Homo sapiens
gtttttgtcaggtttgtcaattagttgttctgcaggtttttgtttaattcttttaaaatttttgtttattgtctgcttgtcttggttgtatttgtcttttyaattgatttgtatgggcttttaaatatatagtgtggatagtaatcctttataatacatatcattaaaaccttgttgtttgtcattaaattctttaatttc

SEQ ID NO: 119741 - DNA, 201 bp, Homo sapiens
tttgttacgtagtatatattacatatatacccagtatcaactgagtatatatgtaaacatttccaccatagagaacactactatgttttctccaggctctyaaaaaaatcgtaattattgggccgagcgtggtggctcactcctgcaatcaggtgttgtacagagctcaacccctgtaaaggggttgatactgtagtatat

SEQ ID NO: 119742 - DNA, 201 bp, Homo sapiens
aacccacagaactcactttaaaaaggtaaattgtaagcatgtgaattatagctcaataaagctgttaattttaattcaattcaattcagttaattaaattmaaaaattaattagagctgttaaataatatatatattatatttttattatattatatattttatagttatttttattggattaaggaaatttgccctaatt

SEQ ID NO: 119743 - DNA, 201 bp, Homo sapiens
cattttctttatttcattaatcactcactatattctcacttttccccatgggaagaattgtgggctaatggaggctctcttggcactgagctgtacttccrtggggcaggggtgatgtaggtaatatgaaactatactttttgccctcttcaatgcatctgttcttggattttttgctccaatggggtcctggaacttctc

SEQ ID NO: 119744 - DNA, 201 bp, Homo sapiens
acacaataatgtagagctgatatttggttggccatagtgcttcagaagttttatttaagacctagaatctgttgcttatgtaattgcatttgcaatattgkcctatagtgtgaattttaaaatgaaatatcttgcctgctgttgttaaatctattttgccaaatgttttacaagaaaattcttttatcttatagatggatt

SEQ ID NO: 119745 - DNA, 201 bp, Homo sapiens
taatgactaaggatgttgagcatcttttcatgtcctttgggcctttttttttttaatcattcaagaaatgtctattaaagtcctttgcctatatttgaatmtgtttggttttttcgttgttgagttgtagttctttatatcttctggatattaatcttttatcagccatatgctttgcattctgtgtactatcattttaac

SEQ ID NO: 119746 - DNA, 201 bp, Homo sapiens
cttaaaccaggcccttggtaggtaagtggagtgaaatttaatataatattatctgtgacagggctatatatataaatctagtcttgctactttactctttrtaataaacttggtaaaattttatttaactggaaccataggaactggtatgtattcaatgatagctgtcacaagtagaatttgaaaagagtaagaagaata

SEQ ID NO: 119747 - DNA, 201 bp, Homo sapiens
ctcaacaaggtaggaatagaaggaaatttaatataataaaggtcatatgtaagaagctcgtagcatactcagtggtgcaaactgaaaggttttcctctaasatcagaaacagggcaaggatgcccactcttgccatttctgtataacgtagtactagaattcctagccagagcagttaggcaagaaaaaggaataaaagtc

SEQ ID NO: 119748 - DNA, 201 bp, Homo sapiens
atatatgtgccacattttctttatttcattaatcactcactatattctcacttttccccatgggaagaattgtgggctaatggaggctctcttggcactgrgctgtacttccgtggggcaggggtgatgtaggtaatatgaaactatactttttgccctcttcaatgcatctgttcttggattttttgctccaatggggtc

SEQ ID NO: 119749 - DNA, 201 bp, Homo sapiens
ttgagcatctttccatatacctgttaaccatttgtatgtcttctttggagaactgtctattcatgtcctttgcctgtttttcaatttttttttaatattgrgtttcttaatatattttggatattaaccccttatcagatatatggtttgcagatattttttctcatcctttaggttgcctttccactcttttttttccct

SEQ ID NO: 119750 - DNA, 201 bp, Homo sapiens
atcatattggctttctttcagatcctcaaacaagcaaaatttgctaaccacctcaggacctttctcctagctgttccttctgcttggatatttcttttcttctgattctcccatgactggatactttttgcattcagttattagaataaatgtcacctcagggagagcattcttgacattaaaattaaagttgcaactagg

SEQ ID NO: 119751 - DNA, 201 bp, Homo sapiens
atatggtttgcagatattttttctcatcctttaggttgcctttccactcttttttttccctttactttgcagaaaccttttagtttgttgtggtcccaatmgtaggttttacttttattgcctgtgcttttatgtcatatgcataaaatcattgttaaatccaatgttacaaaaattttctcctgtgtttttttctaagag

SEQ ID NO: 119752 - DNA, 201 bp, Homo sapiens
aatcatattggctttctttcagatcctcaaacaagcaaaatttgctaaccacctcaggacctttctcctagctgttccttctgcttggatatttcttttcttctgattctcccatgactggatactttttgcattcagttattagaataaatgtcacctcagggagagcattcttgacattaaaattaaagttgcaactag

SEQ ID NO: 119753 - DNA, 201 bp, Homo sapiens
aaatcatattggctttctttcagatcctcaaacaagcaaaatttgctaaccacctcaggacctttctcctagctgttccttctgcttggatatttcttttcttctgattctcccatgactggatactttttgcattcagttattagaataaatgtcacctcagggagagcattcttgacattaaaattaaagttgcaacta

SEQ ID NO: 119754 - DNA, 201 bp, Homo sapiens
ctgctcattaaccacacatgtggtcactcaagaactctatggagatgtacaaggagattaatgttgttttcatgcttgctaacaaaacatccattctgcakccaatgaataaaggagtaatttctacttccaagtctcattacttaagaagtacatttcacaaggctataactgctatagatagcgagtcctctgatgcat

SEQ ID NO: 119755 - DNA, 201 bp, Homo sapiens
ccagccaacagtttgaaatcttacatttaagtctaatccattttgagtgaacttttgtgtattgtgtaagataaaggtccagttttattcttttgcatgtrgatattgtttgccctgaactatttgttgaagagactgtcctttccccattatgtatttttggcacccttgctgaagatcagttgatcatacatgtgtgga

SEQ ID NO: 119756 - DNA, 201 bp, Homo sapiens
tactaaatagtattcatttgtgtgttcttttcaatttttaaaattgtggtaaaatacacatgacataaaatttaccttttaagcatttttaagtgtacaayttagtgccatcgagtacattcatgatgttgtacaaccatcaccagtatccctttccaaaacttttcaatcatcccagtcagaaactgtactgatggaaca

SEQ ID NO: 119757 - DNA, 201 bp, Homo sapiens
caaatcatattggctttctttcagatcctcaaacaagcaaaatttgctaaccacctcaggacctttctcctagctgttccttctgcttggatatttcttttcttctgattctcccatgactggatactttttgcattcagttattagaataaatgtcacctcagggagagcattcttgacattaaaattaaagttgcaact

SEQ ID NO: 119758 - DNA, 201 bp, Homo sapiens
cttgagttcaggagttcaagaccagcctgagcaacatgacaaaaccctgtctctacaaaaaaggagccatatgtggtgatgcacttgtggttccagctacytggtggctgaggcacaagaattgcttgaacctgggaggcggaggttgcagtgaaccaagattggatcgtgccactgcaccccaggtgacagagtgagact

SEQ ID NO: 119759 - DNA, 201 bp, Homo sapiens
tgttgttttcatgcttgctaacaaaacatccattctgcatccaatgaataaaggagtaatttctacttccaagtctcattacttaagaagtacatttcacraggctataactgctatagatagcgagtcctctgatgcatctggacacagtcgattaaaaaccttctggaaaggattcaccgttctagatgccattaagaa

SEQ ID NO: 119760 - DNA, 201 bp, Homo sapiens
gcaaatcatattggctttctttcagatcctcaaacaagcaaaatttgctaaccacctcaggacctttctcctagctgttccttctgcttggatatttcttttcttctgattctcccatgactggatactttttgcattcagttattagaataaatgtcacctcagggagagcattcttgacattaaaattaaagttgcaac

SEQ ID NO: 119761 - DNA, 201 bp, Homo sapiens
acttcctacaggcatttgaaagtgctggcaatctgagaaaatttgagattttctgaccactgagctgacttattgattatgacctatatccctccccctasgatacagtcagttagggtctcataccaaagcaggagttctttcattagaatagttatctttttaattgttaatactttactaggtactgtgaattagata

SEQ ID NO: 119762 - DNA, 201 bp, Homo sapiens
ccaaagcaggagttctttcattagaatagttatctttttaattgttaatactttactaggtactgtgaattagataatttttcttttatttttctagtccrtagcagtctttaggtaacattaacagtaataagcagtatttcttttggtagcccttactcttccgtaacctctggacctcttcaaaatttctgaaagtcc

SEQ ID NO: 119763 - DNA, 201 bp, Homo sapiens
tcaagaagctattcacagtttcttgccatgtggccttttcacaagccccctcgtatcatgacagtatacttccagaggccaataggaagctctctagcccyagtcagccaatacagagtcttacacaacttaataaaattgtgaggaaaaaaataaaattaaaaaatcatgggaataacttcccatcatttttgctatata

SEQ ID NO: 119764 - DNA, 201 bp, Homo sapiens
caattacttgggagcaactacggcatttggtagttgggaacctagaatgctactcctatgtaactaagaattgtgctttccaaatgccagagtgttcctgytgagaaatgtgactatgaacagcagtgaaggaagaatacatgttccacgttttcaagttgctttctttagagacacagataaatatgggaagttggtaaa

SEQ ID NO: 119765 - DNA, 201 bp, Homo sapiens
atgtttgtatcctaagacgaaatctaattagcctcattgattcattcttgataagtttgcctggccttctgaggccagtatcctacataagtatcaggtakgtttatgtgtgatctttaaataatttttactaattttagagaaatacattaagagtaacataagattattaataatatatttaaaaaatatttcacctgc

SEQ ID NO: 119766 - DNA, 201 bp, Homo sapiens
gagtgcaatggcgtgatctcagctcaccgcaacctctgcctcctgggttcaagtgattctcctgcctcagactcccaagtagctgggattacaggcatgcrccaccacacctggctaattttttgtatttttagtagagacggagtttctccatgttggtcaggctggcctcgaactcctgacctcaggtgatcggcccac

SEQ ID NO: 119767 - DNA, 201 bp, Homo sapiens
aaaatacatagagctgttttggcctttgagaacaactagccagttaaacttctagttcaccttaaacttcattttggttctgtgtttacagattagaaaaygtcattgctttggaacagaagtacacaatttggatgcaaaagttgattcaggaaagactgtaaaactcaactctccactggaaaagataaactccttttc

SEQ ID NO: 119768 - DNA, 201 bp, Homo sapiens
tgcttgaacctgggaggcggaggttgcagtgaaccaagattggatcgtgccactgcaccccaggtgacagagtgagactcccatctctgaaaaaaaaaaaaggtaatagaatggcaaagggcattagtagataacataaaagaagaaacacaaattactattgaaccttgttagactattcatacaacactatgttaaact

SEQ ID NO: 119769 - DNA, 201 bp, Homo sapiens
gaggctgaggcatgagaagtgcttgaacccatatgtatatatgtatgtgtatgtacacacacatacacacacacacacacacacacacacacacacacacmtatgtatatagctgcctcaaagtcttttatccctgatataatttatatattttatgtatggttgttttttgttaaggatagcaaactaggaaaaataaat

SEQ ID NO: 119770 - DNA, 201 bp, Homo sapiens
ggaggctgaggcatgagaagtgcttgaacccatatgtatatatgtatgtgtatgtacacacacatacacacacacacacacacacacacacacacacacacatatgtatatagctgcctcaaagtcttttatccctgatataatttatatattttatgtatggttgttttttgttaaggatagcaaactaggaaaaataaa

SEQ ID NO: 119771 - DNA, 201 bp, Homo sapiens
tgcgtgcttgtaatcccagctacttgggaggctgaggcatgagaagtgcttgaacccatatgtatatatgtatgtgtatgtacacacacatacacacacayacacacacacacacacacacacacacatatgtatatagctgcctcaaagtcttttatccctgatataatttatatattttatgtatggttgttttttgtt

SEQ ID NO: 119772 - DNA, 201 bp, Homo sapiens
tgagattcaaatatacaaacatttcataaagtggaatggcctcatcagaggttagattacaacaaaactattcagattataaaactattcagaataggccrggtgcagtggctcacacctgtaattccatcacttggaggccgaggtgggtggatcacttgaggtcaggagttggagaacaacctggccaacataatgaaa

SEQ ID NO: 119773 - DNA, 201 bp, Homo sapiens
gcatggtgatgcgtgcttgtaatcccagctacttgggaggctgaggcatgagaagtgcttgaacccatatgtatatatgtatgtgtatgtacacacacatwcacacacacacacacacacacacacacacacacacatatgtatatagctgcctcaaagtcttttatccctgatataatttatatattttatgtatggttg

SEQ ID NO: 119774 - DNA, 201 bp, Homo sapiens; identical to SEQ ID NO: 20396

SEQ ID NO: 119775 - DNA, 201 bp, Homo sapiens
gtgtgtgtatatatatacaatttaatttattatacagacgtatacaaatacaatttaattttacacacacacacacacacacacacacacacacacacacmgaaagagagagacatttcatcctgccttggcttctcaaagtgttaggattataagcatgagccagtgcgctcagcctgtaatgaaatcttttatttccag

SEQ ID NO: 119776 - DNA, 201 bp, Homo sapiens
gagtgcaatggcgtgatcttggctcaccacaacctccacctcccaggctcaagcgatcctcctgcctcagcctcccgagtagctgggattacaggcatgcrccaccacgcccagctaatttgtatttttagtagagatggggtgtctctatgttggtcaggctggtctcgaactcccgacctcagaagatccgcccgcctc

SEQ ID NO: 119777 - DNA, 201 bp, Homo sapiens; identical to SEQ ID NO: 20397

SEQ ID NO: 119778 - DNA, 201 bp, Homo sapiens
ttctccttttggataattcatagataaaaatacatgtaaagattatatatatgcatatatatgtgtgtgtatatatatacaatttaatttattatacagaygtatacaaatacaatttaattttacacacacacacacacacacacacacacacacacacacagaaagagagagacatttcatcctgccttggcttctcaa

SEQ ID NO: 119779 - DNA, 201 bp, Homo sapiens
ttctctctatgcctcgtttccttatttataaaataagagaattggactagagagagatctgaaagtcatttttttctgttctgtattttaatgtttgtaarttctccaactccttacagttctttcaggattcttagggcaacagttctcaaggagtagtccaaggagttctagatattgagatttttttggggagtgatc

SEQ ID NO: 119780 - DNA, 201 bp, Homo sapiens
gagacctttataaagttaatatgtttattattttcattggtttctgtgttcatagattctcagaggattaaacagcaagcaacattgtttgttggagagtsccacaggaagtggaaaaagcttagccttactttgttctgctttagcatggcaacaatctcttagtggtaagtagttgcttgatatcttcaggttacttac

SEQ ID NO: 119781 - DNA, 201 bp, Homo sapiens
tgaacccaggaggcagaggttgcagtgagccaagatcgcgccactgcactgcagcctgggcaacagagcaaggctcttgtctcaaaaacaaccaaccaacmaaaaacatacattggtaaaatacattggtaaaagcaatgataaagtgtaagattgtgtattgaaggcagacagtttcattttgtgtaacctagaatccta

SEQ ID NO: 119782 - DNA, 201 bp, Homo sapiens
gaataatattccattgtgtatatgtgtcacattttctttatccattcatctgttgatggacatttaggttgatgccaactccttgtctattatgaatagcrctgcaataaacatggtgttggctgggtgtggtggctcacaccagtaatcccaacactttggaaggctcaggtaggagaatcactcaggccaggagtttga

SEQ ID NO: 119783 - DNA, 201 bp, Homo sapiens
gcaaggcaaaataaatgattttccaaaattgatgttatttgtagccattattgttaattatatgttagaattctataaaacaatgtttgtatcctaagacraaatctaattagcctcattgattcattcttgataagtttgcctggccttctgaggccagtatcctacataagtatcaggtatgtttatgtgtgatcttta

SEQ ID NO: 119784 - DNA, 201 bp, Homo sapiens
cctatggaagaagagaccatatagcctttgaagcttgaaatgtttactgtctggctcttttgctgactcttgctctaaagagtctattaattgaaagtttktgttttttatttttcccttgggggacataatatggatcttgttataacatatttgatttaaatgtcaactaataagttaaaacaatttttatgaagatca

SEQ ID NO: 119785 - DNA, 201 bp, Homo sapiens
cctttttgtatgttaagtaaatttttagtaaatttctcatggatttctagcattaaataatacatctaggttttcagagaacaaggactaattatttccawgaatgtaatataagaaaaaataatggggatatgagtagaggtaatttatttaaaaaatgggatttttgggtgtcataggggagtaaatatttttccttgt

SEQ ID NO: 119786 - DNA, 201 bp, Homo sapiens
tagagagtatttaaactccagaaaattttgtaaccagtgctcttgagcctcttgctcaagccccctcccactctgtggagtgtactttctttctttctttytttttttttttttaagacagagtctcgcttcgttgcccaggctggagtgcaatagcgggatctcagcccactgcaacctccgcttccctggctcaagtga

SEQ ID NO: 119787 - DNA, 201 bp, Homo sapiens
attcctttaagaacctctgattctatttactgctttcttacataagataatattttattttgttagttgttattgctagcaaaagtttattcacagttatygggctctcatatgtgactttaacaagaaaaactctagattgtaagatatttgaataaaataatatttagactaatatggtaccaatcatgcactcattct

SEQ ID NO: 119788 - DNA, 201 bp, Homo sapiens
aatgcctttgatattgaggatcttatttctacttatgtcagttaggttagattttgatgcagatatatatttatttgtctaaaaactatcatagtaagggwgctttacatttggtacaaacttgaccttcaattatgaaatgataaatttttgtgaatctatgcagcatctgaaccaatgggttgcaaactcaagcagcta

SEQ ID NO: 119789 - DNA, 201 bp, Homo sapiens
actctcttgtttatgggatttattttcatgcatgtatgaggtcaggctctaattgcatattttcccaaatagttgatcagttgtcccagtgtcacttaatmatttttccagttttgaagttttgctgttatcatgtactaaattgttatatgtacttggattggttcctggacttttttttctctttaatttttttttttt

SEQ ID NO: 119790 - DNA, 201 bp, Homo sapiens
acttccataatgtaaaatgtctgtctcattaggcattaaggaagcattggtcaacaggtataatgttgttagattataaggtaatgtgaatgtgggcatgrcctcccaaatagatcaaagactaatctctttgacagttagaagatggcagagcttgccttgggccttttgctggtggtgcacattgaaactatttgtttg

SEQ ID NO: 119791 - DNA, 201 bp, Homo sapiens
tttcatgtgcttattagtaattcagacatcttctttagagaaatgcctattcaaattctttgcgcatttttgcattgagtcatttttagtatattcacaamgttgtgtaatcatcaccactgtctaattccagaatatttttctgaccccaaaaagaaactcctaactcattaacagtcactgcctactcttacctgctat

SEQ ID NO: 119792 - DNA, 201 bp, Homo sapiens
ctttagatttaagataagtttcttataaataattgtcttctttatttatccaatctgacaacctcttctttttaattggaacacttatactatttacattyagtgtaattatcactgtggttactatttgttttctgtttgttccaacttttctttattccccttttctgtcttctttgaattaattaaacatgttttagg

SEQ ID NO: 119793 - DNA, 201 bp, Homo sapiens
agatttaagataagtttcttataaataattgtcttctttatttatccaatctgacaacctcttctttttaattggaacacttatactatttacattcagtktaattatcactgtggttactatttgttttctgtttgttccaacttttctttattccccttttctgtcttctttgaattaattaaacatgttttaggattc

SEQ ID NO: 119794 - DNA, 201 bp, Homo sapiens
atcaacacattttgaacactggaaaacagccgaatgactgaatgacttagcaggcaagagaaagctgaaatttaaatctacattgatgatagtcaacaagmactttcagatttatgcatgaaaaagcctaggatttggagcaatctaaaatgtcaatgaaagtaaggtttaaaaacaggtggcttggttgcaaattagtat

SEQ ID NO: 119795 - DNA, 201 bp, Homo sapiens
tgctcttgaccgctgtgatttataagactaggaaattattttgtttccatttgttttgtttatacttttattaattccagtttctgtttccagatttctcycttagttttggttctctggttttctttgtaaggcgtgtctcaatatttgacattttcatttctgttgtagttaggaatctgaaataaacaggaaagcact

SEQ ID NO: 119796 - DNA, 201 bp, Homo sapiens
acaactgcgaaactccgtctcaaaaaaaaaaattctatttttatctctgctttcagcaattcaactaaggtgtgtgtgtgtgtgtgtgtgtgtgtgtgtgtgtgtgtgtttattgtgtgcttggggtcattgagctttttggatctatggttttatagttttcatcaaattatgaacaatttgagccatttaaaaatattt

SEQ ID NO: 119797 - DNA, 201 bp, Homo sapiens
aacaactgcgaaactccgtctcaaaaaaaaaaattctatttttatctctgctttcagcaattcaactaaggtgtgtgtgtgtgtgtgtgtgtgtgtgtgtgtgtgtgtgtttattgtgtgcttggggtcattgagctttttggatctatggttttatagttttcatcaaattatgaacaatttgagccatttaaaaatatt

SEQ ID NO: 119798 - DNA, 201 bp, Homo sapiens
gcaacaactgcgaaactccgtctcaaaaaaaaaaattctatttttatctctgctttcagcaattcaactaaggtgtgtgtgtgtgtgtgtgtgtgtgtgtgtgtgtgtgtgtttattgtgtgcttggggtcattgagctttttggatctatggttttatagttttcatcaaattatgaacaatttgagccatttaaaaata

SEQ ID NO: 119799 - DNA, 201 bp, Homo sapiens
gaagcattggtcaacaggtataatgttgttagattataaggtaatgtgaatgtgggcatgacctcccaaatagatcaaagactaatctctttgacagttasaagatggcagagcttgccttgggccttttgctggtggtgcacattgaaactatttgtttggaaagcatgcctgagagataagaatgtgtttataaggatg

SEQ ID NO: 119800 - DNA, 201 bp, Homo sapiens
atgtttcctaaggaaccataattaactttttatttatttttccattgcttagttttctatttttctaccccccccaacccagctgccaatgtgtaggtaasctaactggaattgagctcggagtactctaataattgaatatgtaggatttcatttagcccttctgtttttagtacagcgcctcacctttagtagtttata

SEQ ID NO: 119801 - DNA, 201 bp, Homo sapiens
agtctgaggcaggagaatcacttgaacccaggaggcggaggttgcagtgagctgagatcactttgggcaacaactgcgaaactccgtctcaaaaaaaaaaattctatttttatctctgctttcagcaattcaactaaggtgtgtgtgtgtgtgtgtgtgtgtgtgtgtgtgtgtgtgtttattgtgtgcttggggtcattg

SEQ ID NO: 119802 - DNA, 201 bp, Homo sapiens
ggcaaagtctatgtcctttatatgtcctttatattctagttgtaaagtttcattttagaaatttgacagattcttttgagggaatgtaaaataaaaagggkggggttttgggtttttagattttggccaggcacagtggctcacgcccgtaatcccagcactttgggaggccgaggcgggtggatcacgaggtcaagagat

SEQ ID NO: 119803 - DNA, 201 bp, Homo sapiens
tatgtatatgttgttgtgcaaccaatctcaagactttctcctcttgaaaaactgaaactctgttcccattaaacaacagctctctattctccccctctccycagctcctggtaactaccattctgctttctgtttctatgaatctgattactataaatacttcatataagtggaatcataaaatatttgtcgtttttgtga

SEQ ID NO: 119804 - DNA, 201 bp, Homo sapiens
ctggagtgcagtggcacaatcttgggtcactgcaagctccgcctcccaggttcacgccattctcctgcctcagcctccctagtagctgagactacaggtgyccgccaccttgcccagctaattttttgtatttttagtagagacgggatttcaccatgttagctaggatggtctcgatctcctgaccttgcgatccgcctg

SEQ ID NO: 119805 - DNA, 201 bp, Homo sapiens
ggctagccttgaacttctggtctcaagtgatcctcctgccttacctctcaaagtactgagattacaggtgtaagccaccactcccagccccattttttttwaatttaatttttattttaagttcaggggtacatgctcaggtttgttatataggtaaacttgtgtggtagtggtttgttgtacagattattttgtcaccca

SEQ ID NO: 119806 - DNA, 201 bp, Homo sapiens
cttttttgtgaaaaccagttccttcatatggaaggaaaaagaatgggagactagatttaatgatgctttatttatttatttatttatttatttatttatttatttatttattttttgagagggagtctcgctctgtcgcccaggctggagtgcagtggcgcgatcggctcactgcaagttccgcctcctgggttcacaccg

SEQ ID NO: 119807 - DNA, 201 bp, Homo sapiens
caaaatgaagtgtagagtgaaaaaaaagagggtcagtgacatgtggagtaatataaagtagtctaatatagttgtaattggagtctaagaagaagagtttygaggcagaataatatatatatttagagaaataatggctgaaaatttttcaagtttgatagaaactataagcccacaggtccaagaagcttaataaaaacg

SEQ ID NO: 119808 - DNA, 201 bp, Homo sapiens
acttttttgtgaaaaccagttccttcatatggaaggaaaaagaatgggagactagatttaatgatgctttatttatttatttatttatttatttatttatttatttatttattttttgagagggagtctcgctctgtcgcccaggctggagtgcagtggcgcgatcggctcactgcaagttccgcctcctgggttcacacc

SEQ ID NO: 119809 - DNA, 201 bp, Homo sapiens
gaaaagaattcgacccttagaaactacacagcaggtaaacagagtttattggcagtaaataacccagttagttacagctgaacatggtagtcaagtatcaygtttttaatgcacttgtggagattagttgggtcatgtgacagccataaattaataatttgttgtaatttcattttgtagagttacttgttacaaaggagt

SEQ ID NO: 119810 - DNA, 201 bp, Homo sapiens
aaagttgaaagaactcattgctagcaaacgtgcactactaatattaaagaaagttcttcaggtagaaggaaaatgataccagatggaaatttaaatctacrtgagaaaatgaagagtgccagaaatggtaaatctgtgggtaaatacggtatattttaaaagataatcttttgggacaaaacagaaatctgaataaaatac

SEQ ID NO: 119811 - DNA, 201 bp, Homo sapiens
cagttttcttcctgtactagataattggaatgggtgatttactcaaaactttactctttcactgagtaaaaactaatattcttttgatgtaaactgcagcatttgtttaagggtaagagtgagaacgttgttcatctagtttttttccccacattctttcagaccaatagtttatggtaactaggaggaatgccattcttc

SEQ ID NO: 119812 - DNA, 201 bp, Homo sapiens
aacttttttgtgaaaaccagttccttcatatggaaggaaaaagaatgggagactagatttaatgatgctttatttatttatttatttatttatttatttatttatttatttattttttgagagggagtctcgctctgtcgcccaggctggagtgcagtggcgcgatcggctcactgcaagttccgcctcctgggttcacac

SEQ ID NO: 119813 - DNA, 201 bp, Homo sapiens
agagacaggtacaacctgttttgctttcaaagaattttcactctaagagaatttagtgatctgcctaaagcaaaacatttataaattaaatctgtatacarttaattgaaggtaatagaaaaccccctgacaatttaaaaataaattgttaaacttgttgcttgatcttttatgtacatacttccaaataaatactaattt

SEQ ID NO: 119814 - DNA, 201 bp, Homo sapiens
agatggaaatttaaatctacgtgagaaaatgaagagtgccagaaatggtaaatctgtgggtaaatacggtatattttaaaagataatcttttgggacaaarcagaaatctgaataaaatacatagattatttaatactaatgtactaatgttaatttcttaatttgacatgagctatagtaatataagatgttaacattag

SEQ ID NO: 119815 - DNA, 201 bp, Homo sapiens
attttcatgagtccaatttatctcatgaagtccattttttatcaccagtgcttttggaaaagttttatggttttagcttttatatttaaggttttgatccmtgtagagttaatttttccatatattataatggtgcaacttcattgtttgtgtgtagatatccaggtttccctgcaccatttgttgaaaaaactgttcttt

SEQ ID NO: 119816 - DNA, 201 bp, Homo sapiens
taacttttttgtgaaaaccagttccttcatatggaaggaaaaagaatgggagactagatttaatgatgctttatttatttatttatttatttatttatttatttatttatttattttttgagagggagtctcgctctgtcgcccaggctggagtgcagtggcgcgatcggctcactgcaagttccgcctcctgggttcaca

SEQ ID NO: 119817 - DNA, 201 bp, Homo sapiens
tgaaggtaatagaaaaccccctgacaatttaaaaataaattgttaaacttgttgcttgatcttttatgtacatacttccaaataaatactaatttccatgmctttttcaggcataactctaataatgacatattcatattctaggtttgggttggtaccattgggtcaggccccaagggtcggaatctctgtgctaccttc

SEQ ID NO: 119818 - DNA, 201 bp, Homo sapiens
aacatgtatgaatcttttaaagaaagatgcttttgaggtttagtgaagtaggcacacatcagggcagtaaaaatgtcagattctccttgttactcagtgartctggagtaggagaagcagtcaccatcctggggtacttcatgatctgtgttgatgatctgctattttgaccatagttcctcagccttcttgaaacttacg

SEQ ID NO: 119819 - DNA, 201 bp, Homo sapiens
gtgagagcagtctgttttcctattcagtcatctcattaacctgtatgattgatttgactggccttactggatagtctgtccagttccctttcttccttggygctttttggtgcatttttcccagagggcacataactggatctattagtacgacaaaaatcttatcaaattgagtaaaatgattctgcaagccctgaaaaa

SEQ ID NO: 119820 - DNA, 201 bp, Homo sapiens
tttgggaggccaaggtgggcagatcacttaaggtcaggagtttgatagcaacctggccaacgtggtgaaaccccatctctactaaaactacaaaaattagytggatgtggtggcaggtgcctataatcccagctacttgggaggctggggcaggagaattacttgaacccgggaggtggaggctgcagtgagccgagatca

SEQ ID NO: 119821 - DNA, 201 bp, Homo sapiens
aaaagagaatgaaattgaggcaggagaatagggtctggaggcagggaacctaaggccgattcacactgacttcctaaaactgaatcaaaaagaaaaactcrcctctccacccccaagtaacaaaaggatcagaggctactctgtttgcaacaccctgcctttctactgaatggcaggttaaagaatggaaagtacctctcc

SEQ ID NO: 119822 - DNA, 201 bp, Homo sapiens
tctttaattcaactgtaaattattttgatgtaaggtgggagataggatctaatttttttccccaaatagtcattcatctaaatattagttgaataatttcycccacagatttgaaatgccacctgatttaaacagggtggtttgctttttttttttttaatttttaattttggtgggtacatagtaggtgtatatatttat

SEQ ID NO: 119823 - DNA, 201 bp, Homo sapiens
acactgtatctgatcccctacctgctgattgacatcttgaatgagctctttgaagcaagttccagcttaattaaaacgtttgcttggttagcagtgatctrtgaaagcctgtgataaatattgaatcaggttcacctgctggttgctgtgagtggataaacagctgctttgtgcagtctaatcatgaaacggtggcagtag

SEQ ID NO: 119824 - DNA, 201 bp, Homo sapiens
ctatcttactagagtgtgtgctaatgtgagattttgcacaacgggcattcagtacctgtttagatggcttggacaacagcaaatggttgataaagattaamaaacccttttttatgtctcaaagtttgtagtataattctatgttcattggccttttaccactagctcttcatatgcatgactttttgaaataaagggcag

SEQ ID NO: 119825 - DNA, 201 bp, Homo sapiens
ctgagtaggtggtattacaggcgtgcactaccacgcctggctaatttttgtatttttagtagagacagggttttaccatattggccaggctggtctcaaastcctgacttcaattgatgtgcctgcctcggcctcccaaagtgctaggataacaggcgtgagccactgtgtccaaccaaatgtttttggcttatttctctc

SEQ ID NO: 119826 - DNA, 201 bp, Homo sapiens
gagtttattgccaaaacttttggataaagtaattgaaaaaaaagtagtccatatattagaacttttcttatgctgacagatcatatgcctcactttttttwatatttttttatttttgcttttttcttcagaccaaaatgcctcacattttatctgttgtattttaatctagaccttgtaataatcttgaataaggtaaat

SEQ ID NO: 119827 - DNA, 201 bp, Homo sapiens
tgagtttattgccaaaacttttggataaagtaattgaaaaaaaagtagtccatatattagaacttttcttatgctgacagatcatatgcctcacttttttwtatatttttttatttttgcttttttcttcagaccaaaatgcctcacattttatctgttgtattttaatctagaccttgtaataatcttgaataaggtaaa

SEQ ID NO: 119828 - DNA, 201 bp, Homo sapiens
gtgatctgtgaggtgaaaattatttttgtaataatattaagatgttgtaggccaggcgtggtggctcacgcctgtaatcccagcactttgggaggccaagrcgggtggatcacttgagttcacgagtttgaaaccagcctgggcaacatggcgaaaccctgattctacaaaaaatacaaaaattagccgggtgttgtggtg

SEQ ID NO: 119829 - DNA, 201 bp, Homo sapiens
gagttcgagaccagcctgggcaacatggtgaaatcctgtctctacaaaaagtacaaacattagcagggtgtggtgcatgtgcctatagttccaactacttrggaggccgaggtgggaggattacctgagcccaggaggtcaaggctgcagtgagctgtgattgtgccactgcactccagcctggctgacagagtgagaccc

SEQ ID NO: 119830 - DNA, 201 bp, Homo sapiens
tgttataacatatttgatttaaatgtcaactaataagttaaaacaatttttatgaagatcatacttaggaatattttgtaattgcattcataaaataatakaactaactttaaacaattccttggtttatgagtgaaaatggtgtgataaactccaagaactacactttgtagaacaatttaagaatgaagctctctttgt

SEQ ID NO: 119831 - DNA, 201 bp, Homo sapiens
ttcatattactttacaacttaaaaaaacaaacaaaaacatttaatataaagttagctgtggtttataatattctgaattatggagtgaaaaaacagatttmaagtcctaactaaagtcactctagtgagaaaagttttctgagactagttcttgatcttttgcttttgttagtaccactactagtgtaacatttaaagata

SEQ ID NO: 119832 - DNA, 201 bp, Homo sapiens
aaagcagatagtttatttaggctgtctgggcaaagtttgaattttcttaattgaatgagaaatataatgattatcccacctcataattctgataaatacamacccctcttttaaaagttatactaaattattaactttcaaaagatgtcattggtggttttgaaattttccagggaaattagaataatatgaatttgggct

SEQ ID NO: 119833 - DNA, 201 bp, Homo sapiens
tattgcctgttagaaatagtctttttttggatgcaggaaaaaaatacatagagctgttttggcctttgagaacaactagccagttaaacttctagttcacsttaaacttcattttggttctgtgtttacagattagaaaacgtcattgctttggaacagaagtacacaatttggatgcaaaagttgattcaggaaagactg

SEQ ID NO: 119834 - DNA, 201 bp, Homo sapiens
tgttagactctaagacatgctcttgaccgctgtgatttataagactaggaaattattttgtttccatttgttttgtttatacttttattaattccagtttytgtttccagatttctcccttagttttggttctctggttttctttgtaaggcgtgtctcaatatttgacattttcatttctgttgtagttaggaatctgaa

SEQ ID NO: 119835 - DNA, 201 bp, Homo sapiens
ctcatagtcatagattctaaaggcactttagtgatcattttgtataaaggtaagctttcagaattgtatggaagaagcttggaatgaagaaatggtgaatrtcctattattaaactcagtctgtatcaaactgagagtatgaaagatgattgacacgtttttacctgaatcacagaattttagagctggaaggaattttag

SEQ ID NO: 119836 - DNA, 201 bp, Homo sapiens
acagtttcttgccatgtggccttttcacaagccccctcgtatcatgacagtatacttccagaggccaataggaagctctctagccctagtcagccaatacagagtcttacacaacttaataaaattgtgaggaaaaaaataaaattaaaaaatcatgggaataacttcccatcatttttgctatataatataacctaatta

SEQ ID NO: 119837 - DNA, 201 bp, Homo sapiens
tattctttaaaaaagcaatttacatgaatttaatcattctatacacgttattcaacatgtttttctcacttaacatagagagcctaatcaacacatagacraatctaaatcatttttaagggctaaagtttttgtattaatttaccataatttatttaacatgtcccttatgggtagacatttggttaattttcaattttt

SEQ ID NO: 119838 - DNA, 201 bp, Homo sapiens
tcccccagacccccacccccagacaggccccagtgtgtgatgttccccaccctgtgtccaagtgttctcattgttcaattcccacctatgagtgagaacayggggtgtttggtgttctgtccttgtgacagtttgcttagaatgatggtttccagtttcatccatgtccctgcaaaggacatgaactcatccttttttata

SEQ ID NO: 119839 - DNA, 201 bp, Homo sapiens
tctcacttgtgtatacaatatgcattaccaaagtcacttagtgtggctcgtttagctgtcaatgtcatgggaactttgttaacaggtatgtagccaatcamcatcaacaaacatctgacataaattattatagttcctatattttctgcatttagtgatgcaatatgttttttctgtcactctgagacagtatgatacaat

SEQ ID NO: 119840 - DNA, 201 bp, Homo sapiens
atccaagatacccaaaatatattttgggacacgcacacacaagcagattgctcagattactagagagctccggaggacggcatattcaggggttccaatgrctattctttccagcagggatcatacttgtgtccatcctgaggtagtcggtaacttcaacagaaatgagaagtgcatggaattgctagatgggaaaaacgt

SEQ ID NO: 119841 - DNA, 201 bp, Homo sapiens
aggctcccaaagtgttaagattacaggcgtgagccaccacacccagccactccccatcattttagaatggtattctgcatgtgtttttcttcaaactgagygattcaggtctatggttaagctacagagatcctgctccccttttttccctagaaatcccattttacttggaatcaagttgcactgaaggttattgaagca

SEQ ID NO: 119842 - DNA, 201 bp, Homo sapiens
ctatttttgtaggcactataggctatagtttgccaacccccagataggagaaatcttcaaaaaaaaatcttaatatccatagagatgtaccatattgcctycatgaaacaagaacaaaagaataagaaaaagtgcttagaaattaacatgataccaacaatttttaaatgcataatagggcttggaagataaaatggaaat

SEQ ID NO: 119843 - DNA, 201 bp, Homo sapiens
tacaaagctaaaattaactttaaaaaatagtttgggcgtttcagtcctagaaaagatgaagtaagcatatttagtagtctaaaaaacctagacagaatatrtggagtagctgtttgagaactctgaaaagtcaacactagcaggtagattaagaaaggagaccagaattcaaaataccaatgatctagctcaagtaactgt

SEQ ID NO: 119844 - DNA, 201 bp, Homo sapiens
aaatgtgaggcaaacaggaaaaaaaggagtaataaaaacaagtataaattgatgaattgtaacaaaaataatgaaatcagtgaaatgaaaattaagctgcwtgaactaagagttgagctaccattcaactcagcaatcccattactggttatatgcccaaaggaaaataaatcattctgccaaaaagacacatgcagctgt

SEQ ID NO: 119845 - DNA, 201 bp, Homo sapiens
tttctagtgcattctttgtgtaatagaattatggataatttaggctttttttggtactcctgaatattttgtagtgaatactcttactttctttttttccycttaggacattccaacctacctacttaccttccttccttcttatttatatttgaataagaaatactatcacatggctcaaagttgaaaaggtacaaaagg

SEQ ID NO: 119846 - DNA, 201 bp, Homo sapiens
taataggcattatgtttactaccccttctatcctacctcttatttggttatctcttaactagatctcttccttctgagacactgtgcatatcaatgccagrtcagttttccaaatattgcttttattacatccttttatctgcctaaaaatctattgcttcctttgctcatgagataaagttcatatttcttaagcttaca

SEQ ID NO: 119847 - DNA, 201 bp, Homo sapiens
atttgtctattagtgtatttgtgctgcctttatatgaaaaatatgtttgattatgccagagtatttaaagttagtaaactttggttaactaggcttcttgrgaaatgaattgttccttgccagttaagctttaaaaacaaggctagtccaaccttttgtcttgttcacaagaatataatgaacataagtgatttttaaaaa

SEQ ID NO: 119848 - DNA, 201 bp, Homo sapiens
tagctttatgacaatttacactaatttttcttttattagacattaagttgttgatctagaatcttgttaccatagaaaaaaacttcccaactctgaatccyatttcatttattgtagcatttttctgtttccttcacatttacactttaaaaaaatttgaatgttacacagtcacatggtttgaagacaaaatgtatacaa

SEQ ID NO: 119849 - DNA, 201 bp, Homo sapiens
gaaaacattggaaaaactctccaggacatcggtctggggaacaacttcttgagcaataccccacaagcacaggtaaccaaagcaaaaatggacagatgggwtcacatcaagttaaaaagctgctgcacagcaaaggaaacaatcaacaaagtgaagaggcaacccacagaatgggagaaaatatttgcaaactacccatct

SEQ ID NO: 119850 - DNA, 201 bp, Homo sapiens
tacaatgagatatcacctcaccccagttaaaatgacttttatgcaaaagacaggcaataacaaatgctggcaaggatgtggagaaaagacaaccctcgtayactgttggtgggaatgtaaattaggacaaccactatgaagaacaatttggaagttcctcaaaaaacttaaaatagagctaccaaacgatccagcaatccc

SEQ ID NO: 119851 - DNA, 201 bp, Homo sapiens
cccaactctactaaaaatacaaaaattagctaggcatggtggcggccgcctgtagtcccagctacttgggaggctgagaggagaactgcttgaacctgggaggcggaggttgcagtgagccaagatcatgtcactgcactccagcctgggcaatggagcgagactctgtctcaaaaaaaaaagaaaaagttaacagtgtta

SEQ ID NO: 119852 - DNA, 201 bp, Homo sapiens
tttaaagctaaaaggagtcaatatttttaggttgtagacttacttagtcaattgtaaaagttaaaattttagaaaataaaaagaggagaaattcctatttygttcatcttaatttagaaattataaacctgatattcatggagagatcatgagtaggctttggaagactatgaaacttatgaagctatatgcaaaatttta

SEQ ID NO: 119853 - DNA, 201 bp, Homo sapiens
ttgtgaatagccactgctctccagcctgagcaacatagcaagactttgtctcttgacaaaaagtggctgtaccattttgcattcccaccagcaatgaacaraagttcctgttgttgtacatcttcaccagtgaactttggggctgaggactctgcttctacgagtacaacttttttagatgacacatatgagtgatagcat

SEQ ID NO: 119854 - DNA, 201 bp, Homo sapiens
ttttaaactgaggccttgcgatattttgtgtgaatagatatgccctaggagttcagaaaaagttaaaagtatgttttctaattaaatgcagtgcacattcytggatcaatattcaaagactggtcataacctgctgtgttaaaataatcacatatgctctttttcatcagatttgttgatgatgtaaataaaatgtgtaaa

SEQ ID NO: 119855 - DNA, 201 bp, Homo sapiens
actcatcatttacattaggtattactcctaagctatccctcccccagacccccacccccagacaggccccagtgtgtgatgttccccaccctgtgtccaartgttctcattgttcaattcccacctatgagtgagaacatggggtgtttggtgttctgtccttgtgacagtttgcttagaatgatggtttccagtttcatc

SEQ ID NO: 119856 - DNA, 201 bp, Homo sapiens
gttttaaaagtatttagtactgtttgttattattttagatgcagtattgtcttcgtatattttccctgtttttcttttttttcctgtatttttattttttwaattaatttatttttattatactttaagttctagggtatatgtgcacaacgtgcaggtttgttacataggtatacatgtgctatgctggtttgctgcacc

SEQ ID NO: 119857 - DNA, 201 bp, Homo sapiens
agaacggttaaaataaagcatattatttcatttaaaaagtaaagtggctcttactcatttacatttagggaacgatggtgacgtggtttggctatgtccccagccagatctcatcttgaattgtagttcccataatcccgacgtgttgtgggaaggacccagtgggaggtaattgaatcgtgggggcggttaccctcatgc

SEQ ID NO: 119858 - DNA, 201 bp, Homo sapiens
ttccagaacggttaaaataaagcatattatttcatttaaaaagtaaagtggctcttactcatttacatttagggaacgatggtgacgtggtttggctatgtccccagccagatctcatcttgaattgtagttcccataatcccgacgtgttgtgggaaggacccagtgggaggtaattgaatcgtgggggcggttaccctc

SEQ ID NO: 119859 - DNA, 201 bp, Homo sapiens
gttccagaacggttaaaataaagcatattatttcatttaaaaagtaaagtggctcttactcatttacatttagggaacgatggtgacgtggtttggctatgtccccagccagatctcatcttgaattgtagttcccataatcccgacgtgttgtgggaaggacccagtgggaggtaattgaatcgtgggggcggttaccct

SEQ ID NO: 119860 - DNA, 201 bp, Homo sapiens
tgttccagaacggttaaaataaagcatattatttcatttaaaaagtaaagtggctcttactcatttacatttagggaacgatggtgacgtggtttggctatgtccccagccagatctcatcttgaattgtagttcccataatcccgacgtgttgtgggaaggacccagtgggaggtaattgaatcgtgggggcggttaccc

SEQ ID NO: 119861 - DNA, 201 bp, Homo sapiens; identical to SEQ ID NO: 20394

SEQ ID NO: 119862 - DNA, 201 bp, Homo sapiens
caggaattgagaagctgattctaaaattattatggaaaagcaaggaacccagaatagtcaaaacaatcttgaaaaagaagaacatactaggagaacaaacagttttctatttcaaacttactacaaagctacaataatcaagactatgttgtactggcataaagacagatgtatagatcaatgggtagaattgagggtcca

SEQ ID NO: 119863 - DNA, 201 bp, Homo sapiens
gcaggaattgagaagctgattctaaaattattatggaaaagcaaggaacccagaatagtcaaaacaatcttgaaaaagaagaacatactaggagaacaaacagttttctatttcaaacttactacaaagctacaataatcaagactatgttgtactggcataaagacagatgtatagatcaatgggtagaattgagggtcc

SEQ ID NO: 119864 - DNA, 201 bp, Homo sapiens
aaaaagaaagaaagaaagaaagaaaagaaaaaaagcaactattcagaataataaagcaacctttttttttttttaatatctggctagagcaccaagtattrtaatagactcaggggacagagtgatacacaacacagtttatagccccttgtctcatgttgcttatagtctagcaaggaatattgacattaatgtaatgaa

SEQ ID NO: 119865 - DNA, 201 bp, Homo sapiens
gaagcaggaagtgaaaacaagatcagagttattacctacagtgctgaggattgaaattatgccccaatatatgcagagactcttggcaaagaatgggagamatgatggttctagacatttaaggaaatctctgtctaattattagctgactactaagttaatcgagcagtcttcaatgaccacacatgacaatacagactt

SEQ ID NO: 119866 - DNA, 201 bp, Homo sapiens
aatttatcccttgtagtcgtaggactgagtgagatacccagtcttttgcgggctgttggctaaggatgactcttaggtcttaaaggttgcattcaggtccyagtcatatcaccctctcaacaacgtggcagcttattactactactacttttttttttccttcttcaaagccaacaaaggtgtctcttctgtaggggtgca

SEQ ID NO: 119867 - DNA, 201 bp, Homo sapiens
gggcagatcgcttgagcttaggagttcaagactagcctaggtaacatgatgaaaccctgtctctactaaaagtacaaaaaaattagccaggtgtagtggcrtgtgcctataatcccagctattcaggagactgatgtgggagaatcacctgagcccaggaagttgaggctgcagtaagccatgacctcactacttcactcc

SEQ ID NO: 119868 - DNA, 201 bp, Homo sapiens
ttgtagtcgtaggactgagtgagatacccagtcttttgcgggctgttggctaaggatgactcttaggtcttaaaggttgcattcaggtcccagtcatatcrccctctcaacaacgtggcagcttattactactactacttttttttttccttcttcaaagccaacaaaggtgtctcttctgtaggggtgcattgtatcttt

SEQ ID NO: 119869 - DNA, 201 bp, Homo sapiens
aatatgcaattataaacatacaaagttaacaaaaaggccccaaaacacatctagcaaaaagcatcagaaatcaataatttagtaatacttggagacttccrtaccctgctcaataatgggtagaacaactagaaggaaaatcaacagaaaataaaagccttgaacaaaactacaaaccaacaactacaaacaaacctaaca

SEQ ID NO: 119870 - DNA, 201 bp, Homo sapiens
aattactatatgactccccaattccacttctaggtgtatgcccaagagaataaaaaacatgtattcatataaaaacttgtacccaaatgtttaatagcagyattattcatactagccaaaaagtggaaacattaacttataaatgaagtactgagaaatgatacaatatgagtgaatcttgaaaacatcatgttcagtgaa

SEQ ID NO: 119871 - DNA, 201 bp, Homo sapiens
agatttatttggcttatggttctgcaggctgcacaagaatcatggcatcagcatctgcttctaatgaggacctcagaaagtctacaatcatagcaccaagsctttcatgagggttctgtccccatgacccacatacctcccactaggccccacctatgacatgggggaacacatttcaacatgagctttggaggaaacaaa

SEQ ID NO: 119872 - DNA, 201 bp, Homo sapiens
acaaaaattagccgggtgcggtggcgggtgcctgtaatctcaactattctggaggctgaggcaggagaatggcttgaacctgggaggcggaggttgcagtragccaagaccgcgccactgcactctagcctgggcaacagagcaagattctgtctcaaaaaaagattgctttcagtagtatggacattctgacaatattag

SEQ ID NO: 119873 - DNA, 201 bp, Homo sapiens
tttgtgttgctgtttagcaggcttcctttagcatatcttgtaaggcacgtttagtggtgaagtccctcagcttttgcttatctggaaaagtttttacctcytattcattttgatagatggctttaccagatataatatccttcactggcaggtttttttctttcagcacttcaaacatgtcatcccacttccttacagcat

SEQ ID NO: 119874 - DNA, 201 bp, Homo sapiens
accttagcctgcttccactgatggcaaaaggtgaaggggagctggtttgtacagatcatatggcaagagaagaagcgagagagagaagggagggaggtgtyaggctctttctaacaaccagctctcgtgggaactaacagagcactaactcaccccctctctacttagggagggcgttaatctattcatgaggtatctacc

SEQ ID NO: 119875 - DNA, 201 bp, Homo sapiens
accatattgcccaggctggtctcagactcctagactcaagcgatcttcctgcttcagcctcccaaagtgctgggattacaggtgtgagccactttgcccascctcttctaaagataattttatttatctaatgttgttttcttttaggccttttcagatattaatggcaaagttcagaccattgttttgacatctggtaca

SEQ ID NO: 119876 - DNA, 201 bp, Homo sapiens
gtggtgcgatcttggctcactgcagccttcgcctcctgggttccagcggttctcctgcctcaaccttctgagtagctgggattatgggtgtatgccaccaygcctggcacatttttgtatttttagtagagatggggttttgccattttggccagactttatctttttagagacaaggtcgcttgctatgttgcccaggct

SEQ ID NO: 119877 - DNA, 201 bp, Homo sapiens
cagagaaaaaggaccacatatgtactgctggtgggaatgtaaattagttcagccactgtggaaagcagtttgttgatttctgaaagaagttaaagcagaagtactgttcaacccaacaattccattattgggtgtatacccaaaggaatgtgagtcattctcccataaagacatatgtatctgtatgtttatcacagcact

SEQ ID NO: 119878 - DNA, 201 bp, Homo sapiens
ggctggcttcaaactcccaggctcaggcagtccacctgcctcagcctcctgagtagctgggactacaggcatgtactaccatgcccagcttgtataattayttatgcttctcttttccattagactacagtgtatcctgattcttccttttacatccacgttcttcctctgtgcctagattaatagctggtatttagcaag

SEQ ID NO: 119879 - DNA, 201 bp, Homo sapiens
caggttcaattgtactccaaactcaacatcatgcaatatacctttgtaacaaacctgcacatgtactcctggaatctaaaataaaataaaagttgaaaaasagaaaaaaatagactctttgaaaagatcaataaaattgataaacctctagcaaaattaacaaagaaaaaaaagagaagccacagttactaatatcaggaa

SEQ ID NO: 119880 - DNA, 201 bp, Homo sapiens
tctccaaagtgacattttgtatgctaatgagatgactaatggtagggggctcctaggtagcatcaggatcagggctggcctccgggaagaccaagacatgrtaggagagttgggattttcacccccattcctcaacctctggggagggcttgggggagatgatgctaaaggttaagtttatcttaatggccagtggtttaa

SEQ ID NO: 119881 - DNA, 201 bp, Homo sapiens
atcaggaataaaagaggtattaatagtataactacagactccacaggcattaaaagaataatatgagaatactacgaaaaactctatacatatacatttgwtaacttagatgaagtagattaattccacaaaacccacaaaataccaaaattcacccaagatgaaatagataacatgaatagctatctagcaaataaatag

SEQ ID NO: 119882 - DNA, 201 bp, Homo sapiens
ggtaaatgtgtccctgggttctgtgagcagctctaccaaattaattgaacccaagcagagggttgtgggatgcccgatttctagctgatcagtcagaagcrcaagtaaaaacaactgtgactggccacagaaatcaggggcagtcttggggactgagccctcaacctctgggatctgaagttatcatctcccagtagatag

SEQ ID NO: 119883 - DNA, 201 bp, Homo sapiens
gaatagattatttttctgcttctagcttttcaattaaaaataaagacacaggaaatccttcgaatatactttgttccaattgagtttatttctttgattgygaaattaattgttctgcaggtttttgtttaatttttttgtggcttaaaacagtaaacatttattatctcatagtttctttttttattattatactttaag

SEQ ID NO: 119884 - DNA, 201 bp, Homo sapiens; identical to SEQ ID NO: 20400

SEQ ID NO: 119885 - DNA, 201 bp, Homo sapiens
ggcaggaattgagaagctgattctaaaattattatggaaaagcaaggaacccagaatagtcaaaacaatcttgaaaaagaagaacatactaggagaacaaacagttttctatttcaaacttactacaaagctacaataatcaagactatgttgtactggcataaagacagatgtatagatcaatgggtagaattgagggtc

SEQ ID NO: 119886 - DNA, 201 bp, Homo sapiens
aacggttaaaataaagcatattatttcatttaaaaagtaaagtggctcttactcatttacatttagggaacgatggtgacgtggtttggctatgtccccasccagatctcatcttgaattgtagttcccataatcccgacgtgttgtgggaaggacccagtgggaggtaattgaatcgtgggggcggttaccctcatgcgg

SEQ ID NO: 119887 - DNA, 201 bp, Homo sapiens
tggcaggaattgagaagctgattctaaaattattatggaaaagcaaggaacccagaatagtcaaaacaatcttgaaaaagaagaacatactaggagaacaaacagttttctatttcaaacttactacaaagctacaataatcaagactatgttgtactggcataaagacagatgtatagatcaatgggtagaattgagggt

SEQ ID NO: 119888 - DNA, 201 bp, Homo sapiens
gctgactttctggcaggaattgagaagctgattctaaaattattatggaaaagcaaggaacccagaatagtcaaaacaatcttgaaaaagaagaacatactaggagaacaaacagttttctatttcaaacttactacaaagctacaataatcaagactatgttgtactggcataaagacagatgtatagatcaatgggtag

SEQ ID NO: 119889 - DNA, 201 bp, Homo sapiens
agctgactttctggcaggaattgagaagctgattctaaaattattatggaaaagcaaggaacccagaatagtcaaaacaatcttgaaaaagaagaacatactaggagaacaaacagttttctatttcaaacttactacaaagctacaataatcaagactatgttgtactggcataaagacagatgtatagatcaatgggta

SEQ ID NO: 119890 - DNA, 201 bp, Homo sapiens
ccagctgactttctggcaggaattgagaagctgattctaaaattattatggaaaagcaaggaacccagaatagtcaaaacaatcttgaaaaagaagaacatactaggagaacaaacagttttctatttcaaacttactacaaagctacaataatcaagactatgttgtactggcataaagacagatgtatagatcaatggg

SEQ ID NO: 119891 - DNA, 201 bp, Homo sapiens
ggattacaggtgtgagccactgcgaccagctgaaatagaatatctgaatagatgtataacaagtaaagatagaatttgtcatcaaaacacttccccccccyttttttttttttttttttgagacagagtctctatctgttgcccaggctggagtacagcggcgcaatctcagcttactgcaagctccacctcccaggttca

SEQ ID NO: 119892 - DNA, 201 bp, Homo sapiens
ttttttttcataaattaaaggtttgtggcaaccctgtgtcaagcaagtctattgtcaccatttttccaatactatgtactcacttcatgtctctgtgtcascatttttttagcaataaagtattttaaaattaaggtatgtatttttttagacataatgccacttgtacacataatagactgcagtatagtataaacatta

SEQ ID NO: 119893 - DNA, 201 bp, Homo sapiens
gggattacaggtgtgagccactgcgaccagctgaaatagaatatctgaatagatgtataacaagtaaagatagaatttgtcatcaaaacacttcccccccytttttttttttttttttttgagacagagtctctatctgttgcccaggctggagtacagcggcgcaatctcagcttactgcaagctccacctcccaggttc

SEQ ID NO: 119894 - DNA, 201 bp, Homo sapiens
actgcaacctctgcctcccaggttcaagcaattctcctgtctcagcctcctgagtagctaggattacaggtgcctgccaccatgcccggctgcatttttaraagagacggggtttcactatgttggccaggctgatcttgaactcctgacctcgtgatccacctcccaaactgctgggattacaggtgtgagccactgcga

SEQ ID NO: 119895 - DNA, 201 bp, Homo sapiens
taagactacaacaactagatttaagccctagaacatgtcacccactgtactccccatcattttattttttatttttgtttttattattattattatttttwttttgagagagtcttgctctgtttcccaggctggagagcagtggtgcgatctcagttcactgcaacctctacctcccaggttcaagcgattctcctacct

SEQ ID NO: 119896 - DNA, 201 bp, Homo sapiens
tacctcttattcattttgatagatggctttaccagatataatatccttcactggcaggtttttttctttcagcacttcaaacatgtcatcccacttccttrcagcatgcaagatgtcgcctgagaaatctttctctttttggagacaggatgttactctgccacccaggcaggagtccagtggcatgatcatgactcactg

SEQ ID NO: 119897 - DNA, 201 bp, Homo sapiens
aagtaaccaaattttccctgggtttacctttttctttaggactttctaaatgggtacggcagcagattcagcaccattcaacctttgaaagtgcactggartccttggctgaattttccaaaaagcatcaaaaagttcttaatgtatccataaaggacagaaccaatatacaggacaatgagtctacacttgaagtgacct

SEQ ID NO: 119898 - DNA, 201 bp, Homo sapiens; identical to SEQ ID NO: 20401

SEQ ID NO: 119899 - DNA, 201 bp, Homo sapiens
tctccagaaaggagaaaagtatgaaaagttcttcccatttacctttgatagagaagtctttcattatatttagtgaaatgatatttatttgggtatagatwaattccttaaatatggtggtttgtaatataaggtgttatcataaaatagtgaaacagtatggtgtactgtaatgggaacaaacttttgtcaggagaccag

SEQ ID NO: 119900 - DNA, 201 bp, Homo sapiens
tagaaacaacagcagagttgagtatttgtgtgtattgcactagaacagcataattgagtagtcgcaacagatacattatgctccacaaagcctaaatattmctatctggcctatgacagaaaaggtttgccaaactctggtctattccattggatataatttcagttgttttaattcatatatccaaggcgggtggatcat

SEQ ID NO: 119901 - DNA, 201 bp, Homo sapiens
gtatattctcctcagatcatgactgaccaagatgatattccaagaagtaaactactggcctttatagagtaggatgtaggccattttcattactgataacwtacttttaaaagaaatgtttacagagttaaataagttaaaacatctaaatgcttttaaaagagcacctggcacattgcaagttattcattattaattagt

SEQ ID NO: 119902 - DNA, 201 bp, Homo sapiens
ttcctcagctcccttcctcttcccttttaccccttctttcctcattcattcttgagctccctgctgtggaatttgatagtttaccagacagcattataacytgggctaggaaacattagagacctaagatttctttcagagttaatattctgttccaagatgaaaatccactagtattcgttgggggctctaagttatgta

SEQ ID NO: 119903 - DNA, 201 bp, Homo sapiens
tgctgggtaatgtttgccattagacgaggcacaaaaaagaatcaagctatgactaattcactcgatggctgtgtgccctgtgtcatgctcattaacacctytcaactctgttattaaagagaatcacacagcagacctcagcgggctcacatttatactataggctgccttatttttccattggaaccccatttttatcac

SEQ ID NO: 119904 - DNA, 201 bp, Homo sapiens; identical to SEQ ID NO: 20432

SEQ ID NO: 119905 - DNA, 201 bp, Homo sapiens
gaaacttgctaatcagcatggcacccatagcaaacagctgccttactagtgaaaaaggtacactgatggaacagctaaaatagcgatgtggctcctaatgyttaacagaacgatcctaatcctgctggtcgttatcattacagattttatagttgcctttttaactgcttctgagcacagtttgaaaatatatgttaattg

SEQ ID NO: 119906 - DNA, 201 bp, Homo sapiens
tatttcatatttgactccttacatatcaaagacaaaggtttttgtttctgctccaaaagagagcaaaattgaaaaggaaaactcacttcagtcttgatcartcaagtgtctttaacttaagaagaaacttgctaatcagcatggcacccatagcaaacagctgccttactagtgaaaaaggtacactgatggaacagctaa

SEQ ID NO: 119907 - DNA, 201 bp, Homo sapiens
aaatttccataaatctgcagatccaaaggctggatgaatcacaaagagaaaaaaaaaaaacaaagaaattcataacaagacacattatagtcaaagttctsaaaagaaataaaaattgaaagtgatgaagaaacagtaaaacgatacctacataagaaaaaaaatcaaataacagtggatttctcatcagaaatcattaag

SEQ ID NO: 119908 - DNA, 201 bp, Homo sapiens
ttaagaccagcctggacaacacagcaaaacctagtctttacaaaagaataaaaaagttagctgggtggggtggcatgtgcctgtagtcccagctacttgaraagcttaagtgggagaatcatttgggccaaggagattaagactgcagtgagcagtgattgcaccactagactccagcctgggtgacagccaaactctgcc

SEQ ID NO: 119909 - DNA, 201 bp, Homo sapiens
  misc_feature (1)...(201): n = A,T,C or G
caccattttgtaacatgtatcattatttcatacctattgctatgtaatagtccattgtatagatctaccaccatgttttgcttatctgttcatcagctganggacttttggtttatttccacctcttgactactgagaattatgaccatatgaacatttgaacaaaggtcttgagcaaaaatgtggacatatgtgatttta

SEQ ID NO: 119910 - DNA, 201 bp, Homo sapiens
tttagaaataatttacatgtcataaaattaacatgtttttactgtataattaaatgatttttagtaaattacagtgttatacaaccatcaccatgacccarttttacaagatttatatcaccataaaaagatttccttgtgcttgtttgtagtcagtcttgttcccatttccagcctcaggcaaccatgctaggcttctgc

SEQ ID NO: 119911 - DNA, 201 bp, Homo sapiens
aattcttagaaatgtttgtgtctttgagattattgcttgacctaagtagtttttagatttcttgcagaatattttcaaagactttttttttttttttttttctttttgagacggagtctggctctgtcgcccaggctggagtgcagtggcgtgatcttggcttactgcaagccccgcctcctgggttcatgccattctccc

SEQ ID NO: 119912 - DNA, 201 bp, Homo sapiens
gactgcagtgatgctatcgtagttgactgtaatcttgaactcctaggctcaagccatcctcctacctcagcctccaagtagctaggactaccggtatgctycatcacgcctggctaatttttaaatttttttggtagagacaaggtgttactataatatgttgcccaggctggtctcaaactcctgggctcaagcagtcct

SEQ ID NO: 119913 - DNA, 201 bp, Homo sapiens
taatgcaattaaaaaaaagttttgttttaaaatttaacagaaatgataaaaccagcctaatgatctcagcagctgggtgtacgttgtaacatgacataatrtaatgtgaagataatggcaggaaaataaaaatttaattttatttttatatcatcactttttttacactcttctttgtcactttaatggtaatctttaaac

SEQ ID NO: 119914 - DNA, 201 bp, Homo sapiens
tttgtaggaatcattgctgatactgttatttatagcatataaatttaatagtatttttacgtgtagctgtttatgttgcacctaacaagtaaaaacatttytaaaagtttggggtactgaaaaagtattaaatatgtggcattaatcggtacaaaatgataattctttaacaattctgtaattttctctcaaagttataag

SEQ ID NO: 119915 - DNA, 201 bp, Homo sapiens
gttttttaaaaagactatcctttctctattgcatttgcacttttgtcaaaagttaatttggccacattcttgtgtgtctgtttctggactttctattctgkttcattgatctttgtggctgtctacgctgtaattactgtagctttatagtaagtctttaaaattgattagcgttactcctcccttcattactcttcttgc

SEQ ID NO: 119916 - DNA, 201 bp, Homo sapiens
gtagtatataggccttttcccaaggagagggttttaacattccttagattctcaaagggatttgtggcctccaaatagttaaaatccagtggtgtagaatkagaagagggctaggaactgaagtcctggaaacttaagatttggggaatggaaagagacaaagctggcacagagagacaaagcaaaagaggtcagatggga

SEQ ID NO: 119917 - DNA, 201 bp, Homo sapiens
cctacgctggactgcagtgatgctatcgtagttgactgtaatcttgaactcctaggctcaagccatcctcctacctcagcctccaagtagctaggactacyggtatgctccatcacgcctggctaatttttaaatttttttggtagagacaaggtgttactataatatgttgcccaggctggtctcaaactcctgggctca

SEQ ID NO: 119918 - DNA, 201 bp, Homo sapiens
aggcactttataagtgtgtcggaagtttgggaaagagcagaacaataaatgtggaattgtcagcttataggtggtgattgaggtaagagaattagattagaattgaagaattattgtattcaataattgtgtgtacatgtagtatataggccttttcccaaggagagggttttaacattccttagattctcaaagggattt

SEQ ID NO: 119919 - DNA, 201 bp, Homo sapiens
caaaaatttctctcatgatttcgagacttatccaagttgtttcctgtatcgacagttcatcgcattctatggctaattagtagtttattgcatgaatgtgycatagttggtttttcattcaagatagttgggttgatttcagtttttagcaattgtaaatatagatgctgtcagcattcatgcttagcgttttatgtgaac

SEQ ID NO: 119920 - DNA, 201 bp, Homo sapiens
cttcttctgctggtagatatctaggctatttccattttttttttttaaagtcttatgaataaagcaagctagtgccaaaattcactggcaagtctttgtgsatatatattttctttttttttttttgagacggagtcttgctctgtcatccaggctggagtgcagtggcacgatcttggctcactgcaacctctgactccc

SEQ ID NO: 119921 - DNA, 201 bp, Homo sapiens
aaggcactttataagtgtgtcggaagtttgggaaagagcagaacaataaatgtggaattgtcagcttataggtggtgattgaggtaagagaattagattagaattgaagaattattgtattcaataattgtgtgtacatgtagtatataggccttttcccaaggagagggttttaacattccttagattctcaaagggatt

SEQ ID NO: 119922 - DNA, 201 bp, Homo sapiens
atcagttttaatatatgcacactcatgtaacctacactcctataaagacacacaatatttttataactccataaaatttccttgtgtggtttttttttttttgagacggagtctcgccttatcgcccaggctggagtgcagtggcacgatgtcggctctccacctcctgggttgaagctattctcctgcctcaacctcctg

SEQ ID NO: 119923 - DNA, 201 bp, Homo sapiens
gaaggcactttataagtgtgtcggaagtttgggaaagagcagaacaataaatgtggaattgtcagcttataggtggtgattgaggtaagagaattagattagaattgaagaattattgtattcaataattgtgtgtacatgtagtatataggccttttcccaaggagagggttttaacattccttagattctcaaagggat

SEQ ID NO: 119924 - DNA, 201 bp, Homo sapiens
tattgcataatatttaataagtgttattctcatataaggaaacattttttgcctcaatagttaatcgactttttatattataaataatgcatagtattatraaatttagaaaatcataagaaaaacatgatttaattaacctgaggataaatttaaatatgaaatatggtatacttacaaaataatatgtcaaacgtatat

SEQ ID NO: 119925 - DNA, 201 bp, Homo sapiens
agaaggcactttataagtgtgtcggaagtttgggaaagagcagaacaataaatgtggaattgtcagcttataggtggtgattgaggtaagagaattagattagaattgaagaattattgtattcaataattgtgtgtacatgtagtatataggccttttcccaaggagagggttttaacattccttagattctcaaaggga

SEQ ID NO: 119926 - DNA, 201 bp, Homo sapiens
gtttttgaagtcttatctaaagtatgttctaaatgaagtttctgacaggttttttttttttttttttgcattttaccttaaaaatgacaataactgttgcrtagtatacatacaggatacctatgctgaaaaatattggattagttctatccatttgtatattgcataatatttaataagtgttattctcatataaggaaa

SEQ ID NO: 119927 - DNA, 201 bp, Homo sapiens
aagaaggcactttataagtgtgtcggaagtttgggaaagagcagaacaataaatgtggaattgtcagcttataggtggtgattgaggtaagagaattagattagaattgaagaattattgtattcaataattgtgtgtacatgtagtatataggccttttcccaaggagagggttttaacattccttagattctcaaaggg

SEQ ID NO: 119928 - DNA, 201 bp, Homo sapiens
gactgagtgccaaagggagggtttttcaaagaagatgctatttgtgttataaaatggtggcagaagggcattctaggcagaggaaatcacagcaaaaagarttatggaaaaagatgactttttaaacttcagaatggctgtacacgaagtgtgggtgtggagagatgcaagtggatgctggcagtatacagaccaaagggc

SEQ ID NO: 119929 - DNA, 201 bp, Homo sapiens
tttattgctacctatgtttagtttttatatagaaatcaactctgtttaggtgagtgagttgataaatatgtaagtttttcagcataggaaaatagccattrccatttatagagttacagtttattagttgatggtcaatgcccatgtgaagtagctggggcagcaaagattatgccaggggaaattgaagaagagcaactt

SEQ ID NO: 119930 - DNA, 201 bp, Homo sapiens
gttctggtgagtgcgtggtgtatttagggaattacaagtacttccactctggtttttgcagaggggagggaaaaggctaatgaagaggaggcttcctaggygcagtggctcacacctgtaatcactcactttgggaggctgaggcagatggatcacttgagctcaggagttcaagaccaacctgcccaaaatggtgaaacc

SEQ ID NO: 119931 - DNA, 201 bp, Homo sapiens
tctgtttcagacattatgctggggctacaaaggtgaatgtagtttctgccattgaaggactcatagcctagaaaggagaacaaacagatcacctgaaatgmtgtattctgaatgctgtataataactacctgtccacagagtgatgagagcccaaaggactgagtgccaaagggagggtttttcaaagaagatgctatttg

SEQ ID NO: 119932 - DNA, 201 bp, Homo sapiens
atgaggatgttatatgggatgtatgttaaaaagtaaagttttaatgaatattaaaagatgtttttgaagtcttatctaaagtatgttctaaatgaagtttytgacaggttttttttttttttttttgcattttaccttaaaaatgacaataactgttgcatagtatacatacaggatacctatgctgaaaaatattggatt

SEQ ID NO: 119933 - DNA, 201 bp, Homo sapiens
cactctttttcaggggtgcaaaggttcaacatttcaagccataatcagtctccaaagagacatagtatttctcattctccaaatagtaattctaatggctyctttcttgcaccagaaacggagccaattgttcctgaactgtgtattgaccatttgtggacagaaacgattactaatataaggtttgttatatatattatt

SEQ ID NO: 119934 - DNA, 201 bp, Homo sapiens
cgttaggagtgcactctttttcaggggtgcaaaggttcaacatttcaagccataatcagtctccaaagagacatagtatttctcattctccaaatagtaaktctaatggctcctttcttgcaccagaaacggagccaattgttcctgaactgtgtattgaccatttgtggacagaaacgattactaatataaggtttgtta

SEQ ID NO: 119935 - DNA, 201 bp, Homo sapiens
catgattttaaaaatgaggatgttatatgggatgtatgttaaaaagtaaagttttaatgaatattaaaagatgtttttgaagtcttatctaaagtatgttytaaatgaagtttctgacaggttttttttttttttttttgcattttaccttaaaaatgacaataactgttgcatagtatacatacaggatacctatgctga

SEQ ID NO: 119936 - DNA, 201 bp, Homo sapiens
ctgccacgaagacatgattttaaaaatgaggatgttatatgggatgtatgttaaaaagtaaagttttaatgaatattaaaagatgtttttgaagtcttatytaaagtatgttctaaatgaagtttctgacaggttttttttttttttttttgcattttaccttaaaaatgacaataactgttgcatagtatacatacagga

SEQ ID NO: 119937 - DNA, 201 bp, Homo sapiens
aaaagttgaaagcattccccctgagaactggaagaagactaagatgcctactttcactatttctattcagcatagtactggaagttctggccagagcaatsaggcaagtgaaagaaataaaggacatccagatttgaaaagaggaagtcatactatcactatttgctgataatatgattatatacctagaaaaccctatag

SEQ ID NO: 119938 - DNA, 201 bp, Homo sapiens
tagctgaaggatggtgacacaggagggactacttttgctggtagggctttgaaagacgaataggtattcgctaggcagggaagttgagaaagaccacagayggcagctgggatcagaacaaaagttctggtgagtgcgtggtgtatttagggaattacaagtacttccactctggtttttgcagaggggagggaaaaggct

SEQ ID NO: 119939 - DNA, 201 bp, Homo sapiens
aaaaaataaataaataaataaagcagctttggtcatagtgaccacaaactggaaccaaatgttcatcagtttttgagtaggtaaacaaagtttggtatgtytgtataatggaatactacttagcatgaaaaggaagaaactagtgatccttggagagacgtgaatgaatctcaaagacttatgctaagttaaagaagtagc

SEQ ID NO: 119940 - DNA, 201 bp, Homo sapiens
cttgaacccaggaggcggaggttgcagtgagccgagattgtgccactgtgctccagcctggcgacatagtgagactccgtctcaaaaaaaaaaaaaataaataaataaataaagcagctttggtcatagtgaccacaaactggaaccaaatgttcatcagtttttgagtaggtaaacaaagtttggtatgtctgtataatg

SEQ ID NO: 119941 - DNA, 201 bp, Homo sapiens
tcgcttgaacccaggaggcggaggttgcagtgagccgagattgtgccactgtgctccagcctggcgacatagtgagactccgtctcaaaaaaaaaaaaaawaaataaataaataaagcagctttggtcatagtgaccacaaactggaaccaaatgttcatcagtttttgagtaggtaaacaaagtttggtatgtctgtata

SEQ ID NO: 119942 - DNA, 201 bp, Homo sapiens
aattactgccacgaagacatgattttaaaaatgaggatgttatatgggatgtatgttaaaaagtaaagttttaatgaatattaaaagatgtttttgaagtyttatctaaagtatgttctaaatgaagtttctgacaggttttttttttttttttttgcattttaccttaaaaatgacaataactgttgcatagtatacata

SEQ ID NO: 119943 - DNA, 201 bp, Homo sapiens
atcgcttgaacccaggaggcggaggttgcagtgagccgagattgtgccactgtgctccagcctggcgacatagtgagactccgtctcaaaaaaaaaaaaaataaataaataaataaagcagctttggtcatagtgaccacaaactggaaccaaatgttcatcagtttttgagtaggtaaacaaagtttggtatgtctgtat

SEQ ID NO: 119944 - DNA, 201 bp, Homo sapiens
tcttttgtcctcatagtcaaagcttaggataaaatggtcctcattggcaaatggttttcattttgctttgttcagatttattctttttgttttcacatatrtaatgtggtggagtacagaatttctgccaatgactcgttacacaatttttggcatttctttgtgctttctttaatttgctgatgtgttacatgagtgcac

SEQ ID NO: 119945 - DNA, 201 bp, Homo sapiens
agaatcgcttgaacccaggaggcggaggttgcagtgagccgagattgtgccactgtgctccagcctggcgacatagtgagactccgtctcaaaaaaaaaawaaataaataaataaataaagcagctttggtcatagtgaccacaaactggaaccaaatgttcatcagtttttgagtaggtaaacaaagtttggtatgtctg

SEQ ID NO: 119946 - DNA, 201 bp, Homo sapiens
ttcctttgcagagaaggacatggctttttgacttacttattgcatgataattataaaggaaggaataaggaaatcaattcttgaggccaagttgctttgcyatttatttataggactgcatggttaaacccttgttatcttttgtcctcatagtcaaagcttaggataaaatggtcctcattggcaaatggttttcatttt

SEQ ID NO: 119947 - DNA, 201 bp, Homo sapiens
gtggcgcatgcctgtaatcccagccactctggaggctaaggtgggagaatcgcttgaacccaggaggcggaggttgcagtgagccgagattgtgccactgygctccagcctggcgacatagtgagactccgtctcaaaaaaaaaaaaaataaataaataaataaagcagctttggtcatagtgaccacaaactggaaccaa

SEQ ID NO: 119948 - DNA, 201 bp, Homo sapiens
caaagaaattttttttcacaaagaactgaaaaacaaaaattactgccacgaagacatgattttaaaaatgaggatgttatatgggatgtatgttaaaaagyaaagttttaatgaatattaaaagatgtttttgaagtcttatctaaagtatgttctaaatgaagtttctgacaggttttttttttttttttttgcatttta

SEQ ID NO: 119949 - DNA, 201 bp, Homo sapiens
atggagcaatcgaaactctcatacattactggtgggactgcaaaagtggcatggcactttgcaaaactggcagtttcttgtgaagttaaacatacactttsgtatttacttaagataaatgaaaacatatgcctacataaagacccgcatgtatgtgaatgtctttggggccaggtgcggtggcataatctcagcactttg

SEQ ID NO: 119950 - DNA, 201 bp, Homo sapiens
gcgtcagctttctgtagttttgtgtatcattgtccttgtaacttgttgatgagtacagattgttgtgtcctagtctctggcagagaacctatgccccttcrcgtttccatgttttggggaggactgagcacctacccattttttcctttgcagagaaggacatggctttttgacttacttattgcatgataattataaagg

SEQ ID NO: 119951 - DNA, 201 bp, Homo sapiens
tgaactcctgaccgcaagtgataaattttttttatgtgatgtttagctaatgagacatttgtagtaaccttctagcttatggtggctctttttctattgastcacttgtatatgcggagatggcattgtctgtgtaccatttgttgaaatgagggaaaggaaggaagtgagataacatttattgggagcctgttgtcttca

SEQ ID NO: 119952 - DNA, 201 bp, Homo sapiens
ctaggttttaaattaagtaaaataccaaagaaattttttttcacaaagaactgaaaaacaaaaattactgccacgaagacatgattttaaaaatgaggatrttatatgggatgtatgttaaaaagtaaagttttaatgaatattaaaagatgtttttgaagtcttatctaaagtatgttctaaatgaagtttctgacaggt

SEQ ID NO: 119953 - DNA, 201 bp, Homo sapiens
gacgaggttttggaggctttgactaatgttaagtttcatttttgtaaatgctgaaatctttgtatctggatactgcttcctcccactcctcccgcctaccrttaactatttcctgatgagtactgtattctatttattggaaaggataaactgaatcattattccaacatttgagggcatatgtgaaagcatttgtgtcct

SEQ ID NO: 119954 - DNA, 201 bp, Homo sapiens
acctcggcctcctgagtagctgggaccacaggtgcacaccatcacacccggctaatttttgtatttttagtagagatggggttttgccatgttgcccaggytggtcttgaactcctgaccgcaagtgataaattttttttatgtgatgtttagctaatgagacatttgtagtaaccttctagcttatggtggctctttttc

SEQ ID NO: 119955 - DNA, 201 bp, Homo sapiens
cctatgctcctaggttttaaattaagtaaaataccaaagaaattttttttcacaaagaactgaaaaacaaaaattactgccacgaagacatgattttaaaratgaggatgttatatgggatgtatgttaaaaagtaaagttttaatgaatattaaaagatgtttttgaagtcttatctaaagtatgttctaaatgaagttt

SEQ ID NO: 119956 - DNA, 201 bp, Homo sapiens
gaaaatttttataacaaaaagttggaggaagaactaatgcatttattgtagttgaattagggttgacgaggttttggaggctttgactaatgttaagtttmatttttgtaaatgctgaaatctttgtatctggatactgcttcctcccactcctcccgcctaccgttaactatttcctgatgagtactgtattctatttat

SEQ ID NO: 119957 - DNA, 201 bp, Homo sapiens
gtttgcacttgccattacctctatggagaatgctttccctccgacaagacgtgcttaggtctttattcagatgtcacctcagtgctgcctgtcctgtctcyatagaattacacctgcctccatacctttagtgccatttacctgtttttttttcttctcacttaattaaatataatatactatatgttttacttattttgt

SEQ ID NO: 119958 - DNA, 201 bp, Homo sapiens
agtcccagctactctggaggctgaggtgagagagtcatttgaacctgggagttggaggttgcagtgagccaagagcacactactgcactccagcttgggcracagagtgagactgtctgaaaaagaaaaaaaggaggcttgagagattactgattgccctttaggcctctggtatgtttgatgacagcggtaagaaggcac

SEQ ID NO: 119959 - DNA, 201 bp, Homo sapiens
caataaatctgtagaataaatacttataaaagtacaagtagtctgtagggtgaggcaggatagggtttggataacaataataaccttttttgagcattttytatgtgctaggcattgttctcagtgctttattagtattaattatttccttagaatagctttattgagaagatagtactatgattcttttttttacaaatg

SEQ ID NO: 119960 - DNA, 201 bp, Homo sapiens
agaacatctttatttttagaaaaggcatggtgaagtatttaggggtgaaatgtcatgatgtgtgtgcaatttatttttaaacagtcagcattcccattccraaaatcccatatgtacacaaatgcacacacacaaacaaatatggcaaaattttcatgattgttggatataggtgaaatatgtttgctgcattatttcaac

SEQ ID NO: 119961 - DNA, 201 bp, Homo sapiens
ggtatacttttgaaggataaatgcacttttgaagggatttcaggcaccaagatgaacattgaactgggaagaggaagaggaaggaaaagagttctatattycctattccccaaacctatgctcctaggttttaaattaagtaaaataccaaagaaattttttttcacaaagaactgaaaaacaaaaattactgccacgaag

SEQ ID NO: 119962 - DNA, 201 bp, Homo sapiens
atttcagggtatacttttgaaggataaatgcacttttgaagggatttcaggcaccaagatgaacattgaactgggaagaggaagaggaaggaaaagagttytatattccctattccccaaacctatgctcctaggttttaaattaagtaaaataccaaagaaattttttttcacaaagaactgaaaaacaaaaattactgc

SEQ ID NO: 119963 - DNA, 201 bp, Homo sapiens
ttcgtaatcacaaggccaggtacctcgaactattataagcctaagcaaaatatataaaaacaaataataatggaataaattaaataaatgaaaacaaaaawtcttacccctttatagccaaacagaagccccatagtttatgcacataagtttatgtactttacctgcagagggttctcacacactcatgcagcattgggt

SEQ ID NO: 119964 - DNA, 201 bp, Homo sapiens
gtcatatacaacaaacccacagccaacatcatactgaatggggaaaagttgaaagcattccccctgagaactggaagaagactaagatgcctactttcacyatttctattcagcatagtactggaagttctggccagagcaatcaggcaagtgaaagaaataaaggacatccagatttgaaaagaggaagtcatactatca

SEQ ID NO: 119965 - DNA, 201 bp, Homo sapiens
aaatctgtagaataaatacttataaaagtacaagtagtctgtagggtgaggcaggatagggtttggataacaataataaccttttttgagcattttctatktgctaggcattgttctcagtgctttattagtattaattatttccttagaatagctttattgagaagatagtactatgattcttttttttacaaatgagat

SEQ ID NO: 119966 - DNA, 201 bp, Homo sapiens
gctccagcatgacactcaaaggtaaatgcttattggagcatttcaggttttggattctcaaattagggttgctgtcatcaaaaagatatgtcatgatcaartgggttttgtctcagggatgcagggatggtttaacatacacaagtcaataaatgtgacacatcacataaacaattaaaaaccatatgatcatctcaatag

SEQ ID NO: 119967 - DNA, 201 bp, Homo sapiens
tatctaaaagtctgagatgatgataattttcatgctgacagcatagatatatgccattttctctcatctcagtacaagttgagtatccctgatccaaaaayctgaaattctccaaaatctgcaacttgttgagctccagcatgacactcaaaggtaaatgcttattggagcatttcaggttttggattctcaaattagggt

SEQ ID NO: 119968 - DNA, 201 bp, Homo sapiens
ttgtggtgttataatgtgagtcaggttcagtagtatgattgttgtccattttaaacctttttcttttcacttaatatgtggggaccagatttcatgttatytaatgattaaatggtagagattagaagtagtccctgctgcagaagatttacatgtttctagaggagagaagaaatgccacaaaagtaggtagagtaatag

SEQ ID NO: 119969 - DNA, 201 bp, Homo sapiens
tgtgtcatgttttgtgacataattatatccagaataacttttcttttttttttttttgagacggagttttgctcttgtcccccaggctggagtacaatggygcgatctcggctcactgcaacctctgcctcccaggttgaagcgattctcttgccttagcctcccaagtagctgggattacaggcgcccacaccatgcctg

SEQ ID NO: 119970 - DNA, 201 bp, Homo sapiens
tagtcccagctactctggaggctgaggtgagagagtcatttgaacctgggagttggaggttgcagtgagccaagagcacactactgcactccagcttgggyaacagagtgagactgtctgaaaaagaaaaaaaggaggcttgagagattactgattgccctttaggcctctggtatgtttgatgacagcggtaagaaggca

SEQ ID NO: 119971 - DNA, 201 bp, Homo sapiens
ggaatttgttccttttggtggagaccactgcaagcaccaccctaatgctttgaaccttcaacttcgccagctgcagccagcttctgaattatggtcttctratggtgctgctggcttggtgggatcccttcaggaggttacaatccacgagaaacagaaggttccattgagtttcccattgtgtttttgaaatgtagagtg

SEQ ID NO: 119972 - DNA, 201 bp, Homo sapiens
ctaaaatgtgataattgcaactgtctgaatcagatctagaatgcccttttatgttatgaccaacttatatacttaccagtctgatataattacttgacacscatgtaaggattaatgacttgtgtgtttatggtatttttattctagttttgagtctggaagctgaccagaatgtgtttgaattcatacagaaataatgtt

SEQ ID NO: 119973 - DNA, 201 bp, Homo sapiens
atggttaggatcactattcctgaaattgccacctctgagttaggtacgattgagaagtttcatttataagacatgaagtaattgtgatttacattaataaytggggttttaaacattattttgccatttttgaagccactggatcaagttcttagctttgtagaggagctttaaagagctagggagtgctttgtgatgtcc

SEQ ID NO: 119974 - DNA, 201 bp, Homo sapiens
ttctctaatgcattctgatgttgatcatctcatgaagttattagccattcatttatcttcttaggtaaaatagctattcagatcttttgcccatttatttmccttcatattttgaaatacgatagattaaaggaagttacaaaagagtaaacaagtcctgtgtaccttgcattctttttccctcacaggtaacctcttata

SEQ ID NO: 119975 - DNA, 201 bp, Homo sapiens
tagtggtaactgtcagtctgtgactaaaatgtgataattgcaactgtctgaatcagatctagaatgcccttttatgttatgaccaacttatatacttaccrgtctgatataattacttgacacccatgtaaggattaatgacttgtgtgtttatggtatttttattctagttttgagtctggaagctgaccagaatgtgtt

SEQ ID NO: 119976 - DNA, 201 bp, Homo sapiens
accaatcagatgttttccttttacctaccttttctagttgttttctgtgaggaccttggtttgctggtacttcattgtatctggaacaaaatgttttaaasagcctgggtcttgccgtgtcatccaggctggagggcagtgactattcacaggctcactacagcctcaaattcctaggcttaagtgattctcctgtctcag

SEQ ID NO: 119977 - DNA, 201 bp, Homo sapiens
tagtcccagctactcgggaggctgaggcaggagaatggcgtgaacccgggaggaggagcttgcagtgagccaagatcgcgccactgcactccatcctgggsgacagagcgagactccatctcaaaaaaaaaaaaaaaaaaaaaaaaaaagaataaaaagaattattattgctctacatagttgccaacatttagtattgat

SEQ ID NO: 119978 - DNA, 201 bp, Homo sapiens
gagacaaggtcttactctgtcacccaggctggagtgcagtggtgcaatcatggctcactgcagcctcaacctcccggggctcaagcagtccttccacctcrgcctcctgagtagctgggaccacaggtgcacaccatcacacccggctaatttttgtatttttagtagagatggggttttgccatgttgcccaggctggtc

SEQ ID NO: 119979 - DNA, 201 bp, Homo sapiens
gcctgtagtcccagctactcgggaggctgaggcaggagaatggcgtgaacccgggaggaggagcttgcagtgagccaagatcgcgccactgcactccatcytgggcgacagagcgagactccatctcaaaaaaaaaaaaaaaaaaaaaaaaaaagaataaaaagaattattattgctctacatagttgccaacatttagta

SEQ ID NO: 119980 - DNA, 201 bp, Homo sapiens
tgatgcataaggaatctttatttgccatttaattggaacatttgaggctgtggctatgtaagctggtctctgagaatggagaactctaatcacctacatayacacctgaaatcattgtgatactcagatatcagaaatgggtggttttggcaaagtctaaaagcaataatataaacatttcagggtatacttttgaaggat

SEQ ID NO: 119981 - DNA, 201 bp, Homo sapiens
ttgatacgtttttggtttcctcattataagttttattggactttttttattttttattttttttatttgagacaaggtcttactctgtcacccaggctggwgtgcagtggtgcaatcatggctcactgcagcctcaacctcccggggctcaagcagtccttccacctcggcctcctgagtagctgggaccacaggtgcaca

SEQ ID NO: 119982 - DNA, 201 bp, Homo sapiens
ctcaggaggcagaagttgcagtgtgccaagaccgtgccacagcactccagcctgggcaacagagcgagacaccctctcaaaaaaaaaaaaaaaaaaaaaaagctgtcttcagacccctttcaagccttgttgaattcagtagttggttttagtttcagatgattggttaggtaatgtttgcatctcattggctctttaatg

SEQ ID NO: 119983 - DNA, 201 bp, Homo sapiens
tttaatttttatttataaaaatattctgaaaaatatcaacagaagcccttgttgatacgtttttggtttcctcattataagttttattggactttttttaytttttattttttttatttgagacaaggtcttactctgtcacccaggctggagtgcagtggtgcaatcatggctcactgcagcctcaacctcccggggctc

SEQ ID NO: 119984 - DNA, 201 bp, Homo sapiens
ccatattctttttttctcgacaatctcacaactttcatataataatatttgggataccagctttttatcttgatgcataaggaatctttatttgccatttmattggaacatttgaggctgtggctatgtaagctggtctctgagaatggagaactctaatcacctacatacacacctgaaatcattgtgatactcagatat

SEQ ID NO: 119985 - DNA, 201 bp, Homo sapiens
agctcagagatctatttataaaaatatgaatttaatttttatttataaaaatattctgaaaaatatcaacagaagcccttgttgatacgtttttggtttcstcattataagttttattggactttttttattttttattttttttatttgagacaaggtcttactctgtcacccaggctggagtgcagtggtgcaatcatg

SEQ ID NO: 119986 - DNA, 201 bp, Homo sapiens
aaaaagtaatgtgtatgatgttttacattttatcaggtttttttttttttacatattttatcttatttaatctttaaaacttcagagtaagtgagctggtwttgccccattttctagaagaaaatactgaggtttatagacatgacttttggaagatcacacagctaatagcagaggaggaactagatcacggtgctttta

SEQ ID NO: 119987 - DNA, 201 bp, Homo sapiens
gccatattctttttttctcgacaatctcacaactttcatataataatatttgggataccagctttttatcttgatgcataaggaatctttatttgccattwaattggaacatttgaggctgtggctatgtaagctggtctctgagaatggagaactctaatcacctacatacacacctgaaatcattgtgatactcagata

SEQ ID NO: 119988 - DNA, 201 bp, Homo sapiens
tttataacttgttagctcagagatctatttataaaaatatgaatttaatttttatttataaaaatattctgaaaaatatcaacagaagcccttgttgatasgtttttggtttcctcattataagttttattggactttttttattttttattttttttatttgagacaaggtcttactctgtcacccaggctggagtgcag

SEQ ID NO: 119989 - DNA, 201 bp, Homo sapiens
gacctcagaaataaagttataaagctttggttaataggcatgttaactcatttagaacatcatgtaatgctagctaagcattgctattcgtggatgcatawattgaatattatatatttactgaagtatgtaggcagtattttatataaatgtataaacatagaagttgtatgtttttcatagtgactttttttttttttt

SEQ ID NO: 119990 - DNA, 201 bp, Homo sapiens
tattattttctatttgtttttttaaaaattatagccatcctagtatttatgaagtgatatctcattgttttgatttgcctccttaatttagtgatattgarcatattttcttgtgtttattggccatttacgtatcttctttgaagaaagatctatgcagatcttttgtgtatttgaaaattggatttttattttcaagtt

SEQ ID NO: 119991 - DNA, 201 bp, Homo sapiens
cacaagattgagattatggttcatcaagccatattctttttttctcgacaatctcacaactttcatataataatatttgggataccagctttttatcttgrtgcataaggaatctttatttgccatttaattggaacatttgaggctgtggctatgtaagctggtctctgagaatggagaactctaatcacctacatacac

SEQ ID NO: 119992 - DNA, 201 bp, Homo sapiens
tgtttaactttttgaggaactgctaaactcattttcatagtggctataccattttacatccttatcagcaatgcaagaggaagggttccaatttctctacrgtcttgccaacacatattattattttctatttgtttttttaaaaattatagccatcctagtatttatgaagtgatatctcattgttttgatttgcctcct

SEQ ID NO: 119993 - DNA, 201 bp, Homo sapiens
ggctctggctttgtgaaaaggcctcacaagattgagattatggttcatcaagccatattctttttttctcgacaatctcacaactttcatataataatatktgggataccagctttttatcttgatgcataaggaatctttatttgccatttaattggaacatttgaggctgtggctatgtaagctggtctctgagaatgg

SEQ ID NO: 119994 - DNA, 201 bp, Homo sapiens
tgcaggagaaccatatgcttttgtcccttctctcaaatgttggcagactgtaaatgtctttgccccctgcccttctttttctttactctacattttgctcygcttcatggtgagaagtgcttcacagtcccccccatggctccaaaacagacatacagaatgatgtttctgtttaaaaaacacgggatttttttaatgata

SEQ ID NO: 119995 - DNA, 201 bp, Homo sapiens
tagcaggaggaagaacaaaacttgtgtcatgttttgtgacataattatatccagaataacttttcttttttttttttttgagacggagttttgctcttgtyccccaggctggagtacaatggcgcgatctcggctcactgcaacctctgcctcccaggttgaagcgattctcttgccttagcctcccaagtagctgggatt

SEQ ID NO: 119996 - DNA, 201 bp, Homo sapiens
gcaaactcggctcactgcaagctccgcctcccgggttcatgccattctcctgcctcagcctcccgagtagctgggactacaggtgcccgccaccacgcccrgctaatttttttgtatttttagtagagacggggtttcactgtgttagccaggatagtctcgatctcctgacctcgtgattcacctgcctcggcctcccaa

SEQ ID NO: 119997 - DNA, 201 bp, Homo sapiens
gcctcccaagtagctgggattacaggcgcccgccatcactgtctggctaatttttgtatttttagtagagatggggtttcaccatcttggccaggctgatsttgaactcctgacctcgtgatccacccgtctcggccacccaaagtgctgggattacaggcgtgagccaccacgccctgccccttgtaagttttataaggc

SEQ ID NO: 119998 - DNA, 201 bp, Homo sapiens
ctttaaagagctagggagtgctttgtgatgtccactctacgtgcgctctaaggctggagtacaggtgaaggatgtgctagttctgttccctgaggttcttytgttggggaatattgtgcagtataataatatatggacatgcctgctgggcatggtggctcacacctgtaatcccaacactttgtgagactgaggcgggtg

SEQ ID NO: 119999 - DNA, 201 bp, Homo sapiens
gagctttaaagagctagggagtgctttgtgatgtccactctacgtgcgctctaaggctggagtacaggtgaaggatgtgctagttctgttccctgaggttyttctgttggggaatattgtgcagtataataatatatggacatgcctgctgggcatggtggctcacacctgtaatcccaacactttgtgagactgaggcgg

SEQ ID NO: 120000 - DNA, 201 bp, Homo sapiens
attcccaccagcaaaatatgaaggttaatgtctctttatccttgacaggattggatatcatcacactctttgattgtagctattttctagtggttgtgaartggctttaatttgcttttctctaatgcattctgatgttgatcatctcatgaagttattagccattcatttatcttcttaggtaaaatagctattcagatc

SEQ ID NO: 120001 - DNA, 201 bp, Homo sapiens
tattcattttattcacttcagaatattactgcttgggatttgtgtgtgtgtgttggttctgaggtttatctaaaagtctgagatgatgataattttcatgytgacagcatagatatatgccattttctctcatctcagtacaagttgagtatccctgatccaaaaacctgaaattctccaaaatctgcaacttgttgagct

SEQ ID NO: 120002 - DNA, 201 bp, Homo sapiens
aagtacctccaggttcacccaggtattcattttattcacttcagaatattactgcttgggatttgtgtgtgtgtgttggttctgaggtttatctaaaagtytgagatgatgataattttcatgctgacagcatagatatatgccattttctctcatctcagtacaagttgagtatccctgatccaaaaacctgaaattctc

SEQ ID NO: 120003 - DNA, 201 bp, Homo sapiens
atatgtgattttatttttcttgagtaaatgcctaggattgggtcattgggttgaatggtaaattcatgtttaactttttaagaaatcaccaaactgttttycaaatagcctgtatcattttatattcccaccagcaaaatatgaaggttaatgtctctttatccttgacaggattggatatcatcacactctttgattgta

SEQ ID NO: 120004 - DNA, 201 bp, Homo sapiens
tgctgtttgaacgaagcgcttcttcacatgaagtacctccaggttcacccaggtattcattttattcacttcagaatattactgcttgggatttgtgtgtktgtgttggttctgaggtttatctaaaagtctgagatgatgataattttcatgctgacagcatagatatatgccattttctctcatctcagtacaagttga

SEQ ID NO: 120005 - DNA, 201 bp, Homo sapiens
  misc_feature (1)...(201): n = A,T,C or G
atttgaacaaaggtcttgagcaaaaatgtggacatatgtgattttatttttcttgagtaaatgcctaggattgggtcattgggttgaatggtaaattcatntttaactttttaagaaatcaccaaactgttttccaaatagcctgtatcattttatattcccaccagcaaaatatgaaggttaatgtctctttatccttga

SEQ ID NO: 120006 - DNA, 201 bp, Homo sapiens
gacatgaagtaattgtgatttacattaataattggggttttaaacattattttgccatttttgaagccactggatcaagttcttagctttgtagaggagcyttaaagagctagggagtgctttgtgatgtccactctacgtgcgctctaaggctggagtacaggtgaaggatgtgctagttctgttccctgaggttcttct

SEQ ID NO: 120007 - DNA, 201 bp, Homo sapiens
aatcgaaactctcatacattactggtgggactgcaaaagtggcatggcactttgcaaaactggcagtttcttgtgaagttaaacatacactttcgtatttmcttaagataaatgaaaacatatgcctacataaagacccgcatgtatgtgaatgtctttggggccaggtgcggtggcataatctcagcactttgggaggcc

SEQ ID NO: 120008 - DNA, 201 bp, Homo sapiens
taagtgtgtcggaagtttgggaaagagcagaacaataaatgtggaattgtcagcttataggtggtgattgaggtaagagaattagattagaattgaagaawtattgtattcaataattgtgtgtacatgtagtatataggccttttcccaaggagagggttttaacattccttagattctcaaagggatttgtggcctcca

SEQ ID NO: 120009 - DNA, 201 bp, Homo sapiens
tctgtttaggtgagtgagttgataaatatgtaagtttttcagcataggaaaatagccattgccatttatagagttacagtttattagttgatggtcaatgyccatgtgaagtagctggggcagcaaagattatgccaggggaaattgaagaagagcaacttgtagaaaactgcttttatgtagttgtattagttagaagat

SEQ ID NO: 120010 - DNA, 201 bp, Homo sapiens
gatatttgtatcttcatctcctagtcataaggactcaataaatctgtagaataaatacttataaaagtacaagtagtctgtagggtgaggcaggatagggwttggataacaataataaccttttttgagcattttctatgtgctaggcattgttctcagtgctttattagtattaattatttccttagaatagctttattg

SEQ ID NO: 120011 - DNA, 201 bp, Homo sapiens
acaaatgagatagaagttacaaatgaaataaacctaataagtggtagaactgggatttacactcttactaatgtgctcttaaaggcagaaaggataaaaakgtggttttattctgaatgcaattgacagggcattacaggattttgagaaaggagttatgaggttttggatctgtgttgtaaataggtgtattttgggatt

SEQ ID NO: 120012 - DNA, 201 bp, Homo sapiens
gtcttcccaggcttgcaggagaaccatatgcttttgtcccttctctcaaatgttggcagactgtaaatgtctttgccccctgcccttctttttctttactytacattttgctctgcttcatggtgagaagtgcttcacagtcccccccatggctccaaaacagacatacagaatgatgtttctgtttaaaaaacacgggat

SEQ ID NO: 120013 - DNA, 201 bp, Homo sapiens
ccttgtgggcctttccaggtggggtcttcccaggcttgcaggagaaccatatgcttttgtcccttctctcaaatgttggcagactgtaaatgtctttgccycctgcccttctttttctttactctacattttgctctgcttcatggtgagaagtgcttcacagtcccccccatggctccaaaacagacatacagaatgatg

SEQ ID NO: 120014 - DNA, 201 bp, Homo sapiens
gccccttgtgggcctttccaggtggggtcttcccaggcttgcaggagaaccatatgcttttgtcccttctctcaaatgttggcagactgtaaatgtctttkccccctgcccttctttttctttactctacattttgctctgcttcatggtgagaagtgcttcacagtcccccccatggctccaaaacagacatacagaatg

SEQ ID NO: 120015 - DNA, 201 bp, Homo sapiens
ttattttgccatttttgaagccactggatcaagttcttagctttgtagaggagctttaaagagctagggagtgctttgtgatgtccactctacgtgcgctytaaggctggagtacaggtgaaggatgtgctagttctgttccctgaggttcttctgttggggaatattgtgcagtataataatatatggacatgcctgctg

SEQ ID NO: 120016 - DNA, 201 bp, Homo sapiens
cctgctcataggccccttgtgggcctttccaggtggggtcttcccaggcttgcaggagaaccatatgcttttgtcccttctctcaaatgttggcagactgyaaatgtctttgccccctgcccttctttttctttactctacattttgctctgcttcatggtgagaagtgcttcacagtcccccccatggctccaaaacaga

SEQ ID NO: 120017 - DNA, 201 bp, Homo sapiens
tgagaagtttcatttataagacatgaagtaattgtgatttacattaataattggggttttaaacattattttgccatttttgaagccactggatcaagttyttagctttgtagaggagctttaaagagctagggagtgctttgtgatgtccactctacgtgcgctctaaggctggagtacaggtgaaggatgtgctagttc

SEQ ID NO: 120018 - DNA, 201 bp, Homo sapiens
tacatgtccaagatcaaaccttcatatagaaccatagggctgtaacggtgaataaggtaagtttcttggcatacctgttcctcagtccccccatcctggarcagcctgctcataggccccttgtgggcctttccaggtggggtcttcccaggcttgcaggagaaccatatgcttttgtcccttctctcaaatgttggcaga

SEQ ID NO: 120019 - DNA, 201 bp, Homo sapiens
tttttacaaatgagatagaagttacaaatgaaataaacctaataagtggtagaactgggatttacactcttactaatgtgctcttaaaggcagaaaggatraaaaggtggttttattctgaatgcaattgacagggcattacaggattttgagaaaggagttatgaggttttggatctgtgttgtaaataggtgtattttg

SEQ ID NO: 120020 - DNA, 201 bp, Homo sapiens
ctcatgatttatttatttttagaaattagtttgttattactggttaatacatgtccaagatcaaaccttcatatagaaccatagggctgtaacggtgaatraggtaagtttcttggcatacctgttcctcagtccccccatcctggagcagcctgctcataggccccttgtgggcctttccaggtggggtcttcccaggct

SEQ ID NO: 120021 - DNA, 201 bp, Homo sapiens
atgattcttttttttacaaatgagatagaagttacaaatgaaataaacctaataagtggtagaactgggatttacactcttactaatgtgctcttaaaggsagaaaggataaaaaggtggttttattctgaatgcaattgacagggcattacaggattttgagaaaggagttatgaggttttggatctgtgttgtaaatag

SEQ ID NO: 120022 - DNA, 201 bp, Homo sapiens
cccatactgattttataatcagcttgtctatagctacaaagaaaaatcctgttgaaatttttttcaagaaacacttctttatttatttttattattttttrtttacctctagctgcaaatctcatgatttatttatttttagaaattagtttgttattactggttaatacatgtccaagatcaaaccttcatatagaacca

SEQ ID NO: 120023 - DNA, 201 bp, Homo sapiens
ggggttgagtaggatatctgtaggtagaaaggagcattcagggcaaggagaaaccacacaggcacaggcaggaaggccagataatgcggaacattttttartggatatttgtatcttcatctcctagtcataaggactcaataaatctgtagaataaatacttataaaagtacaagtagtctgtagggtgaggcaggatag

SEQ ID NO: 120024 - DNA, 201 bp, Homo sapiens
gagtgatctcagctcactgcaacctccaccttctgggttcaggcgattctcctgcctcagcctcccaaatagctgggattacaggatcccacaccatgccyggctaattttttgtatttttagtagagacggggtttcaccatattgtccaggctggtctcgaactttcaacctcaagtgatccgcctggctcagcctccc

SEQ ID NO: 120025 - DNA, 201 bp, Homo sapiens
ttcgtttggaccttggggttgagtaggatatctgtaggtagaaaggagcattcagggcaaggagaaaccacacaggcacaggcaggaaggccagataatgyggaacattttttaatggatatttgtatcttcatctcctagtcataaggactcaataaatctgtagaataaatacttataaaagtacaagtagtctgtagg

SEQ ID NO: 120026 - DNA, 201 bp, Homo sapiens
acctattgctatgtaatagtccattgtatagatctaccaccatgttttgcttatctgttcatcagctgacggacttttggtttatttccacctcttgactrctgagaattatgaccatatgaacatttgaacaaaggtcttgagcaaaaatgtggacatatgtgattttatttttcttgagtaaatgcctaggattgggtc

SEQ ID NO: 120027 - DNA, 201 bp, Homo sapiens
ttggatatccagttctttcagcactgttttttaaaaagactatcctttctctattgcatttgcacttttgtcaaaagttaatttggccacattcttgtgtktctgtttctggactttctattctggttcattgatctttgtggctgtctacgctgtaattactgtagctttatagtaagtctttaaaattgattagcgtta

SEQ ID NO: 120028 - DNA, 201 bp, Homo sapiens
ccatctagggatctcacaattgtgtggagttgatgtactgtctgcataagaaattagaatttaagaaagactcatgactcagtaatgtggaaaagagagtrccatcgttgattgactgatgggaagataacatccgatgggaagataacatccaatgggaggacatggcaaaatcaaagcctcactgagagacatgtcagt

SEQ ID NO: 120029 - DNA, 201 bp, Homo sapiens
tgttaatcttttataacatgtcaggttttaagtcaaggtttttattatttcatttggatatccagttctttcagcactgttttttaaaaagactatccttyctctattgcatttgcacttttgtcaaaagttaatttggccacattcttgtgtgtctgtttctggactttctattctggttcattgatctttgtggctgtc

SEQ ID NO: 120030 - DNA, 201 bp, Homo sapiens
aagagtaagattttcttagggcgtgttttgtctgtgaacgttggcatgtctgtgttataggcactttgaaagcctaaggcctggttacgtaaggaatcaaaccagaaacctagggaattcatcattaggtcattcctgggtctcaggttactagccagtttgtcttcttttcttcactttttcagaatcttctgttagttg

SEQ ID NO: 120031 - DNA, 201 bp, Homo sapiens
gggatcacagctcactgcacccatgacctcctgactcaagcgatcctcccacctcagcctcccaaagtgctgggatattacagacatgagccaccacatcmagcctggcaaactttttatgtaggagttcagacaagtatcttagcctctatgggccacatgcagtctctgttacatatttgtcttctgttttttttttcc

SEQ ID NO: 120032 - DNA, 201 bp, Homo sapiens
taacatgtatcattatttcatacctattgctatgtaatagtccattgtatagatctaccaccatgttttgcttatctgttcatcagctgacggacttttgrtttatttccacctcttgactactgagaattatgaccatatgaacatttgaacaaaggtcttgagcaaaaatgtggacatatgtgattttatttttcttga

SEQ ID NO: 120033 - DNA, 201 bp, Homo sapiens
agtatcagaattgaaaaaagaattgaatttttcttgtttgctttggcggccatgtcttacctttttagtactgttctggtctgttgcggtcttttgtccamaactaattttcaggtatcaggattacttaaaatctaatacatcttgtattttcagtgcgggtaaaaaggactattttagcctgaaggaaattattgtacc

SEQ ID NO: 120034 - DNA, 201 bp, Homo sapiens
attcgctaggcagggaagttgagaaagaccacagacggcagctgggatcagaacaaaagttctggtgagtgcgtggtgtatttagggaattacaagtactyccactctggtttttgcagaggggagggaaaaggctaatgaagaggaggcttcctaggcgcagtggctcacacctgtaatcactcactttgggaggctgag

SEQ ID NO: 120035 - DNA, 201 bp, Homo sapiens
ctttaaaacattttataaaggggtaggttctcttacttctatcttttcccacccttttacctgaaaggttgcaaatgtttggcccactaaatatggattgytgtttgaacgaagcgcttcttcacatgaagtacctccaggttcacccaggtattcattttattcacttcagaatattactgcttgggatttgtgtgtgtg

SEQ ID NO: 120036 - DNA, 201 bp, Homo sapiens
attacgtagatgctattattattatttagatgccattagttaatagatgattatttagatataattttcttaggtaagcattttgttttgattttaggcaytgtggtgtgacttcattatatcacaggataagtctgaaaaggcctacagtaagtttctttttgaaattttatttttcttatgatgattccaaatatttat

SEQ ID NO: 120037 - DNA, 201 bp, Homo sapiens
ctttccttatcatatttatcatttattactctaatttattttttcttattctttttgttcccatgattgtacatgttgagctgaggaggcaaagttattaygtagatgctattattattatttagatgccattagttaatagatgattatttagatataattttcttaggtaagcattttgttttgattttaggcattgtg

SEQ ID NO: 120038 - DNA, 201 bp, Homo sapiens
agctggtattgccccattttctagaagaaaatactgaggtttatagacatgacttttggaagatcacacagctaatagcagaggaggaactagatcacggkgcttttactgtagttttacttccacaaaatttagcaaaaagagattgggttccatttgtcacactgggcactttaaagtccaaaaatacaatagagagac

SEQ ID NO: 120039 - DNA, 201 bp, Homo sapiens
atagaagttacaaatgaaataaacctaataagtggtagaactgggatttacactcttactaatgtgctcttaaaggcagaaaggataaaaaggtggttttyttctgaatgcaattgacagggcattacaggattttgagaaaggagttatgaggttttggatctgtgttgtaaataggtgtattttgggattaaagataag

SEQ ID NO: 120040 - DNA, 201 bp, Homo sapiens
gaagttacaaatgaaataaacctaataagtggtagaactgggatttacactcttactaatgtgctcttaaaggcagaaaggataaaaaggtggttttattytgaatgcaattgacagggcattacaggattttgagaaaggagttatgaggttttggatctgtgttgtaaataggtgtattttgggattaaagataaggag

SEQ ID NO: 120041 - DNA, 201 bp, Homo sapiens
acactcttactaatgtgctcttaaaggcagaaaggataaaaaggtggttttattctgaatgcaattgacagggcattacaggattttgagaaaggagttaygaggttttggatctgtgttgtaaataggtgtattttgggattaaagataaggagaccggttagcctccaagtgaggttgtctgtgtcagtttaagaagta

SEQ ID NO: 120042 - DNA, 201 bp, Homo sapiens
gatttaccaagttaggaagcctggagaaaagtggtttgtatttaaaggacatgtgagtgtggatgtttagggacggttcaaagggaaggttagtgctatcwgttgtatttgataatgtctatgtcttcattatatttttaaacatgtgccacattgaattttttttccttcaaaccagcacatttgcagaacattcaaagg

SEQ ID NO: 120043 - DNA, 201 bp, Homo sapiens
ctggagaaaagtggtttgtatttaaaggacatgtgagtgtggatgtttagggacggttcaaagggaaggttagtgctatctgttgtatttgataatgtctrtgtcttcattatatttttaaacatgtgccacattgaattttttttccttcaaaccagcacatttgcagaacattcaaagggggaactggagaagtgtcag

SEQ ID NO: 120044 - DNA, 201 bp, Homo sapiens
cattatatttttaaacatgtgccacattgaattttttttccttcaaaccagcacatttgcagaacattcaaagggggaactggagaagtgtcagagtgttytgtgtgatttggaagaatttcttttataatggaaaatggtttccaacttttttagaattctataagcctggtaatagtgcctttttgataggtgtaaggt

SEQ ID NO: 120045 - DNA, 201 bp, Homo sapiens
tctaacatttgactgatattgggttgatcctttgagacttggtatattgtggatatgcctaaagtttctttttctaccaaagatgtgatgtaatctatgtygttacaggagtaggagagggaaggaaactaccattaaaatcagtccttagaagcccaggcactgttctagatgtttgcatatattaatatgatttcattt

SEQ ID NO: 120046 - DNA, 201 bp, Homo sapiens
tttgtagaggagctttaaagagctagggagtgctttgtgatgtccactctacgtgcgctctaaggctggagtacaggtgaaggatgtgctagttctgttcyctgaggttcttctgttggggaatattgtgcagtataataatatatggacatgcctgctgggcatggtggctcacacctgtaatcccaacactttgtgaga

SEQ ID NO: 120047 - DNA, 201 bp, Homo sapiens
aacattattttgccatttttgaagccactggatcaagttcttagctttgtagaggagctttaaagagctagggagtgctttgtgatgtccactctacgtgygctctaaggctggagtacaggtgaaggatgtgctagttctgttccctgaggttcttctgttggggaatattgtgcagtataataatatatggacatgcct

SEQ ID NO: 120048 - DNA, 201 bp, Homo sapiens
atctctaatccattttgttaatcttttataacatgtcaggttttaagtcaaggtttttattatttcatttggatatccagttctttcagcactgttttttraaaagactatcctttctctattgcatttgcacttttgtcaaaagttaatttggccacattcttgtgtgtctgtttctggactttctattctggttcattg

SEQ ID NO: 120049 - DNA, 201 bp, Homo sapiens
tttaaacattattttgccatttttgaagccactggatcaagttcttagctttgtagaggagctttaaagagctagggagtgctttgtgatgtccactctaygtgcgctctaaggctggagtacaggtgaaggatgtgctagttctgttccctgaggttcttctgttggggaatattgtgcagtataataatatatggacat

SEQ ID NO: 120050 - DNA, 201 bp, Homo sapiens
cttgtcttgtctcgtcattctcttaatacatcaaagagcaaaagtgtttaattttgatgaagctagtttatctgtatttttctttaatggatgttgctttyagtgtcatgtctaataattctttgtttaacttcaggttttgaagattttctcctgggtttctttgcatgttttacatttagatctctaatccattttgtt

SEQ ID NO: 120051 - DNA, 201 bp, Homo sapiens
gaagaagatgccatctaggactttcataacctgagaggagaagtcagtgcctggcttcaaaggacagtctgactctcttgttaggggctaatgcagctggwgacttaaagttgaagcccgtgctcatttaccattccaaaaatcttagggcccttaagaattatgccaagtctgctctgcctgggctctataaatggagta

SEQ ID NO: 120052 - DNA, 201 bp, Homo sapiens
tctttttttttttttttttttgagacaaggtcttgctctgttgcccaggctggatggagtgcagtggcgcgatcatagctcactgtggcctcaaactccckgctcaagtgatcctccagactcccaagcagctgggactacaggtgcgcaccacgcctccaggctaattaaaaaaatttttcttttgtggagacagggtct

SEQ ID NO: 120053 - DNA, 201 bp, Homo sapiens
gtttctaccttgtcttgtctcgtcattctcttaatacatcaaagagcaaaagtgtttaattttgatgaagctagtttatctgtatttttctttaatggatrttgcttttagtgtcatgtctaataattctttgtttaacttcaggttttgaagattttctcctgggtttctttgcatgttttacatttagatctctaatcc

SEQ ID NO: 120054 - DNA, 201 bp, Homo sapiens
ccttcatattttgaaatacgatagattaaaggaagttacaaaagagtaaacaagtcctgtgtaccttgcattctttttccctcacaggtaacctcttatayaactataatacattatcataaccaggagatagatgatgtacacactttatttcaaatttcatcaatttgacatgtactcatttatgtgtatgtatggttc

SEQ ID NO: 120055 - DNA, 201 bp, Homo sapiens
agggttctaggtatgaggttttgtcagatatgtggtttgcagatattttcttctggtttctaccttgtcttgtctcgtcattctcttaatacatcaaagarcaaaagtgtttaattttgatgaagctagtttatctgtatttttctttaatggatgttgcttttagtgtcatgtctaataattctttgtttaacttcaggt

SEQ ID NO: 120056 - DNA, 201 bp, Homo sapiens
caaatttttgtaaatgtcagtatcagaattgaaaaaagaattgaatttttcttgtttgctttggcggccatgtcttacctttttagtactgttctggtctrttgcggtcttttgtccacaactaattttcaggtatcaggattacttaaaatctaatacatcttgtattttcagtgcgggtaaaaaggactattttagcct

SEQ ID NO: 120057 - DNA, 201 bp, Homo sapiens
tagctattcagatcttttgcccatttatttaccttcatattttgaaatacgatagattaaaggaagttacaaaagagtaaacaagtcctgtgtaccttgcrttctttttccctcacaggtaacctcttatataactataatacattatcataaccaggagatagatgatgtacacactttatttcaaatttcatcaatttg

SEQ ID NO: 120058 - DNA, 201 bp, Homo sapiens
ctaatgatgttttcagggttctaggtatgaggttttgtcagatatgtggtttgcagatattttcttctggtttctaccttgtcttgtctcgtcattctctwaatacatcaaagagcaaaagtgtttaattttgatgaagctagtttatctgtatttttctttaatggatgttgcttttagtgtcatgtctaataattcttt

SEQ ID NO: 120059 - DNA, 201 bp, Homo sapiens
actccagcctgggcgacagagggagactccatctcaaaaaaaaaaagaaaccttctggaaaggattcacctttctagatgccattaagaatattcatgatycatgggaggaggacaaaatatcaacataaacaggaatttggaagaagttgattccaaccctcatgggtgactttgaggggctcaaaacttcagtggagga

SEQ ID NO: 120060 - DNA, 201 bp, Homo sapiens
tgttttccaaatagcctgtatcattttatattcccaccagcaaaatatgaaggttaatgtctctttatccttgacaggattggatatcatcacactctttsattgtagctattttctagtggttgtgaagtggctttaatttgcttttctctaatgcattctgatgttgatcatctcatgaagttattagccattcattta

SEQ ID NO: 120061 - DNA, 201 bp, Homo sapiens
ctcattgtggttttaatttgcattttcctaatggctaatgatgttttcagggttctaggtatgaggttttgtcagatatgtggtttgcagatattttcttstggtttctaccttgtcttgtctcgtcattctcttaatacatcaaagagcaaaagtgtttaattttgatgaagctagtttatctgtatttttctttaatgg

SEQ ID NO: 120062 - DNA, 201 bp, Homo sapiens
gtggtggcgggtgcctgtagttccagctactcgggaggctgaggcaggagactggcgtgaacccaggaggcggagcttgcagtgagccgagattacgccastgcactccagcctgggcgacagagggagactccatctcaaaaaaaaaaagaaaccttctggaaaggattcacctttctagatgccattaagaatattcat

SEQ ID NO: 120063 - DNA, 201 bp, Homo sapiens
tattgtcactcttttttatttttgtctttctgagagatgtgtagttatacctcattgtggttttaatttgcattttcctaatggctaatgatgttttcagsgttctaggtatgaggttttgtcagatatgtggtttgcagatattttcttctggtttctaccttgtcttgtctcgtcattctcttaatacatcaaagagca

SEQ ID NO: 120064 - DNA, 201 bp, Homo sapiens
ggaggccgaggcaggtggatcatgaggtcaggagatcgagaccatcctggctaacacggtgaaaccctgtgtctactaaaagtacaaaaaattagccgggygtggtggcgggtgcctgtagttccagctactcgggaggctgaggcaggagactggcgtgaacccaggaggcggagcttgcagtgagccgagattacgcca

SEQ ID NO: 120065 - DNA, 201 bp, Homo sapiens
tgtttttaaagaaactgtcatctgttttccagagtggctcttccattttacatttttaccaccaatatttaagagatcatttacctgcattcttgttggtrtttggtattgtcactcttttttatttttgtctttctgagagatgtgtagttatacctcattgtggttttaatttgcattttcctaatggctaatgatgtt

SEQ ID NO: 120066 - DNA, 201 bp, Homo sapiens
ctttgggaggccgaggcaggtggatcatgaggtcaggagatcgagaccatcctggctaacacggtgaaaccctgtgtctactaaaagtacaaaaaattagscgggcgtggtggcgggtgcctgtagttccagctactcgggaggctgaggcaggagactggcgtgaacccaggaggcggagcttgcagtgagccgagatta

SEQ ID NO: 120067 - DNA, 201 bp, Homo sapiens
ggagtaggattgatgggtcatatagttaagtttatattttgtttttaaagaaactgtcatctgttttccagagtggctcttccattttacatttttaccascaatatttaagagatcatttacctgcattcttgttggtgtttggtattgtcactcttttttatttttgtctttctgagagatgtgtagttatacctcatt

SEQ ID NO: 120068 - DNA, 201 bp, Homo sapiens
aaagattcctttcaaaatattaccgctcattgacagtgcacctggtcatctaagagctctgagggagatgtacaggagatgaatgttgttttcatgcctgytgacacatctgttctgcagcctgtgaaggagtaattttgactttaaagtcttactatgaaatacattacttaactggagctgccatagatagtgattcct

SEQ ID NO: 120069 - DNA, 201 bp, Homo sapiens
taaatatagatgctgtcagcattcatgcttagcgttttatgtgaacataagttttgctttctctaggacaggtacctgggagtaggattgatgggtcatayagttaagtttatattttgtttttaaagaaactgtcatctgttttccagagtggctcttccattttacatttttaccaccaatatttaagagatcatttac

SEQ ID NO: 120070 - DNA, 201 bp, Homo sapiens
agacgtattgctcagaaaaaagattcctttcaaaatattaccgctcattgacagtgcacctggtcatctaagagctctgagggagatgtacaggagatgartgttgttttcatgcctgctgacacatctgttctgcagcctgtgaaggagtaattttgactttaaagtcttactatgaaatacattacttaactggagctg

SEQ ID NO: 120071 - DNA, 201 bp, Homo sapiens
gtttaaagtttccttttaatgtgatcagttattaatatatgtaaaaatatatagagatatgtattaaggccacctcagtttcagtagaggatattaatgakattaaagtgatcataggctggacgtggtggttcatgcctgtaatcccagcactttgggaggctgaagctggtagatcacttgagcctaggagttcgagac

SEQ ID NO: 120072 - DNA, 201 bp, Homo sapiens
tgtgacggccaagaaaggtgaagaagctgcagacgaaaagttgtaagctaacagaggttgattcttgaggtttaaggaaaaaagccctccccataacacaraagtgcaaggtgaagcagcatgtgctgatgtagaagctgctaagataattgatgcaggtggctacactaaacagattttcagtgtggatgaaacagcttt

SEQ ID NO: 120073 - DNA, 201 bp, Homo sapiens
caataaatgtggaattgtcagcttataggtggtgattgaggtaagagaattagattagaattgaagaattattgtattcaataattgtgtgtacatgtagyatataggccttttcccaaggagagggttttaacattccttagattctcaaagggatttgtggcctccaaatagttaaaatccagtggtgtagaatgagaa

SEQ ID NO: 120074 - DNA, 201 bp, Homo sapiens
gcacaagagccaacttgtgcatgcagaggaaaagctctcgaaggaaattaaaagtgctatttcagtgaacatggcaactgataaagcgaaacagccttatygctgatatgaagaaagttttagtgtctggacagaagatcaaaccagccataacattcccttatgctgaagtcgaatccacagcaaggccttaactctctt

SEQ ID NO: 120075 - DNA, 201 bp, Homo sapiens
tttgacccctttcctgtctctctgtctcctcctgcctcactatatcctgagacaaaacaatattgaaattagaccaattagtaaccctctaatggcctctragttttcaaatgaagggaagaatcacaggtttctcactttacatcaaaaactagaaatgattaagcttagtgaggaaggcgtgttgaaagctgagatagg

SEQ ID NO: 120076 - DNA, 201 bp, Homo sapiens
gttggtgaggatgtccagaaattggaactcctgtgcattgctgatgggaatgtaacatagctgctgtggaaaagtttggcgatttctcaaaaagttacacrtgtagccaggcatggtggtgcatgcctgtactcccaagctgttcaggagactgaggcaggggggtcatgtgaacccaggagttctaggctgctgcgagct

SEQ ID NO: 120077 - DNA, 201 bp, Homo sapiens
gcagagggagatgtggaaggggttagtgatctcttaggtatcagggataaaagagatgttaaaatatttacttttagaggctgagaggatgggatttcatsaaaggaagttgagactgtaatcggtgcattgtagattttggacgtttcaggttggagcacagctctcatgcatggttttcttcatgaattttcatttctt

SEQ ID NO: 120078 - DNA, 201 bp, Homo sapiens
gcctctggtatgtttgatgacagcggtaagaaggcactttataagtgtgtcggaagtttgggaaagagcagaacaataaatgtggaattgtcagcttatargtggtgattgaggtaagagaattagattagaattgaagaattattgtattcaataattgtgtgtacatgtagtatataggccttttcccaaggagagggt

SEQ ID NO: 120079 - DNA, 201 bp, Homo sapiens
atgtggaattgtcagcttataggtggtgattgaggtaagagaattagattagaattgaagaattattgtattcaataattgtgtgtacatgtagtatatargccttttcccaaggagagggttttaacattccttagattctcaaagggatttgtggcctccaaatagttaaaatccagtggtgtagaatgagaagagggc

SEQ ID NO: 120080 - DNA, 201 bp, Homo sapiens
ttgatttcagtttttagcaattgtaaatatagatgctgtcagcattcatgcttagcgttttatgtgaacataagttttgctttctctaggacaggtacctrggagtaggattgatgggtcatatagttaagtttatattttgtttttaaagaaactgtcatctgttttccagagtggctcttccattttacatttttacca

SEQ ID NO: 120081 - DNA, 201 bp, Homo sapiens
gagtgttactacctatctcctttttcttttaaaatttagttttaaaaagtacacctgatattaagtttttttctgtgtatagttctgtgaatttcagtacrtgtatagattcatgtaattactacaatgaggatatagaacatttacatcaccctcaaaaatttctctcatgatttcgagacttatccaagttgtttcctg

SEQ ID NO: 120082 - DNA, 201 bp, Homo sapiens
ttttacttccacaaaatttagcaaaaagagattgggttccatttgtcacactgggcactttaaagtccaaaaatacaatagagagactctagatttggttwtctttctcatatgtaagtttttaaattaaaagattcaactaatcaatccttccaattctgttgggagaaagtgctgtaataccttcttttttacatgccc

SEQ ID NO: 120083 - DNA, 201 bp, Homo sapiens
ggaatctgtgaaagaagcagacttgtagtcttggtatgtatgtggagtgttactacctatctcctttttcttttaaaatttagttttaaaaagtacacctratattaagtttttttctgtgtatagttctgtgaatttcagtacatgtatagattcatgtaattactacaatgaggatatagaacatttacatcaccctca

SEQ ID NO: 120084 - DNA, 201 bp, Homo sapiens
tgctcaacattatatttgttttagatttgtctgtgttgatgcgtgtgttgtttactcattcagtgtgatgtatatatttaatagtattccatcgtacctcrttttgtgctttgctttattgtacttcacagatactgcatttttttttacagattgaaggtttgtggcaacttcgtgttgagcaagtctgttggtgccatt

SEQ ID NO: 120085 - DNA, 201 bp, Homo sapiens
aaggtcaaacaggatttatgcatcatccatcattttttacgtctgagccaccaagtatttatcagtgggtgagttcttgtctgaagggtgaaggaatgccrccttatccttacctccctggaatctgtgaaagaagcagacttgtagtcttggtatgtatgtggagtgttactacctatctcctttttcttttaaaattta

SEQ ID NO: 120086 - DNA, 201 bp, Homo sapiens
ggactataggcgcctgccaccacgcctggctaattttttgtatttttagtagagacggggtttcaccgtgttagccagggtggtctcgatctcctgacctygtgatccacccacctcggcctcctaacgtgctgggattacaggcgtgagccaccgcgcccagccgctagctgtattttttaacatttgtgaaatgtacgt

SEQ ID NO: 120087 - DNA, 201 bp, Homo sapiens
tatctaattttaaaggtcaaacaggatttatgcatcatccatcattttttacgtctgagccaccaagtatttatcagtgggtgagttcttgtctgaagggygaaggaatgccaccttatccttacctccctggaatctgtgaaagaagcagacttgtagtcttggtatgtatgtggagtgttactacctatctcctttttc

SEQ ID NO: 120088 - DNA, 201 bp, Homo sapiens
aaaatttagcaaaaagagattgggttccatttgtcacactgggcactttaaagtccaaaaatacaatagagagactctagatttggttatctttctcatawgtaagtttttaaattaaaagattcaactaatcaatccttccaattctgttgggagaaagtgctgtaataccttcttttttacatgcccttactgttttag

SEQ ID NO: 120089 - DNA, 201 bp, Homo sapiens
tgaaatttggggcccagttgttggaacagacctgaatcctggatgtttcttttgtttttttcacctttaggtttagggcaagatttttgattagattcttytttttttttttttttttttcttgagacagggtctcactctgtcgcccagacgggagtgcagtggtacgatcttggctcactgcatcctctgccttccagg

SEQ ID NO: 120090 - DNA, 201 bp, Homo sapiens
gagactgaagcaggaagattgcttgagccaaggagtttgaggctgcagtgagctgtgattgtgtcactgcactccagcctgggtgacaaagtgagatgctrtctctgaaaagagaaaaataatgttaattttcttcctttgcagagtattgcactgtacatacttggtgatgagagcttggtttctgatgaatcctcacag

SEQ ID NO: 120091 - DNA, 201 bp, Homo sapiens
ggctagtgctaccatattggacagtgcagatacagacacagaacatctccatcaccactgtactatcctagaccctgagctaaaggtactgaaatttgggrcccagttgttggaacagacctgaatcctggatgtttcttttgtttttttcacctttaggtttagggcaagatttttgattagattcttcttttttttttt

SEQ ID NO: 120092 - DNA, 201 bp, Homo sapiens
ttagctgtatttttttgagacggagtctcgctctgttgcccagggtggagtgcaatggcacgatctcggcttactgcaagctccgcctcccgggttcacamtattctcctgcctcagcctcccgagtagctgggactataggcgcctgccaccacgcctggctaattttttgtatttttagtagagacggggtttcaccgt

SEQ ID NO: 120093 - DNA, 201 bp, Homo sapiens
tagtctcactctgtttcagacattatgctggggctacaaaggtgaatgtagtttctgccattgaaggactcatagcctagaaaggagaacaaacagatcamctgaaatgctgtattctgaatgctgtataataactacctgtccacagagtgatgagagcccaaaggactgagtgccaaagggagggtttttcaaagaaga

SEQ ID NO: 120094 - DNA, 201 bp, Homo sapiens
tttggagggctatggctcactgctgttaaatgcattggtactctaaacctgtcacagatgggaaaccttcaatgagtataggtagatttttttttttttttaaagttaaagttttgaaattgaagcatgggtacctttggtaagtactaaagttttggtaaagtttcactatattaaatgtggtatatgttagctgtattt

SEQ ID NO: 120095 - DNA, 201 bp, Homo sapiens
ttttgagatggagtcttgctctgtcacccaggctggagtgcagtggcatgatctcagctcactgcaagctctgcctcccaggttcatgccattctcccgcytcaccctcccgagtagctgggactgcagttgcccgccaccacacccggctaattttgtttttatatttttagtagagctggggtttcactgtgttagcca

SEQ ID NO: 120096 - DNA, 201 bp, Homo sapiens
acccagctcatctttggttcagtgaccaacataccagcaaaggatgcagcaccagtggaggtaatgtaggcacatttgagaagttgacaattacgcttcawcagatttttcagtcaaaaaatctgttaatttgctcagattgggaaataaattttttgtcttttttgtttttttagaaaatagacaccatgctggtcttgg

SEQ ID NO: 120097 - DNA, 201 bp, Homo sapiens
cagagtaatatagaggaataatatgaaacattcaatatagagaattattgagtaaattcttcatgtaattctgtagtgtaatgcatatatccacatcctcygttaatcagtgtaccaaactttgtaggagttgtgtttgaattgagtcttactccatgggcaaataaattttgttccagatttttgaagaacaaaaaaaga

SEQ ID NO: 120098 - DNA, 201 bp, Homo sapiens
tggcatttgtgaatgttatataaatgggctcatacagtatgtaaacttctgagattgtctttttctgttcagtataatacttttaatacccatacaggttrttgcatgtatcaagtttcttttttattttattatttagctgtgtaaagtttcaagagagtaatgataaaacccagctcatctttggttcagtgaccaaca

SEQ ID NO: 120099 - DNA, 201 bp, Homo sapiens
ctttttttttttcctgagacggagtttcacttttgttgcccaggctggagtgcaatggcacaatctcagctcaccgcaacctctgcctcctggattcaagygattctcctgcctcagcctcccgagtagctgagattacaggcatgtgccaccacgcccagctaattttgtatttttttagtagaggcgggatttctccat

SEQ ID NO: 120100 - DNA, 201 bp, Homo sapiens
taaccactaattctccatcttgataatttggcatttgtgaatgttatataaatgggctcatacagtatgtaaacttctgagattgtctttttctgttcagyataatacttttaatacccatacaggttgttgcatgtatcaagtttcttttttattttattatttagctgtgtaaagtttcaagagagtaatgataaaacc

SEQ ID NO: 120101 - DNA, 201 bp, Homo sapiens
cgttaactccttatagtcacatacaccattacccactgatcctggtaaccactaattctccatcttgataatttggcatttgtgaatgttatataaatggkctcatacagtatgtaaacttctgagattgtctttttctgttcagtataatacttttaatacccatacaggttgttgcatgtatcaagtttcttttttatt

SEQ ID NO: 120102 - DNA, 201 bp, Homo sapiens
atctgtcttacgttaactccttatagtcacatacaccattacccactgatcctggtaaccactaattctccatcttgataatttggcatttgtgaatgttwtataaatgggctcatacagtatgtaaacttctgagattgtctttttctgttcagtataatacttttaatacccatacaggttgttgcatgtatcaagttt

SEQ ID NO: 120103 - DNA, 201 bp, Homo sapiens
gtctgaaaaagaaaaaaaggaggcttgagagattactgattgccctttaggcctctggtatgtttgatgacagcggtaagaaggcactttataagtgtgtyggaagtttgggaaagagcagaacaataaatgtggaattgtcagcttataggtggtgattgaggtaagagaattagattagaattgaagaattattgtatt

SEQ ID NO: 120104 - DNA, 201 bp, Homo sapiens
aattgtcagcttataggtggtgattgaggtaagagaattagattagaattgaagaattattgtattcaataattgtgtgtacatgtagtatataggccttytcccaaggagagggttttaacattccttagattctcaaagggatttgtggcctccaaatagttaaaatccagtggtgtagaatgagaagagggctaggaa

SEQ ID NO: 120105 - DNA, 201 bp, Homo sapiens
gaataacatctgctgttttgtaatatccacattcaaatagtgctttatagttgacaaaatcatagtttacatgtaaagtctcaaacaaggtaagtttcctrttttagtgatgaggaaacttgcctaaatgtctttcctgggatgcgagtgtttgatagttgtggactcattttgctatgctgtccttgttgcagtctgagg

SEQ ID NO: 120106 - DNA, 201 bp, Homo sapiens
gactggctatactgcggtgggagttctagaataacatctgctgttttgtaatatccacattcaaatagtgctttatagttgacaaaatcatagtttacatrtaaagtctcaaacaaggtaagtttcctgttttagtgatgaggaaacttgcctaaatgtctttcctgggatgcgagtgtttgatagttgtggactcatttt

SEQ ID NO: 120107 - DNA, 201 bp, Homo sapiens
gatttttagtctttgtcctgagattagtggaaggtcacgaaaaaatggagatgacctgctcagattttcattttgacaggatgactgactggctatactgyggtgggagttctagaataacatctgctgttttgtaatatccacattcaaatagtgctttatagttgacaaaatcatagtttacatgtaaagtctcaaaca

SEQ ID NO: 120108 - DNA, 201 bp, Homo sapiens
ccatgcagggatttttagtctttgtcctgagattagtggaaggtcacgaaaaaatggagatgacctgctcagattttcattttgacaggatgactgactgrctatactgcggtgggagttctagaataacatctgctgttttgtaatatccacattcaaatagtgctttatagttgacaaaatcatagtttacatgtaaag

SEQ ID NO: 120109 - DNA, 201 bp, Homo sapiens
caggaagtcctgagatgactgtcttttccatataggaaccttgtatcatatagggaccttgtaaataagtttctgaaatctaccttctcagaaaactaggrcatctctgtaaaccacagagttgtttgaagatactggttttgtaagggcctgtgagccatgcagggatttttagtctttgtcctgagattagtggaaggt

SEQ ID NO: 120110 - DNA, 201 bp, Homo sapiens
cacttctctttactcacatacctgcaatttttttcgttcttcaccttgtgtatgaggagcttaagttgaatactctaatgggagaaggaatttgttcactygttgaacttctcgttcagttggcaaggtaaatttgtttgtaggttagaaactgccaggaagtcctgagatgactgtcttttccatataggaaccttgtat

SEQ ID NO: 120111 - DNA, 201 bp, Homo sapiens
tcattttttatggctgcatagtattccatggtgtatatgtgccacattttcttaatccagtctatcattgttggacatttgggttggttccaagtctttgstattgtgaatagtgccgcaataaacatatgtgtgcatgtgtctttatagcagcatgatttatagtcctttgggtatatacccagtaatgggatggctggg

SEQ ID NO: 120112 - DNA, 201 bp, Homo sapiens
tttttggtggagatggggtttcatcatgttagccaggctggtatcgaactcctgacttcaggtgatccacccacctcggcctcccaaagttctgagattamaggggtgagccaccgtgcctagctgctttttatcttctgtattatgtcttggcaaactgtaggccatgggctaaatctggcctgcagcatgtttttgtaa

SEQ ID NO: 120113 - DNA, 201 bp, Homo sapiens
atttttggtggagatggggtttcatcatgttagccaggctggtatcgaactcctgacttcaggtgatccacccacctcggcctcccaaagttctgagattrcaggggtgagccaccgtgcctagctgctttttatcttctgtattatgtcttggcaaactgtaggccatgggctaaatctggcctgcagcatgtttttgta

SEQ ID NO: 120114 - DNA, 201 bp, Homo sapiens
agagaacctttacctactatgttcagcatgctgcacccactagatgaaataactccacttgtttgtaaatctggaagtaagtgtatttctatattcttttrgataagctcttttttttttgactttggtgagggaggttataaaggcgcttatatgaaaactgacttataaaaataatgtaaacattttacaaaaataact

SEQ ID NO: 120115 - DNA, 201 bp, Homo sapiens
cctgcactctagcctgggcaacagagtgagactccatctcagaaaaaaaaagcagacttaatttacttgaagtagtttgtttcttccttttttaaaaaatrcattcctttgtcagcagatatgggagaataaatttctttcttagctgccaaagacacactgccagtaagagaggtcaataaaaaaagaccgctttatgca

SEQ ID NO: 120116 - DNA, 201 bp, Homo sapiens
cgggcgctcctggcctgcgggctggggtgctccttccggctcctgcttgccaacctctttcctgagctgtgcgtagcatcccatgtgcagcctcagctttyagactggcctccagcccctctgagctgtttttctgagcctcgggctctcagcctgttttcaccgtcctctagaaaggctggggaagctcttgtggagact

SEQ ID NO: 120117 - DNA, 201 bp, Homo sapiens
tactaaaaatacaaaaaaactagctgggcgtggtggcgtgtgcctgtaatcccaactactcgggaggttgatacaggagaatcgcttgaacgtgggaggtrgaggttgtagtgagccgagatgatgcccctgcactctagcctgggcaacagagtgagactccatctcagaaaaaaaaagcagacttaatttacttgaagt

SEQ ID NO: 120118 - DNA, 201 bp, Homo sapiens
ggggcactattttgtgactgttcaggtaaaagattggtgccttggcaaagaaggggtgataaagcagagggagatgtggaaggggttagtgatctcttagrtatcagggataaaagagatgttaaaatatttacttttagaggctgagaggatgggatttcatgaaaggaagttgagactgtaatcggtgcattgtagatt

SEQ ID NO: 120119 - DNA, 201 bp, Homo sapiens
ctttatctgtcttacgttaactccttatagtcacatacaccattacccactgatcctggtaaccactaattctccatcttgataatttggcatttgtgaakgttatataaatgggctcatacagtatgtaaacttctgagattgtctttttctgttcagtataatacttttaatacccatacaggttgttgcatgtatcaa

SEQ ID NO: 120120 - DNA, 201 bp, Homo sapiens
acaaaacatctttatctgtcttacgttaactccttatagtcacatacaccattacccactgatcctggtaaccactaattctccatcttgataatttggcrtttgtgaatgttatataaatgggctcatacagtatgtaaacttctgagattgtctttttctgttcagtataatacttttaatacccatacaggttgttgc

SEQ ID NO: 120121 - DNA, 201 bp, Homo sapiens
ttctcagttttcgtaattggcagaactgatttctgaatccttgaagttgatcagttgacaggaatgcatttacgatttttatcttttcttttggggttacytttcagtttgactttgaaggatcactttctcctgtcattgcgcccaaaaaagcaaggccttccgagactggatctgatgatgtaagcattattatttctt

SEQ ID NO: 120122 - DNA, 201 bp, Homo sapiens
atatgtagatgtgtgtaaataccaccacaatcaagatacaaaacatctttatctgtcttacgttaactccttatagtcacatacaccattacccactgatsctggtaaccactaattctccatcttgataatttggcatttgtgaatgttatataaatgggctcatacagtatgtaaacttctgagattgtctttttctgt

SEQ ID NO: 120123 - DNA, 201 bp, Homo sapiens
gttttttcacatatgtagatgtgtgtaaataccaccacaatcaagatacaaaacatctttatctgtcttacgttaactccttatagtcacatacaccattrcccactgatcctggtaaccactaattctccatcttgataatttggcatttgtgaatgttatataaatgggctcatacagtatgtaaacttctgagattgt

SEQ ID NO: 120124 - DNA, 201 bp, Homo sapiens
tttcttatgatattataaggaggtattatttttaaaaattaatattctttttattcttctcaggactgggaatatttactaaattcagactaccaccagartgttgagtctcatcttttgaacagatctttatgtctgagtccttcagaagcttcacagatgaaggatgaggatttttcacagaatctcagtctggattct

SEQ ID NO: 120125 - DNA, 201 bp, Homo sapiens
ctataaaacctagcctgagataatcttaaattttctctctcaatctctacctaaatagtataattcttctcccaatgtctttcctaaaaggtcatgaaaakattttttttaatggtttttaaaggtggcttgccttaacgtttataactggcttgctattttatagttacttcattcttagcattgtctttttttttttta

SEQ ID NO: 120126 - DNA, 201 bp, Homo sapiens
tccaaaaacctgaaattctccaaaatctgcaacttgttgagctccagcatgacactcaaaggtaaatgcttattggagcatttcaggttttggattctcawattagggttgctgtcatcaaaaagatatgtcatgatcaagtgggttttgtctcagggatgcagggatggtttaacatacacaagtcaataaatgtgacac

SEQ ID NO: 120127 - DNA, 201 bp, Homo sapiens
taaacaagtcctgtgtaccttgcattctttttccctcacaggtaacctcttatataactataatacattatcataaccaggagatagatgatgtacacackttatttcaaatttcatcaatttgacatgtactcatttatgtgtatgtatggttctatgcagttttttcacatatgtagatgtgtgtaaataccaccacaa

SEQ ID NO: 120128 - DNA, 201 bp, Homo sapiens
tgaagtagccactagtaatagtggtttaccataagcatctttatattgtgcattaaataatttgtgctgttaggattgaactcctttgagggaaaaaacayataagtcttgttgtaccctttcttttcaggtagcaatgaagtagaaaaatgcatatgtatattgcaaagctcatgtattaacatgcatagcatagaagga

SEQ ID NO: 120129 - DNA, 201 bp, Homo sapiens
caaaagagtaaacaagtcctgtgtaccttgcattctttttccctcacaggtaacctcttatataactataatacattatcataaccaggagatagatgatstacacactttatttcaaatttcatcaatttgacatgtactcatttatgtgtatgtatggttctatgcagttttttcacatatgtagatgtgtgtaaatac

SEQ ID NO: 120130 - DNA, 201 bp, Homo sapiens
ctacttttcctataaaacctagcctgagataatcttaaattttctctctcaatctctacctaaatagtataattcttctcccaatgtctttcctaaaaggkcatgaaaatattttttttaatggtttttaaaggtggcttgccttaacgtttataactggcttgctattttatagttacttcattcttagcattgtctttt

SEQ ID NO: 120131 - DNA, 201 bp, Homo sapiens
aactttatgtatgttttctcatttaatagagagatcttatgtacttttgtgtttgtgttatatgttgaatattttaactcttttgagagactttttccttkgtgttatctttttcttttcctcttcaaagcaaataacactacagctctgtactactagatacttcttagatagtgagagagcactattcgatacctgttg

SEQ ID NO: 120132 - DNA, 201 bp, Homo sapiens
tcatgagtttgagcccagcctgggcaacacagcgagactccgtctttacaaaaaataaaaataatataaaataataagctgggcatggtggtgtgtgcctrtagtcctagctactctggagactgaagcaggaagattgcttgagccaaggagtttgaggctgcagtgagctgtgattgtgtcactgcactccagcctggg

SEQ ID NO: 120133 - DNA, 201 bp, Homo sapiens
aacacagttcagtgtagtggccactaacttgccatctacttttcctataaaacctagcctgagataatcttaaattttctctctcaatctctacctaaatwgtataattcttctcccaatgtctttcctaaaaggtcatgaaaatattttttttaatggtttttaaaggtggcttgccttaacgtttataactggcttgct

SEQ ID NO: 120134 - DNA, 201 bp, Homo sapiens
atgcatttacgatttttatcttttcttttggggttacttttcagtttgactttgaaggatcactttctcctgtcattgcgcccaaaaaagcaaggccttcygagactggatctgatgatgtaagcattattatttcttgctaatataaattaatttatggatattcatactattcttccacttctgtggtattcctatcaa

SEQ ID NO: 120135 - DNA, 201 bp, Homo sapiens
tgtatcattttatattcccaccagcaaaatatgaaggttaatgtctctttatccttgacaggattggatatcatcacactctttgattgtagctattttcyagtggttgtgaagtggctttaatttgcttttctctaatgcattctgatgttgatcatctcatgaagttattagccattcatttatcttcttaggtaaaat

SEQ ID NO: 120136 - DNA, 201 bp, Homo sapiens
gaaaatgtagtccaatcagtctgaatataaaaatcagttgattattagattatattactagccccggcatcttatacatgtggaaagatgaatacaccagmtgaatgcaggtggaccttccttcttaccaaaacacagttcagtgtagtggccactaacttgccatctacttttcctataaaacctagcctgagataatct

SEQ ID NO: 120137 - DNA, 201 bp, Homo sapiens
  misc_feature (1)...(201): n = A,T,C or G
ctgagaattatgaccatatgaacatttgaacaaaggtcttgagcaaaaatgtggacatatgtgattttatttttcttgagtaaatgcctaggattgggtcnttgggttgaatggtaaattcatgtttaactttttaagaaatcaccaaactgttttccaaatagcctgtatcattttatattcccaccagcaaaatatgaa

SEQ ID NO: 120138 - DNA, 201 bp, Homo sapiens
aatcacaagtagaaccaaaatagacttgaatatttggaaaatgtagtccaatcagtctgaatataaaaatcagttgattattagattatattactagcccyggcatcttatacatgtggaaagatgaatacaccagctgaatgcaggtggaccttccttcttaccaaaacacagttcagtgtagtggccactaacttgcca

SEQ ID NO: 120139 - DNA, 201 bp, Homo sapiens
actactgagaattatgaccatatgaacatttgaacaaaggtcttgagcaaaaatgtggacatatgtgattttatttttcttgagtaaatgcctaggattgrgtcattgggttgaatggtaaattcatgtttaactttttaagaaatcaccaaactgttttccaaatagcctgtatcattttatattcccaccagcaaaata

SEQ ID NO: 120140 - DNA, 201 bp, Homo sapiens
tgcagtaaatcacaagtagaaccaaaatagacttgaatatttggaaaatgtagtccaatcagtctgaatataaaaatcagttgattattagattatattastagccccggcatcttatacatgtggaaagatgaatacaccagctgaatgcaggtggaccttccttcttaccaaaacacagttcagtgtagtggccactaa

SEQ ID NO: 120141 - DNA, 201 bp, Homo sapiens
tttcttttatggttagttctttctgtatctagtccaagaatttttaatttagagtaacacactgtattaagccttacaaaaacatcagtaaattccaagayctggaaatagcataaaccacattctctgaaccaaatgcagtaaatcacaagtagaaccaaaatagacttgaatatttggaaaatgtagtccaatcagtct

SEQ ID NO: 120142 - DNA, 201 bp, Homo sapiens
ggcaagacgggaaagtcaagatggacgcgtccatttgaacgtctcgcacgccttcctgccattagcactcgagcccgctgctgttgcccgttcttcctccrgaataggggagggagagggaatgagaagctgctgcggcccaagagtcactgtgaaggaccccgccgctgccctcgggcctcctcggcccctgcgcctccg

SEQ ID NO: 120143 - DNA, 201 bp, Homo sapiens
acccgcctcggcctcccaaagtgctgggattacaggcatgagccactgcacccggcccagttttttcttttatggttagttctttctgtatctagtccaakaatttttaatttagagtaacacactgtattaagccttacaaaaacatcagtaaattccaagatctggaaatagcataaaccacattctctgaaccaaatg

SEQ ID NO: 120144 - DNA, 201 bp, Homo sapiens
gatggggttccaccgtgttagccaggaaggtcgtgatctcctgaccttgtgatccacccgcctcggcctcccaaagtgctgggattacaggcatgagccastgcacccggcccagttttttcttttatggttagttctttctgtatctagtccaagaatttttaatttagagtaacacactgtattaagccttacaaaaac

SEQ ID NO: 120145 - DNA, 201 bp, Homo sapiens
gttcttagctttgtagaggagctttaaagagctagggagtgctttgtgatgtccactctacgtgcgctctaaggctggagtacaggtgaaggatgtgctakttctgttccctgaggttcttctgttggggaatattgtgcagtataataatatatggacatgcctgctgggcatggtggctcacacctgtaatcccaacac

SEQ ID NO: 120146 - DNA, 201 bp, Homo sapiens
gcgttacaggaatgttatcatttacctcttaggacttatgcaaagttaaagtagctaaatgtatataagctttgacacagggcctagtaggtattaagtaygcaataaatggcagatgtttactagcggcgtgtttatcttgccccctatgaattatgagcacaccgaagggcagcagcatacagcacctgtcaggcatgt

SEQ ID NO: 120147 - DNA, 201 bp, Homo sapiens
atgttgttacaggagtaggagagggaaggaaactaccattaaaatcagtccttagaagcccaggcactgttctagatgtttgcatatattaatatgatttmatttcatctttacagtaacctggaagaaagatatttaaataatgcctttccagatcaaaaaatgagttttgatggcttttctcagttttcgtaattggca

SEQ ID NO: 120148 - DNA, 201 bp, Homo sapiens
ggagaatcacttgaacctgggagacggaggttgcagtgagccgagatcacatcactgcactccagctgggcgatgagcaaaactccgtgtcaaaaaaaaaataaataacaagattcagttcttagctctgccattttctcattgtgctgctttgagcagatcattagagctttcttagctatagtttccttacgcgttaca

SEQ ID NO: 120149 - DNA, 201 bp, Homo sapiens
tgtttttgaatcattacatattattgtttgttagaccatatgcaaaaaagaaacagttaaatttccttgtccttaatttctcagaaaacaattcatttgtrtcgtatttacaactttttacaggttgttctgttgtccccagttccagaactgagggattcttcaaaacttcatgattctctctataatgaggattgtact

SEQ ID NO: 120150 - DNA, 201 bp, Homo sapiens
acagtaacctggaagaaagatatttaaataatgcctttccagatcaaaaaatgagttttgatggcttttctcagttttcgtaattggcagaactgatttcygaatccttgaagttgatcagttgacaggaatgcatttacgatttttatcttttcttttggggttacttttcagtttgactttgaaggatcactttctcct

SEQ ID NO: 120151 - DNA, 201 bp, Homo sapiens
taatcccagctactcgggaggctgaggcaggagaatcacttgaacctgggagacggaggttgcagtgagccgagatcacatcactgcactccagctgggcratgagcaaaactccgtgtcaaaaaaaaaataaataacaagattcagttcttagctctgccattttctcattgtgctgctttgagcagatcattagagctt

SEQ ID NO: 120152 - DNA, 201 bp, Homo sapiens
ttaccttcatattttgaaatacgatagattaaaggaagttacaaaagagtaaacaagtcctgtgtaccttgcattctttttccctcacaggtaacctcttrtataactataatacattatcataaccaggagatagatgatgtacacactttatttcaaatttcatcaatttgacatgtactcatttatgtgtatgtatgg

SEQ ID NO: 120153 - DNA, 201 bp, Homo sapiens
aaataaaataatgttgtcttaatgtattttcgtgtctttttgaatatttatctaattttaaaggtcaaacaggatttatgcatcatccatcattttttacrtctgagccaccaagtatttatcagtgggtgagttcttgtctgaagggtgaaggaatgccaccttatccttacctccctggaatctgtgaaagaagcagac

SEQ ID NO: 120154 - DNA, 201 bp, Homo sapiens
aaaaatacaaaaaattagccaagcgtggtggcaggtgcctgtaatcccagctactcgggaggctgaggcaggagaatcacttgaacctgggagacggaggktgcagtgagccgagatcacatcactgcactccagctgggcgatgagcaaaactccgtgtcaaaaaaaaaataaataacaagattcagttcttagctctgc

SEQ ID NO: 120155 - DNA, 201 bp, Homo sapiens
acttggcacttaattagccttttttcccaatctaagtggtaaaattgaatatgcaaataaatggcttcaaaaaagatttggccgggcgcggtggcccacgyctgtaatcccagcacttttgggaggccgaggcgagtggatcacctgaggtcaggagttcgagaccagcctgcccaacgtggcgaaaccctgtctctacta

SEQ ID NO: 120156 - DNA, 201 bp, Homo sapiens
acccccaaaagaattagggttgctcaaccgttagtgtaaggtaaataatccaaaacacttagggtcccaagtatttcagataagggatactcagcctgtaygtacactcatgaactctacgcacttggcacttaattagccttttttcccaatctaagtggtaaaattgaatatgcaaataaatggcttcaaaaaagattt

SEQ ID NO: 120157 - DNA, 201 bp, Homo sapiens
tgtttattgcaacacaattcacaattgcaaagataaggaagcagcctaagtgcccattgaccaatgagtgaataaagaaaatgtatatatacaccatggartactaatcagccataacgaggaaatgaaataatgtcttttgcagcaagctggatggaactggaggccatgattctaagtgaagtaacccaggaatggaaa

SEQ ID NO: 120158 - DNA, 201 bp, Homo sapiens
ttaaaatctcccacaactcagcaataaaacaaactacccaattaaaaaattgggcagaaggacttaaatggacatttttctaaagatgcacacatggtcartaagcacatgaaaagatgctcagcttcgctaatcattaggcaaatgcaaattacaaccacaatgagataccactttactaggttggctgttattaaagaa

SEQ ID NO: 120159 - DNA, 201 bp, Homo sapiens
attgtgggttagttcactttgaagctaataattgcgagtccaccttataggcccatttttttcaacagctgtcaactctgccaccctctagcaaagaatayaagttaaattaatggattgactccattggttcttctgtcttcctggagttcatcgcagtctacatctgcactgttattttagaagcagactcattttgcc

SEQ ID NO: 120160 - DNA, 201 bp, Homo sapiens
ctgtcttcattttgattgtcaccagagaagggttaatgataaaattatggttgttgagatctgaaggattattatcagcaggtaaagagggaagagtattytatgccgagggaaacagtggaatactcagggacaagaagggtcctccggcttacctggaatggaaaaaaggccaatgggttataatagagaaagagaaga

SEQ ID NO: 120161 - DNA, 201 bp, Homo sapiens
gaacgtataagtcagacttatttttggatgatcatagtgaaacccgaagatccataatgaagtttatgtgacagagatccccacacaacaatctgagcgayctctatagtggtgtacaacttccctgttgctttggcagtttcttaaacgtaattattcccaaagcaaatctattcaagcatatttaaaaagaatgggaca

SEQ ID NO: 120162 - DNA, 201 bp, Homo sapiens
tgttgactcatgggaggatatagaaatttattaacagctttatttcattatcagaactcaattatatagttatttttatctttcagggatatgaggattgkctgagacacagagctgacaatgaagtcaacaaaagcactgtttacattattgaaaatgcaaagcgagtgagaaaagaaagtgaaaaaatcaaggtatttt

SEQ ID NO: 120163 - DNA, 201 bp, Homo sapiens
acctgttatgtcactacagccagtcttgatggggaatccaattgcaaggtaacagactaaaccttgcctaaacattttgatctcaggatagttaatcatamaatactgcctcccatcaccctctaatcttttattttttcttatttttattttttcttaggttttatatttgaaaagagctgttatgtaattgttttttaa

SEQ ID NO: 120164 - DNA, 201 bp, Homo sapiens
tattaagcaggccatatgcaccaaagcctcagggtaagactttctcaatatcctcccccctcatagtaactgaacttctaccttgtatcagcaccaggttwttggtatgataggtttcctgtccaattccctgtagcaggtcccatcccctgtagcaggtcacttttgtttctacctctcctctaacagtagtgatgtttc

SEQ ID NO: 120165 - DNA, 201 bp, Homo sapiens
ctattttgattaatgctgctgtgaacattggtatataagtatctgagtttttccctttgattcttttgagtatataacttagagcagaattactaggttgkaattatctttttaaaacctttttttttttttttaagacaagagtctcactctgtcacccaggctggagtacagtggcacgatctcggctcactgcagcct

SEQ ID NO: 120166 - DNA, 201 bp, Homo sapiens
cctgcagaccttctcagaagcaccttttgagaaaacctggattcaaattaaggcccacatatcgccataattggtcagtctggaattagcattgagttttrgcatctagccacacacattcacttgtcctcttgcacttttgccaaaatgggaacaaatgcatttctctttagtttgggaaaatcaactttttatattaat

SEQ ID NO: 120167 - DNA, 201 bp, Homo sapiens
ctttctatgattccccctcccctccccctagtctctgtccgtaccacgctatttataggctgctagatacctcaggtacctcttggtgtttgccagatgcytctaggtattggctcctgttgttccctttctgaagctgccgctcttccattcactggtgaaatcctagacccaactcaaatgtcatttcttctgtggtat

SEQ ID NO: 120168 - DNA, 201 bp, Homo sapiens
agctacagaatcagctgaattaacctatatctcctcttcaccagatgaaatagctttggtgaaaggagctaaaaggtaaagtatactttcttatacttctyctaagaaagtgaaatcacaggaggacagaagttatttgtttttttccgtttgcttcagtgaccttagcacatacatctcctattatttaataaaaaacac

SEQ ID NO: 120169 - DNA, 201 bp, Homo sapiens
aaactggacttttggaaccattgtttttacagtcttagtattcactgtaaccctgaaggttagatttttacttattcatgtattttttaatactgtttttrtaatactttcttgtcttatcctaatataccatttttttgtctcctttatttcttgttatgggttgttattcaagtgtttgccttaatacttactaaaatg

SEQ ID NO: 120170 - DNA, 201 bp, Homo sapiens
taggtcacagtagacacaccaactagcccagttaccagtggacttccacttttctttgttataactgttacagccatcaagcaggtaaatttcttatttayacttgcacctgcatttcagtccaggcttgttggaatttcattgtcaaaggctctttttcatatttatatacagtgggtagtatcctttatggatttattt

SEQ ID NO: 120171 - DNA, 201 bp, Homo sapiens
tataatttaatgggaatgcacccagcaacatggccgtgcttagcatgggatgtcagcacaaacaggaagaaatattccattatgtagagaactctttcaaagagtggtagacagggaagggaagaatgtcaactgtctgagccaaagtcccagagaaagcattttggaaattttggagaatatagttaatcattataataa

SEQ ID NO: 120172 - DNA, 201 bp, Homo sapiens
ctataatttaatgggaatgcacccagcaacatggccgtgcttagcatgggatgtcagcacaaacaggaagaaatattccattatgtagagaactctttcaaagagtggtagacagggaagggaagaatgtcaactgtctgagccaaagtcccagagaaagcattttggaaattttggagaatatagttaatcattataata

SEQ ID NO: 120173 - DNA, 201 bp, Homo sapiens
tatgatgccaaggaacactctgtgactagctgccatttgtcatctgggcccctgttatggctcagttaactgcctagaacattattcaaggtgttcttcasaatttgagtgaggtagagttctgcagaagtcttttccatgtggcagacttttcccagaaagcctgtgtagcctaggcctcataaatttttctaccttcct

SEQ ID NO: 120174 - DNA, 201 bp, Homo sapiens
taatcccagcactttgggagaccaaggtgggcagatcgcttgagcccaggagttcaagaccagcctgggcaacatagcaagaccctgtctctatttttatatatatatatatatatatttttttttttttaatttaaaaataaatataaaaaaataaaaatatataaaatgtattcatcattaaaatttacccatgttagt

SEQ ID NO: 120175 - DNA, 201 bp, Homo sapiens
tataatcccagcactttgggagaccaaggtgggcagatcgcttgagcccaggagttcaagaccagcctgggcaacatagcaagaccctgtctctatttttatatatatatatatatatatttttttttttttaatttaaaaataaatataaaaaaataaaaatatataaaatgtattcatcattaaaatttacccatgtta

SEQ ID NO: 120176 - DNA, 201 bp, Homo sapiens
aagttattatgtaaatctatattcttgacatggaaatacatatgtatatgtgtgtgagaaaaatagattacgtagcaaacataatgagattacatttctgytcaagtggtaaatacacattttaccactcaaaatattaacatgattgtttctgtatgatgggattaatatgtgtttcagggaaaactcccaaaatgtgtt

SEQ ID NO: 120177 - DNA, 201 bp, Homo sapiens
aaaaatgtaaaaggggcatgagaaatatattgtgtgaattggaactttacaacaatgaggctctgagagattgcaaaataaactatcctgtaaagccaaayaactagtttctttttagaaaaagtcgatcatttcttcaatagaggcagccattctatttctgacctttacacttatacacaattattttgtgtttagaag

SEQ ID NO: 120178 - DNA, 201 bp, Homo sapiens
tatttaaaaaatcactttgtcttgttataggtgaaagatcattcacttgccttccgttatgattcacagtgcttgttgattatgcatattactttaaaccrtaaagtttgctaaaaatacaaattacttacttgtgcaaagcttcctgaattacccttgaatggatgaactaggatataaaagaatgcaaattcttttata

SEQ ID NO: 120179 - DNA, 201 bp, Homo sapiens
tttttttgctaatactcttttcgtttttcttccttttttattttttgaggcagggtcttgctctgtcgcccagactggatggagtgcagtggcttgatctyggctcactgcagcctcaacctccagggtgtaagcaatcctcctacctctcagccttccaagtagctggaactacaggcacgcaccaccacgtccagctaa

SEQ ID NO: 120180 - DNA, 201 bp, Homo sapiens
cgttgtgcacatgtaccctagaacttaaagtataataataaaaagaaagctgatttgtgtggttacacaggtataatagttttatttcaagcttttgaagrtacagttccacccctccccccccccacatttttattttatctttctgggaaaatcctgaacctagaagcttcttttataaactttgttctgtgtcagatc

SEQ ID NO: 120181 - DNA, 201 bp, Homo sapiens
tgtgagcaatatgtaaatagcaaagtagatacatgtgtatgtacactatatatgtaagcattcattatactttaaaaattttaattatataagatgacacrtctttaatattaatggcctgaaggttatttgttagctggtagtgctactaatttcaggtaagattttaaatacacgtatatagactgcacaagtcactca

SEQ ID NO: 120182 - DNA, 201 bp, Homo sapiens
gttggcccaatatgtgaagagaggaattctcttctctccctcctcttcccaatggaagcacagtattctgcagaaaggctattctggtcctgccagtgtcytcccagaacatgactatctcattcagcagttgcactggggtaattttgccctggctgtactctaggagaaaattactgatggcggggacagctgaggcct

SEQ ID NO: 120183 - DNA, 201 bp, Homo sapiens
taatctgaacctatttcagaggcttattttgcctcttttgagttttggcctgcaatttaagcaactgccaccagatggaaggaatgctctgttaaggagarcaaaacaagcgttaaaatggcaaatgttgaccagtggttatttatgtagatgatatcctctgtcttcgttagtatctctaggcccattatcatcttggtt

SEQ ID NO: 120184 - DNA, 201 bp, Homo sapiens
cttagaagatttcttgttataaataaagaaatgtgttagggagatgtggtgatgcccacctgtggtcctagctacttgggaggctgaggcaggagaaaccyttaggctcaggcgttcaaagctacagtatgtgatgatcttgcctgtgaacaggcactgcacttgtgcctgggcaacatagttgagatcgcatctcaaaaa

SEQ ID NO: 120185 - DNA, 201 bp, Homo sapiens
atttttcacggttttggaggctaaagttctgtgattggagtgccagcatggttgggttcttgtgagggcttttttctggcttgcaaatggccgccctctgmtgtctcttcctcttataagggcagtaatcccatcatggaggccccaccttcattaactcatctaaagtcagtgtattagtctgtttttacactgctgata

SEQ ID NO: 120186 - DNA, 201 bp, Homo sapiens
atataagtttaaaatatatacattcttgccttggttcctgccatcaacatgtcctattcatctttattcatagttcgagttctaagttgtttattcaatcrgtgaacaaatatattttaaatgtgttaccatgtgccaaggcctgttttaggtgcttgaggatacaccatggaataagacaggcagtgtcccttttctcat

SEQ ID NO: 120187 - DNA, 201 bp, Homo sapiens
tgataagaggaatgtatattctgttgttttgggggtagagagttctgtagatgtctgttaggtccatttggtcacatgttgaattcagggcctgaatatckttgttaatttttggcctcagtgatctgtctcatactgccagtagggtgttgaagtctctttggcagtatttttaagagaatgcattcttctcaatgggaa

SEQ ID NO: 120188 - DNA, 201 bp, Homo sapiens
cctggatttcttggtcttttgtatggtttttttgcatctcagtttccctcagttcagctctgatttgggttatttcttgttttcttctagctttggggttrgtttgctcttgtttctgtagttcctctagttgtgatgttgggttgttaatttgacctctttctaacttctttctttggtttccttttcttcttcttttct

SEQ ID NO: 120189 - DNA, 201 bp, Homo sapiens
cttgaggatacaccatggaataagacaggcagtgtcccttttctcatgagacttacattctggtgggtgaggtagatacctgctctcccttctcaatggarcatccccatgatccccactgagctctacctgcttcaacctcagaacacttatttttttcataaactgtgactctaggaatactatggactatattttgca

SEQ ID NO: 120190 - DNA, 201 bp, Homo sapiens
ctaaaagaaacctagagatgatttaaagtatgcaggaggattttggtatctacgagcgtcctggagccagtcctccaaggatactgagggatgactgtatrtgcacaaactacctttctgtttgcaaggctgctatttacaagtgtgaatgaggcataaacccctaaagtagcccagtcttacattcttctttgacctttt

SEQ ID NO: 120191 - DNA, 201 bp, Homo sapiens
tgtctctctgtctcttcctctgtctcttcctctctctctctttgcctcttctctctcttccccctctctttcttcccctctctgtctttcccctctctctstctttcccctctctctttttctctcctctctgtctctctttctgtctctgtctctgtctctctctctctgctggtctttccttgcctctgccagccgctt

SEQ ID NO: 120192 - DNA, 201 bp, Homo sapiens
attcacaccctttgtgttattgttgtcatacgttttacttttacattttataaagcccacaatatgttactatttttgcctgtgagttgtcttttttggtrataaaatatataaaataaactttaccatttaactttttttctttgagatggagtttgctcttgttgcccaggctggagtacaatggcgtgatcttggctc

SEQ ID NO: 120193 - DNA, 201 bp, Homo sapiens
tcctcgccataattacccctgaaaattttactacattaaaggtactttttttctcatttcattttttaaatgaagcagaaaaatcccattgaagttgctcmaatgccctgttgatgttaagtgcttctgttgactcactttgaggctttgagtaaatggtactgtaattgaatttagccttgctacttaaaatcagtctgg

SEQ ID NO: 120194 - DNA, 201 bp, Homo sapiens
tgcaagtgttatttagctagtctttacctctggctgaccaggttaggtgctaggttggcctactgccatctcttatagaatggaatagatcttgaagattktcctcacttcctcatgtgccctggcaaggcagagataaaagttggtgacatttggttcactgtacacttgtaatcacttagaaactgaaacacaaaatta

SEQ ID NO: 120195 - DNA, 201 bp, Homo sapiens
aggttaaggaacttgcccactactagtaagttggaaagctgggatttgaattaaagcaagcctaggtgtagagtccatgctcttaaccacaactctttacyacctgtttagattttaagggaaatggatatattcaggatattttttggaggtagaataatcaggatttagtgatttaggatgtagtgggtgagagaaaca

SEQ ID NO: 120196 - DNA, 201 bp, Homo sapiens
gctattttttatgtgaaccaaatattattatacagttgcaggaaattccaccagccattgcagtttcatcagcttttagggtgaaacaggcacggaaaagwcacctacttcatactaccccacccccagtctcaggcacgtctcaacccaaacctgtttagggtaaagagactgtaaaatgctattttggaaaatgctcag

SEQ ID NO: 120197 - DNA, 201 bp, Homo sapiens
taccatcacagtggcatttaaattttaacatgagttttggaggggacattcaaaccatagcagaggtttaagtaagataaagactgagaactattcattgsatttggcaagttagagttatgggagtgtgggtctatggaccagcctacagagagagggctgaaagagtgaagaggaggtgaggaagtagagatggtatat

SEQ ID NO: 120198 - DNA, 201 bp, Homo sapiens; identical to SEQ ID NO: 20448

SEQ ID NO: 120199 - DNA, 201 bp, Homo sapiens
gctaatttttgttatttttagtagagacagggttttgccatgttggccaggctggtctcaaactcctgacttcaggtgatctgcctgccttggcctcccaragtgctgggattacaggtgtgaaccactgtgcctggccatccaaataatttattgtctgccttgtaccaggcactgtgttgagtgttgggaaaattgtaa

SEQ ID NO: 120200 - DNA, 201 bp, Homo sapiens
ctgtttgaaagagtctgtggcagtaattcttagctgtgcttgcaaattagaattgtcacctggggagcttccagaaaaattaaatattaaataaaagaacsaggcatcagtattgtgtttaaatccactgtgtgaccaggattaagagtcaaagatctatggctaactcataaatataagtttgccagcaaatggaaagga

SEQ ID NO: 120201 - DNA, 201 bp, Homo sapiens
tttttgaacaacttacctgcgtatgttttcccttagtaatgaatctgcttcacaagtaaccttcaaggtctttgacccctttgtcccagattgcctcgttytaagctgtgtgatgcattttagctatattgtttctggctaattttgtatccccctggattgctctctttagcttggtctgtggtttgggggactgggctg

SEQ ID NO: 120202 - DNA, 201 bp, Homo sapiens
cctggagttcatcgcagtctacatctgcactgttattttagaagcagactcattttgccacagttagcatctttttacccatttttgaacaacttacctgmgtatgttttcccttagtaatgaatctgcttcacaagtaaccttcaaggtctttgacccctttgtcccagattgcctcgttttaagctgtgtgatgcattt

SEQ ID NO: 120203 - DNA, 201 bp, Homo sapiens
aattttaattatataagatgacacgtctttaatattaatggcctgaaggttatttgttagctggtagtgctactaatttcaggtaagattttaaatacacrtatatagactgcacaagtcactcagaagacctccctttggtagcttctgtctgtttgaaggtgttgtaaacatctctctagtgaaactatagttttcagc

SEQ ID NO: 120204 - DNA, 201 bp, Homo sapiens
tggtatttttgtattcattgcggcaatctatgtcttttaagtggagcatttaggccatttacattcaaggttaatattgatatgtgaggttttgttcctgycttagtgttgttagctagttgttttggtagtctcaagtatataattgctttataggatctgttaactttctactaacatatgcttttatagtagcaaata

SEQ ID NO: 120205 - DNA, 201 bp, Homo sapiens
gctggcattttctgtataaatagttttaaacatgttctaaatgtctgggctgctttttaagtttatagttgtacttaaagatagtataaaagaggcccggkgcagtggctcacacctgtaatgccagcacttcgggaggctgaggcgggtgaagttcgagaccagcctcggagatggttcaaagggagaccccgtatctac

SEQ ID NO: 120206 - DNA, 201 bp, Homo sapiens
tagggaaatccccacatttttcagttgctttaagtatgaaggagaatgataggacagggaaggttattccttatttccttagacgattgaattccttgctstgtgacttcggaataccttgtacttctatcactctagtggtaagcacttgcgtcgtaattgcctatttacttttatagggcaaggagccatttctttttt

SEQ ID NO: 120207 - DNA, 201 bp, Homo sapiens
gagatgatggagagacagtgtcaataattccagtgcagttcccaagtgcctgtgtactctgccacaaagggagaaacgaattcctatttttactgtcaggrtgtcagatcaacagttccaaaatactaacggtatatgttctggacagcagcctccataagctcctccagtggccctcagttgtcatcaaacatggcactt

SEQ ID NO: 120208 - DNA, 201 bp, Homo sapiens; identical to SEQ ID NO: 20446

SEQ ID NO: 120209 - DNA, 201 bp, Homo sapiens
ttggttgattcactctttcaggaaagagaatcatttcatgtagtagtgtaggattagtgaaagtcatgcaaagcagtagcttttgcatatgctttcatgtrtttttttaagcacagatgttctgtttaccaaattgttagtgacagaacccttgttatgacagggtgtgccttttcttggtagcagaaccatatccctctg

SEQ ID NO: 120210 - DNA, 201 bp, Homo sapiens
tttttctcagtatattctaggttttttactttgctcatttctcttaaagatatgaacttcttcacaccttaaactttgatgctgtccggcgacgtatgagygtaattgtgaagactcaagaaggtacatgtctgaaaagcttgaatttttctctttgttgatttgtaggcttattggttgattcactctttcaggaaagag

SEQ ID NO: 120211 - DNA, 201 bp, Homo sapiens
ccaaacctgcaattttttattccacatatattgtcttctcgtgtgtattagtttgtaagttactctttatcctgaaacagggagtaatttcttcctcaccyttgaatgctttttttttgttttaggggactaggctgaaacaggtggcaagtgatgcaacatccaaagccacttttcaagctttttttttttttttttttt

SEQ ID NO: 120212 - DNA, 201 bp, Homo sapiens
cttccaaaaagatgaagcataagaaaaaacagaagaatcaatcgactcatagatacatgatctaccaaaaggaaaattaacttccatattgtaggggggaratatgcttctttcagtaaaaaggaagaatattttcacaataatcttccaaagctgaatatatcttcagacttcctctgtcaaaattaacacatcaagaaa

SEQ ID NO: 120213 - DNA, 201 bp, Homo sapiens
ccccccaaataaaatgttaaacatttttcagagccaaatgttgatacagcatatttaatttgtaaggggcaagttgtcatggcaaggccaccatgtgaaartgtttgttaatattgatcaggaaatataactttgatttataaagatcatttggaaaactaaaagtaaatattccaaaattgcatctgtataatatcaagc

SEQ ID NO: 120214 - DNA, 201 bp, Homo sapiens
gattcaaaaccttgaaacctgtgttgccttcccacataccacatacattaccctttcattgtagtcttagtcactaaattttgtctgtttcttattacatygtcttttccatctattcctttcttttcattacctttcagggctaggcctttcaatagctcattgaactcctggaactagccacctaacttctctctttgc

SEQ ID NO: 120215 - DNA, 201 bp, Homo sapiens
aaaatctttctgttgtgctttttattttatttatctatttttttgagacagagccttgttctgtcacccagtctagagtgcagtggtgcaatcttggctcrctgcagcctccgcctcccgggttcaacaattctctgcctcagcctcccgagtagctgggattataggtgcccgccactacgcctggctaattgtttgtat

SEQ ID NO: 120216 - DNA, 201 bp, Homo sapiens
tccttgcggcaggttatctttctaattatttgtaatatattttcataataataccataaaacttattagtgggaaatgttaatatttgtttattctgccaragcctcttactaaaacataaactaaatttgtttctgaaatcagttgggtgtatgattatgaaaagaaagtttttttggttttcactttttcttctgcttt

SEQ ID NO: 120217 - DNA, 201 bp, Homo sapiens
gaagggataactcatccccagtaagtccaaaacccttcagggaaaacaacattaagttttaaagctaaataataatctcctctgactacatatcctgcatyctgggtacactgggatagagatttggcccccaaggcctcaggcagccttgctcctatggctttgttgggttcagtgcactcagtaactcacaggttggag

SEQ ID NO: 120218 - DNA, 201 bp, Homo sapiens
ctgaatgtacttgcctccttttgtgttttttccctgaggattccctaaattttgagcccataagcctttttaaactgaaaggttagtaaattcccatataktatgtcgtgctctacaacttggcttttcagtcacctcttattaaaggttatgttctcacatattatacagataattgggatgggctttggtaattggtaa

SEQ ID NO: 120219 - DNA, 201 bp, Homo sapiens
gtcttaactcattccagaatcaactccaaatcccagagtctcatctaaatcagatatagatgagagactcaaggcatgattcatcctaatgtgaatttctytccagctgtgagcctgtgaaatgaacaagttatgtgctatcaaaatagcataggttagacattcccattccaaaagggaggaataaccaagaaggaaggg

SEQ ID NO: 120220 - DNA, 201 bp, Homo sapiens
ctgctggtctttccttgcctctgccagccgcttatgctgctgttctcccctctccttcctcttcccctaggggagggactggcgggagtggagctactttktcttcctctaagaagaaagggggggtttgtgtgaggttcaagccttgaaattagcagaagtctcaacccctgaaaccagggatgtctcgccttgcctgtc

SEQ ID NO: 120221 - DNA, 201 bp, Homo sapiens
cgtgcccggcccaaacctgcaattttttattccacatatattgtcttctcgtgtgtattagtttgtaagttactctttatcctgaaacagggagtaatttyttcctcacccttgaatgctttttttttgttttaggggactaggctgaaacaggtggcaagtgatgcaacatccaaagccacttttcaagctttttttttt

SEQ ID NO: 120222 - DNA, 201 bp, Homo sapiens
tatagggtcacggagaagacctttaattatcaagtacaggttcctaatttaccttggcttttaaaggaatagggtacactgtttttttcttaactacttgkatatctctctctctttctctttgactttgtttctctcaatctttgactccctctttgtctctctgtctcttcctctgtctcttcctctctctctctttgc

SEQ ID NO: 120223 - DNA, 201 bp, Homo sapiens
ctctcctcaaattccccacattgtgtctgattatagccagatatggctgggcgttctaagcctcacctccggagattggtattcactaagtttggcctgacacacagagctctgcattttgaacaagttccctggggatgctcctgcagaccttctcagaagcaccttttgagaaaacctggattcaaattaaggcccaca

SEQ ID NO: 120224 - DNA, 201 bp, Homo sapiens
aagtactttaaggcttagctgagtggaaacagctcatccatgtttgattagaccaattattaggccattttcctaactctgcttttacaagagtttccctrtcaattactgaatacctattgtgtctttttcactcagtcacctgggaggaaccatctattgtcctgtcctgaagggagttcctcctaggtctggtcagac

SEQ ID NO: 120225 - DNA, 201 bp, Homo sapiens
ctgctctactcctaagaaggtatgtgatttgggcaattcatttaatctccctgtacctcagttcccttatttataaaatactgaaaacaagcaggttcctstaacaattttatgagataatatctgtatagtacacatcacagggactggaatatagaaagcactcaataaaccttagctattattagcaaccacttgaat

SEQ ID NO: 120226 - DNA, 201 bp, Homo sapiens
tccttcatatctgtggactagactgcctaaggccataagattagaagttaggataatacatgttacaagttaggataatacgttaacttttagcaaacttkacttttgttgaaaactttgtaagtttgggatttcaattatcctttgctgttaataagaccttgtttagtccaaattaacttagaattgatatagatggtt

SEQ ID NO: 120227 - DNA, 201 bp, Homo sapiens
ccaacattataacaacagattatgacaagggttatggaagttatgagctagaaactgtggatgaagagggtgtgtgtgtgtgtgtgtgtgtgtgtgtgtgtataacaggattattatctaggactacacgaatttgatttgtgcatttgcttaagacagtgtaatactgtgttaggtatgcaggcttgagagtcagtccat

SEQ ID NO: 120228 - DNA, 201 bp, Homo sapiens
cccaacattataacaacagattatgacaagggttatggaagttatgagctagaaactgtggatgaagagggtgtgtgtgtgtgtgtgtgtgtgtgtgtgtgtataacaggattattatctaggactacacgaatttgatttgtgcatttgcttaagacagtgtaatactgtgttaggtatgcaggcttgagagtcagtcca

SEQ ID NO: 120229 - DNA, 201 bp, Homo sapiens
agcaggtcacttttgtttctacctctcctctaacagtagtgatgtttccctgagactatgccagggaaggtttcctgcctttctcctagatgcagatgacrtttgcttaatatgagaaaggggtctatgattctggcatggtttttttgtgcctatttcttcacagcagtcaccacctgtatgcccgtgccagtgagaaag

SEQ ID NO: 120230 - DNA, 201 bp, Homo sapiens
attatcctataaatgatatacaactggtgagtggaagagggcctagatttcccacttttatagacttaaaaattcatagagccagctgggtgaggagttgrttgacaagttcttagtttttattatattctgtaatttcttaggagttgctgtttacactggaatggaaaccaaaatggctttgaactaccaagggaaatc

SEQ ID NO: 120231 - DNA, 201 bp, Homo sapiens
caagcaatctgcttgtctcggcctcccaaagtgttggatttataggtgtgagccaccatgcctcgccagtgtattgttaagagtgtagtgtttggagccasactgttagacttcagattcttccggcgtctttttttttgtttgtttttgaaacagggtcttcttctgtcacccatgctagagtgtggtggcacagtcgtt

SEQ ID NO: 120232 - DNA, 201 bp, Homo sapiens
atttctgtttaaatgacagtttaaatacattttagcttatttttgtggtctatgttttgtatttggggatttgataatattacttttttttatcttaatakaaaacattttcctggagcaagtttcaggtcagaatttgcagccttaaaagacttttcaacaacctttgttaaaagaactgttacttcctttttctgaacc

SEQ ID NO: 120233 - DNA, 201 bp, Homo sapiens
aactgacatttctaagatataaagaaatttaaggccaatttggatttgtactctggctctgcttcctgcttaggtggaagactttgagtgatttagttatsctctctgcctctattttctcctcttcaaagtggggatgatgaaacctactttataactttgctgtgaggatttgtttcggaaaaactctcaaatcagctc

SEQ ID NO: 120234 - DNA, 201 bp, Homo sapiens
aatggctaagtaacttggcaaagatgacatatcttgctagtaagtagcagagccagtgttttgatctaaaatcttttttactgtcactttccacatctgcyacacacttgaacaagaaaatgtacagttgtcattcatcttgaatgttgataatttgtcttattgtcaggtttttgctactttcaaaaattggcacaaagg

SEQ ID NO: 120235 - DNA, 201 bp, Homo sapiens
agttaaacttagttaaattatttggtaagtctcagtgtcactgttaaagaaagctcttttggtttttaaaaaaggaaaactaattgatagaattgaactayaacattaaaccaagttgaaactgtgaagataaatcagggagtcatttattctagaaaatgctcaccatatagagatactctcttttaggtattaaaggca

SEQ ID NO: 120236 - DNA, 201 bp, Homo sapiens
ccaggttcaagcgattcttgtgcctcagcctccccagtagctgggattacaggcatatgccaccatgcccagctaatttttttttttttttttttttttttagtagagagggggttttgccacattggccaggctagtcttgaactggcctcaaccgatccacccaccttggcctaccaaagtgctgggattacaggcgtg

SEQ ID NO: 120237 - DNA, 201 bp, Homo sapiens
gcagtctctaaatagcagattgcttggctggggagtcgggggaaagagtttgttgagactccttttgagcaagagagagacttggtctgcatccttagtgyggtggggagtctttgaagtgttaaagccggagagtgacttgatgatttttaaaaataaaactggagtgaggcaaaatgaaagcatgaatgtgcaatcaga

SEQ ID NO: 120238 - DNA, 201 bp, Homo sapiens
ttttttttttttgccagtctagttttacttattatctcttcatttcccacgttcaccttcccagaacttattatattatattattattattattattattwttttgagacagagtgtttctctgtcgcccaggctaaagtgcagtagcatgatctcagctcactgcaacctccacctcccaggttcaagcgattcttgtgc

SEQ ID NO: 120239 - DNA, 201 bp, Homo sapiens
acatatactcagtattgaaacaagaagccatagacattttaaatagaatttagcatgtctttaaaaatgtgtaattgtatcttttaaaggacttgaagtcygctccactatgtaatacaactagattaatatttgataacttacacataagaaagctgcactgaaaggaaaaacaagccctattgctgggtggttccttta

SEQ ID NO: 120240 - DNA, 201 bp, Homo sapiens
aaaaatatcttgttttgattttcacacaaagttaaaaacatattaattttattttctgtccgtaactattattgccaatatttggctttactaactttgtrtgataaatatttgctattttggccacattattggtaaaatagacctttgtgggcttttctggctacctgcacaccatttttattatttcaagggtaacaa

SEQ ID NO: 120241 - DNA, 201 bp, Homo sapiens
tggctattgtgaataatcctacaatgaacatgggggtacagatatcccttcaagatactgattttatttcctttctctccggccctcacaggttttctcargcctacatttatagtctcctgttttgttttgttttgtttttgacatgaggtcttgctctgttaccaggctgaagtacagtggtactatcgtggctcactg

SEQ ID NO: 120242 - DNA, 201 bp, Homo sapiens
tacacatagtaggagctcaataaatattggttgaatggatgcatcaactgtgttaacggatttaccttgtgacccactattaggcaagggagttacttttwtattgaggtgaaattcacataacataaaactaaccattgtaaagtgaacaatctattggaatttagtacatttatattttttataaccacaaactcgtac

SEQ ID NO: 120243 - DNA, 201 bp, Homo sapiens
tctagctttggagcctggcacgtgtgaattatacaaagattttcaaactaatttgatcgtattctagatcacaagaggccaaaattacccaacgctcagayacattaatctcttggaaatttaagacaaactctacgcagccccagtcagcctctacatttcagcaactcttattcctttcttctgtatttacttagcagt

SEQ ID NO: 120244 - DNA, 201 bp, Homo sapiens
tgagataccatctcacaccagttagaatggcaatcattaaaaagttaggaaacaacaggttctagagaggatgtggagaaataggaatacttttacactgytagtgggattgtaaactagttcaaccattgtggaagacagtgtggtgattcctcaaggatctagaactagaaatatgatttgacccagccatcccattac

SEQ ID NO: 120245 - DNA, 201 bp, Homo sapiens
atctcacaccagttagaatggcaatcattaaaaagttaggaaacaacaggttctagagaggatgtggagaaataggaatacttttacactgttagtgggattgtaaactagttcaaccattgtggaagacagtgtggtgattcctcaaggatctagaactagaaatatgatttgacccagccatcccattactgggtatat

SEQ ID NO: 120246 - DNA, 201 bp, Homo sapiens
caaagacagggacagaaagcttatttaatgaaataaatgctgaggtccagaattcctaggcccggggtcttacaaaattactgaaacactatgacttgagstgttggttcactttccaaggcaaaagtggatacagttctcccacaaagctgaggtctgtttctctgaagcactttcttttttttttttttaattatactt

SEQ ID NO: 120247 - DNA, 201 bp, Homo sapiens
gaggccaagcaggaagaactcagtgagaaagttaaaccaggccacagctgctgtcaccaaccataccactgacagtggtgtgggtactgaggagaagagcytggacccaaatcaacactacaagatccatagtcaggcagtttatcaactgaatgtcaatggggaacacccatacccacacaagttccatgcagacatctc

SEQ ID NO: 120248 - DNA, 201 bp, Homo sapiens
gagaaaggaacccagtacttactacatcctcactggtaaagcctatgttagagtactttcacttgacatttcattaccatttcatcaccccacaaaatagstcagaaagaatctacatctaggcccataacatgcccctgaatttgatttttctaccacatcacaacacaagatttcaaaggaagcatgactaacctcctc

SEQ ID NO: 120249 - DNA, 201 bp, Homo sapiens
ccataacatgcccctgaatttgatttttctaccacatcacaacacaagatttcaaaggaagcatgactaacctcctcactgcaactacgtgctcatctgcyaaactttcccctatttaccatgtaacattctgtagttagatataatggacatgaagggtgaaaatatttagcaccaaagtcctcattatttacaacacga

SEQ ID NO: 120250 - DNA, 201 bp, Homo sapiens
gggcatggtggcgcacgcctgtagtcccagctactcaggagactgaggcaggagaatcgcttgaacccgggagacgaaggttgcagtgagccgagattgcrccactgcactccagcctgggcaacagagtgagactccgtctcaggggaaaaaaaaaaaaaaaaaaagaatatttattattcagcctttaaaaagaaggaa

SEQ ID NO: 120251 - DNA, 201 bp, Homo sapiens
gtatacatgtatatttgcttgtgtttgtatagaaaaatgcaagacagattcccctgaaactaatactgtgagaattaacatgaatgaaaataggggtgaayatataatttctcaatgtatatctttttatattgttttgatttctgaatgacaaaaatatattagttctgcaaaaaagttatttttttaaagtcatgcttt

SEQ ID NO: 120252 - DNA, 201 bp, Homo sapiens
gtcagagtatttaaatagcagatatgtaagatgaccaagtctagagatctaatgtacaatatgaggactataagtaataaaactgtactgtgaaattgtaytgaaattcctcctaaatgagtagtttttagctgcttttgccaaaccaaaaaaaacatgagtaactatgtgagatgatggatatgttaatttgcttcacta

SEQ ID NO: 120253 - DNA, 201 bp, Homo sapiens
ccaaccaatatcttcaggcccatctgcaggggaaagtcttcccctaaaaaagccactctgtaaagtttggaagaggtgactgctctatcaaatgcacagamatcagcatcagaacacaaacacacacacaaacacacacaaatgaaaaagcaaagaaacatgacaccaccaaaggaacataataattccccagtaactgac

SEQ ID NO: 120254 - DNA, 201 bp, Homo sapiens
ttactgaaacactatgacttgaggtgttggttcactttccaaggcaaaagtggatacagttctcccacaaagctgaggtctgtttctctgaagcactttcttttttttttttttaattatactttaagttctagggtacatgtgcacaacgtgcaagtcagttacatatgtatacatgtgccatgttggtgtgctgcaccc

SEQ ID NO: 120255 - DNA, 201 bp, Homo sapiens
tccccattagactattagatttctctgtagaaaccatgcaggccaggagagaatggaataatatattcaaagtactgaaagaaaaaaactgccagtcaaamatactacacccagaaaaaactgcccttcagaaattaaggagaaataaagtatttcccagataagcaaagactgagagaattcatcaccactggacctgcc

SEQ ID NO: 120256 - DNA, 201 bp, Homo sapiens
aatgggagaaaatttttacaatctacccatctgacaaagggctaatatccagaatttacaaagaacttaaacaaaattacaagaaaaaaacaaacaacccvatcaacaagtgggcaaaggatatgaacagacacttctcaaaagaagacatttatgcagccaaaagacacatgaaaaaatgctcatcatcactggccatca

SEQ ID NO: 120257 - DNA, 201 bp, Homo sapiens; identical to SEQ ID NO: 20452

SEQ ID NO: 120258 - DNA, 201 bp, Homo sapiens
gtgtctgacctgaggaaagcagggcctgtcagcagctgggcagagcggcggcagacccacctgctgcagtagaaaggaagctcacttcatgctctctggcytgagagtctgtgtgactcgcacacctagcagggactgtgtgtcagggacgagagcgtccaggctctgggatgccggtcacagctgtagtgtgcacagcag

SEQ ID NO: 120259 - DNA, 201 bp, Homo sapiens
gacctggacatcatggagactccctgagtctctggacaaatcacttccctcctgggatttctgttttctggtctgtaagtggagatgtgatcagagtagaygtccatggaggcttcttggttcttgtgttctgtgactctgagtattccaggccccagggtgtaggatgcgttctgatcttcccggtgacaggagttgttg

SEQ ID NO: 120260 - DNA, 201 bp, Homo sapiens
tcctgggtgggggaggttcccagggctgcggcagcacagaccataccttgtcagtgtcaagccctgactgacccaggagtgccaggtggtggtgtgctcaytgccagaaaggggccagtatttgaagagcagtggaatgtgctgggcacgctgtgcaggcattcctcagccctcctggggctctaagggtgttattggggt

SEQ ID NO: 120261 - DNA, 201 bp, Homo sapiens
tgggtcgtgttttctggataactctgcagcagacactccttccccagcgtagggcagaggccgttgctgtgcaggtcacgtccttccccatgtagccgttmctgcctgagcctccagcgcggtcacccaagtgacacctgtgctgtgaggtgccttctctccaagggctcgggtgtcaggttgttccccctgccatgtgcc

SEQ ID NO: 120262 - DNA, 201 bp, Homo sapiens
caccattaaagatgccttgaaaaagcactcaggtatacactggcttctcccacagaccccccaaccaccttctcatacatgtgtaatggctgtagcactcrggagaataagggcgttggctgtcttgtgtccccccacagcacggcagttgcggctggccttcctcatgcactcgtggaaggacaccctggactactccag

SEQ ID NO: 120263 - DNA, 201 bp, Homo sapiens
aaatgactgtctgcgtccatctcatggaagcctgtcattctcctgtgcttccctgggcaccagcacctttctgctctgagaagatccttcccaagcatggwcttggttcccttttgatgagccgtctagcctgctctagacggtacatttaagaattatgtgatccaagatcaaggcagatttggtaataaacttttaaaa

SEQ ID NO: 120264 - DNA, 201 bp, Homo sapiens
cagtgagccgagatcacaccattgcactccagcctggcaacagagcaagattccgtcttaaaaaaaaaaaaaaaaaaaaaaaagggaaatatagtagaaargtttttctatcctgtggccacctccccagtgttactgtgggtggtgaatctacgtgtagctgctaatgtgcatgtagatagtaggtgcttaatggagatc

SEQ ID NO: 120265 - DNA, 201 bp, Homo sapiens
cctttatgaatttaggttttgctgagcagtatctaatagatttgacgtctctttatggttgcagccattttcagtaaaattaaatgagaccacggatcccrataaaaagcagatgctcgaacggattcagcacgcagtgcagcttgccacagagccacttgagaaagctgtgcagtccagactcacgggagaggaagtcaa

SEQ ID NO: 120266 - DNA, 201 bp, Homo sapiens
acccctgggactcctgcgtgagggtctgccagacccgtggctggagcacagaccccgcggggacccgagcccgagcggggcgctgcccagaccacccagcytcagtttcctcacttggttcctgccgaggtccccttgcatcctcaccccgggaggtggccctacatcaaacagcctttccccagccggtgcctgggcggg

SEQ ID NO: 120267 - DNA, 201 bp, Homo sapiens
atagactgatctgtgtgcacggattgattccacagattgtcttagtggaagacactctgtgtctccagtagctccactgtggcaggcggccctgttctgcrgtggctgagtcagtgcccctcccctcccacacccctttgccccatttcctgggtgcagagcctgtgccactggaaggagactcgggatccacaccctccc

SEQ ID NO: 120268 - DNA, 201 bp, Homo sapiens
cttgcatcctcaccccgggaggtggccctacatcaaacagcctttccccagccggtgcctgggcgggccctcgctccctcttgccccagctggcctttagrggggagacaaaggcccaagggttgttttggttttctgcccagacctggcagcttccgggaggtgggcggagggcacctgaggttggtatttagggaaatg

SEQ ID NO: 120269 - DNA, 201 bp, Homo sapiens
gcacagtgcccctcaccttaggcaggaagcacccccagactctggtcgcccctctcccattcttagctgctggagccagcactgccagatgagtgtgctgkctccagagcagtgtggtgactgaatgtccaagcaagaggacatggctgcatcagggagatagacactttgagacgggagggcaaagaaaggggagttggg

SEQ ID NO: 120270 - DNA, 201 bp, Homo sapiens
accatgcgtaatggctcctaccttggagcatggagtgtaaatgaattaatagatgggaaggacgtagaacagtgcctggcactcaattaagtgctgtgtcygtgctgaaagttagggcctgtttgttttcaaactaaaaatgtgtttttgttcatttgtgaacgtaaatgacgtattagtagtgttttgtatcttgttttt

SEQ ID NO: 120271 - DNA, 201 bp, Homo sapiens
tggcctgctgcagagggatgcatgtgggatccaagcatcactccccaatgtctgccttccctccccagatcatcaagagggcccggcagaaccacctgttygagcagtatcgggagaagaggcctgaagcggcacagctcttggaggatgttcaggccgccctgaaggtgggcctcttgctgtctgctctagaaaccgagc

SEQ ID NO: 120272 - DNA, 201 bp, Homo sapiens
taaacttttaaaataataaaattaattaaataaaaatgggtgtgtgagccctaggaaaactccaggaaattctctgtgtgtagcatgcggctattacaatracattaataataccagagcgattatgataataatgatggcaaatggggcccctggctctgtgccaggcagcttttaaacattttacaagtgtcatttgac

SEQ ID NO: 120273 - DNA, 201 bp, Homo sapiens
atctccagttgggaggagagcgcatctccatgtaagcagcctcctccttctcagagggaagccccggcagtgtcagtgctgacactgggcctgtaactgtrgggatggggcaggtgagaggccctcaagagctcccggcaccccccaggcgccttcagtggggccagagtccacccctgtctttctctttccttggactgt

SEQ ID NO: 120274 - DNA, 201 bp, Homo sapiens
tctgggcagcgtctccagctgtctgagatggcagcagtgtcctattgaaggagctccagggtctttgtgagggaggagagtgatgggatcctagagtggcsggttgaatgcctccaggcattgagtgagattctccttcaagggcttgtgaggcatttaaagtacactgaggccgagctgcacttggcctcaataagcaca

SEQ ID NO: 120275 - DNA, 201 bp, Homo sapiens
taatagatttgacgtctctttatggttgcagccattttcagtaaaattaaatgagaccacggatcccgataaaaagcagatgctcgaacggattcagcackcagtgcagcttgccacagagccacttgagaaagctgtgcagtccagactcacgggagaggaagtcaacagctgtgtggaggtgaggcttcacacatctcc

SEQ ID NO: 120276 - DNA, 201 bp, Homo sapiens
gcccaggagtttgaggctgcagtgagccatgaacacaccactgcactccagcctgggcagcagagtgagacccagactcttaaaaaaaaagaaagaaatgyctatgcaaatttcttcttcttctaccacattttgggtgtgctgtgtatttgcacatacacctgcatttgtattgttggattcttccctttcatcagtcaa

SEQ ID NO: 120277 - DNA, 201 bp, Homo sapiens
ctcaccacaacctccacctcccgggttcgagcgattctcctgcctcagcctcccgagtagctggggttacaggcatgcgccaccatacctggctaatttcwgatttttagtagaggtgggggtctctccatgtttgtcaggctggtctcgaactcccgacctcaggtgatccgcccacctcagcctcccaaagtgctggga

SEQ ID NO: 120278 - DNA, 201 bp, Homo sapiens
ttcaggtctgacttcacattccttcctctttgttgctcagcttttatgacaagaagacagcaattcacaaagccctctgtgacaatgttgacacccgcacygtcatggaagagatgcgggccttggtcagtcagtgcaacctctatatggcagcccggaaagccgtgaggaagaggcccaaccaggctctgctggagaaca

SEQ ID NO: 120279 - DNA, 201 bp, Homo sapiens
cagcagagtggacagaggcctcgtcctcctagtcactgcagtgcacgtccttctgacttgtactttccaccaaatgagcatctgtaaacctaaagcaagarcatgtttctgtcaaagaaatatcttttcctttctttctgaccacttgtgtaattctggtctttcagatttttaccaaaaataaaatcacagcagtagaaa

SEQ ID NO: 120280 - DNA, 201 bp, Homo sapiens
aacaaaacaaaacaaaacaaaaaacagaaaacaaaaaaaagaacaaacaaaaaaacagaaaacagactaagacacgaattcatctctgttacatgttggcrtgtgtttgtgtctcttaattctgttctgttggtcaaattgtccagcccagaccaggtgcagtggctcgttcctgtaatcatagcaccttgggaggccaag

SEQ ID NO: 120281 - DNA, 201 bp, Homo sapiens
agccctttgctttctgttctcggtcctttgtaggctactgtccctagggtagtgtcagtctcacaggctttcacaaagtgtatgttactcaagccagttcygtcaggggcgctgaagtctccataggtaaggtcccctggcctgtgacaaagtcaccagcaaagatgtactggagtggagtggagagtaggtgacattcct

SEQ ID NO: 120282 - DNA, 201 bp, Homo sapiens
gagtgcagtggtgtcatcttggcccactgcaacctccgactccctggttcaagcgattcttctgcctcagcgtcccaagtagctgggattacaggcacatrccaccacacccagatagtttttgtatttttagtagagatggggtttcaccatgttggccaggatggtctcgatctcctgaccttgtgatccacccgcctc

SEQ ID NO: 120283 - DNA, 201 bp, Homo sapiens
ggtgttgaacggcatcccgggcctggacccaccaggtgcattagtaccacacgctccagtcaccacagccccacatgtccctgcagggcagaatcctcgastgagtgcagctgagtgggcagtggggaccgaggatgtgatatgatgggccagggttgatttgcctctccttctctgagccgaggcagaatggtgggtcct

SEQ ID NO: 120284 - DNA, 201 bp, Homo sapiens
ggagtgcagtggtgtcatcttggcccactgcaacctccgactccctggttcaagcgattcttctgcctcagcgtcccaagtagctgggattacaggcacaygccaccacacccagatagtttttgtatttttagtagagatggggtttcaccatgttggccaggatggtctcgatctcctgaccttgtgatccacccgcct

SEQ ID NO: 120285 - DNA, 201 bp, Homo sapiens
ctccccggaccgggcgtctcccccgaggcactatggcgttcaggccggatcatcctctgggaaggctgccccgtgcaccacagggtgttgaacggcatccygggcctggacccaccaggtgcattagtaccacacgctccagtcaccacagccccacatgtccctgcagggcagaatcctcgagtgagtgcagctgagtgg

SEQ ID NO: 120286 - DNA, 201 bp, Homo sapiens
ggagtgcagtggcgcgatctcggctcactgcaagctccgcctcccgggttcacgccattcttctgcctcagcctcctgagtagctgggactacaggcgccygccaccgcgcccggctaattttttgtatttttttttttttagcagagatggggtttcaccgtgttggccaggatggtctcgatctcctgacctcgtgatc

SEQ ID NO: 120287 - DNA, 201 bp, Homo sapiens
ttgtttgtttgagatggagtctcactctgtctcccaggctggagtgcagtggcgcgatctcggctcactgcaagctccgcctcccgggttcacgccattcytctgcctcagcctcctgagtagctgggactacaggcgcccgccaccgcgcccggctaattttttgtatttttttttttttagcagagatggggtttcacc

SEQ ID NO: 120288 - DNA, 201 bp, Homo sapiens
tagcgctagctagcttggttgtggtagttggtgtggtatttttgagacttcctgatatgaaccttctttggtgcttttaagaaaacccacatagcttctttgttctcttgcgcaaatgatactaagatatttattttctttaaaaacaaaaaaccaaaacacacctcctgggttaaagtcagcctgcctttgaactgcagt

SEQ ID NO: 120289 - DNA, 201 bp, Homo sapiens
ttagcgctagctagcttggttgtggtagttggtgtggtatttttgagacttcctgatatgaaccttctttggtgcttttaagaaaacccacatagcttctttgttctcttgcgcaaatgatactaagatatttattttctttaaaaacaaaaaaccaaaacacacctcctgggttaaagtcagcctgcctttgaactgcag

SEQ ID NO: 120290 - DNA, 201 bp, Homo sapiens
ctttggcaacagactagcctggatttgaaccagttgtgttacctgctggcttattaacctgggctgtccttccaagccctgcctgcaccacctggaaaacrcagctcctgcctgtggacagcaccaacaaggcagcagacagtgcaggtggcaggaggcggccccagtaacacatgactgttgacatcctttgtctctttc

SEQ ID NO: 120291 - DNA, 201 bp, Homo sapiens
ctaaaaaaaatacaaaaaactagccaggcatggtggcgggttcctgtagttccagctactcgggaggctgaggcaggagaatggcatgaacccaggaggcrgagcttgcagtgagccaagattgcgccattgcactccagcctgggcgacagagtgagattccatctcaaaaaaaaaaaaaaaagagaagcaaaaccaggg

SEQ ID NO: 120292 - DNA, 201 bp, Homo sapiens
ctggggttacaggcatgcgccaccatacctggctaatttctgatttttagtagaggtgggggtctctccatgtttgtcaggctggtctcgaactcccgacytcaggtgatccgcccacctcagcctcccaaagtgctgggattataggcgtgagccactgcgcctggccacatggggaatttctatggtgtgttttcaggt

SEQ ID NO: 120293 - DNA, 201 bp, Homo sapiens
tgtcactgggccagagcctggtgctggtgcagcacaggctgcctggccccggggacctggacatcatggagactccctgagtctctggacaaatcacttcyctcctgggatttctgttttctggtctgtaagtggagatgtgatcagagtagatgtccatggaggcttcttggttcttgtgttctgtgactctgagtattc

SEQ ID NO: 120294 - DNA, 201 bp, Homo sapiens
cttcagcccaagaagtcaaggctgcagtgagccctgattgtgccattgcactccagcctgggcaacagagcaagactctgtctcaaagacattaaaaaaawttttttttttaaataaaaaagataccagcactgacaggacggacgtctaaaatgtacaaacttgtctggggggttgaaatcatgctcctggataactcct

SEQ ID NO: 120295 - DNA, 201 bp, Homo sapiens
gtatcatgctgtctctcacaggtatctgatgggtaagaggccccatcttggttttgtcgttaggtgtgttttgaagcctcagcttgtcaagttccatgtaagacactgttgggattttacatgttgtatctaagaaccatctcagatccagtttggctgtgttgatcctctgtagtctttttgttttatcagtttttgtcc

SEQ ID NO: 120296 - DNA, 201 bp, Homo sapiens
ggcctcgtcctcctagtcactgcagtgcacgtccttctgacttgtactttccaccaaatgagcatctgtaaacctaaagcaagaacatgtttctgtcaaaraaatatcttttcctttctttctgaccacttgtgtaattctggtctttcagatttttaccaaaaataaaatcacagcagtagaaagttgtaacagatattt

SEQ ID NO: 120297 - DNA, 201 bp, Homo sapiens
gaacatgtttctgtcaaagaaatatcttttcctttctttctgaccacttgtgtaattctggtctttcagatttttaccaaaaataaaatcacagcagtagraagttgtaacagatatttcaggatggaaaagttgcctaaatgctgttaaactgatttttctaacttcaggagtttttcttaaatgtgaaagatatccttc

SEQ ID NO: 120298 - DNA, 201 bp, Homo sapiens
tgttgtggctttgtccaccctgtgtcctcgctgtctgccaggccattttcctacactttttctctccagccttggttctttgcctccccttcccatagtasgccacagaccatctgcttggtgccacgccctgtcctgggtccacgtcagtgcattgagactctaggtccctccaagatggcggagggtagacatttctct

SEQ ID NO: 120299 - DNA, 201 bp, Homo sapiens
gcccacagtagtgctcagcactgtaccgtgcgcctgctcccagagacccactgtgtccagcctcagattgcttccctcccacaggaaccacacaggctggmtgaaagagaaacaagaggttgtgacagtgccaggaacggggcagactcttaagcagtagcgctgcttctctccccacttcacacaaactactgtggggca

SEQ ID NO: 120300 - DNA, 201 bp, Homo sapiens
tacaacaaatgttttggtaactatagtcaccctactgtgctagtgaccacaagaacctattctttctgtctgtgtgtttgtgcctagaaaccaacctctcyccactcactgcccctgacctgacccttctcagcttctggtgaccactgttctatgctgcacctccttgaggtccaccgttttttagctcccacataagag

SEQ ID NO: 120301 - DNA, 201 bp, Homo sapiens
tgctgcacctccttgaggtccaccgttttttagctcccacataagagagaggacatgtgatatttgtctttctctgcctggtttatttcacttaacagaaygtcttccagttccatccatgttgctgtaaaagacaagatgtcatttttttatggtgtgttattttttaagaaacaaaagacagtaaacgcagtgctgtct

SEQ ID NO: 120302 - DNA, 201 bp, Homo sapiens
gccactcccctcactgggctccccggaccgggcgtctcccccgaggcactatggcgttcaggccggatcatcctctgggaaggctgccccgtgcaccacakggtgttgaacggcatcccgggcctggacccaccaggtgcattagtaccacacgctccagtcaccacagccccacatgtccctgcagggcagaatcctcga

SEQ ID NO: 120303 - DNA, 201 bp, Homo sapiens
tgcagggcagaatcctcgagtgagtgcagctgagtgggcagtggggaccgaggatgtgatatgatgggccagggttgatttgcctctccttctctgagccraggcagaatggtgggtcctctgaccagcccagtcaccacctgccatttggctcacactggggcttatttttgttcctggtgacctggtaggctgggtgcg

SEQ ID NO: 120304 - DNA, 201 bp, Homo sapiens
ctaatgattaatgatattcatatataatcatatctaagatctatatctggtataactattcttattttatattttattatactggaacagctcgtgccctyggtctcttgcctcggcacctgggtggcttgccgcccacagtagtgctcagcactgtaccgtgcgcctgctcccagagacccactgtgtccagcctcagat

SEQ ID NO: 120305 - DNA, 201 bp, Homo sapiens
cttaaaaaaacaaaaacaagaaccaaaacaaaactccccctctgatgatgaatttgtctgtttctccttattttttcactttttagaaaaaaaaaaagttctttttttagaggagattctggttcacatcagaattgagaggctatatatatcccctacccacctcaccgtcacctcccccagcatccgcacccaccaggg

SEQ ID NO: 120306 - DNA, 201 bp, Homo sapiens
ccgtcatggaagagatgcgggccttggtcagtcagtgcaacctctatatggcagcccggaaagccgtgaggaagaggcccaaccaggctctgctggagaayatcgccctgtacctcacccatatgctgaaggtaagccaggccccaggcaggcgtatccctcagcctgtgtggacacaggagccaggccccaggactggga

SEQ ID NO: 120307 - DNA, 201 bp, Homo sapiens
gatcacgccactgcattccagcctgggaaacagagtgagactgtctcaaaaaaaacaaaacaaaacaaaacaaaaaacagaaaacaaaaaaaagaacaaamaaaaaaacagaaaacagactaagacacgaattcatctctgttacatgttggcatgtgtttgtgtctcttaattctgttctgttggtcaaattgtccagcc

SEQ ID NO: 120308 - DNA, 201 bp, Homo sapiens
caggagaatagcttgaaaccaggaggcggaggttgcagtgagccgagatcacgccactgcattccagcctgggaaacagagtgagactgtctcaaaaaaaacaaaacaaaacaaaacaaaaaacagaaaacaaaaaaaagaacaaacaaaaaaacagaaaacagactaagacacgaattcatctctgttacatgttggcat

SEQ ID NO: 120309 - DNA, 201 bp, Homo sapiens
tcccagcactttgggaggctgaggtgggcagatcacgaggtcaggagatcgagaccatcctggccaacatggtgaaaccccgtctctactaaaaataaaawaaaaaaaattagctgggtgttgtggcgtgtgcctgtaatcccagctacttgggaggctgaggtgggagaatcccttgaaccagggagtcagaggttgcag

SEQ ID NO: 120310 - DNA, 201 bp, Homo sapiens
ggctcatgcctgtaatcccagcactttgggaggctgaggtgggcagatcacgaggtcaggagatcgagaccatcctggccaacatggtgaaaccccgtctytactaaaaataaaataaaaaaaattagctgggtgttgtggcgtgtgcctgtaatcccagctacttgggaggctgaggtgggagaatcccttgaaccaggg

SEQ ID NO: 120311 - DNA, 201 bp, Homo sapiens
ccatgaggttattggtccttttcttactgttttgtatcattcttatgtcttctgatactaattactatgatttgaatgtttgtcccctccaaaactcatgytgaaacttaatccctagtgtaacagtattaagaggtaaggccttttagaggtgatcgagtcatgagagctctgccctcatgaatgggttaatggattaat

SEQ ID NO: 120312 - DNA, 201 bp, Homo sapiens
catagttggtctgttgttggatcactcaggtcagggtgggactctggaatcaacgaatgtgtgttcattttttccaaagaaacaaaagcacaggccaggcrcggtggctcacacctgtaatcccagcactttaggaggccaaggcaggcagatcacaaggtcaggagtttgagaccagcctggccaatatggtgaaacccc

SEQ ID NO: 120313 - DNA, 201 bp, Homo sapiens
cctcccacatccctgtttcaaagccatgtctctcatgagcggttcatagttggtctgttgttggatcactcaggtcagggtgggactctggaatcaacgaatgtgtgttcattttttccaaagaaacaaaagcacaggccaggcgcggtggctcacacctgtaatcccagcactttaggaggccaaggcaggcagatcaca

SEQ ID NO: 120314 - DNA, 201 bp, Homo sapiens
atttatgaaggcagtatagacctatgtggagcttgaagcccagtgtctggatcagagtctgctgggctgtgggcccagagctgggagccagccactcactyctgcagtgtccgaagtgatgaggaggggctgggctggagccagtcttgcctgctggccgtggccacagggggtcctttctgctctgactcctggcttctg

SEQ ID NO: 120315 - DNA, 201 bp, Homo sapiens
tgcggccacttggcatcatgaacacacatgacttcatcacatatactgacctgtattcagtaaatgcttcatcgaaaggctgcagagctcacaaacagcayagaatttacactgatggggagatacgccactgtctgcctcggtccccatggggctgggcagatgccctaacaggcccagtcctgaccctgagcccaggtc

SEQ ID NO: 120316 - DNA, 201 bp, Homo sapiens
tttgcaggactgcccacagtggtgaaactggtagacagaaacaccttattaaaagagagagaagaaaagagacgggtgagtaaagtgaaaatgacttaagygtgatatttgttgaaaatgtaaaaaccattgcgattattacatagtttactttttaagcattgatgtttacacttttattaaaatcccagtatttataaa

SEQ ID NO: 120317 - DNA, 201 bp, Homo sapiens
cttccaggccaaggtgtagccattgtcagtagcgcccaggtaagggcacagctcgccaagtgccaggcacttttccgggtgctggcaatgtgaagaagaarcacgtggtgtctgtccgggactgtctcccggagcctcagtgaggacaaggcagccaagagcagaactacaggcaaggtagcctctggaggggactcctga

SEQ ID NO: 120318 - DNA, 201 bp, Homo sapiens
gttgtaacagatatttcaggatggaaaagttgcctaaatgctgttaaactgatttttctaacttcaggagtttttcttaaatgtgaaagatatccttcgcrctcctgttgacatcactggtcagtttgagaagtggggagaagaagaagcagaactgaataagaagtaaggtggtgccatttctttggggtttttgagcat

SEQ ID NO: 120319 - DNA, 201 bp, Homo sapiens
ctgaggggcagctgtgtccgtggtctgaggggcggcagtgcccgaggtctgaggggtgtcagtgcgcggggtctgagggacggcacgtccttgggtccgargggcgggggtgctcggggtctgaggggtgtcagtgcccggggtctgagggacggcgggtcctgaggttcgaggggtggcacgtcctaggatccgaaggac

SEQ ID NO: 120320 - DNA, 201 bp, Homo sapiens
ccttgggtccgaggggcgggggtgctcggggtctgaggggtgtcagtgcccggggtctgagggacggcgggtcctgaggttcgaggggtggcacgtcctasgatccgaaggacaacgggtgcccggctccgagggacggccactgggacccctgggactcctgcgtgagggtctgccagacccgtggctggagcacagacc

SEQ ID NO: 120321 - DNA, 201 bp, Homo sapiens
aatgctttcagtgaccatcttcccagatttttcaaggaggccatcatttttgtaccatcttccctaagttgactcagaaggtctatttctctttcctgatytcactgggtgtacagcttttcctttgcagtcttgaaggtgcataggcttggtgcctgtccaagagcctgattatttcagaaggatgagtttcatttctga

SEQ ID NO: 120322 - DNA, 201 bp, Homo sapiens
gttgactcagaaggtctatttctctttcctgatttcactgggtgtacagcttttcctttgcagtcttgaaggtgcataggcttggtgcctgtccaagagcytgattatttcagaaggatgagtttcatttctgaggtttctggggtagatggagcctacctcagggcctttccgcacagacttgggataccacttggtcgg

SEQ ID NO: 120323 - DNA, 201 bp, Homo sapiens
atagtttaatttttatacagtttaattcaagggtcttcataataacacagccagcattttttcagcatgagtctgtgccgggcactgctctaaatgctttkcatctgttatctcctgccacccttgggggaacccctttgaggaagatcctgccggcatcttgtacagatgagaatcctgaggttcagagaagtcaagcaa

SEQ ID NO: 120324 - DNA, 201 bp, Homo sapiens
gggtgcttggagctgcctctgtgggtctgcctccgcctccgtcctccctgatctcatctccagttgggaggagagcgcatctccatgtaagcagcctcctycttctcagagggaagccccggcagtgtcagtgctgacactgggcctgtaactgtggggatggggcaggtgagaggccctcaagagctcccggcacccccc

SEQ ID NO: 120325 - DNA, 201 bp, Homo sapiens
gttcttgtgtctctggtatctttgggcagcagggctcctgctaagcaagcccctgggggctcaaagcagcagaggctgtggccggttcccagcactggtcyttgtgcaggtgtctttctgagaagggtgcatgaggcccagtgccacaggggaacgccagcccaccactggtggcatgcactctgtggtgccattctgctg

SEQ ID NO: 120326 - DNA, 201 bp, Homo sapiens
ttccatccatgttgctgtaaaagacaagatgtcatttttttatggtgtgttattttttaagaaacaaaagacagtaaacgcagtgctgtcttgagaaacayagtggcccctggggcctggattcacagggctggtgtttgctggctgagcatgtgaggtttagggggattgtggggtgctgggatgtgtgccgagtgatgc

SEQ ID NO: 120327 - DNA, 201 bp, Homo sapiens
tctttctgagaagggtgcatgaggcccagtgccacaggggaacgccagcccaccactggtggcatgcactctgtggtgccattctgctgtccactcatctrtgccctaggcaactttagctgatatctggaatgtcacacgctcagttgtagatgctgaagatcgagcagtgaataaggtagatggagcggtggggcagat

SEQ ID NO: 120328 - DNA, 201 bp, Homo sapiens
acgcagatgcaagaggtgggttcccatggtcttgggcagctctgaccctgtggcttttcagggtacaacctccctcctggctgctttcacagcagctggcrttgagtgtctccactcactgcagccttgaccgctgggcttaagcgatcctcctgcctcagcctcccaagcagatgtccacgacagagaaagggctgtaaa

SEQ ID NO: 120329 - DNA, 201 bp, Homo sapiens
tcagacccatggcatttcaggctccgggtttgtgggagtagaggggcgggtttgtgatgatgaagcgcctcagctctgagaggatgcagcctgggcctctrgaccagaaggcttcactaccctagaaccagagtggacatgcccacgtttcatgcacttcccaggagttgacagatcaagtaggccaagaattaatatgga

SEQ ID NO: 120330 - DNA, 201 bp, Homo sapiens
acaggggtgctgcggagagaaagagcagccaggctcagggtctagaggcgggcgccatatggacagggagtccttgaagacctggtggggaagccggcacstagcagagctgtgaaggattaaggggcctgctggtatctggggagcatgccccctaaaaaaagagcagcaggtggaggggccatgtgactagggtattgt

SEQ ID NO: 120331 - DNA, 201 bp, Homo sapiens
cctcagctctgagaggatgcagcctgggcctctagaccagaaggcttcactaccctagaaccagagtggacatgcccacgtttcatgcacttcccaggagytgacagatcaagtaggccaagaattaatatggatatgaaaggtttgaaatacagttaacaggcttggtttgagagctgggaactttgcactcaggaatta

SEQ ID NO: 120332 - DNA, 201 bp, Homo sapiens
gggcaagttagagggacgctgcactcgtcatcccaccagcgagagtcatcccaggaagccattttaagccctgcatccatgttgagacttcaggaaggctytcccacagagtgcccacccctttactgcagagaagaggtggcttcaggacatcttctccggcagccacggaggctgggccttggggcatcacgtggctcc

SEQ ID NO: 120333 - DNA, 201 bp, Homo sapiens
tctagaccagaaggcttcactaccctagaaccagagtggacatgcccacgtttcatgcacttcccaggagttgacagatcaagtaggccaagaattaatayggatatgaaaggtttgaaatacagttaacaggcttggtttgagagctgggaactttgcactcaggaattaaagaacatcctttccttccaagaacacaga

SEQ ID NO: 120334 - DNA, 201 bp, Homo sapiens
gagccctgattgtgccattgcactccagcctgggcaacagagcaagactctgtctcaaagacattaaaaaaaattttttttttaaataaaaaagataccarcactgacaggacggacgtctaaaatgtacaaacttgtctggggggttgaaatcatgctcctggataactcctaggaaagaaaaccacagtgggaaatcag

SEQ ID NO: 120335 - DNA, 201 bp, Homo sapiens
gacctttgtgccttcctggtttcttttccctagctctgtgtgtggcgcctccccaggagaccttatctggtcctgcggcttctccaccatctatcttgtasccggtggcccaaaaacagtttgcccagctgcctacctgatagctccactgggccaggaagcctctgatatctaggctgtccaaagtaaatgtgattttca

SEQ ID NO: 120336 - DNA, 201 bp, Homo sapiens
cacgaagggctttccccacactaagcaaagcagagaaaggcattcgtgtgcagttacccccgcaacacactctgctctctgttttcagaagctgtgtgggyttggttggggtgactctggctctgtgccaggagtaaacacggagatgggggacaaaagggaatgggagaaggcagagagggggactgtgatgtgcagggc

SEQ ID NO: 120337 - DNA, 201 bp, Homo sapiens
tgggtctgtgcggtgagaaaatccatccagaacaccctggcagtctgttgctggcttctgtttgcagttggcatgtgagcagacacacactgtcagtcctrtccttctgctgtagaacccctgtcccgtctgacacacccacagtcaggcttcttaaagatggacttccacctgctcccaggtcaagaatgctctttgact

SEQ ID NO: 120338 - DNA, 201 bp, Homo sapiens
tatttatttagagttagttttccaggacctcgctttggggtgcttggagctgcctctgtgggtctgcctccgcctccgtcctccctgatctcatctccagytgggaggagagcgcatctccatgtaagcagcctcctccttctcagagggaagccccggcagtgtcagtgctgacactgggcctgtaactgtggggatggg

SEQ ID NO: 120339 - DNA, 201 bp, Homo sapiens
gaaatatccagctaaactagaagtctcctggctggaagttgctctgcaaaagagtttgtaggagtctgatatttatttagagttagttttccaggacctcrctttggggtgcttggagctgcctctgtgggtctgcctccgcctccgtcctccctgatctcatctccagttgggaggagagcgcatctccatgtaagcagc

SEQ ID NO: 120340 - DNA, 201 bp, Homo sapiens
tggattttactactccagggaccctacatgagtggagtcacacagtgtttgtcctgtgtctggcttatttcgctgatcacggtgtcctcaggtctatccaygttgcagcctgtgtcaggacctcctgcctttttaatggccaaatcatattccatggatggatgggccctgatctgtctattcttccatggaagaattctc

SEQ ID NO: 120341 - DNA, 201 bp, Homo sapiens
caacggttacgggtaagcacaagggccctccctagggagggaagggctgcagaacatcgcacagggaggagctccccagctctgagcctgagtttgggaarcagaggagcaggtgttctggggctgcgtagctagaagtcccagcagacttcctcctacaactctgggcccacccaggggctgaggagcatgggtctgcac

SEQ ID NO: 120342 - DNA, 201 bp, Homo sapiens
tcatggaagagatgcgggccttggtcagtcagtgcaacctctatatggcagcccggaaagccgtgaggaagaggcccaaccaggctctgctggagaacatmgccctgtacctcacccatatgctgaaggtaagccaggccccaggcaggcgtatccctcagcctgtgtggacacaggagccaggccccaggactgggagaa

SEQ ID NO: 120343 - DNA, 201 bp, Homo sapiens
gggaagcatctgaaacctaggctgtccaaaggaaaggtgaaaatgtgattttcaactccccaaacttgctccttttccgtcagtggagggcatgtctgttygtgcaatggctcaggccagaacctcaaagcaaccgagggcttccctcaccggcacccagcctgctggctccactaataagctctccctgcagcatcagac

SEQ ID NO: 120344 - DNA, 201 bp, Homo sapiens
gattttactactccagggaccctacatgagtggagtcacacagtgtttgtcctgtgtctggcttatttcgctgatcacggtgtcctcaggtctatccacgytgcagcctgtgtcaggacctcctgcctttttaatggccaaatcatattccatggatggatgggccctgatctgtctattcttccatggaagaattctcat

SEQ ID NO: 120345 - DNA, 201 bp, Homo sapiens
gcccaaccaggctctgctggagaacatcgccctgtacctcacccatatgctgaaggtaagccaggccccaggcaggcgtatccctcagcctgtgtggacayaggagccaggccccaggactgggagaacagaggcctctggtgccccccagtgctgtgcctggtgcccagcacctctgagacgtggagatatgcttctgtc

SEQ ID NO: 120346 - DNA, 201 bp, Homo sapiens
cctttcccccagggagtgtggcccgggaggctttcttggtgcctgctctgatgatcacccatggcgggtgggctggggtgctggccttgtggcctcccatsacacccgtgacagtgaccacaggtgctggcttgccttccttctaatgagggtgctatccaggggtggctttcaaagagtgaagggcaggcacctacctca

SEQ ID NO: 120347 - DNA, 201 bp, Homo sapiens
gtgggccctggctcctccatgtctgagggaactgctctgcttctcctacagtccctgagattctgcagctcagcgatgccctgcgggacaacatcctgccygagcttggggtgcggtttgaagaccacgaaggtgggtgagcccttgctgtttgctacaaagttaccaggagcttggagaggtgtcacaaggagagctccc

SEQ ID NO: 120348 - DNA, 201 bp, Homo sapiens
ggatggccttgaagtgagacatgtgggtctgtgggtgctgctgagtgaccttgcctggcgtccctcgtgtttgcaggtgacctgagcatctctgcagaccrcctgagtgagaagcgctctcccaacgactttgccttatggaaggcctctaagcccggagaaccgtcctggccgtgcccttggggaaaggtgagcgagtgg

SEQ ID NO: 120349 - DNA, 201 bp, Homo sapiens
ggtgagacagattttattccctaattcctgacagtaggggaaggagctgtgttccctgccagttcagcagaggtgacttttggatttaaagggagtatgaktagctgggcctggtggcatgtgcctgtagtcccagctactcaggaggcttaggctggagggtcacttgagcccagcattttgaggctgtgatgagccttg

SEQ ID NO: 120350 - DNA, 201 bp, Homo sapiens
cagaccgcctgagtgagaagcgctctcccaacgactttgccttatggaaggcctctaagcccggagaaccgtcctggccgtgcccttggggaaaggtgagygagtggcctagaaggtgtggggcttggacaggggcactggcgccagccacactctcaggcccccagcagagggccgctctgtgtgtgaaggatgttgtca

SEQ ID NO: 120351 - DNA, 201 bp, Homo sapiens
ggctggagcagccacattttcctggcagccctgtgctttcttgggctggtcctttgagggggcccagtcctcctgaggctgtggccttgacctgcagaagycatgctagagtccagctgtctcttggtgcaggggtgtaaatggcacacattgtcaatgtggggttctcctacccctcatcccccagcacccagagggaga

SEQ ID NO: 120352 - DNA, 201 bp, Homo sapiens
agctctgaatgtaagtgtcacgattgtcttgtgctggctctcttgcgctaagggccctgatttctaaattcctgttttggcaaggccagctcaattaagcrgccaagtcaacattgaacttgagttgaggggcataatgggcttttcgttttatgaattgggaacgtttttatggagcgcgtggttttcagaagggaaaat

SEQ ID NO: 120353 - DNA, 201 bp, Homo sapiens
cccatccatacctgtcaggcagtcactccctcgcccccagtcgaagcgctgcccctgtgcctttgcctgttctggatgtttggcgtccagggaagggcttsaacacctttttccttggttctgtgccatcccctagtccctgtctttctggcggcctctgggctgcccgcctgcctgcctgacaccatgtgccctctgtct

SEQ ID NO: 120354 - DNA, 201 bp, Homo sapiens
cgggagatactcctgggatgcctgcatggctttgtcactctgtggcaaatctgagggggctccatgccatcatcactgaagtatgcctttgggtggcccarctcctcctgtggctgtgggcactcctccaccttcatgtgggggcaggtttagtgctgttttctggtggtcctggctgtagctggcagccttctgggggct

SEQ ID NO: 120355 - DNA, 201 bp, Homo sapiens
tgctgtgcaggtcacgtccttccccatgtagccgttcctgcctgagcctccagcgcggtcacccaagtgacacctgtgctgtgaggtgccttctctccaakggctcgggtgtcaggttgttccccctgccatgtgccattccaagacacagccagaggggggcaggattagggagggtgaagcgggcctggtacgtccagc

SEQ ID NO: 120356 - DNA, 201 bp, Homo sapiens
acagagcgagactccgtctcggggtggggggttggagataatggaaaggctctgcttaacccccaggtccctactcctgtgaagccagaccccttcctggyggatcccttccctggatcaccagcctccagcacggaggtccactggatatcaggacgttgaacttgttgagcacttctcacccgcagtggaggctcagcc

SEQ ID NO: 120357 - DNA, 201 bp, Homo sapiens
attggcagggcggtccctaggcctggagcgctcttcccgcccatccccaggccctgctccaggtcggcctcctgggaaccatcccgtctcgccagcacacyctgtcccgaggccgcctctgacctccaggctgggcctggtccccacggcgcttagcgcaatcatgacttaaacacctattacaggacgctcagtctttag

SEQ ID NO: 120358 - DNA, 201 bp, Homo sapiens
gtggcccaaaaacagtttgcccagctgcctacctgatagctccactgggccaggaagcctctgatatctaggctgtccaaagtaaatgtgattttcaactycccaaacttgttcctccttcctgccatggagggcgtgcctacctgatagctccactgggctgggaagcatctgaaacctaggctgtccaaaggaaaggtg

SEQ ID NO: 120359 - DNA, 201 bp, Homo sapiens
catggctggccaaagagaaagtgagtgtataacaagctcaggggtggccctcagatcagctgggatctgcttggcccaggccagatgctccacagacagaygaaaaagaaactgtttcccctggaaatacccccatggtccagtcagctagagagcacaggcctggcaaggagggcaatgggttcagggtttgaccaggag

SEQ ID NO: 120360 - DNA, 201 bp, Homo sapiens
tcacaggacgccaggcagagggacgagctgcccagggcaggcaggctgcctccgcagcgggatgggccctggtgtcccactcagtccaaacagctgatacrgttttcagtggccaccacagagagtagataggccacagatttcgcacttttatagccctgctttattttgttactgtcatcctgctgacacactttcggg

SEQ ID NO: 120361 - DNA, 201 bp, Homo sapiens
gagggaactggcagcacatgggaaaggtgggagtggtaagtggagcagtgccctcaggtcacgtggtgaaggaatgttctggaggcagctagagcacactractcaccactttatgatgaattttgctatctggccccatctagggtctttttcttaaataccatttattcttgggcccattttcttccagaatgacttca

SEQ ID NO: 120362 - DNA, 201 bp, Homo sapiens
cagtataccgggataccaggggttgccgtagaagaagcgtagtaattgtatggtggacaaatggagatgggaggaaacctcagatccgcctccctgagatytggggaggggtttttaattgctctggacaggtgatggggattgccggttgctggggaagtgaggggcgaagtcatgggacagggaggtaaaccacatttc

SEQ ID NO: 120363 - DNA, 201 bp, Homo sapiens
tgggaggaaacctcagatccgcctccctgagatttggggaggggtttttaattgctctggacaggtgatggggattgccggttgctggggaagtgaggggygaagtcatgggacagggaggtaaaccacatttctgcgacgagtcagttccttggtgcaggtcttcagaccagttggcaacagctgtcctgctggaattca

SEQ ID NO: 120364 - DNA, 201 bp, Homo sapiens
ttgtgcagaattaattcaggataggcggctctgctaatgggagctgctctgggtgttgaagtgcatggagaatttcttttttgttttttctttttgagacrgagtttcgcccttgttgcccaggctggagtgcagtggcgtgatctcggctcaccacaacctccacctcccgggttcgagcgattctcctgcctcagcctc

SEQ ID NO: 120365 - DNA, 201 bp, Homo sapiens
catccatatagttgtccttactcagagctatttctttcctttgactccgtttccctctactcccatcttggagtttgaaaagcaaaaccacgccaggcgckgtggctcacacctgtaatcccagcactttgggaggccaaggcgggcggatcacaaggtcaggagatggagaccatcctgactaacacggtgaaaccccgt

SEQ ID NO: 120366 - DNA, 201 bp, Homo sapiens
atgcctccaggcattgagtgagattctccttcaagggcttgtgaggcatttaaagtacactgaggccgagctgcacttggcctcaataagcacatgatgtytgattaagattggagattgcctacgctttagaatctgaccacctgtgaccactggaactcacctagagtgggggctcctgctgagcactggccctctctc

SEQ ID NO: 120367 - DNA, 201 bp, Homo sapiens
gttgtccttactcagagctatttctttcctttgactccgtttccctctactcccatcttggagtttgaaaagcaaaaccacgccaggcgctgtggctcacrcctgtaatcccagcactttgggaggccaaggcgggcggatcacaaggtcaggagatggagaccatcctgactaacacggtgaaaccccgtctctactaaa

SEQ ID NO: 120368 - DNA, 201 bp, Homo sapiens
gaggcttggaggtggcctctgtcccaacaagagtcctcaaaatcctcagtttgtccaggtgagggatcctgggtgggggaggttcccagggctgcggcagmacagaccataccttgtcagtgtcaagccctgactgacccaggagtgccaggtggtggtgtgctcactgccagaaaggggccagtatttgaagagcagtgg

SEQ ID NO: 120369 - DNA, 201 bp, Homo sapiens
ttcatgtaggttcgtgtcgtcgttggctctgagacattgataataaatttttctcaacagtgagaccctctctgtcttgttctgcatgttcagcacttggyaggaggcctggtggccagccagggccgcttggtcagcaggtcacaacttaggtgcttgggtcagttgagctgcttcagctggccgaggaatttctccccc

SEQ ID NO: 120370 - DNA, 201 bp, Homo sapiens
agacacgtgaagtatcatgcctcatgtggaagcctgcccatgacttctgggcatggatcaccctggcttgtctctcggactctgcccaaccatgagtactkgaggtcatccacagccacgcctttcaggaggacgcgtggttgcagcaggtggcactgtatgagccaagcaggatggacaaaacggcaaactggctggatg

SEQ ID NO: 120371 - DNA, 201 bp, Homo sapiens
gatgcccccagagaggtctgagggtgctgggatgttggggagtggtgccagagcagcaccacgattcaggggtcctggcctccaagccgcgctcccccaayagggactgaccctggccaagtgttgtctgcctcagtttcttcatccgtaaaaagaaaatgacataacctacgtcctagagtgtactgcatattgaatatt

SEQ ID NO: 120372 - DNA, 201 bp, Homo sapiens
ctcagtgagttaatattaccacttctgctactgatatgatcatttctatgatgttcagacacggttagaaacctgcatgttgctcaggggtcggtagcccygggtgttttgcagaaggaaggcctcccacagcacgcacttcgacatgtggcttgcaggggaagctggggcccccagggctcatttcattaagcgtcagaa

SEQ ID NO: 120373 - DNA, 201 bp, Homo sapiens
cagggcctggcacatggtaggtactcagtaaatattagctgtgttattgttaaataagcagcatttcaacaatcaataaaatcattgattccctttatcgyctccctccatagatgagtagaaccccagggaggaagaggccccacccacccagggctcagttggtgggaggtgccgtacatctcactgggctcccactga

SEQ ID NO: 120374 - DNA, 201 bp, Homo sapiens
cttcattcctaacaaaggaagtgttcatacctcaagatgggaaaaaggtgacgtggtattgctgtgggccaaccgtctatgacgcatctcacatggggcaygccaggtaggtccaccgcggggtgtccctgcagcttctgcagttgcacgcagaagtcagagccattgggatccacagcagcgatcttaggtccacaaaga

SEQ ID NO: 120375 - DNA, 201 bp, Homo sapiens
gcagttgcacgcagaagtcagagccattgggatccacagcagcgatcttaggtccacaaagatcttagatctgctacagagacctgagatttgaggaatcragactgaatttcttctcttatttttaagatgaaaattttaattccataagtaatctatattcactgcagaaagactacagatcaccaaaaagaaaatgtc

SEQ ID NO: 120376 - DNA, 201 bp, Homo sapiens
tgctaacatgctggactcgacctgggcactttttctcacataccttaaagttttctctcatccctcaagctctcgtggggtccccagatgctgagttcccrtgacactcagacctgacaggcctgacgctgggttggctgtgaccgccccccgaccactggatggtcatggctgtagctcctgacgagtagctggctgttg

SEQ ID NO: 120377 - DNA, 201 bp, Homo sapiens
tttgcagaaggaaggcctcccacagcacgcacttcgacatgtggcttgcaggggaagctggggcccccagggctcatttcattaagcgtcagaaagatcaygttaggccttgggcactacttggcaggtgggagatggagggtggtgtttctatttgatgatggtgtgcacgtccggggcccacagttgtctcccaccacc

SEQ ID NO: 120378 - DNA, 201 bp, Homo sapiens
aacactgcccacacattctggggccctagaaggactcatgagactcggcatcgagttatcatcttgtctaaggtttgtagcagtgacacagcgaggagcaraagctcaggcggagtcttcaatcatccatgggcaggctgctgaagcttcctccctgcctcccatgaggggacacagcacactctcccccaccaggaaaaa

SEQ ID NO: 120379 - DNA, 201 bp, Homo sapiens
gatcttaggtccacaaagatcttagatctgctacagagacctgagatttgaggaatcgagactgaatttcttctcttatttttaagatgaaaattttaatkccataagtaatctatattcactgcagaaagactacagatcaccaaaaagaaaatgtccatagccccactgctaacatgctggactcgacctgggcacttt

SEQ ID NO: 120380 - DNA, 201 bp, Homo sapiens
tctactaaaaatacaaaaaattagccgggcgtgatggcgggtgcctatagtcccagctactcgggaggctgaggcaggagaatggcctgaacctgggaggyggagcttgcagtgagccgagatcgtgccactgtactccagcctaggtgacagagcgagactccgtctcggggtggggggttggagataatggaaaggctc

SEQ ID NO: 120381 - DNA, 201 bp, Homo sapiens
gggcggatcacgaggtcaggagattgagaccatgctcgctaagtcggtgacaacctgtctctactaaaaatacaaaaaattagccgggcgtgatggcgggygcctatagtcccagctactcgggaggctgaggcaggagaatggcctgaacctgggaggtggagcttgcagtgagccgagatcgtgccactgtactccagc

SEQ ID NO: 120382 - DNA, 201 bp, Homo sapiens
gtggcagccccatgggtcccccggcgccattcccacgctggccagcctggcaggggcaggggagcaccccgtagctccttcccactgctgcgtgtggtggygtcacctcccctgcgcatcatctcccctaggggcctggctgcccgctgcccctgttgctaccgcctttgaagctctcagctgaggaaccagcctgtatcc

SEQ ID NO: 120383 - DNA, 201 bp, Homo sapiens
ccttagcgctagctagcttggttgtggtagttggtgtggtatttttgagacttcctgatatgaaccttctttggtgcttttaagaaaacccacatagcttctttgttctcttgcgcaaatgatactaagatatttattttctttaaaaacaaaaaaccaaaacacacctcctgggttaaagtcagcctgcctttgaactgc

SEQ ID NO: 120384 - DNA, 201 bp, Homo sapiens
agctactcgggaggctgaggcaggagaatggcatgaacccaggaggcagagcttgcagtgagccaagattgcgccattgcactccagcctgggcgacagartgagattccatctcaaaaaaaaaaaaaaaagagaagcaaaaccagggacaaggcctcctctctgaacacatcctgtgcagagcccttccccgcagtgcac

SEQ ID NO: 120385 - DNA, 201 bp, Homo sapiens
gagggcctggaaccagcctcagtgtgagtagcatgcagggtcctgccttctgcacctgctccctccccactccctacccctctgtgtccctctgaactgcmcctcctctgtctgcccacccacaccagacccttccggacagcgcctcgagctaaatggcaattctggctctgagagtgctaagtgtggtcagctgccctg

SEQ ID NO: 120386 - DNA, 201 bp, Homo sapiens
ctagggctggaactgagcctagcagtggggtgaatgcctccctttctgtccttccccaaggcttgtctgggctggctgtgtggtgggtggagatacagatsgaaaacccccaagaagtccaaagttcagatgcagaattgggtctcagggagcttggcttagacttaagggcttgctagcctgcctgacttttgcacttgc

SEQ ID NO: 120387 - DNA, 201 bp, Homo sapiens
cacctagcagggactgtgtgtcagggacgagagcgtccaggctctgggatgccggtcacagctgtagtgtgcacagcagcactgcccatgccagtccctgmcctgtgtcgcggccactgagctattattctgttatgaatatgggagtgtgagcagctctcagtgaaccaaaactgttctttccgcagctcgaggccacag

SEQ ID NO: 120388 - DNA, 201 bp, Homo sapiens
gtcccagagccaagcggccctcagaagtcacccagattcctgtaaaacagcatcatagttaacagccccaactctggaaccaccctggaagggccagggtyccaactctgcctcccgccccacagcaaaccatgcgtaatggctcctaccttggagcatggagtgtaaatgaattaatagatgggaaggacgtagaacagt

SEQ ID NO: 120389 - DNA, 201 bp, Homo sapiens
ttctgcctttatcttaacatggcaccctccctgcttgtcagtgtccaaatttcctccacttaaacattttaattaattggctgggcatggtggctcacgcstgtaatcccagcactttgggaggccgaggcgggcggatcatctgaggtcgggaattcgagaccagcctggccaacatggagaaacccgtctctactaaaa

SEQ ID NO: 120390 - DNA, 201 bp, Homo sapiens
ggctgtgttgatcctctgtagtctttttgttttatcagtttttgtccattctttattccttcttttcttctttttcctttggatttattctgtttttcttkgtctcacttagcagtttagcttattttctgatttaagaatttaaggctatacattttcctctgactgtttttgctgcaaaatttgacatcatttacttgt

SEQ ID NO: 120391 - DNA, 201 bp, Homo sapiens
aactcctgacagcagctagtctttctactgtctccgtagttttgcctttcccagaatgtcacatacttggaatcctacagtgttgcagccatttcagatcrgaaaaaatttttaaacagaatacttcacctctgatcaccaaaatgcatagggatttcttcctcacccagcccacctctgccccgacaaccagtcagttct

SEQ ID NO: 120392 - DNA, 201 bp, Homo sapiens
ctgacttgcctacaccaagcctgcagcaatctctgttacagtcctggttttcctcccccaacactggttcccacagaattttcagcttatgagtctctgcyctggtaagttgtgattgtctgtcttctcctgttggtctctccagtttagggggcagtggtttgccctatgacctaacttctcttatggatctaagaagag

SEQ ID NO: 120393 - DNA, 201 bp, Homo sapiens
gtatatttccctgtttgttcaaggtggttgccgtcttctggcttccattgttggctgttgttgaaaacatcggctgcccttcaaattacttttctttgatyggtaaatatgtcttttctatcaggcgcattataaaagtattctctcttttcagttttctgctatttcacaaagacattgtaagagatttgtttttactta

SEQ ID NO: 120394 - DNA, 201 bp, Homo sapiens
gtgtctgtagccgcagctgcgggtccgggattcccagccatggcagattcctccgggcagcagggtgagcggcgcggccgggccaggctgagggcggctgsgggcctgactgggcgctgggtgctcggctcgaagggcagcgagtccttatgtctgaggggcccgggtgcatgggttctgaggggcagctgtgtccgtggt

SEQ ID NO: 120395 - DNA, 201 bp, Homo sapiens
gattcaggagctgtaggcagggattgcatcaggaacctggcccacgtgggccctgtgccccttctctgtctgtgttgtggctttgtccaccctgtgtcctygctgtctgccaggccattttcctacactttttctctccagccttggttctttgcctccccttcccatagtaggccacagaccatctgcttggtgccacgc

SEQ ID NO: 120396 - DNA, 201 bp, Homo sapiens
gctcggctcgaagggcagcgagtccttatgtctgaggggcccgggtgcatgggttctgaggggcagctgtgtccgtggtctgaggggcggcagtgcccgargtctgaggggtgtcagtgcgcggggtctgagggacggcacgtccttgggtccgaggggcgggggtgctcggggtctgaggggtgtcagtgcccggggtct

SEQ ID NO: 120397 - DNA, 201 bp, Homo sapiens
tattcagaacttgatcagaccacattaaagtgggaggacaggaattttcaaccttggacaagcagattttctgtctgtagaaaatttggaatcaaatctgrcacccgctttaggtccagggcctcctggcccaactactgagctccttccacagcccaggcagctaggcaagcccgtgccagggccccctccactggtgtg

SEQ ID NO: 120398 - DNA, 201 bp, Homo sapiens
tcctgaatgcaccaaggggttgtgctgtaggtgacacactgtgtgctcctgcccagcctctgcccataaccctgccctgcacggcccaggtaggctgcacrtgctcaccaggcccacctcggccctcccacctctttttgcctctgcacccacagtccccttggctttgctcctctgagttcatgtgagacctgcccattt

SEQ ID NO: 120399 - DNA, 201 bp, Homo sapiens
tccctccagatgtcttaacccgggttagtgagtatgtgccagaaattgtgaactttgtccagaagattgtggacaacggttacgggtaagcacaagggccytccctagggagggaagggctgcagaacatcgcacagggaggagctccccagctctgagcctgagtttgggaagcagaggagcaggtgttctggggctgcg

SEQ ID NO: 120400 - DNA, 201 bp, Homo sapiens
gcatgaacccaggaggcagagcttgcagtgagccaagattgcgccattgcactccagcctgggcgacagagtgagattccatctcaaaaaaaaaaaaaaaagagaagcaaaaccagggacaaggcctcctctctgaacacatcctgtgcagagcccttccccgcagtgcaccttgaaaggccagcagggcctggactcaac

SEQ ID NO: 120401 - DNA, 201 bp, Homo sapiens
tcctgcctcagcctcccgagtagctgggattacagacgcccatcaccacgctcggctaatttttgtatctttagtagagacggggtttcactgtgttgacmaggctagtgtcgaactcctgacctcaagtaatctgcccacctcggcctcctaaagtggcatgagccacatgcccagccttagtttcagtttttatggata

SEQ ID NO: 120402 - DNA, 201 bp, Homo sapiens
gacaggagctatatggccttttaggatctaacctcggaggtcatgtcctgacttccactgtcctccctagcggaggccgtcacaaggcccacccacgttcrtgcggagggggaggcatagacactaccctgtggtgggcattactgggttccagaagggatgggaaatactactgcagctatttcagaaagtaccatctgg

SEQ ID NO: 120403 - DNA, 201 bp, Homo sapiens
tcctacaactctgggcccacccaggggctgaggagcatgggtctgcactgtcctgggggccatggtgagaacctaacccagaatctgctgggaagctcggmagccaagaccatcagtcatggggccccagagctgcataatggtgagtgcgaatactgctgggccttcacagacatcagtgccattgcgtagacattttga

SEQ ID NO: 120404 - DNA, 201 bp, Homo sapiens
ggtgagtgcgaatactgctgggccttcacagacatcagtgccattgcgtagacattttgagagtgctagtcctggtgtcatatcccgaaggaggatgcatktcatcagcatctatcgcttggctatgattttagtgactttttgttggcaaatccatcatacacttccctggcccgtattgtctcaatctccaaagtaagc

SEQ ID NO: 120405 - DNA, 201 bp, Homo sapiens
gcccagggcaggcaggctgcctccgcagcgggatgggccctggtgtcccactcagtccaaacagctgatacggttttcagtggccaccacagagagtagayaggccacagatttcgcacttttatagccctgctttattttgttactgtcatcctgctgacacactttcgggtctgttagatgcacccacccaattccttt

SEQ ID NO: 120406 - DNA, 201 bp, Homo sapiens
acattgtgcagctctaagaccatgacatgtgtttttttaatggatatataataattatgcaatttatggggaacatgtgatgtcttaatacatgcacaccstgtgtgatgatcggggtagttaggatgctcgtcaccttagacatttaccttttctttgcattgggaatgttccagatcttctggctatgttgaaatatac

SEQ ID NO: 120407 - DNA, 201 bp, Homo sapiens
tctaagaccatgacatgtgtttttttaatggatatataataattatgcaatttatggggaacatgtgatgtcttaatacatgcacaccctgtgtgatgatyggggtagttaggatgctcgtcaccttagacatttaccttttctttgcattgggaatgttccagatcttctggctatgttgaaatatacaacaaatgtttt

SEQ ID NO: 120408 - DNA, 201 bp, Homo sapiens
gtgagtgtaggtactcagccctggagggcgtcggggccgcccctcaggtctccagagagcggatacacagcggcttcagttcccagactgcttcctcagcrctcaaaagccactgcagccgccgttaggacatttgatgtttttctcattttaaaaatagcagatgcttactgcagaaaatgtgagcaatgaagaaaaaga

SEQ ID NO: 120409 - DNA, 201 bp, Homo sapiens
aggaagctcacttcatgctctctggcctgagagtctgtgtgactcgcacacctagcagggactgtgtgtcagggacgagagcgtccaggctctgggatgcyggtcacagctgtagtgtgcacagcagcactgcccatgccagtccctgccctgtgtcgcggccactgagctattattctgttatgaatatgggagtgtgag

SEQ ID NO: 120410 - DNA, 201 bp, Homo sapiens
atatataataattatgcaatttatggggaacatgtgatgtcttaatacatgcacaccctgtgtgatgatcggggtagttaggatgctcgtcaccttagacrtttaccttttctttgcattgggaatgttccagatcttctggctatgttgaaatatacaacaaatgttttggtaactatagtcaccctactgtgctagtga

SEQ ID NO: 120411 - DNA, 201 bp, Homo sapiens; identical to SEQ ID NO: 20493

SEQ ID NO: 120412 - DNA, 201 bp, Homo sapiens; identical to SEQ ID NO: 20494

SEQ ID NO: 120413 - DNA, 201 bp, Homo sapiens
gcttcttctttttaaaatgaacagctgaaataaaaatgggtgaatatattttaacactcctttctcttcccggcatctgataagcaagcatgtgttaattygtgtgacctattatcctcagcatctttctgtttgttgtaccctctttgagaagaattgacattcattataacagtagaaatcatttaaaatgtcagttca

SEQ ID NO: 120414 - DNA, 201 bp, Homo sapiens; identical to SEQ ID NO: 20495

SEQ ID NO: 120415 - DNA, 201 bp, Homo sapiens
attccctagacagatgcaaccatgcttgtggaccacaactgcactgcaataatatactgtagagaacacaaacttttctaagtccaccatagtgaatgacmtagattttcttagataaaaatcatgtcagcatatatcagttcaggcagattgttttgtttatttctgtatgaaatgagaccaagctaggcatttggttga

SEQ ID NO: 120416 - DNA, 201 bp, Homo sapiens
aagatggtatcagttataccagtgaaggagaagaaactcctggatgtcaaactaggggagctgccaagctggatactgatgcaagatttcacccctagtgscattgctggagcatttcaaagaggtttctactggtactacaacaagtacatcgacgtgaagaaagggtgtctcagggggttccacggtactggcagctta

SEQ ID NO: 120417 - DNA, 201 bp, Homo sapiens
gcacttcattgccagtattagacagataatcgaggtagaaaattaacaaagatatttaggacctgaaaatgtttaatttttaatttttgggagtacatagwatatatatatatatatatatatatatatatatatatatatttatttatttatttatttatggggtatatgggatatttttatgtaggcatacaatgtgtg

SEQ ID NO: 120418 - DNA, 201 bp, Homo sapiens
ttcagggtacagatctttcacctccattgttaaatttatttctaagtattttatttgttattgtaaatggaatagttttcttgctttcttttttgagtggytcattattagtgtatagaaatgtaactgagtttcgtatgttgattttgtatccacccactttactgaatttattagttttaacaggtttttggtggcatc

SEQ ID NO: 120419 - DNA, 201 bp, Homo sapiens
aggtattttattctctttgtacctattgtgaatgggagttcactcatgatttggctgtttgtctatttttgttgtataggaatgcttgtgatttttgcacrttgattttgtatcctgagactttgctgaagttgcttatcagtttaaggagattttgggctgagatgatgaggttttctaaatatacaatcatgtcatctg

SEQ ID NO: 120420 - DNA, 201 bp, Homo sapiens
aggctggagtgcagtggtgcagtcttggctcactgaaagcctcctgggttcaagcaattctcctgcttcagcctcccaagtcgctgggattacaggtgtgygccaccatgcctggctaatttttttgtatttttcgtagagacgggtttcaccatgttgaccaggctagtcttgaactcatgacctcaagtgatctgcctg

SEQ ID NO: 120421 - DNA, 201 bp, Homo sapiens
ttgtaacctgctaaatatttatgccactaaatatttatccataatatccctttatggttttaaaatacattttaatacaaggtatttataaataagtaagrtaaattactctatactctaagtaggaatatgtagactggtggaaagattatctagttactgaattatatatggaatatgaaaccatttatataaaacatg

SEQ ID NO: 120422 - DNA, 201 bp, Homo sapiens
tctcttcctgtcacagtatctactgtttactgaatttaccaaatgttgaatctctgacgaagtccaaccttagcatacaatgagctagcagtggacttcartctcagcttgcgaggatttctatccgttctgttgtgtacatgactagcaaaatgatttaatgcacacaaacaaccagagattaggtcattcttaaaaatt

SEQ ID NO: 120423 - DNA, 201 bp, Homo sapiens
caaatcctatagcatgaatatttgctcttctgatgctatctgataaatcccttaaggttttattccttttcattctttttcttttattctctctgactgtrttttttaagataacttgtctttgagttcatagattctttcttctgcttaatcagttctttttacttctctatgggttttaaatttcattccttgtatttt

SEQ ID NO: 120424 - DNA, 201 bp, Homo sapiens
cacagtatctactgtttactgaatttaccaaatgttgaatctctgacgaagtccaaccttagcatacaatgagctagcagtggacttcagtctcagcttgygaggatttctatccgttctgttgtgtacatgactagcaaaatgatttaatgcacacaaacaaccagagattaggtcattcttaaaaattctgtttataaa

SEQ ID NO: 120425 - DNA, 201 bp, Homo sapiens
tcttgtcacccaggctggagtgcaatggcatgatcctggctcactgcagcctctgcctcccaggttcaagtgattctcctccctcagcctcccaaataggkgggattacaggagcaagtcaccacacccagctaatttttgtatttttagtagaaacagggttttgggaagttatctatcaagtcctttgcccgtttttaa

SEQ ID NO: 120426 - DNA, 201 bp, Homo sapiens
ttatagtggttggaaaagatgcctgatacaatttcagttttcttaaatttgttaagttgtgttttgtagcctaacatatgatctgtcctggagaatgttcygcttgtgcttgaagagaatatgtattctgctgctgttggatagaacgttttgtacatgtctgttaggtctgtttggtatgaagtgtagttcaagtccggt

SEQ ID NO: 120427 - DNA, 201 bp, Homo sapiens
agcagaagagaaagcaagtatttgatatgttacggcaaccaagagaagaccagtgtggttgaagcacaaggggaagagtggtttgagatgtgtttggagaggtaggcaggagttggatcatgcaggtttttgtccaccttcaaatatttcttgaactgaatgtgtcaagcctgaaatcaaattctgcatattttgtcctta

SEQ ID NO: 120428 - DNA, 201 bp, Homo sapiens
aaaattagccagacatggtggtgggtgcctgtagtcccagttactcagaaggctgaggtgggaggatcacctgagcccagggaggtcaaggctgcagtgcrccatgatcgttcgctgcactctagcctgggtgacagagtgagaccctgtcaaaagaaaagaagagaagagaagagaaaagctttttaatttgaatattgt

SEQ ID NO: 120429 - DNA, 201 bp, Homo sapiens
ctaggaaaagtcatggtagtacagcccaggtaggaatgagaagtttcaatatagtgtccctggaatattcaggcataggctttagataaggagttcttaamctggggtccttgaattaaacttagaagatccatgaatttcgatgggaaaaaaatccgtattttattttcactaatcacaatttccttgaattatgatata

SEQ ID NO: 120430 - DNA, 201 bp, Homo sapiens
tacacgtgccatggtggtttgctgcacccatcaacccatcatctgcattaggtatttctcctaatgctatccctcccctagcccccaatcacctgacaggycctggtgtgtgatgttcccctccctgtgtccatgtgttctcattgttccactcccacttatgagtgagaacatgtggtgtttggttttctgttcctgtgt

SEQ ID NO: 120431 - DNA, 201 bp, Homo sapiens
ttccttccctgcaggttgtaaaagagtagtctctgttcactgtcttcttcactatgctttccaatctaatactcattgttgaaatctgcagtgtctctcargtcttacttaacttgtcctttctctagattatgtgactgctgtctgtcctccatccttaagcaattttctcctttttcagactctgtcctgattcccttg

SEQ ID NO: 120432 - DNA, 201 bp, Homo sapiens
agtaggaggagtaaaagtagaagaaatccattgcaaagagaattggagtggggtagggagcctttagaaaaggaagctcaaagttttcccaagaaaaaaawaatgggtggaaatgcattaatgggtgtgaccaattaaagaaagttgcagcccaaaatatgtacaagagttgttgccgatgcccagcagaattacaaaaag

SEQ ID NO: 120433 - DNA, 201 bp, Homo sapiens
gcaagctccacttcctgggttcatgccattctcctgcctcagcctcccgagtagctgggactacaggcagcccccaccacgcctggctaatttttttgtattttttttttttttgtagaggcggggtttcattgtattagccaggatggtcttgacctcctgacctcatgatccacccccccagagtgaatattaaataat

SEQ ID NO: 120434 - DNA, 201 bp, Homo sapiens
tgaagcaggagaatcactggagcccaggaggtcgaggctgcagtgagctgtgatcatgccactgtagtctagcctgggagacagagcaagaccctgtctcwtaaattaaataaataaataaataaataaataaataaataaataaaatgtcagttattggcttcaccactattaaacaaaatcattggtaggaaaaatatc

SEQ ID NO: 120435 - DNA, 201 bp, Homo sapiens
ttgaacagtctattaatataatatgctacaccaaaagaataaaggtgattgtatcagtagacacagaaaaagtatttgacaaaacctgacaatctttcatrataaacacactcaacaaactaggaatagaagaaaacttcctaactcaataaaggacatatgaaaaccgacagctaatgccatatttaatggtgaaaaggc

SEQ ID NO: 120436 - DNA, 201 bp, Homo sapiens
acaactcttccaaaaaatagaagaggaggaaacatgtcccacctcattctacagggtcactatgaccctgatggcaaatccagacaatgatcacaaggaargaaaactgtaggtcaatgtcttttatgaatacatacacaaaatccttaacaaaatactagcaaaccaaatacagcaacatttaaaacataaccaagtgtg

SEQ ID NO: 120437 - DNA, 201 bp, Homo sapiens
atgccaattattcacaactcttccaaaaaatagaagaggaggaaacatgtcccacctcattctacagggtcactatgaccctgatggcaaatccagacaaygatcacaaggaaagaaaactgtaggtcaatgtcttttatgaatacatacacaaaatccttaacaaaatactagcaaaccaaatacagcaacatttaaaac

SEQ ID NO: 120438 - DNA, 201 bp, Homo sapiens
gtatcacttcactgataaattctgtgaaatatttaaagaagaattaatgccaattattcacaactcttccaaaaaatagaagaggaggaaacatgtcccamctcattctacagggtcactatgaccctgatggcaaatccagacaatgatcacaaggaaagaaaactgtaggtcaatgtcttttatgaatacatacacaaa

SEQ ID NO: 120439 - DNA, 201 bp, Homo sapiens
ctccatctgctgactgtccattcattttctactagcctacttaagtgagaaggctgccatgagaacatgtattcatatctttattcaaatgaacaaaaacraaataattggaagtctttttttcggacacagaatacatccgatttggttgattaatttgacagtgaggactggctttgtaaattatatggtggacttcat

SEQ ID NO: 120440 - DNA, 201 bp, Homo sapiens; identical to SEQ ID NO: 20504

SEQ ID NO: 120441 - DNA, 201 bp, Homo sapiens
atgactcctaggaactgagatagacagccctaggaatcctctgcacccctccgtacacacagggctgagggctagaccttgttggagagggcatggctgtwgccactaaacagcagagaagttgttatggtgccatgatggtgcaacttgctggagctttcctgaaatctgaaatttgctggaaatttaccctctgggatg

SEQ ID NO: 120442 - DNA, 201 bp, Homo sapiens
tctttttttgttgtgtctctgccaggttttggtatgaggatgatgctggcctcataaagtgagttagggaggagtccctctttttctattgtttggaatartttcagaaggaatggtactagctcctgtttgtacctctggtagaattcatcagtgaatccatctggtcctgggcttttttttttttttggttggtaggct

SEQ ID NO: 120443 - DNA, 201 bp, Homo sapiens
tggtgcaacttgctggagctttcctgaaatctgaaatttgctggaaatttaccctctgggatgctggggaaagctgtttgcagggcatctcagtggaggcrctccactaccaaaccatgtgagcggagcgccaggggaagctgctagccgctgggtgctgctcatcgctgtgcacagaaagcagcacctggcactgaagaa

SEQ ID NO: 120444 - DNA, 201 bp, Homo sapiens
actgttcacacatgctacatttcacatgagcctcctgtgcaattttattctaggctaccagaaaatttaagccatttttcagctctttaagaacataagcyctttcactgagaaaattccagtccagtgccacacacagttcactcaactgtgctacttcatgcatgctattctgttcaccactaaaagagactttcaaca

SEQ ID NO: 120445 - DNA, 201 bp, Homo sapiens
tttatctttttagtgatgaattattttaggtggtctgttggccctgcctgagtaatcaatggaatctaaggttttataatttgattcatgtgttcagagayaatagctgaaaaataaaataatagttttaataagttcaccaagaaagtagcaaatgtattattttttgcctcggggctgggtctttttctgatggatttt

SEQ ID NO: 120446 - DNA, 201 bp, Homo sapiens
ctgggcccccacccattgctccttctatacccaacagccaggcatcgagttccaaagtgatctagtccatgacaatccagtccaagggcaacctctggccmccaggtgctctcagccactcaccctcacaggagggtttgcattaagagttctctgagcaggaatgtgaagaagtattgagacagggggcccctgctttct

SEQ ID NO: 120447 - DNA, 201 bp, Homo sapiens
tttacagaaaaattgagatagttcagagagttcacatataccctctcacccagtttctcctattaacatcttacattagtgtggaatatttgttataattrtaaatgaatattggtacgtaattattaactaaagcccatttttttcatactttcttagtttttacctaatgtcctttttctgttccaggattctatccag

SEQ ID NO: 120448 - DNA, 201 bp, Homo sapiens
tctgtggagatataaatatacacaagaaacaattacattattttagaggaaacataaatcacatagacaggaattcagagaaggtgaatatcaacaaggcmtagggaagaattgtagaagctgggagccaaaaatggccttacaaattatttattttttcagcattctctatctgtaggtttgagttctacagatgcacct

SEQ ID NO: 120449 - DNA, 201 bp, Homo sapiens
gttaatttccttttttaactgacaagtaaaaattgtatataattatggtgtacaacatggtgttctgatataggtatgtgttgtggaatggctaaatcaarctatttttaacatatgcattacctcacatatttattattttggtgaaaatacttaaaatctactctcttagcaattctcaagcataccataggttgttat

SEQ ID NO: 120450 - DNA, 201 bp, Homo sapiens
tcgcaaggcatgactcaaagtataacaatatacaaagataattataactgcatttttctttttaaaaagttatatacacacggaaaagaactgaagcaatwgatacaaaaatacctaggtgtgtgaagttgtgtgtgtatgtgtattatttggggaaaggaaagtgaggaaagaacaatcttgccttgcctcgtattacct

SEQ ID NO: 120451 - DNA, 201 bp, Homo sapiens
atgaccttcttttccagaaaagacatatatgcatctacacatgttttcatataatttcaagaaattttttgttaagtcttctgaaactcttcaaagggggytctttgaccacatattcaggacctctgttctaaaagatgcacatgaacccaatctaaaactcggatcagaacaccgtgtttctgatttctgtattggtgt

SEQ ID NO: 120452 - DNA, 201 bp, Homo sapiens
attatgaaaaccacaatggctaaatattttacttctgtgagcgtgattatcaatattatttacatttttccattagtgtacatatctatcactacattgtrtaaggaatttaattccaactcattagatgttaactatgcatgccaggcattgtgttaagcagtgaggatacagtgataaataaggtaaagctgatttttt

SEQ ID NO: 120453 - DNA, 201 bp, Homo sapiens
caaaataggacattcatcttgttaaaggataatgaaaatgcttttcattccacatgtggtcattcctttaggaaaaaatgaaaatgaacaatgttagcatrattaagttaccaatttattgtagttaaaaagaaagaaagttctacttaacaatggccaaataaacagaactaatatagcatgcatcagtgggttcttaaa

SEQ ID NO: 120454 - DNA, 201 bp, Homo sapiens
aggagaatcactggagcccaggaggtcgaggctgcagtgagctgtgatcatgccactgtagtctagcctgggagacagagcaagaccctgtctcataaatwaaataaataaataaataaataaataaataaataaataaaatgtcagttattggcttcaccactattaaacaaaatcattggtaggaaaaatatcatcttc

SEQ ID NO: 120455 - DNA, 201 bp, Homo sapiens
aaaagacaatggaagagaactgaaaaggcttagctcaaggggaaaagtcgtagagctgtcagggtctacttcagtaatttgcaaacctcactgtccattaraaccatacattccaagtctctcctcaaagttctgatgtagcaagattatagtggattctagaattttctttttaaaactctcccataattcttatgcttg

SEQ ID NO: 120456 - DNA, 201 bp, Homo sapiens
gttgctgcaattaccacctgtaaataaaagtgctctcctcctccctcatatctcatagctttataaggaaagaggctctgagactttatatgattcaaatrtttgttttctccacttaagatcgtcccccgactactccatcttgttggcaaggttctatttaccttttaatgctcacctcaaacattactatatcaatta

SEQ ID NO: 120457 - DNA, 201 bp, Homo sapiens
ctcccaggtttacgccattctcctgcttcagcctctcgagtagccgggactacaggcacccgccaccacgcctggcttttttttttttttttgtatttttagtagagacggggtttcaccgtgttagtcagatctcctgacctcgtgatcagctcgcctcggcctcccgaagtgctgggattacaggcgtgagccaccgcg

SEQ ID NO: 120458 - DNA, 201 bp, Homo sapiens
tgttgatttataactcaatcacctaaagtttttggctttgccaattgagaacagtcagcttaccttctttttaaaaggagttttaaggtttccattttatrccttttcctagttgatgtactaatgttggcttgcctaggattgtgtggagttggtgattttactaatagagtaaaacagacttccttttatgttcagaag

SEQ ID NO: 120459 - DNA, 201 bp, Homo sapiens
gtgaggcaatgggggcaggcgggatgctgacatgattcacgtgagccttgattgttgagaaataatatggcaatagttccatttgatgggagtgatacatrcaaagtgtgagttagagatggattggagagctggatcatggaggaccctttatacgccatgcagaggagtgggcacttaatgtcgccaggtcagtggctt

SEQ ID NO: 120460 - DNA, 201 bp, Homo sapiens; identical to SEQ ID NO: 20499

SEQ ID NO: 120461 - DNA, 201 bp, Homo sapiens
tattggcaaatcttaagactttggcgtgatttaatttagtgatatatcttaaccaaacaaccataaatctcattttcacattaaagttaaaagacgtatartactatattttgttaaaccacatgatttgtcataatagttgtaattgtatcatgttttcaaagtggcttgactgaattcttgctgttcttttgctcatga

SEQ ID NO: 120462 - DNA, 201 bp, Homo sapiens
tatcatgctggagggctcccggtatttgtggccctcaggttttaattgtagaatgcatctttgttctttccctgacctgcagagtgacatcactgcctctsttcctgtgcgctggctttgacataagccagatggccaccgtggttggtaggcgcccaggctgcctggtacaggagttgatgaaacagaataggaagacgt

SEQ ID NO: 120463 - DNA, 201 bp, Homo sapiens
gaggaggagtaggaggagtaaaagtagaagaaatccattgcaaagagaattggagtggggtagggagcctttagaaaaggaagctcaaagttttcccaagaaaaaaaaaatgggtggaaatgcattaatgggtgtgaccaattaaagaaagttgcagcccaaaatatgtacaagagttgttgccgatgcccagcagaatta

SEQ ID NO: 120464 - DNA, 201 bp, Homo sapiens
gctttaataaaaagtcattaagagctagatttcttctccccctgccctctgcagtgcttttccttgccaattaatttaaagcattctatacttacttgctraagtctatgaattagtatccttgaaaaggttaaaatggtgttgtttaggttaagactaagttttatttgttcttttctccatttaatgaatactgcatat

SEQ ID NO: 120465 - DNA, 201 bp, Homo sapiens
agctatgccattattcaattatgggctcaagtagacttgaaacagatttattaagctacattatgggttggagggggaatgattatttatgctgcaatctaaaaaaaaaatccattctagtgtagatgatatagcaagcaccaaagacgctacaacaactaatctggatcactttctcttatatttgagatgaaaatgagc

SEQ ID NO: 120466 - DNA, 201 bp, Homo sapiens
ttccacttttagctcttcaaggcattgccacactgctttccacaatggttaaactcttttacactctcaccaacagtgtataagcattcctttttttctgmaaccttgccagcatgttatattttaacttttaaataatgtcctttctgactcatgtgaggtggtatctcattgtggttttgatttgcatttctctaatga

SEQ ID NO: 120467 - DNA, 201 bp, Homo sapiens
tcatattcaggttttagcactttcactgaggttacctgtctctgtctctgccactggaatatgaacttgttagtgttttcatctcttgcattgatcattcytgccatgtgttcggaaagctcttccttcagagatcagcacagacaccttcctctcctccttcagggctttgctcaaatatcacctcagtgagacttcttt

SEQ ID NO: 120468 - DNA, 201 bp, Homo sapiens
cgaagttcttgcgctgtgtttttcaggtccatcggggtcacttatgttcttctctaaactggttattctagttagcatttcctgtaacctttcttcaaggwtcttagcttccttacattgagttagaacatgcttctttagctcgaggagtttattattacccaccttctgaagcctacttctgtcaattcatcaaactca

SEQ ID NO: 120469 - DNA, 201 bp, Homo sapiens
ctatttaaccagaatactagtaccagattagcaaatgaaactacaggttgaaaactcacccagttcaacagattcaattactgtaatttggatttttaaamtatgatttgggaaattaagaccatataactcattcttaaacaccttcaaatatatcctcactatgctttatttttggtgtagaataaatagaaatatttt

SEQ ID NO: 120470 - DNA, 201 bp, Homo sapiens
tttgtccatgtgtccagtgacttctcagataatgtttttagtaaagatttactgagagagttcagattggttcagtcctatcaccactttttctagaagtsttgcagtgaggttcttctaaaagaattgttgtgtaggaaacagcacactgcctaatctttgcattgacagcactgaaaacaagcaagggtcggagagatt

SEQ ID NO: 120471 - DNA, 201 bp, Homo sapiens
cactaaggattttcattatttgcttagtatttctttaaaatgcattctaacccaaggctgtgtatctctcctctctgctttgattcttgtgcctgctgtgycccaggttggccttcattccacgatgtgatcaattctgaggcaatcacattcacagatgacttttcctatgggatgcacagggtggaaacaagctgctct

SEQ ID NO: 120472 - DNA, 201 bp, Homo sapiens
tcttttcatgttgtagcttaaatttgagcttgctggttcttttttttctttaagagtagtatttttaaattaaatacatacaaattaaattttaaagaaayagtatcatctttgattaaatcagaatacacattgcatcaatttttaaatgttattaccatgtctggatacttagttaacaacatgttagagcaattcaaa

SEQ ID NO: 120473 - DNA, 201 bp, Homo sapiens
tgaaatgaaagggatttaatcgagcctgcccactcttcttcaaataattgataattaggctaagatgtggagaaagtttcagaagttaggtaggcaaaggrgttaaggtatagtagagtgggggagggaggaggaagcattccacgcagaggaagcatattgtgttcatgtaaattgaaagggcacataaatattcactgc

SEQ ID NO: 120474 - DNA, 201 bp, Homo sapiens
atccgggaaccagagcccccagtgcctgcatagacgttggttgtgctgctgaccagccaggtgccatagctgggcacctggatggagcccagggatgggtwggtagttggtggacaaggtggagcgagtggtgaagctcatgctgtctggggaagagagcgggaagagaggactcaggctttgctgataaccttgagtttt

SEQ ID NO: 120475 - DNA, 201 bp, Homo sapiens
caggtcagaaaccaaatttgactccggttcaggtatgtttacattaataatgctcttctgaatatattttatttacattattctctgaggagtaaatcatyagatcaagaaccattttgattttaaacagactaggcggtttctttccaaaatgtgagtcccacctcaaagcagggctattgactgcatcaaatcataatt

SEQ ID NO: 120476 - DNA, 201 bp, Homo sapiens; identical to SEQ ID NO: 20502

SEQ ID NO: 120477 - DNA, 201 bp, Homo sapiens
gggcctgggcaagaggacaaatggtagcatagatacatactgtatagctaaatagttaaaactcaaggcaaaaaactgttagaaaaggatataccaacctrtcttgacacatacaccttataatgaaaaatgataccaaatgactgagagtaatgcaaatttaaaattaattttgtcttccaccaaaagactatgaattta

SEQ ID NO: 120478 - DNA, 201 bp, Homo sapiens
cattagtgtgcatgtgtctttatggtggaatgatttatattcctttggtatatcagtagtgaaactgctgggtgtaatggtagttccacttttagctcttyaaggcattgccacactgctttccacaatggttaaactcttttacactctcaccaacagtgtataagcattcctttttttctgcaaccttgccagcatgtt

SEQ ID NO: 120479 - DNA, 201 bp, Homo sapiens
ttagtagagcagactcgtagacaacagtgtaaacgacagtttataaacatggtatttcaactcaatcaaaaatgaacagtttaaaacttattggtagcccsattggtattctgtttagaagaaaataaaattataatactatagcatatacttagtgaaattcctgattaagatctgaatgcaaaacaaacatcctatatg

SEQ ID NO: 120480 - DNA, 201 bp, Homo sapiens
tcaaccactagttcttgtgctttgcagaaccttttcaatgctataccgtacatatcacaggtggactatggaggttatttagattatacataatgatgttttcctctggaaaaagctccaatgtgtaaaagtacccagcatagttcttgtaacattggtttgccaaatacaggggaggctaaatgtttatagaaaccacat

SEQ ID NO: 120481 - DNA, 201 bp, Homo sapiens
caaccactagttcttgtgctttgcagaaccttttcaatgctataccgtacatatcacaggtggactatggaggttatttagattatacataatgatgttttcctctggaaaaagctccaatgtgtaaaagtacccagcatagttcttgtaacattggtttgccaaatacaggggaggctaaatgtttatagaaaccacatt

SEQ ID NO: 120482 - DNA, 201 bp, Homo sapiens
aaccactagttcttgtgctttgcagaaccttttcaatgctataccgtacatatcacaggtggactatggaggttatttagattatacataatgatgttttcctctggaaaaagctccaatgtgtaaaagtacccagcatagttcttgtaacattggtttgccaaatacaggggaggctaaatgtttatagaaaccacatta

SEQ ID NO: 120483 - DNA, 201 bp, Homo sapiens
accactagttcttgtgctttgcagaaccttttcaatgctataccgtacatatcacaggtggactatggaggttatttagattatacataatgatgttttcctctggaaaaagctccaatgtgtaaaagtacccagcatagttcttgtaacattggtttgccaaatacaggggaggctaaatgtttatagaaaccacattaa

SEQ ID NO: 120484 - DNA, 201 bp, Homo sapiens
ttggagcaagctcttaaagttgattataactggattgacctgcatgaaggctatatcccagaagagtgatctattatttttcagctttgactttttttacktcttatttttttaataaagtataattttaatttggagctttttaagtgcatctgagttatggttcactcatgtttgcaattaaaggtaatttttctctcg

SEQ ID NO: 120485 - DNA, 201 bp, Homo sapiens
tcattggctgggtgtggtggcccaggcctgcaatcacagcactttgggaggccaagacgggtgcatcacttgaggtcaggagttcgagattagcctggccaacatggtgaaaccccatctctactaaaaatacaaaaattagataggcatggtggtgtgcgcctgtagtcccagctactcgggaggctgaggcaggagaat

SEQ ID NO: 120486 - DNA, 201 bp, Homo sapiens
gcttctgataattttgtttgagaccttgaggaaccacataggacattttaatattttgtatacacttattcagcaggccttccactgaatagctcattttytataggttcactaatgataatgataataatgctaaaacaatagctaacacttactacagcacttaccatatgtcaggcatggttcttagtgcttcatata

SEQ ID NO: 120487 - DNA, 201 bp, Homo sapiens
acaaaaaatggttatgaagaacaaaaaattgaaaaactaaatgagacctagaatttgctagcacagcagggagactgtagtaaaaaaataattgtacattaaaaaaaaaaaactaaaagagtataattgggttgtttgaaacaaaggataaatgcttgcagtaatgaccccgatgtggtaattatgcattgcatgctggta

SEQ ID NO: 120488 - DNA, 201 bp, Homo sapiens
tttaaatagcaataattaaagtggagaattgagtaagtatttaaatacaacatatacccgtttagtccttcctttttctcagccacattactaggtgctgrggatgcaaagatgactaaaatatgtgtgagcactgtctctcaagaagacattgaataatgtcttcccgtgtcagggcaagacatggcttttcttgataaa

SEQ ID NO: 120489 - DNA, 201 bp, Homo sapiens
ataagagtaatttgcaatctaacacatagttataatacatattgtacattatactctgtttgtccctgggaaagattaaacagagggctttcattgcttgytgtatttttacagcctgttactagaaaagaatttcatatagaacaggcaaaattttgaattggaattaagttaaaaataaatggaaaaagtagtaaggtc

SEQ ID NO: 120490 - DNA, 201 bp, Homo sapiens
ttatgtacattgactgtttataattcctttgtgaattgcttattaacttatttttctttggtgaggctggaaataagagcagggcttgagtcagacagacmatcatttgaatcctggctctgtcttttaagcactgtgtaacttggggcatataatataaactctctgagcttcaatttcctcatttgtaaaacaatattt

SEQ ID NO: 120491 - DNA, 201 bp, Homo sapiens
atatctacattttacaacatattaggaggtaactgctattaaaaaaacccagcagagtaagggggattgggaatgctagggaagacaggggtacagtcacrgtttcaataggtcagagtaggtctcagggagaagaagacatgtaagcaaacatatgcagaagaaagggaagctgacaatgtagatattctgggggaaaat

SEQ ID NO: 120492 - DNA, 201 bp, Homo sapiens
acctacatagtgctttgataaaagttatgaccttcttttccagaaaagacatatatgcatctacacatgttttcatataatttcaagaaattttttgttargtcttctgaaactcttcaaagggggctctttgaccacatattcaggacctctgttctaaaagatgcacatgaacccaatctaaaactcggatcagaacac

SEQ ID NO: 120493 - DNA, 201 bp, Homo sapiens
ttataactcattttctaaaatttttctcttggagaaaagaaggaatttgttaggtatcatatggttaaaaatacacttaaacaaatacttcataggcatcwtttccatgcaataaatatccagtattgagaaggaacatattaaatagatacctggtttagcgtgttaagatatgcatcttttcatgttgtagcttaaatt

SEQ ID NO: 120494 - DNA, 201 bp, Homo sapiens
gaatttctttccatgagctatgagaaagctgatttagagtctctccacctgttctgacagcagcctcagatggctgtctggagttttgagagatgtttgamagaaggccatagactcttgaagtttgtagctagcaacctacaggaaggacagattcatatatcccatagatagcacctgggttagggtcctgatcaacac

SEQ ID NO: 120495 - DNA, 201 bp, Homo sapiens
tgctcttgtcacccaggctggagtgcaatggcatgatcctggctcactgcagcctctgcctcccaggttcaagtgattctcctccctcagcctcccaaatrggtgggattacaggagcaagtcaccacacccagctaatttttgtatttttagtagaaacagggttttgggaagttatctatcaagtcctttgcccgtttt

SEQ ID NO: 120496 - DNA, 201 bp, Homo sapiens
ttctctgtaaaaatgtatctctagcatgattcagctagtcacacaagctggaaacctagtaataatgtgatcctgcccttcttcactgccctgcatgtacygcaatcaccaaaatcagtaaactttgctctcttgattgctctataaactctcccctgcttcccagtcccattaaagcttcattatttctgttccagtaca

SEQ ID NO: 120497 - DNA, 201 bp, Homo sapiens
ccctagatttggaaagatttctgctattatttctttaaataagctttctggctctttgtctctttattctcccccaaatcctatagcatgaatatttgctsttctgatgctatctgataaatcccttaaggttttattccttttcattctttttcttttattctctctgactgtattttttaagataacttgtctttgagt

SEQ ID NO: 120498 - DNA, 201 bp, Homo sapiens
ctggcatctcaggtatactgatcttaccagttatttattttctgtgtgtatattttttttttgctccactgtattgttgcaaaatcttaaataggatcttrgggactctctggggttattttgtttggagatagctgtctatgtttattttgggggtgctaaagggagaaagctgatatctcctactctgccattgtggtt

SEQ ID NO: 120499 - DNA, 201 bp, Homo sapiens
aacaggagtacgacattattggcactagcaaatctaatcatgtaacccctctgcccagagtttttccaagggcttctaattgactatgggatgaaatatcmctccctttgcatgcaatcaaaggctttcatgacctagacctttctctgtctatgttcaatttctctacttcccacccccatctttagcaattggtatttt

SEQ ID NO: 120500 - DNA, 201 bp, Homo sapiens
tatgcatgcctcttagaaatataatatagctgaattttgatttttattttttatccattatgagaatatttattttcaaattgaagaatttcaacctttcrttttattataagggagacactttaaaaaatgctagccaggtgcagtggctcacgcctgtaatcccagcactttgggaggccgaggtgggtgaatcacgag

SEQ ID NO: 120501 - DNA, 201 bp, Homo sapiens
tatggctagccagttttcccagcaccatttattaaatagggaatcctttccccatttcttgtttttgtcaggtttgtcaaagatcagatagctgtagatawgcagcattatttctgagggctctgttctgttccattggtctatatctctgttttggtaccagtgccatgctgttttgttactgtagccttgcagtatagt

SEQ ID NO: 120502 - DNA, 201 bp, Homo sapiens
tggtgagagagggcatccctgtcttgtgccagttttcaaagggaatgcttccagtttttgcccattcagtatgacattgcctgtgggtttgtcatagatarctcttattatttgcagatatgtcccatcagtacctaatttattgagagtttttagcacgaaggttgttgaattttctcaaaggccttttctgcatctatt

SEQ ID NO: 120503 - DNA, 201 bp, Homo sapiens
gtgtctctatttccttcagttctgctctgatcttagttatttcttgccttctgctagcttttgaatgtgtttgctcttgcttctctagttcttttaattgkgacgttagggtgtcaattttaaatccttcctgctttctcttgtgggcatttagtgctataaatttccccctacacacggctttcgatgtgtcccagagat

SEQ ID NO: 120504 - DNA, 201 bp, Homo sapiens
ttcttttgcttaacatttaaatacctgcctggttctcctctccgtttatattcatccctcctacatatccttatccaggaccttactgtcttttatgttgygatgactttccaatctgcatcttgagcttggctctcatttctgagcccacatattcctttgtctcctagatccacaagaaactgattttgttattttctc

SEQ ID NO: 120505 - DNA, 201 bp, Homo sapiens
aaaaagcctttgacaaaattcaacaacccttcatgctaaaaactctcagtaaattaggtattgatgggacgtatttcaaaataataagagctatctatgasaaacccacagccaatatcatactgaatgggcaaaaactggaagcattccctttgaaaactggcacaagacagggatgccctctctcaccactcctattca

SEQ ID NO: 120506 - DNA, 201 bp, Homo sapiens
tttcaactttggtgaatctgacaattatgtgtcttggagttgctcttctcgaagagtatctttgtggcattctctgtatttcctgaatctgaatgttggcrtgccctgctagattggggaagttctcctggataatatcctgcagagtgttttccaacttggttccattcttcccgtcactttcaggtacaccaatcagac

SEQ ID NO: 120507 - DNA, 201 bp, Homo sapiens
gcttcatttcattcatttgatcttccatcactgataaccctttcttccagttgatcgaatcggctactgaggcttgtgcattcgtcacgtagttctcttgycatggttttcagctccatcaggtcctttaaggacttctcggcattggttattctatttagccattcgtttaatttttttttaagaaagatctttaagttt

SEQ ID NO: 120508 - DNA, 201 bp, Homo sapiens
ttacggcagtggtgattggtaaccatggatgcaattttacgtgtacatgtatatgtgtgtattacatattacacatatatgtgtatatattttacatatayatatacacacacacacacatacacacaatcatacaattataagcatcagctgaaactttgtttgggaggacttcagaaaatgaatgtttatgaccaagga

SEQ ID NO: 120509 - DNA, 201 bp, Homo sapiens
ggtaatgcccttcatttattgaggattttagttttccactctaattcttgctatcctcacgtgtgatttcagtgaccatgtggaccgtccaatcaacaacygagtgtcttcaacctccatgtcccaatcccttccctttcttcccagtctgttatgtacttcatcattttacttccctgcccatccatcctagactctatg

SEQ ID NO: 120510 - DNA, 201 bp, Homo sapiens
ctaatctgatttgacagtggaacctttcccttctcactctgcaagaggaataacatgttagcatttttttcagagccagtgttttagagaatgcattttgrggaatgctggatcaggtaatcttatagtcttaaatccagagaattaatcaaatattagttataataaaagagttgaatgtgaaaccctagagaggtaaca

SEQ ID NO: 120511 - DNA, 201 bp, Homo sapiens
ttttagttttccactctaattcttgctatcctcacgtgtgatttcagtgaccatgtggaccgtccaatcaacaaccgagtgtcttcaacctccatgtcccratcccttccctttcttcccagtctgttatgtacttcatcattttacttccctgcccatccatcctagactctatggtgaccatttttcacctttgccagt

SEQ ID NO: 120512 - DNA, 201 bp, Homo sapiens
gttatgatatattagaaagtgatacatatgtgacaaaatagagcattgggggttggcaaagatttccctaaaggattttaaaaagaaggggtggtaatagrgtatgctttggttcgatgaaggttccttcatgccttttcgatgtaatctattaaacaaatttaatatattagggaatgtacagtatttgctaaattgctt

SEQ ID NO: 120513 - DNA, 201 bp, Homo sapiens
ggagtttgacttaaggagatttatggacttcaagagtagagatcggcatagccacttctaagtgtactcagccttcttgctcccggagactaagaagcggytaaacatctgagctgcatcactgttcgtgacaggaattttggatacaggaggctttttcttattctttatcctcttattctctcagcaagatctggtagt

SEQ ID NO: 120514 - DNA, 201 bp, Homo sapiens
ccggccaggcccctggaccccaagcagccccggaagctggtggagcaggacatggagatccgggaaccagagcccccagtgcctgcatagacgttggttgkgctgctgaccagccaggtgccatagctgggcacctggatggagcccagggatgggtaggtagttggtggacaaggtggagcgagtggtgaagctcatgct

SEQ ID NO: 120515 - DNA, 201 bp, Homo sapiens
tgtaccagtcagagaagcagtggttcaagcctgttggcttaattgctttgagtatgttgctaatgatgctggggccacatgttagatagccaatgtgagcrtttttatgcagtggaaaaggtctttctccagacaaatattgtacctctaatccttttatgagtaaatctgagataaagggatttgtgaatttgtcagtga

SEQ ID NO: 120516 - DNA, 201 bp, Homo sapiens
ctttaagtataatttaaaaataaatgaataaagttgatggagagtgtaattttacctaaaaattacatgtctcttttttccctgccagtcaccaaatattwattaagaacccacttcattatgatctgatgtaattccctaaacatcaagtcagaaactggttttagggtacagggtctggaatatagcttttaaaaatga

SEQ ID NO: 120517 - DNA, 201 bp, Homo sapiens
tctcaaaataacatttacactaattactacttccaaattatgataattagtagatccaccattaaagcttgttatgtaatgtgttaataaagaagcacatwtttactatataacgcatttgttttttttcagtattttgatagcagtatttaaagatcatttttccattgtaatcccatatatttgttctcatgcatttag

SEQ ID NO: 120518 - DNA, 201 bp, Homo sapiens
agtagtctctgttcactgtcttcttcactatgctttccaatctaatactcattgttgaaatctgcagtgtctctcaggtcttacttaacttgtcctttctstagattatgtgactgctgtctgtcctccatccttaagcaattttctcctttttcagactctgtcctgattcccttgtcctcttcctatttctggaaatgc

SEQ ID NO: 120519 - DNA, 201 bp, Homo sapiens
tgcttcttgagactattgttggtttgaagtaatgaaatcatgtcatcagcatatgggggacacatccttatatttgcaatggcaggagggaagaaatacaraaattctcaaacaatacaaagcaaatataaacttgaaaagtggtctaagaaattcctttccacttaagtaggcaatgaagagaccattctgacctaccaa

SEQ ID NO: 120520 - DNA, 201 bp, Homo sapiens
gttacttctgccatcttgtttcctctttattatgcctccttgtggtctttttctttcctttagttggattaaagttttgcccttttaagaaaacttctagktatatgttaaatatactatttctgtttattctgtctaccatctaattctaacaaacatatttgaccttgtattttttctgtaaatattgggaattaatta

SEQ ID NO: 120521 - DNA, 201 bp, Homo sapiens
ttttctgagcaatctgttctgtttctaaagatagttgaaaactgtattttcaagaatggttttcagaatttaaattttagtaggtggactaagttttgacrtatcataaaaaggtgttgtagatcagtgaatgatcatagaagatttatgaaaacagggaaattcaggtttagcacttaaaatatatataatagaataaag

SEQ ID NO: 120522 - DNA, 201 bp, Homo sapiens
aactgaccttggcctccatgtttaaataggaactgttgatcaaagatccccaaagacagatgaaggaaactaagagcttgaaatttaaaaatcaagataargagaacaatttcccagaaggagcagagatattttagggaatcatagaaaaactaaaataaaacaactctctagttaatattctcagaaatatttgaaaag

SEQ ID NO: 120523 - DNA, 201 bp, Homo sapiens
agatccccaaagacagatgaaggaaactaagagcttgaaatttaaaaatcaagataaggagaacaatttcccagaaggagcagagatattttagggaatcrtagaaaaactaaaataaaacaactctctagttaatattctcagaaatatttgaaaagatactttgtttataaaataagatgatactgttaccaagaaagc

SEQ ID NO: 120524 - DNA, 201 bp, Homo sapiens
caagataaggagaacaatttcccagaaggagcagagatattttagggaatcatagaaaaactaaaataaaacaactctctagttaatattctcagaaatayttgaaaagatactttgtttataaaataagatgatactgttaccaagaaagccagaggtaagaataatgtgaaaaaataagttgccaaaaaaatacctaca

SEQ ID NO: 120525 - DNA, 201 bp, Homo sapiens
tcaagaggcagacattacccaattaggttttaaagaaattaaaaataacctgagtattaaaagattggaaaggggaatggaggggagattatgtaggtatragtactaaatcttaatctttcataagaagaaatgaatttataatgtctaaaacagcactgtgcaaggatggaaatgttctatgtctgtggaaatcttggt

SEQ ID NO: 120526 - DNA, 201 bp, Homo sapiens
tcctaagctgacctgttctagtttttaaaaatggatgtgaaattttgcttagaatcctagaagttaaaaatgtgacatcctacagaatgccacttcatacrggcaagtctggtgcccttaaagttagttttaccctgagaggaaaacttagaaatgaatacaagttcaagtttgctcaatttcttgttttgcttaaaattt

SEQ ID NO: 120527 - DNA, 201 bp, Homo sapiens
caatttcttgttttgcttaaaatttgcctacataacacataaattcatcaaactcctttcctagtgacaatacttcattagattactttagtgagtattcrggagattttcatcttatgagtcataaaattcttttattccccaaagaatttccggtgtctgattggaatttcacgtctttgtagttttagctggactctt

SEQ ID NO: 120528 - DNA, 201 bp, Homo sapiens
tcctttcctagtgacaatacttcattagattactttagtgagtattcaggagattttcatcttatgagtcataaaattcttttattccccaaagaatttcyggtgtctgattggaatttcacgtctttgtagttttagctggactctttgaagcagttacttcctaaatgactgtattcctgaggcctgcatgtaatacct

SEQ ID NO: 120529 - DNA, 201 bp, Homo sapiens
accctgtctctactaaaaatacaaaaatttgctgggtgtggcagtgcatgcctgtaatcccagctactcaggaggctgaggcaggagaatcacttgaaccygggaagcagaggctgcagtgagccaagatcatgccattacactccagcctgggtgacaagagtgaaactccatctcaaaaaaaaaagaaagaaagaaaga

SEQ ID NO: 120530 - DNA, 201 bp, Homo sapiens
ttcttgtcttctgctagcttttgaatttgtttgctcttgcttctctggttcttttaattgtgatgttagggtgtcggttttagatctttcctgctttctcytgtgggcatttagtgctataaatttccgtctaaacactgctttagctgtgtcccagagattctggtacactgtgtctttgttctcattggtttcaaagaa

SEQ ID NO: 120531 - DNA, 201 bp, Homo sapiens
gtttagcctcactattactcatagaaatgcaaattgcatcaactataagaatatttactcaaaaattagggatttaagagtatggggagatgtttactctygaatattactagtgggaatataaattgatgcaatctttctgaaaagcaatttggtaattgtttaaaccagtaattccactttgggagacttcatgaagaa

SEQ ID NO: 120532 - DNA, 201 bp, Homo sapiens
ttcttttaattgtgatgttagggtgtcggttttagatctttcctgctttctcctgtgggcatttagtgctataaatttccgtctaaacactgctttagctrtgtcccagagattctggtacactgtgtctttgttctcattggtttcaaagaacttctttatttctgcctgaatgtcattatttacccagtagccattcag

SEQ ID NO: 120533 - DNA, 201 bp, Homo sapiens
tgtcttttccatattgtgctatctgtattgatatttgcatatttagagggcctagggtaatgcatgcatataaaatgattacaatacatatatattaacaktttagaaatatacactgaaaaatgtaactattacctcccctcccaaccacaccccccccccccatgaaataattgttcttttacaaacagtttttatatt

SEQ ID NO: 120534 - DNA, 201 bp, Homo sapiens
cttggtgaatctggcgattatgtgtcttggggttgctcttctcaaggagtatctttgtggtgttctctgtatttcctgaatttgaatgttggcctggcttsctaggttggggaagttctcctggatattttcctgaagagtgttttccaacttagttccattctccccatcactttcgggtacaccagtcaaacgtaggtt

SEQ ID NO: 120535 - DNA, 201 bp, Homo sapiens
ccccaggtgctctgtcccagggagatggcagttttatctgtaagcccatgactggggctgctgcctttctttcagagattccctgcccagagaggaggaakctagacaggcagtcttggctacagtggctttgccaagttgcggtgggctctgccaagtttgaaatttctggcggctttgtttacactgtgaggggaaaac

SEQ ID NO: 120536 - DNA, 201 bp, Homo sapiens
tctgtcccagggagatggcagttttatctgtaagcccatgactggggctgctgcctttctttcagagattccctgcccagagaggaggaatctagacaggyagtcttggctacagtggctttgccaagttgcggtgggctctgccaagtttgaaatttctggcggctttgtttacactgtgaggggaaaactgcctactca

SEQ ID NO: 120537 - DNA, 201 bp, Homo sapiens
accaaggaagcttcttgcttatccttccctttcctcctttgatgacttttcttgaggctaatttaggtacagaaagccaccgcttccaaaagtgctttggwaccctggcataatttcaaagaaatctcctttcccacttagttaactacatttctccaggaaaaaaaagtcttgtctgtcaatgtaacatccttttaacag

SEQ ID NO: 120538 - DNA, 201 bp, Homo sapiens
gtttagtttggggaagtcagagttcaggcatgttaatacaagcagatttctgtcagatatactccagagtgatttagtaaaatatattactgtttattatrtgtttgttcttcaaggaggtcagaagagtccggaacagactttttttggggcgggaagcaggggaagtggtcaggaaatgaacaagacattaattttata

SEQ ID NO: 120539 - DNA, 201 bp, Homo sapiens
aggaagacttaccctggttgtgattctatctcctcgttctaaacagagtcctggaatttgaaaaacacctatccattaggtactgcaggaatctttgtgaycccatgtaacaatgtatagatgtgttgcttaatgatgggagtacgtctgaagaagtctctcattaggtgattttgtcattgtgtgaacattggagagcat

SEQ ID NO: 120540 - DNA, 201 bp, Homo sapiens
aagttccttctagaatacttggggaattcttccttcttcagatcaaaatcctccagctggagcaaatgggagactaataaatcacttaactttttgtaatatttttttaaggaaaccatcagatctctgaatttacccacgttggagtctatttatgagtgctgctattactgcttgagtctatggtatagtcccttaagt

SEQ ID NO: 120541 - DNA, 201 bp, Homo sapiens
tccttcttcagatcaaaatcctccagctggagcaaatgggagactaataaatcacttaactttttgtaatatttttttaaggaaaccatcagatctctgartttacccacgttggagtctatttatgagtgctgctattactgcttgagtctatggtatagtcccttaagtttgtttaagatcattattaatttgttctaa

SEQ ID NO: 120542 - DNA, 201 bp, Homo sapiens; identical to SEQ ID NO: 20503

SEQ ID NO: 120543 - DNA, 201 bp, Homo sapiens; identical to SEQ ID NO: 20505

SEQ ID NO: 120544 - DNA, 201 bp, Homo sapiens; identical to SEQ ID NO: 20497

SEQ ID NO: 120545 - DNA, 201 bp, Homo sapiens
ctctctgctttgattcttgtgcctgctgtgtcccaggttggccttcattccacgatgtgatcaattctgaggcaatcacattcacagatgacttttcctaygggatgcacagggtggaaacaagctgctctcaggtgagttcatcctttctgaaaacccaatacattgctttcaggactcctggttgtgctaaatatagca

SEQ ID NO: 120546 - DNA, 201 bp, Homo sapiens
gtatttctttaaaatgcattctaacccaaggctgtgtatctctcctctctgctttgattcttgtgcctgctgtgtcccaggttggccttcattccacgatrtgatcaattctgaggcaatcacattcacagatgacttttcctatgggatgcacagggtggaaacaagctgctctcaggtgagttcatcctttctgaaaac

SEQ ID NO: 120547 - DNA, 201 bp, Homo sapiens
gagttcaggcatgttaatacaagcagatttctgtcagatatactccagagtgatttagtaaaatatattactgtttattatatgtttgttcttcaaggagktcagaagagtccggaacagactttttttggggcgggaagcaggggaagtggtcaggaaatgaacaagacattaattttatattaatttttggacatttaa

SEQ ID NO: 120548 - DNA, 201 bp, Homo sapiens
ttcagtgtggtgctcaccttgggcacatttttgatgatgggcctcgtccaactgggaaaagatactgcataaattcggctgccttgtcttttacacctgcrgatagcagtggcaccgccgagggaggcagtggggtcgccagcccggcccaggcagacaaagcggagctctagagtaatggagagtgatggaaacaaagtg

SEQ ID NO: 120549 - DNA, 201 bp, Homo sapiens
gggattacaggtgggcaccaccatacctggctaatttttgtatttttagtagagatggggtttcaccatcttggccaggctggtcttgaacccctgacctyatgtgatctattcacctcgccctcccacagtgctaagattacaggtgtgagccaccatgcccagccaaggagcctcattcttatttcaaggttttcaacg

SEQ ID NO: 120550 - DNA, 201 bp, Homo sapiens
aagacattcttatctcttattcatttattatcttgggaaaatatttaatagtttcgttttttctgattctagaaccaaaattaaagttatgggatccttargttttgttttgttttgatttttcacaccgaaatataaaatttatgacttaaaagtactctaaggtttaggtaacagatctaatttacttcttaataggaa

SEQ ID NO: 120551 - DNA, 201 bp, Homo sapiens
gaatccagggctgtgttcatgagaccgcacttcctatgactatagtcatgttttcactcaatttcaagccctttttattttaactttatttttaatttcayagttatttctttacatggttaagccagttcaagattttcctattcaataacttgacagatttcctttaaacaagagccatcttattagacactgaagcta

SEQ ID NO: 120552 - DNA, 201 bp, Homo sapiens
ttaaactgtatcttccatgctttttccatttaatacatcctacttagaaaagttagatagtgaaaaatgattatattctaggaaaagtcatggtagtacascccaggtaggaatgagaagtttcaatatagtgtccctggaatattcaggcataggctttagataaggagttcttaaactggggtccttgaattaaactta

SEQ ID NO: 120553 - DNA, 201 bp, Homo sapiens
taaacaaaagtatataaggaatagccagttaagaacatatggatttataatccacaaatttttctgcttatattatgttcaaacaatatttgtagagcacmaaacctttttccattttcaataagattctgactcccttatgcttggccatctcattgaaattgtctttcatgtgtagactttctataaactgaaacaagt

SEQ ID NO: 120554 - DNA, 201 bp, Homo sapiens
gcggattagaaatcatccacgatggtttccttcatttctctacaggctggtcatccatttaaactgcttaatgtgaattcctctcaaagcctgctttgtayatgcttttccctgacgttttgttcttctctttcagtgtggtgctcaccttgggcacatttttgatgatgggcctcgtccaactgggaaaagatactgcat

SEQ ID NO: 120555 - DNA, 201 bp, Homo sapiens
tccttgaaaaggttaaaatggtgttgtttaggttaagactaagttttatttgttcttttctccatttaatgaatactgcatatctgatataaagtcacaargcttttgttaagggcctgtttttagtttactacaaaatgtgtggaagtaacagcgatttaggtacattttttgggaagacatcacagtaagcaaaaccat

SEQ ID NO: 120556 - DNA, 201 bp, Homo sapiens
attctccccaacagtgtacaaaggttcccttttctccacgtcttcactggatcttgggacggagttttgctcttgtcacccaggctggagtgcaatggcaygatcctggctcactgcagcctctgcctcccaggttcaagtgattctcctccctcagcctcccaaataggtgggattacaggagcaagtcaccacacccag

SEQ ID NO: 120557 - DNA, 201 bp, Homo sapiens
tgttcagattaatgccctcagttctccagtttcaccattcttacccaacatctgacctaactttatcttacctaatttctttgattatattaaaatgccgwggagaggattttttttaaagaaatagaaaaaaggacatacaaatttcaacccgtaattcacaaaataatttgcaattagttgattaaatggtatccactt

SEQ ID NO: 120558 - DNA, 201 bp, Homo sapiens
tctttgcaggccagggaagggctgaagtatttgtggaaggtcagcagaggtgctgtctgacaacctgcaggcccactccaaggtgtatcttgctctttggstctggcttgctcttttgctgcctccattttctcttgtggagaatcaaccgctctatcttggtggcccggattctgcaagctgatatccttcttcaacacc

SEQ ID NO: 120559 - DNA, 201 bp, Homo sapiens
ctgccaagactgagtggttggatggcaagcatgtggtctttggcaaggtgaaagaaagcatgagcattgtagaggccatggagcactttgggtccaggaayggcaagaccaacaagaagatcaccattgctgactatgaacaactctaataagtttgacttgggttttatcttaaccaccagaccattccctctgtaactc

SEQ ID NO: 120560 - DNA, 201 bp, Homo sapiens
agacacacacaggctcaaaataaaagcatggaggaatatttaccaaggaaatggaaagcaaaaaaaaaaacaggggttgcaatcctagtctctgataagayagactttaaaccaacaaagatcaaaagagacaacgaaggccattacataatggtaaagggatcaatgtaataagaagcactaaatattctaaatatatat

SEQ ID NO: 120561 - DNA, 201 bp, Homo sapiens
gggaataaaattgatcttacctgacaatgaattgaagtataaaagtaaagaagcagtcgaggatgacacctggtctttaaccaaggcaagatatgtgtgaygccatttttcaagggaggaaacaattgaggaggacttcgtttggggagaagagaatatcattactttggttttggatgtcttgagtttgaatgtgccatt

SEQ ID NO: 120562 - DNA, 201 bp, Homo sapiens
taatgtatgattttcgagcttctgtatgctaagaaaataggtgtgaaaaactggtgttctgaaatagcctaacatttattgtaattctgaattttctgccsttttattcattgcatattaaagtattagagtataaaaactaatttgctaaactttggttgtatataacacagatcttccatcatggagagatatacatgt

SEQ ID NO: 120563 - DNA, 201 bp, Homo sapiens; identical to SEQ ID NO: 20508

SEQ ID NO: 120564 - DNA, 201 bp, Homo sapiens; identical to SEQ ID NO: 20509

SEQ ID NO: 120565 - DNA, 201 bp, Homo sapiens; identical to SEQ ID NO: 20510

SEQ ID NO: 120566 - DNA, 201 bp, Homo sapiens; identical to SEQ ID NO: 20511

SEQ ID NO: 120567 - DNA, 201 bp, Homo sapiens
taatatcatcaagaagctgtgaatttgctattcatctgtttcagtatggggtttaatagctgggccaatacaccacggatctaaaagacactatacatatmaagataataacatatacctaggctttctatgtttgatgttccaatttgtttagacataaaagtcaccacttgtgtctttattttatataaatttttttta

SEQ ID NO: 120568 - DNA, 201 bp, Homo sapiens; identical to SEQ ID NO: 20512

SEQ ID NO: 120569 - DNA, 201 bp, Homo sapiens
tcttaaagaattacacccactcataataatatcatcaagaagctgtgaatttgctattcatctgtttcagtatggggtttaatagctgggccaatacaccwcggatctaaaagacactatacatatcaagataataacatatacctaggctttctatgtttgatgttccaatttgtttagacataaaagtcaccacttgtg

SEQ ID NO: 120570 - DNA, 201 bp, Homo sapiens
atagaacagagaaatgtctccatgagggtttggtctcattttaaacattttttttttggagacagtgtctcactctgtcacccaggctggagtgcagtagygcgttctcagctcattgcaacctctgcctttttaaacatgctattaaatgtggcaatgaaggatttttttttaatgttatcttgctattaagtggtaatg

SEQ ID NO: 120571 - DNA, 201 bp, Homo sapiens
catggtttatgccacttctccacattgtccacaagatggcaccatttccatttctttggggggcgtgcttctgaatgcaacagagaggagtgcaactagcwactgttaaaatcattaacagccgctagcaatacactgcctacctgacacatcccagctttatcctttgctgtggaggcagaaactagaaagtacgattca

SEQ ID NO: 120572 - DNA, 201 bp, Homo sapiens; identical to SEQ ID NO: 20515

SEQ ID NO: 120573 - DNA, 201 bp, Homo sapiens
gctatcaatagtaccgccttcttaagattgtttggaattaagtctgttaatagtaaaaataaagtacttatacactgcttgctctgtgccagacactgttytaaaccatattagtcaaaaaaaaaaaaaaaaaaaaaaaggccgggcgcggtggctcacgcctgtaatcccagcactttaggaggccgaggcaggcagatc

SEQ ID NO: 120574 - DNA, 201 bp, Homo sapiens
gagttcgagaccatcctggccaacatggtgaaacccccatctctactaaaaatacaaaaattagccgggcacggtggcacatgcctgtaatcccagctacytgggaggctgagtcagaagaatcacttgaaaacaggaggctgaggttgcaatgagccaagattgcaccactgcactccaacctgggcaacagagcgagac

SEQ ID NO: 120575 - DNA, 201 bp, Homo sapiens
gaggccagaggagcccattgaagtcatcaggcctgacatagcagctctggttagacaagtgatcataaaaaagaaagaggatctatgagaatgccattgcrtttctaatagaacagagaaatgtctccatgagggtttggtctcattttaaacattttttttttggagacagtgtctcactctgtcacccaggctggagtg

SEQ ID NO: 120576 - DNA, 201 bp, Homo sapiens
ttataccaggacaatactttcctatttcatttgaaacgttgtatcgggaaagcttcataaaactatcatcaaagagccagaatctcatcctttgtaacttstaggagttatgctcccctgaaatcaatgttttagcttcttagatggtaaaagaattctattccaatatattttattccttattaccatcttcctgaagaa

SEQ ID NO: 120577 - DNA, 201 bp, Homo sapiens
aaatttctggaataactgtaaatggttatgttaatggaataaaacacaaatgttgaaaaatgtaaaatatatatacatagattcaaatccttatatatgtrtgcttgttttgtgtacaggattttgttttttctttttaagtacaggttcctagtgttttactataactgtcactatgtatgtaactgacatatataaata

SEQ ID NO: 120578 - DNA, 201 bp, Homo sapiens
atttgctgatgtgctgctacctgtaactcaaatgcctcataggaataccagcggacaaacacatagaggaaaagttgaatctttcctatattggacaatcytccttcagtcttgtttctgcatcaaaaagtctgggacacagagtgctacaggatgcctgggctaaggactgtaacagaaaaatatcaacatcagagcctg

SEQ ID NO: 120579 - DNA, 201 bp, Homo sapiens
tggtgccagagcactcttgccttgtatcctcacctacgccttccatgaactcatagcagtgctgtggcactgcaggggtgttttatgcattcacgttaggrgcatgagcagaactgcatatgccagcaccacatgggcagcagagactccccactgccagatggatgataatggagctgcactgggaacaaccaggactgt

SEQ ID NO: 120580 - DNA, 201 bp, Homo sapiens
ttaactacttgcagaattttttaaaatcttttgcttcactttccggttggatttttttctttttccgggaggtttcactagttgtaaacgtggccagtgaytgccaactcacagacagaaattacttagggctgaaggaactgcacaaagagtttggaccatcccacttcagcgtgttggcttttccctgcaatcagtttg

SEQ ID NO: 120581 - DNA, 201 bp, Homo sapiens
ggcttccatttatctcatctgcaaaacggggatgataataatacccacctcatagggtccctgtaagattaaaagagaggatcaatttgaagcacggagcrtacattaatctggcacatagtaagcacttcataaattttagttataattattatatttttcctcatgttagtcaataaaatgaacataaatcttgagtgg

SEQ ID NO: 120582 - DNA, 201 bp, Homo sapiens
aaatatgttctggatattttagattcttcaaagaaggaaccaaggtggaatttttggaagtatcttgtcaaccctgagggtcaagttgtgaagttctggargccagaggagcccattgaagtcatcaggcctgacatagcagctctggttagacaagtgatcataaaaaagaaagaggatctatgagaatgccattgcgtt

SEQ ID NO: 120583 - DNA, 201 bp, Homo sapiens
cactccatctccggctgacttcgccctgcctggcgtttggcctctctgctcgactgcctctggttttcttcccaggtctaagtcagtcttgacgcctaatygtcaaacccctggagtcccgtcccccaggaccattctatttcaccacctccctccaggtcccccactcctcccaccgccgctgcaaggtgttccccaggg

SEQ ID NO: 120584 - DNA, 201 bp, Homo sapiens
aggtaacagtgagttaaggtgtcattccacttagataggaaggatcatagagcccaaaggttaagagcatgagctctggagtaaaaggcccgtatatcaaycctggctcaaccactcattagccacgtgaccttgtgtctaggcttccatttatctcatctgcaaaacggggatgataataatacccacctcatagggtcc

SEQ ID NO: 120585 - DNA, 201 bp, Homo sapiens
cggggccttcggccccgcattagagagttagggagaatgcagaaaagggtgttactcacccacagcatctcctcttccgtgcggaccctccgaggcgcggkgcgctccagtttccactccatctccggctgacttcgccctgcctggcgtttggcctctctgctcgactgcctctggttttcttcccaggtctaagtcagt

SEQ ID NO: 120586 - DNA, 201 bp, Homo sapiens
atttcagggccttaacccaggcatctaggttacagttttcaatagaactgtgtatgtccaaaaatatgaaaaaaacatcaatcagaggttatagtcccccscaaattgtttaggattttaactacttgcagaattttttaaaatcttttgcttcactttccggttggatttttttctttttccgggaggtttcactagttg

SEQ ID NO: 120587 - DNA, 201 bp, Homo sapiens
ctcttggtcctaaacagatattatgaacggggccttcggccccgcattagagagttagggagaatgcagaaaagggtgttactcacccacagcatctcctyttccgtgcggaccctccgaggcgcggtgcgctccagtttccactccatctccggctgacttcgccctgcctggcgtttggcctctctgctcgactgcctc

SEQ ID NO: 120588 - DNA, 201 bp, Homo sapiens
gtcaaggagcactgcctatcctaactctaagtctggagttagagcccgttgagtctgtggtagttccttttgcttttgatatttagttagcaggaaaactragaggatattgaatttcattaacacttccttagaagcacatttccttagaagcatgaatattgcttggattctgaacactctgaatcttcaccaagagaa

SEQ ID NO: 120589 - DNA, 201 bp, Homo sapiens
atcaaagaaataatataagaaaaattcccagcggaagccacagacgccaggagccctgtactctcagccatggtgaatcccaccgtgttcttccacattcyagtggacagcgagcccttgggccgcgtctccttcaagctgtttgcagacaagtttccaaagacagcagaaaactttcgtgctctgagcactggagagaaa

SEQ ID NO: 120590 - DNA, 201 bp, Homo sapiens
gaatctttgtgctcttgctgcagttccctttgggttccatgttttccttgttcccttccatgactagctggattgcagagttgaattaagtttatgattakgaaataaaaactaaataacaaaaagaaagaaaaattcccagagctgaacaatgacacgttttcagattaacagttcccacaaaatgctaagcaggttgga

SEQ ID NO: 120591 - DNA, 201 bp, Homo sapiens
agggcagcctccagtgataaggcttggctgaaacgggataattgagaaatctctcttccctctccacaatgcgggtgtcggagagccagtgccagggtgargttaaacttctgctgctcatggaatggtgcgggccctcaggagctccttatttttgtgtaaactacagttgcctccaaggtccggcatttgggctcagat

SEQ ID NO: 120592 - DNA, 201 bp, Homo sapiens
aaccaccattccccactccctacacaactgagatgcacctactgtaaataatattaataatgataacgactatcctttcttgaacactgtatgccaggcaytgtgctaagcatcctgcatgcatgatctcattttactctcctgataacccagtgatagaggctaattactcccattataaagatagggaaactgaggcac

SEQ ID NO: 120593 - DNA, 201 bp, Homo sapiens
cgtgccagacaccaaggctacagagagaagccacactcaggagccccgaagcaaggtcctctctcctcccagcctgcagctgcattctgggccaaagaccrggcctcccaccccactgggacagcgggaggcattttgaatgagcaccctcactacctttcccttgactccgcagcaccctggctctctagccacatctca

SEQ ID NO: 120594 - DNA, 201 bp, Homo sapiens
gacggggatggttccctccacagtgtaatgaaggaagaatggcctcaccaagggtgaggtcagcttcagtgatcaaaggaggcagacggaggtttcagaayggaattgactctagcgtctcccgaaaatcacctcttctgaagcttccattaaccgcaggcagagttcaagatggcctaaaccacctttagatgtatggtg

SEQ ID NO: 120595 - DNA, 201 bp, Homo sapiens
ttctactgctgtgtggtcagtttcgattagctgtgctagtctaatagctcaccccaacatcttggtggccggccacagcaatgattctttctcactcacamtgcagtccatggtgggccagctctgctgcgctcccggccactttactctaggacccagggtgatagagcagccctgatttgagatcttgccagccttgca

SEQ ID NO: 120596 - DNA, 201 bp, Homo sapiens
aggacatgaccctggtggacgccatccagcaagtggccaagaaccgctgcgtcctcccgaaccggggctttttgaagcagctccgggagctggacaagcarctggtgcagcagaggcgacggtcccagcgccaggacggtgaggaggaggatggcagggagctgtaggcccgactcacagggccagcagaggcacttgggg

SEQ ID NO: 120597 - DNA, 201 bp, Homo sapiens
gatctgaaaaaactgaatttgtcactcttcatcagaaaaagaagtactcacaaaatactgtcacaggaaccccacttgggttgctttaactgcccccgatkcggcatcctccgaggtgaattagtgtggttttaatttaatgaagtcttctaagaaactccagggcaaatgccacgaggcgctaaagatcagactttagta

SEQ ID NO: 120598 - DNA, 201 bp, Homo sapiens
gcgtaagaataaaaggccttttggtcggagtctttgctaaagaacatttgccatccttcaaaaggcggaggcggtctgggagctctcaaagctgggactgyggccggagacactaattgtgcctgggcctgaacccaactagtagccaagggctttgatgccagaaaaccctcagggagctgacttgagtgggaatccatg

SEQ ID NO: 120599 - DNA, 201 bp, Homo sapiens
ctccccaggccacgccctgcgccacctcctagccatgggctttggaatttgtagtcgttctgtgagaactcaattagttagggctgggcttaccttcacaytacagaaaacctaaacaaagtcttaggcaagatagaggtttatttctctctcacatataagtgcagagggaggtgggctggggctggcacggccactgca

SEQ ID NO: 120600 - DNA, 201 bp, Homo sapiens
accacagtaagagacccgcggccccgccccgatcggccccgccccgccccgccccgactcgccccgcccgtagcttaggccccgccccttccccgccccamtaaggctccgcccctagcctaggctccgcccttagcccaaggtttccccgtctgaggcccaggccggaagcgggatgtgcgcgtgcgaaatctttgtcgc

SEQ ID NO: 120601 - DNA, 201 bp, Homo sapiens
gtggctcgcttgaagtcacaagttcgagaccagcctggccaacatggcaaaaccccgcctctactaaaaatacaaaaattagccggggatggccgggcgcrttggctcacgcctgtaatcccagcactttgggaggccgaggcaggcggattacgaggtcaggagattgagaccatcctggctaacacggtgaaatgctgt

SEQ ID NO: 120602 - DNA, 201 bp, Homo sapiens
agctctgctgcgctcccggccactttactctaggacccagggtgatagagcagccctgatttgagatcttgccagccttgcagcagagagaaaagagagayctagcaaaccataagctgatttagaagtgacacatgccatttttgcccacatttcactggcaaaagcaagtccacgccaaagcctcatgtcagtggggca

SEQ ID NO: 120603 - DNA, 201 bp, Homo sapiens
cagcagcccctccccaggccacgccctgcgccacctcctagccatgggctttggaatttgtagtcgttctgtgagaactcaattagttagggctgggcttrccttcacattacagaaaacctaaacaaagtcttaggcaagatagaggtttatttctctctcacatataagtgcagagggaggtgggctggggctggcacg

SEQ ID NO: 120604 - DNA, 201 bp, Homo sapiens
gggcaggttattttaccttttcctcaacttgaagaatagttggccaggcgtggtggctcacgcctgtaatctcaacactttgggaggccgaggcaggtggmtcgcttgaagtcacaagttcgagaccagcctggccaacatggcaaaaccccgcctctactaaaaatacaaaaattagccggggatggccgggcgcgttgg

SEQ ID NO: 120605 - DNA, 201 bp, Homo sapiens
gttttttgttttttctttttgtattattagtagagacagggtttcgccacgttgaccaggctggtctcgaactcctgacctcatgtgatttgcctgcctcrgcttccgaaagtgctgggattataggcgtgagccattgtgctcggcccctgttcatttctttaccatcagcacccagcacagtgcctggcacataataga

SEQ ID NO: 120606 - DNA, 201 bp, Homo sapiens
ccaagctggctttccagggaacctctgtcttgtcctttctgcttttctgcttctgaccagacccacagcctcagaagccagaggcatcgccacagctggcytggcgttgagagcctgggaagtgaagtgaaggcaagtcagtcagctgagacagctccttctccccgaaaaggaggaactaattccgccttaaggcaccga

SEQ ID NO: 120607 - DNA, 201 bp, Homo sapiens
agaccctgtctcaaaaaaaaaaagtaacatatgctcattgtgtaaatagagaagtctcggtttccctattggtaagaggctaataagataaccttcctcayagggctgtatggattaagttgggtaatgtgtgtaaaatagtgcactgcctagtacataggaagtgctcagtaaagtttagctatgataataaaaaaatga

SEQ ID NO: 120608 - DNA, 201 bp, Homo sapiens
gggagggaggaagattgctggagaccaggagagtgatgctgcagtgagccaagattgtgccactgcactttagcctgagggatagagcaacagtttgtctscaaaacaaacaaaaccccatactatatatacatactgttgtatacttttattaatccatagttagctgtgccacaatttacccacaatttctcagttgtg

SEQ ID NO: 120609 - DNA, 201 bp, Homo sapiens
tacagcatattaacttttctactttttaagttttacccacttatgtttccttagtgtgcctggcataatgtcttctattttaaaaagtgttaaatgggccrggtgtggtggctcacgcctgtaatcccagcactttgggaggctgaagcaggtggatcacgaggtcaggagatcgagaccatcctggctaacaaggtgaaa

SEQ ID NO: 120610 - DNA, 201 bp, Homo sapiens
ttttccccaaaggcaaatgaagtcctggaatgttcttatttagtttacagcaagaagagtgcaaaaaatctgcagtaaatattttactcaatattatgagyattacaatttatgactatggtaaatcattgttatagcatatgtagtttacaaattgaatagtaaaagtcaaaagcaggcattaactttatgtcatcggga

SEQ ID NO: 120611 - DNA, 201 bp, Homo sapiens
gtaatgggagacaatgacagatcatcaggcattaaattctcataagaagcacacaacatagatcccttgcatgggcaattcacaatagagtttgcgctccwatgaaaatctaatgtcgacactgatctgacaggaggcagagctcaggcagtaattcaggcgatagggagtggctgtaaatacagaagctttatgatgctc

SEQ ID NO: 120612 - DNA, 201 bp, Homo sapiens
ttatttggctatatgttttatttttaaaatttgataggaaagaaaatgattacatacataccctaatacttttttttaagccttggggaaaaatgcaactrggagtcagtcaagagaatttaaaactttctcttactctacacatcagagagtacatcagtctgctatccctttgctacaactgtgagaagtaaagtctga

SEQ ID NO: 120613 - DNA, 201 bp, Homo sapiens
aaaatatctatttgagataaaaatttatttttgatatccatttccaggtaattgccttgattctgcattatctatggaacataatctgaggctttttttttacagttggtagatacttatgtacaagattttgctgtgaaaatcagggcaagaaggtagtgatgcaaggtagcagataacattgaaatacatttttgaaaa

SEQ ID NO: 120614 - DNA, 201 bp, Homo sapiens
gaattccagaaactttcagaagagtcagttggacatatcagtccaaagactattagtgtggtttttgtatggtgaatagaattatgtgggtatagaattgraaagtgataagaatttccccaaaaaatatatatagtaaggtgaaggtgatttcacagacaattaagatcaaatgtataatgtatatggctttctgtagct

SEQ ID NO: 120615 - DNA, 201 bp, Homo sapiens
accgtgtactagttaccattttgagacaaatgtttcttacatatttttttcttttttcaaaaataccacagagaaaagaatattatccccattttatagtygtggaaatgttcttgatgagattaaggacacaggtaaggttacagagctaaggatgacagaataagaattcacacccagatctgtgttactctcaaatta

SEQ ID NO: 120616 - DNA, 201 bp, Homo sapiens
taccatgtgtttaaaaattttttaaagcaggggctaacgttgatactatttggttacatttaagagtcctaaccaggactttctctaagaaatgaaaattmatgagcttttgtttttttaaagccttatgatgagaaattaatgtggtgatcagatatttgaaactattgaagaaaaaatgaaagaaaatatctttagtaa

SEQ ID NO: 120617 - DNA, 201 bp, Homo sapiens
tttgttttcttttctggagtgatattgtaaatactttaaagattttgattgagtgagaggtgtgagctatattttcttctttcctgtatgatatacatacrttgtttccaatctaatttctattaaataactataggagagcccacagccttgttattttacatatcactatttagatatttgttatttatttatttgtgt

SEQ ID NO: 120618 - DNA, 201 bp, Homo sapiens
atgtttaaatttagagtgctaagtgtgattacaaagaggagatatatgggtgaaatcataatttaaaggaaatgatagaaagcatataacattaaagtatytaataaagtattcaactatatatttaatgtcaaaagaccttatgctagattatgatgcaaatattctagaatttaaataaaaatacttgtttttgaaatc

SEQ ID NO: 120619 - DNA, 201 bp, Homo sapiens
acaaagaaaagtgtaaagattatcactgtttttttttaaatcatcaatattttagaaagtctgattttcataaaggaaaaaggggaggaaattttctcccyattaatagcttagctgtattttatctttttaaacttcaaatgaattctcctattttctctgagatctcagactaaatttcacattgaattgaattaactt

SEQ ID NO: 120620 - DNA, 201 bp, Homo sapiens
acccaatctagcttatttgttaaatacattacttatatattttataagaatttataaaattcttatataccatttaatagattgaatgtgggcagtaaaastgctgcccttctatggctacaaattagtgcactaaatcaaaagttcacttttcctttgtatcctacttacatagctttcctcatccatctcctgaattaa

SEQ ID NO: 120621 - DNA, 201 bp, Homo sapiens
ggaggtccaagatgaaggtgcagacagatttgcttatctggtgagggttgcaccctctggaggggaggaacgcgtgtcctcacacagtggaaagcagaagrgcaagctatccaaatgcttagtgaagcctgtcttataaggaccttaatcccattcaccatgggaggtattctcatgacgtaatcacctcttataggcccc

SEQ ID NO: 120622 - DNA, 201 bp, Homo sapiens
aatatttgcttaaaaaggtttactttagcaatagtaatgctttcctttcaaaatattatttcaagttttaaaataatgaacttatgattttaattaattamgttttcatgtggaagttgttcatctagagtaactaattttaaagaattggatctttttatttggtaatgcctttagcactctgtgaaatataaattaatg

SEQ ID NO: 120623 - DNA, 201 bp, Homo sapiens
ttgacaggcttaggattgtatttttagcttaccgtgtactagttaccattttgagacaaatgtttcttacatatttttttcttttttcaaaaataccacaragaaaagaatattatccccattttatagttgtggaaatgttcttgatgagattaaggacacaggtaaggttacagagctaaggatgacagaataagaatt

SEQ ID NO: 120624 - DNA, 201 bp, Homo sapiens
caggtatgtctttatcagcagcgtaaaaacagaatattgcacaattttagcattaatttaggtcagctgttgtgtctaacagtaagtggtgggggatatastgaggtgtgtctgacctcccatcctgtcatggccagaaactccattgtttttaagattctgttggttgacaggcttaggattgtatttttagcttaccgt

SEQ ID NO: 120625 - DNA, 201 bp, Homo sapiens
gtcaaaattataagagtgaatgagattcactatggaatgtgcaaagtaagatgacaacctaaggacagcaccctggggactatcaacacttaaataagagrccattgaagagactgaatgggagtagatagccatttggatggaaatccaggtatgaaagtcaaacccttcatataagataggatgctcaatgatgtcaat

SEQ ID NO: 120626 - DNA, 201 bp, Homo sapiens
ctgttttatcagagactaggtttgcaacccctgccttttcttgttttccatttgcttggtagatcttcctccatccttttattttgagcctatgtgtgtcyctgcatgtgatatgggtttcctgaatacagaacactgatgagacctgatggttttacaaggggtttcccctttcgcttggctttcatcctttcttgcctg

SEQ ID NO: 120627 - DNA, 201 bp, Homo sapiens
tagccagaataaagactggaagtatttcctttgcaccctgcttgggttttgctgggcctgatgaacacagttttctaatagcatcttatgcattaaattgkatagcatagtgatttctcctcctttctctctgtctcttgaccaactttataattttattatgtctttgtagtattccttaaatggagatataatgcttct

SEQ ID NO: 120628 - DNA, 201 bp, Homo sapiens
tcctgacctcaggtgatcctcctgtctcagcctcccaaagtgctgggattacaggcgtgagccactacacctgactgaatatttcttttttttttttttttgagtgtgtcttcaaaatgcaggctgcctatgacatttattatattgggtaacttttttctttatcatgaatatttcttgacaaaataactcatgagggtt

SEQ ID NO: 120629 - DNA, 201 bp, Homo sapiens
atatatatgtaatatatataattaaatatacacatatatttaaattttcagcattgtcttactaagatgcttgctggaagctttatgctttagtatcttaytaacatactttagtgtcttactaacatccttagttggaaatagccctgtaaggtatagtaagtgtagcgaaggaaatggtcataattctggattccttca

SEQ ID NO: 120630 - DNA, 201 bp, Homo sapiens
taccctctgcagcaccaccttgcggttaggaaatctaattagaaaacacacttaacatctcataaaatgataggaaatatttcctacactgacagtggtgwtgcgttttggtcagcgaaatcactgggctctaggaaaacatccaaactacaaaaggatagccagttatcaaagtgttttaaccagtggacaggaatatgt

SEQ ID NO: 120631 - DNA, 201 bp, Homo sapiens
tctgtccacactggttcttacagagctggaagtcaaatttttcaaataacattaataataagggagccttaatacatttatacagaggtcatatcccatcmccttttatagagtcagaggcagaagagaggccattgaaacccacaaagcatcttatatttatatttttcaaggcaattaattatgctgatggcaggagac

SEQ ID NO: 120632 - DNA, 201 bp, Homo sapiens
agttagaaactgtatatatatatatataaatatatattatacaaatatatatattatataatatatataatatatttgtatatatattatacaaattttttaaatatatttgtatattttgtatacaaaatatatatttgtataatatatatttttatatatgatatatatgcaatataagtatatgtatatattatatat

SEQ ID NO: 120633 - DNA, 201 bp, Homo sapiens
ttgcacaattgttccagtagttctaaattttagcaatcattttgtctctgtacaatttacttatggcttctatgtgatttatattttggttctctttatcyatatctaaataatatagcataagtatcaaactatggttccaacgtgatcttctaaacctacttattcacacctgggtgtgtaatatgatctaatttgcaa

SEQ ID NO: 120634 - DNA, 201 bp, Homo sapiens
ccatacctttaaaagcacctcttcttaattttttttttgtttacttctgtcaatgtttattgaatgagcaaaagatcccgttctagtcatttcttcttatmagctctggatgcacttcctggtatgttagtgaatctttaaatcgagattgtagaccactgactactaaattaatcatttctgcataaatttatggctacc

SEQ ID NO: 120635 - DNA, 201 bp, Homo sapiens
tttttatgatttttaattactggtataaatgttcccccaaattattcaccaggacaaaagaaggacctaagttactctggggtgtgaggtaaagcgtagckgtggaagttatgtcgaagctgtgacatgaaaatgaataaagagggagggtgagaaataggaaagatcatgccaggtagaggagtgagagatttgtgaagt

SEQ ID NO: 120636 - DNA, 201 bp, Homo sapiens
ttttagattgaatggctacttgctttcgagttaggtaaaactgagacatactcataggaatagattctgagattctaatgaggtatgtgtatagatagtgrtgcagagtgggagcacgaaaatggcatgcctggagaagacttatggaggagacagcatttggcctggatcttaatgaggaggttggaatgggcagaagga

SEQ ID NO: 120637 - DNA, 201 bp, Homo sapiens
ccttgccctcatgaagctcacggttagaacaagagacctaaatttgacaaatgtgtggacaaataatttttatgatttttaattactggtataaatgttcmcccaaattattcaccaggacaaaagaaggacctaagttactctggggtgtgaggtaaagcgtagcggtggaagttatgtcgaagctgtgacatgaaaatg

SEQ ID NO: 120638 - DNA, 201 bp, Homo sapiens
caaaaaatgacaacataagttttcaataccattagccattcggaaaatgcaaattaaagccacaataaggtattattgtctatgtactagaacagataagrtaataatttaaaatatggcgatgatacccaatgctggcaagggatgcagaaagactggacctctcatacattgctagtaggaatgtaaaatggaatagcc

SEQ ID NO: 120639 - DNA, 201 bp, Homo sapiens
tttctcacactttgtcttggcttttgaggttagtgttcacagataagcatgtgttgcttttgtgtttagagatatggtttctttttatttttttaacaccraataatgtgacttttctcacaccctagcaaacactttattagctacctttaaattttttcctgtctgtatggatgaaaatgatgttcatcccaatggggt

SEQ ID NO: 120640 - DNA, 201 bp, Homo sapiens
ctgctcccacaacctatctttgctgtaccattttctcttcttgatagttttaattatttctagcagctctcttttctcacactttgtcttggcttttgagrttagtgttcacagataagcatgtgttgcttttgtgtttagagatatggtttctttttatttttttaacaccgaataatgtgacttttctcacaccctagc

SEQ ID NO: 120641 - DNA, 201 bp, Homo sapiens
atttaattataactacctaattgtaaaactctgtggtcgcaaataatccaggattgactcttgatgtgtaaatggaacgtagaaaacacttttccctcagyaaaacttggctttattttacacacacacacacacacacacacacacacatctctctctctctctctgctttaaaatttactttgttcattgcggtattta

SEQ ID NO: 120642 - DNA, 201 bp, Homo sapiens
aaatttttccttttatctttcttttgactgatggaaatttccttcttccgtatactctttcctttctacacctcaagggtcttaatttaattataactacytaattgtaaaactctgtggtcgcaaataatccaggattgactcttgatgtgtaaatggaacgtagaaaacacttttccctcagtaaaacttggctttatt

SEQ ID NO: 120643 - DNA, 201 bp, Homo sapiens
acatataaactcatgcatcttcactgcaactctgtaacaacacctcctatttacatagcgccaatttctaggtaagaagtttgaagcattgtgttttttastaacttgaccaagctttttaaccatcccaaaggtggtggcagaacctgctttcagacccaggcagcgtgacctcagtcagtgctgtacttgtaaccactg

SEQ ID NO: 120644 - DNA, 201 bp, Homo sapiens
gtgatattgaaacagaaaaagttcccttgtcctgctctcggggcgtgcgaccggggtgtgtctcaattctctggtgcccccctgctcaaacctctagggggagcatgcagacgggcaggctgtggggctccgaccccatggcagggtctaggggtgaatgtttacagctgaaaccccagtgggcgtgtgttacagtatgct

SEQ ID NO: 120645 - DNA, 201 bp, Homo sapiens
tgggtacaggggaagcccaatgaaagtggggtgagggaatctcaaatccgtgatattgaaacagaaaaagttcccttgtcctgctctcggggcgtgcgacsggggtgtgtctcaattctctggtgcccccctgctcaaacctctagggggagcatgcagacgggcaggctgtggggctccgaccccatggcagggtctagg

SEQ ID NO: 120646 - DNA, 201 bp, Homo sapiens
tctcattttctgaggtagtctgggtacaggggaagcccaatgaaagtggggtgagggaatctcaaatccgtgatattgaaacagaaaaagttcccttgtcytgctctcggggcgtgcgaccggggtgtgtctcaattctctggtgcccccctgctcaaacctctagggggagcatgcagacgggcaggctgtggggctccg

SEQ ID NO: 120647 - DNA, 201 bp, Homo sapiens
tgtccaaattattggaaatagtgatctgtatatgaactgtatttcaattgacattgtttaaagatgtaaacaaattctcagaatttctgttagctacctaygaattcacattccgtgcataactgtaacaatgaaccaaattttagtgttttccttttttacatgtaaaaagttgtattccattattctaagacattactg

SEQ ID NO: 120648 - DNA, 201 bp, Homo sapiens
ctgcataattggacaagatgctattccccaaagttagtagctttcatactgaatatttaaacatacctttccctaacccaaataaaatcaactttactachgaggccactttacattgataccttaccaagttagacatatattatgctaagaatataacttctgaaagatatatttgggttaggatttgcattttatgtt

SEQ ID NO: 120649 - DNA, 201 bp, Homo sapiens
cttctgcataattggacaagatgctattccccaaagttagtagctttcatactgaatatttaaacatacctttccctaacccaaataaaatcaactttactactgaggccactttacattgataccttaccaagttagacatatattatgctaagaatataacttctgaaagatatatttgggttaggatttgcattttat

SEQ ID NO: 120650 - DNA, 201 bp, Homo sapiens
aacatgagctttgaagcagattatgtttatgtaaatgttcagcacttttttacgatattaatgattaacttgataatgagatcaggctattgtacaggctyctgcataattggacaagatgctattccccaaagttagtagctttcatactgaatatttaaacatacctttccctaacccaaataaaatcaactttactac

SEQ ID NO: 120651 - DNA, 201 bp, Homo sapiens
acttgctttcgagttaggtaaaactgagacatactcataggaatagattctgagattctaatgaggtatgtgtatagatagtggtgcagagtgggagcacraaaatggcatgcctggagaagacttatggaggagacagcatttggcctggatcttaatgaggaggttggaatgggcagaaggatgttatagagcaggggt

SEQ ID NO: 120652 - DNA, 201 bp, Homo sapiens
ctgttcattgttacactgatattttgtcattaggcttctgctcagcatggggaggaaagtaataactttgaaagattctattgtgatatgaaataataacyatttttatgaatgcttatcaagtatttcgtttaagtggccatagcatcaagaacaccttattttaatgatgaattataaagcaatgtttttgttttctga

SEQ ID NO: 120653 - DNA, 201 bp, Homo sapiens
gtaataatgccatcaccatcataggtacattgaaaccttatatgcactcaagatctccacttggtttgcaaattcatggaatcttaaagaaggaagtgccytgaatttgaccattcaccttgaaactctaaaaaattcctgtcagcctcttttggcattgattcatccacttcttcctaagacgggattctatctctaaac

SEQ ID NO: 120654 - DNA, 201 bp, Homo sapiens
ctttttaaatgtggctactagaaaattcaaaactgcatgtgtggctcacgttatagttttattggacattgatggtttagagaatcacaagatatattagsatatctgaggctttaaaatacactgcaataaagaaagctgcttaacttaaaaagaacttatttgacaaagtggtttgattacagaacatctattaagctc

SEQ ID NO: 120655 - DNA, 201 bp, Homo sapiens
cagatttaagtatgttatttacattatgaaagtaacctaataagaattgagaacagatgacgaaggtatatatgtgtttaagtaacctaactcttcactakcattgcagaaaatcaatagattctaaaaatgagtgttaacagagcagtatatgcatattatttagtgttttaggggtaaacaccataagaactgaaaaca

SEQ ID NO: 120656 - DNA, 201 bp, Homo sapiens
ataacaaacatatgattgcattctcaaaactcatagcttttcaactaagtagtcataagtggttgaggataattctttaaattttgacgatgagttggttmctcgtcttttagtttcaagaatggaggaaatttttgcttccaatggaatagaagacatttttctaatgataaatattgtacaattgaatttccaaatttc

SEQ ID NO: 120657 - DNA, 201 bp, Homo sapiens
gggtaacacttaggttgggaaaaccacaggataccatactcatgaggaattttaactacccaaacatctgttaggttaaaaaaaattcaacaaaacatgcytcatcaaagaagtttctaaggaatgcaactttatgatctaaaaagaagaaaaccaaatagagggcaaagtacactttaacattatttaaaattaaaaatt

SEQ ID NO: 120658 - DNA, 201 bp, Homo sapiens
tagattgtcaatattattattaatgataccaatcatttctttgtaaataaataaattatttatttattttatttgtaaaacttttataaatgtcatttatktataccaattatttattcttttttacctatcaagaaaggcacagttaaaatatgtgatttattaattccatatactagtagataaacatgttttgatttt

SEQ ID NO: 120659 - DNA, 201 bp, Homo sapiens
agtagtctcatgaaatttgcatttgacagatattatgaagttggatagtaatgtccaatgctggattcctctaactggaaatcttttcctggggactcccmagtggcctggctgagaatctcagaactacctgaaacctgagcctcttcctactgaatcctgcctttcatcttcccttttacaggtgtcatacctgtgatc

SEQ ID NO: 120660 - DNA, 201 bp, Homo sapiens
tgtttttagtttgctactctttatttttctgggtatggaattccagttgtttttcagttgatgttgattgtcagtctaattgtcattcctatgtagaagawtttttttttctggtactgttaagatggttccttttttgatattctgtattttcacaatgatatgtctaaatatggtttaaaaatttctgcttgagattta

SEQ ID NO: 120661 - DNA, 201 bp, Homo sapiens
tttcgtttaagtggccatagcatcaagaacaccttattttaatgatgaattataaagcaatgtttttgttttctgattattacatgcacataatcttttacttagtattgaaaatgtaattttattttctgttttattgtctgtatgagtttaattcaaaggcagggacaataaactttaagtgaatataaattttgagat

SEQ ID NO: 120662 - DNA, 201 bp, Homo sapiens
gggtcacgggccctgttgataggtttcacagaaactgtcttttaaaaattctaaactaaagcaatacattattgttatcttcacagaaaactaagtctaaygaaaaatggagggtttgagaggttcattcattcaaaaaatatttataatataccaggccctactggggataaagtagtgtagaagaaaaggatttccttc

SEQ ID NO: 120663 - DNA, 201 bp, Homo sapiens
cccaaagtgctgggattacagccatgagccaccgcacctagcctagtctgttttctaatagaattgtttatatatcttaaattgtgaactaagaatttagrcacttttttcacttgaaaaaatatttttaaattccccctttttcttttctttctttctttctttcttagttccaggggcagtgtttgatttacaacttgc

SEQ ID NO: 120664 - DNA, 201 bp, Homo sapiens
tctccactcactgtaacctccgcctcttgggttcaagcaattctcctgcctcagcctcctgagtagctgggattacaggcacgcaccaccatgcctggctwatttttgtattttttagtagagatggggtttcaccatgttggtcaggctggtctcgaactccttacctcaggtgattggcctcccttggcctcccaaagt

SEQ ID NO: 120665 - DNA, 201 bp, Homo sapiens
ccttatctttttaagagaaatagagtttactaatgcttggaagtaaaacacccttgtgttcaagcaggaaagatcaatacaagattgattctgtgtgtgtrtgtgtgtatctctgtgtgtgtttgtgtgtgttttaatcatagatgtgcagttttccaataagcctaagattagtttttattttctcatacttagggtgta

SEQ ID NO: 120666 - DNA, 201 bp, Homo sapiens
agtttgcacacacatattcaaaggtagaagcagaaatagcaaacagaattgacatactttcttcattttcataagatacaatggaaatatctccaaaacamctttgggcaaacattttacctggtgctttaccattttctgaaataaattagccattacaggaagaaaacttaaatgtgtcttagcttctttacatgagaa

SEQ ID NO: 120667 - DNA, 201 bp, Homo sapiens
attttctttctttcttgttttttgtttgtttgtttgtttgtttgtttgtttgttttttgatggagtcttgctctttcttccaggctggagtgcagtggtgyaatctccactcactgtaacctccgcctcttgggttcaagcaattctcctgcctcagcctcctgagtagctgggattacaggcacgcaccaccatgcctgg

SEQ ID NO: 120668 - DNA, 201 bp, Homo sapiens
ttaatttttaacaaaataaattgtttttgtctattttctttctttcttgttttttgtttgtttgtttgtttgtttgtttgtttgttttttgatggagtctygctctttcttccaggctggagtgcagtggtgcaatctccactcactgtaacctccgcctcttgggttcaagcaattctcctgcctcagcctcctgagtag

SEQ ID NO: 120669 - DNA, 201 bp, Homo sapiens
ataatattagtactaattcacaatgattttataagaatattgaatataagatgcttagcaaactgctacaaagactcagacttaagacctttattaagttstgttattattgtaaatattattatgtagtccttaatgttttattcaaaagttagacataaattttgagaaccatttgttgtgtagtatatcagattgtga

SEQ ID NO: 120670 - DNA, 201 bp, Homo sapiens
tttttaagacttatttaatttttaacaaaataaattgtttttgtctattttctttctttcttgttttttgtttgtttgtttgtttgtttgtttgtttgttttttgatggagtcttgctctttcttccaggctggagtgcagtggtgcaatctccactcactgtaacctccgcctcttgggttcaagcaattctcctgcctc

SEQ ID NO: 120671 - DNA, 201 bp, Homo sapiens
ttttttaagacttatttaatttttaacaaaataaattgtttttgtctattttctttctttcttgttttttgtttgtttgtttgtttgtttgtttgtttgttttttgatggagtcttgctctttcttccaggctggagtgcagtggtgcaatctccactcactgtaacctccgcctcttgggttcaagcaattctcctgcct

SEQ ID NO: 120672 - DNA, 201 bp, Homo sapiens
tttttttaagacttatttaatttttaacaaaataaattgtttttgtctattttctttctttcttgttttttgtttgtttgtttgtttgtttgtttgtttgttttttgatggagtcttgctctttcttccaggctggagtgcagtggtgcaatctccactcactgtaacctccgcctcttgggttcaagcaattctcctgcc

SEQ ID NO: 120673 - DNA, 201 bp, Homo sapiens
aaaaaaaaagggggggacgagagaacatgatataaaatatgattgatctaaatgtctaaaataaaattaatttctagaactatccctttcaaggatacctrtatattcaacaatgcttttgtattgtcttctgaacagaattttgaatcgatatccaactttagtatcaatgtcactgtatttgttccagatcactctagt

SEQ ID NO: 120674 - DNA, 201 bp, Homo sapiens
caaattatatatcttttgctttgttcatatttaactaaagttagtatacgtggttttcagtttgttcacacaagttcacttatgcaggtgcaagaaactgyagacctaatagtttcttagctttgtaattaaacccaagtaatgaacctgtttaacatcttcctacagacctagcatcaaatgcaaagggaatattctcac

SEQ ID NO: 120675 - DNA, 201 bp, Homo sapiens
ctgaaaggtgaaggagttcggagtgctcccataagtatactgacggaggaagatggtaaatataatagtggatattgatatactttgattctataacattycaagaaacacacgtatagaatgaaacaatgtaaaaactcctctagtcatgggtatcagttgtgtaccataccagcgttatacagagatttcattgtcatg

SEQ ID NO: 120676 - DNA, 201 bp, Homo sapiens
tattaaatgatattttgtaagtttcaacttacctatttgatttctctttagtactgaagaaatatacccaatatatcattgaggtgtctgctagtacactsaaaggtgaaggagttcggagtgctcccataagtatactgacggaggaagatggtaaatataatagtggatattgatatactttgattctataacattcca

SEQ ID NO: 120677 - DNA, 201 bp, Homo sapiens
gagactggaaagacagaaaagctgcagtatactgtgtatttaagagaatcaagattttctacaagcaaatgttcctggcttgcactgtaatttgggaaaakcacctaaagtgcctcctcattgttccttaaagtaaaataaacttgctggattacattttagagtccctggaaaatttaaatatatgttattttttgtata

SEQ ID NO: 120678 - DNA, 201 bp, Homo sapiens
tattatgtatttttctaaattttcaaaatattctacattaacatatattatttttaataagaaaagatccctcacactttaactacatatttaggtctttyggttgagactggaaagacagaaaagctgcagtatactgtgtatttaagagaatcaagattttctacaagcaaatgttcctggcttgcactgtaatttggg

SEQ ID NO: 120679 - DNA, 201 bp, Homo sapiens
ttgatgaaggatagactgtgaaagaggtaggaagaagtgatattgcagccccataatctgccaccaactgtacaaatgagtttagaaaggttttcaagagrgtcaaaaatgaaaatactgtgattttaggtataagaggaaggcttataattaattttgaggaaggctcgtcaaaattatctctcctgtcaatttcagatg

SEQ ID NO: 120680 - DNA, 201 bp, Homo sapiens
ttccctctaaaatgtaattcaaaatgtaaacattttggtgaaatcttatgcttacaatttccattaaaatctaaactctacagcatgttaaagttttactyggatttacaaaatgatgcatatatgcatttagatatttacatttcatcactactctgataatcaaatgccatcaagcaggacaaggacaactggttgtat

SEQ ID NO: 120681 - DNA, 201 bp, Homo sapiens
tctactaaatttattattagtaatttttatatgcattcaatttagaatactaataaaaagtttaatttctttcatttgaaagaaaagagttttataacagractcttgaatggcaataatatttacctatttagtttatattgtttaaccctccaagttaattatttatgttattgttctatgtactcaatttttaaacca

SEQ ID NO: 120682 - DNA, 201 bp, Homo sapiens
ccacatctgcatttaaataatttaagagctgatgatgtaatagttgccatttcaacaattatactcagtttgtgaatttagattctgtttagggtaactgwtgatttttgtattttgcccattacctatcatagtacctgaagggtttgttggaaacctgacttacgaatccatttcgtcaactgcaataaatgtaagctg

SEQ ID NO: 120683 - DNA, 201 bp, Homo sapiens
ctgaaattgtattatctttccaattacttaaaacaacaaatttattacaactcctatggatcttaatatgctagttatttacaaccacattgtgtaccctyattttatagatgtggatatggatatgcctaacagagatactaacttatcaaaaattatttcaccagtgcgcggcagatgttcaacttcaggctacacatc

SEQ ID NO: 120684 - DNA, 201 bp, Homo sapiens
ctttttttaagacttatttaatttttaacaaaataaattgtttttgtctattttctttctttcttgttttttgtttgtttgtttgtttgtttgtttgtttgttttttgatggagtcttgctctttcttccaggctggagtgcagtggtgcaatctccactcactgtaacctccgcctcttgggttcaagcaattctcctgc

SEQ ID NO: 120685 - DNA, 201 bp, Homo sapiens
atttacttagatggggcagtccagggaagaggtcaatatggagaacatccaggagttctgtttgcaacatgtttgaaatatccaagtgccattatgaaggmagttagataaataagtttaaagctcagggaaaagatacagagctgaatatataatttggagcctcaccacatctttggtattcaatcaagggatgaggat

SEQ ID NO: 120686 - DNA, 201 bp, Homo sapiens
cagtttgtgaatttagattctgtttagggtaactgttgatttttgtattttgcccattacctatcatagtacctgaagggtttgttggaaacctgacttaygaatccatttcgtcaactgcaataaatgtaagctgggtcccaccggctcaaccaaacggtctagtcttctactatgtttcactgatcttacagcagactc

SEQ ID NO: 120687 - DNA, 201 bp, Homo sapiens
ataatgaaagtaagagaaaacagaatttttcaaacactttggttcagagtatgaattgttagagaacaattgagaaatgtttttcaaaatttggaatgcakatatataaaatctaaaaattttactgctggtagtatattctacaagtacactcctatatatatgcaatatgcaaaaatttcaattatatctattcaacat

SEQ ID NO: 120688 - DNA, 201 bp, Homo sapiens
cctttttttaagacttatttaatttttaacaaaataaattgtttttgtctattttctttctttcttgttttttgtttgtttgtttgtttgtttgtttgttkgttttttgatggagtcttgctctttcttccaggctggagtgcagtggtgcaatctccactcactgtaacctccgcctcttgggttcaagcaattctcctg

SEQ ID NO: 120689 - DNA, 201 bp, Homo sapiens
gccaagtcaactatacaccctgcagtgtgccaaaaagttacttttgcaactttaaattattgccttaatattttaggagagaacttgaagtcaccaacatrgaaaggcctataagcccaagaatttgaggagactgcaattatttggaagcgatatagatatctagtcccccgtataaattcttcttactggccttatatt

SEQ ID NO: 120690 - DNA, 201 bp, Homo sapiens
attttgcccattacctatcatagtacctgaagggtttgttggaaacctgacttacgaatccatttcgtcaactgcaataaatgtaagctgggtcccaccgsctcaaccaaacggtctagtcttctactatgtttcactgatcttacagcagactcctcgccatgtgagaccacctcttgttacatatgagagaagcatata

SEQ ID NO: 120691 - DNA, 201 bp, Homo sapiens
gacatttaatttaacaaaaatttattatactttcagttctggggtacatgtgcagaacgtataggtttgttacataggtatacatgtgtcatggtggtttrctgcacccatcaaagtgtcatctacattaggtacttctcctaatgctatccctcccctagccccccacccaccgacaggccccggtgtatgatgttcctc

SEQ ID NO: 120692 - DNA, 201 bp, Homo sapiens
acagcaaaagaaactaccatcagagcgaacaggcaacctacaaaatgggagaaaattttcacaacctactcatctgacaaagggctaatatccagaatctrcaatgaactcaaacaaatttacaagagaaaaacaaacaaccccatcaaaaagtgggcgaaggacatgaacagacacttctcaaaagaagacatttatgca

SEQ ID NO: 120693 - DNA, 201 bp, Homo sapiens
tctaaaacaccaaaagcaatggcaacaaaagacaaaattgacaaatgggatctaattaaactaaagagcttctgtacagcaaaagaaactaccatcagagygaacaggcaacctacaaaatgggagaaaattttcacaacctactcatctgacaaagggctaatatccagaatctgcaatgaactcaaacaaatttacaag

SEQ ID NO: 120694 - DNA, 201 bp, Homo sapiens
cttgtcccaggagcaaaagacagaggtcatctatgaatggattccgggtttcaatttctttggaagctatggcaaagggaagagaactatagagggaggtmggaaagaaagcaaaataactagtgttcagatagaaacatgaaaaactgaagtctggggaagagacagaggaggaccagcatatggtctgagggatgtatg

SEQ ID NO: 120695 - DNA, 201 bp, Homo sapiens
aaagagaataaaatacctaggaatccaacttacaagggatgtgaaggacgtcttcaaggagaactacaaaccgctgctcaatgaaataaaagaggatacaracaaatggaagaacattccatgctcatgggtaggaagaatcaatatcgtgaaaatggccatactgcccaaggtaatttacagattcaatgccatccccat

SEQ ID NO: 120696 - DNA, 201 bp, Homo sapiens
tgggaacagatgtagcaatgatactgcagtggccctcactttccacctacgtattcctacaatcttcaccttagaaagaatgtctggtatatcaatttccscctacccccaaattttattcgaaagcacttccaattgaaagtttatgaacacttgtcccaggagcaaaagacagaggtcatctatgaatggattccgggt

SEQ ID NO: 120697 - DNA, 201 bp, Homo sapiens
ggcaggtgcctgtaatcccagctactcgagaggctgaggcaggagacttgcttgaacctgggaggcagaggttgcagtgagccgagatcgcaccattgcaytccatcctgggtgacagagcgagactctatctcaaaaaataataataataattaatttataatatatcagtatatataaagtaagtaattcaaatatgtc

SEQ ID NO: 120698 - DNA, 201 bp, Homo sapiens
atcatgagtgaactcccattcacagttgcttcaaagagaataaaatacctaggaatccaacttacaagggatgtgaaggacgtcttcaaggagaactacamaccgctgctcaatgaaataaaagaggatacaaacaaatggaagaacattccatgctcatgggtaggaagaatcaatatcgtgaaaatggccatactgccc

SEQ ID NO: 120699 - DNA, 201 bp, Homo sapiens
cctattcaacatagtgttggaagttctgcccagggcaattaggcaggagaaggaaataaagggcattcaattaggaaaagaggaagtcaaattgtccctgyttgcagatgacatgattgtatatctagaaaaccccattgtctcagcccaaaatctccttaatctgataagcaacttcagcaaagtctcaggatacaaaac

SEQ ID NO: 120700 - DNA, 201 bp, Homo sapiens
ggctgaggcgggcagatcacttgaggtcagaagttcaagactagcctggcaaatgtggtgaaaccccatctgtactaaaaatccaaaaaaaaaaaaaaaaattagccgggcgtgatggcaggtgcctgtaatcccagctactcgagaggctgaggcaggagacttgcttgaacctgggaggcagaggttgcagtgagccga

SEQ ID NO: 120701 - DNA, 201 bp, Homo sapiens
aaggcctttgacaaaattcaacaatccttcatgctaaaaactctcaataaattaggtattgatgggacgtatttcaaaataataagagccatccatgacamacccacagccaatatcatactgaatgggcaaaaactggaagcattccctttgaaaactggcacaagacagggatgccccctctcaccactcctattcaac

SEQ ID NO: 120702 - DNA, 201 bp, Homo sapiens
aatcccagcacgttgggaggctgaggcgggcagatcacttgaggtcagaagttcaagactagcctggcaaatgtggtgaaaccccatctgtactaaaaatmcaaaaaaaaaaaaaaaaattagccgggcgtgatggcaggtgcctgtaatcccagctactcgagaggctgaggcaggagacttgcttgaacctgggaggca

SEQ ID NO: 120703 - DNA, 201 bp, Homo sapiens
aagcaatagcttaccaaccaaaaagagtccaggaccggatggattcacagccgaattctaccagaggtacaaggaggaactggtaccattccttctgaaaytattccaatcaatagaaaaagagggaatcctccctaactcattttatgaggccagcatcattctgataccaaagccaggcagagacacaaccaaaaaaga

SEQ ID NO: 120704 - DNA, 201 bp, Homo sapiens
agagtccccttatacaattataaaaacactatttataattgtaaaaatatattcatatgttacttggaattattgttctctttgtttctgaaaacagctcmgcatgatggaaatgtaacaaagtggtatgatgcatattttaataaagcaaggccatattttacaaatgaaggctttcctaaccctccatgtacagaagga

SEQ ID NO: 120705 - DNA, 201 bp, Homo sapiens
acagtaactgtggaataattagtattttttcaattgtatagaattaatggcctggcgcggtggctcacgcctgtaatcccagcacgttgggaggctgaggygggcagatcacttgaggtcagaagttcaagactagcctggcaaatgtggtgaaaccccatctgtactaaaaatccaaaaaaaaaaaaaaaaattagccgg

SEQ ID NO: 120706 - DNA, 201 bp, Homo sapiens
ttatttggtgatattctgtgaaaataaatactgtaatctgattaagggacagtaactgtggaataattagtattttttcaattgtatagaattaatggcckggcgcggtggctcacgcctgtaatcccagcacgttgggaggctgaggcgggcagatcacttgaggtcagaagttcaagactagcctggcaaatgtggtga

SEQ ID NO: 120707 - DNA, 201 bp, Homo sapiens
aaattagccaggcatagtggcagacacctgtaatcccagctactcaggaggctgaggcaggagaatcgcttgaacccaggaggcagaggttgcaatgagcygagtttgcaccattgcactccagcctgggcaacaatcgtgaaatcccatctcaaaaaaaaaaaaaaggaagtattctattactcacttatggtatatttc

SEQ ID NO: 120708 - DNA, 201 bp, Homo sapiens
ctttgggaggtcgaggcgggtagatcccctgaggtcaggagttcgagaccagcctggccaacatggcaaaatcccgtctctactaaaagtacaaaaattakccaggcatagtggcagacacctgtaatcccagctactcaggaggctgaggcaggagaatcgcttgaacccaggaggcagaggttgcaatgagccgagttt

SEQ ID NO: 120709 - DNA, 201 bp, Homo sapiens
cagctcagtttagacccaggtagagcggtgtaggcagatcagggatcacctgagtattctttaaagcactatgttttgcataatggcagcaagttattttytttcaattttcattgtttgtaatccacaaattgactgtgtcccaatttttcttctaccattatcttttactgtgaccagaaaagttattctactaatgcc

SEQ ID NO: 120710 - DNA, 201 bp, Homo sapiens
gacagatttctacatgtcaccaaaaacattatttctattttatttttttccatgaaatttccagtgtgtgaactcctgaaacaaagaataaaacaattggrttaaataattcagaattataatatttcagtctcttagggaataataacaaaaatgagagaagattaatggtatttcctgcagccttttggttatgcttct

SEQ ID NO: 120711 - DNA, 201 bp, Homo sapiens
cctgtttctttcctgataacaccacttcactgtagatattggcaataattgttaacttctggcacatccagaccctttatcttggaaacgtctttcaagcygtcttgaggctgtaaacctagaacatcaagacatagtctgccttctctctgatttcagcatctaactccacatcctttccttctcattcttccagtgcaa

SEQ ID NO: 120712 - DNA, 201 bp, Homo sapiens
atgtccattttaagcaagcaaggccatgaaggactctggccttgataatcaatacccaattaccaggttgattgttttgatagtaatgttacactgggccrcctctggtgcaacctgatcagaattattcacctactgtgtcaggaaaaggtggtcttcttcagacctcccctgtattggcagcatgaccttgtctattct

SEQ ID NO: 120713 - DNA, 201 bp, Homo sapiens
actttctattatgtatttttctaaattttcaaaatattctacattaacatatattatttttaataagaaaagatccctcacactttaactacatatttagrtctttcggttgagactggaaagacagaaaagctgcagtatactgtgtatttaagagaatcaagattttctacaagcaaatgttcctggcttgcactgtaa

SEQ ID NO: 120714 - DNA, 201 bp, Homo sapiens
ggatgtccattgttctttaacttgttaaaagtgaagccagtgccaatgctaacgcgaacaaatacaatctaacatgaccctattttatacctttctttacytggaggccaataagcaagaaatccttcctgcaacatgttgaagagctttgcacaaacaacaacctaaagtttcaagaagaattttcggtatgttactagc

SEQ ID NO: 120715 - DNA, 201 bp, Homo sapiens
caaagcatctcagtcatttatatcttaagttcagttgatcagaatttacccaacacaaccttctattctttcctatttctgaagaacaaggtatcataggrgcactgggcaacaagttatcttaagggagctaggtagtatgtgtggatgtagcctgtagtttatctttctttcttgctggtcttcgctgaggggtaatta

SEQ ID NO: 120716 - DNA, 201 bp, Homo sapiens
acattgcacaattgttccagtagttctaaattttagcaatcattttgtctctgtacaatttacttatggcttctatgtgatttatattttggttctctttrtccatatctaaataatatagcataagtatcaaactatggttccaacgtgatcttctaaacctacttattcacacctgggtgtgtaatatgatctaatttg

SEQ ID NO: 120717 - DNA, 201 bp, Homo sapiens
agttatctcagtaaaaatacttttgcagtaccggctcaaatgatcctctaggaaaaaggaatctctctgcgatgggtggcagtctcactgtccttatatakgtggactactagcctgtcactaaatcatatatattgtgcttaaattttgccaatcacaatggaataatatttgctgttattataaaagttatttccacaa

SEQ ID NO: 120718 - DNA, 201 bp, Homo sapiens
catactgattagctatgtgtttaagtctccttttattttagaattaattttatttggctatatgttttatttttaaaatttgataggaaagaaaatgattrcatacataccctaatacttttttttaagccttggggaaaaatgcaactgggagtcagtcaagagaatttaaaactttctcttactctacacatcagagag

SEQ ID NO: 120719 - DNA, 201 bp, Homo sapiens
cttatgtattgcttactaaaggcagagacctttaaatatatgaacttaatttaatacatttcccaaactaggaaactgaggcacagaaaaattaagtattkcacatgataatataactagtaattgttcaagcaggtatttgaaaccaataaaggcatcatattttctaataaggcaataattcacaaatatccacccaaa

SEQ ID NO: 120720 - DNA, 201 bp, Homo sapiens
atttagacacgttcattataggagtttgaaaatgcaattaatatacttacaaaactattgcagtaatagcctcttctgttcaagaaaactgctaacatccrttcatgaaaattctgttctttttattgcttcaaaagatgtcgtggccatccagttatgggcacaaaaagtactgcatacatggatgaattttccagtagt

SEQ ID NO: 120721 - DNA, 201 bp, Homo sapiens
gccctttaatatctatccctggtttaatcttaacattattccattttttatttgctttgtctgtatgggtcactgggagatagatatcaaaaggaaaaaakaatcattttctcagagtaatcgcattcctaggataattgtgtacgtgtgttagagtgtggttgtctatatatggatcttgtctcctcagaatggtgatct

SEQ ID NO: 120722 - DNA, 201 bp, Homo sapiens
taaaataataataatttataatgacaactttgacaaatggtacaaagtcatagtgaaaaataatgagaaatttgattgcataacaatataaatttttgtayggcaaaattgatagacaaattcatggacaaatgacaaactaagaagaaaattttaattaatatgacaaaaggcgatatgtagccttctgtttttaacata

SEQ ID NO: 120723 - DNA, 201 bp, Homo sapiens
actggatgtttcaattataatatcaacttggtaaaatttctcaggaaaaatagtttctgacatttttctctgaagaaaagtaatgagtacagggtatctarttttactagctcttaaaatattctaaaaagtagtaattagaaatttgaaagaaagaataggcagatgaattaatggaaaagaatgaatggtctagaaata

SEQ ID NO: 120724 - DNA, 201 bp, Homo sapiens
tgcacttattcattttactatcaaaacttagcataacgtggatggaactggaggacattatgttaagtgaaataagccaggcacagaaagacaaacttcaygtgttctcactcatttgtggcagccaaaaactaaaacaattgaactcatggagatagagtgtagaatgatggtttccagagcctggaaaaggtaggaggg

SEQ ID NO: 120725 - DNA, 201 bp, Homo sapiens
cctggtccagcatccccatatttttcaacaattcctgtattgtaatgaaatatacttccttttaaatcctgttttcttcattgaatacacctctttttgaycattttcatatttattatgctctgtttttcaaaccattttttttcttttattcattctttgcttcaaaaaacatatcttcttacaaatattcttcaatta

SEQ ID NO: 120726 - DNA, 201 bp, Homo sapiens
agtgatccactggaaatccactgagcttgcaaatatattaatgctacaatatgattgacttggcatgtattcaatttaattatcatcatcatcatcatcaycattttagagacaatatcgcactatgtcaccgaggctggagtgcagtggctttatctcagctcactgtagccttaacctcctgggctcaagtgatccttc

SEQ ID NO: 120727 - DNA, 201 bp, Homo sapiens
tgtataaaacataattactgaaattgtattatctttccaattacttaaaacaacaaatttattacaactcctatggatcttaatatgctagttatttacarccacattgtgtacccttattttatagatgtggatatggatatgcctaacagagatactaacttatcaaaaattatttcaccagtgcgcggcagatgttca

SEQ ID NO: 120728 - DNA, 201 bp, Homo sapiens
ttatgtttaccctgagaagctggaagatacaacatctctttctgcttggggggcacccatcattaactgagaattctaacattctactttgtaatacctgstccagcatccccatatttttcaacaattcctgtattgtaatgaaatatacttccttttaaatcctgttttcttcattgaatacacctctttttgaccatt

SEQ ID NO: 120729 - DNA, 201 bp, Homo sapiens
cataggctttttcttatccataggtcttctcatccatgccctctatttccttcagttctattaaggctcttgttatatgacgttccaccctttctccaacrtcaaacatacttgtgctgtgtctcattccctccaagcctttgtcatggaggaaaaaaacgaattagttctaaatctgatattggttgataactaatctaa

SEQ ID NO: 120730 - DNA, 201 bp, Homo sapiens
atgtacctcaaaatgtcttctcaatttgagcattcctaataggtatttgaagatttcaactcacaaatgattgtgacataagtacagactagaaaattacrtaaaaactggactactagaagctttcttatcttatataaacataaatgtgaagaacagattctaaaaagtgattggatttagataaaaaagagtgataca

SEQ ID NO: 120731 - DNA, 201 bp, Homo sapiens
aggaatgaataaattcctcgacacatacactctcccaagactaaaccaggaagaagttgaatctctgaatagaccaataacaggctctgaaattgtggcartaagcaatagcttaccaaccaaaaagagtccaggaccggatggattcacagccgaattctaccagaggtacaaggaggaactggtaccattccttctgaa

SEQ ID NO: 120732 - DNA, 201 bp, Homo sapiens
gtagaagtagatgtaatttatgtgtcattagtgacttgatgaaatatataaactaaaaactcacactcagtatcatacaaaacttggaaatattaatattktaccagagaaatagattcttcacaaatttaatctaagtagcaagtacatgctatgggatacaaatacatatttttacaccaattgacaaatttgagattc

SEQ ID NO: 120733 - DNA, 201 bp, Homo sapiens
aagctagcagaaggcaagaaataactaaaatcagagcagaactgatggacatagaaacacaaaaaacccttcaaaaaattaatgaatccaggagctggttwtttgaaaggatcaacaaaatacatagaccactagcaagactaataaagaaaaaaagagagaagaatcaaatagacgcaatacaaaatgataaaggggata

SEQ ID NO: 120734 - DNA, 201 bp, Homo sapiens
agaaatgccatttgtatcctggcacaaacattttttgttacattctgagagtagcatagcagaatatcagcactagcagggaccccagtaactgattgagygtcccaaacataataaatttcttcatgcaaagaatgtaaatgaaggaatatgaatggaggcagagaataaaaaggcatttgatttcaaaatcacacgcct

SEQ ID NO: 120735 - DNA, 201 bp, Homo sapiens
aaagcagtgacatcattgaagtatacacagatcaagacagtatgtaaacaaaaaacactaatctttaatatgattaatttaaaacttattattttaggaamttttactatttgtttgaatttgtaataacatcttttatttagacacgttcattataggagtttgaaaatgcaattaatatacttacaaaactattgcagt

SEQ ID NO: 120736 - DNA, 201 bp, Homo sapiens
gcctaacatcacaattaaaagaactagaaaagcaagagcaaacacattcaaaagctagcagaaggcaagaaataactaaaatcagagcagaactgatggayatagaaacacaaaaaacccttcaaaaaattaatgaatccaggagctggttttttgaaaggatcaacaaaatacatagaccactagcaagactaataaaga

SEQ ID NO: 120737 - DNA, 201 bp, Homo sapiens
gcaaggagatttttgtcatccagtaagttactgtggtaatgcagaactctgctgtgattattttaatcttgtcaggtggtgtgctctatattttaaaatayataatattgaacatcttgttgtttaatgcactattttttccaaagctccccccaaaagctatatttctatttacaacatgtcctttataatattgcatgc

SEQ ID NO: 120738 - DNA, 201 bp, Homo sapiens
agtacataaaagtctaagttgtatatgatatcatttttacatttctttgtatttaaaaattaaatataaagtaaaaagttaccttcagagggaaaagtaaraacatgtgtactaaatatgtttcattggtacctattggaaatagtaaagtacataattttaaagaaaaaataattataaatccttttaaaagcattatca

SEQ ID NO: 120739 - DNA, 201 bp, Homo sapiens
gtagagggaaatttatagcactaaatgcccacaagagaaagcaggaaagatccaaaattgacagcctaacatcacaattaaaagaactagaaaagcaagarcaaacacattcaaaagctagcagaaggcaagaaataactaaaatcagagcagaactgatggacatagaaacacaaaaaacccttcaaaaaattaatgaat

SEQ ID NO: 120740 - DNA, 201 bp, Homo sapiens
gctactatacattttggttaacagcaagtacttcagttggaaatgggaataaaagcagtgacatcattgaagtatacacagatcaagacagtatgtaaacraaaaacactaatctttaatatgattaatttaaaacttattattttaggaaattttactatttgtttgaatttgtaataacatcttttatttagacacgtt

SEQ ID NO: 120741 - DNA, 201 bp, Homo sapiens
cttttcatgttttttctgcattgaaatcttgcctctcaactaaattgtaatgtctttgagggtagggaacatgttttatactttccatatcatccttgatrtccaactcttaataaatactaaatatttgaaatgtgaaagatagaatagctaaacattactttgtaatataccatactgtgtcatggagaaataagcatt

SEQ ID NO: 120742 - DNA, 201 bp, Homo sapiens
ttttcattttgttaaaagaatacttagtagcccgtgaaaaatcctgaataagtatatcttcagcaaatgtaataacgtgaaaaagcactctttttgtttaytatgtcatgtttttaaacagtcaatattggagaaagtattatttatcgaagaggttacattcgaggcagactgtggtgagattcaatcccctaagcacta

SEQ ID NO: 120743 - DNA, 201 bp, Homo sapiens
atactaaaaaaatacattctgaacaatgaatgtgtttatttttcagaattttacactccatgaagtaaccaatgactttgacaatatgactgtatccacarttatagataaactgacaatattcagctactatacattttggttaacagcaagtacttcagttggaaatgggaataaaagcagtgacatcattgaagtata

SEQ ID NO: 120744 - DNA, 201 bp, Homo sapiens
tgaaatgaaggcagaaataaagatgttctttgaaaccaactagaacaaagacacaacataccagaatatctgggacgcattcaaagcagtgtgtagagggmaatttatagcactaaatgcccacaagagaaagcaggaaagatccaaaattgacagcctaacatcacaattaaaagaactagaaaagcaagagcaaacaca

SEQ ID NO: 120745 - DNA, 201 bp, Homo sapiens
atgcacaagggaaaaaattcaaatctctcaatgcaattaattttagctatttgaacaatatagttgaatctgttcatactaaaatgtaaacttctaagacygaccccctccccaacactggtaggcattttcattttgttaaaagaatacttagtagcccgtgaaaaatcctgaataagtatatcttcagcaaatgtaata

SEQ ID NO: 120746 - DNA, 201 bp, Homo sapiens
aaaggaatgcagttcctcaccagcaatggaacaaagctggacggagaacgactttgacgagctgagagaagcttcagacgatcaaattactctgagctacrggaggacattcaaaccaaaggcaaagaagttgaaaactgtgaaaaaaatttagaagaatgtataactagaataaccaatacagagaagtgcttaaaggag

SEQ ID NO: 120747 - DNA, 201 bp, Homo sapiens
tagcctccttcctgcactccatcgtcagttccttttgcccctcctcaggcctgtgtggcccatccctttattctacaactgaaaatgcacaagggaaaaaattcaaatctctcaatgcaattaattttagctatttgaacaatatagttgaatctgttcatactaaaatgtaaacttctaagaccgaccccctccccaaca

SEQ ID NO: 120748 - DNA, 201 bp, Homo sapiens
acccatctgtacatcaccatcatcaaagaccaaaagtagataaaaccacaaagatggggaaaaaacagaacagaaaaactggaaactctaaaaagcagagygcctctcctcctccaaaggaatgcagttcctcaccagcaatggaacaaagctggacggagaacgactttgacgagctgagagaagcttcagacgatcaaa

SEQ ID NO: 120749 - DNA, 201 bp, Homo sapiens
acatggcctttccttggtgcatggatggagatagagaaaatatggtggggggaggaggaggagaaaggagtgagtggcacacacacacacacacacacacagagagagagaaagagagagagagagatggagaacaagctctctgtgtctcttcttataagtcactaatcccatcagatcggggcctcaccctatggcctc

SEQ ID NO: 120750 - DNA, 201 bp, Homo sapiens
aaactgcaaggcggcagcgaagctgggtgaggggcgcccgccattgcccaggcttgcttaggtaaacaaagcagcctggaagctccaactgggtggagcccacaacagctcaaggaggcctgcttgcctctgtaggctccacctctgggggcagggcacagacaaacaaaaagacagcagtaacctctgcagacttaaatg

SEQ ID NO: 120751 - DNA, 201 bp, Homo sapiens
tacatggcctttccttggtgcatggatggagatagagaaaatatggtggggggaggaggaggagaaaggagtgagtggcacacacacacacacacacacacagagagagagaaagagagagagagagatggagaacaagctctctgtgtctcttcttataagtcactaatcccatcagatcggggcctcaccctatggcct

SEQ ID NO: 120752 - DNA, 201 bp, Homo sapiens
ttgctagtacagcagtctgagatcaaactgcaaggcggcagcgaagctgggtgaggggcgcccgccattgcccaggcttgcttaggtaaacaaagcagccwggaagctccaactgggtggagcccacaacagctcaaggaggcctgcttgcctctgtaggctccacctctgggggcagggcacagacaaacaaaaagacag

SEQ ID NO: 120753 - DNA, 201 bp, Homo sapiens
gacggcacctggaaaatcgggtcactccgacccgaatactgcgcttttctgacgggcttaaaaaacggcgcaccacgagattatatcccacacctggctcrgagggtcctacgcccacggagtctcgctgattgctagtacagcagtctgagatcaaactgcaaggcggcagcgaagctgggtgaggggcgcccgccattg

SEQ ID NO: 120754 - DNA, 201 bp, Homo sapiens
agaattatttaaaattacatgtaaccataatcagttttatatatatatatataactatatatatacatacatatatagatacatgcatatatatatatatwcacacacatacataagcaatcacttgaaaatagtaacaaatatttgtttgttttaggtttacgcagtcaatagtgctggtgcaggtccaaaggttccgat

SEQ ID NO: 120755 - DNA, 201 bp, Homo sapiens
aagaattatttaaaattacatgtaaccataatcagttttatatatatatatataactatatatatacatacatatatagatacatgcatatatatatatayacacacacatacataagcaatcacttgaaaatagtaacaaatatttgtttgttttaggtttacgcagtcaatagtgctggtgcaggtccaaaggttccga

SEQ ID NO: 120756 - DNA, 201 bp, Homo sapiens
tctattatctcagggaagtctcaaatgtataattatgctttcaggagataataattgctaaatgtctgctgtctccaagcacaattctctataatttgttrtttatgtttgtcatcactttatctgtaaattaactgcatgaaaggagaaagattttttcttttgttgatgaaacaataacatcaattgcagtgatatttc

SEQ ID NO: 120757 - DNA, 201 bp, Homo sapiens
aagtgcaagaaaatacaattaatagactatatgcagttgttttttaaagaattatttaaaattacatgtaaccataatcagttttatatatatatatatamctatatatatacatacatatatagatacatgcatatatatatatatacacacacatacataagcaatcacttgaaaatagtaacaaatatttgtttgttt

SEQ ID NO: 120758 - DNA, 201 bp, Homo sapiens
agacaatttaaattgaaggtatatagagctgaagttttctgttttgtaagttgatgttaaaccatatattcatttatgtttattcttttaggaaagtgatmataacgaggtacactaaaaaccatagagtattttctagaatattttccactattaagttagacttacagggatctgcagatggcaaagttacaaataagt

SEQ ID NO: 120759 - DNA, 201 bp, Homo sapiens
atactacagacaacaatgaggaaggaaatatctaacttttatttgaaatagtcaggtaatgtacctcaaaatgtcttctcaatttgagcattcctaatagrtatttgaagatttcaactcacaaatgattgtgacataagtacagactagaaaattacataaaaactggactactagaagctttcttatcttatataaaca

SEQ ID NO: 120760 - DNA, 201 bp, Homo sapiens
atcttggcaagttacttcacctttctaagcttcaatatcttcatctataaaatgagcataatattagtactaattcacaatgattttataagaatattgartataagatgcttagcaaactgctacaaagactcagacttaagacctttattaagttctgttattattgtaaatattattatgtagtccttaatgttttat

SEQ ID NO: 120761 - DNA, 201 bp, Homo sapiens
aagggagaaatacacctatacaacatgaggctaagaacgaaagcaatgataagtatactacagacaacaatgaggaaggaaatatctaacttttatttgaratagtcaggtaatgtacctcaaaatgtcttctcaatttgagcattcctaataggtatttgaagatttcaactcacaaatgattgtgacataagtacagac

SEQ ID NO: 120762 - DNA, 201 bp, Homo sapiens
gtatataaacattaaagcttaaaacctcaaagaaaaatacaatttagaatgtagccaacacctaagggagaaatacacctatacaacatgaggctaagaaygaaagcaatgataagtatactacagacaacaatgaggaaggaaatatctaacttttatttgaaatagtcaggtaatgtacctcaaaatgtcttctcaatt

SEQ ID NO: 120763 - DNA, 201 bp, Homo sapiens
tagaattcagacccaatcctgtttacccatttttcctccttgaaaacaaacaacccatcaaaacaattaagtagtggatatttcatgtttagttaaaaatyattactggatgtttcaattataatatcaacttggtaaaatttctcaggaaaaatagtttctgacatttttctctgaagaaaagtaatgagtacagggtat

SEQ ID NO: 120764 - DNA, 201 bp, Homo sapiens
taaagtaggtgtaatacattgtgaatttttgtctttaacctcagttctaagttctagctcagcattaggccctaggtcagcaaaatttcagctcctatttyttctgcatttaccaagaaagaattctgatttaactatgaaaattccaaactatagaaaaatcctgggattactatgtatggtgtcttggtcactttttgt

SEQ ID NO: 120765 - DNA, 201 bp, Homo sapiens
cttttctaattctctctataaatcagtcaaattaatttttttgtatataaacattaaagcttaaaacctcaaagaaaaatacaatttagaatgtagccaayacctaagggagaaatacacctatacaacatgaggctaagaacgaaagcaatgataagtatactacagacaacaatgaggaaggaaatatctaacttttat

SEQ ID NO: 120766 - DNA, 201 bp, Homo sapiens
caagtgtggtggctcacacctgtaatcacagagctttggaaggctgaggtgggaggatcttttgagcctaggagtttgagaacagccttggcaatgtagckagatcccgttagtacaaaaaaaaaaattagcctagagtggtggtgtgtgcctgtagttccacctactcaggaggctgaggtggaggattgcttaagccca

SEQ ID NO: 120767 - DNA, 201 bp, Homo sapiens
tacatgaattttgcagaagtattcccatgtacttccctgtagtttctgctgttattgttatattttttgtacttacttttatagatgtcaggttgttataygtgtcagctatatatattaatatacgtgtgtatgtgtgcatgcacactcggtttttcagctgtctttctactgagctccttggattctccgtcatgtaca

SEQ ID NO: 120768 - DNA, 201 bp, Homo sapiens
tgaactattgtcttctttcaagaccagctgattttggtgcttccaaatagaatccacaactcaataaacatatttttattgtcatcattcttggactacakcatgtgacaaaaatagggaaatagataatgcatatgctgtgtacaatgtcatgttatttgtcttggattattttaaaatttacttgccttaatttctaca

SEQ ID NO: 120769 - DNA, 201 bp, Homo sapiens
ttggaaaagtttccagactttgtttgtgtggaagctaacatacagtaacttataaatgaaatgtagacatgtatacacacacacacactcacacacacgcrcacacacacacacacacacacacacaggtcatacattcatcgttcaagcgtttgaccattagagggcagtaactattaggaaattttgtacttctaccct

SEQ ID NO: 120770 - DNA, 201 bp, Homo sapiens
agtctcgctctgtcgcccaggctggagtgcagtggcgggatctcggctcactgcaagctccgcctcccgggttcacgccattctcctgcctcagcctcccragtagctgggactacaggcgcccgccactacgcccggctaattttttgtatttttagtagagacggggtttcaccgttttagccgggatggtctcgatct

SEQ ID NO: 120771 - DNA, 201 bp, Homo sapiens
gactgagatttagctggctttcttacagttcatcatactccaccaaaaaaggatatgtgttatgagaagtttttaaagcatataaacaaaaaaattagtgrctctctgcaactgacaaaaaggaagatttctatttatatttttgaggtaaagaggagttatgtagaatattcaatccttgtaaatacagcaacaattaaa

SEQ ID NO: 120772 - DNA, 201 bp, Homo sapiens
tcaaatgaagaaaataaaaccatagaaattaaagatttagaaatattcacaaggtattctgtagtgatcactgcatttactgggaacattagtgctgcatwtgtagaagggaagtcaagtgctgaaatgattgttactactttagaatcaggtaaggagaatttctcaaccttgctaaaaattgactgagatttagctggc

SEQ ID NO: 120773 - DNA, 201 bp, Homo sapiens
gcttttggtattccacatagtatttttttaatagtaacagagctgtagggagtgtgaactcatattgctctttggaaatttcaaattttacatttataaayactgttattatgtatttttgtgaaaatgcaataattatttgaccttttaacaaaatggattttttaaaaatagaaccagggcctccagtcttcctagccg

SEQ ID NO: 120774 - DNA, 201 bp, Homo sapiens
cttatagaagataatgaaattatttagcatttttttttttttttttttttttttttgagacggagtctcgctctgtcgcccaggctggagtgcagtggcgsgatctcggctcactgcaagctccgcctcccgggttcacgccattctcctgcctcagcctcccgagtagctgggactacaggcgcccgccactacgcccgg

SEQ ID NO: 120775 - DNA, 201 bp, Homo sapiens
ccttcatcaagtcaaatgaagaaaataaaaccatagaaattaaagatttagaaatattcacaaggtattctgtagtgatcactgcatttactgggaacatyagtgctgcatatgtagaagggaagtcaagtgctgaaatgattgttactactttagaatcaggtaaggagaatttctcaaccttgctaaaaattgactgag

SEQ ID NO: 120776 - DNA, 201 bp, Homo sapiens
tgaacatcatattaacatttgatctaattactgaatataattaaaagcaaaataagttaatttactaaagaattctgaaatttactattttcagtatttcwggataaccaacatcttttttctattaatctagaataaatttccatatattaatgttgtttacttttaatgttagtgtgctcaaaaagtattgttaacttt

SEQ ID NO: 120777 - DNA, 201 bp, Homo sapiens
ttagagcaagaaggtaaaggaaacatttaaagcaaagtcgaagatttaaagtattgtgctgacagactaaggaattttgttcagaagctaaactagaaatattttctaaatatatcctcttatagaagataatgaaattatttagcatttttttttttttttttttttttttttgagacggagtctcgctctgtcgcccag

SEQ ID NO: 120778 - DNA, 201 bp, Homo sapiens
aataattttttttttggaaatagttctgagaacagatattaatctgtaacataataggaatgtagcttttagatttcagaatgtggtgctacattaggaayctgattattaataggctagttaatatgttttgattaagaaacaagtttttccatattatgtagtggttcaatcatggtcaaatgaaataattttgcaatt

SEQ ID NO: 120779 - DNA, 201 bp, Homo sapiens
tttgcctcttgcatattattaaatgatattttgtaagtttcaacttacctatttgatttctctttagtactgaagaaatatacccaatatatcattgaggygtctgctagtacactgaaaggtgaaggagttcggagtgctcccataagtatactgacggaggaagatggtaaatataatagtggatattgatatactttg

SEQ ID NO: 120780 - DNA, 201 bp, Homo sapiens
aataaagccacatattatcatttatttgggggcatcaaaaaagatacagagttccaactcattttattttgcaatttctgtggtatgaatcactcatcacyatcatgagtaacctttatctttcatccctaagtaacttatgctcctaaaattctgaaatacttttacttcctaaaaaaagataattccctccactcaccc

SEQ ID NO: 120781 - DNA, 201 bp, Homo sapiens
tccacttgccagagatactttgagaggatcaagtattatatcattaggatcaagtattatatcattagaagtgaattatgtaaagtctaaaattctctccygattgagagcctctgattctatgaaagaagtttaattctaacaatgatgagataaataataaagccacatattatcatttatttgggggcatcaaaaaag

SEQ ID NO: 120782 - DNA, 201 bp, Homo sapiens
tcttcataaataagagctactattgccaaagaatgacattttcacttagtttttatttttggaagattgtgttgacagccatttcatagtttgcctcttgyatattattaaatgatattttgtaagtttcaacttacctatttgatttctctttagtactgaagaaatatacccaatatatcattgaggtgtctgctagta

SEQ ID NO: 120783 - DNA, 201 bp, Homo sapiens
catattctcactcataggtgggaattgaacaatgagaacacatggacacaggaaggggaacatcacactctggggactgttgtggggtgggggcagggggkaggtatagctttaggagttatacctaatgctaaatgacgagttaatgggtgcagcaaaccaacatggcacatgtatacatatgtaactaacctgcacgtt

SEQ ID NO: 120784 - DNA, 201 bp, Homo sapiens
tagtaaaccagctaaaagaagcaaaagaaactacactaaaattatagtaaaaagtaaatatgtttatgcatttataaaaaatatatatgagtgagagcatrtataaattgaatttttaatatgcaaagaggagtcaggtgcctgaaaatcacacctgggctctattatctcagggaagtctcaaatgtataattatgcttt

SEQ ID NO: 120785 - DNA, 201 bp, Homo sapiens
aacttattatagcagtgtcaaaaatgaatttcctacatacgaatttcctacacagggtttgctcaaagggagtgaacactttgagcttcaggattgctcaraagattgctcctttgattagagagctcacacttcagcacagagatttatgtgttatctgcaattcggtaacagctactaggaaaatggagttcgagcctt

SEQ ID NO: 120786 - DNA, 201 bp, Homo sapiens
tatatatttttagcattatattttaattcttctatttgacttttagctatgtttctttgtattattatttttcgtggcttctcaagggactgcaatatgartacttgacttatatctacttaatttatgtaactggaaataaaatacatgaattttgcagaagtattcccatgtacttccctgtagtttctgctgttattg

SEQ ID NO: 120787 - DNA, 201 bp, Homo sapiens
taaacttaatcatttgtgttagtcagaacctttatagaacacctctacatacgtcatactatttaaagtagatctgtcttgttccaaatccagttttctgrggttgcttctaacatctaacagagaaatgttattgcctgcctgtcatcttggctaacaggcagtaaggccttatttttagctggtataatatcttctggt

SEQ ID NO: 120788 - DNA, 201 bp, Homo sapiens
tacaaattctaccctgttgccccggatgtagctaaacaatgcccatggttttcatttagaatacatggttgacaaaagaagacttctggcaagaatatttyttcaaatgtgctaatgtggaaaggcttagtaataaggaaaattcaacttctgccacactggggatcatacctctgagctttttgacatcagcaagaatat

SEQ ID NO: 120789 - DNA, 201 bp, Homo sapiens
actcattttcatctattttctcccctttataccagcctttatctttcatgttatttgaataaaatatccgggtcgttaagctttagtccacaagacgaaaktctcaccttccctagcagtgctctgtcctgtatcataatatccttcatcctattttcttccatattctacctgcttatataaattaaaacctgtttcttt

SEQ ID NO: 120790 - DNA, 201 bp, Homo sapiens
gtcaataccacctgcaatctttatagcatacttatctaaacatacaaagcacatattaaaaaatacaacacaggctttttatcccacgtgttgcttgagtrccagctgtgtactacattgacccttctccaaaacattgggagattgaagggaggaaaaaaagagagatgatcctctttactgtatttccacaaatataaa

SEQ ID NO: 120791 - DNA, 201 bp, Homo sapiens
aggtagagcggtgtaggcagatcagggatcacctgagtattctttaaagcactatgttttgcataatggcagcaagttattttctttcaattttcattgtktgtaatccacaaattgactgtgtcccaatttttcttctaccattatcttttactgtgaccagaaaagttattctactaatgccaccattaggggacattg

SEQ ID NO: 120792 - DNA, 201 bp, Homo sapiens; identical to SEQ ID NO: 20521

SEQ ID NO: 120793 - DNA, 201 bp, Homo sapiens
gccatttcaacaattatactcagtttgtgaatttagattctgtttagggtaactgttgatttttgtattttgcccattacctatcatagtacctgaagggyttgttggaaacctgacttacgaatccatttcgtcaactgcaataaatgtaagctgggtcccaccggctcaaccaaacggtctagtcttctactatgtttc

SEQ ID NO: 120794 - DNA, 201 bp, Homo sapiens
taacaccgaataatgtgacttttctcacaccctagcaaacactttattagctacctttaaattttttcctgtctgtatggatgaaaatgatgttcatcccwatggggtgttttaatctatatgtttaaaattttattgaatattgacaaattatacacgtatatatttatggggaacagagtgatgccatgatatatgtat

SEQ ID NO: 120795 - DNA, 201 bp, Homo sapiens
attaacatccttaagttttattaataatacagacttgtcacagtaaaagaaattgtttaccttacattgataattaggcacagatgtattttataaaactyccattgacatagaaaaatgcggtgtagaaatgtcagatacatttaatctctctttacagacacacacacacacacatacaacttctatataagcttcaca

SEQ ID NO: 120796 - DNA, 201 bp, Homo sapiens
gccttaattggttttgtgtttgccttttggagtgagaataataaaatatgttaccaatatcaaactctgtttaaaagtatcagactctttttaaaagactytaagattgaagcaaacaataggaaagtcataaggaaggggaggtcctttgattttttaattcaaaaccataaatgagtataagaatgacaaaactattca

SEQ ID NO: 120797 - DNA, 201 bp, Homo sapiens
tctatctgtcttcagcttgaatatgcctataataaagtattagaggggtgacccaatgtgttttatggatttcatttctgacatttctaattcaagctttwttgaaaaacattttttatcactttaatttataaactgtaggtaaaattcaggccatttcagacattacttgtaaacacaaatacagtaatttgttcaatt

SEQ ID NO: 120798 - DNA, 201 bp, Homo sapiens
tgcttttaagcgcgatattttattttccttctttgcctttgtgttttattatgtgtatttaatagggtgcgctttcattttaaatatatgttatgtatttwttttctataattattttagtgcctgaaggaccaccacaaaactgcgtaacaggcaacatcacaggaaagtccttttcaattttatgggacccaccaacta

SEQ ID NO: 120799 - DNA, 201 bp, Homo sapiens
tttttagcacctattaagggtcacgggccctgttgataggtttcacagaaactgtcttttaaaaattctaaactaaagcaatacattattgttatcttcayagaaaactaagtctaatgaaaaatggagggtttgagaggttcattcattcaaaaaatatttataatataccaggccctactggggataaagtagtgtaga

SEQ ID NO: 120800 - DNA, 201 bp, Homo sapiens
gggtacaattaaaatctagcaaatttgtctataacttttgcatgttatgtgtgtatgtatagcataaaagaaaaagaaatgaattacatgttcttattctyatgttcaccaagagatacaacattatttctctattgatcttattttatttactaggagaatagtgaatcttttttatggagtacagccagcccttctcca

SEQ ID NO: 120801 - DNA, 201 bp, Homo sapiens
aaaaccaaacaccgcatattctcactcataggtgggaattgaacaatgagaacacatggacacaggaaggggaacatcacactctggggactgttgtgggktgggggcaggggggaggtatagctttaggagttatacctaatgctaaatgacgagttaatgggtgcagcaaaccaacatggcacatgtatacatatgtaa

SEQ ID NO: 120802 - DNA, 201 bp, Homo sapiens
cttctaaaactgcagacataaatgggtacaattaaaatctagcaaatttgtctataacttttgcatgttatgtgtgtatgtatagcataaaagaaaaagamatgaattacatgttcttattcttatgttcaccaagagatacaacattatttctctattgatcttattttatttactaggagaatagtgaatcttttttat

SEQ ID NO: 120803 - DNA, 201 bp, Homo sapiens
aaagacacatgcacacatatgtttattgcggcattattcacaatagcaaagacttgcaaccaacccaaatgtccaacaatgatagactggattaagaaaaygtggcacatatacaccatggaatactatgcagccataaaaaatgatgagttcatgtcctctgtagggacatggatgaaattggaaatcatcattctcagt

SEQ ID NO: 120804 - DNA, 201 bp, Homo sapiens
caaaaagtgggcgaaggacatgaacagacacttctcaaaagaagacatttatgcagccaaaaaacacatgaaaagatgctcaccatcactggccatcagakaaatgcaaatcaaaaccacaatgagataccatctcacaccagttagaatggcaatcattaaaaagtcaggaaacaacaggtgctggagaagatgtggaga

SEQ ID NO: 120805 - DNA, 201 bp, Homo sapiens
caatgaaatgaaaagcttgttctttgaaaaaataaataaaattgacaaatctctagcaagcctgacaaagaaaaaaagagaaaattcaagaatgaaacaartgcagacactgcagacataaaaaaaaaataagagaatactacaaacagctctcacagttaaattttatatatgagatgaaatgtactgattcttcaggaa

SEQ ID NO: 120806 - DNA, 201 bp, Homo sapiens
tccctatttaataaatggtgctgggaaaactggctagccatatgtagaaagctgaaactggatcccttccttataccttatacaaaaatcaattcaagatrgattaaagacttaaatgttagacctaaaaccataaaaaccctagaagtaaacctaggcattaccattcaggacataggcatgggcaaggacttcatgtct

SEQ ID NO: 120807 - DNA, 201 bp, Homo sapiens
agattaataatagtaaacagggtatgaggactgaatcagttaacatgcataaagaacttggaacattccctgagatatggtaaatgctcaataaatataaratattagtaacattattataatatgttttatcagtgtatagaatgtgtatatatatgtatgtatatatacacacatacaagtggttaaattggtagtaat

SEQ ID NO: 120808 - DNA, 201 bp, Homo sapiens
taaagtttagaattatataattttagatcttcattgaatctcatagataacttcatttagtcatttcattttgcagacataggaaatgaagcacacaactraagtgtttgttgagttttctacaattaattatttgcaaaactattactagtccagaattctttctactatattgtctcccctaccttagaaattcaatac

SEQ ID NO: 120809 - DNA, 201 bp, Homo sapiens
catcaagctaccaatgactttcttcacagaattggaaaaaactactttaaagttcatatggaaccaaaaaggagcccgcattgccaagtcaatcctaagcsaaaagaacaaagctggaggcatcacactacctgactttaaactatactacaaggctacagtaaccaaaacagaatggtactggtaccaaaacagagatat

SEQ ID NO: 120810 - DNA, 201 bp, Homo sapiens
ttttatttggtaatgcctttagcactctgtgaaatataaattaatgtaaaattaaaattaatttattatgactatccatttttcatggtcttttctattaytgtgctgtagcaagtactaattctaatgtagctagataattaattttctattgtcatagctccagatggtcctcctgaaaatgttcatgtagtagcaaca

SEQ ID NO: 120811 - DNA, 201 bp, Homo sapiens; identical to SEQ ID NO: 20536

SEQ ID NO: 120812 - DNA, 201 bp, Homo sapiens
taaaatacctaggaatccaacttacaagggatgtgaaggacctcttcaaggagaagtacaaaccagtgctcaatgaaataaaagaggatacaaacaaatgraagaacattccatgctcatgggtaggaagaatcaatatcatgaaaatggccacactgcccaaggtaatttatagattctatgccatccccatcaagctac

SEQ ID NO: 120813 - DNA, 201 bp, Homo sapiens
cgtatctcaaaataataagagctatctatgacaaacccacagccaatatcatactgaatgggcaaaaactggaagcattccctttgaaaactggcacaagwcagggatgccccctctcaccactcctattcaacatagtgttggaagttctggccagggcaattaggcaggagaaggaagtaaacggtattcaattaggaa

SEQ ID NO: 120814 - DNA, 201 bp, Homo sapiens
aaaaaccacatgattatctcaatagatgcagaaaaggcctttgacaaaattcaacaaccctccatgctaaaaaccctcaataaattaggaattggtgggaygtatctcaaaataataagagctatctatgacaaacccacagccaatatcatactgaatgggcaaaaactggaagcattccctttgaaaactggcacaaga

SEQ ID NO: 120815 - DNA, 201 bp, Homo sapiens
acaacctctttaacccaaaacattaaaggtaaaagaacaaatctaatattggatatttgcatttataatgacagagtagccacaaatattagtttaatgtyaatagtttcagattattttcatgcagggtattacaattttgtctttttggttaaataagctaggagtttattgcaggtcacatgaaagaatactatagat

SEQ ID NO: 120816 - DNA, 201 bp, Homo sapiens
agtgcctgatagtgcaccagaaaatatcacttacaaaaatatttcttctggagagattgagctatcattccttcccccaagtagtcccaatggaatcatamaaaaatatacaatttatctcaagagaagtaatggaaatgaggaaagaactataaatacaacctctttaacccaaaacattaaaggtaaaagaacaaatct

SEQ ID NO: 120817 - DNA, 201 bp, Homo sapiens
tttcgacacatacaccctcccaagactaaaccaggaagaagttgactctctgaatagaccactaacaggctctgaaattgtggcaataagcaatagcttamcaaccaaaaagagtccaggaccagatggattcacagccgaattctaccagaggtacaaggaggaactggtaccattccttctgaaactattccaatcaat

SEQ ID NO: 120818 - DNA, 201 bp, Homo sapiens
ctactgggtacctaacaaaatgaaggcagaaataaagatgttctttgaaaccaacgagaacaaagacacaacataccagtatcactgggacgcattcaaascagtgtgtagagggcaatttatagcactaaatgcccacaagagaaagcaggaaagatccaaaactgacaccctaacatcacaattaaaagaactagaaaa

SEQ ID NO: 120819 - DNA, 201 bp, Homo sapiens
gtgtcacacatgtagtatacatgacatatcttgcctttgtgtgcacactgaatagtttttatttaggacctatttaatgatggcttagaaatgtacttttycttttctcaactgcaccatacctttaaaagcacctcttcttaattttttttttgtttacttctgtcaatgtttattgaatgagcaaaagatcccgttcta

SEQ ID NO: 120820 - DNA, 201 bp, Homo sapiens
aggattgactcttgatgtgtaaatggaacgtagaaaacacttttccctcagtaaaacttggctttattttacacacacacacacacacacacacacacacmtctctctctctctctctgctttaaaatttactttgttcattgcggtatttaaaagagactattacctggcacataattgaaacttaatatttgttcaatg

SEQ ID NO: 120821 - DNA, 201 bp, Homo sapiens
tgtcacacatgtagtatacatgacatatcttgcctttgtgtgcacactgaatagtttttatttaggacctatttaatgatggcttagaaatgtacttttcyttttctcaactgcaccatacctttaaaagcacctcttcttaattttttttttgtttacttctgtcaatgtttattgaatgagcaaaagatcccgttctag

SEQ ID NO: 120822 - DNA, 201 bp, Homo sapiens
atcaagtattatatcattaggatcaagtattatatcattagaagtgaattatgtaaagtctaaaattctctcctgattgagagcctctgattctatgaaakaagtttaattctaacaatgatgagataaataataaagccacatattatcatttatttgggggcatcaaaaaagatacagagttccaactcattttatttt

SEQ ID NO: 120823 - DNA, 201 bp, Homo sapiens
tttgaaatgaacaaatgtttggacaatgaaaacatcagtatgaaagggaatactgtaattactttagtacatagtattccttaatatccattaaaattggyccaagcaaactctaattatgaacatcatattaacatttgatctaattactgaatataattaaaagcaaaataagttaatttactaaagaattctgaaatt

SEQ ID NO: 120824 - DNA, 201 bp, Homo sapiens
taattttgtctcttgggagtaaaccaagctagatgttgaaactatatatatgcaaactgaagtgaactactatgtttttattaacataatttataacaacwagcttctttttactaaaatatctatttgagataaaaatttatttttgatatccatttccaggtaattgccttgattctgcattatctatggaacataatc

SEQ ID NO: 120825 - DNA, 201 bp, Homo sapiens
aatttgtatcctggtgtagggttgcatgcctgtagtaccagctactctgaaggaaggctaaggtggtaggttaccttgagcccaggattcaagtccagccyaggcaacataacaagaccttgtcgctaaaaaatatatatatttaaatttaaagaagtttaaaaggaatcacaatttaatatgtagaaataaaagtactat

SEQ ID NO: 120826 - DNA, 201 bp, Homo sapiens
gtctcaaaccttgtctagagaaccatacacatttatacttatggaaacagagaaatttatttactgtggtttgggtattcaggattccttcataggcctarcatggacttggtgttgtaagagagaaacaaagaaattggtaaagcaaattaattgctcttttgatctagaatttcttttatgcactagatgtcaaaatgt

SEQ ID NO: 120827 - DNA, 201 bp, Homo sapiens
tctgattgttacacgtgatgctaaaattgatcagtaggcttggtggcagcaacagcatgatccttcattggaaagttggttttgaccacttataacaagcrtataatctatacagcgatattttgtcatcctgtaaatgtccaattccccattaactttcctcctaatcattttagaatacatttatgtttgttacctgaa

SEQ ID NO: 120828 - DNA, 201 bp, Homo sapiens
ttcaaattcctgcttccagaatccatcaactcatttacatccattctcagaggatgaaatctctctctttcagttcaagtgcaatccttcctcctgccttstggatcctaattccttgtgtctgctctaaagctatctatggattattagtgtatgcttcctcagcttcaaactcattctcttcagtggctttgtccttta

SEQ ID NO: 120829 - DNA, 201 bp, Homo sapiens
gtcaaactgctggattgaatcatggattagccacttgatatctatttgactttgagaaagtttcttaacctctataggcctgaaaaatggagataatactrgttcctatctcaaagttactaactttgaggattaaaagagaatctgaaaaaacccttaagacccctgcctggaaacatgtactattaagaataaaaaata

SEQ ID NO: 120830 - DNA, 201 bp, Homo sapiens
aagagtattattttaaggacattaaacagtttgtctcttgtccttatagggttaaagaaatacacaaaatacaaaatgagagtggcagcctcaacccacgwtggagaaagttctttgtctgaagaaaatgacatctttgtgagaacttcagaagatggtaagaatatcaattgcagctttaatttttttaaaaaagtggtt

SEQ ID NO: 120831 - DNA, 201 bp, Homo sapiens
tgttaatgttcttcctacatatattatattcaagtgcaagaaaatacaattaatagactatatgcagttgttttttaaagaattatttaaaattacatgtwaccataatcagttttatatatatatatataactatatatatacatacatatatagatacatgcatatatatatatatacacacacatacataagcaatca

SEQ ID NO: 120832 - DNA, 201 bp, Homo sapiens
cctcttctaaaactgcagacataaatgggtacaattaaaatctagcaaatttgtctataacttttgcatgttatgtgtgtatgtatagcataaaagaaaamgaaatgaattacatgttcttattcttatgttcaccaagagatacaacattatttctctattgatcttattttatttactaggagaatagtgaatcttttt

SEQ ID NO: 120833 - DNA, 201 bp, Homo sapiens
aatcttagataaatttaattttcatatttctagcatctagatactatatttttaccaaagttttattagttatttgattacttatggtatcatgttatacrcaacgttttattatttgattacttagggtatcatgttacacaattggcctcattcaggtagaatacaggaatggtttgagaattcaagagtgagggatta

SEQ ID NO: 120834 - DNA, 201 bp, Homo sapiens
gagagcccacagccttgttattttacatatcactatttagatatttgttatttatttatttgtgttggcctgaagtaaatgttacttttgtacgatatttraaggatagatttattttataaattaatagtttaaataagattttgccagcatttgaaatgaacaaatgtttggacaatgaaaacatcagtatgaaaggga

SEQ ID NO: 120835 - DNA, 201 bp, Homo sapiens
ctttctatgtcttgaaaaatcttagataaatttaattttcatatttctagcatctagatactatatttttaccaaagttttattagttatttgattacttrtggtatcatgttatacacaacgttttattatttgattacttagggtatcatgttacacaattggcctcattcaggtagaatacaggaatggtttgagaat

SEQ ID NO: 120836 - DNA, 201 bp, Homo sapiens
tttggcctggatcttaatgaggaggttggaatgggcagaaggatgttatagagcaggggtccccaacctttttggcactggggaccagtttcatggaagamaatttttcccctccctccggactagggaggggagtgaggttggtttctggatgattcaagcacgttacgtttgttgtgcactttatttctattattatta

SEQ ID NO: 120837 - DNA, 201 bp, Homo sapiens
catgtgctatttcatttagtcctcagcacaatcctataacatagatacattattattcccattttaaagacaagataaatgttacttacaacagttaagtraattgctcaaagctactatctgggaattggtagaactacagttaagccaaggttatgattccagtcatggcatttgcaaaagcttgagtcttattctcat

SEQ ID NO: 120838 - DNA, 201 bp, Homo sapiens
actctccgtttcatctcacactttataaatcattcttgtgacctttactctgttcaaataaatgttagccattgcagaattccaaagggtatttggcatgrtacatttgatgtcttcagtgtaagtaatgttataggaaaaatcctgttaagtattttacatgtgctatttcatttagtcctcagcacaatcctataacat

SEQ ID NO: 120839 - DNA, 201 bp, Homo sapiens
gtaaaatttaacatcatctcatttgaatactacagaaagatgagcttataaaaagcagtgctaaattaggccacaggaaaatgcttccagttaagggatawgtatgacatttccaagggataataaagggtaaagatatcttctggatcctccctcaatataacatcaatatcttctttgaaccttgaaaataattaaata

SEQ ID NO: 120840 - DNA, 201 bp, Homo sapiens
agcacatgccatgtcagcacactacctgaaacaggtaactaacgtgaaacaggtaactaacatgaaacctttaactatttggggattgtgtcaataccacytgcaatctttatagcatacttatctaaacatacaaagcacatattaaaaaatacaacacaggctttttatcccacgtgttgcttgagtgccagctgtgta

SEQ ID NO: 120841 - DNA, 201 bp, Homo sapiens
tttttatatttaacacctttcttttccttttcttagtttatatgataaagtatcattacttaagagtctactcaaagggaaattgcatttcagtgctttaygtttagtcttggtcttgtgtgaaatcatatgctgtatgtgtgtttatacatatattttcacacatggtttttccttttgaacagaggaagttgaaataaa

SEQ ID NO: 120842 - DNA, 201 bp, Homo sapiens
ggtgcccaattcatccttgtatcataaactgagcacactctatggcacaaaataaatgctaatatttgttttattataatttaaaatatccatgcttattraactataggttaaatataaaaggaataacttcaatgaaaatattccattgatgaacaattttttgacagtgcattaactaataactttttttctgttttt

SEQ ID NO: 120843 - DNA, 201 bp, Homo sapiens
gaggtcctttgattttttaattcaaaaccataaatgagtataagaatgacaaaactattcatgttccacatttcatgtgatgcatgtgaaaaactagagakaactcctcaagaaaaaagtgttagtggagatatacatcttcaaatatttgaacaagaagtccttggcttacattcatgaagaacaatggactttgactat

SEQ ID NO: 120844 - DNA, 201 bp, Homo sapiens
agaatccatgcacttaagaatctctctaggtaattccgatattctgtatgtattggagagtactggagtagattaccaggaacttttgaggacaggcaaasagtgtcagaaaggtccatcaaggggtgacaggtgttttcccagtgggtggccagcacatcattgctatgtggagtctgtgggaagaaaaaatgtcaaaat

SEQ ID NO: 120845 - DNA, 201 bp, Homo sapiens
atatcattggtctaattcatcaacagcttacctgctgtgtcacacatgtagtatacatgacatatcttgcctttgtgtgcacactgaatagtttttatttrggacctatttaatgatggcttagaaatgtacttttccttttctcaactgcaccatacctttaaaagcacctcttcttaattttttttttgtttacttctg

SEQ ID NO: 120846 - DNA, 201 bp, Homo sapiens
ctgtgagaagtaaagtctgaaaagaaatgtgaaagtctgaaagcccactaaatgtgaataataatagcgatttgagttcatagaaacaggcaaacacattygaaattccttcatcacaaatggaaagaaacacaattaaaagttttctaatactcccaaacttgtttaaaattagctgatgctttgaaaattacttgaatg

SEQ ID NO: 120847 - DNA, 201 bp, Homo sapiens
atgagttaggttgaaaagtatagtcccaacagcatcgagtagtatatgttacagaggtacatgaatcaaatagatgttggagatgatctttcctttttgaygtaattaattttagcccatctttctggtatgagttagataccaaggatcacagtctatcacagccccttctacttcatggcgtttgtctttttgttcaca

SEQ ID NO: 120848 - DNA, 201 bp, Homo sapiens
gaaataacaaacattttcttaatgtgtttatatgtgaacaagacaagttctatatcatcattttaatctaattcactagcatttgcaaaagtgattgaggyataacagttatgccttttatttataaattatgttagtgtaacacccttcacagatatcaaatcattccatctaaacaaatccttgaaggaggtgagctga

SEQ ID NO: 120849 - DNA, 201 bp, Homo sapiens
gctcaatacatattttaattgaaagatttaaaaaatattatagtagaccaacatcacttttagtacatagtcataattttggagcccttgagtatgtagcraagccatctttcctttttcttatcttggagaatttaacctctttgctactacttggcaatccatattgttcttccttcagttgttgcacattgtattttg

SEQ ID NO: 120850 - DNA, 201 bp, Homo sapiens
cagttaatgagggaccagatcacacatgccactggaaggatatgggcttttctcagtgggagatgaggaggattttaagcagagaaataatgttttaaaaygattgtccttgcttgtatgttgaaaataggtggaacaaggacaaaggtggatacaggcagacttgctaagtttttaattcatgcaagacaggatggtggc

SEQ ID NO: 120851 - DNA, 201 bp, Homo sapiens
ttaatgaatacggagaaatcaggtttaagattttatagtctaagaaaaaaataattttgattgtgaagccaaacacctttctttttttctctttttactgrattcaaacagtaactacaaggaatcagtatattactgacattgcagctgaacagctgtcttatgttatcaggagacttgtacctttcactgagcacatga

SEQ ID NO: 120852 - DNA, 201 bp, Homo sapiens
acatctaactttaatagaggtgtgcatggagagattaatgaatacggagaaatcaggtttaagattttatagtctaagaaaaaaataattttgattgtgargccaaacacctttctttttttctctttttactgaattcaaacagtaactacaaggaatcagtatattactgacattgcagctgaacagctgtcttatgtt

SEQ ID NO: 120853 - DNA, 201 bp, Homo sapiens
ctaaactctagttatttggcatcttaatactaggcatctttactatcacttattttttttttatctcagacgttttgtttcattttgatttctttcaaaartgacttgtcatgtttgttttatattctgaaggatcttggtgttttactctatcagttttacacactttaccatgaggttaatgggaataatttcccctaa

SEQ ID NO: 120854 - DNA, 201 bp, Homo sapiens
gggtattagtagccggagaatgaaattttggaatctaaagaagacagtggtcatggaaatatgttatcttttataacagcatgattccaaagttataggtkttttagaactaatacttgatttaagtcatgaagtgtaactgtcacagtcttttaaaatatctacttttaattacagtatataaatgaccccatggctcca

SEQ ID NO: 120855 - DNA, 201 bp, Homo sapiens
ttgtatattcacaactattgattgaatttttttcatacttatttgaaacgtttcatcaatgcatgtattagcccagttatcctaaagtaaagttgacttgycccaactccagttttttattttaggcaaagttcagttaaatacatttataaaaatcttacacaaatagattttatgcagtgtattatatatttaatttca

SEQ ID NO: 120856 - DNA, 201 bp, Homo sapiens
gctgttttggttactgtagccttatagtatagtttaaagtcaggtagtgtgatgcctccagcttcgttcttttggcttaggattgacttggcgatgtgggytcttttttggttccatatgaactttaaagtagttttttccaattctgtgaagaaagtcattggtagcttgatggggatggcatagaatctataaattacc

SEQ ID NO: 120857 - DNA, 201 bp, Homo sapiens
cagtaccatgctgttttggttactgtagccttatagtatagtttaaagtcaggtagtgtgatgcctccagcttcgttcttttggcttaggattgacttggygatgtgggctcttttttggttccatatgaactttaaagtagttttttccaattctgtgaagaaagtcattggtagcttgatggggatggcatagaatcta

SEQ ID NO: 120858 - DNA, 201 bp, Homo sapiens
aggttgctgctgaaaacagtgctggcattggagtgtttagtgatccatttctcttccaaactgcagaaagtggtaattttcctgtcatttattttaaattracttagtcatgagtttgtcgtttaaaataataaagaacataaataaaaactgacactaaaatacatataattctcagtagcatggccacttaattagttt

SEQ ID NO: 120859 - DNA, 201 bp, Homo sapiens
tatatacacaagtcagatcaaagccagacagtctggaagttcttcttactaatcttaatcctggaacaacatatgaaattaaggtaattattttgtgtatkactacttagtgttcaaacatttcattcattttaaaagtgtgggaggtttttctcaccttgtcaagcctttacagctgaatacagtcagtgactgacaacg

SEQ ID NO: 120860 - DNA, 201 bp, Homo sapiens
tgttctcattgttcaattcccacctatgagtgagaatatgcggtacttggttttttgttcttgcgatagtttactgagaatgatgatttccaatttcatcyatgtccctacaaagggcatgaactcatcattttttatggctgcatagtattccatggtgtatatgtgccactttttcttaatccagtctatcattgttgg

SEQ ID NO: 120861 - DNA, 201 bp, Homo sapiens
atggagcccaagtcctcttccaggtggtattgttaaagtatatagttttaaaattcatgaacatgaaactgacactatatattataaggtaggttgattayaacagtatatgtttatttttaaaaatcagaaattgaattaaaatcttttgacatataggaggaaaatggactactaaattaaacaatgactattttttta

SEQ ID NO: 120862 - DNA, 201 bp, Homo sapiens; identical to SEQ ID NO: 20543

SEQ ID NO: 120863 - DNA, 201 bp, Homo sapiens; identical to SEQ ID NO: 20545

SEQ ID NO: 120864 - DNA, 201 bp, Homo sapiens
tctcgtcctttacatagttgtttttttttttttgagatggactctcgctctgtcgcccaggctggagtgcagtggcccgatctcggctcactgcaagctcygcctcccaggttcacgccattctcctgcctcagcctcccaaatagctgggactagaggcgcccgccaccatgcccggctaattttttcgtattttatttt

SEQ ID NO: 120865 - DNA, 201 bp, Homo sapiens
cgaggcgggcggatcacctgaggagttcaagaccagcctggccaatatggcgaaatcccatctctactcaaaatacaagaaattagctgggcatggtggcragtgcctgtaatcccagctactctgggggttgaggcaggagagtcacttgaacccgggaggcagaggttgcagtgagctgagatcatgccattgcactcc

SEQ ID NO: 120866 - DNA, 201 bp, Homo sapiens
cctttttatttgttccttatcatctttccccttcctacagaactttgtagaatatgtcatgcatggcatatcatgttctgcctcctattaccgataactgktgcttctcttagttcccttatgccatgacaagcatcttgtagaaaaagaattgtgtaatatttattttttcatctccaaaagtcttctgcaactatgtca

SEQ ID NO: 120867 - DNA, 201 bp, Homo sapiens
gaaaatgtggactagattttgtaccacatgaaaacaaaaggctgtttcaatgaaccatcatttatttccacagtcaacaaacacttatgagtgccagtatrttccagtgtcccatcactgtgcctgtcacataataggaggctgaaattgtcattatgtttcctatagccaggttacaaataactcttgcctggatttagt

SEQ ID NO: 120868 - DNA, 201 bp, Homo sapiens
tagcttcggctgggtgcagtgcctcatgcctgtaatcccagcactttgggaggccgaggcgggcggatcacctgaggagttcaagaccagcctggccaatrtggcgaaatcccatctctactcaaaatacaagaaattagctgggcatggtggcgagtgcctgtaatcccagctactctgggggttgaggcaggagagtca

SEQ ID NO: 120869 - DNA, 201 bp, Homo sapiens
gcctcaaaatgaaaattatgtagcagaataagtgtatacctttttatttgttccttatcatctttccccttcctacagaactttgtagaatatgtcatgcrtggcatatcatgttctgcctcctattaccgataactgttgcttctcttagttcccttatgccatgacaagcatcttgtagaaaaagaattgtgtaatatt

SEQ ID NO: 120870 - DNA, 201 bp, Homo sapiens
atgcttttatgttccaggtaaatagaccaaatttcagagaaatttgataaatatacacaaggatgtcataatagatttaagacagatctcatgtcctatgmgtttactgtattagcaaaatgaaacttcatattaccatgtttttcttgggtcagaactccagacagtaaatgccactagactaatgactaatgccacagt

SEQ ID NO: 120871 - DNA, 201 bp, Homo sapiens
ttgtgtcatctctaatttatttcatgagtgtcttgtagttctccttgtaaagattttcacctcctttgtaaaatgtattcctagatattttattttttttktggctatcgtaaatgggattgaattcttgatttcattctcagcctgaatgttattggtgtatagaaattccacttatttttgtacactgaatttgtatcc

SEQ ID NO: 120872 - DNA, 201 bp, Homo sapiens
gctaaactagaaatattttctaaatatatcctcttatagaagataatgaaattatttagcatttttttttttttttttttttttttttgagacggagtctygctctgtcgcccaggctggagtgcagtggcgggatctcggctcactgcaagctccgcctcccgggttcacgccattctcctgcctcagcctcccgagtag

SEQ ID NO: 120873 - DNA, 201 bp, Homo sapiens
ttttgatctttgttggtttaaagtctgttttatcagagactaggtttgcaacccctgccttttcttgttttccatttgcttggtagatcttcctccatccytttattttgagcctatgtgtgtctctgcatgtgatatgggtttcctgaatacagaacactgatgagacctgatggttttacaaggggtttcccctttcgc

SEQ ID NO: 120874 - DNA, 201 bp, Homo sapiens
tagattatttaaggaaatatctaagtaatttaaggattaagtctcaggatattaaaatcagcacaaattaagatggtagccttgaaccaaagctagaccaygaaagtaaatgagagtaaatgaccctcaggttagtagattacgacaactgtgagggctagtggatttcactggtgatacagtatttaaagctgtgggctt

SEQ ID NO: 120875 - DNA, 201 bp, Homo sapiens
tcagcaatttcatatagttcagccagatactatatacgaatttctgtcttgaccttgaggatctagaaatctagtaaagtagcttacttttgtagaaaagkatcctgttgagactattcacagaaatgaatacaatgagatgatacaaaagagcccatagataatggcagtagttgaaagtgcaggaataagaaagtaatg

SEQ ID NO: 120876 - DNA, 201 bp, Homo sapiens
gaggcagagctcaggcagtaattcaggcgatagggagtggctgtaaatacagaagctttatgatgctcacctgctgtgtggcccagttcctaacaggccaycagctggtactagtccgtggcgctgggattggggacccctgttatagaggttgctggatgggttgggagaggatatcccatctaaaggaagtaaaacaag

SEQ ID NO: 120877 - DNA, 201 bp, Homo sapiens
ggggcagtgtttgatttacaacttgcagaggtagaatccacgcaagtaagaattacttggaagaaaccacgacaaccaaatggaattattaaccaataccragtgaaagtgctagttccagagacaggaataattttggaaaatactttgctcactggaaataatgaggtattgcatttttatttcacttattggtgaacc

SEQ ID NO: 120878 - DNA, 201 bp, Homo sapiens
agttccaggggcagtgtttgatttacaacttgcagaggtagaatccacgcaagtaagaattacttggaagaaaccacgacaaccaaatggaattattaacsaataccgagtgaaagtgctagttccagagacaggaataattttggaaaatactttgctcactggaaataatgaggtattgcatttttatttcacttattg

SEQ ID NO: 120879 - DNA, 201 bp, Homo sapiens
actttatttctgggttttctattctcttccattaaagtatatctgtatttttctatcagtactgtgctattttagttactatagctttgtagtataattcraagtcaggtaatgtgatgcctccagatttgttctttttgcttaggattgctttcattatttgggctcttttttggtttcatatgaactttaggattgctg

SEQ ID NO: 120880 - DNA, 201 bp, Homo sapiens
tagttaagtgctattattccttttcatcatatgaaaaatgttaattgtgcaattaaacaggactaaaggtattttcataagttaatattatttttctaaaktagttaatgaattgttcggaaactcttgttatgatttaagtgctccttcaaaggctgtgcttgcaatttggaacagttgccagtgaaaggcacagtaact

SEQ ID NO: 120881 - DNA, 201 bp, Homo sapiens
cacccctttctttgactaggaaagggaactccctgaccccttgtgctccccaagtgaggcaatgcctcgccctgcttcggctctctcacggcgcactgcaygcactgacctgcatccactgtctggcactccctagtgagacgaacgggtaccttagatgaaaatgcggaaatggatgccttttatttctttctcttgctt

SEQ ID NO: 120882 - DNA, 201 bp, Homo sapiens
cagttcaaactgtggaaactgaactaacatgactgaaataaaatagtgttatattttgttctttagactcttttttcccttcctgagattttgatatgtayttggagagttttgagtcaatatttatttgatttgttttcttttctggagtgatattgtaaatactttaaagattttgattgagtgagaggtgtgagctat

SEQ ID NO: 120883 - DNA, 201 bp, Homo sapiens; identical to SEQ ID NO: 20533

SEQ ID NO: 120884 - DNA, 201 bp, Homo sapiens; identical to SEQ ID NO: 20535

SEQ ID NO: 120885 - DNA, 201 bp, Homo sapiens
ttttttaatagtaacagagctgtagggagtgtgaactcatattgctctttggaaatttcaaattttacatttataaatactgttattatgtatttttgtgwaaatgcaataattatttgaccttttaacaaaatggattttttaaaaatagaaccagggcctccagtcttcctagccggggaaagagtcggatctgctggg

SEQ ID NO: 120886 - DNA, 201 bp, Homo sapiens
attttggataacagcacaaaagacctcaagtttgcattcactaacctaacaccatttacaatgtatgatgtctatattgcggctgaaaccagtgcagggastgggcccaagtcaaatatttcagtattcactccaccagatggtaagaacatagggaatgagtgagatatttttggtatgcttatgaacttcatgaattgg

SEQ ID NO: 120887 - DNA, 201 bp, Homo sapiens
caaatctggtacccagaaatggagaaaagcctcaagaaacattgctggttggccctctgccacttgactgtatgatctgatcacatgtaagtttcacaaamgattcatatttctctgctagtttgacgttgagaatttgctcataaacctccctaattttatcttcttggtcctttgagaaacacatagtatcccaacttg

SEQ ID NO: 120888 - DNA, 201 bp, Homo sapiens
aaaaaataatccatagctatcttccactttttgcaggtcgcattttggataacagcacaaaagacctcaagtttgcattcactaacctaacaccatttacratgtatgatgtctatattgcggctgaaaccagtgcagggactgggcccaagtcaaatatttcagtattcactccaccagatggtaagaacatagggaatg

SEQ ID NO: 120889 - DNA, 201 bp, Homo sapiens
aatatatgcagttttgatattataataacaaattttagtgcataggttaacacttgaattgttgtctttggctctgtacttaaatgtgaacatgattgcaygcttgataaaaaataatccatagctatcttccactttttgcaggtcgcattttggataacagcacaaaagacctcaagtttgcattcactaacctaacac

SEQ ID NO: 120890 - DNA, 201 bp, Homo sapiens
tcttaaagaaaatttattttaatgttatacagagttttagttattttaagtaagatattcactcagtttagggtatctgttccaatattttaccggaattrgaatcttgtatatagttttgtactcaaatatacatagaaaaccattttatgcataatgtattcagtataaaaatgttgttagatacagaaaactagtgtt

SEQ ID NO: 120891 - DNA, 201 bp, Homo sapiens
atttctcttttagtacaaacatatttccagtttaattgttgcaataaaaaatgttctatgtcgattttcctaaaacaacatattaaaataatgataaatartaaaatcgatccattgataacaattagtttgaagtgttcatgcatactaaaaaaatacattctgaacaatgaatgtgtttatttttcagaattttacact

SEQ ID NO: 120892 - DNA, 201 bp, Homo sapiens
tacatagaaaaccattttatgcataatgtattcagtataaaaatgttgttagatacagaaaactagtgttttacttaatgatatcccatattcttgggagrtggttttgctgccaggtcataatatgcaacctcacatccaggaggggctccttgccttgtcacagaccttgctgtcgaccaaaactaacctactgatctt

SEQ ID NO: 120893 - DNA, 201 bp, Homo sapiens
aatttacgttaatagagtttaatatcacaatacaacttatatctgagaattggaacttgtgtgtaagtagagtaactttgtaatgtacaaatgtgagttgstagtctggtgactggagagattttgagactagatcttgggaaagcttttagtattgattcttctggctacccacatgaccttggagaagtaacttaatgg

SEQ ID NO: 120894 - DNA, 201 bp, Homo sapiens
acttagtttttatttttggaagattgtgttgacagccatttcatagtttgcctcttgcatattattaaatgatattttgtaagtttcaacttacctatttkatttctctttagtactgaagaaatatacccaatatatcattgaggtgtctgctagtacactgaaaggtgaaggagttcggagtgctcccataagtatact

SEQ ID NO: 120895 - DNA, 201 bp, Homo sapiens
ggctccatcttgctgccactagagaaaataaatatcatttattctagacatgatggttgcacttctgcaaaattagttagatgctgttgaaaatcttctarattagttacacaggactccctaatgggtaattcaagacaacatttctgtcctctaggcccgaatattgaagttattggtataaccacttaggttcccata

SEQ ID NO: 120896 - DNA, 201 bp, Homo sapiens
ctttacaaggaccaaatgaaaattattctttcattacttctgataattacataatattggaagagctttcaccatttacattatatagcttttttgctgcygcaagaactagaaaaggacttggtccttccagtattcttttcttttacacagatgagtcaggtaagccagaatccacatttcttcaaacaatttcactgt

SEQ ID NO: 120897 - DNA, 201 bp, Homo sapiens
tagaaaataagactgagactccttaaatcttccttccaatgatgtctacaaaaggtacttaaaaatgaaatcctcaagattcttccaaagaagccatcccrgtaaaaaccagtacctttaaattagttaggggtttccaagtactgtgaagcccagatttgtcacaacagggaggcacctgcatctatgttttgcataaaa

SEQ ID NO: 120898 - DNA, 201 bp, Homo sapiens
agtattatataatataggtattttctgtcaatatgtacacattcagattaattaacatgtcaatatatgctattggggataattaaaaatttttaatgtgytgtaagaaactattgctgataggaaggtgatttagtcaacctagttctgcttagatctatttttatggagcttgaatttttattcctgtgaattctctta

SEQ ID NO: 120899 - DNA, 201 bp, Homo sapiens
aaaagtagctaaaatagtataattggaatttttgtaacacaggaaatgataaatgcttgaggtgatggatacctcatttaccctgatgtgattattatacwttgcattcctgtatcaaaatatcttgtgtaccctgtaaatacatacacctactatgtacccataaaaacttaagatttaaaatttaaaaccagttaaaac

SEQ ID NO: 120900 - DNA, 201 bp, Homo sapiens
tatatctttttctattcttacttgtgaattatttgtattgtatttaaactgtggctggtggacaacaaagtacgtctcttgtgaacaacctataatcaggyctttaatcttgtctgacaacctctgacttttaaatggagtatttacttcatttagatttaaacttagtattaatttacttgactttggatgtactatttt

SEQ ID NO: 120901 - DNA, 201 bp, Homo sapiens
aacaagaataaaaaatgaaaattatccatagacttatcatataaaaaatgcttttatcattttggtgcatttctggcttgtctatttcccccattaatatrtatctatatgactatacattaatgaaaataagcttgtgctacatatgcaagtttatatcctgccttttctttttaacatgaagtcataagcttgttataa

SEQ ID NO: 120902 - DNA, 201 bp, Homo sapiens
tagatactatatttttaccaaagttttattagttatttgattacttatggtatcatgttatacacaacgttttattatttgattacttagggtatcatgtwacacaattggcctcattcaggtagaatacaggaatggtttgagaattcaagagtgagggattaaaatcatttagggaattctgaaaagacttcatcaaag

SEQ ID NO: 120903 - DNA, 201 bp, Homo sapiens
ggcaattgtacatatcaaagaacattcctcttttattggaaatatcttggatggttaggttgagatcagaagagattatgggttgactaaagcactcatgrtaagctgccctccgacaccctcactattcatgaaaatagtgagaatagtagttagaggagaataaataggaatttcaagatacagcaagagaaaacacat

SEQ ID NO: 120904 - DNA, 201 bp, Homo sapiens
gcttttatcattttataatgtcagcaatttttagtaatcatctttgccgttctaaatgatttataatcatttacacccttctctcactgttattgccatcmtcaaaagcagaaatacctgcactagcagaacgagcatgtgatcaacatttagttatcagatacaagcagtagctaaaatatatacctacttatatcccat

SEQ ID NO: 120905 - DNA, 201 bp, Homo sapiens
aataatataccataggcatcccatcaagggtttcttcgaatttctatactcttttatattatagcacaaaataagtatttgaaaggagaaagatttgcaaraaacaattcttgagccactgaccgtgatcctcatatagcttttatcattttataatgtcagcaatttttagtaatcatctttgccgttctaaatgattta

SEQ ID NO: 120906 - DNA, 201 bp, Homo sapiens
aaatattttctttcttctttttgaatatcaaagttagatgcactgactcagtagaaccttaatgtgtgattcactttttgtatgtttgttggaaaaacctycaagctggatataaatcataaaagcatgactaattgcatggtaactggagaaatgctttctctctctctggggtgaagcctgcatgtctgtattttagct

SEQ ID NO: 120907 - DNA, 201 bp, Homo sapiens
agaaagaaggtggcacatactctcctcaggatgcagaaattattgacactaaattgaagctggatcagctcatcacagtggcagacctggaactgaaggaygagagattaacgcggtgagcacactcctctgggtgaactgtggtccagagggcctggagccatgaccctattctgacctatgcttgttggaagtgtttgt

SEQ ID NO: 120908 - DNA, 201 bp, Homo sapiens
gatagtgttttctctaattgcttttcttcatgataggtaaagataaaacagaatgtgttgtaaatagtgtgccagttttggtaaatatatatatatatatwgtaaataagcaatagatctgtaaataattcgataaaaatttaagatgaaatccaaaattttaactgaagtccagacctctctctacagaatccagactca

SEQ ID NO: 120909 - DNA, 201 bp, Homo sapiens
ttttggaagattgtgttgacagccatttcatagtttgcctcttgcatattattaaatgatattttgtaagtttcaacttacctatttgatttctctttagkactgaagaaatatacccaatatatcattgaggtgtctgctagtacactgaaaggtgaaggagttcggagtgctcccataagtatactgacggaggaagat

SEQ ID NO: 120910 - DNA, 201 bp, Homo sapiens
ttggtaaaacatgatattagaagcaatttgttttacatttacttaaatcatgttatttccttattaaattactacctaattcattctgaacatgtgttctycagaatgttaaactcatagcatgcttcataataaaagggacccaagatcaggtaaggttaggaaatatcatatgtagtattggcctgttagagattcaca

SEQ ID NO: 120911 - DNA, 201 bp, Homo sapiens
ttacttagggtatcatgttacacaattggcctcattcaggtagaatacaggaatggtttgagaattcaagagtgagggattaaaatcatttagggaattckgaaaagacttcatcaaaggagtagcatttgtgatacaccatggagcaaggacagatagagattttgtgatggtggcattcccggtggaggatactttata

SEQ ID NO: 120912 - DNA, 201 bp, Homo sapiens
aatcttctttttcaacttatgatatagttctaatacacgcacacacctaacgtgtgagctagtggcatactactactttttagtacttatgagaaaaaaamgttcattaacagtaagaaagcagcatttgaacatacacaagagtaaaattatttcagctctttggctcttgcactgttaacatgaagcttaaaaattctt

SEQ ID NO: 120913 - DNA, 201 bp, Homo sapiens
ttgacacagaatgagatcagctctgtgtggaaagagcctatcagttttgtagtgacacacttgagaccttatacaacatatctttttgaagtttcagctgytacaactgaagcaggttatattgatagtacgattgtcagaacaccagaatcaggtatggttcactttttgtagataaaaagatttaaatgattagagaat

SEQ ID NO: 120914 - DNA, 201 bp, Homo sapiens
tttgactgatggaaatttccttcttccgtatactctttcctttctacacctcaagggtcttaatttaattataactacctaattgtaaaactctgtggtcscaaataatccaggattgactcttgatgtgtaaatggaacgtagaaaacacttttccctcagtaaaacttggctttattttacacacacacacacacacac

SEQ ID NO: 120915 - DNA, 201 bp, Homo sapiens
gcaatacattattgttatcttcacagaaaactaagtctaatgaaaaatggagggtttgagaggttcattcattcaaaaaatatttataatataccaggccytactggggataaagtagtgtagaagaaaaggatttccttccctccttaagttttattagttggtgggtgtttcattgcctaatggcaccagctggaaagt

SEQ ID NO: 120916 - DNA, 201 bp, Homo sapiens
ggaaaagcgcagtattcgggtgggagtgactggattttccaggtgccatctgtcacccctttctttgactaggaaagggaactccctgaccccttgtgctycccaagtgaggcaatgcctcgccctgcttcggctctctcacggcgcactgcatgcactgacctgcatccactgtctggcactccctagtgagacgaacgg

SEQ ID NO: 120917 - DNA, 201 bp, Homo sapiens
tatttctgggttttctattctcttccattaaagtatatctgtatttttctatcagtactgtgctattttagttactatagctttgtagtataattcgaagycaggtaatgtgatgcctccagatttgttctttttgcttaggattgctttcattatttgggctcttttttggtttcatatgaactttaggattgctgttct

SEQ ID NO: 120918 - DNA, 201 bp, Homo sapiens
tgtgtccctgaaaaagtgaaatgaaaatgacaagagatacattttataaatcaaaatcaatttattaatattgatcgtcctctcttctttgatccctccamactttgtatatttagcatagcctttgtcagattctaactcacagtgatctcatttattaactgccttctctgtgtgaggaagagcataaggtactgggca

SEQ ID NO: 120919 - DNA, 201 bp, Homo sapiens
ttattaatattgatcgtcctctcttctttgatccctccaaactttgtatatttagcatagcctttgtcagattctaactcacagtgatctcatttattaaytgccttctctgtgtgaggaagagcataaggtactgggcactacatgaggataagcatgtatatttcctcttatcttagtaccacgtaaggatggagattc

SEQ ID NO: 120920 - DNA, 201 bp, Homo sapiens
atggtgtgggaaaccagagcaaaaacattagtaatgctaacacagtgttttgaaaaaggacgggtaagttatttgaaaatgttttacaaatgttgttttaygattgtgttaacatatgtgtgaatatttcatctaatactgtgagtcatcaataacctggacatctataaagtaattttaacttagtcgtaataactgtgg

SEQ ID NO: 120921 - DNA, 201 bp, Homo sapiens
ttatatacatcatttacaaggatttgctagacagtttgggggatattaagatgaagaatctctgcttttaatgacatcataatcatacaaaaggaaaaaawatatatatataaacacatatatgtgtgtatacataaatatatttgtatatgtgtatatacagttatattttatatgtctatattttatatatgtatatat

SEQ ID NO: 120922 - DNA, 201 bp, Homo sapiens
acgggtaagttatttgaaaatgttttacaaatgttgttttacgattgtgttaacatatgtgtgaatatttcatctaatactgtgagtcatcaataacctgkacatctataaagtaattttaacttagtcgtaataactgtggtatacatatatatcaatataacaatgacgcttatgactgatgattttctctgaatgcag

SEQ ID NO: 120923 - DNA, 201 bp, Homo sapiens
ctagacagtttgggggatattaagatgaagaatctctgcttttaatgacatcataatcatacaaaaggaaaaaatatatatatataaacacatatatgtgkgtatacataaatatatttgtatatgtgtatatacagttatattttatatgtctatattttatatatgtatatatataatataaacatatatacattttgt

SEQ ID NO: 120924 - DNA, 201 bp, Homo sapiens
tgaattcatgctatcaagcataggacacaccattgctctttttggaagttaattaccatcccctaagtcactttctcttgtttcttaaagatttcactccrggatcactgcttctctctcatcactcttctgtcataattattgatgatgtcaaaattcatataaaatattgacccatagccctgctcatcactttctgga

SEQ ID NO: 120925 - DNA, 201 bp, Homo sapiens
ttcacaaggtcccctacttgtctgcatctgtgtccatatactcagtctttctcctgtggctgcatatgaactgtcctagtccctgataacagccaaccctytcacttggacactacatgacctctccctttgcctctcaagaacatgggttgaggaattctcccttctgcatcatcattttttctcttttagcagctaaac

SEQ ID NO: 120926 - DNA, 201 bp, Homo sapiens
agacacactgagtttgaaatatgtggcagtcctccaggtcaatacacccattggcagtattaaatatggatctggagctcaggagagaaattctggatttscagatttgggtaatgttagtatttagaagatagtcaaaattataagagtgaatgagattcactatggaatgtgcaaagtaagatgacaacctaaggacag

SEQ ID NO: 120927 - DNA, 201 bp, Homo sapiens
acccattggcagtattaaatatggatctggagctcaggagagaaattctggatttccagatttgggtaatgttagtatttagaagatagtcaaaattatargagtgaatgagattcactatggaatgtgcaaagtaagatgacaacctaaggacagcaccctggggactatcaacacttaaataagaggccattgaagaga

SEQ ID NO: 120928 - DNA, 201 bp, Homo sapiens
tgtgatttcagtcctgggtaagtggacaagtaatagctaacaacaacaaaggtgtagtaggtttaataaagaaaggtaatgatgatcttttgtactgccaratttgaggaccgagaattcctttcaaattttgttaaatacttttaaagatataatatatgcgtgccatgtcatattttgcgacttgatatttgttatcta

SEQ ID NO: 120929 - DNA, 201 bp, Homo sapiens
tagtgaaatgagaatgcacccctggagcagaattcctcaatgactagcaaagcagcccagccatttctctggttaatggatttaacaccatcaattactgktgtcatatttgctttctaccagactattgagtgtcgtggttctatggagattagagtcactttcataggtcaagaaacaaacaacatcccctagaagtgg

SEQ ID NO: 120930 - DNA, 201 bp, Homo sapiens
ttaaatttataagatcaaacccagtgaccttgtggaagtgtagaattctatggactcttgaaagacctgggctcaaatccttcctctgctactaagtaacmctgaggaagtcaccttacctctataaaatcagaattcaaatagctataaaagacaagtgacatgaaccagtagtcaaagtgaagccaattgagtggggct

SEQ ID NO: 120931 - DNA, 201 bp, Homo sapiens
atcatcacatgtcaatttatcttgttaaattgtggagtgtagattactgagtgctaaaaagaatttagttcaaattaagattgactcccagttatcacacrcctcttgagattaatagattgtcaatattattattaatgataccaatcatttctttgtaaataaataaattatttatttattttatttgtaaaactttta

SEQ ID NO: 120932 - DNA, 201 bp, Homo sapiens
cagaagagaggccattgaaacccacaaagcatcttatatttatatttttcaaggcaattaattatgctgatggcaggagacctcttatagctctcatctgktatgtataattacctaaatgaattaggctacaatttgaggcagttttcctaggaccataaagctagcagtaaaaagaatgaaaatgtctgtttatgcagg

SEQ ID NO: 120933 - DNA, 201 bp, Homo sapiens
ctactcagaaaattagccttaagtctcagtctccaatttatttgacttttcagcagctctgactctttcatcttagtctcataggttctatctcatcttcyagacctgcaaacaaaataatttagagctcagtacttgaatttactatctctttctaaactctttttcttggtgattgtaagagtcagggttctctagagg

SEQ ID NO: 120934 - DNA, 201 bp, Homo sapiens
gtgtctatagctctgtagtgtgactataacaaaccacaatttattgtatattttcaaatagctagaagagcagaatttgatgttcccaacataaagaaatkataaatgtttaaggagatggatgtgctcattaccctgacttgagtattacacattgcatacatgtatgaaaattttcacactgtattccataaaaatgtg

SEQ ID NO: 120935 - DNA, 201 bp, Homo sapiens
taatgataatcatcttgccttgtttaaacacaatcttggtaaccataaaaaatccaaagacactccaaagaaaatctgcctccaaataagagaagaaactrttagaatttattgctatcatagctcattatctttatccccatcaaaatgaacaaccctttgctgaataattttcatgtaatttacccttcctgtagtgct

SEQ ID NO: 120936 - DNA, 201 bp, Homo sapiens
tttgatgttcccaacataaagaaattataaatgtttaaggagatggatgtgctcattaccctgacttgagtattacacattgcatacatgtatgaaaattktcacactgtattccataaaaatgtgcaattattatgtgtcaaaataataagaaaagattattaaaaactgctcatctggagtcttccccatcttcctttg

SEQ ID NO: 120937 - DNA, 201 bp, Homo sapiens
ctctgtctctactaaaaactacaaatattagctgggtgtggtggcacatgcctgtaatcccagctacttgggaggctgaggcagggagaatggcttgaacytgggagtccacctcccactgcactccaacctgggcaacaaaatgagactctgtcaagaaaaaaaaaaagtctaaaaaaggcaattatgaggttcttcagg

SEQ ID NO: 120938 - DNA, 201 bp, Homo sapiens
aatttagacgttggaaattttgagtatttaagattatctagtatttacggtattctaaaatattaggtaattttacaaccagcatatgtttcatgcattgwtcgaaaactaaaacactgtatctgtgaacacagtgatgcagtgtttgtaattatatccttctagggttatttatgtccaaatgaatttattgctactcaa

SEQ ID NO: 120939 - DNA, 201 bp, Homo sapiens
tgggaatgatctatttgactgtatgcaacgatagtattatttatatcatccttttactatgtttcttttttttctttttttatagcaacatcttttttttwaaaaaaaattgagttaattttatttacattacctcagcaaacatctctataaatgagtttccaggacaacatttacaatatagttataccatatgcaaat

SEQ ID NO: 120940 - DNA, 201 bp, Homo sapiens
gatgcagtgtttgtaattatatccttctagggttatttatgtccaaatgaatttattgctactcaaggtccactaccaggaacagttggagatttttggaraatggtgtgggaaaccagagcaaaaacattagtaatgctaacacagtgttttgaaaaaggacgggtaagttatttgaaaatgttttacaaatgttgtttt

SEQ ID NO: 120941 - DNA, 201 bp, Homo sapiens
tatttttcaaggcaattaattatgctgatggcaggagacctcttatagctctcatctgttatgtataattacctaaatgaattaggctacaatttgaggcrgttttcctaggaccataaagctagcagtaaaaagaatgaaaatgtctgtttatgcagggtatgtgtatgattccttgataccttagttgttgcagaaact

SEQ ID NO: 120942 - DNA, 201 bp, Homo sapiens
tctttggagatatagtgattacaaagctaatggaggatgttcaaatagattggactatcagggatctgaaaattgaaagggtaaaaaaaaaagggggggaygagagaacatgatataaaatatgattgatctaaatgtctaaaataaaattaatttctagaactatccctttcaaggatacctgtatattcaacaatgctt

SEQ ID NO: 120943 - DNA, 201 bp, Homo sapiens
gctgagatttcaggcatgagctaccatcccacgcatattttcttattgtctagaatagttcccagtaccagtagatactctataaatattccctgaatgasagaaatttgattcattaagttctagtgggtaggacaaaacagattgttttccagtgcaggtgatgataaggatgacgatactataacaaagatagcaaaa

SEQ ID NO: 120944 - DNA, 201 bp, Homo sapiens
ttttgatagagatgaggtctcactatattgcccaagctggtcttaaactcttgggctcaagtgatcctcctgccgtggcctcccacagtgctgagatttcrggcatgagctaccatcccacgcatattttcttattgtctagaatagttcccagtaccagtagatactctataaatattccctgaatgagagaaatttgat

SEQ ID NO: 120945 - DNA, 201 bp, Homo sapiens
attgacatggctaggtcccctacctacatatggaatttagtatcttctttttctttttttttttattattatactttaagttttagggtacatgtgcacawtgtgcaggttagttacatatgtatacatgtgccatgctggtgcgctgcacccactaactcgtcatctagcattaggtatatctcccaatgctatccctcc

SEQ ID NO: 120946 - DNA, 201 bp, Homo sapiens
tggagtgatattgtaaatactttaaagattttgattgagtgagaggtgtgagctatattttcttctttcctgtatgatatacatacattgtttccaatctmatttctattaaataactataggagagcccacagccttgttattttacatatcactatttagatatttgttatttatttatttgtgttggcctgaagtaaa

SEQ ID NO: 120947 - DNA, 201 bp, Homo sapiens
cagtaatgggattgctgggtcaaatggtatttctagttctagatccttgaggaatcaccacactgtcttccacaatggttgaactaatttacactcctacraacagtataaaagtgttcctgtttctccacatcctctccagcatctgttgtttcctgactttttaataattgccattctaactggcttgagatggtatct

SEQ ID NO: 120948 - DNA, 201 bp, Homo sapiens
gtttagatcagttttcaatattttatcctttgcactttcaatattgtcaaatatcagcaagagttctcttggtgtgaaatttttgttttgctgttttttayttccttcaagacatcatccttcattgaattcatcagaaccacttgctttaatttctgtccatatttgtcttcagtaagttgtcttggctgcatatgtaaa

SEQ ID NO: 120949 - DNA, 201 bp, Homo sapiens
ttgaactcctgagctcaggcaatgtgcccacctcggcctcccaaagtgctgggattacagacatgagccactgcacctggcctttttttttttttttttttctttttggtatggatgtaccacagttcccttaaccattcactagttgaaggacatgtgagttgtgtccattttgtggctattagaaataaagcttctata

SEQ ID NO: 120950 - DNA, 201 bp, Homo sapiens
taagtgcagggactttgcattgttcactgctatgatccaggtgcccagaacagtgtttgacactcaaaatatatttaacaattcaatggctgtgtggcatrtatatatatatacatgttactatactcagttttatgttataggctcacaatttcttaggtcaaatcataggaacttgccaatgtttgaatgtttcttact

SEQ ID NO: 120951 - DNA, 201 bp, Homo sapiens
gatgaaaaattattatctaatgggtacagaccttctatttgggatgatgaaaagttctggaaatatactgtgttgatatttgcacaacattgagaatatayttaatgccactgaattgtacatgtaaaatggtcaaaatggtagattctctgttattcatctttcaccacaataaaaagatttttttaaagtaacaataac

SEQ ID NO: 120952 - DNA, 201 bp, Homo sapiens
ccatgtcaaacaaaaagagtagattttttttttttaagaatgactgtcatggcagctacagaaaagtttcagatcatgaaaaaggtgggcaaggaatgtayagattgtttactattggttatttataattcagggtctactttatttgaccttcactcttcattatttatttttccacttctgtgtttatttacatattgc

SEQ ID NO: 120953 - DNA, 201 bp, Homo sapiens
aatgaaactgaaaagttggatttctaaataatcctacattctcaagtctttccacttgaatatcattctttccaccctatttcctccacttcttacccccktttaagttctatggccatattttatttccaggagacacaggggaaatggtctttctaccactgtgattaggagagaaagatgaaaagatttatatttttc

SEQ ID NO: 120954 - DNA, 201 bp, Homo sapiens
ggttatttataattcagggtctactttatttgaccttcactcttcattatttatttttccacttctgtgtttatttacatattgcattatttgtaaaaggktttaaaagtgaaataatatttcagataatttttattttgttacacacagagaattagtatatattacccatgataatagcaaaattggaaatattagttt

SEQ ID NO: 120955 - DNA, 201 bp, Homo sapiens
tttactatttatgcaatatttttatgttaataaagtcactaaaacattagacaataagactggaaaaaataacaaatataattagctgcatgtacatatgmgtggatcctgtcatttggtgaagctctaaaactcttcatctgttttgaggtgtttgaagatctaaatctgttcaaagtcaatcagagactgatggtagat

SEQ ID NO: 120956 - DNA, 201 bp, Homo sapiens
aaaaatctacccagctaacatacgctctctctacttgattcttaggcatgtcctttttattccaacctgctaaatttttcatgcaaaattgagctcataayttttctgagtcctgtatgttttcccatgtccaaaagataaatgataaaagaagaatctctaatcaataattaaaatattaattttaggaagttaccaact

SEQ ID NO: 120957 - DNA, 201 bp, Homo sapiens
attggcaagatcagcagacacagacacgcacagtaagacacagacctgtatcactgagactgactcaccttgtggattgcctttaactactttaactgtamaacgattaccttcccatgagagtcacatcacttataattaaataacccaacagaattttcgtaagctaaaaatgctatttgctaaataagcttatttttt

SEQ ID NO: 120958 - DNA, 201 bp, Homo sapiens
catgagagtcacatcacttataattaaataacccaacagaattttcgtaagctaaaaatgctatttgctaaataagcttattttttactatcttctttccrcatttaagtcacggaagttttgtttcttatgccgactaaatcagaaaagaatagtaaaacaacattaatcaatgtcactaatattcttacttgacagaaa

SEQ ID NO: 120959 - DNA, 201 bp, Homo sapiens
ggtatgaagatacacgtgtgtgtgtgtgtgtgtgtgtgtgtgtgtgtgtgtgtgtttaacttcgaagcatactagagaagattaatgtaaactttcttaartagacaaagacccatggaattcttcctcagcagcattttctatgatgagaatgagtctaaagaaagaggttcctctttggatttctttgttgtctcatga

SEQ ID NO: 120960 - DNA, 201 bp, Homo sapiens
atcaaagaacattcctcttttattggaaatatcttggatggttaggttgagatcagaagagattatgggttgactaaagcactcatggtaagctgccctcygacaccctcactattcatgaaaatagtgagaatagtagttagaggagaataaataggaatttcaagatacagcaagagaaaacacatagtggagaaagga

SEQ ID NO: 120961 - DNA, 201 bp, Homo sapiens
ggtggttgttacttttgctggattctttttaattattttaatctctttgttaaatgtatctgatagaattaatgtaatcactaattctatcattaattaatcattaacaaatcatttattattaataaatctaattaattctatgaattctgaatttcttctctgtgttatcttgaattttcttgagtttcctcaaaatag

SEQ ID NO: 120962 - DNA, 201 bp, Homo sapiens
tggtggttgttacttttgctggattctttttaattattttaatctctttgttaaatgtatctgatagaattaatgtaatcactaattctatcattaattaatcattaacaaatcatttattattaataaatctaattaattctatgaattctgaatttcttctctgtgttatcttgaattttcttgagtttcctcaaaata

SEQ ID NO: 120963 - DNA, 201 bp, Homo sapiens
tggttctaagcacagcctagtactagaagttgcctagaaattgcactcctggtatcctggactgcccttcaagtttacctaggaccccagaacacttcagyctgtggtggcgaggcttgctgagaaactcaagttctaactgctgggatgggcaattttcctctggctagggctggtccaaatgctccctccatgtgaagg

SEQ ID NO: 120964 - DNA, 201 bp, Homo sapiens
atggtggttgttacttttgctggattctttttaattattttaatctctttgttaaatgtatctgatagaattaatgtaatcactaattctatcattaattaatcattaacaaatcatttattattaataaatctaattaattctatgaattctgaatttcttctctgtgttatcttgaattttcttgagtttcctcaaaat

SEQ ID NO: 120965 - DNA, 201 bp, Homo sapiens
aatggtggttgttacttttgctggattctttttaattattttaatctctttgttaaatgtatctgatagaattaatgtaatcactaattctatcattaattaatcattaacaaatcatttattattaataaatctaattaattctatgaattctgaatttcttctctgtgttatcttgaattttcttgagtttcctcaaaa

SEQ ID NO: 120966 - DNA, 201 bp, Homo sapiens
gctggagtgcagtggcacaatcgcggctcactgcaagctccacctcccaggttcacaccattctcctacctcagcctcctgagtagctgggactacaggcrcccgccaccacgcccggctaattttttttctacttttagtagagacggggtttcactgtgttagccaggatggtctcgatcttctgacctcatgatccac

SEQ ID NO: 120967 - DNA, 201 bp, Homo sapiens
ttactttgcagatgcagctgccactgggagccctgtgccttagccatggtcaacccaccatgttctttgacatcgccatcaacggtaagcctttgggccawgtctgctttgagttgcttgcagacaagtttctgaagacagcagaaaactttcatgctctgagcactggagagaaaggatttggttataatggttcttgcc

SEQ ID NO: 120968 - DNA, 201 bp, Homo sapiens
tttaagactttgttttttttactttgcagatgcagctgccactgggagccctgtgccttagccatggtcaacccaccatgttctttgacatcgccatcaayggtaagcctttgggccatgtctgctttgagttgcttgcagacaagtttctgaagacagcagaaaactttcatgctctgagcactggagagaaaggatttg

SEQ ID NO: 120969 - DNA, 201 bp, Homo sapiens
ttgtgtttccattattatttgtttcaagaaaatgttcaatttccttctcaatttcttcattggcccactgatcaatttaggagcatagtttttaattttcmtgtgtttgtatagtttccaaaattcttgattgatttttagttttattccattgtgatcagggaaatacttgatatttcaatttttcgaatgttttaagac

SEQ ID NO: 120970 - DNA, 201 bp, Homo sapiens
gttactgggaacgactgcatagactatataaggaagtaaagaatcacctggactatcatataactgtgcagaacatgatgcttcgaaagaaacaagaacayatgataaattgggtggagaagcacgtggtgcagagcatctctgcacagcaggaaaaggagacaattgccaagtgcattgccaacctaaagctgctggcaa

SEQ ID NO: 120971 - DNA, 201 bp, Homo sapiens
tgatttggagaagtcacagcaggcactcgttcagaagcaccattacctttttgatgtgcagaaaaacaacattgctatggctttggaggttactgggaacractgcatagactatataaggaagtaaagaatcacctggactatcatataactgtgcagaacatgatgcttcgaaagaaacaagaacacatgataaattgg

SEQ ID NO: 120972 - DNA, 201 bp, Homo sapiens
cccaactagaagaggtgaagcaggcttctatcagacaaatccaggatgcaactgatttggagaagtcacagcaggcactcgttcagaagcaccattacctktttgatgtgcagaaaaacaacattgctatggctttggaggttactgggaacgactgcatagactatataaggaagtaaagaatcacctggactatcatat

SEQ ID NO: 120973 - DNA, 201 bp, Homo sapiens
atgtgttcttaggctctacacacgagaggatcaagaatagattataaaccgggcgcggtggctcacgcttgtaatccccagcactttgggaggccgaggcrggcggatcacgaggtcaggagatcgagaccatactggctaacacggtgaaaccccgtctctactaaaaatacaaaaaattagccgggcgtggtagcgggc

SEQ ID NO: 120974 - DNA, 201 bp, Homo sapiens
gcacatatgaggctctctaagctagtacttaattgctattcatatgtatagtaataacttcggcactttcaaacataggtactttttgagacccaaaatgraatgggcagtctcaagagatagtgatctccctatttctagaagtgaccaaactgatattagaggaatgctccatcaagaaagtacacatcacattcatta

SEQ ID NO: 120975 - DNA, 201 bp, Homo sapiens
aagatttctgaaagaggagtattatccaaattaccagcaaaagaaaatcttatcttttcagatatgatagatggctgacatagatcagtagaggtttttargagttctaagaagttaaacatggaagttttattttagggcctggcatcctcacttacccatactgggactcattttacccttaacctctctccagcatgg

SEQ ID NO: 120976 - DNA, 201 bp, Homo sapiens
gttatattttaattaatttcatatctttgttatcttttgctatatggatagatttttagcttagattctgtttagatgctttttggtttgattctggtttkggcagcttgagaaggctgtagaattttttcgtgttctagttagattttaaatttcctagctcctcagtagagttttctgcctctcccttggcccaagtat

SEQ ID NO: 120977 - DNA, 201 bp, Homo sapiens
ttgggccagtttatagccttttgggcctcagtcttcttatctgtgagaaagtgtaatgtcacctcccatgtcactgtgagcagtacataagtggatctgtrtaaatagcttggagcatcatgtagcatgtggaaatgctcagtaaatgaaccaggtctctcaaactctagggcccatgtttttccccttcaccactaagaa

SEQ ID NO: 120978 - DNA, 201 bp, Homo sapiens
ttatgcttaggtctattatctattttgagtttaattttgtgaatggtgtgaggaaggtgtctaacttcactttttttgcatgtgaatatacagttatcacmgaaccagatgttgaaaaaattaccccctccccgaccctcaccattggattgtcttagcactctcataaaaaattgatcatagatatatattcttattttg

SEQ ID NO: 120979 - DNA, 201 bp, Homo sapiens
ggagcatcatgtagcatgtggaaatgctcagtaaatgaaccaggtctctcaaactctagggcccatgtttttccccttcaccactaagaaacctcatgagmagcatgggctcaggagtagcaggaggcttctggcacagaatgagaagatgggaaagcgtgctgcttggccacaatggaaggaggagaaaggtcaaggagc

SEQ ID NO: 120980 - DNA, 201 bp, Homo sapiens
tgcccctccttgaatcctggaaggatcatctattgcctttcaactcaaagtgtgggacgtgtactagcagcatgggcatcaccagggagcttgttggacaygtggagtctcagactccaccttagacccactgactcaatctgaatcttgacaaggttcctgtatatcatgcatgttactctttgagaagcaccagcctgt

SEQ ID NO: 120981 - DNA, 201 bp, Homo sapiens
taacacggataagtcatctgctttttcaatggattttcctgaatagtgggatcacaaaagaaatttatgtgtttttctaagtttctttttcttttaatgtrgatttacaagtgattaatttaaaaatttgctctctgattagcaggtaacatttataatctggacctgtacctaagatagcttagcaaatgaacacaaatg

SEQ ID NO: 120982 - DNA, 201 bp, Homo sapiens
ctgattagcaggtaacatttataatctggacctgtacctaagatagcttagcaaatgaacacaaatggcttactaggtctttgcttttgaaaacgtatggmcatctaaaagtagtaaaggcaatttaataaatacagacaatctgctaagcagccaaggaaaaaaggtgcctgaattatatatgtctgcatgagtggacaa

SEQ ID NO: 120983 - DNA, 201 bp, Homo sapiens
tcttcaaaattcactgtccttctctatcccttcaggattgattgcaggggtgatccaggatggtgtctgtctaaagccttaacttctctcccttcataaarggaagattatcccttttttaattccttgttttcattgatgtcagatgagaggcattcagaaggagtgttagcattcactgcactttccctgaaagtggct

SEQ ID NO: 120984 - DNA, 201 bp, Homo sapiens
gatccaggatggtgtctgtctaaagccttaacttctctcccttcataaagggaagattatcccttttttaattccttgttttcattgatgtcagatgagargcattcagaaggagtgttagcattcactgcactttccctgaaagtggctcaacttttgattgagatgttcttgaagattctgttagtggcatcttggcat

SEQ ID NO: 120985 - DNA, 201 bp, Homo sapiens
ccctcctccttcttttctccctcacactcctgtccacacttccagtcaagtgctttccagagcctgtcattcagtttcttttctctctcccaaatccatcrtcttttcccaatttgtaggattttttctttttccctcttgttcagcatttcataaagttagtcctgccaggttttaataggggttccacccccctcaccg

SEQ ID NO: 120986 - DNA, 201 bp, Homo sapiens
agctcctggattcattgatttttttgaagggttttttgtgtctctatctccttcagttcttctctgatcttagctatttcttgccttctgctagcttttgmatgtgtttgctctagcttctgtagttcttttaattgtgatgttagggtgtccattttagatctttcctgctttctcttgtggacatttagtactataaat

SEQ ID NO: 120987 - DNA, 201 bp, Homo sapiens
gctaatgtgtctttcccaaacaataatctttagttcaaaattaagtaataaagaaagcttctcataatctcagagactttgcaaagacctggtgataattmcctttcttttctgaaagataattttagcagagtaacctcatcatttactcaggcatttgtggaatgtatatagatgtacactcaagtattcaagatatat

SEQ ID NO: 120988 - DNA, 201 bp, Homo sapiens
aggtttatgatgcgggtgtgaaataacttacttgggatcaatgaatcattgaagaattctgttttttatattctccccacccaggcaagagtgcagtggcrcaatctttgcttactgcaacatctgtctcttgggttcaagggattctcctgcctcagcctcccaggtagctgggactacagatgcccgccaccacgccgg

SEQ ID NO: 120989 - DNA, 201 bp, Homo sapiens
gagggcaaaggagggattactttcttatcacagggaaattaaatgcctgagacagcaacatagtgatttttttaaaacaaatttttaggaaaattgaactyaccctgtttactttcatagaaggcttttgggctgtgggaaggaacctatttttgtacttaatgaaatggatcttggcagtaaagggtttaaaactaactt

SEQ ID NO: 120990 - DNA, 201 bp, Homo sapiens
agtttcaccgtgttagccaggatggtctcgatctcatgacctcgtgatccgcccatcttggcctcccaaagtgctaggattacaggcttgagccacctcgmctggcccaaaatgcttattaatcttttaagtgatcaatatagttgttattatgatgacagtcatttcagctcttgcactgaggcagttcctgtgtgtgaa

SEQ ID NO: 120991 - DNA, 201 bp, Homo sapiens
aaaaatcagtttctaaagactagatttctcaacaacttatcacattatttccaacaacattcaaattcaaaagctgatgcccaatgctagcaaagtatgartagatagaaagtaaacatcttcctttgcattagataagatgcccagcaatggaaatccctggatttaaagaccttgttaagatgtattatgtcagatgaa

SEQ ID NO: 120992 - DNA, 201 bp, Homo sapiens
tagacttccagcctgagagatggaattcagggtttggtggcaatgtcatccaattcatgaaggatatttttcttgattgacctaatgttgcagtaaaaaaycagagcaagggtcaactggccaaaaataaaagtcaaaactcagcttgggaagttataggctacactgcatttaacttgcaactggataattgcaagaaca

SEQ ID NO: 120993 - DNA, 201 bp, Homo sapiens
tgcatttaacttgcaactggataattgcaagaacacattcaaagcgtcactgcaaagcccttgttgtttagccctagctgcttcaatttctagataatggyccattattaatgtggaagtattagaaagttttccagggaaaaatatcaacctggaaccattcccctttgcatgcattatacacttcactgccatctggtt

SEQ ID NO: 120994 - DNA, 201 bp, Homo sapiens
atggagatttcttcaaaaactatacatagaactgccatatgatccagcaatcctactactgggtagttctcaaaaagaaagcaaatcagtatatcaaaagkatacctgcatcctatgtttattgcaccacaatgcacaatagcaatgacatggattcaatctaagtgtcatcagtggctgaatggataaagaaaacgttac

SEQ ID NO: 120995 - DNA, 201 bp, Homo sapiens
tcttcaaaaactatacatagaactgccatatgatccagcaatcctactactgggtagttctcaaaaagaaagcaaatcagtatatcaaaagtatacctgcmtcctatgtttattgcaccacaatgcacaatagcaatgacatggattcaatctaagtgtcatcagtggctgaatggataaagaaaacgttacacacacaca

SEQ ID NO: 120996 - DNA, 201 bp, Homo sapiens
tggctgaatggataaagaaaacgttacacacacacacagacacacacgcacacacacacacgcacacacagaggaatattattcagccttaaaaaagaatsagatcctgccatttgcagcatcatgaatggaactgggggtgattctgttaagtgaaataagccaggcatagaatgacaaatagcacatgttcctacccat

SEQ ID NO: 120997 - DNA, 201 bp, Homo sapiens
ttatgtcatggaagtagagaatagaatgatagttaccagagttttggaagggtgtggggctggggatgaagagaggctggttaatgggtacaaatacaccrttagaaggaataagttctaatgtttgatagcagagtagggtgaatatagttaaaaataaggtattgtattttgcaaaatagctagaagcgaggacatgaa

SEQ ID NO: 120998 - DNA, 201 bp, Homo sapiens
cctccctagagccagagctcacctggttgattcctcctaggagggacatggtggtggaaagagctctgctgggaagaatggggactcagctcttctgcatrctgcagtgtgactcaggcagacactgcacatttctgggctgcgtttccttctcctcaggatgagaaagcaaacctagactgtctctaatatcttacagca

SEQ ID NO: 120999 - DNA, 201 bp, Homo sapiens
caaaaatacttaaaaaagaaaaaaagtcccctctgctttaaccctataaggaaagtaactttgaaatgaccaattgggccaggcatggtgactcatgcctstagttccagcattttggaagaccaaggtgggaggattgcatgagtccaggagttcgagaccagcctgggcaacatggcaaaaccttgtctctacaaaaaa

SEQ ID NO: 121000 - DNA, 201 bp, Homo sapiens
cttaagatcctgctggcggtagtggtttctcagactttaaacttgtttttaatgaccttgacagttttgaggagtactgctcaggagtttagtagaaggtkcctcttttggaatttgtctaaggttttctaataattagactggggttatgggtttttgagaggaagaaggcagagagaaaatgccattcttatcacatca

SEQ ID NO: 121001 - DNA, 201 bp, Homo sapiens
aaagcattcgaatgcaaaaagtgtaaattttgtctgtgtgtgtcagtttgcaatttcctaaactcacttaagctcaaattgctaataattaaatgagactragttcgaagatagattaaaggacagctgactgaggatggcagtaattcctaaaggacccaaaagttcatcagaatatcacatttaggaaactgctggtca

SEQ ID NO: 121002 - DNA, 201 bp, Homo sapiens
actaagctgttccaagaggctcttaactctccctaatacgtatggcttaaaataaaacgtggtgtatacaaatgaaaaaaggaagtttgtttaaaaaggtycggggctttgaaaagctatgctttatgttttcaatttaggagtgtataaggcctttggttattgctgcaggttgaagaatgtgctttaacaaaagtatac

SEQ ID NO: 121003 - DNA, 201 bp, Homo sapiens
gctctcagcatctgtcatgcatttatttagttgttcaattccagtatacatatgtagcagtatcaaaattgttaacttatacccccatggaaaatagcctygtcaactagagtacagtgcttgtgtacggtttattttgccttagttttacagactgcatacatttccaaagccacttaaatagcacctttttcttccatc

SEQ ID NO: 121004 - DNA, 201 bp, Homo sapiens
gaaccattttaagaggaaatgacaggatcctattaacatttaaaaaatatagtggttgaattatgtccctccataatttttatgttgaagtatcaatcctkttacctcaggatgtgaacttatttggaaattaggttattgcagatgtaagatgtagtaggatgagtaagattagtaagatgaggtcatactgtagcagag

SEQ ID NO: 121005 - DNA, 201 bp, Homo sapiens
gtaataatataggatatgctattatgtctccactttccacttgaggactctgaccttagaactcatgattgcccacggtttcttggcttgtaattggtgaygctagcgtcaacccaagtctctgatgttaaaacaggaactctgaaactccccactatgctgcctattttccaatgaaatgggtccaggaagccatctgat

SEQ ID NO: 121006 - DNA, 201 bp, Homo sapiens
aacaggaactctgaaactccccactatgctgcctattttccaatgaaatgggtccaggaagccatctgataaatattttcactaggttgtcaaaaattaayaaacatgcctctttcattaccttcggaggccatctgtggggtggttgtgagtcagcctctgcagccatgctgccagaatttgaatcctacctccttcact

SEQ ID NO: 121007 - DNA, 201 bp, Homo sapiens
attttccaatgaaatgggtccaggaagccatctgataaatattttcactaggttgtcaaaaattaataaacatgcctctttcattaccttcggaggccatytgtggggtggttgtgagtcagcctctgcagccatgctgccagaatttgaatcctacctccttcacttcttacccatgtgatttgaacaggtggttttact

SEQ ID NO: 121008 - DNA, 201 bp, Homo sapiens
tcattaaaacagtgattcagtatgaaagtgctttgcaaatgatgagatgtcacacaaatttagccactgtttggtcattttcactttatctttgaaagctygtgtttatagctaaacatttggttagaagattaaagtctatgaaaagatttggatccagtaggtcacagcttactagaaacagaacagagacttaaacca

SEQ ID NO: 121009 - DNA, 201 bp, Homo sapiens
tctggctttctttatttctgttgataagttagataaaaatccaatttttgtttctttttcacccttatgctgatttttagtttttttttttttttctttgkggttttagcagttttattgtaattggcctgggtgaagttttctttttacatttcctgcttggggtttctaggattctttgtcttggctccttctgaggcc

SEQ ID NO: 121010 - DNA, 201 bp, Homo sapiens
aaaagatattttatttacttctggctttctttatttctgttgataagttagataaaaatccaatttttgtttctttttcacccttatgctgatttttagtktttttttttttttctttgtggttttagcagttttattgtaattggcctgggtgaagttttctttttacatttcctgcttggggtttctaggattctttgt

SEQ ID NO: 121011 - DNA, 201 bp, Homo sapiens
taatagagacagggtttcgccatgttggccaggctagtcccgaacccctgacctcaggtgatccgcccgcctcggcctcccaaagtgctaggattacaagyctgagctaccgcacccgaccaacctaattttaatataacaaattatatctacaatggccctacttctaaataaggtcagactctgaggtattggggttta

SEQ ID NO: 121012 - DNA, 201 bp, Homo sapiens
gcctgtgtcccgtttccccttttaacaatggtaccagtcatgttggaacagggacccatcctactccagtgtgacctcattttgttttttgtttgtttgtytgtttgtttttagacagagtcccactctgttgcccaggctggagtgcaaggatgtgatctcggctcactgcaacctctgcctcccaggctgaagcgactc

SEQ ID NO: 121013 - DNA, 201 bp, Homo sapiens
gtatgcctgtgtcccgtttccccttttaacaatggtaccagtcatgttggaacagggacccatcctactccagtgtgacctcattttgttttttgtttgtktgtttgtttgtttttagacagagtcccactctgttgcccaggctggagtgcaaggatgtgatctcggctcactgcaacctctgcctcccaggctgaagcg

SEQ ID NO: 121014 - DNA, 201 bp, Homo sapiens
gccagcatgatttatttcataatgctgagttgcagcacccttcatggctagagatttttgctgtggagataagttcttagaactatctccatttccagaawagagagggtttctctcgtctgttgcccagaaaagaagtcagtttacgtatgcatcttccctgggtcaggctaagaagtagccccagcactggcatgctag

SEQ ID NO: 121015 - DNA, 201 bp, Homo sapiens
atcaggattgtaaaccacaggtaaagatctgagaggaggcaaataacatttactgattacctaccatgcatctaaattctgcagtggtgaatttatatgtyttattgtttaatccccatggtagccttatggagcaaatactccaattttcaggtaataaatatgagtctaagaaaggttgtcttgccatagtttataaat

SEQ ID NO: 121016 - DNA, 201 bp, Homo sapiens
aaatacttaaaaaagaaaaaaagtcccctctgctttaaccctataaggaaagtaactttgaaatgaccaattgggccaggcatggtgactcatgcctgtasttccagcattttggaagaccaaggtgggaggattgcatgagtccaggagttcgagaccagcctgggcaacatggcaaaaccttgtctctacaaaaaatat

SEQ ID NO: 121017 - DNA, 201 bp, Homo sapiens
ttctttgttatttcttacaacccttttaaatgtgtaaaaactattcctagctcatacaaaaacaggctattggtgggatttgcctcatagactgtagtttrctgacccctgctctagtataaatttgtcttgtttattactagagtgcttatgccagtaagtattttttaaaagagagagaaaatgcattaagtaaataac

SEQ ID NO: 121018 - DNA, 201 bp, Homo sapiens
ttgtgcaatatttgcaagaagagcaaaaaataaaagatagtgtctctttaaaagggagacagtgtagtttaaagaggctacagtgtagtgtagcggcttaygctctgtggtcagcaagaactgagtttaggtccttgtcccatcacttactaactgtgagaccctggatacaatatcaactcctaaaaacctcagtcactt

SEQ ID NO: 121019 - DNA, 201 bp, Homo sapiens
tgggaggctgaggtggaaggatcacttgagcccaggaggtagaggctgcagtgagtcgagatggggccactgcactcctacttgggcaacagagggagackctgtctcaaggaaaataaataaataaatgaccaatccacttcttattccttgtttcttctttctacagccctttttttcccctataaaagcctacctctg

SEQ ID NO: 121020 - DNA, 201 bp, Homo sapiens
tacttgggcaacagagggagacgctgtctcaaggaaaataaataaataaatgaccaatccacttcttattccttgtttcttctttctacagcccttttttycccctataaaagcctacctctgtctgcttagctcattggagcacctttctatttagtagatgggatgttgctcagtttatgaatcgctaataaaagccaa

SEQ ID NO: 121021 - DNA, 201 bp, Homo sapiens
ttgttatgagtagtaaatgagttcacgtggataagatgcttagaacaatgccagtttcattataagtactcggtaaaaattagctgttgtttttggtgcaygtgcgaagacagcaagttgagactacttttgaagcttaattatgaaaattggagagaaaaacgaggccagaggtagatacaggccaggaattaggtgaaa

SEQ ID NO: 121022 - DNA, 201 bp, Homo sapiens
ctacagccctttttttcccctataaaagcctacctctgtctgcttagctcattggagcacctttctatttagtagatgggatgttgctcagtttatgaatygctaataaaagccaattaggtctttgaaactaaatttgttgaaatttgcttttttgatgccactattgctctttatcaaaatgatcccatagatagtcta

SEQ ID NO: 121023 - DNA, 201 bp, Homo sapiens
ggagcacctttctatttagtagatgggatgttgctcagtttatgaatcgctaataaaagccaattaggtctttgaaactaaatttgttgaaatttgctttkttgatgccactattgctctttatcaaaatgatcccatagatagtctatagtcttttcttagtgttttctcccaaatctgttgggaagatactaagaaagt

SEQ ID NO: 121024 - DNA, 201 bp, Homo sapiens
gagtttcacacttgttgcccaggctggagtgcaatggcgatctcagcccactgcaacctccgcctccttggttcaagttgttctcctgcctcagcctcccragtaactgggattacaggcacgcaccaccaggcccagctaattgttgcattttttttttagcagagatggggtttcaccattttggccaggctgatctca

SEQ ID NO: 121025 - DNA, 201 bp, Homo sapiens
tttcccatgtatttgcattttcgttgctattgcatgttagatttcttctactgtggtctgttttttgtattgttttgttttgttttgtttttgctgatgtrctgttggcgattttctgtatccatgttgtagctggttaccatttttaattctcctattagttctaatagtttttctctggttgctgtgtttgcaaggaga

SEQ ID NO: 121026 - DNA, 201 bp, Homo sapiens
tgggtccaggaagccatctgataaatattttcactaggttgtcaaaaattaataaacatgcctctttcattaccttcggaggccatctgtggggtggttgkgagtcagcctctgcagccatgctgccagaatttgaatcctacctccttcacttcttacccatgtgatttgaacaggtggttttactttttttttctgtct

SEQ ID NO: 121027 - DNA, 201 bp, Homo sapiens
acaaacacttggggtctttattatgttgcatgggtcaatgtgtctgcccttgtgtccacaccatcttgttcctcttcatcaagggcattagctttcttggycctttgcatctctataaaaatgttaggatcagtttgtagagttccatggaagaaatcttgtggtatttggggattttgattgagattatcttgaacctat

SEQ ID NO: 121028 - DNA, 201 bp, Homo sapiens
acttcttacccatgtgatttgaacaggtggttttactttttttttctgtctttcctggcttactaaacaattcttcctttttaggaatatatgggaggagrgatctgtgcaatgcagttctacaccctggacatagcaaccgactgagtcaggccaattaacttctctagcctagcgatttgaaacccagagccggggccc

SEQ ID NO: 121029 - DNA, 201 bp, Homo sapiens
tttattatgttgcatgggtcaatgtgtctgcccttgtgtccacaccatcttgttcctcttcatcaagggcattagctttcttggccctttgcatctctatraaaatgttaggatcagtttgtagagttccatggaagaaatcttgtggtatttggggattttgattgagattatcttgaacctatagattcatgtgaggat

SEQ ID NO: 121030 - DNA, 201 bp, Homo sapiens
gggtggccccaagtctggatgcttagggatttattaattttttgagcaactccagtatcttaaaaagaattcatccttctcttccttttgttgttgttctycttttattcttatttttaaaatttaagcgaggtaaaatcagcccctcttggctacaggtactttaattactacaggagatcatagtagctacctcactgg

SEQ ID NO: 121031 - DNA, 201 bp, Homo sapiens
ttagcacagggaatgagggaattgtcagggaataagtacctggtaattagtagcttttactattatctaataatagttcttgatatttacttagtgctttstaatgtgaaccatacactcctgtgtgcttatctccttgacaattgggtggaaatggcatccacattttatggatgagcaaatggccatgctttggggttt

SEQ ID NO: 121032 - DNA, 201 bp, Homo sapiens
catccacattttatggatgagcaaatggccatgctttggggtttgcccagggtcacaaagctggcaagggactgagccaggatccccactcaggcccttcrtcatgtcatgtatccagggttctctccaatgtgccagggtcgtgtggtttcctgggggtgtgatggagagggaggcagtttccctttcccattttaggga

SEQ ID NO: 121033 - DNA, 201 bp, Homo sapiens
ggatccccactcaggcccttcatcatgtcatgtatccagggttctctccaatgtgccagggtcgtgtggtttcctgggggtgtgatggagagggaggcagyttccctttcccattttagggacaagagtggagatgggaaagtactttcctggggacagaggatggaggtgaaggtggtggatttctttagttatggggag

SEQ ID NO: 121034 - DNA, 201 bp, Homo sapiens
ttgttgttgttgtgtgtctgccaggttttggtatcagcatgatgctggcctcatagaatgagtaagggaggagtcactctacctcaacttttgggaattgkttcagaaggaatggtaccagctcatctatgtacatctggtggaattcagctgtgaatccatctggccctgggcttttattggttggtaggctatttgttg

SEQ ID NO: 121035 - DNA, 201 bp, Homo sapiens
gtctcctcccacattctcacgcctagaccttattcttcaggaatgtcttggtcattcttggccttttgcatttctacagaaattttataataatcttggaratttttaatatttttatgaaatttcattaaatttatagttttggggaagagttggtatctttgtaacattataatgttgagtctttctatctatatttct

SEQ ID NO: 121036 - DNA, 201 bp, Homo sapiens
aacactgtgttagggaagatgaaaggatagatgagacccattaaggtctgccctttaaaagcttgtaatatgttggagaaaccagacatgaaaacaactargtataacacaacataatgtctgaaagataaaaacaagtgttttcagaacacaataattcacagaatacctacacatgccataaactgtgctaagggtttt

SEQ ID NO: 121037 - DNA, 201 bp, Homo sapiens
atggcacaagaggaaccaggccctgagttctgctgctgtgcttcagggggggcctgcattagccatctctggctgttcccactcaagagtgcccccccccmccaaaaaatagttcacccagaacccatgctagtcctttcatgcctcagggactcaggatcctgtaacccacttaaacatcacttacctcatctcagggcc

SEQ ID NO: 121038 - DNA, 201 bp, Homo sapiens
attcttttattattattttggtgcttacactagagattatagtatgcatcttgactcaggtcttagaccactttaatggcatttatcactctcttgacttstgtgtcattgttatgtattttacttctatacctttcagatgcccaagacattattattattattgctttattcagtcataattcattttgattaatcata

SEQ ID NO: 121039 - DNA, 201 bp, Homo sapiens
acaaatgcattacaatccctgggctgctgaggactaattccagactagaaacacttctaataattctaatgactataatgacaaaaagtaactaatatttmctgagcagatagtacatgcaagacttactaaatgttaagtaagtgttaacttatttaatattcaagaaaaacacatggtaggtaataggtcattaatagt

SEQ ID NO: 121040 - DNA, 201 bp, Homo sapiens
ttaagatggtgattctccaggctaggaacccttccaagagattctatcacttacccaaagccgaaacacttgtccagtttagcaggaaatatctatatgawtttgaatttcttggtttcggccatttgtggctctgaattcactgttgccctgaggaagccatctctgacccaaacactccttgttaaaccactggcatag

SEQ ID NO: 121041 - DNA, 201 bp, Homo sapiens
ttaagaatgtttacaaatttgtgttgggccacattcaaagctgtcctgcgctgcgggttggacaagctatagagcttgtcttttaccttcagtgccaattwagtaaatatttatagggattctgaatttatttcaccatcttctaccccagacaatatccagtctagacaacttcctaatctggtggcctgatggggacca

SEQ ID NO: 121042 - DNA, 201 bp, Homo sapiens
agaatgtttacaaatttgtgttgggccacattcaaagctgtcctgcgctgcgggttggacaagctatagagcttgtcttttaccttcagtgccaatttagwaaatatttatagggattctgaatttatttcaccatcttctaccccagacaatatccagtctagacaacttcctaatctggtggcctgatggggaccactt

SEQ ID NO: 121043 - DNA, 201 bp, Homo sapiens
tctctataaaaatgttaggatcagtttgtagagttccatggaagaaatcttgtggtatttggggattttgattgagattatcttgaacctatagattcatktgaggataatttacctctttacaccattgaattttctattccatgtatatgttatgtctctccaaatatgtagatcctttttaatatttctcaataaaat

SEQ ID NO: 121044 - DNA, 201 bp, Homo sapiens
tagacttattcctaggtatttaatattttgaggcagtaatgaatggcatcttttcttaaatttttagctatattgaaatacaacatatttggattctgatytgtatctagcaatcctaactctaataaaaactataacaaattatatatgaatttttaataccatgatataatctgtagataattatatttttgtttcttc

SEQ ID NO: 121045 - DNA, 201 bp, Homo sapiens
aaacaaaattatgtgcaggtgccatcctcagaaattgtctgtcttatttggtcaggggtggactcccgccattgccatttttaaaagttctcctggtcatwgtaatgtatagccagttgaaaactatattcctagttgagtgacatgcaagtacactaataccatatagcaagaatcagttttcttaccttctttttgtga

SEQ ID NO: 121046 - DNA, 201 bp, Homo sapiens
cgccattgccatttttaaaagttctcctggtcattgtaatgtatagccagttgaaaactatattcctagttgagtgacatgcaagtacactaataccatayagcaagaatcagttttcttaccttctttttgtgacattcctgtgtggcattttagcagcacgtcctgagatcatcctcctgaaaggagaaaaaaataatc

SEQ ID NO: 121047 - DNA, 201 bp, Homo sapiens
ctgaagctcctgattatgattaggaatgttccatttgtctggcccccacactcttgtcatactttaaagatggttcctgcaagtaagtggtaaaatagagmaattatcatgttcatccatgtctcctggtaccttattcaggaaggcagatggctaggcaaaactattacccagaagtatagaccaagaagtacaaacgtc

SEQ ID NO: 121048 - DNA, 201 bp, Homo sapiens
ctagcgctaataaagaactgttaagggaagatattgaaaccaatagctaaagttttaaattatctgtgaattttgcttatttgtgcaatatcatggataarttgagcatctgctatagttccaatattagcattccaattttttcaaaatgtatgtatttcactattcaatattatcaaatctaagcttttaactatattg

SEQ ID NO: 121049 - DNA, 201 bp, Homo sapiens
attctgccttaatatcattatatatttagtttgcaaatttcccaattgtctcattgatatatttttcatagtttgttttaattaggattagcataaggttyatacatagcaattgattgatatgtgtcttatatttctcctaacctatatagaaacttccctgtctctccttctctcttctatctccctccctgcctgttg

SEQ ID NO: 121050 - DNA, 201 bp, Homo sapiens
agttccagagcctgccctgttaatgatggcactaaactgccttccagagaaggtcagaatgcatagctctttgtaggattgttggtgaaacttgcagagarggtattttctgaactgatattcaaggatgagtaggaatttataggtggatagaaaaggaattgtattccaagtagaggaaggaatgtgagtggacacaca

SEQ ID NO: 121051 - DNA, 201 bp, Homo sapiens
tcacttagcagccatgttattaaagggattcaaacattggtaaagtgtctggactaacagactttcaagattctttgcaaccccgaggttttcgatttgtyggaggtacagaactggtaagcggcagagagcggcagcacctaggtttcctgacccttgctgcttgcttccctgccgctcccctcagtccttcatcaagag

SEQ ID NO: 121052 - DNA, 201 bp, Homo sapiens
ttgcatcattgcccaaacttacagcttaatatgttggctttgctgcttaacagctgtgtgaatgggcatgttacttaacctctgtatttctccatcataaratagacataataaatttaaacccatgggttattgtgagaataaataagataatccatgtaaaagatgctcagcctagtccctggcatatggcaggtactc

SEQ ID NO: 121053 - DNA, 201 bp, Homo sapiens
gaaggacaaagaggaggtgaccaggcccagagctggggaaagactgtccaaggcaggggaatagcatgtgtgtggactcagagaccggagagcatgcgctmtgttttgaagagctgagaaaagtcctgcgtgggtcttgtaggtgttcaatcaatggcaactgtcattattctagattccctctcagggtgctgaatccta

SEQ ID NO: 121054 - DNA, 201 bp, Homo sapiens
tgtgcatagaggtgatcataatattctctgatggttggttgtatttctgtggggtcagtggtaatattccccttgccatttctgattgtgtttattggaaycttctctcttttcttctttattagtttagctagtggtatgtctgttttattaatttttatcaaaaaacagctcctggattcattggtcttttgaatgatt

SEQ ID NO: 121055 - DNA, 201 bp, Homo sapiens
aaatttctttaggtgattgtgcattcctgtgatatgcattttctccaaaatgtacagaaagaaaaataatttgaaccctaattaattgggttctaattggyctgtgttttaggctctaaaggatcttagatcctttagatctttattaaatactggtaattcagtatttaattgtaactgatttttatgcaactgcgcagg

SEQ ID NO: 121056 - DNA, 201 bp, Homo sapiens
ttctccaaaatgtacagaaagaaaaataatttgaaccctaattaattgggttctaattggcctgtgttttaggctctaaaggatcttagatcctttagatmtttattaaatactggtaattcagtatttaattgtaactgatttttatgcaactgcgcaggagaagaagtgttcaggtgcagctttcttcccatccgtgcc

SEQ ID NO: 121057 - DNA, 201 bp, Homo sapiens
tagatgaaatcattttattatcattcagttaagagcagtttctaatttctaccagggattttctagccatcttttcattattgatttttggcttcattgcmttgtgaggaaagaacacgctttgaatgatttcagtgcttgaaatgtgttgagatgtgtttgatttcataacatctggcatatttttatacgtgtttgcta

SEQ ID NO: 121058 - DNA, 201 bp, Homo sapiens
tatttcattttctaggtgtaccagaatttgcttatccattctcctactgaaggccagcttggttgctccaagttttggcacttataagtacagtttctgtwttcgtaaacacagaataaacacctatatgaagatttgtgtggtaagagtgttttcaacacttcctcatgttgatcttttatattgtatgcttgttttcac

SEQ ID NO: 121059 - DNA, 201 bp, Homo sapiens
tcatacaaatcccagtaacgatgctaacatcattcatccagtgtcagtcaatcctaggtgcttgaaaaacatctcatttagtctttacaatagcttatgargttgatacttttgtctcagtctttaaataagaaagccaaaactcagattggtttagtgatctggtcaatattacagagccaggaagtaagaggaggaatt

SEQ ID NO: 121060 - DNA, 201 bp, Homo sapiens
ttggtgagaatttttttgtaaagttgtcaaatctataggcctcagaaatggcagttctcatacaaatcccagtaacgatgctaacatcattcatccagtgycagtcaatcctaggtgcttgaaaaacatctcatttagtctttacaatagcttatgaagttgatacttttgtctcagtctttaaataagaaagccaaaact

SEQ ID NO: 121061 - DNA, 201 bp, Homo sapiens
atatattcatagcccctttattcgtaattgctccaaactggaaacaaccagtatgtttataaaatgtaaaactactaagcaatgagaaggaatgcactgtygatacatgcaacaatgtagatgaatctccaaaacattacattaagcaaaagaagccagacatgaaagagtacgtaatacgtgattctatctatatgacgt

SEQ ID NO: 121062 - DNA, 201 bp, Homo sapiens
ccacaaaaattgtggatcttatttactgagtttttatttaagactgcattgaatccttaaaaattccacttctaggtatttatccaagtgaaatgaaaacstatgtccacaaaagagtggtacatgcatatattcatagcccctttattcgtaattgctccaaactggaaacaaccagtatgtttataaaatgtaaaacta

SEQ ID NO: 121063 - DNA, 201 bp, Homo sapiens
aattctaaatttttcatcagaaatatttgatttgtattttgattttactaatttaaagtaaaaaagtaggttcactcgtctaagttgaattgtgcttagascttttccagtagctgaatggaacattatttttaaaaggtaaattaattaaaatgaaatgaaattttaaaaatgtggtttgttggttatgccagccatgtt

SEQ ID NO: 121064 - DNA, 201 bp, Homo sapiens
atactttgagttataatcaaatagtatactactagattttgtttgttttttttttgcctctgggagctgtttcacgtgactcctgtgtccctttgacacayccccatcattgcgggtttttgtttttgaggtgtttctttcttgctttctttgtggcactcactacaagatactccaggattatcttgtacatcttctgcc

SEQ ID NO: 121065 - DNA, 201 bp, Homo sapiens
tgaataaaatacatgggaagcaaagttctagcaaaaataaaatatctctgaaaaataattgaatataatgactagaaataaataaataaaattgtaatacytcagtggttaggttaaatgacagtcactgtgttaagtattttatgtgccattttcttttagctcttacggagtacatactattttactgatttaactaat

SEQ ID NO: 121066 - DNA, 201 bp, Homo sapiens
actactgtctaaagaaaagtggaatgggaggcagcagaattaggtcaaacatctagtggacactgtggagtgtagggttgcttaggagcaaaatctgattstttagttatcttttaaaaatagatgactctggtccctttggattggcacaagtgaaaatatagctggtttgtgaatctatgacagcctgccctgaaggcc

SEQ ID NO: 121067 - DNA, 201 bp, Homo sapiens
attttgaggataaaataagtcgaagtatatgaggttcccagctccaaattgctattcaatgaatgaattgcttttgctttctctgtactttccagtatggyataaagtgttcagtatgaataacatcaaattatcacagtccagagtaccagaatttatatgtacattttaaagatcctggacttgggggaataaacacat

SEQ ID NO: 121068 - DNA, 201 bp, Homo sapiens
agaaaatgacggattttgcagagaaggtctgcagaaactgatccagcatccctggcagtttgagtagagaatgggattttggtctttactttgaattgtcrtaattatttaatgtcaaacctatggagtgttatgaggctgtaagattttgaactctgtgcccttcagaggctctgcctcagggcacaaacacaggaagat

SEQ ID NO: 121069 - DNA, 201 bp, Homo sapiens
cccacctccttcctggacagggcggctggccgggcagaggggctcctcacttcccagtaggggcggccgggcagaggcgcccctcacctcccggacggggsggctggccgggcggggggctgacccccccacctccttcccggactgggcggctggccgggcggggggctaaccccccgacctcccttccggacggggcgg

SEQ ID NO: 121070 - DNA, 201 bp, Homo sapiens
tgaactctgtgcccttcagaggctctgcctcagggcacaaacacaggaagattaaacattaattaaagtaaccacacaggagaataaacaatgtaaagaaktagaaaaagacctggcttccccaccagggtaagccattttagaaagcgagattttgtattgaacttacgagatggatgaaataggcttcactagacccaa

SEQ ID NO: 121071 - DNA, 201 bp, Homo sapiens
caagctttttttaaaatcataatatgtcttggagatggttccataataaaacattcagatctacctcactcctttcaatgactgcatgcccatggaatgamtacctcattatttatttagccatcttactttctggtaaatactgatattgtttctgttttgatttttttaaccacagctacgaatgccacctctttgggt

SEQ ID NO: 121072 - DNA, 201 bp, Homo sapiens
cactgtaacatacacccaactgggctccgggagtcacaggctcccatccctggacgctgctgtggggccagagcccagcatcccaacccctgcacctgtcygtctgcatgctcccactcctgtaaggggtttgagcgatggtggtgactgaacagacaagccaaacccctgttgcaggtcctgtgagagtcagggaacccc

SEQ ID NO: 121073 - DNA, 201 bp, Homo sapiens
tattccacaaaaccgccgttgtcatcatggccccttctcaatgagctgttgagtacacctcccagacggggtggtggccgggcagaggggctcctcacttyccagtaggggcggccgggcagaggcgcccctcacctcccggatggggaggctggccgggctgggggctgacccccccacctccctcccggacggggcggc

SEQ ID NO: 121074 - DNA, 201 bp, Homo sapiens
actgtaacatacacccaactgggctccgggagtcacaggctcccatccctggacgctgctgtggggccagagcccagcatcccaacccctgcacctgtccrtctgcatgctcccactcctgtaaggggtttgagcgatggtggtgactgaacagacaagccaaacccctgttgcaggtcctgtgagagtcagggaaccccc

SEQ ID NO: 121075 - DNA, 201 bp, Homo sapiens
gccttagtaagaaaggcttagagatattaggaactgtaatgtctaatgtgagatattaatttagtttactgtgtgttttgctctctagtttctgtgacttrccaatctctaataactcaaaaatggtttttgagtgaattattttgtgaagactagggaaggcaatgaggatttttttttgcctagattaattggaaacag

SEQ ID NO: 121076 - DNA, 201 bp, Homo sapiens
caggctcccatccctggacgctgctgtggggccagagcccagcatcccaacccctgcacctgtccgtctgcatgctcccactcctgtaaggggtttgagcratggtggtgactgaacagacaagccaaacccctgttgcaggtcctgtgagagtcagggaacccccctgtttcaccgttgttaatattgatagagctttaa

SEQ ID NO: 121077 - DNA, 201 bp, Homo sapiens
gtccaccagtggatggtcttggcacaacaaggctgcctcctcatggtctttggtcccaacaagttcaatataaaatggaggaaatgttataattttaagcwctgataccagggtttccttagggggagaattgcctttgtgtgggaaaataccgtgataagacatttggagtagattgtgaaacactgaagacattagtgt

SEQ ID NO: 121078 - DNA, 201 bp, Homo sapiens
ctttgctgggagcatatacatgagtgataaagatttgcctatttcatgcagcaaacttgccatagtccctgttcccacacagatttttaatagttcagtcrtgtagttgccagtctcctgacgaaatggctagaccaccacccaggaattggcaaagatgtagcaaggtgtgtggggtagggtggcttgtacaccattacc

SEQ ID NO: 121079 - DNA, 201 bp, Homo sapiens
tgtatgtatggtattggtgtctatggctagacattaggactattacagagtttgcagatgtcactatgtctaatgcagttctaatgcagatctgtttgggrttttgtttaatatatggttatggagaagtctagaaaggaatgacaatgaagtagtagttactgtaaatcttgtggtcacgtaatgaaaatttaggagact

SEQ ID NO: 121080 - DNA, 201 bp, Homo sapiens
tccctgcatcactataaaatgagtaggttgtattaggtgatcaccagaggccctgctagacctgacagtccaaggataaagttgagtgctaaaggagcagkctgtgtagacagattgcaagtgtccaccagtggatggtcttggcacaacaaggctgcctcctcatggtctttggtcccaacaagttcaatataaaatgga

SEQ ID NO: 121081 - DNA, 201 bp, Homo sapiens
tttttcttaggttcccagggccacagaaaggaagcccatgctgaataatccagatttaagccttacccattggccttggatgcctatttctgtcttccttrtctactactgtcactgtcaaccccttgtggctgttccatccccatgtgtcagctctttgtgggctggtttgcccccggaactattgctctgagttcttct

SEQ ID NO: 121082 - DNA, 201 bp, Homo sapiens
acattgtgagcacagtgtgtgtgagtcttgggagaagtgaggacctgcaaagttctggcttgccactaacctgcactgtggctttgggagtgtcagctccstgcatcactataaaatgagtaggttgtattaggtgatcaccagaggccctgctagacctgacagtccaaggataaagttgagtgctaaaggagcaggctg

SEQ ID NO: 121083 - DNA, 201 bp, Homo sapiens
agtttgtgctttgccctatttttgaatcatttgtattaatgctgtgacattgtgagcacagtgtgtgtgagtcttgggagaagtgaggacctgcaaagttstggcttgccactaacctgcactgtggctttgggagtgtcagctccctgcatcactataaaatgagtaggttgtattaggtgatcaccagaggccctgcta

SEQ ID NO: 121084 - DNA, 201 bp, Homo sapiens
acagagggtattgtggctggacagaggatgctcattgcatgaaaaggaatctgtttgtctgggtcagtggggaagagttctggtgtgtcagactgtcttawtttgagttaaaagttttacaggtaaagatttgctttaattttctactcatgttgtccagtcgagtatggccatgtgtgcttctgtctctgatgagaaata

SEQ ID NO: 121085 - DNA, 201 bp, Homo sapiens
cctggggactaacttcatatatatattttcacaataatgcatactgaataaatctgaatattttgcttatggaatcaacaaataatctccagagaaagtttcattatgcagtcatatataagatatgaaacagattttttccctttattttaagaaatatgcatagcataaaaattctcaggctctctttgctttatgtag

SEQ ID NO: 121086 - DNA, 201 bp, Homo sapiens
ttaaaaaggaagtagaagccatgcttaaatgctttcaaaaacaaacctgcacagtttgtgctttgccctatttttgaatcatttgtattaatgctgtgacwttgtgagcacagtgtgtgtgagtcttgggagaagtgaggacctgcaaagttctggcttgccactaacctgcactgtggctttgggagtgtcagctccctg

SEQ ID NO: 121087 - DNA, 201 bp, Homo sapiens
accagcaggactggccatgccctgttcctctttcacagccctgcttctgcccaaagggctcattcaaattctttttcattctttcagccctccacatatgyggagaactctcatattttccacattcctttcttctttggaatcctgctctaaggaaagaaataggtcttggtcacctataccttttacaccttactgtga

SEQ ID NO: 121088 - DNA, 201 bp, Homo sapiens
tgccatactggacagcacagatgtagaacatttctgaaagctctctcagtgctgacctagagctagctttggtattttcatcttttcatgatgcaatacarttgccaaatttcttacttctcatatactcaaagcaacctcttgaaaaaaaattttttttttgagatggagtctcacctcttgaaatgtttttaagattgt

SEQ ID NO: 121089 - DNA, 201 bp, Homo sapiens
ttgttctcttaaaaaacaatgacactcaccagtaacctcttaggtatcaaacttgatgattttcaaaatctgcatttgtagcttcgacctttcttctgggyttcatcctgaatttccccggcctgtcacacatctttacatagaaatcccagcagcacatctttcacacattgaaagtcaaacttctcctacccttttttt

SEQ ID NO: 121090 - DNA, 201 bp, Homo sapiens
ttgcaaaagtcttggtcattttgaaaatggtaataccagtgcaatgagttctgaaatctgtagacatagtgtgtgtgtgtgtgtgtgtgtgtgtgtgtgtgtttctgaagaaaataaaaattttcacatctaaaataaaggctcagtttcctttggggtgccttagttcacagcagtatgacagctaaccagaaagctgcc

SEQ ID NO: 121091 - DNA, 201 bp, Homo sapiens
cctggtgaaaaccatcccagtcttgacaggtgcatagtctgatatttccaaaggtaacagttgtcacataggtggtcctgccctgttgagacacaagcccrttaagcagtttattttcaccccatggccagattggctttggagcaatcaatgcagcctggtgcagcctggagaagagatcctactggataaggtgggaag

SEQ ID NO: 121092 - DNA, 201 bp, Homo sapiens
atttgcaaaagtcttggtcattttgaaaatggtaataccagtgcaatgagttctgaaatctgtagacatagtgtgtgtgtgtgtgtgtgtgtgtgtgtgtgtgtttctgaagaaaataaaaattttcacatctaaaataaaggctcagtttcctttggggtgccttagttcacagcagtatgacagctaaccagaaagctg

SEQ ID NO: 121093 - DNA, 201 bp, Homo sapiens
cttgaacaatatgggagttaggggcactgatccctatacagtggaaaatttgtgtttaacttttgactctcccccaaaacctaactataatagactactaytgactggaagctttaccagtaacataaacaattgattaatacataaaaatgttattaagaaaaccataaagaaaataaaatgaattcattattcattaac

SEQ ID NO: 121094 - DNA, 201 bp, Homo sapiens
atacttgaattgattttcaaaattagggaaaagagctgcgattttagctatatatttgggctgtttgagttgaaaatgatgaagagtaaagtaatgtttgstgtaagaggtgggaggcaggactgtgacacggtcagctgactcttagatgtgtaataatggtctggcaccaccagtctctcactgtcttcttgaaatcac

SEQ ID NO: 121095 - DNA, 201 bp, Homo sapiens
gcactgatccctatacagtggaaaatttgtgtttaacttttgactctcccccaaaacctaactataatagactactactgactggaagctttaccagtaayataaacaattgattaatacataaaaatgttattaagaaaaccataaagaaaataaaatgaattcattattcattaactgccagtggatcatcataaaggt

SEQ ID NO: 121096 - DNA, 201 bp, Homo sapiens
caatgtactttattttttggcccatttttgctcctatatgccctttcatcatcctcagaacctgtacccttggcattttgtcggtagacatttatatttcytggcattgaggctatagatctctaatacttgaattgattttcaaaattagggaaaagagctgcgattttagctatatatttgggctgtttgagttgaaaa

SEQ ID NO: 121097 - DNA, 201 bp, Homo sapiens
accagtaacataaacaattgattaatacataaaaatgttattaagaaaaccataaagaaaataaaatgaattcattattcattaactgccagtggatcatsataaaggtcttcatcctcattgtcttcatgtagaggatgaggaaccagaagaggacaattggtcttgctgtctcagggttgtcagaggtggaagaaaatc

SEQ ID NO: 121098 - DNA, 201 bp, Homo sapiens
ttttttttttataataatcaggcatccaatgagatctgtcctctttttatcctcatttcactgagaaggaatggtggctctgaagagttaaataacttgcstaagctcacaattttagaaggtatggccaagactcaaacccagattggtctgattgtcaaagttgtgttctattcttaaccaattttctactttctttgg

SEQ ID NO: 121099 - DNA, 201 bp, Homo sapiens
ttaagcacacggaaaaatccataatctaaacatgagggacattaagttttggatggaagagagtgaattttgcaacaataacaactaaaaacccaggacasagaacaattattgaaaacaacttgctgaagtatataaataaataaaagtgtcatttctgaagtatctttccttccctaggctcactgccattgtcatggg

SEQ ID NO: 121100 - DNA, 201 bp, Homo sapiens
ctctggacttcttggtgtccccacattggtctgggctgaacctgacaggccaatagacaagggagtgaactatggatgtactcaagttcattaagtcacaygtcattgtgcttagtgaatgtggcaatctgagacaaatacgccctttgatgaatagagagtagaatgactaataagagatcagaagccagcaaagagtaa

SEQ ID NO: 121101 - DNA, 201 bp, Homo sapiens
tctagccctcatcccttggaaaaatgagctgaaccatgttggttggtgcaagaggggctgacagaagagagttttgataaatccacaagataactttggaractctttgccattttccctcctactcaatgctgctgggactttgagctcgctgaggcagtctaaggctgtgctttgacttcagtgctgtgccttgtgctt

SEQ ID NO: 121102 - DNA, 201 bp, Homo sapiens
gtgcttggcttattttacctaacataatgacctccacttccatcaatgtggctgcaaatgcctgagttatggctgaataatattccattgtatatatataycacactttctttacccatttatccattgatgggcacttaggttgattccatattttggctattataaatattgttgccataaatatgggggtagagatag

SEQ ID NO: 121103 - DNA, 201 bp, Homo sapiens
acaagaatgtagagtttgaaatttcttaagtttaaatgagaatgttagcttattttgcaaatagctttgtctttttctgacccctcctcccaccatgtggmggtatggaggagagaaaggctcttgcagaaaagtataagcggtgcaagtggagagtgctgcagagatggagatggaggccaggtctgctggtgaagggtc

SEQ ID NO: 121104 - DNA, 201 bp, Homo sapiens
cagagataacccatataacccttgccccatccgtgcacagccttccctgtgaccaagatcccccatcagggtgctatatttgttacaattgatgatcctamattgacacatcattatcacccaaagtccatagtttatactaggattcactcttggtgttgtacatcctatgagttttggacaaatatatccaccattgtg

SEQ ID NO: 121105 - DNA, 201 bp, Homo sapiens
ctgctgccatgtgaagaaggacatgcttgctcccccttctgccatgattgtaaatttcctgaggcttccccagccatactgaactgtaagacaattaagcstctttccttaataaattacccagtcttgggtatgtctttattagtgcatgagaacagactaatacagcttctttttttcagtgttatgtttatgaagttc

SEQ ID NO: 121106 - DNA, 201 bp, Homo sapiens
cagcctcccaagtagctaggactacaggcatgtgccaccacgcccggctaatttttgtatttttagtggagacacggtttcgccatgttggccaggctggkcttgaactactgacctcaggtgacccacccaccttggcctcccaaagtgctgggattacaggcgtgaaccactgcgcccagccagagcattgttttatgt

SEQ ID NO: 121107 - DNA, 201 bp, Homo sapiens
gaatctgcaaactaacctcacttcatcagttttctcctgtatatttaccttcccacagtttcccatccttggaagcccaaaacctcacttctttgtcctgycttttcttgacaactttattgttctttgttgaacatgccacataagccagatgccacataagccagagttctaagctgctgctgtgggttacctttcatt

SEQ ID NO: 121108 - DNA, 201 bp, Homo sapiens
aaaatatttaccagtctaatgtcaaatgtcaggaggaacacttttcccttaatcagtggcatagcagggacttttggcttgaaaatacagaagaagtttartggttgtgtaatttgcaaaagcaagtttgtcatttctgctgctctgatggcttgatggatagctatctactcaatggttagttagatttgatcatgaagg

SEQ ID NO: 121109 - DNA, 201 bp, Homo sapiens
caatgatagtcaaagaagttcaaaaattggttactttggacttaacaagcaaatgcacttctaggtggcttttgaaaaccaaaagtacacctaagtagagrgcttctgttttttatagtgattatatgaagagtaatgggtgaaaagcatcaaagctggaattggagctctggggtctacaccgtttccaatgaatcattc

SEQ ID NO: 121110 - DNA, 201 bp, Homo sapiens
ggtctgcagactggccacatcagcatcacttgggagcttgttaaaaattcagagttgctggccccacaccatctcactgaaccagaaactgcattttaccrtgatcctcagataatctgtctgcacattaatgtttgagaaccactgaatggggaatacctttttaggaagcatggtcatgaagaaagtggagtggttgtg

SEQ ID NO: 121111 - DNA, 201 bp, Homo sapiens
tcacttgggagcttgttaaaaattcagagttgctggccccacaccatctcactgaaccagaaactgcattttaccatgatcctcagataatctgtctgcayattaatgtttgagaaccactgaatggggaatacctttttaggaagcatggtcatgaagaaagtggagtggttgtggagaaggtcctagctagagatggag

SEQ ID NO: 121112 - DNA, 201 bp, Homo sapiens
tcatagagcttttttttttttttttttgagacagagtctcgcttttttacccaggctggagcacagtggcgtgatctcggctcactgcaatctccgcctcscgggttcaagcgattctcctgcctcagcctcccaagtagctaggactacaggcatgtgccaccacgcccggctaatttttgtatttttagtggagacacg

SEQ ID NO: 121113 - DNA, 201 bp, Homo sapiens
ccttagtagctattctgtttcataacttgactttcaaaaaataataatggcaaaagatgacattttttgataagcaccaggtgcttttagaagcaatttttatgggagtttctaatctaatcatcacagcaacccttcaaaatgggtgctattattgtgtccatttgacagagaagtaaactgaggtgacagtggctagat

SEQ ID NO: 121114 - DNA, 201 bp, Homo sapiens
catgagggacattaagttttggatggaagagagtgaattttgcaacaataacaactaaaaacccaggacacagaacaattattgaaaacaacttgctgaartatataaataaataaaagtgtcatttctgaagtatctttccttccctaggctcactgccattgtcatgggaaaagtgtgcatggcagcatttactctgag

SEQ ID NO: 121115 - DNA, 201 bp, Homo sapiens
tactgtatcttttctgtgtttagatatgtttagatacacagatacttaccattgtgttacagttattatacctatagtatatagcacagtaatgtgctgtrtgggtttgtagcctaagagcaattggctataccatgtagcctaggtatgtagtaggctacaccatctaggtgtatgtaagtgcactctatgatgctcaca

SEQ ID NO: 121116 - DNA, 201 bp, Homo sapiens
agaaaaggctttatgtactgggaagctttcaagcccatgatggcagatgtgagttttacaaaatccgaatttttgcttgaaaacaaggtttttatcattgrcatcaatgactattagttgtttttcttaaagtgttaagattatttcattcatttagaagaaaacatctgccaactgcccacatataaataactttacttg

SEQ ID NO: 121117 - DNA, 201 bp, Homo sapiens
aagtagctgggactacaggcacctgccactacgcccggctaattttattttattttatttatttatttatttattttttagaagagacggggtttcactgygttagccaggatgatctcaatctcctgacctcgtgatctgcccgccttggcctcccaaaatgctgggattacaggcataagccaccgcacccggccacac

SEQ ID NO: 121118 - DNA, 201 bp, Homo sapiens
tttctaggggaatttagggtgtgtatgaatagtaataataattgtaacaatagcttacatttactgagtgcttacctgtactgtgttggggctttatattygtggattatctcattttatccccacaggctcatgaggtacatccacctaggtgaggaaatgaaggcttggagaggctaagtcacctctcaaaggtcatac

SEQ ID NO: 121119 - DNA, 201 bp, Homo sapiens
tgattcttccagtctggggtatgactcaagaatttgtatctctaacaagccaccaggtgatactagcactgcacatctgggaaccgcactttgattagacctaccatatgacatccagctcaatgaacagttgttgagttatggaaattgcagagcatggattcaaacccatgcattccccaaaagaaattgactagaaat

SEQ ID NO: 121120 - DNA, 201 bp, Homo sapiens
tgagttcataaaatcctgaaaaaattaaagcagcagacagaaaacagaaaagacccccacttagatactgattagcaaatagacacaaacatttcctctawatacttcagtgcctgtgatttaagtagctacttgggacacattgaagagtctgttgttagctttctgcattcacatgataagaaacaaagaattctttag

SEQ ID NO: 121121 - DNA, 201 bp, Homo sapiens
tctgtttaaaagatgagtactctggtttatataggatcctctggtagcagcaggttaattaaagaatgattctatcatccctagcctaaatcgcaggcatkataaaagccagcctgctttatgactgtcatgtgagaaatgtgcacactgataccccagaatttgagcattgttaaaagttagtccattgggtgtgtttgt

SEQ ID NO: 121122 - DNA, 201 bp, Homo sapiens
tccacaaaggaaaaaatatggcctcttctttttaggagtctagatcccactttctcaaagtgccttccttcatgtgtagccaccccacttccagtctacaytggggacccccaccattagaaaatgtctttatttatttatttttaattgtcaaaagattgtatatatttgtcacacacatgttgttttgaagtgtgtaca

SEQ ID NO: 121123 - DNA, 201 bp, Homo sapiens
tctttttttttacaaacagttcttaaaactcggtgtacgttttacacttatagcatctctcagtttgaattctaaatttttcatcagaaatatttgatttrtattttgattttactaatttaaagtaaaaaagtaggttcactcgtctaagttgaattgtgcttagaccttttccagtagctgaatggaacattattttta

SEQ ID NO: 121124 - DNA, 201 bp, Homo sapiens
aagtttagaagtgtcatataaaaactagaaacaagcttttgtgcttctgagtataacttaaattaggtagaaaaaatatctaataataaaagtagattctkctaccctgtgtagggtccacaaaggaaaaaatatggcctcttctttttaggagtctagatcccactttctcaaagtgccttccttcatgtgtagccaccc

SEQ ID NO: 121125 - DNA, 201 bp, Homo sapiens
gaatttaattgcttaaagtcagagagttaggagatccttcagttttgactgatgtcaacctccgtgctcttaaccccagctctgtccaagtcataagaccrtcctatagacaggccagaatggtacaagtggaaacacaggaagagatcttctttcctatagaccttaaataaaaatgtctcttggatcatcttgtctgaa

SEQ ID NO: 121126 - DNA, 201 bp, Homo sapiens
aaaacctaagtaaattgtccgatgtcctgtggtcagtaagtgatggaggtggggttcaccctgacttcgtgtggttgtaaagcaggggtgttcaaactttwggcttccttgggccacattggaagaagaattgtctgggccacacataaaatacactaacacgaatgacagctggtgagctaaaaaaaaaaaaaaaaaaaa

SEQ ID NO: 121127 - DNA, 201 bp, Homo sapiens
cactgaagttcagaaaacctaagtaaattgtccgatgtcctgtggtcagtaagtgatggaggtggggttcaccctgacttcgtgtggttgtaaagcagggstgttcaaacttttggcttccttgggccacattggaagaagaattgtctgggccacacataaaatacactaacacgaatgacagctggtgagctaaaaaaa

SEQ ID NO: 121128 - DNA, 201 bp, Homo sapiens
tgagactggaatctactttcatagactcccaggtgtccttgttctcaaccactggtctttacttctctgaagagcctgaccttatgaattaaattctttcygattgtaacattagtcagaggaattggggaactggggacttttgtttattaatccttttatcttctgcttttttgcccagaaaggtcatttttcaatttc

SEQ ID NO: 121129 - DNA, 201 bp, Homo sapiens
tttcaaagcttttcatggcttctgctctttgatcaggataaatcatgccacagtgagactggaatctactttcatagactcccaggtgtccttgttctcamccactggtctttacttctctgaagagcctgaccttatgaattaaattctttccgattgtaacattagtcagaggaattggggaactggggacttttgttt

SEQ ID NO: 121130 - DNA, 201 bp, Homo sapiens
cacaggtatgttcttctcggcactgtgaatcatttttcaaagcttttcatggcttctgctctttgatcaggataaatcatgccacagtgagactggaatcyactttcatagactcccaggtgtccttgttctcaaccactggtctttacttctctgaagagcctgaccttatgaattaaattctttccgattgtaacatta

SEQ ID NO: 121131 - DNA, 201 bp, Homo sapiens
agaatttaattgcttaaagtcagagagttaggagatccttcagttttgactgatgtcaacctccgtgctcttaaccccagctctgtccaagtcataagacyatcctatagacaggccagaatggtacaagtggaaacacaggaagagatcttctttcctatagaccttaaataaaaatgtctcttggatcatcttgtctga

SEQ ID NO: 121132 - DNA, 201 bp, Homo sapiens
ttgttttattcaacttggtatttctaagaactagcttggctctcagtaggtgatccttaagtgtttgctgaatgtatcagtggtgttattaatttttttttatgtcagttatagacacaggtccaacctgtcttctgaaaacagctgagcatttcaaggatgtggcatggattttttactctaatgtatagcaggcagatt

SEQ ID NO: 121133 - DNA, 201 bp, Homo sapiens
aagagctgctctctagtcgacttggaaaaagagtttttgaagagtcctgctctcacaggacatctgtgagaatgccgaaggagaaggtaaagagaggcacrcttcaatattttattatctcaacccacagccttaaaggtctcctcgattgtctctgcctacaggaaggctcagctgctttttatcattccgttggggcct

SEQ ID NO: 121134 - DNA, 201 bp, Homo sapiens
ggtactttctttttcccaaaaaggcagagctgcttttgcatatgaactcattttcttcaaaatccattatcctcatgtgagagatgtagaattttgggcayagaaaacatgacaaattttgcctgtagtcctgaactgagattggtaccaggctctgctggcttccagctatttcatttcatgatttatcaagagctgctc

SEQ ID NO: 121135 - DNA, 201 bp, Homo sapiens
atgtaccttgtggaagtaaaattgcccctggttgaaaacaactgttacagagttttgcctttatttatgtttttgttgttgctgttatttgtttgtttgttctgagacagggtctcactgtgtcacctaggctggagtgcactggcacaatcagggctcactgcagccttgacttcccaggctcaagtgatcctcccactt

SEQ ID NO: 121136 - DNA, 201 bp, Homo sapiens
aatgtaccttgtggaagtaaaattgcccctggttgaaaacaactgttacagagttttgcctttatttatgtttttgttgttgctgttatttgtttgtttgttctgagacagggtctcactgtgtcacctaggctggagtgcactggcacaatcagggctcactgcagccttgacttcccaggctcaagtgatcctcccact

SEQ ID NO: 121137 - DNA, 201 bp, Homo sapiens
aaatgtaccttgtggaagtaaaattgcccctggttgaaaacaactgttacagagttttgcctttatttatgtttttgttgttgctgttatttgtttgtttgttctgagacagggtctcactgtgtcacctaggctggagtgcactggcacaatcagggctcactgcagccttgacttcccaggctcaagtgatcctcccac

SEQ ID NO: 121138 - DNA, 201 bp, Homo sapiens
caaatgtaccttgtggaagtaaaattgcccctggttgaaaacaactgttacagagttttgcctttatttatgtttttgttgttgctgttatttgtttgtttgttctgagacagggtctcactgtgtcacctaggctggagtgcactggcacaatcagggctcactgcagccttgacttcccaggctcaagtgatcctccca

SEQ ID NO: 121139 - DNA, 201 bp, Homo sapiens
cacacaccactgtctttgagaagaagtttaatttggctggttcactgagtgtaggtcaagatggggatgtagaaggtaggaaatgacaagagggtagaaarattaggcaggaccctctaagcctttggggtttctcagccttagcactatcaacattttgggctggataattctttgttgatgtggggtgggggactgttc

SEQ ID NO: 121140 - DNA, 201 bp, Homo sapiens
ttttttttttttttgagacggagtttcactcttgtcacccaggctggagtgcaatggcgcgatctcggctcactgcagcctcctcctcccgggttcaagcrattctcccacgtcagcctctcgagtagctgggattacaggcttgtgccaccatgcccggctaatttttgtatttttagtagagatggtgtttcaccatgt

SEQ ID NO: 121141 - DNA, 201 bp, Homo sapiens
ctttttagagtgctcagagtccctgcattgccactggtcattgccctttgtacttggaaatgacttgttccaattatgacagccttgcaattgcgcaggcygaatgtttatcagaaaactgtaagttaaaacatggcaatgacatctctctccttgtgtgtcatatttaaggcacatgttctctgaaatcaagaagctggg

SEQ ID NO: 121142 - DNA, 201 bp, Homo sapiens
tggggccatgattttgcatttttatcaggttcctgggtgatactgatgctgctcctctgggtagcacactataagaaactgaatcacaggaattcacacamtgaatactataaatatcaatagatacaactcatataagcaaaagctgtttgagattctcaatacttttttttttttttgagacggagtttcactcttgtc

SEQ ID NO: 121143 - DNA, 201 bp, Homo sapiens
aaggagacatgagggtgtggaggcggcctttctcttcttgctgcactagggcaatagatctgtggttaaagcagatgaactgggaagctcttgatcaggcrtacgaaatacccagattcttgtatattttctagtttgtgtgcacaaggcttctggcttggctgcttttgccagtggggaagcattagtgaacaaaacaga

SEQ ID NO: 121144 - DNA, 201 bp, Homo sapiens
ctctgtctagaatcatctcctaccacttagagtctatgtattcttctgaccaaatgacttcaagttttctgaccaaattaatggcctttcaaactgttaakccctctgcctggaatgcccttcacatcttctcttggcgaggccgccgcggtcctcaggactctgttggaatatcaccaccccagacaaacattccctgaa

SEQ ID NO: 121145 - DNA, 201 bp, Homo sapiens
gtcacaaaagtattactaatattttgtattaaatggtcattgaagaaaatcatcatgtgtagttgagcatcagcattggtcagcatctgtatagaacttgraagcctataaagggaggacttttatggactttatcagaagcaagcttcataaatctgtggagaaggggctcttctctccattttgcagttgagaaatcag

SEQ ID NO: 121146 - DNA, 201 bp, Homo sapiens
aatttacaaatggagttttgatatactcaggactgtgaataagtattggggggtggtgtctggtgaaaggcagacaaaccacagtagctcatttccttttrttgatccgagcacaaagcattgttgttgcatcttagaaattaaaatcctcatttacagaatagtgtggtgcaatctggaaagatgttgttgtggtctctc

SEQ ID NO: 121147 - DNA, 201 bp, Homo sapiens
tcccaacaactggaaacatgagagagtaatttcagtttctaggatgggtttaactggctttcatgataaaaagagaaatatttcttgatccacaagaatamaggtttttgttgttgttgctgctgttttttccaaaagtgatttgagttcctagtgtaaatcaaaaccagacgcaactgtaattgccaattgatggtacaa

SEQ ID NO: 121148 - DNA, 201 bp, Homo sapiens
agttaaaaaagtcaaaggaagagtctaaacacctcccaccagggtcgttgataaatatcttgtctcagccttcttgagtccagcaaggatgtgaatgtcawaccttcagtaaactagattttgtacttctagaagacttttattaggcacataagaaaatgatgctaacaaagttcaaagttgctccgtgttgcagtgatc

SEQ ID NO: 121149 - DNA, 201 bp, Homo sapiens
gaagattaatattaatgaaaagatgtttttattcgcactttccttaagatgttttagttgttcaagtatgaatctttgagacctgaaagtgtcaaggattyggagaattggcatttatatgatctaatttacaaaaaaagaaaagaaaccaaataaatgaacaaaagagagagacattcttccagaataatgaaacctccc

SEQ ID NO: 121150 - DNA, 201 bp, Homo sapiens
tttggtgttcctgatctctgccttcatcttcacatggtgttctcccctgtgtatgcctgtgtcccgtttccccttttaacaatggtaccagtcatgttggracagggacccatcctactccagtgtgacctcattttgttttttgtttgtttgtttgtttgtttttagacagagtcccactctgttgcccaggctggagtg

SEQ ID NO: 121151 - DNA, 201 bp, Homo sapiens
gagcaatccatggaaatacatagattaaaaaccatgagcaattgccattttacatctgtcaaattagaaagcatttttaaagtgcaatactgctgctacartgttggtgaagtgactggactcatatactactggtagcaatataattgctttggaaagtattttggcaatacatcaagtgttaatatactttgatactac

SEQ ID NO: 121152 - DNA, 201 bp, Homo sapiens
agcagaataaggatccagacttaggtaaactgaccacagttctgaaaaagcaagctgggcagggtcttgatggtgcatagcatgtcttcagcatggtctcytctgggcagtgtgtctgactttcctagtcagcctgaccacatggcctcctgtttccttggcaccctgtacgtgcttcttctgcagctgttgtcatcgata

SEQ ID NO: 121153 - DNA, 201 bp, Homo sapiens
tggagtttgatagctcttcactccctattttatacatctctaagtaattataccctgtgcccttaagcctcaaaagcataaaattatttaaaaacatacarttaaacacttcagatgacagtgttaaaacttcagaagaagacactcactttggaagaatggtgcttcgtgctggagcctttatatcagctccttcttctc

SEQ ID NO: 121154 - DNA, 201 bp, Homo sapiens
ttcacagaatcctctaactatgcaaaacacatagtgaacagttatcatttgaatcttagtacaactttaataagctgtgttttatatttaagtagtttctsccctggtggttgcccgtggcagactttggagtttgatagctcttcactccctattttatacatctctaagtaattataccctgtgcccttaagcctcaaa

SEQ ID NO: 121155 - DNA, 201 bp, Homo sapiens
tgaaaaagacagttggtatctatccgaatgcccaaatatacgtgaccacagagaagcgcatgagttactgtgatggagtttttaagaaggaaactgggaargacaggtgagccctctctgaagcagctttattgtcttttattatcttttatgctaaatcttcgccaattccttttgcaggatataaaatgaacagttatt

SEQ ID NO: 121156 - DNA, 201 bp, Homo sapiens
aagtggataagatgaccttacctatagtcttctaagctgagacaacaggaggccaggcccctggtcgggaggatggtgtgtgtgtgtgtgtgtgtgtgtgtacatgtgtgtgtaatgtgacttacccattaggcaccataggtgcggtgccttggggccgtggcagttttagggctccacaaaaatgttttaatctttttt

SEQ ID NO: 121157 - DNA, 201 bp, Homo sapiens
gaagtggataagatgaccttacctatagtcttctaagctgagacaacaggaggccaggcccctggtcgggaggatggtgtgtgtgtgtgtgtgtgtgtgtgtacatgtgtgtgtaatgtgacttacccattaggcaccataggtgcggtgccttggggccgtggcagttttagggctccacaaaaatgttttaatcttttt

SEQ ID NO: 121158 - DNA, 201 bp, Homo sapiens
agatgaaaccttcttgcagagtcccgggatataagccattccattaggaatccttccctgggaaatatgaatcattgctatgcctgatataaaatcactgrcatggtgttcatgacagctcaccatgtcatccctcacacctttgccatggcctggaggctgactacactactacttgtgtttgttcttttattgctgacc

SEQ ID NO: 121159 - DNA, 201 bp, Homo sapiens
tctgattcttccagtctggggtatgactcaagaatttgtatctctaacaagccaccaggtgatactagcactgcacatctgggaaccgcactttgattagmcctaccatatgacatccagctcaatgaacagttgttgagttatggaaattgcagagcatggattcaaacccatgcattccccaaaagaaattgactagaa

SEQ ID NO: 121160 - DNA, 201 bp, Homo sapiens
ggtgaatgaatgtcataaaatatactctcatttggttccaccctgagagagccgttggattgcagccccagtgcttttcagcagggaagctggccagagaygcctgcagcctgctggggagtgtgtgggtagctcctccagcagtgtgcctgcactcctcatctgcacagagcatgcacagtgttcaaaggcacacagatg

SEQ ID NO: 121161 - DNA, 201 bp, Homo sapiens
attggtttcatttgacagatgacaaaactctggcttgacaactttaccagcatgagagtgctagactagggtcagcaaactacctcctctagaacaagccyggcttgctgcctatttacatgcagctcctgagtaagaatggcttttgtgtttttaaatggttgaaaaaaaaatcaaaagaagaataagagttgacaggtg

SEQ ID NO: 121162 - DNA, 201 bp, Homo sapiens
cgtgctatggatgtgatgttggggaatttctaagattgaagtggccagttgcatgtagatgagaagactttctttaatttgccctaagtagacattctgcrcagtcagtgtgttatagaaacacatttctgggaggcaggtgatccaagggatggtggtcaagaagcacagaatatatagagatgggatagaaacaaatgc

SEQ ID NO: 121163 - DNA, 201 bp, Homo sapiens
gaatgattaaatgaattaattttaggcaaaaaaattagcatgtgcaaagatccggtggcatgaaggaacaggacattttgggaaacagtgaaaagttgtgkatggctggcattgagctggctttgggagctggaagagataatacagttgggtcagatcataaggatcatgtagattctgtcaaggagtgtagatttgatc

SEQ ID NO: 121164 - DNA, 201 bp, Homo sapiens
gcttcagtgagaatgtgtcacgtgtaaaatgaagataagcaagaatatcagtctgtttgaaagtgctaataaaagtaaaatattcttggcaaataaagctwttaatgtaggtgttgaaattttcatttagtcagagcagtcctaaatttaaatgtaaccttttgagcccttagatcattgagttaagactctttctcatgc

SEQ ID NO: 121165 - DNA, 201 bp, Homo sapiens
gtggtcttttctacttaataaaaagcacactatatgctttatctctttttgaagtgctagccattaatgttcaatgcctaaatccattagttgattagagrttacaaaatactggtattcttatcttctcataccttcatcatttattagatgtgatatttttataataaaaatttcctcctttttattctttggtgacca

SEQ ID NO: 121166 - DNA, 201 bp, Homo sapiens
ataagatgataatatcacatttttactgtatcttttctgtgtttagatatgtttagatacacagatacttaccattgtgttacagttattatacctatagyatatagcacagtaatgtgctgtatgggtttgtagcctaagagcaattggctataccatgtagcctaggtatgtagtaggctacaccatctaggtgtatgt

SEQ ID NO: 121167 - DNA, 201 bp, Homo sapiens
agatataaatactgttaatattttaatttttatcctctggccttgtacttctaggaagtaatgaatggtctggttctttgggtccttggagccagtgtgggtaggagtggggttggcagggacagtagagaaggatgcaaggaaaatatttgctctggatagataattttgtctttttcatccaatcttatggggaagaaa

SEQ ID NO: 121168 - DNA, 201 bp, Homo sapiens
ctatggctagagcctgaaactgcccaagttccatctctcagcattttctgagaactttctgtgaagagaagttcagaggccagtaaaacaagtgtggtcaygaaaggaatcagaacatgactcccccaaatctgcctctttgacataaaattatttttgagctgaaggaaattaagaagcagtaaacaggggaaaagctct

SEQ ID NO: 121169 - DNA, 201 bp, Homo sapiens
ttcttaaacaagttaaatattcctcatggaaaaataattagccaattccttaaatttgacaaaaacatcattcagaattgttgctatcattccttttttttcctctttttttggatattttatgtccaggcaaatgggggaatgattggctttatattctttacatgaactgtcttttttcctgcctatcctagtaatatc

SEQ ID NO: 121170 - DNA, 201 bp, Homo sapiens
tatcactctccccctgccgctgcagtcctaccctgcactgctaatcctccctcagcaaacagatgcccctggaacaatgtaggggtgagcacaaagaaattcaggagaagaaagtacattcatgtaattcaaaattgttatctctatcataagattagtaaaaagcctttgttcagattttttattgtgagcagtgttgta

SEQ ID NO: 121171 - DNA, 201 bp, Homo sapiens
cctctcccttgcatggacccagtgggagataaagagattatagaagaaaagaaactgaattaccaggtcttcaataatttgttgtgatctattttttcatwctatttacttttaaacctactttgtatttgtaattttattttttcttaaagattctcacttccttcagtaatataggccacacaagctagatccaccctt

SEQ ID NO: 121172 - DNA, 201 bp, Homo sapiens
tcatgccacaatagggtgtggataggtgtttctggatacggagatagatggccacacaatcctgctgccttcacccagccagctctcagcttaagagaggyaggaaatgaggcaaggaaaggaagatctgagcccttcctggagctcagctgcatcctgaggcagatgtttaatggactagaaatgatcacatagagaatt

SEQ ID NO: 121173 - DNA, 201 bp, Homo sapiens
gagattagttatcatttcccccattatgtacaagaaggatccattaagcatcccaagtccagggaagggaaagggatgccaagaagtagacaagaggtacragagtaccacatccccctttctcccacaaagacaatcatgccaagacagtaggctgtgttcttctgacctactagtttgctcctagttagaccgtagact

SEQ ID NO: 121174 - DNA, 201 bp, Homo sapiens
acaaccctccaaaattaacaaagtaaattatagacttaaatggaggatataaaactcctgcaggaaaacagaagagtaaatttccatgatcatggagtagrcaattactttttacatttgaaatcagaagcataagcaacaacaataaagaacaatagatacgttaaactttatcaaaattaaaaacctttgtccttcaaa

SEQ ID NO: 121175 - DNA, 201 bp, Homo sapiens
aggttcacctagatattccaggacaatccccccatctcaagatctttaatttcatcacatctgcaaagtccctttggcatggaaagtaacatattcacagrttttggagattaggatgttggcattttgtgggccaatcttctgcttactacaagggatcacccgttgttctttcatccagtccatcagcaagccctgctg

SEQ ID NO: 121176 - DNA, 201 bp, Homo sapiens
catcttacaaaattatttcagtgcaattgcttttggtggtaaaatgccaagcattgtagaaatatgattttgatggtggttgagcagtactgtttctgtctaattacactcacgtattcatacaattactgtgaaattactgtaccaaaagcagtatatacacatagtaataataatgcaatgttctgattggctggcttt

SEQ ID NO: 121177 - DNA, 201 bp, Homo sapiens
ccatcttacaaaattatttcagtgcaattgcttttggtggtaaaatgccaagcattgtagaaatatgattttgatggtggttgagcagtactgtttctgtctaattacactcacgtattcatacaattactgtgaaattactgtaccaaaagcagtatatacacatagtaataataatgcaatgttctgattggctggctt

SEQ ID NO: 121178 - DNA, 201 bp, Homo sapiens
caaatcaagcttgattacatatgagataccaaggcatccagagaaatgatagtgggtgtaagtcatgccacaatagggtgtggataggtgtttctggatayggagatagatggccacacaatcctgctgccttcacccagccagctctcagcttaagagaggcaggaaatgaggcaaggaaaggaagatctgagcccttcc

SEQ ID NO: 121179 - DNA, 201 bp, Homo sapiens
ctttttaattaggactattatagaaatgagttaaacagccaaatatcaaacctgaaacgatctcctgaggcaagagtgtacatgatcattaggtttggagrcaaactattgttaaggattctcatataaggtatcttagtctccacaagcaaaggtgatcaaatccagttgaacttgcttcacaccatatgccattgtcct

SEQ ID NO: 121180 - DNA, 201 bp, Homo sapiens
gggaatttctaagattgaagtggccagttgcatgtagatgagaagactttctttaatttgccctaagtagacattctgcacagtcagtgtgttatagaaasacatttctgggaggcaggtgatccaagggatggtggtcaagaagcacagaatatatagagatgggatagaaacaaatgcaatgaaagatcaggacatttt

SEQ ID NO: 121181 - DNA, 201 bp, Homo sapiens
aattctatggctgctgactacacctggcattccttggcataaagcagtgtaactcccatctctgcctccttcttcacatggaatttccctgtgtgtctttktatctgtttcttcttctcttataagaacttgtgattggatttaaggcccaccctaatccagggttatatcatctaataatgatccttaccttaattacat

SEQ ID NO: 121182 - DNA, 201 bp, Homo sapiens
tccatcttacaaaattatttcagtgcaattgcttttggtggtaaaatgccaagcattgtagaaatatgattttgatggtggttgagcagtactgtttctgtctaattacactcacgtattcatacaattactgtgaaattactgtaccaaaagcagtatatacacatagtaataataatgcaatgttctgattggctggct

SEQ ID NO: 121183 - DNA, 201 bp, Homo sapiens
ttccatcttacaaaattatttcagtgcaattgcttttggtggtaaaatgccaagcattgtagaaatatgattttgatggtggttgagcagtactgtttctgtctaattacactcacgtattcatacaattactgtgaaattactgtaccaaaagcagtatatacacatagtaataataatgcaatgttctgattggctggc

SEQ ID NO: 121184 - DNA, 201 bp, Homo sapiens
gacttcttaggagttgtcctgtgtggcactgatgatacctggtgatggaaaatgtgtctgctcttattcccttacagccactttgttttctctctatttttactcgtctttagtaattacatgatttttgagactaacatacatgtaaaaccttttgtagatctgatgctaagcaaagaaacgatgttctgctcaataagt

SEQ ID NO: 121185 - DNA, 201 bp, Homo sapiens
aatttacaagttttgctgataaagaagaaaatcaattttattttattctatttcccagggagatagcaaaatgcttgaggattttttttgcaagagacttkttaattaggactattatagaaatgagttaaacagccaaatatcaaacctgaaacgatctcctgaggcaagagtgtacatgatcattaggtttggaggcaa

SEQ ID NO: 121186 - DNA, 201 bp, Homo sapiens
agacggagttttgctcttgtcacccaggctggaatgcaatggagcgatctcagttcggttcactgcaacctctgcctcccgggttcaagcgattttcctgycacagcctcccgagtagctgggattacagcacctgccaccacacccagctaatttaatttttgtagttttagtaaagacagggtttcaccacgtttgcca

SEQ ID NO: 121187 - DNA, 201 bp, Homo sapiens
gaggcaggagaatcacttgaacctgggaggaggcagaggttgcagtgagccaggatcgcgccactgcactgcactccagccccagcgacaatgcgagattmtgtctcaaaaaaaaaaaaaaaaaaatcaaccacaaatatccaagtagataagttagaggtaatttcttgttttatagaaggagtctctataaacagccag

SEQ ID NO: 121188 - DNA, 201 bp, Homo sapiens
atttgtgccttcaatttacaagttttgctgataaagaagaaaatcaattttattttattctatttcccagggagatagcaaaatgcttgaggattttttttgcaagagactttttaattaggactattatagaaatgagttaaacagccaaatatcaaacctgaaacgatctcctgaggcaagagtgtacatgatcattag

SEQ ID NO: 121189 - DNA, 201 bp, Homo sapiens
ttgttgcccaggctggagtgcaatggcgcactctcagctcaccacagcctccgcctctcaggttcaagtgattctcctgcctcagcctcccgagtagctgrgattacaggcatgcccccccacatccagctaatttttttgtatttttagtagagacagggtttctccatgttggtcaggctggtcgcaaactcctgacct

SEQ ID NO: 121190 - DNA, 201 bp, Homo sapiens
ctcatgcactgcactaagtgttgtctatgcctcaccttatgtaaacattaactgcaacttagaagattgctaagagatgaagaaactttttttttttttttgagacggagtttcactcttgttgcccaggctggagtgcaatggcgcactctcagctcaccacagcctccgcctctcaggttcaagtgattctcctgcctc

SEQ ID NO: 121191 - DNA, 201 bp, Homo sapiens
agaagacatttatgcagccaacaaacaggaaaaaaatctccacatcaatgatcatcagagaaatgcaaatcaaaaccacaatgagataccatctcacatckgtcagaatggtgattattaaaaagtcaagaaacaatagatgttggtgaggctgaggagaaataagaatgcttttacactgttggtgggaatgcaaattag

SEQ ID NO: 121192 - DNA, 201 bp, Homo sapiens
gcaccatgggagaaaatttttgcagtctacccatctgacaaaggtctaatatccagaatttactaggaacttaaatttgcaagaaaaaaaaaaccccatcraaaagtgggcaaaggatatgaacagacacttctcaaaagaagacatttatgcagccaacaaacaggaaaaaaatctccacatcaatgatcatcagagaaa

SEQ ID NO: 121193 - DNA, 201 bp, Homo sapiens
agctattcatgacaaacccacagccaatatcatattgaatgggcaaaaactggaagcattccttttgcaaaccagtacaagacaaggatgccctctctcaycactcctattcaacatagtactggaagttctggccagggcaatcaggcaacagaaggaaataaatcatattcaaataggaagagaggaaatcaaattatc

SEQ ID NO: 121194 - DNA, 201 bp, Homo sapiens
ttcttaattttcaaaaggaatttattgaatttaatctgagccagtaagacgggctttgatgttaagtaatagagattagttgcccctctctgatgtctacrttactgaacagttattaactaccaaactcctgtgacacagtatccttcaaattccaaaacttagctacagtttaccttactaaaatctctgctactggta

SEQ ID NO: 121195 - DNA, 201 bp, Homo sapiens
ctaagggtttcaggtctaatggcatcccctgaggtagtaggtagataagctggtcatcaggttagagcctgtattttgaatcaattcatgtgtagtccttmcgaccattcattctacagattctggtatctgcccacctctcaggcccctctctcattgcgccctgtacccacagtactcatgctttgcccattctgaatc

SEQ ID NO: 121196 - DNA, 201 bp, Homo sapiens
ggtcaagcatgccaggatgaggggccaagggtgtactgaatgccagcctgtgcttcatttgccaagccttgcatctgatgtaggactgtatcctcacaggrgacaccttttcctaatacacacaaaggtatcatgtgggctagcagctgttctgctataacttagctaggtgtctttacaggagaaggtagtggaagaggt

SEQ ID NO: 121197 - DNA, 201 bp, Homo sapiens
aagtatcctacaaactggggatgcatcttaattaattctggccaggttcaatggcatttaagagcaggattggcaagtggccttgaaaatgtgctcagtayagccaagttgtacccttgaggacctctatacttaagatgtacctgtgtttctgctccccatcaactgggatccatagatctctctttgtaatcaagaccc

SEQ ID NO: 121198 - DNA, 201 bp, Homo sapiens
tcctcaataaaatactggcaaaccgagtccagcagtacatcagaaaatttatctgctatgatcaagtcagcttcatccctgggatgcaagtctggttcaaygtacacaaatcgataaacgtaatccatcacataaacagaaccaaagacaaaaaccacattattatctcaatagatggagaaaaggtatttgataaaattc

SEQ ID NO: 121199 - DNA, 201 bp, Homo sapiens
ggagggactcctccctaattcattttatgaagccagcatcatcctgataccaagacagggaagaagcacaacaaaaagagaaaatttcaggccaatatccrtgatgaacatcgacacaaaaatcctcaataaaatactggcaaaccgagtccagcagtacatcagaaaatttatctgctatgatcaagtcagcttcatccc

SEQ ID NO: 121200 - DNA, 201 bp, Homo sapiens
atagaccattagataaacgaataaagaggaaaagagagaagaatcaaataaataatgatacaatattgtgtaccatcattttacatttccatataaaagcrttaaacacaataagaaatgataaagaggatgtcaccactgatcccacagaaatgcaaactaccatcagaggatactataaatacctctgtgcaaattaac

SEQ ID NO: 121201 - DNA, 201 bp, Homo sapiens
ccagaatctctgcgacatagctaaagcagtgttaagcgggaaatttatagtactaaatgcccatatcagaaagctaaaaagatctcaaattgacaccctamcatcacaattaaaagagctagagaggcaagagcaaactaaccctagcagaaaacaagaagtaactaagatcagagcagaattgaatgagatggagacatg

SEQ ID NO: 121202 - DNA, 201 bp, Homo sapiens
gactacaggcacccaccaccactgccggctaatttttgtatttttagtagagacagggttttaccatgttggccagactggtctcaaactcctgacttcargtgatccacccgcctcaacctcccaaagtgctgggataacaggcttgaaccaccatgcctggcccagtcctatacctttaaagtccatccatgtctctaa

SEQ ID NO: 121203 - DNA, 201 bp, Homo sapiens
atgacacattttcatcattggtctgtgaggaccctaaccttattcttcagtaagtctattgatatatttattatttttcttcctactcctttccccctccctgcagaggcaggcattctattatattttatatacaccttttttattgcacacacccttgtcaaaaaattattgtcatacgtatatgtattttaatttcca

SEQ ID NO: 121204 - DNA, 201 bp, Homo sapiens
tgtgtatattagtcattgttctctagagaaaaaggaccaacaggatgtgtatgtatatatgcgtgtgtgtgtgtgtgtgtgtgtgtgtgtgtgtgtgtgtgtatgtgtgtatagagagagatattgagaaggagatattttaaagaattgcctcatgagattgtgggagtaagccagtaggctggagactcagaaagattt

SEQ ID NO: 121205 - DNA, 201 bp, Homo sapiens
aagctcattaataattttcttctctcagtaagtgaagacgaatcctttaatttgaagtggccttcacactaatgagtcatgtcattactctggaatcctttaagttgattttttatcttgttgactcagtgaggtagaaattaaggacagctcccattagctttatgtatttcttgaagcatctgctcatgatggcaaact

SEQ ID NO: 121206 - DNA, 201 bp, Homo sapiens
ggagttccagaccagcctggccaacatggtgacatcccatctctactaaaaaaaaaaaaaaaaaattcaaaaattagttgggcctggtggcacacacctgyaatcccagctacttgggaggctgaggcagaagaattgcttgagcccgggaggtggaggttgcagtaagctgagatcaagatcacgccactgcactccagc

SEQ ID NO: 121207 - DNA, 201 bp, Homo sapiens
catgtattttaattttatatatattttaaattccccaaacataaacattgttattttgtgccatatatatacagacatatatatatatatacacacacacrcgcgcgtacatacatgcatatacacacacacacacaaacacacatggagaggaaaagaaggtgggagaaagggagggagattgatagagagcctcactat

SEQ ID NO: 121208 - DNA, 201 bp, Homo sapiens
tttgggaggccaaggcaggtggatcacttgaggtcaggagttccagaccagcctggccaacatggtgacatcccatctctactaaaaaaaaaaaaaaaaaattcaaaaattagttgggcctggtggcacacacctgtaatcccagctacttgggaggctgaggcagaagaattgcttgagcccgggaggtggaggttgcag

SEQ ID NO: 121209 - DNA, 201 bp, Homo sapiens
ggtattattgtcatgtattttaattttatatatattttaaattccccaaacataaacattgttattttgtgccatatatatacagacatatatatatatayacacacacacacgcgcgtacatacatgcatatacacacacacacacaaacacacatggagaggaaaagaaggtgggagaaagggagggagattgatagag

SEQ ID NO: 121210 - DNA, 201 bp, Homo sapiens
ctttgggaggccaaggcaggtggatcacttgaggtcaggagttccagaccagcctggccaacatggtgacatcccatctctactaaaaaaaaaaaaaaaaaattcaaaaattagttgggcctggtggcacacacctgtaatcccagctacttgggaggctgaggcagaagaattgcttgagcccgggaggtggaggttgca

SEQ ID NO: 121211 - DNA, 201 bp, Homo sapiens
ttctacttgaattattttgtttgttaatgtacttattgatgtatttggatttatatccaccttattattatttagcctacctgatcttttttaaatgcctwtggtttttctttcttttagattaatcaggtgatttgtcattcaatagtttattatcttattatttttacattttaaacaattcttttaatgcctaagaga

SEQ ID NO: 121212 - DNA, 201 bp, Homo sapiens
actttgggaggccaaggcaggtggatcacttgaggtcaggagttccagaccagcctggccaacatggtgacatcccatctctactaaaaaaaaaaaaaaaaaattcaaaaattagttgggcctggtggcacacacctgtaatcccagctacttgggaggctgaggcagaagaattgcttgagcccgggaggtggaggttgc

SEQ ID NO: 121213 - DNA, 201 bp, Homo sapiens
gaaaacatcctcttgggagagtcagcagcattaaggcatagcaatatttttgttcaggatgcattaggtatctctgattttccaatatcttaaatgctagyagcagcttcagatatgaaattacttagtaagcaattctaataggagaaacaagatctaaaagagaaacatataaggaatcctacttctggctctcaatgg

SEQ ID NO: 121214 - DNA, 201 bp, Homo sapiens
gattagaattttaggaaggctctcaaataatgcaacaataaattcttcaatacccagttgtcagatgtttcagtaaattgcaaatatcagattactttttwaaaatatttcaaacacacacttggaattaaacaagaaccatatattagaaaaggaaataagcttaccttttctattgtaagactccaagcacccacatgg

SEQ ID NO: 121215 - DNA, 201 bp, Homo sapiens
tttcagtaaattgcaaatatcagattactttttaaaaatatttcaaacacacacttggaattaaacaagaaccatatattagaaaaggaaataagcttacyttttctattgtaagactccaagcacccacatggatcttcatggtggagattttaacaacactgctaatactgacttacttccaatcagagctgagagagc

SEQ ID NO: 121216 - DNA, 201 bp, Homo sapiens
tttattcaccaaacatgcattgagcactcacgctgtatcagacacaatcgttagtactaaatgtaagaaatcctgagatcctcaaataaaatagcagaatrtgggtggatttgagtagactggtttagaagatattgaggaaggtgatttgatggtaactaaatatgagagtagtgagcgcattaagattaactctcaagt

SEQ ID NO: 121217 - DNA, 201 bp, Homo sapiens
gcctgaccaacatggtgaaaccctgtctctactaaaaatacaaaaaaattagccaagcattgtgatgcacgcctatagcctagctactcaggaggctaagrcaggagaatcacttgaacccggaaggcagaggttgcagtgagccaagatcgtgccacgaaactctgtctggaaaaaaataaaataaaatgtatcacttag

SEQ ID NO: 121218 - DNA, 201 bp, Homo sapiens
attcgtagctgaaatctcagtggaactaaggagagttaattaggcattcccaaaaatacacatcgttttatgattttgcagatcaccccgatgaaaataasagtttaattttgtcaagtcatgtaaattatagtgagagggatgatgagagttctcagctctttggagaagttaattttgttgtcagcacatccacatttc

SEQ ID NO: 121219 - DNA, 201 bp, Homo sapiens
agtcttgatttattagtgaatcttcatgttcgaccattctatgtcattttcatgtaattatgattctagtaaagagaatgtagctaaaattattatgtatrtctgacatggcttctatttttaatgaggagttttacttaattcacatttgttgtaatgatcgaaatatttaatcatgtataacctgcttgtttatttttc

SEQ ID NO: 121220 - DNA, 201 bp, Homo sapiens
attaatcaagccaaccttgattaattaaaccttttaaatttaaaccttttaaaggcttactgtaaattattgctgtgtttattttccacccttattaattmtttccttcaactttgttttactttctttgttgtttattaagttgattatttaattattttcaacatttttgctattaattggtacatttttaaggctact

SEQ ID NO: 121221 - DNA, 201 bp, Homo sapiens
ttcatctctgacttgaagttttgggatcttatcatattttttcatagactagctaaatgtttgtttattttatctttaaaaaaaccaactcttttgttgtkttttttaattttttagtctctgtttatttctgctctgagctttattatttcctttcttctaccaattctggcttagtttcttcttgtttgtctattttct

SEQ ID NO: 121222 - DNA, 201 bp, Homo sapiens
atttcctagtcttctattttctggaatagtgtgacaagcatcagtattgttctttaaatgtttgatagaattcagcagtgaagccatcaggctgggctttktattttattttttgatggagggtattttattactgattcaatttcctcactcatcattgatctgtccaaattttcagtttcttcataatttaatcttaca

SEQ ID NO: 121223 - DNA, 201 bp, Homo sapiens
gcctattgaggaattttcaaggcaaagtgaattcatgtgacctggattcattattatttaagattattaacacatttttagaccgaattggcagtaaggaragggaggaaggaaacatctattgaggtcataccaggtgctgggtgctgtagtgggcacttctatgcatgttagctcaactgacgataccagagaagtgga

SEQ ID NO: 121224 - DNA, 201 bp, Homo sapiens
tatgtggcctttcctgtgttgaggtacataccttttatacttaatttgtggagagtttttatcacgaagggtgttgaatattgccagaagctttttctccrtttatttaaatgatcatatggtttttttcctcttactttttgttaatgtggttgtatggtttggatatggtttgtttgtccctaccaaaggtcatgttga

SEQ ID NO: 121225 - DNA, 201 bp, Homo sapiens
gtgttgtgggtttgtcatatgtggcctttcctgtgttgaggtacataccttttatacttaatttgtggagagtttttatcacgaagggtgttgaatattgycagaagctttttctccatttatttaaatgatcatatggtttttttcctcttactttttgttaatgtggttgtatggtttggatatggtttgtttgtccct

SEQ ID NO: 121226 - DNA, 201 bp, Homo sapiens
tgtgtttatttcacattgacttttgccgtgagctttgagggagacaacaccatcacatatgtgtaaattgtaaaagaattgggagagaatagctttgggakatcattttcttactggccatgatgaagaaagctgtatcgtaggaaaattactaggtaattttactcacttgataaagttaatttgcaaggtatcattcga

SEQ ID NO: 121227 - DNA, 201 bp, Homo sapiens
ttaaaaggataaggcccagtaagatagaagtgagcacaaaagcaaggggctgctgggctccattggcatagaatataggcagagtgggcttgggccaccasctgtctcctggggttctcaggcctggagtcctgggggagcctcttgtccttttcgcttctctagcctccttgaaggaagaatctgaagggagtgatccag

SEQ ID NO: 121228 - DNA, 201 bp, Homo sapiens
attttctttttctatttctttattttgataagaatttggtattttggtattttggtatttggtgttttgataagaattgcattacatctgtggataacttygggtagtatggacattttaacaatatcaattcttctaatctataaatatgtgatatctttccatttacttgtgtcttcctctatttctttcctcagcgtt

SEQ ID NO: 121229 - DNA, 201 bp, Homo sapiens
tttgcatttccctgattattaatgctgtcaagcattttctcatgtgcctattggccatttgtgtgtctcactttttcttttgaaaaatatctatttttcartatattgggttttttttcttttgtttaagtccctaatatattctggatgttaactccttgtcgaatgtatagtttacaaatattttctcccattctatag

SEQ ID NO: 121230 - DNA, 201 bp, Homo sapiens
atttgcatttccctgattattaatgctgtcaagcattttctcatgtgcctattggccatttgtgtgtctcactttttcttttgaaaaatatctatttttcratatattgggttttttttcttttgtttaagtccctaatatattctggatgttaactccttgtcgaatgtatagtttacaaatattttctcccattctata

SEQ ID NO: 121231 - DNA, 201 bp, Homo sapiens
tcgactggaggagttctgtgtttgtgttttcctattataaagagttcgggagaaagtggggtgcttgctaaccattggttctctctcctgtcttctcttccttttctctcatcttgccctttctcttttgccattgccccttttctcatttttcgttctcttatttgttctttccttctccctccacttctccttcgcctt

SEQ ID NO: 121232 - DNA, 201 bp, Homo sapiens
ttactcgactggaggagttctgtgtttgtgttttcctattataaagagttcgggagaaagtggggtgcttgctaaccattggttctctctcctgtcttctcttccttttctctcatcttgccctttctcttttgccattgccccttttctcatttttcgttctcttatttgttctttccttctccctccacttctccttcg

SEQ ID NO: 121233 - DNA, 201 bp, Homo sapiens
gagataacccatataacccttgccccatccgtgcacagccttccctgtgaccaagatcccccatcagggtgctatatttgttacaattgatgatcctaaaytgacacatcattatcacccaaagtccatagtttatactaggattcactcttggtgttgtacatcctatgagttttggacaaatatatccaccattgtgtc

SEQ ID NO: 121234 - DNA, 201 bp, Homo sapiens
tataacccttgccccatccgtgcacagccttccctgtgaccaagatcccccatcagggtgctatatttgttacaattgatgatcctaaattgacacatcaktatcacccaaagtccatagtttatactaggattcactcttggtgttgtacatcctatgagttttggacaaatatatccaccattgtgtcacgcagaatag

SEQ ID NO: 121235 - DNA, 201 bp, Homo sapiens
gatttgcatttccctgattattaatgctgtcaagcattttctcatgtgcctattggccatttgtgtgtctcactttttcttttgaaaaatatctatttttmaatatattgggttttttttcttttgtttaagtccctaatatattctggatgttaactccttgtcgaatgtatagtttacaaatattttctcccattctat

SEQ ID NO: 121236 - DNA, 201 bp, Homo sapiens
gtatcttaggatccaagtttggaattatttcctgacattaatctcttcttcctctgtgctcccataacataatttcttctttttaaatggttgttttaaakagaaaaatgtcgtacttgaatattttgatttttatgggggaaaaatttactactatgaaaaaaatagaataaaactatgtgaaagaacgcctccatttct

SEQ ID NO: 121237 - DNA, 201 bp, Homo sapiens
gcctccaccttttaccttcccccactcactaactcctgctgctgctcacatccctagcctgtgtgcggtgcccctcccctttcctcccacagtgacctgarcacagctcgggtatttatgcctctgttctccccggtaggtttaaagattctttagagcaaagatacagaattttcatcttcccttttccagcccttgtgc

SEQ ID NO: 121238 - DNA, 201 bp, Homo sapiens
gaagccatgctaattctgacactttgaaatgtaagagcagttcttgaggtattgaatctacatgaaagggatggaataaactggaaatgatttataccaacgagatttgagttaggggaatgtgttagttttctattgctgctataacaaattatcaccaactttgtggtttaaaacaacacaaagttattttatacagtt

SEQ ID NO: 121239 - DNA, 201 bp, Homo sapiens
agaagccatgctaattctgacactttgaaatgtaagagcagttcttgaggtattgaatctacatgaaagggatggaataaactggaaatgatttataccaacgagatttgagttaggggaatgtgttagttttctattgctgctataacaaattatcaccaactttgtggtttaaaacaacacaaagttattttatacagt

SEQ ID NO: 121240 - DNA, 201 bp, Homo sapiens
aaacaacttgaaacaaggcattgtggtgtcttaaatggtaattcaaataaaatgaagtgattgatacatttttacttgtttggaaagtggagaatatttcrgaattgcaaaacattgcacttttatatacatttatcctttcattatcctaatgtagggtagataggacagttgattgcatccaacttcatttatttggct

SEQ ID NO: 121241 - DNA, 201 bp, Homo sapiens
ggactacaggggcccgccaccatgcccagctaattttttgtatttttagtagagacggggtttcaccgtgttagacaggatggtctcaatctcctgacctsgtgatccgcccatctcggcctcccaaagtactgggattataggctgctaggcattcttttttttaatggatttcagtgtttaaagaattcaagaagagcc

SEQ ID NO: 121242 - DNA, 201 bp, Homo sapiens
gagaagccatgctaattctgacactttgaaatgtaagagcagttcttgaggtattgaatctacatgaaagggatggaataaactggaaatgatttataccaacgagatttgagttaggggaatgtgttagttttctattgctgctataacaaattatcaccaactttgtggtttaaaacaacacaaagttattttatacag

SEQ ID NO: 121243 - DNA, 201 bp, Homo sapiens
caaacaacttgaaacaaggcattgtggtgtcttaaatggtaattcaaataaaatgaagtgattgatacatttttacttgtttggaaagtggagaatatttyggaattgcaaaacattgcacttttatatacatttatcctttcattatcctaatgtagggtagataggacagttgattgcatccaacttcatttatttggc

SEQ ID NO: 121244 - DNA, 201 bp, Homo sapiens
gtatgaaaaatttgttgagccgagtgtcatacattataaactgacatgtacttactgttgtttaatctaattggtggttgttaaatctaaaggatgttctractacttcaataaaggcagcagcaatcacttccataaataaatcattagacgtagaacacatgtgtaaacaggtagagtcttctaatttgctaagtgttg

SEQ ID NO: 121245 - DNA, 201 bp, Homo sapiens
tttggggaagagttggtatctttgtaacattataatgttgagtctttctatctatatttctatccaaatctacttatttagatcttcactgtctttcgtcrctataataaatggtatctttcagtatcatgtattctcattattgctaggcattctttttttttttttttgagatggagtctcgctctgtcatcccaggct

SEQ ID NO: 121246 - DNA, 201 bp, Homo sapiens
gtcaaattatcaaactattccttatggttgatattttgttgtcttatttttaaaattattttctactccaacctcatatatatttgtgtatgcctatgtgygtgtgtgtatttacatatgggcttatatatttgggcaatgtggtactgatatatttgggcagtgtggtactgacacaaagacagaccaatgagacacaat

SEQ ID NO: 121247 - DNA, 201 bp, Homo sapiens
ttgggttcgaacaaagggccttgccagagtgggctggaatccagagcccatctggattccactcaggtgggaccaagcctgtgctctggccatctgggagyaaggggtcctttttctaatggatcctccccggaaaggctcctttgtgcaattcatctgaccggagaaggtcctctccttaagtccttcctcttccctcag

SEQ ID NO: 121248 - DNA, 201 bp, Homo sapiens
agtgacattttctcagaacttatatggataagttacactgaacagttcaagggtttgcagctgcttggaatatttaagaaaaaaatatctctagttcttaygcatttcatatggtctgaccagtgctcaacactagctaatgttcactgaggctgtaaccatcagtagttatgtcgtaatagcttttgtttctcgagagct

SEQ ID NO: 121249 - DNA, 201 bp, Homo sapiens
  misc_feature (1)...(201): n = A,T,C or G
tagtaatgtgaatttcaaagaagatcactttgggataatgaacagcatgacagaatccgggagcctaatgaagaagatgtgatatagtaaaagaaatatantgagtgtaggctttgaatagggcagaaggagtggaactagagaggcaagaggagatgtgattacggaaggtcttgtatatcataccaagggtctgcactt

SEQ ID NO: 121250 - DNA, 201 bp, Homo sapiens
agaaaaatggtcatatgtcacattattctatataaatatgaagcctattcacaaagggctttggaaatttctgatctctccttagcccagagcaatgcaawtaatgaaatgtattttggtttttcattagttagagttagccctcagggtatcacccagacatacctataagccctagagtcatttgcggggaggtatcag

SEQ ID NO: 121251 - DNA, 201 bp, Homo sapiens
attatccatgcaggtcataaattcgagttccaaaaaatgtaaaggaggtcatccttttgggcctccttcatgaggccccagcataccagacctaaccagaatggagtcttctcatgctaagtgccatgtaatcaaactgaacttagaaactagccagtttcgaaaacaggagtttcacagcaccaaatccaaaggtgccct

SEQ ID NO: 121252 - DNA, 201 bp, Homo sapiens
tttgctaaggagtgctttacttccaactatgtggtcaattttggaataagtgcgatgtggtgatgagaagaatgtatattttgttgatttggggtggagakttctgtagatgtctattaggtctgcttggtgcagagctgagttcaattcctggatatccttgttaaccttctgtctcattgatctgtctaatgttgacag

SEQ ID NO: 121253 - DNA, 201 bp, Homo sapiens
tcttgccaggtcatataaaatagaatttgctactattacttgtatttgatttcccctgataggctattcagctaggccagccttctatgactgaaaaaaaatctttaacaaacaaagctgacaaaacaaagtagtaaactagcctgctttgggtttcaaggtgagtctccggtggactctggagcagaaatcctaagtttc

SEQ ID NO: 121254 - DNA, 201 bp, Homo sapiens
agctagcctgccatgagttagacttgtaacaagtcagattgcaatctccagtaaccatctaggaagctaaacaataacttcaacaattgacctcaagtggycaggacttgatcaataactggcagcttccctaattttgtgtccccatttttaacttaggatgaacgagagacagccaaataacacacccctaacaaatca

SEQ ID NO: 121255 - DNA, 201 bp, Homo sapiens
attcctggactcaggcgatccttctacttcagactcctaagtagctaggattactgttgcatgccactatgcctggctaattaatttttttttttttttttgtagaggcagggtctctctatattgcccaggctggtcttgacgggctcaaacaatcctctgacctcagcctcccaaagtgctgagatttaccggcattag

SEQ ID NO: 121256 - DNA, 201 bp, Homo sapiens
ggaagcatggttgggagacctcaggaaacttacaactgtggtgggagggcaaaggggaagcaagcacatcttcacagggcagagagagagagagagagagaaggggaaagtgctacatacttccaaataaccaaatcttgtgagaactgtaccatgagaacagcaagggggaagtttgcctccaatagttaaatcagctcc

SEQ ID NO: 121257 - DNA, 201 bp, Homo sapiens
aggaagcatggttgggagacctcaggaaacttacaactgtggtgggagggcaaaggggaagcaagcacatcttcacagggcagagagagagagagagagagaaggggaaagtgctacatacttccaaataaccaaatcttgtgagaactgtaccatgagaacagcaagggggaagtttgcctccaatagttaaatcagctc

SEQ ID NO: 121258 - DNA, 201 bp, Homo sapiens
caggaagcatggttgggagacctcaggaaacttacaactgtggtgggagggcaaaggggaagcaagcacatcttcacagggcagagagagagagagagagagaaggggaaagtgctacatacttccaaataaccaaatcttgtgagaactgtaccatgagaacagcaagggggaagtttgcctccaatagttaaatcagct

SEQ ID NO: 121259 - DNA, 201 bp, Homo sapiens
tcaatatccacagcaataattattttttgcctgaaaattacaggagcagattatttcattcatttaatgtattgattcaccaacatctcttgcacatctartatgtgccaaataataagtttccagagccaggggtatgttgtccttttccttaaggcattgtattctaacttattggggtagacagaaatatgactaaat

SEQ ID NO: 121260 - DNA, 201 bp, Homo sapiens
ctcattccacagctacctcccacccttatctcatactgggacatttgcatttggcaactgatttcctagcagtaacatccctggggtggccctacatgtcrctgctccttttctcactgtagatgatggatcagctgctgtgtgtccctgaaggaaggcagctttcaggaggtggacagctgtgtgtgaataaaacagggg

SEQ ID NO: 121261 - DNA, 201 bp, Homo sapiens
tgagatcacaccactgcactccagcctggatgacagagcaagactccatctcaaaaaaaaacatctgtatgtatttagtaggtaagggtgaaaatgattaytatagtgtgtgtgggagtgggaggaaattagcccatgtactattggactggtgatgtttctaagggattgttgtatatgcgaaattgatcttccatttac

SEQ ID NO: 121262 - DNA, 201 bp, Homo sapiens
aggcagatattatctttacagcaaaggagactgaggctcagagaggtgacacaggcagtgaatagcatgtccaggaccagaagccaggtcttttttgtttyaaatccaggtttgatggattttcttccctcattccacagctacctcccacccttatctcatactgggacatttgcatttggcaactgatttcctagcagt

SEQ ID NO: 121263 - DNA, 201 bp, Homo sapiens
acaggaagcatggttgggagacctcaggaaacttacaactgtggtgggagggcaaaggggaagcaagcacatcttcacagggcagagagagagagagagagagaaggggaaagtgctacatacttccaaataaccaaatcttgtgagaactgtaccatgagaacagcaagggggaagtttgcctccaatagttaaatcagc

SEQ ID NO: 121264 - DNA, 201 bp, Homo sapiens
acaccactgcactccagcctggatgacagagcaagactccatctcaaaaaaaaacatctgtatgtatttagtaggtaagggtgaaaatgattattatagtrtgtgtgggagtgggaggaaattagcccatgtactattggactggtgatgtttctaagggattgttgtatatgcgaaattgatcttccatttacctactct

SEQ ID NO: 121265 - DNA, 201 bp, Homo sapiens
gaagggaatggagaaattggaagactaggtagatgctagactcttactttttagtgtatatttcctccttctcccctaaacctttttttttttaaaaaaaagaaaacattttattatgagataattatagattcacatgcagttgtaagaaataatacaaagagatcccatatatctttcatccagttttctccaatgata

SEQ ID NO: 121266 - DNA, 201 bp, Homo sapiens
ccttaagggatcctggccctgcagggctgtatggtctcacaggcaagggtgcctatctgctgggagaaaatgctttgtgtgctcatattcatgcaagtaagttcttagattattgtcttacataaagtgatttgtaccctttgcctatggttaccaccaccacccctgtgataagtccatagcttcccaaactccaggcac

SEQ ID NO: 121267 - DNA, 201 bp, Homo sapiens
ttttgaagcagatttctggaatcatcttcaggactttcgtgagctcattgtaatgtgttatgtgaaatgcatgtcctcaaaacatgggtggttgtataaaygaggaagctggcctcatggagccaaagcagcatggaaaggcccaaataacttgctgtggggaagactgactgcctctggggtttttaatcagcatgaaaa

SEQ ID NO: 121268 - DNA, 201 bp, Homo sapiens
gagtcccagctctccctttatgctgggcaaacagtgtcgctcttctgcagttccattcccatgttagtaatataggcacgaccatttctgccttgccataytgtgttcagaactaaaggtgattgtgcatgtaaagtgcctcactcccagtgggctttcaggcatccccaggtgctgcgttttattcagttaaaaaagtca

SEQ ID NO: 121269 - DNA, 201 bp, Homo sapiens
ggatagaagtcagtttgcagtgacttccctgatcctaccagccagacatgctccttgcctctcttcttgcctcctcctttaatatttaaaatatttttttwaattttatttatttatttactttttgtagagatagggtcttgctatgttggccaggctggtctctaagtcctgggctcaagtgatcctcctgcttcaacc

SEQ ID NO: 121270 - DNA, 201 bp, Homo sapiens
tagagactagaaaatgttttacatagagaaactaatttatatgcagattagaaaatgtttttggagtttattttcccactagtaaagccaatttttttctrtgtaatgaatccattcacctacccatctacccatcagtctacccattcacatgtccatccatccatccattcatccatccatccatccacccacccagtc

SEQ ID NO: 121271 - DNA, 201 bp, Homo sapiens
actataaagtaatacccgagactgggtaatttataaagaaaataggtttaattgatccacagttctacaggctatgcaggaagcatgatgctggcatctcstctgcttctggggaggcctcaggaaccttacaatcatggcggaaagcaaaaagggggagttggcacttcacatggctgaagcaggaagaagagagagagg

SEQ ID NO: 121272 - DNA, 201 bp, Homo sapiens
ttgaacccaggaggtgaaggttgcagtgcgctgagatcacgccactgcactccagcctgggcaacagagtgagactctgtatcaaaaaaaaaaaaaaaaaaagagagaaagaaagatacctgagactgggtaatttataaagaaaagaggtttaattggctctgggttccataggctgtacaggaagcatgacactggcat

SEQ ID NO: 121273 - DNA, 201 bp, Homo sapiens
cttgaacccaggaggtgaaggttgcagtgcgctgagatcacgccactgcactccagcctgggcaacagagtgagactctgtatcaaaaaaaaaaaaaaaaaaagagagaaagaaagatacctgagactgggtaatttataaagaaaagaggtttaattggctctgggttccataggctgtacaggaagcatgacactggca

SEQ ID NO: 121274 - DNA, 201 bp, Homo sapiens
cacttgaacccaggaggtgaaggttgcagtgcgctgagatcacgccactgcactccagcctgggcaacagagtgagactctgtatcaaaaaaaaaaaaaawaaaagagagaaagaaagatacctgagactgggtaatttataaagaaaagaggtttaattggctctgggttccataggctgtacaggaagcatgacactgg

SEQ ID NO: 121275 - DNA, 201 bp, Homo sapiens
gaatcacttgaacccaggaggtgaaggttgcagtgcgctgagatcacgccactgcactccagcctgggcaacagagtgagactctgtatcaaaaaaaaaawaaaaaaaagagagaaagaaagatacctgagactgggtaatttataaagaaaagaggtttaattggctctgggttccataggctgtacaggaagcatgaca

SEQ ID NO: 121276 - DNA, 201 bp, Homo sapiens
tgtgtgcttggatttcatgcttaaaaaattcagcaatagtttcaatgctcttttaattaaaataagatgctttataacatttcccacatgatgtggaatgyactctgtagctcatatatgaattaaaacccttagaagatttacattttctggtctggcaaccttcatttttctaatttatgtgtcctgtttgtcctgaag

SEQ ID NO: 121277 - DNA, 201 bp, Homo sapiens
ttatcttcctttggttcatccttcaaacatagaggacaaactgcgtcttctgtctgggatgctcttctcttctgtttccacctatttagatcttttacctyttagatcaatcatcattcccttgaagaagcaccttctgatcttcctgaatagatcaaatccactattagagtctgtactggcatcaggttattaaaatac

SEQ ID NO: 121278 - DNA, 201 bp, Homo sapiens
ggccaaaacaaattaagtaatttatttaataacactgactccttgccgcatgccaacccccgatctagactctggtgatatagcaatgaacagtagggttaaaaaaaaaaaaaaaaaaaagcctaatagaatttacatgccagtgcaggaacaggggagaaagggacaaaaataacactagtaagtaaattataggatgtt

SEQ ID NO: 121279 - DNA, 201 bp, Homo sapiens
gagatgagacacacctttttatgctccaatgaattagaaatttctcaaagagaattttaacaaattttctttacacacacacacacacacacacacacacmtgcacttcatcttagcagtaaaagccaagattcagaatttcagcccaagagatctttcattttctgaaaggttatgagcccctgagatttcattcctttc

SEQ ID NO: 121280 - DNA, 201 bp, Homo sapiens
cataccttcatcatttattagatgtgatatttttataataaaaatttcctcctttttattctttggtgaccagtagtacaactagtgtagccaagggaggwtaaactcttgattcttttatttacagttttcaaaattatcattagttccctacagtatccctcggtactcaataattttttactatcatgaagaacacat

SEQ ID NO: 121281 - DNA, 201 bp, Homo sapiens
gatgattcgtttcatttctaacagaaccagttgttcaaaactattgtcttgtttccagtgccaaagctgtggatattcaatgatgtttatcactctccccytgccgctgcagtcctaccctgcactgctaatcctccctcagcaaacagatgcccctggaacaatgtaggggtgagcacaaagaaattcaggagaagaaag

SEQ ID NO: 121282 - DNA, 201 bp, Homo sapiens
agcaggtgtaaaggagggaggcaggagtgagagatgcaataaatttttctaaagtagctgggtcaggaaaatttgaagagctagataaagattacagtagrattcccagggttctatatttttagagggattctgggtaccaggaaaattcaataagaaattctggggttaggacataatttttataaaagatttattaaa

SEQ ID NO: 121283 - DNA, 201 bp, Homo sapiens
gccctattccttagcaaattaataatggggctcagagaagtccttaagaattcaactggagacttgtgtatctgaattgtgtttatgtgttcatttctttsattgaacaacaacacatgtcctaaggacagggactacacccatctccattttattctcagatctagcatagcggtggttagccataaaatacagtaccaa

SEQ ID NO: 121284 - DNA, 201 bp, Homo sapiens
agagattttatttactttgtgaggaacaaaatgctgctcttttatcttttctcctcctttataacactcatcacctctccccactaagtttgtggacaagraatgtattctgtttatctatgcattcccagcccagaggaaggtactggcccagagtaaatgctcattaaatattgtgaataaatgggcaaaaggatagaa

SEQ ID NO: 121285 - DNA, 201 bp, Homo sapiens
actcaaatgcattattcatgtaacatttctgttggttttttttcaacataaaaatttcaagagaaaacctagctcatttcaaaatccagattttaaaaagrttatttttgatttttattttttaaagcaacggggtctccctatgttgcccaggctggtcttgaactcctgggcttgagtgatctttccttctgagcctcc

SEQ ID NO: 121286 - DNA, 201 bp, Homo sapiens
catttactctttcatcgccccactttgggttcttctgctctgccgccatctatttggcctgtacccactgttcactaatgaaagcccgtagcttctaaaaygggccaagattcacagttgatataagctgagaaagactgacaagttattctgccgaatgatactggaaaaaagaataggatagagggctaatgatgttat

SEQ ID NO: 121287 - DNA, 201 bp, Homo sapiens
aatctccaaactgcttttctttctttctttctttctttctttctttctttctttctttctttctttctttctttctttctttctttctttctttcttctttctttctttctttctttccttctttctttcttttaattatactttaagttctgggatacttgtacagaatgtgcaggtttgttacataggtatacatgggc

SEQ ID NO: 121288 - DNA, 201 bp, Homo sapiens
aaatctccaaactgcttttctttctttctttctttctttctttctttctttctttctttctttctttctttctttctttctttctttctttctttcttctttctttctttctttctttccttctttctttcttttaattatactttaagttctgggatacttgtacagaatgtgcaggtttgttacataggtatacatggg

SEQ ID NO: 121289 - DNA, 201 bp, Homo sapiens
agaaatctccaaactgcttttctttctttctttctttctttctttctttctttctttctttctttctttctttctttctttctttctttctttctttcttctttctttctttctttctttccttctttctttcttttaattatactttaagttctgggatacttgtacagaatgtgcaggtttgttacataggtatacatg

SEQ ID NO: 121290 - DNA, 201 bp, Homo sapiens
ttcagaaatctccaaactgcttttctttctttctttctttctttctttctttctttctttctttctttctttctttctttctttctttctttctttctttcttctttctttctttctttctttccttctttctttcttttaattatactttaagttctgggatacttgtacagaatgtgcaggtttgttacataggtatac

SEQ ID NO: 121291 - DNA, 201 bp, Homo sapiens
cggcacctgggacccagtattgctgaagcataaccccccggagtctacccctacagccccagtgttgctgaggaaggcatccaaagagacttcgggaaggrtagtcagagaatgcagagagcttcacagcaagcaccagccaggggcttagctggaccccaggtttctaggtgatcatcaggtagcatatactctgtgatc

SEQ ID NO: 121292 - DNA, 201 bp, Homo sapiens
tttcagaaatctccaaactgcttttctttctttctttctttctttctttctttctttctttctttctttctttctttctttctttctttctttctttctttcttctttctttctttctttctttccttctttctttcttttaattatactttaagttctgggatacttgtacagaatgtgcaggtttgttacataggtata

SEQ ID NO: 121293 - DNA, 201 bp, Homo sapiens
agaacttaaaacagaattaccatttgccctaggaatcccattgtatacccaaagaaatataaatcattctaccataaagacacatccatgcatatgtttaytgtatcactattcaaaataacaaagacatgggatccacctaaatgcccattgatggtagggtggataaagaaatgtggtacatatacaccatggaatact

SEQ ID NO: 121294 - DNA, 201 bp, Homo sapiens
tctgtggacaggacagctcccagagtctgcacagaaagacctaggaaggcagcatcgtgtttgaagttcggcacctgggacccagtattgctgaagcatarccccccggagtctacccctacagccccagtgttgctgaggaaggcatccaaagagacttcgggaagggtagtcagagaatgcagagagcttcacagcaag

SEQ ID NO: 121295 - DNA, 201 bp, Homo sapiens
ggcccactactatagttatataatgacaggaaaatttcaacattctaatctctgtggacaggacagctcccagagtctgcacagaaagacctaggaaggcrgcatcgtgtttgaagttcggcacctgggacccagtattgctgaagcataaccccccggagtctacccctacagccccagtgttgctgaggaaggcatcca

SEQ ID NO: 121296 - DNA, 201 bp, Homo sapiens
ctttcagaaatctccaaactgcttttctttctttctttctttctttctttctttctttctttctttctttctttctttctttctttctttctttctttctttcttctttctttctttctttctttccttctttctttcttttaattatactttaagttctgggatacttgtacagaatgtgcaggtttgttacataggtat

SEQ ID NO: 121297 - DNA, 201 bp, Homo sapiens
tgtcacaaaagtattactaatattttgtattaaatggtcattgaagaaaatcatcatgtgtagttgagcatcagcattggtcagcatctgtatagaacttkaaagcctataaagggaggacttttatggactttatcagaagcaagcttcataaatctgtggagaaggggctcttctctccattttgcagttgagaaatca

SEQ ID NO: 121298 - DNA, 201 bp, Homo sapiens
ccgctcacctactgctgtgttgcccagttcctaacaggccagggacaggtaccggtctgtggccctagggttagggactcctgccttagaggaatttggcmcactactatagttatataatgacaggaaaatttcaacattctaatctctgtggacaggacagctcccagagtctgcacagaaagacctaggaaggcagca

SEQ ID NO: 121299 - DNA, 201 bp, Homo sapiens
tctttcagaaatctccaaactgcttttctttctttctttctttctttctttctttctttctttctttctttctttctttctttctttctttctttctttctttcttctttctttctttctttctttccttctttctttcttttaattatactttaagttctgggatacttgtacagaatgtgcaggtttgttacataggta

SEQ ID NO: 121300 - DNA, 201 bp, Homo sapiens
ctggtttcatggaagaaaaattttccatgaggtgtggatgtgggggatagcgttagattctcataaggagtgcacaacctagatccgtcgcacgcagagtwcacaacaggattcgtgctcctgtgagaatctaatgctgctgctgatctgacaggagatggaactcaggcagtaatgctcgcttgcccaccgctcacctac

SEQ ID NO: 121301 - DNA, 201 bp, Homo sapiens
gttctttcagaaatctccaaactgcttttctttctttctttctttctttctttctttctttctttctttctttctttctttctttctttctttctttctttctttcttctttctttctttctttctttccttctttctttcttttaattatactttaagttctgggatacttgtacagaatgtgcaggtttgttacatagg

SEQ ID NO: 121302 - DNA, 201 bp, Homo sapiens
tttttggcaccagggactggtttcatggaagaaaaattttccatgaggtgtggatgtgggggatagcgttagattctcataaggagtgcacaacctagatycgtcgcacgcagagttcacaacaggattcgtgctcctgtgagaatctaatgctgctgctgatctgacaggagatggaactcaggcagtaatgctcgcttg

SEQ ID NO: 121303 - DNA, 201 bp, Homo sapiens
agttctttcagaaatctccaaactgcttttctttctttctttctttctttctttctttctttctttctttctttctttctttctttctttctttctttctttctttcttctttctttctttctttctttccttctttctttcttttaattatactttaagttctgggatacttgtacagaatgtgcaggtttgttacatag

SEQ ID NO: 121304 - DNA, 201 bp, Homo sapiens
tagttctttcagaaatctccaaactgcttttctttctttctttctttctttctttctttctttctttctttctttctttctttctttctttctttctttctttctttcttctttctttctttctttctttccttctttctttcttttaattatactttaagttctgggatacttgtacagaatgtgcaggtttgttacata

SEQ ID NO: 121305 - DNA, 201 bp, Homo sapiens
tggcctctagcttcatccgtattgttgcaaagaaccttatttcattgtttaaaatggctgcatggtattccatggtgtgtatgtgacacattttctttgtytaatccactgttgatgggcacctgggtggattccatgtctttgtgagtaatgctgtgatgaacatactagtgcaggtgtctcttggtatatactcagtaa

SEQ ID NO: 121306 - DNA, 201 bp, Homo sapiens
tggagcctatcccagctgcttagggtccaaggtagtaaccagcctgggacaggatgtgatctcatcacagggaacacacacacacacacacacacacacamtcacactcagtcagattgggaccatttagacacaccagtgaacctcacgtgcacagctttgagaggggggaagaaactggagttccagagaaaacccaca

SEQ ID NO: 121307 - DNA, 201 bp, Homo sapiens
atattgaatgaaaaagacaaatcacaggaatacatacaaaatgatgccgtttatgtaaaggtgaaaaactcacaaaaccaaatattttgttcatggacacrtacatgcacagtaaaatgacgttgaaaaatattgaataatccaaaaactaaaataacagttactcctgccagggagaaagaggattggaatgtgtctgaa

SEQ ID NO: 121308 - DNA, 201 bp, Homo sapiens
tcttttttaaaacaagcattttatacaaagtaaaataactttagcagtttggttcatttttaaaatatttcatgcctgcatgcatgattaattgagacaawcattccatttaactaatatttgagggcatactatatgccaggaaatggggctactcaggccttcacagatcttgtaatctatcaaccaatacaaacaaat

SEQ ID NO: 121309 - DNA, 201 bp, Homo sapiens
ctggagcctatcccagctgcttagggtccaaggtagtaaccagcctgggacaggatgtgatctcatcacagggaacacacacacacacacacacacacacactcacactcagtcagattgggaccatttagacacaccagtgaacctcacgtgcacagctttgagaggggggaagaaactggagttccagagaaaacccac

SEQ ID NO: 121310 - DNA, 201 bp, Homo sapiens
ctacagcctggaactcctgagctcaggcagtccttccacctcagtcccctgattagctgggactacaggcacagctaatgctctatttcttaagcttggtsgtttattattctatgggcctatgaacacattacctatagtccttcatatatatgaaatatttcataataaatgcaaatcaaggcaaaaattaaaagggga

SEQ ID NO: 121311 - DNA, 201 bp, Homo sapiens
tgttgacacatcatttcatgtaacaaataatcttgtggctttgattatattctccatttttattctctttctctctctttatttatttatttatttatttwttttttgagatggagtcttgctctgtcacccaggctggagtacagtggtgcaatctctgctcactgcaacctccatctcccaggttcaggtgattctcct

SEQ ID NO: 121312 - DNA, 201 bp, Homo sapiens
gtgtatattagtcattgttctctagagaaaaaggaccaacaggatgtgtatgtatatatgcgtgtgtgtgtgtgtgtgtgtgtgtgtgtgtgtgtgtgtgkatgtgtgtatagagagagatattgagaaggagatattttaaagaattgcctcatgagattgtgggagtaagccagtaggctggagactcagaaagatttg

SEQ ID NO: 121313 - DNA, 201 bp, Homo sapiens
caaaaatactattaattttatatatgttttcctgcatttggttgctatactgaactcttctaattaagttctggaagttttgggtttttttttttttttttgcattgtttaggtatgcaatctcaatgtttttaaataatctttttctcatttcttttcaatattgattgcattgactagagcttatcaaacaatagtaaa

SEQ ID NO: 121314 - DNA, 201 bp, Homo sapiens
cctgggttcatgccattctcctgcctcagcctcctgagtagctgggaccacaggtgcccgccaccacgcccggctaatttttttgtatttttagtagagayggggtttcactgtgttagacaggatggtctcgatctcctgaccttgtgatctgcccaccttggcctcccaaagtgctgggattacaggcgtaacccacca

SEQ ID NO: 121315 - DNA, 201 bp, Homo sapiens
agaatatatacaacatactatgttatacattaaaatggtatgtaaaatggtgtgtaaatggtgtaaaatggtatatatacacacacacacacacacacacattatatatatatatatatagtcaggtaggtgtatagtgtgccttttgcggttgtctactctccaccttccctttattagagaaggtggcccttccttttg

SEQ ID NO: 121316 - DNA, 201 bp, Homo sapiens
tagaatatatacaacatactatgttatacattaaaatggtatgtaaaatggtgtgtaaatggtgtaaaatggtatatatacacacacacacacacacacacattatatatatatatatatagtcaggtaggtgtatagtgtgccttttgcggttgtctactctccaccttccctttattagagaaggtggcccttcctttt

SEQ ID NO: 121317 - DNA, 201 bp, Homo sapiens
aaggttgaataatctttctttcttctctcttagctatttcccagcccctcacttaagtttataactatattcttttcatcaacctagaaaaccaaatgaarcctgaagtattgagaactcaggaaatgtttttgaggtcccatgtgattcagtggcaaaggcagagcaggtgcagatgcaaacctctgggctcttagatgt

SEQ ID NO: 121318 - DNA, 201 bp, Homo sapiens
gggaggcggaggttgcagtgagccgagatcgcaccactgcactccagcctaggtgacaagagtgaaactctgtctcaaaaaaaaaaaaaaaaaaaaaaaaagttggcaaccttagaacagttcctgtcatctctctttattgtttcatttctaaaagagtttcatttggttgctacccagttataatgaaactgaaatcca

SEQ ID NO: 121319 - DNA, 201 bp, Homo sapiens
catttttcgttctcttatttgttctttccttctccctccacttctccttcgccttttctctcttgcttctttctctgcttcacttcattctccctgttctktcctctcttccagtcgcccttttttccaacccaccctttgctatgttctgaattagtgattgcctaagtggaaagatggagacagtttcagaaatcctat

SEQ ID NO: 121320 - DNA, 201 bp, Homo sapiens
ttctccctccacttctccttcgccttttctctcttgcttctttctctgcttcacttcattctccctgttctgtcctctcttccagtcgcccttttttccamcccaccctttgctatgttctgaattagtgattgcctaagtggaaagatggagacagtttcagaaatcctatttattttagttcatcagttgttactgctt

SEQ ID NO: 121321 - DNA, 201 bp, Homo sapiens
agtctgggctggatcttttttctttgttgtctttgaaaagctacacatggagcagtgcagaatacaggtttcagtccagagacctgagttcagtgcaagcytggcttcttgcatatgattttagacagctgctgcaacctggagcctcagttttcccttgttgaagtgttcatagaattataaccattgcgttacagggtt

SEQ ID NO: 121322 - DNA, 201 bp, Homo sapiens
tagcaataattatactttggatcttgccccttagacagcttcctaattgttatttccaaaaatctaagcctcatttttggaaactgctcccctatgttaartatagtgaaacgcttccagacaatctcattttgttaaaattaaattggtgttttctggaccatgtttgtcccataagcagcattctcaaagggctcggca

SEQ ID NO: 121323 - DNA, 201 bp, Homo sapiens
ttttccatttccaggtaaaatatgctgaatgacagaatccttcgacccctatgaaagaaaaagagaagaataaaggaacctccttctgtgactgcctttgrttgaaagtcattcgttcttctttttgtttttttaatgttttgtagagaaagtctgtgattgctgtgagcttcatagcagcgttccttttcctgctggttg

SEQ ID NO: 121324 - DNA, 201 bp, Homo sapiens
ttctgattcttccagtctggggtatgactcaagaatttgtatctctaacaagccaccaggtgatactagcactgcacatctgggaaccgcactttgattaracctaccatatgacatccagctcaatgaacagttgttgagttatggaaattgcagagcatggattcaaacccatgcattccccaaaagaaattgactaga

SEQ ID NO: 121325 - DNA, 201 bp, Homo sapiens
atttgtttagctaagagaataagagcagttgaagttatttttaagtttgcattttgtcagttgtaggttttcttttttcttcctttttttttttttttttrcatttgatggcaccagctgagtgtgggatggtgcacaaatcccctcagaaatggagttatttggtcacagtaaactgaagcctctccccaaccgccaaga

SEQ ID NO: 121326 - DNA, 201 bp, Homo sapiens
ctaaggtatgactgttgtctagaagctttgggagaaaggtgaaatcactgtaaaatcacagcggaagcttggtgctgaaatgattattgtatcttctccamccttatacccagtaacgatgtgtttgtaagtccaattttgtgtttgtggtccaattttttcctgcagagtgaaaaaaataatggctcccccactaccttg

SEQ ID NO: 121327 - DNA, 201 bp, Homo sapiens
aaaaaaattttttttttgagatggagtctcacctcttgaaatgtttttaagattgttacagtataaattctggaaaaggttctagaacaaattacaaaagrttgatttctgagtacacattaagggaagctgtgataattagaagccaccaagcattcactaaaattaagttactacacatttacttcagtgactggaata

SEQ ID NO: 121328 - DNA, 201 bp, Homo sapiens
tacagtagcttgtgttaatttttaaaagtttcatgatggtgtagtttcttagtatcattatgctgaaaaatatttgacctgaaagcaacaaatactgcaaycaaagtacctatgccagtttctgttctattaaaaacaaattcccttgctctatttattccaactaaaatcacagagatgtgctaatttacaggccagcag

SEQ ID NO: 121329 - DNA, 201 bp, Homo sapiens
ccttgcccagggctgggcacctgagacaggaaacagtgaagggatctgggcctcagagctgtgagatagaactggggaccaggctgcaggtgaggcctgtrtggtcaggttcatgcaaggccttcaccacaccatcctctatcaccaggaagaacctctcaagctctcatcctcaaagagtggcaacagcaaatcatctag

SEQ ID NO: 121330 - DNA, 201 bp, Homo sapiens
acctgaaacgatctcctgaggcaagagtgtacatgatcattaggtttggaggcaaactattgttaaggattctcatataaggtatcttagtctccacaagyaaaggtgatcaaatccagttgaacttgcttcacaccatatgccattgtccttcagtcccccaagcagacaaatcaagcttgattacatatgagataccaa

SEQ ID NO: 121331 - DNA, 201 bp, Homo sapiens
caagaaggtaaaatagctcattaataatttttatattaactagtgaatattttggatctattgggttaagaaaatatatcaaatttaatttcacttgtttytctttactttttgttaatgtaactactagaaaatttaaagtttcctatgtggcatgtgtttgtagcttgcattacatgtctctggggcagcctctctcta

SEQ ID NO: 121332 - DNA, 201 bp, Homo sapiens
tcaaagaagtgccctgatttgattggaattcagtagggtacccaaactcatggcaaagattttttttccagggcaactatggtggtaccagcattcacatrcagcacagagatgacagttctaaaccttaagtaggtgtcagctgctgtgaggcaccagaagaatccatggccgggtgttaaagatccagtgtgatccatc

SEQ ID NO: 121333 - DNA, 201 bp, Homo sapiens
ggaagacggaaaaagtgtattacaagccattccacaggatgcacattgatcctggtcttcttgcccctgggaaattgagaaaaaggcattggccaagtccrtgacagcataccagtctccagaataagctgccaccgactcagaaaaacgggatgatcgccagcactcaggggccaaggcatttggcctgcaatagtccaa

SEQ ID NO: 121334 - DNA, 201 bp, Homo sapiens
cagtggggaggaggggggagtatctgaatcttcaggggggcaatccaagactcaaaatccttccaatccggtgagctcccctcttcctgttccttaatggkctgcatgaggtccttcatctctaatttagggggttctctttcctctttatgtgtggacaaaggtcttcagtggagactgcctatctgagtcttatctatc

SEQ ID NO: 121335 - DNA, 201 bp, Homo sapiens
ctcttcctgttccttaatggtctgcatgaggtccttcatctctaatttagggggttctctttcctctttatgtgtggacaaaggtcttcagtggagactgyctatctgagtcttatctatcctttgtttagaagccacaaccacattgcactgcacacgagtcctgcccctctgattgtctcccttttgggcccttggagg

SEQ ID NO: 121336 - DNA, 201 bp, Homo sapiens
ctgcctgtggctgcagagcctcactggttggagctctgtcctaggggccttcagtctgcattggagctcctaattgttgagccatcggtgtatcagcagtmaagtggccagcagtcaagggatagttttcctgctcgtcttatatctccgccatgggttccaccccctgtctctccaccatatgacccattggcccaagtc

SEQ ID NO: 121337 - DNA, 201 bp, Homo sapiens
gttttactgttttattttcttaattgatggctagtatttaagaacattatctcccttctgtattatgtattttaaataagagtatttactgtcttgtatayacttgtattgtcttgtatatacttgtcttgtaagagcatttactgtcttgtatatctgaatgggtcacatgtagtgcaagcttcaagactggtttgattc

SEQ ID NO: 121338 - DNA, 201 bp, Homo sapiens
gttcaagttaacatgagcattatgactgtatcagatgacatgataagaggttacattgaactttctaacacctattcttaaattataataaaaaaactcaytgagtttttaacatgcctgtacattttctcattttattcagggagtagatttaggtttttctggcctgactggatttttaaactgctacaagataacata

SEQ ID NO: 121339 - DNA, 201 bp, Homo sapiens
agtccagatagagtgtacgtgcatgaataatcatcatagtcttaacagaggatgaagtttaatgagtgttatcagttagataattatttatataatctcasttttccagacaaagaaatagaggcatagtgagatgaagtgactgcccaaagtcatagatggagaaaatggtaaagatgacttgaactctgatattctgcc

SEQ ID NO: 121340 - DNA, 201 bp, Homo sapiens
agtgggtgggatatgcctgcatgagcaacataatctaaaccaagttcaaaaaaagaagttttttttttttccacaggtgcaatcttgacaagaagaaaaawctcaaaaaggtattttgcattggtaaattctgatgtcttgggcagctccaggactgtttgtcatgctttccttatggacttctggttatgcctccttaag

SEQ ID NO: 121341 - DNA, 201 bp, Homo sapiens
tggcacaatactatttattatcaccatgagacctgtgctgtagcaaaactctgcttgtgtttcggtgaaagactgtttaacatgcatgtttcactctaccraggttcaactttgacctataagaggacagtgtatattccttagagagatgctaggaggtaccacaattgatatctatgtatgagaagtgggtgggatatg

SEQ ID NO: 121342 - DNA, 201 bp, Homo sapiens
ggcaattgaaaagtatggaatttatcaagaaccacaaaaagcttaccatggttaaagtatagggtacaagtttgggaggctgagagatgaggctggaggarcagtcagaggtcagattatgaaggggcttttataacatgttaagacacttggactttatcttgccatatagacaactccctctcacctaagtaggaaatg

SEQ ID NO: 121343 - DNA, 201 bp, Homo sapiens
cccttcaacatggctatgaagcatacaagtgaggtctgtcgtggtgcctgccctgtgaagcatctatgcatgagaaacaggagaaaaatacacatacaaaataattagcaataatttgctaataatgtaatctattttctgttcactccttgacttagcatattctgacttcagtcaaccactctacttaaattgttctct

SEQ ID NO: 121344 - DNA, 201 bp, Homo sapiens
aagagctgcgattttagctatatatttgggctgtttgagttgaaaatgatgaagagtaaagtaatgtttggtgtaagaggtgggaggcaggactgtgacayggtcagctgactcttagatgtgtaataatggtctggcaccaccagtctctcactgtcttcttgaaatcacctctaaagaagagtttgatctggaaggtca

SEQ ID NO: 121345 - DNA, 201 bp, Homo sapiens
agatggggactcttagaaagtattcttaaaatgggcaggaaatgtgaaaagggactttaaaaagaggattgtgggatgagcaatgaataagtaaaagggtrcttaacctcatcactcatcagggtagtgcaaattaaaaccacaatgagataaaaatactaccagaataactaaacaaaaaatgatggatcaaaccaagtg

SEQ ID NO: 121346 - DNA, 201 bp, Homo sapiens
gagaagccttttttgaccctaacaacaccaaactgattagtgataaagccatacttcaagatgcttgactgtaactctagtgctcttttttttttttttttaactagattatattagctagagatttttcttgataagacagtggtacttttaaggcctttattcctctggattacaaaaaagtaagttacctattcctga

SEQ ID NO: 121347 - DNA, 201 bp, Homo sapiens
tggacattattatccctattttgcagttgaggaaacttaaggctcagactgtttcacctactcagatcaaatagctaataaggaccaaagtcaaaattcaytggacatggggctgacttgaaaagcctgtgttcttttgggtatgcattttactggctaccaaatatcccatctatcatgccatgttgtgacgcaaatcga

SEQ ID NO: 121348 - DNA, 201 bp, Homo sapiens
ttcacctactcagatcaaatagctaataaggaccaaagtcaaaattcattggacatggggctgacttgaaaagcctgtgttcttttgggtatgcattttamtggctaccaaatatcccatctatcatgccatgttgtgacgcaaatcgaacatcaggtgaggggccccatagtggagctacctgtcacccaagataggatt

SEQ ID NO: 121349 - DNA, 201 bp, Homo sapiens
aaatgcatttataggaactgctaatgtgtgagggttttgatattagtgctaaatttgcaatctataatatatcatctagtcatctttgacaaactcaattktaatctaattaagtggcgtcttctgtgattctgagtagagatccctaaggtaattctatcctacttggttttcacaggagaaaaaaaaaatccctaagag

SEQ ID NO: 121350 - DNA, 201 bp, Homo sapiens
cagagtgatgtatttccttgaaagttttttttctttgagaacatagggtggggttcttcctgaggaaaatattgatattgccagcctgctcctggtgaaaytgaaaaaaaccaggaaatttaaacaaaggcatgattcaagaccaatatttaggaggaagcactcaccacaggaccagaacctgacccatggacccttgta

SEQ ID NO: 121351 - DNA, 201 bp, Homo sapiens
tctgcctgtctctactctcagctcttattgttttttttggtgaaagagattaatccaatgctccgtggaagtagatatcaagaactcttgagcagagagawgttttgcattctgcctgtttgacatttacaaggtatttcattaacactgtgggcgattcaatccccttttatttttggctgcccttgctgtgcctctgaa

SEQ ID NO: 121352 - DNA, 201 bp, Homo sapiens
atggatatttttattagccagcatgatttatttcataatgctgagttgcagcacccttcatggctagagatttttgctgtggagataagttcttagaactrtctccatttccagaaaagagagggtttctctcgtctgttgcccagaaaagaagtcagtttacgtatgcatcttccctgggtcaggctaagaagtagcccc

SEQ ID NO: 121353 - DNA, 201 bp, Homo sapiens
agaggctaagctgttagaataaagaggtttacaacatcagcggcttaaatcaaatagaagtgtgtttctctttcacatgacagagtagatgtggcctggcrtctagaaagcatatttgtctctgctccactgtgtcttccagggacccattcttctcttgtcttcatgctccatcacttcctagggtgttgtctacacctg

SEQ ID NO: 121354 - DNA, 201 bp, Homo sapiens
cagagtagatgtggcctggcatctagaaagcatatttgtctctgctccactgtgtcttccagggacccattcttctcttgtcttcatgctccatcacttcmtagggtgttgtctacacctgcatagccatagctaattttccattctcagcaccaaccaggggaagaggaggaaaggtagcctccttttcatgataggtgt

SEQ ID NO: 121355 - DNA, 201 bp, Homo sapiens
agaaaggtcaaggagctcggtcagtaatccccactctgaggccaaggaaagaggatggaggaaagggcaaccagaacatcaaataccacataagcaagaarccataagtttctttccaaactaacagttaagaaaacagacctaaccacttctactcagggactacatcttatttgtttttgtatccatagtgcctggcct

SEQ ID NO: 121356 - DNA, 201 bp, Homo sapiens
ttctttccaaactaacagttaagaaaacagacctaaccacttctactcagggactacatcttatttgtttttgtatccatagtgcctggcctctagttgarcttgacaaatattggagtgtgttggcctgtttcttgttcactcatttgttcagtcattcaacaaatatttaagtgcctatcatggaacagccactgcttt

SEQ ID NO: 121357 - DNA, 201 bp, Homo sapiens
ttttcttctctatctatctgtctattcctcaagaatcaagagactaacttcccgaagagacagaagaacagctaggagaagtatcagagaagtaaagtttytagggttgtacaaaaacttaagttttgtacagaaaaaaaaactatactaatatatgtggcaattgaaaagtatggaatttatcaagaaccacaaaaagct

SEQ ID NO: 121358 - DNA, 201 bp, Homo sapiens
gacacagttccagcccttgtagaatttcaactctgatgagaaagaaaggcattgtgttattttataataaatatattctagtttttcccctttatactttytgctgccatcaactttattattttgggagaaaagattaaatttcaaccctatatcttgtatggtgcagttgccccataaatgtgtgttgattggtgaaaa

SEQ ID NO: 121359 - DNA, 201 bp, Homo sapiens
gaagtggaggaaaaagaatgaaaactaggaaagcaaagcaaacttcttgggaagtgtgtgtgtctgtgtgaaaatacatttttgtgcaatgaaatggtttsagtactgtagctctgagttctttcgtagctttgagaacttttaccactaaatggtagaaattcagttgttctcttttctttctaaggaaatgtctttggg

SEQ ID NO: 121360 - DNA, 201 bp, Homo sapiens
ttattgtttatatgaagtcaaaatctacctccttgaacttccatttggtggacctagttctatcttctgcacaaaaataaacatgtcaactccctcttccmtgtgagtattttgaggcttaatcactcctcaagtcttctctgtgccagattaatccctagttccctaaattaattattttcttaagctgccatgtcaatc

SEQ ID NO: 121361 - DNA, 201 bp, Homo sapiens
ggttgaatttctgacacttggtgtataagtaccagtaagtaagattggcttacttgttgcaatttttaaaggaagtgccttgccacagccagaaccagtgscctggaactaaagttgaaaagaggttagatttaataagtcatccaatatatacaagatttccctttagcagtcatcagtaagccttgcttgatgacttat

SEQ ID NO: 121362 - DNA, 201 bp, Homo sapiens
gcattgatagaaggaatcccaaaagaggtttacatgttgtacttggaggcccgtaaccaatagagggtttaatcaacaggctttttacctagggcctgatrtaggctccgccttaaggccatcacattcactgtttggttatgtgcacagggagggaaccagtggaagcccaaccccccttccacagggttcttgaagcta

SEQ ID NO: 121363 - DNA, 201 bp, Homo sapiens
ggcttcacctgggaggggagatgggcagtgagcccatgctagcttctaatgcactcaccacttcttttaataaatacaatactctccccgcttcccctaaygattctgtgaagcaaactagtctatagttcctggtatcttcttttcttgaaaagttgacatagatgacagttgtgtcctgaagtctgatagcttctatga

SEQ ID NO: 121364 - DNA, 201 bp, Homo sapiens
cctccttttctaccttgccctcatcaagaatcctaaaccaaaaagtatttggctaaagtgtgaaggagactgtgattctgctttcttgaaatttttcaagwtcttaaagcacacaatatgaagctctataaaaattatttatgatttcaaaagaaaataattttaaaattaagatattatgatagaaagtagccttctagt

SEQ ID NO: 121365 - DNA, 201 bp, Homo sapiens
agatgggcagtgagcccatgctagcttctaatgcactcaccacttcttttaataaatacaatactctccccgcttcccctaatgattctgtgaagcaaacyagtctatagttcctggtatcttcttttcttgaaaagttgacatagatgacagttgtgtcctgaagtctgatagcttctatgaatttctcaaacattggtt

SEQ ID NO: 121366 - DNA, 201 bp, Homo sapiens
gttcctgtatatcatgcatgttactctttgagaagcaccagcctgttgaatacctctgggccaaaatactattcagatgtgttgttctttttcaattacgraaataattagtgacttaaaactcacttctgattcaggactgcatggctgtttaagtcgatatgtctgcgttaatgctgttgtaatgacatcacagaattg

SEQ ID NO: 121367 - DNA, 201 bp, Homo sapiens
gaagatccaagtatcttggccaaaccaaagccaaaggcagacctctaatgaattcaaacagttctagggacagcttaagataaacagtgtgatcctactcrgccttaagagtgaggacgctatcggttcattcagcccagagctaggaggagtctgcttcctgtctgcaagatgctattgcagggtccaaggcaggatttc

SEQ ID NO: 121368 - DNA, 201 bp, Homo sapiens
tatgtctgcgttaatgctgttgtaatgacatcacagaattgaggcatttatgaactggagagtaaattctatatgtgtttaaaaattagataaataagaayttacatgacagtttaataggggctttaaaaatttaacacggataagtcatctgctttttcaatggattttcctgaatagtgggatcacaaaagaaattta

SEQ ID NO: 121369 - DNA, 201 bp, Homo sapiens
gtgccaggtgagccccagctgggcaattcaattcatctcgtgcctgcccttcctctttggggagactgccttgctgctgatgaaatggaggtagagagctrtgaagctgagtcccgttagcatccccgtgatgaacaaatcatgcgcattctttcaaggtgatgtgaagagatgactaaaaggttttgaaaagttccagat

SEQ ID NO: 121370 - DNA, 201 bp, Homo sapiens
aatacagacaatctgctaagcagccaaggaaaaaaggtgcctgaattatatatgtctgcatgagtggacaagacgtgcttttcaagattaatgatttaagytgttctttacgttcccagactgattaaacaaggcttaattctaaacaacactttctccttttcttgcttcttcaaaattcactgtccttctctatccctt

SEQ ID NO: 121371 - DNA, 201 bp, Homo sapiens
tgctgtatctgctatcaccaaacataaatgattttctgattttccactcttttggaatatctgcatcactgttggctttcattagcatgacagttcagagstgattgtactaaattttactttgtacacatcctagtggcaatgtatttgtgctgtgatataattcatttcatgatttagtgagtcatgatggaaaaaagt

SEQ ID NO: 121372 - DNA, 201 bp, Homo sapiens
tgttcacatttcatctacatttcccctcttgggcaaataggttgcccaatttagggcaaatttgtttggttttccttccgatatctttatttatttttctwtattatttgcttcctctcccttccctccaagagagttcagatacttaccacaatggataaacttatgctgggaaattgcaatgcttttctttttttgcaa

SEQ ID NO: 121373 - DNA, 201 bp, Homo sapiens
atttcatctacatttcccctcttgggcaaataggttgcccaatttagggcaaatttgtttggttttccttccgatatctttatttatttttctttattatktgcttcctctcccttccctccaagagagttcagatacttaccacaatggataaacttatgctgggaaattgcaatgcttttctttttttgcaaagtacag

SEQ ID NO: 121374 - DNA, 201 bp, Homo sapiens
aatttagggcaaatttgtttggttttccttccgatatctttatttatttttctttattatttgcttcctctcccttccctccaagagagttcagatacttmccacaatggataaacttatgctgggaaattgcaatgcttttctttttttgcaaagtacagacctcatgtacatatgaaggctgctgacactagctttcca

SEQ ID NO: 121375 - DNA, 201 bp, Homo sapiens
acttgtgtttcatcctcagattctcctatttactcattgtataaccatagttcagtcaattcccgttgccgagccttagtttctttgtctgtcaaatgggkataacaatgcttgcctcatcatattcttgcaaataaggtcagataattcatgtaaagcttggagcacagtgtatggcacctggtaatcggtctctctatg

SEQ ID NO: 121376 - DNA, 201 bp, Homo sapiens
ctcctaaaggtgagatttgagattcaaagaaggtgagacccattgatcagttcagaggagccaagggatattctgatttgaggataaggtggagagagcasattaggctattgatagactgaagaacgagtgaaaaagtagcaggtgtaaaggagggaggcaggagtgagagatgcaataaatttttctaaagtagctggg

SEQ ID NO: 121377 - DNA, 201 bp, Homo sapiens
caaaaggaatttattgaatttaatctgagccagtaagacgggctttgatgttaagtaatagagattagttgcccctctctgatgtctacattactgaacarttattaactaccaaactcctgtgacacagtatccttcaaattccaaaacttagctacagtttaccttactaaaatctctgctactggtaatcagcctttt

SEQ ID NO: 121378 - DNA, 201 bp, Homo sapiens
ttcaaaaggaatttattgaatttaatctgagccagtaagacgggctttgatgttaagtaatagagattagttgcccctctctgatgtctacattactgaamagttattaactaccaaactcctgtgacacagtatccttcaaattccaaaacttagctacagtttaccttactaaaatctctgctactggtaatcagcctt

SEQ ID NO: 121379 - DNA, 201 bp, Homo sapiens
aaagtggaatcctctatgtaggatttcagggtctaaataattattttacttaccatgtatgataggcaatagaacattaccaggcatgtcaggaaatatarccaaataaatgaatttcttagtgaaaacaaataaactgtaggttattgatatattgggattatcagacagatttcaatacaactatgattaatatgtgta

SEQ ID NO: 121380 - DNA, 201 bp, Homo sapiens
atttatctggatccttgtgggcagaggaaataaacataactaagaacaatgaatgataagtttacaggagggtaggggagaagattccaagtagaagcatygtactaaattttgagtggggcaaaagttcagtgaaacttttatttttattataaacccaccaaagtaaaagttctcagcttacatattatagatagctct

SEQ ID NO: 121381 - DNA, 201 bp, Homo sapiens
gtcaactgattaatggattgaaaaatgtatgaggtccatacaatctaatattattcagcaattaaaaatacagatacatggtacaacatgtatgaatcttrgaaacattctaagtgaagcaagctagtcacaaaagaccaaatattatataattctatttatatgaaatgtccagaataggcacatctatggagatagtag

SEQ ID NO: 121382 - DNA, 201 bp, Homo sapiens
ctggaatcctcatacactgctgatagggaatcaaaatggcacagcagttttgaaacatagtctagcggttccttaaaatgttggacatagaggccacacakgattcagtaatttcactctgagaaaaataaaaacacatccacacaaaaacttttacatgcattttcaaagcagcattatttttacagtcaaagagtggaa

SEQ ID NO: 121383 - DNA, 201 bp, Homo sapiens
tttaattccattttacagatgaagaaatggaggcacaaagttgttaagtacctttgtccaaggtcctagagtttgtgagcagcagaaggggtttagcaatmagcctgccttgggagccatgtgcttattacctacaattcactgcccaactgagaagtagcatgggagatcacctctcccactcatctttgagatgctgat

SEQ ID NO: 121384 - DNA, 201 bp, Homo sapiens
gccaacccctgcccttgaccttgggcaaccttcttcccctttgtgggtggaatgaggtgccatgacttgttgcttttattcacaaagtgcctcacttgttkatatgaagccaccggcctcatggccatgcctcagccaaaccaactgggaattatgaagattggtttgaggcaggaagtgtcctggctctagacctaggac

SEQ ID NO: 121385 - DNA, 201 bp, Homo sapiens
atcttctctaaccttatacccagtaatgatgtgtttgtaaggccagtggtccaattttttctgcagagtgaacaaaccagtggctcccccactacctccayagagatgttttaacacagacacattctaaacagcaaactacatcggacgccagtctcctataaatgctagagagtaggcctcctcctggcctttattttt

SEQ ID NO: 121386 - DNA, 201 bp, Homo sapiens
agacagagggagatgaaaacagacacacatgcccacacacaaagagagaaacaggcagacacacacccccgcgccccctcccccatctggacccgccccaycaacatcctgacagatacaggaaggcagagagaatgagacagatggagacacaggaaagacatgcagaactagactgacagccataggctaagatgtcac

SEQ ID NO: 121387 - DNA, 201 bp, Homo sapiens
aagtatgaatgaacaggtggaatttagttgttttccaaaacttgaacaaacaagaaagggtattttggggtccaattagcaacattaagataaattttatrtactggcttcctgggatttgtgccttcaatttacaagttttgctgataaagaagaaaatcaattttattttattctatttcccagggagatagcaaaatg

SEQ ID NO: 121388 - DNA, 201 bp, Homo sapiens
tgtactcgaaccatgaacagcttttcctccttggtgctgctctgagtggatgccacccatgtagaatattcttttattttcccactggtgtagcgtgatgrgtccattttatttttctcttcatctctatcatcaggtgtcatcttttaaaacttgtgagcccttggctgtcccagccacccccaaagaacacccttggga

SEQ ID NO: 121389 - DNA, 201 bp, Homo sapiens
atgtacccagaggtgggattgctgggtcataatgccattctaggagttgttttgcacgttgctagatgtttcctgaatgatatgagaagattcttaaatasagggaacctccctagagccagagctcacctggttgattcctcctaggagggacatggtggtggaaagagctctgctgggaagaatggggactcagctctt

SEQ ID NO: 121390 - DNA, 201 bp, Homo sapiens
ctgctctgagtggatgccacccatgtagaatattcttttattttcccactggtgtagcgtgatgggtccattttatttttctcttcatctctatcatcagktgtcatcttttaaaacttgtgagcccttggctgtcccagccacccccaaagaacacccttgggatttactgattggctcacaacagtaattgtgagcaat

SEQ ID NO: 121391 - DNA, 201 bp, Homo sapiens
gacctttttagcagtgaggagcgtccagctgtggttatctggagaatgcaataggcagaacttgctggtagaggccccgcttccctgtcttgaatgcctgsctttttttttttcttttaaatttttcatctgcttctggatcacattgctgtgagccacattgggtcaattcacatggaggattagatctgggcacaccgt

SEQ ID NO: 121392 - DNA, 201 bp, Homo sapiens
ggggagtggggaatgagaaggggaggaaggaagccaataaaggatgtgctatcaagctcgccatcactgtggacagctgcagctcagttccactgggaacrtctgggaaagagtgtagcacaggtgcctctgagtgatcacacctgagaggggaggttctgctggccagagaacctctggtaaggaggtgcaggggctggc

SEQ ID NO: 121393 - DNA, 201 bp, Homo sapiens
gtgctatcaagctcgccatcactgtggacagctgcagctcagttccactgggaacgtctgggaaagagtgtagcacaggtgcctctgagtgatcacacctragaggggaggttctgctggccagagaacctctggtaaggaggtgcaggggctggcagttggtcaggcccatgggcactgttacaatgaaggctgagggaa

SEQ ID NO: 121394 - DNA, 201 bp, Homo sapiens
tgtgtgtgtgtgtgtgtgtgtccgtctgtgtgtgcatgtatttgaaatggaagtgtgggaacatgacagtgtagacaagcttacagcccccatttttcttygagtggccccctctgataaaaggttatatactggaagaggacttaaaacctttgaaaaatcaaattctcttggaatataataccaaagtgatgttgttgt

SEQ ID NO: 121395 - DNA, 201 bp, Homo sapiens
atttttcttcgagtggccccctctgataaaaggttatatactggaagaggacttaaaacctttgaaaaatcaaattctcttggaatataataccaaagtgwtgttgttgtttttcttgcatctacatgttccatgaatattttccaaacaattcaatacattactcttcagcccacgcccatgctgacatcaaaaactttt

SEQ ID NO: 121396 - DNA, 201 bp, Homo sapiens
tggatgccattgtgaattttttttcccctatagctattgcctatttgcataccctctgaagttgcccgttcttgaaggacactgataatgttctcctcccstgccctttcctttttgttgccagaataacctaatctaaaccagaaactccatcttttcttccccagggctcctatagacccataggcggctagagtgtac

SEQ ID NO: 121397 - DNA, 201 bp, Homo sapiens
gtcagtgtggctttctaatctctttcatctatacttacacactataacagttttttctattgcaatgcagcccaagttttttgcaaggtaaattatttgtratattcttaggaagaaaaggtagaaagtaaataactttttggtggcttggtatggtgttgtattttgccaataactatttatttccaatagtgtttaatg

SEQ ID NO: 121398 - DNA, 201 bp, Homo sapiens
gacttgagttcctcgtagattctggatattattcctttgtcagatgtatagattgtgaagattttctcccactctacaggttgtctgtttactgattgttwctttttctgtgccttttagttcaattaagttgcatctatttatctttgttttgttgcatttactttgggttcttggtcatgaagtctgcctaagccaatg

SEQ ID NO: 121399 - DNA, 201 bp, Homo sapiens
tgaaggacactgataatgttctcctcccctgccctttcctttttgttgccagaataacctaatctaaaccagaaactccatcttttcttccccagggctcmtatagacccataggcggctagagtgtacctgtgagcctctggggagatgtctcaccgccagagagctgtccccaactcaggacctcacctgcctgtgcgt

SEQ ID NO: 121400 - DNA, 201 bp, Homo sapiens
ttttttcttaaaacagcatatttaaaagacaagacctcatcatttcagtagtgtacatagattagtgactgaaggagccagtgctagcctttttaagtagktcaggcttttagagctgaaagagattttaaagaccagccaattcaactcctacaccttggagctgaggaaacagacagaggtgaagtgacttgcctgtag

SEQ ID NO: 121401 - DNA, 201 bp, Homo sapiens
ttttggtttcaaaatgatgttctttaccgtgttaagaaaatatcctacttttagcttacttagagtgttatataaatcaaatcttttactatatgctttaytctatctggcttttgctgaatataatgttttttatatttactgatgttgtttatttgttttcaatgctggatagtagcccttacacaagtatcataaaaa

SEQ ID NO: 121402 - DNA, 201 bp, Homo sapiens
atgttgtacttggaggcccgtaaccaatagagggtttaatcaacaggctttttacctagggcctgatgtaggctccgccttaaggccatcacattcactgyttggttatgtgcacagggagggaaccagtggaagcccaaccccccttccacagggttcttgaagctagtcatgaagggaacagagggaggagggaatgag

SEQ ID NO: 121403 - DNA, 201 bp, Homo sapiens
tgaatgcgattctgtgcccttttctgtagccccacatgtcagttatgcacaggacacactaaatgctcaacaaacactttctgatatataaaaccaaaatyattgtttatatgaagtcaaaatctacctccttgaacttccatttggtggacctagttctatcttctgcacaaaaataaacatgtcaactccctcttccat

SEQ ID NO: 121404 - DNA, 201 bp, Homo sapiens
gctttccttatggacttctggttatgcctccttaaggatgtgggctgagggataatcatttaaaatagtccaggcaccatttctgattctttgttccctaraatgatgatggtggtggtggtggtgaccacaacggtgacaacaatgataccaccatatttcattgatttttaaaatgtttttccacattttcagctatct

SEQ ID NO: 121405 - DNA, 201 bp, Homo sapiens
tagtattcttgatggcttgtcagaggcagtagtggccataatcacgtgagtgcagcacttgagctggttcagagctgcagtgcctggagtcgtgtctgccrgcagctgccggaggcggaagtggcgtccatggtagccacttcgtcaggagggctcctcaggttttagagccagagcacaactgtgactcctataccaggc

SEQ ID NO: 121406 - DNA, 201 bp, Homo sapiens
tcctgtttttccacatctttgccaacacttggttttgtcagcatttaaaaaagttgtcaaattggtgtgtatgaatttatactttacagttcaatttaccrttttggcaaatcaattaggctgagaatatttgcatttttaattgatatttttatttcatcttttgtgaaatgtctgtttatgatttttacccattttgat

SEQ ID NO: 121407 - DNA, 201 bp, Homo sapiens
ttaagaacattatctcccttctgtattatgtattttaaataagagtatttactgtcttgtatatacttgtattgtcttgtatatacttgtcttgtaagagyatttactgtcttgtatatctgaatgggtcacatgtagtgcaagcttcaagactggtttgattcagcggttcaacagtgtcatcaaagtactcgtttcatt

SEQ ID NO: 121408 - DNA, 201 bp, Homo sapiens
aatcttagtctgtaaactcagatatgcaataaatagaacatttcacatttttgaaatattaaactctgattttgatgtccccatccctcccaggtggcagraagcttaactttggcccttcttggagttctgcactgacctgttagtaccatgccaaaattctggtcattgcttatctgtcacacttggctagttgcccct

SEQ ID NO: 121409 - DNA, 201 bp, Homo sapiens
tgacatgcagaaatagaggtgagattgtccagtaagtagttgccagaatttgtcttgatgatgcttgatgcagatttaagagagagaaagcagatgcagtstgtttcactggggtgccagagccagggggactgagactgccacaatgtgtgggacctttcctttctgagcacagcctggtggcagtcagcctttccctcc

SEQ ID NO: 121410 - DNA, 201 bp, Homo sapiens
tcctgatctgcggattgcaaaaatctgtgggaaaagcgtagtacccagggcaggtagcacagtccttcatggcttctcttggctgggcgagggaggtcctstggctccttgcatttcctgggtgaagtgaagccccaccctgcttctgctcactctctgtgggttgcacccactgcctaaccagacccattgagatgaact

SEQ ID NO: 121411 - DNA, 201 bp, Homo sapiens
ttctcctcccctgccctttcctttttgttgccagaataacctaatctaaaccagaaactccatcttttcttccccagggctcctatagacccataggcggmtagagtgtacctgtgagcctctggggagatgtctcaccgccagagagctgtccccaactcaggacctcacctgcctgtgcgtgcgaaattacacctgaga

SEQ ID NO: 121412 - DNA, 201 bp, Homo sapiens
ttgatcattggttatctggtttcacctgtcaagaaataagctgccctttgattgtggataataggtgagacaccgcagaatcaagttacactgttgcatcygtaaagtttcatcactgtgtgtttccaggagtcaggatttgccatcaaagtcaattgccgaatgactctgactttattattctttatttgcattaacaat

SEQ ID NO: 121413 - DNA, 201 bp, Homo sapiens
aactcaggacctcacctgcctgtgcgtgcgaaattacacctgagatggagtggctgtgtccagctaacaaagccgtttggggaggggatttcaagcatggstattccttgttcactttaataaaacatggcatgaattcaggcaaagggacttactccttactccctcacctcagatttttctgtgttttgctgttggtat

SEQ ID NO: 121414 - DNA, 201 bp, Homo sapiens
agtacgtaaaatcatattcaaaagctggccagaagaataaagctagagaagctgctaaatctagaaaacacaatcagatgccacagttgtcacaaatcagrcttgtaagtatagcaatctgtattgtaggttctgccgattgcaggcttagctaaagtcacattgaaaaacattgcatcaagcttcattcacactgaagta

SEQ ID NO: 121415 - DNA, 201 bp, Homo sapiens
atccactttagtgagggttgttcacatatgtaccacagattgctttgtcacatgctgtatttcattccgggattaccctgactgcctaaatgatttttttwaagtttatatatgttaagatttgccctttgtgctgtaaatttcaatgggttttcacaaatgcataatattatgtacccaccattacagtaatgtacagaa

SEQ ID NO: 121416 - DNA, 201 bp, Homo sapiens
cctgagtcagtttctgacctgccttctgagctctgcatggtgcctggggtcagcctgcttctggcttcaccactctctgttctactgcatttattgtgcamacagttgattgaatgcctgtttatgtgccaaacactgtgttagggaagatgaaaggatagatgagacccattaaggtctgccctttaaaagcttgtaata

SEQ ID NO: 121417 - DNA, 201 bp, Homo sapiens; identical to SEQ ID NO: 20557

SEQ ID NO: 121418 - DNA, 201 bp, Homo sapiens
gcatggtgcctggggtcagcctgcttctggcttcaccactctctgttctactgcatttattgtgcaaacagttgattgaatgcctgtttatgtgccaaacwctgtgttagggaagatgaaaggatagatgagacccattaaggtctgccctttaaaagcttgtaatatgttggagaaaccagacatgaaaacaactaagta

SEQ ID NO: 121419 - DNA, 201 bp, Homo sapiens; identical to SEQ ID NO: 20551

SEQ ID NO: 121420 - DNA, 201 bp, Homo sapiens
gcctgtttatgtgccaaacactgtgttagggaagatgaaaggatagatgagacccattaaggtctgccctttaaaagcttgtaatatgttggagaaaccasacatgaaaacaactaagtataacacaacataatgtctgaaagataaaaacaagtgttttcagaacacaataattcacagaatacctacacatgccataaa

SEQ ID NO: 121421 - DNA, 201 bp, Homo sapiens
tttgaggcttaaggtagtaagagcaagagcattcctataaattattcagagataattcaaaacaagtgtgcatctttgacatattgtcaagtttctcaatkctttttcctgataacaagtgctatgtttttgatgaaatgttgctcgtttctcacacaccttattgttctgtgtgtgtgttctgtgttttgttctgtttgt

SEQ ID NO: 121422 - DNA, 201 bp, Homo sapiens
tagggaagatgaaaggatagatgagacccattaaggtctgccctttaaaagcttgtaatatgttggagaaaccagacatgaaaacaactaagtataacacmacataatgtctgaaagataaaaacaagtgttttcagaacacaataattcacagaatacctacacatgccataaactgtgctaagggttttccatggatta

SEQ ID NO: 121423 - DNA, 201 bp, Homo sapiens
ctttgaggcttaaggtagtaagagcaagagcattcctataaattattcagagataattcaaaacaagtgtgcatctttgacatattgtcaagtttctcaaygctttttcctgataacaagtgctatgtttttgatgaaatgttgctcgtttctcacacaccttattgttctgtgtgtgtgttctgtgttttgttctgtttg

SEQ ID NO: 121424 - DNA, 201 bp, Homo sapiens
aatatggagatccagcttttcatttaacattcctttgaaccatttggaacttggcagatgcccaatcagcacttcatccaagtacatcaccaccttccccytcagttcctgcatttcccagctcttctttgaacataccaaccatacttccatatttgtgattttgtccttgcccttccctcttcctgaaataccttttcc

SEQ ID NO: 121425 - DNA, 201 bp, Homo sapiens
gattctagtgcaagctcttatttccttgcagcccacaaacaacatgtggactttcaccagtccacaaccataaatagagtaatgctgctgtataatcaacrtatcttacttgctctatacttcaaatatcttcttctctacagctgaattttgtagatgaaaaatttattttaaagtttcaacattttaagaggtttcttt

SEQ ID NO: 121426 - DNA, 201 bp, Homo sapiens
ttgcaaggtaaaaactttatacccagcttatatttttatatataccccatacatttagtgtcatgcccatcacacaagggagcatgaaatgtgatctgacstattcacatgtttgctcattacaacatccaatatgcatagagcatggtaccgcacagtggttaaaacttaattacagactgttgagggtgatgatcacag

SEQ ID NO: 121427 - DNA, 201 bp, Homo sapiens
caaccataaatagagtaatgctgctgtataatcaacatatcttacttgctctatacttcaaatatcttcttctctacagctgaattttgtagatgaaaaawttattttaaagtttcaacattttaagaggtttctttttactctacaggcaagccacttatgtaaaggacccatcttttaatttttgagttttggaaactt

SEQ ID NO: 121428 - DNA, 201 bp, Homo sapiens
catgtgatggcctttcgacatgaaggaataggggtaaacatcaagggtaaagtagcttatattttattgaaataaactagatgaaaggtcgtatcttaaaygatatgtcttcaagcatgtgctacatcaaggtcttgacggcatcattttcccaagagatatgccagtaaatttaagtagtttccaagttgtaagtatctt

SEQ ID NO: 121429 - DNA, 201 bp, Homo sapiens
acgatgttcgtttggatgggtggctgtattgtaatagtcacttggacactggctttagaagtcagaagagatttgactcaaggcttttataatatgtctckttcatggtcatctgcctaacttatctgaacttcagaatctactactgttatataaatgacctccccccaaccttgagggttttgtgggaataaataggat

SEQ ID NO: 121430 - DNA, 201 bp, Homo sapiens
acttcagtcaaccactctacttaaattgttctcttaaaaaacaatgacactcaccagtaacctcttaggtatcaaacttgatgattttcaaaatctgcatytgtagcttcgacctttcttctgggcttcatcctgaatttccccggcctgtcacacatctttacatagaaatcccagcagcacatctttcacacattgaaa

SEQ ID NO: 121431 - DNA, 201 bp, Homo sapiens
tttgattttttattttaattttgtgattttgtgactgggcttttgtgactggcttctttcacttagcaaaatattttgaggttcattcatattatagcttrtatcaatacttcattctttttattgccacatatattccattctataaagttaccatatcttttttttctacttatcagttatagccgcttttaggatgtc

SEQ ID NO: 121432 - DNA, 201 bp, Homo sapiens
aggccattacggggtattttaagcttttatttgttagtacatccacagacatttgttgagggtatttttcccgctatgcccagggctaggcactggacatwccgagacatactgtgtccagaagctcaacaatttagctgaggagatggatgatgcagccataactaattgtaatgcagtgccattgcctctgtagacaat

SEQ ID NO: 121433 - DNA, 201 bp, Homo sapiens
gtgtgctgggaatctttggtgttcctgatctctgccttcatcttcacatggtgttctcccctgtgtatgcctgtgtcccgtttccccttttaacaatggtmccagtcatgttggaacagggacccatcctactccagtgtgacctcattttgttttttgtttgtttgtttgtttgtttttagacagagtcccactctgttg

SEQ ID NO: 121434 - DNA, 201 bp, Homo sapiens
aacagatacacagtatatctgtgatattaaaattttatgtgggggagcaattagaaaaaatgtctaaaaagtgtccttagagggacgataatgaaaacatytaagaattactggcaattgatatttttattaaataaatgtgaaaatataggttgagaggttaaataattagtccaagaacataaaattattaggtgtgag

SEQ ID NO: 121435 - DNA, 201 bp, Homo sapiens
cagcactttgggaggctgagacaggaggatcgcttgagcccaaaagttcaagtctagcctgggcagtatggtgagaacccatctctacaaaaaattaaaamtattagccacgcgtggtggtgcctgcctgtagtccaagctacttgggcagctaaggtgggaggatcacctgagcctgagagatcgaggctgcagtgatcc

SEQ ID NO: 121436 - DNA, 201 bp, Homo sapiens
cagagtttctaggatcaatttatcaggaatgagtggattcctttctcttcctcccaaagggtctatggaagatgaagaatacaagcaataatagcaaatcwatcaaatttacattgcaaagagtccttcacaaaagtacctgagagggctctacctagataatcagatgctaacattacctttttcccaaatatagtccac

SEQ ID NO: 121437 - DNA, 201 bp, Homo sapiens
tccaagcctgtgttctctttcacgctggccattgactgtccagaactggctgttgactgtccagcaggcccagggcaagctccactcatagaaattgtgtratcatctttcttcttcctttcttttctctattccagtcagaatttcagcatttctggaagcaattgcttgtttgcttatctgccttcttcttcacacagt

SEQ ID NO: 121438 - DNA, 201 bp, Homo sapiens
cacgctggccattgactgtccagaactggctgttgactgtccagcaggcccagggcaagctccactcatagaaattgtgtgatcatctttcttcttccttycttttctctattccagtcagaatttcagcatttctggaagcaattgcttgtttgcttatctgccttcttcttcacacagtaagatatgtgaagacaggag

SEQ ID NO: 121439 - DNA, 201 bp, Homo sapiens
cttatgtaaaggacccatcttttaatttttgagttttggaaacttacatgagtacttaaccttgattaataattgataactctttctgtagagatgggccrgtgacctcttgctactctccagcattgttaagtgctattgcctttcagacttcagattctttccaacctctaacacttgggccattattccttctccaag

SEQ ID NO: 121440 - DNA, 201 bp, Homo sapiens
gacccatcttttaatttttgagttttggaaacttacatgagtacttaaccttgattaataattgataactctttctgtagagatgggccagtgacctcttsctactctccagcattgttaagtgctattgcctttcagacttcagattctttccaacctctaacacttgggccattattccttctccaaggttctcagaag

SEQ ID NO: 121441 - DNA, 201 bp, Homo sapiens
catttcatgaaaggagttaaccatagatactgtggcttctgaactcgttgtccttgtcccacctgatactttttctgcattcctaattgtacattcccccmttgcaggctaagacttgccctttgggtctaggcctactgagtttgctgatttctaaggttaaaaagtaagataatgggtttagatggacttgtaaagaag

SEQ ID NO: 121442 - DNA, 201 bp, Homo sapiens
tcttaaagtacgtgctgggaagataatacccaatctctggagaaaagagctttacatttctttttactgagggctgttctgtaatttggctctcctaactstggcttgccccaacaatgagctacgtaattggccttaaagggacacccattgatttggacagggtctgtacatacaccagttaaacacagtgcctcatgc

SEQ ID NO: 121443 - DNA, 201 bp, Homo sapiens
ttttacttttaaatgtacgtttttgaaaagaacacagtcgtttcttattattctccttttgtacaatttcattgcattcataaccagtcaaagggtcctgwtgattctccggcagaaaaactatttgttatattcacagtccaagtgcctactgattagcacaggtattttgcattagctgattgggatagaagtacagtc

SEQ ID NO: 121444 - DNA, 201 bp, Homo sapiens
aaagttggaaatcgacatttgccaatgccaattggcagacagttggcactcaaattggggacagggccaggcaaaaaaaggtcttcaaaaactgtgctccmaaatcctctaaaatccactgtggttgcatcattgcccaaacttacagcttaatatgttggctttgctgcttaacagctgtgtgaatgggcatgttactta

SEQ ID NO: 121445 - DNA, 201 bp, Homo sapiens
agagtttaagaaaagaagtcctggaaaaagcagtggggagtttaggtgtgttgaggagggtctcaggggacacacattgtcttggtctgccctggccatcrtatgtcaaaatatcacatagcttaaacagcagaagtttattttctcacagtttcgggagcttgaagtctaagatcagggtaccagcattacaggtttctg

SEQ ID NO: 121446 - DNA, 201 bp, Homo sapiens
tcttagaaattaaaatcctcatttacagaatagtgtggtgcaatctggaaagatgttgttgtggtctctcaggagtgaataatatgagtttttaaacattytccaagaaaaatttacatgatttcaaacattctaaagcataaggatgtacagtatttcttacagtagaggaaactgccaaatattttggaaaaatataag

SEQ ID NO: 121447 - DNA, 201 bp, Homo sapiens
caagaagcttgaataatctgaaactataaactgcataggccatctgtagtagctcaagtcttcaaaattatggactgttaagaaaaaaatcagagatctarggaaggcaacaaagttattttgggtacagacaggataagagggtatataataccattccttctcccagaagcttcaataggtagaggatatactgattta

SEQ ID NO: 121448 - DNA, 201 bp, Homo sapiens
agtcttgcaaactgctcttacttgcaactgacagctacctcccacaccctcttggcatttctctagtgaagctattgatgtaattattgcttttagggttstgtattaaatttaaaaaacaacttcttttaattttgtgcttaatacagaaatcctaaaaaatcatagaaaaacacaaaggaaaaaaatccagcattaacc

SEQ ID NO: 121449 - DNA, 201 bp, Homo sapiens
ttaagataagttgaagggtaagttaggaagaagcaactttttaaagcttaagtataaaactaggatgagatcaaagatggattgttaataagagtcaaggrttagttggaagtaaagtccctaatcatacccagagtatttaatagactcaattgtgttaaagaagatcttagaggtcatccaatccaacttcgatctttg

SEQ ID NO: 121450 - DNA, 201 bp, Homo sapiens
accagataatatgattctttttaccatttttaacccattggataggaatatattttcatgtttttatttgcatttctttggatttttgaggctacgtattrcaaagctgttattttaaggcataccagagaacatgaaatcttattttatccatattttggttttatccatttgctttgaaccccctgagtcagctgccct

SEQ ID NO: 121451 - DNA, 201 bp, Homo sapiens
aggcccttaagactcagcagagctaaggggaagggaagggaattgagggaaccaccaagagagctccaaaaacaagagttggcaggtaattctgttcatcyacgcctgctctgtaacagctttcagagttcagctcttactttcagtcacttccttgcaacccttgcagtcagaatttcagggttcagaaacataggccta

SEQ ID NO: 121452 - DNA, 201 bp, Homo sapiens
gaataagcctcttgatgttgatctatctcctggggggtccaataaattacagaaacacttcttgccattttttggagcttcctcttcatttattctccttyctgtggcatactgtgtatggccaggcctttgctacaatttgttatttataaaaagtacagagcacatttcaatcctaccagataaagtcagaattctaac

SEQ ID NO: 121453 - DNA, 201 bp, Homo sapiens
ggctacgtattgcaaagctgttattttaaggcataccagagaacatgaaatcttattttatccatattttggttttatccatttgctttgaaccccctgartcagctgccctgatggatagttttttttttttttggtgtgggcttggccatgatggggaacttggttgaaagatgagtgaagttaaggcagttcaaggat

SEQ ID NO: 121454 - DNA, 201 bp, Homo sapiens
cttaattttctgagagtttgctttgcagtgaagatttaagacactgagattaatttagttaaattgatatttcccctcgtgatttcagggattaaacagtraataagcctcttgatgttgatctatctcctggggggtccaataaattacagaaacacttcttgccattttttggagcttcctcttcatttattctccttc

SEQ ID NO: 121455 - DNA, 201 bp, Homo sapiens
ataatgtacaagctgagcttaaatgagtgaaattataaaaggagataatctcaattttgccctatataagaataaaatatcagtcaaaatatttaaagaayagagatttctgtttggtgcaattttctggttaagaggttaatggaggggaatggaaagttattgttttatggatgcagaattttagttttataaaagagt

SEQ ID NO: 121456 - DNA, 201 bp, Homo sapiens
tagcaccccccttgacttgggttcaatctaacacacttgagaagtgttatattaatagctttccttgtattaaatcatccttgcactcctggaatagaaaygccttggccatagagtgtggctttttaatctagtgctaagagtgctaagttggttaggttttaactgaggatttttgagtctgtaattataagtgggatg

SEQ ID NO: 121457 - DNA, 201 bp, Homo sapiens
ctttactttgaattgtcataattatttaatgtcaaacctatggagtgttatgaggctgtaagattttgaactctgtgcccttcagaggctctgcctcaggrcacaaacacaggaagattaaacattaattaaagtaaccacacaggagaataaacaatgtaaagaattagaaaaagacctggcttccccaccagggtaagc

SEQ ID NO: 121458 - DNA, 201 bp, Homo sapiens
cattttgtcaaattctttttggtatctgtcaaagaaatgataagttgtttcttctttaaatggctaataccataaattaatttaatatagggtctattaaratgttttttagagaacactttttccacaggctggtccatgaaaaaaattgggggtggggagattattgtctgatcaaatcatttggaggaaatgctacat

SEQ ID NO: 121459 - DNA, 201 bp, Homo sapiens
cattagtctttatattagatacttatctatgtatttatgtttatttaaataaacttaggggtacaagtgcaattttgttacatggatatattacagtagtkgtgaagtctgggaggaaataccatttacttttaacaacaaccatatactttttgtatatataaagcacagatacatgtgcagtatacaaacagatacaca

SEQ ID NO: 121460 - DNA, 201 bp, Homo sapiens
ggtcatgccagtcaggaccctgcgcattgatggtcatcttcaggtgattaacgttgatagatatctgagcagagaatagtgcaggatggagaaggagccayccacagacagggtttagcacattcagagtagactcaccaggctaatgctcatgggcccgctctggtttcatttagggctgagagactgattatatgaatg

SEQ ID NO: 121461 - DNA, 201 bp, Homo sapiens
tttgcagcaacatggatggatctgtaagccattatcctaagaaagcgaactaatgaagaaacaaaaacccgaatactgtatgttctctcttataagtgggrgctaaacagtgagaacacataaacgcgaacacaaagagaagaacaacagatactggggcttatttcagagtggaaggtgggaggagagagaggatcgaaa

SEQ ID NO: 121462 - DNA, 201 bp, Homo sapiens
gaggacgcaatgacttcctcctgaatgaagtagggtttaagccaggtcctgaaggagagtgagtgttaacctggtggagctgttggggcaggctaggggckttggactagggaatagctcatgtaaatgcctggagtgggcagccagccatggtgttattgtgttcttcttcttctcagagatatttacatgggcaagaac

SEQ ID NO: 121463 - DNA, 201 bp, Homo sapiens
gcatccaaccctgagcaattcctgtgactcgtggtggttgttatagagagggtacacagtggtgaatgagaaggaggcttattattgttatctgtaggcaycacttttgcttgaaaatgtgtaatggcaaactcaaaagtagaaatacttattccctattaattgtcttttttgtcataactttttaaaattttttgggtt

SEQ ID NO: 121464 - DNA, 201 bp, Homo sapiens
gaagttaaaaatgccaatggctgggttattgccagagattaattaattgatgtgggatgcagctttggcattgggatatttcatgcccctcccctgcccckggtgatcctaatttgagaaccactggtttaagctgagggaggtcttgacgatttctgttcgctccacttttacatagtctattaagttacttgcatggaa

SEQ ID NO: 121465 - DNA, 201 bp, Homo sapiens
tgggcacataatgggaactgtgcaactcactctcaagtgttgttgggtagggccatggggttggattctggccaatgggatctgttaggaatgacatgtgrtacttcaaaacctaaaaatcctcctgcatgatcctctgcattttctgacttcctttatctactgactggagggtgctaggagatggtggaggcataagac

SEQ ID NO: 121466 - DNA, 201 bp, Homo sapiens
cttgttcactcatttgttcagtcattcaacaaatatttaagtgcctatcatggaacagccactgctttgagagcttacaatcaatgctgaagaaaacaacrcggaaggattccccctgccttggcttcacctgggaggggagatgggcagtgagcccatgctagcttctaatgcactcaccacttcttttaataaatacaa

SEQ ID NO: 121467 - DNA, 201 bp, Homo sapiens
aagattaaacattaattaaagtaaccacacaggagaataaacaatgtaaagaattagaaaaagacctggcttccccaccagggtaagccattttagaaagmgagattttgtattgaacttacgagatggatgaaataggcttcactagacccaagggcatggagtaatttctcaggaaagtattctgccattgattcctgg

SEQ ID NO: 121468 - DNA, 201 bp, Homo sapiens
tggatgaaataggcttcactagacccaagggcatggagtaatttctcaggaaagtattctgccattgattcctggaagaaaaattagaaaaactcagtggwtgatggaccaacccagaggccctaatggtacagagagaaaggaaacatgaccatgttcaagttacaagttgtagctgaccttgatgtttatcgccagacc

SEQ ID NO: 121469 - DNA, 201 bp, Homo sapiens
ttatttttcctgtatggagagcctccagagactctatacaggtgatagacagcctgttaaggtgatagacagtacaacgtgttaggttatacatggagggmcaacagatttttggtagtttagaaaaggaagtgaccatcagatgttgatagaagatgatatttctgagtattaacgtatgagtaggagtttgcttgttgg

SEQ ID NO: 121470 - DNA, 201 bp, Homo sapiens
gtgtttcccatcaggatctaccttgatcttagccaaaagcccaagaagcgatcttatcctgatctcacctcatctccaacttatttgcccttcagtcactstgctctggccataatttcctcctttactcacttggccaagcatgctcctgcctctgggcccctccctcatttcctctggctgaaagatgtttttgtaagt

SEQ ID NO: 121471 - DNA, 201 bp, Homo sapiens
agagaaaaaaaaagatgaaatatgttcatctcctaccttgagacataatcattatttaataaggcactatatatgaaacatgggctttatttgacacatggatatgctaataagctccagaatattgctaggctctttgaaatggaggctgtgagatcatgatagtcagtcgcttgtttacaatacatgtagaacccttta

SEQ ID NO: 121472 - DNA, 201 bp, Homo sapiens
gcgatcttatcctgatctcacctcatctccaacttatttgcccttcagtcactctgctctggccataatttcctcctttactcacttggccaagcatgctsctgcctctgggcccctccctcatttcctctggctgaaagatgtttttgtaagttaggtatttgtatggttccctcacttttcttcaagtctgaccaattt

SEQ ID NO: 121473 - DNA, 201 bp, Homo sapiens
ctaaaagaacacactgtaacatacacccaactgggctccgggagtcacaggctcccatccctggacgctgctgtggggccagagcccagcatcccaacccstgcacctgtccgtctgcatgctcccactcctgtaaggggtttgagcgatggtggtgactgaacagacaagccaaacccctgttgcaggtcctgtgagagt

SEQ ID NO: 121474 - DNA, 201 bp, Homo sapiens
tgtaacatacacccaactgggctccgggagtcacaggctcccatccctggacgctgctgtggggccagagcccagcatcccaacccctgcacctgtccgtstgcatgctcccactcctgtaaggggtttgagcgatggtggtgactgaacagacaagccaaacccctgttgcaggtcctgtgagagtcagggaacccccct

SEQ ID NO: 121475 - DNA, 201 bp, Homo sapiens
ttgtatttttagtagagacagagtttcaccatgttgaccaggctggtctcgaactcctagcctcaagtgatctgcctgcctcggctttccaaagtgctgtygttacaggcatgagccaccgcacccggtctgggccctgagtcagtttctgacctgccttctgagctctgcatggtgcctggggtcagcctgcttctggct

SEQ ID NO: 121476 - DNA, 201 bp, Homo sapiens
tgagagtctaatatcaaacttactcttcctatttgttttctctgagccctgggttagaagactgatatgaaataagcatttttactatactgagctatacktatcatttacattattggtgttgcttagaaattactccacaggttttcaaaagataaatcatgccatttgattatcagcaaccatttgtccaatcagcac

SEQ ID NO: 121477 - DNA, 201 bp, Homo sapiens
tggtgaaacttgcagagaaggtattttctgaactgatattcaaggatgagtaggaatttataggtggatagaaaaggaattgtattccaagtagaggaagsaatgtgagtggacacacagatggatgaaaatatataatgtgttcagggaatggctagtaatcccagaggtcaagagtggcaggcagtggttggctattac

SEQ ID NO: 121478 - DNA, 201 bp, Homo sapiens
agaagtaacaaggccatttttgtggataagtctagacaatagtcttttctgtagcatgaaactaatatctggtcttattgcatgatcatttttcttgcacmtgctaaatcctttagtgccattcataaaacttttcataagaatgacttcatataagtttctattctttttagagatatgattacctatctgctttcagtt

SEQ ID NO: 121479 - DNA, 201 bp, Homo sapiens
agagatatgattacctatctgctttcagtttacactattgcacttgtgtgtgtgttgtggggggtatcctctggtcttgtgcaattattttcattttagtyactcaaatgaattgctgattaaaaagtaaattttgatggccatgtaaattggagatgattctggcttaaagggataactaggcaggtatttttgaaaatt

SEQ ID NO: 121480 - DNA, 201 bp, Homo sapiens
cattcattgagatgggaatacagaaatgagaaaagggttgagaaaatgcaagatcactttggggcatggtatggataaggtgcatgggtgtatgcatgagrgaactgtcctgatggagagaccactgggcgtcttatacagatttgggaatcataaaattgcttcccaggagaaaacagagaagagaaggcacccagaaag

SEQ ID NO: 121481 - DNA, 201 bp, Homo sapiens
agcaactgaagccttttaatcaaggagaatgacataatcagctttgctttatagaaaactcactgtgtcagcagtttaggggatggaaaagtgggagaaamgacttaagccagagagatcgtcaagaagagattatacttgtccagaacagagatgatgaggtttggagggaaggaagatggaaagaatgcatttcagaaa

SEQ ID NO: 121482 - DNA, 201 bp, Homo sapiens
gtgtagatcctgactgatacactggtgatttgaatctattctgctcaatgaattagtagaatgggaaagttaatgtatttaaacagctatgtctctgtgcrgctctgaataaaaacaaaaatgcataaataatgtactaagacatttcatcacagcaaaacactgctttggtttctgatatttcatgccatttgcaaatat

SEQ ID NO: 121483 - DNA, 201 bp, Homo sapiens
tattgcagttgtgtctgagacctttatgtaccttagtttttttgggttttccttccccatgtgaaccacagttaccctttctctgactagtatgctgaagytatagtacatttctatttagcaggtgtttcctgtggttgccttttgttctaaatctatgattgaaccttatctatattgaaccaaatctaatatctattt

SEQ ID NO: 121484 - DNA, 201 bp, Homo sapiens
gcttctgccaggcagccactaggctccacttgttccagcctgagtaactggtttctggaaataccacatcctagaagcagtggcttcctgttcttatatayctttgaattgcctcctctgtccctgattagcttttcaggtcatttatcatctatgtaaccaattccaagtattaaattttctctgtttaaagcacttaga

SEQ ID NO: 121485 - DNA, 201 bp, Homo sapiens
gtggcaaacatgtgagatagaaatgggactgaccccactttgtcgacaactagcccacaccggtgatcatggcattaactcatttatgaggtctctggtcycatgagttaatcacctcttaaaggccccgttacttaatagcattactaaggcaattcaattttaacatgagttttggagggggacattcaaaccatacca

SEQ ID NO: 121486 - DNA, 201 bp, Homo sapiens
tttaatttttctccctctacccaagggactttacacttcttaatgtgacattaatcagtgttttaatatttcttcaaaatgtatctattctctgcatgctwtttaccgtctttgtcaaagtcagtgaacaggaataaaaagtaactacatgatatagaaactatggtcttcttggcccttgtgtaatagccaagtggatgc

SEQ ID NO: 121487 - DNA, 201 bp, Homo sapiens
aaatgctgttggagttgggcggatcatgaggtcaggagatcaagaccatcctggccaacatggtgaaaccccatctttactaaaaaatacaaaattagccrggcatggtggcgggtgcctgtagtcccagctactcgggaggctgaggcaggagaatcgcttcaggagaacccgggaggtggagtttgcagtgagctgaga

SEQ ID NO: 121488 - DNA, 201 bp, Homo sapiens
cctttcaggataagtctaattatacctcttttgttgtcagcctgtgagagctgagggtttgtggcttttaattctcctttaggctgtggaaggcagtgggkgtgcggaaagagtgtgaccattagagttagttctggattcaaatcccaactctgctgctttccacttgtacagattaggcagttgacaatatttcctagc

SEQ ID NO: 121489 - DNA, 201 bp, Homo sapiens
tgccctcatgattcttaccacagccagcactgttatatcctcccaatttggttcttacattacttcactcttcagaacatcattcatttatttaaatggtwtttcttgagctcttttcatgttatggcttggttctagctacagagaaggatataacaaaatgtgagacatggtctttggacccaagaagcttctatttca

SEQ ID NO: 121490 - DNA, 201 bp, Homo sapiens
atgatctgtctgtttgcagaggggagttgggtggaactgggtgctctgggagtactctgatggtagaaagagtcctttttattccactgtggaggtggggrtatgtccttgggtgtggttttgagcctggatatccagaagcagtgtttctcaaatggcactattctgtatattcctattgcacgacgtgtatcttcttgc

SEQ ID NO: 121491 - DNA, 201 bp, Homo sapiens
gactggttataaaaattgccacatttacctctggtataacccaaatagaagctctgcatcataaaatttagagttgaagacagatgctgtaacttaaaagrattgatgctgggccagactgctgaattctgtagaggctttataatggagacacatctttctaggcagatatcacttgtcacttccataaggaaaattccc

SEQ ID NO: 121492 - DNA, 201 bp, Homo sapiens
gatgctcattagggttcttctgaaacgattggatcctccaagacatagaaggttatgactggttataaaaattgccacatttacctctggtataacccaartagaagctctgcatcataaaatttagagttgaagacagatgctgtaacttaaaaggattgatgctgggccagactgctgaattctgtagaggctttataa

SEQ ID NO: 121493 - DNA, 201 bp, Homo sapiens
gttggaaggcaaagggggaacaggcatcttacatcgcaggagcaggaggaagagagagagttgggggtggggtgccacacctttaaacaaccagatctcasgagagaactcactcactatcacaagaacagaaccaaggggatggtactaaactattcagggaggatccatcccgcctacacacacccatttccaatcacc

SEQ ID NO: 121494 - DNA, 201 bp, Homo sapiens
gtcagttgacaaggtaaagttgacccttgaacaatatgggagttaggggcactgatccctatacagtggaaaatttgtgtttaacttttgactctcccccraaacctaactataatagactactactgactggaagctttaccagtaacataaacaattgattaatacataaaaatgttattaagaaaaccataaagaaaa

SEQ ID NO: 121495 - DNA, 201 bp, Homo sapiens
atagaagagggttgcaatctgcttaactagaacacccacctgcccttctcctccaagtgaatgaaatgaactctcagttttacgactgttttatctttgtrttgtgaaaaagaaatattgtcttgctaaactctttggacacttcccaatatgcactatctctctcctactcctattatcactcattctggtaataaatga

SEQ ID NO: 121496 - DNA, 201 bp, Homo sapiens
ttgcttagctccaggcacaattaagtgcttttcactatttcaggaaatcctcaccacaaacctatgaggtagttgcttttattatccctatcttttgcatsgggagtattatagaagctggataacttgcccaaggtcttatagttagtaaatggtggagctgggatcagtggagcagttgggatgatgtcagatgttgaa

SEQ ID NO: 121497 - DNA, 201 bp, Homo sapiens
agactttcatgacccagccttggaaatcacatagtgtcacttcctcatccttaattaattaaagcaattacaatcccatgtagatttaagaggagggtacrtagatatctctatagaaggaatgtcaaagagtttgtggccactgtttataaaccaccacaccactcaatgcataaatcccttaacaaatggtcatccaca

SEQ ID NO: 121498 - DNA, 201 bp, Homo sapiens
agaaatctttttacgccgcttgtccattttgagagggctaattgataagttgaaactaaataatataatacatatataaaccagtttgactagaccatttwattcagaatatgttgcacagtactcaaagagaagatttcacatgttgactctgacgtgcagatgaatgatggtgccgtagacaattaggatattagattt

SEQ ID NO: 121499 - DNA, 201 bp, Homo sapiens
tctataaccaccagatcccataaagatcattctttttaaagccttgttttttactaaggaatgttgattttctagatacatcactgcaggatggagtcagkcaaagaataattattgtcattcaagtcagtgtttcataatctatctgggtgctaagagccaccccaattgggaagagtgcatgtgttataataaaattat

SEQ ID NO: 121500 - DNA, 201 bp, Homo sapiens
tatacctatgcatacacaaatttgtgtgtgggtggacatacatatattctacacaaatgcactgagggagagagcaagagtgagtttctattttcattctrtcgtgcttacgtatattcatatgatttcacattgggtatagctttggatctgagaaaaccagactattatatgtctggtaacttcactggaaaatctgaa

SEQ ID NO: 121501 - DNA, 201 bp, Homo sapiens
tctccaacaaggctaaaaacaatttcaagcagaatataaataagacgcatctgaggatatacctatgcatacacaaatttgtgtgtgggtggacatacatwtattctacacaaatgcactgagggagagagcaagagtgagtttctattttcattctgtcgtgcttacgtatattcatatgatttcacattgggtatagct

SEQ ID NO: 121502 - DNA, 201 bp, Homo sapiens
accttagagcctgtcttgtagacttagtttcataaaagttgtataataattttggaaagtacagatgacatgtcagaaaaaatgccagaggaaaagctctrgggagcctgattaatcagtttcacagtaggtataaggaatgagggggttctgatagctaaagtagtgatttgcatgtctaactaattttcttctgccatt

SEQ ID NO: 121503 - DNA, 201 bp, Homo sapiens
ccctattgcagttagaccaaggaatcttggcagtctagtgctatagaagccagacacatgcaggtaataacaccccaagaagagctgaaatattagccttyggagacacaggctgtgcaaatttctctggcttacaaaagagacatcagttacaccttagagcctgtcttgtagacttagtttcataaaagttgtataata

SEQ ID NO: 121504 - DNA, 201 bp, Homo sapiens
tgcaaagttaattgtttgctcccaatccataattgatgatagcttttcccctattgcagttagaccaaggaatcttggcagtctagtgctatagaagccaracacatgcaggtaataacaccccaagaagagctgaaatattagccttcggagacacaggctgtgcaaatttctctggcttacaaaagagacatcagttac

SEQ ID NO: 121505 - DNA, 201 bp, Homo sapiens
acaggtgagccctctctgaagcagctttattgtcttttattatcttttatgctaaatcttcgccaattccttttgcaggatataaaatgaacagttatttrtttacgctgattgttatatgttttgactattatgattacttgataagccagcctgaggtctcatttattccacctatactacctcctgttctttccattc

SEQ ID NO: 121506 - DNA, 201 bp, Homo sapiens
tgatgtaggtgaaaatatgctatagtagggggatgggttgtcaacttccccaaactacatctttctgctggagtcacttgggtctgcaaggccccctcatycatcaggcacaccaaccaggtagcttgggactctcctggcctctgcccacatctattctttaatttccttatcttgctgccagaaattgagcacatttcc

SEQ ID NO: 121507 - DNA, 201 bp, Homo sapiens
tcaaattatctctgtttgcagatgacatgattttatatttagaaaaccccatcatatcagccccaaaactctttaaactgataagcaatttcagcagtctraggatacagaatcaatgtgcaaaaatcacatgcattccttacaccaacagtagacaaccagagtgccaaatcatgaatgaactcccattcacaatcacta

SEQ ID NO: 121508 - DNA, 201 bp, Homo sapiens
tccacagctacagtggcttccaccttgcagctccctccatcagatgatgggacatggcagagatgcgtctccaccacctcgctcattgtcatcccagggayagaagaagggacaaggaagtcttccattgtgggggatcctgcctcttaaaggcctctagggctgtacaagataggacagcttcatctacgtcctgtctgg

SEQ ID NO: 121509 - DNA, 201 bp, Homo sapiens
tcaggagtatcccacctcccttccagaccagaaatgccgtagggcttgacagccaatttgcgctctctttcctacatcctgacctctttgactcaggtccyggaacttttgatccgcaattatgaatctcaatatacaaccccttgatcatgaccccttgcctcatggaactctctgtctcctctgtctagcccctgctaa

SEQ ID NO: 121510 - DNA, 201 bp, Homo sapiens
atggtctaccttctctatttctattatctatactacactcctgctcccatggctgaatcctctccctgatacattaagcagtaattatcagcctctttttraaatcttcaggcacaaaaagctctctacttcctgaagcagcccattccaccaaccagtagctccaattttcaaaatgatcttccttatattaatctgaaa

SEQ ID NO: 121511 - DNA, 201 bp, Homo sapiens
catgtgttaggctctgtggccacccacaatctcaggcccagctgttctgtaggaccagccctaagtggcccagagaaatattttctttgggttatatccartaaaaggatatgcggatatgctcgggtcttgttgagaggcagcctggtaaatggagtgaaaacactagaagcaggcaatgccaatgtgaagtccctctgc

SEQ ID NO: 121512 - DNA, 201 bp, Homo sapiens
tgtcattgtcgtgttgtaagtgtttacctgggcttctagctttttgcttttccaaggacactgctgatccatcctagaagaagctgacagccaccaccttracactggcttattgctgtccaggttatttaagatgcggaggaaatcttatcacagagaagcagcttctaaacatgtcctgccaggtgggtgatgaggtaa

SEQ ID NO: 121513 - DNA, 201 bp, Homo sapiens
accagtggaatttttatcagaattgcactcaaatatattaattatttgggaagaatttacatgtctgcagccttcagtcctcccatttagtaaaactggtrgtccagtcttaaaagtaccacaaatttttattaagatgattctttggtttttaaaactatttttgctgttattatgaatgtaggattattttggtccatt

SEQ ID NO: 121514 - DNA, 201 bp, Homo sapiens
ccccctttcttctcctttttttttttgtctcataggtgtaataacatttcattttaaaaataaatatgaaaaatggaaaagcataaataaaaaataaacayatttgtgagttttttatgcagatataaatactgttaatattttaatttttatcctctggccttgtacttctaggaagtaatgaatggtctggttctttgg

SEQ ID NO: 121515 - DNA, 201 bp, Homo sapiens
gaacaatattgtccttcccaccatgggctctttagtctttcttggagtgaaaaattgtcaaaagattaaatcctatttgggagccagagaaaaagcaaaakaatggctgagcgtgtaaataaagtctcctaggaagatcatatttttgaaggtatttattattcatatctttttgtcattgtcgtgttgtaagtgtttacc

SEQ ID NO: 121516 - DNA, 201 bp, Homo sapiens
ttctctgctcagaacttagtgtgactatgtggcctacctcacattgtttgtgttacacctacacaggaaaaaggaaaaatgtccttttgattccatgcttrtagagatgttcatccaatttgaatgaacatgtagccaaggtagtgtcttccccctttcttctcctttttttttttgtctcataggtgtaataacatttca

SEQ ID NO: 121517 - DNA, 201 bp, Homo sapiens
aaggaggtgcaggggctggcagttggtcaggcccatgggcactgttacaatgaaggctgagggaaaacgggtggggcatcgattgctttgctgcaggtccyatcccggattcaccttcccagggatgctagatgggagtctagacattgtctctacagaggatgaatctggaattcagaaagatgatggaggcccactgtg

SEQ ID NO: 121518 - DNA, 201 bp, Homo sapiens
gttaactaaaagttttgtagaagtagataatcttttcctggtgatcgatgtggtgagattggaagtgagttgccaggggagtcatggggaaataggcttamtcattttatttgtatttgtgctgaaggcagtgctgaacaaacctctgaagtcacttagccatgtcttttccagggggcatgcaaggcgactgctgatttc

SEQ ID NO: 121519 - DNA, 201 bp, Homo sapiens
tatgaatgggaaagaaaggtttcctatgcctgagtgagttgagttgctgttctttgcttatcatatataaagagtgagtgaatttattatcatcctggtakgtacatgttaactcaaaattattgtggtactcactgtactttgtactattgggttccaatggtttgtaagctagtgatttatgcacataaatccttaatt

SEQ ID NO: 121520 - DNA, 201 bp, Homo sapiens
cacttataagggacagtaatccttgtgccagttgaaatattttcacagccatgattttatcacagactgtaggaaacagattctcttgcttctagaaagcrtgttttgttagggaactgtgttgaattcttcacctcaattaacctttattttaaaccttctgagcatcagaagtatttactatcttatattataaatgca

SEQ ID NO: 121521 - DNA, 201 bp, Homo sapiens
tatccacctactttttttaaaaaggcaacttccgcacttataagggacagtaatccttgtgccagttgaaatattttcacagccatgattttatcacagaytgtaggaaacagattctcttgcttctagaaagcatgttttgttagggaactgtgttgaattcttcacctcaattaacctttattttaaaccttctgagca

SEQ ID NO: 121522 - DNA, 201 bp, Homo sapiens
tgtaccttcaatgtctttctccctaaattttcacttacttctaactcaaacagttgattctttatactaacacatgaataaacttgccaatgacatcttaygttgctaaggcttatgcgtgcttttattgtgtttgtttttactcatttttctagagcatttgacatatctccttgtcaaagtgttctcttctcttgccgt

SEQ ID NO: 121523 - DNA, 201 bp, Homo sapiens
agtctgaatatgttctttagtttgtctagtttctgcagtcttgtgtactaaaagggtagtaattttcagttagctaattactatgctttacacagttatarggacgaagcattttagaatggcacttcattaaagcagtaaaaatactgtgggctcagtaatctcatttactgggtcaatagcccataatatctagaagaa

SEQ ID NO: 121524 - DNA, 201 bp, Homo sapiens
cactcatgtttgttgagctaataatgtccatcttaaatcaagaagacatttaaacctttatggaatatctttataaaatatcaacctttatggaatgttaktaaaaatgtatgtatggtaatggacaattcttcaccagtgctttggatattctgccctcagaccaaagatgcttatttttcttccttccctctcttcttc

SEQ ID NO: 121525 - DNA, 201 bp, Homo sapiens
cagcatggcacatgtatacatatgtaactaacctgcacattgtgcacatgtaccctaaaacttaaagtataataataaaaaaacaaaaacaaacaaacaaaaaaataatttacaagcaaaaagcaaacagcccctctagaaagtgagcaaaggacatgaacagacagttttcaaaggaagacatgcaaacagctgacaagg

SEQ ID NO: 121526 - DNA, 201 bp, Homo sapiens
ccagcatggcacatgtatacatatgtaactaacctgcacattgtgcacatgtaccctaaaacttaaagtataataataaaaaaacaaaaacaaacaaacaaaaaaataatttacaagcaaaaagcaaacagcccctctagaaagtgagcaaaggacatgaacagacagttttcaaaggaagacatgcaaacagctgacaag

SEQ ID NO: 121527 - DNA, 201 bp, Homo sapiens
accagcatggcacatgtatacatatgtaactaacctgcacattgtgcacatgtaccctaaaacttaaagtataataataaaaaaacaaaaacaaacaaacaaaaaaataatttacaagcaaaaagcaaacagcccctctagaaagtgagcaaaggacatgaacagacagttttcaaaggaagacatgcaaacagctgacaa

SEQ ID NO: 121528 - DNA, 201 bp, Homo sapiens
ctgggtaaactaggccatgccttcagctagaacctcttcaacatggcccaggtgactagggaagggaccagcactgtgctccctctggcagggtggccacytgctcatgtagttgaccccttggggtcctggcctggctcagtcttagatgtaacatttccatttgatgatggaaccctcctgggcttttccagttttatt

SEQ ID NO: 121529 - DNA, 201 bp, Homo sapiens
caccagcatggcacatgtatacatatgtaactaacctgcacattgtgcacatgtaccctaaaacttaaagtataataataaaaaaacaaaaacaaacaaacaaaaaaataatttacaagcaaaaagcaaacagcccctctagaaagtgagcaaaggacatgaacagacagttttcaaaggaagacatgcaaacagctgaca

SEQ ID NO: 121530 - DNA, 201 bp, Homo sapiens
tgattgtagtgaaagttctatctctaagcattaaaaattaaacatttaaaatgtgcttttgcaatggggaaaggactccctatttaataaatagtgctggrataactggctagccataagcagaatagtgaagctggaccccttccttagaaaaatcaactcaagatggattaaagacttatatgcaaaacctaaaactgt

SEQ ID NO: 121531 - DNA, 201 bp, Homo sapiens
ctagaagaagatttaaagtagtttaaaaataattattcaaacgagaaagggatttcaaactataattaccatagcagtaaaggaatgaatgactccaaagsaaatataaatattatatttaaatcttaatatctgattgctgtaactcaaagggtttagctcttccaatactaaagatcacaagatcttagacctgaaata

SEQ ID NO: 121532 - DNA, 201 bp, Homo sapiens
caactttagtagaagtgctgtctgaatgtaaaaatctgactgcttgaaaataacacgcccccagtaattaactctcctaataggactacaattaagatctmgtaggacagcatttcgggaatttcttcctgcttattctcaccatatatatttcttatggctgcaggttagtttatacctccaaatatcatatttctcact

SEQ ID NO: 121533 - DNA, 201 bp, Homo sapiens
ggggctgccctattaaccttgagtgagctgagagaactaaagaaaattctttgtttgtcctactgcaaaattggccaaggcaaatcaaaacaagatgcctrggcaaatcaaagtgacacgttcaaaataaaatcatgttaatactggttgcaaatgaaactttattagcaagtcaactttagtagaagtgctgtctgaatg

SEQ ID NO: 121534 - DNA, 201 bp, Homo sapiens
gtacaggggctgccctattaaccttgagtgagctgagagaactaaagaaaattctttgtttgtcctactgcaaaattggccaaggcaaatcaaaacaagaygcctgggcaaatcaaagtgacacgttcaaaataaaatcatgttaatactggttgcaaatgaaactttattagcaagtcaactttagtagaagtgctgtct

SEQ ID NO: 121535 - DNA, 201 bp, Homo sapiens
tagaagcatcccaggcataccgaatggcgtacaaaacagaccttaatgagtactgcttgtcaaaggatctgatatgcattttgcagaataaacataactcytttttcagcagttgatccactattctctagggaaatgaatgaagggccatatactgctgtctttgctgcccaaacatacacttgtttgaagggaaagcaa

SEQ ID NO: 121536 - DNA, 201 bp, Homo sapiens
ttgaagcaggtactattacaccctatttgtaaggcttagagaggtctagtggcttgcccaagaacagaccacaagtacacagcagaggcatgattagaacmctgcccttctaactgcagtctggtgctctttcctggacacctgcacatctcttccagtaattgaactgacctgcatgttaagcatttcacattgctctaa

SEQ ID NO: 121537 - DNA, 201 bp, Homo sapiens
gctgcagtcctaccctgcactgctaatcctccctcagcaaacagatgcccctggaacaatgtaggggtgagcacaaagaaattcaggagaagaaagtacaytcatgtaattcaaaattgttatctctatcataagattagtaaaaagcctttgttcagattttttattgtgagcagtgttgtattttttgttattgtttca

SEQ ID NO: 121538 - DNA, 201 bp, Homo sapiens
aaaatgctcccctgcaagaaaattcttgcccttttcagaattcttcccttccccatttccgtttccaaagatgattgctgagtacaagggtgggaggatgkctctcagtccggtgtccaacgggaggggcccctctgatctcatggagggtgcctgtgccttttgctgggctcccattgggtcagcattaagggggctgcc

SEQ ID NO: 121539 - DNA, 201 bp, Homo sapiens
acacagtacgtggttttaacttcatatcaatgcaagaggcactgaagaggcaggaaaaacagccttgaattgctgatgccgcctctctcccatgccccagmggtgacagcatggtggagaatgctactgtgtgctggcaagagggaaatcacagcaactgtgacacatttaataatgtctcagggcatttaataatcaaac

SEQ ID NO: 121540 - DNA, 201 bp, Homo sapiens
aacttttttatcctttcataggattgcttctggctatgctgggtcccttgaatttccgtgtgaattttaggattaactcatcaatgggaaattgggatgcrggcttctccaaactctccaggcaaaactaatgttccatcaggattgtaaaccacaggtaaagatctgagaggaggcaaataacatttactgattacctac

SEQ ID NO: 121541 - DNA, 201 bp, Homo sapiens
aaacattgttttagtctatatcctgtaattccgtatgtggagattttatgtgagtatttttgttggttttctttaatggtggtttgtttctttttatatcygaagtttttaattgtgtatggggcattgtgcttaaaactttatttgtaacagtgatttgagacctaggatgatattatcttcctccagaggagatttttc

SEQ ID NO: 121542 - DNA, 201 bp, Homo sapiens
tttaaaaattctttatatattctacatgcacatccttaattatatgtatgatgtgcaaatattttctctcaccttgtgggctatcttttcactttcttgcyagtgtgctttgaacacaaatgtttttaattttgataaatccaatttatctgtttttttcttttgtcacttatgcttttagtgtcgtatttaaaaaggctt

SEQ ID NO: 121543 - DNA, 201 bp, Homo sapiens
ttttccttaattcttagatgccttttggtggttgaattctgtccttattttcttatttcctgaagcccaaaatataagctctataatgtggtcattcatamacctttagggatattcctattggaaaatgttgtgcaagtcttattttagagttcccagaagggaattaccggaccttaagatatgcacgttttgaagata

SEQ ID NO: 121544 - DNA, 201 bp, Homo sapiens
gtttagaggttccaccaacattttccttaattcttagatgccttttggtggttgaattctgtccttattttcttatttcctgaagcccaaaatataagctmtataatgtggtcattcataaacctttagggatattcctattggaaaatgttgtgcaagtcttattttagagttcccagaagggaattaccggaccttaag

SEQ ID NO: 121545 - DNA, 201 bp, Homo sapiens
ggcagagatttcccatcatgggatcagccatagaccatatccactgggaacatggagaaaaggtttagaggttccaccaacattttccttaattcttagaygccttttggtggttgaattctgtccttattttcttatttcctgaagcccaaaatataagctctataatgtggtcattcataaacctttagggatattcct

SEQ ID NO: 121546 - DNA, 201 bp, Homo sapiens
gtcttgtgctaggtgaaggtgggctctttcttaaattctgaaatgcccacgagtctttggtaatgttcatagtgaagcatctgagctgagcctgaggcttyccaggaggctgtgccaaggacaaaacacactgaggatgttgaccatggcctcctgacagaatgaaaggcccccacagtttcaatttaaaccgtaaacatt

SEQ ID NO: 121547 - DNA, 201 bp, Homo sapiens
ccttcccaccatgggctctttagtctttcttggagtgaaaaattgtcaaaagattaaatcctatttgggagccagagaaaaagcaaaagaatggctgagcrtgtaaataaagtctcctaggaagatcatatttttgaaggtatttattattcatatctttttgtcattgtcgtgttgtaagtgtttacctgggcttctagc

SEQ ID NO: 121548 - DNA, 201 bp, Homo sapiens
gatccatctgccaaacgagcctgctgatacccctcacgataggtcatcattctcgtcatactgtttgggctgattggtgggaattgcactgcattcttggyttctgtgtcttctcggattacacccatggatttggcccattcctgcatttgagatgggattccatgactggttcattaaggcacccagcgtgtggccctt

SEQ ID NO: 121549 - DNA, 201 bp, Homo sapiens
cctctggggtttttaatcagcatgaaaagccacccagggccccaaatcattagtagcattttaattggcagcagagtaatactgtgtctactttggcttamagatataaatttcctgctctctcataacagatggtgatgaggtgcatggtaggaagcatggcaagaactgtgttactcaaaatgtagacttaattgcaaa

SEQ ID NO: 121550 - DNA, 201 bp, Homo sapiens
tcagaagtgaataataattgttatatgaatattgtatgctgaaattcatgtgttgaagacaaacctccgcagagccagaggattttctttcaccttcactrcccacaagtctctgtcattcttggctgcacgtgtttccttgcttgatttatctaattattttcttccttctttagtcgaccaagtatttagataccagat

SEQ ID NO: 121551 - DNA, 201 bp, Homo sapiens
gttcttttttaaaacaagcattttatacaaagtaaaataactttagcagtttggttcatttttaaaatatttcatgcctgcatgcatgattaattgagacraacattccatttaactaatatttgagggcatactatatgccaggaaatggggctactcaggccttcacagatcttgtaatctatcaaccaatacaaacaa

SEQ ID NO: 121552 - DNA, 201 bp, Homo sapiens
tatcattctgatagtagccatgataatgggtatacctcattatggctttggttgcatttcctagttggctaataatgttgagcatcttttcctgtacttaytgactatatatcttctttggataaatgtttcttcaaatcgtttgaccatttttaattgggctatttatctttttcttattgagctttaaaaattctttat

SEQ ID NO: 121553 - DNA, 201 bp, Homo sapiens
tatcagttcatggacatttgggttgtcactttttggccattatgaataatgctgctatcaacattcatgtacaagttttggtgtgaaaataagtttttttyttttttggataaatacctgcctgtgagtggaattgctggtgcttatactaactctatgttcaacattttcaggaactaccagactattttttagagtagc

SEQ ID NO: 121554 - DNA, 201 bp, Homo sapiens
agtttcatccatgccatagtatgtatctgtacttcatgatttttatggctgaataatattttattctatggacatatacacatacattttattaattaatktatcagttcatggacatttgggttgtcactttttggccattatgaataatgctgctatcaacattcatgtacaagttttggtgtgaaaataagttttttt

SEQ ID NO: 121555 - DNA, 201 bp, Homo sapiens
gttgtgcaaccatcactgcaaccaattttagaacatttttatcacttcaaaagggaactatacccattagcagtctactcccccgtcctcctaataacccyagctgtaagcagccactaatctgctgtctctatagatttgcctattccggatactccatacaaatggaatcatacagtacgtggccttttgtgtccagct

SEQ ID NO: 121556 - DNA, 201 bp, Homo sapiens
attcaataagaaattctggggttaggacataatttttataaaagatttattaaatatattattcatataccatacaactcacccatttaaggcatatgatmctgtgttttttagtgtattcagagttgtgcaaccatcactgcaaccaattttagaacatttttatcacttcaaaagggaactatacccattagcagtcta

SEQ ID NO: 121557 - DNA, 201 bp, Homo sapiens
gattctgggtaccaggaaaattcaataagaaattctggggttaggacataatttttataaaagatttattaaatatattattcatataccatacaactcayccatttaaggcatatgatactgtgttttttagtgtattcagagttgtgcaaccatcactgcaaccaattttagaacatttttatcacttcaaaagggaac

SEQ ID NO: 121558 - DNA, 201 bp, Homo sapiens
aagaaggtgagacccattgatcagttcagaggagccaagggatattctgatttgaggataaggtggagagagcagattaggctattgatagactgaagaamgagtgaaaaagtagcaggtgtaaaggagggaggcaggagtgagagatgcaataaatttttctaaagtagctgggtcaggaaaatttgaagagctagataa

SEQ ID NO: 121559 - DNA, 201 bp, Homo sapiens
ttataaaatagccttaatgcccttaaaaataaaaactcccttgaataatatatgaggagaaggcaggaagatgctagaaatgtcagcttattagagtaagkatgtattatattgttaacagccaccaaaaattcacatagaaagaagttactagagatcttcaggaagattacaatctaatcagacagataaaacacacac

SEQ ID NO: 121560 - DNA, 201 bp, Homo sapiens
atttttcttctgtaaaatggaaacagaccagttgattattgccatttataaaatagccttaatgcccttaaaaataaaaactcccttgaataatatatgargagaaggcaggaagatgctagaaatgtcagcttattagagtaagtatgtattatattgttaacagccaccaaaaattcacatagaaagaagttactagag

SEQ ID NO: 121561 - DNA, 201 bp, Homo sapiens
aaaaacacatggtaggtaataggtcattaatagttagaaactgaggttcaaaacagttaactaatttgcccaaggtactataaatatctcctttgataggytaaatcatttttcttctgtaaaatggaaacagaccagttgattattgccatttataaaatagccttaatgcccttaaaaataaaaactcccttgaataat

SEQ ID NO: 121562 - DNA, 201 bp, Homo sapiens
tttatagattcaatgctattcccattaaattaccattgatgttcttcatcaaatgagaaaatactactttaaatttcatgtggaatcaaagaagaccctayatagccaagacaatttcaagcaaaaagaacaaagctggaggcatcatgctacctgacctcaaactatactacaaggctaccataaccaaaacagcatggt

SEQ ID NO: 121563 - DNA, 201 bp, Homo sapiens
tggccttaagggaaaagtctttctttcttctttctttctttcttttccctccctccctccctcctgcctttccttccttccttccttccttccttcctttkttccttccttcctctctctctgtctcgctctctttcatgacgaatgaatataccttgtagacataagtgaatacatttcatgatactgtacttttttctt

SEQ ID NO: 121564 - DNA, 201 bp, Homo sapiens
actctgaagatcagaagcagtctctctgtacaagacatgtgtttcccatcagcagacagcagactcttttgtagctgggttcaaaatctttgttgttgacygcttctggcatcttagcttttgtgaatctggggtgataccttttggtttccctgccttttctttaacaccagatctccttcatcctgatgcatttttaaa

SEQ ID NO: 121565 - DNA, 201 bp, Homo sapiens
ttttgggcactgcacctattgattgatccctcagtggctgctggttggctctttgtcccaccttcaccatcatctggtctttctgggactcctcagcaggstcctctgggtgggctagccctaaatgtgagtgatcctcacagttctgacccctcctccacctctctcccctctgctcctcttccctggtttgggactcag

SEQ ID NO: 121566 - DNA, 201 bp, Homo sapiens
  misc_feature (1)...(201): n = A,T,C or G
gcaattgaaaagtatggaatttatcaagaaccacaaaaagcttaccatggttaaagtatagggtacaagtttgggaggctgagagatgaggctggaggaanagtcagaggtcagattatgaaggggcttttataacatgttaagacacttggactttatcttgccatatagacaactccctctcacctaagtaggaaatga

SEQ ID NO: 121567 - DNA, 201 bp, Homo sapiens
tattggtttaactgcttcctccctgccaccccagactctgagtcccatgatggcaaaagccttggtagctgtagtagatactacatatatctttgtggaaygaataataataatactagtggagaatatttgttgtgcttatgatgcaccagggactgggctaactgtgttactcatcctatcttactgatcctctgtctt

SEQ ID NO: 121568 - DNA, 201 bp, Homo sapiens
tggataagatgaccttacctatagtcttctaagctgagacaacaggaggccaggcccctggtcgggaggatggtgtgtgtgtgtgtgtgtgtgtgtgtacrtgtgtgtgtaatgtgacttacccattaggcaccataggtgcggtgccttggggccgtggcagttttagggctccacaaaaatgttttaatcttttttaaa

SEQ ID NO: 121569 - DNA, 201 bp, Homo sapiens
  misc_feature (1)...(201): n = A,T,C or G
tgtttaatggactagaaatgatcacatagagaattccttgtgtctaacctagaactaaagcctgtgagaacacactcttaatttatttccatactgaagcnctaaccagaagcttagatctttgcattccaacataagaaagagacaggggttaccaaactaatctgtgagaagtaaaagaatgtgtgaaaaaaataacat

SEQ ID NO: 121570 - DNA, 201 bp, Homo sapiens
tgttcctccctggcagtcgccatgttctttctgtgaatttgttagaatcacttattaaaccaaagtcagggtcaccccttgtggggcttagaagtgctttyttttttttaagccttttatctgttgatgagctttcgtttctgaatatgaatggtatttggtcaaggtaggaagaggtttgaactagaacaacaactaaaa

SEQ ID NO: 121571 - DNA, 201 bp, Homo sapiens
tgttggatataacttttaatattgaataatctatattgctgtttatttctgactacttcatatcattgatttataatttgtgtccaaatacaacagtgaayttgtttatttctccttataaaattttaataagttgaccttatatttttgatgcatgttgctaagtacctatgatgtattatcttaatattttttaattat

SEQ ID NO: 121572 - DNA, 201 bp, Homo sapiens
aagtgtggactcaacgaagaaagaagatcattgagatgtgtaatattgaagacctgggaaagtgacaaaatatttatatcctacaatagcagaagcctttwtgtcaatggaattgatttggtttctcagctccactgtctcattcttttggagacttctgggtaaacacattttgctcctctgaacactgtatttctcgaa

SEQ ID NO: 121573 - DNA, 201 bp, Homo sapiens
agcattcctttattgatgggctttcaagttacttccagtttgttgtcagttaagtaaattgtttacttgaaagcttccattgtctgggtctctaccactaygggacccattttgagtgttggtgatgctcacacaacaaggagacacaagcccggagttgagctcctaggtgagagagccatccagtagccattctggtcc

SEQ ID NO: 121574 - DNA, 201 bp, Homo sapiens
agtatatagtgttattattaactattatcttcatgatgcacagtaggccacttgaatgtgttcttcctatccaaatgaagtttagcccccctccccacttyaagtatctgtcttttaatggctacataatatagtttggatacattatattcaattagccttttgttgatttggatatgccataatctactcaagcattcc

SEQ ID NO: 121575 - DNA, 201 bp, Homo sapiens
cacccagtcaatgtgcaataaatgttggctattatcatcatcaccacctccatcatcatcattctctaataaaagttaagcccttctctctgttgaatacrcccatcagttaataccagtggctccttttaaatagcttaaaagcaaccaacattctatagatttcagtggggaagattgtaagtgaaatgggtgttgtga

SEQ ID NO: 121576 - DNA, 201 bp, Homo sapiens
agatacctctagtcagccatcttgaagcccctcagcgttattattcttgaatgagttgttactgctctgtagaaattctgttgttacctttatgttgatcmtgtatctggccaccttgctgaacactgactaatgtttatggtctgcagattcccatgaattatttatgtaaacaaaccatttatgctttaatatagcttt

SEQ ID NO: 121577 - DNA, 201 bp, Homo sapiens
tccagtgacctgtcctcatatatttatcttgattgataggtaattagatgaatgatgataccaagttaggaacttggcgtcttctcatttcctcttcctcyccctgccccagatctaatccttctccacagtgcatcagttctgtctcaggaaaacctctcaactctgccccttactttccatccttactccccctgcctt

SEQ ID NO: 121578 - DNA, 201 bp, Homo sapiens
agtgttctatttttttccccatgacagtactactccttgattattcctgtagctttagagatattattgcatagggttaggtgtaggggcttagtagccaygctgcttgagtttgaatcctaacaatgccactgcctagccatgggatcttgaaagagttccataatctctttgtgtaccagtttcttttttatctgtaaa

SEQ ID NO: 121579 - DNA, 201 bp, Homo sapiens
tggtatcatcagacagatctgtatcaatcttttagtgtgaaatggcatcacatcattttattttgtgtttccctgacaatgaggaaggttgaagatctttraataggtatcttggccaatcaagttttgttttataaaaatttgtgtccatttcccttttagagggaatgggttttgttttcttattgatttatacagtac

SEQ ID NO: 121580 - DNA, 201 bp, Homo sapiens
aaagaggagtattatccaaattaccagcaaaagaaaatcttatcttttcagatatgatagatggctgacatagatcagtagaggtttttaagagttctaaraagttaaacatggaagttttattttagggcctggcatcctcacttacccatactgggactcattttacccttaacctctctccagcatggtatttcatct

SEQ ID NO: 121581 - DNA, 201 bp, Homo sapiens
gtttcagcagttggtatcatcagacagatctgtatcaatcttttagtgtgaaatggcatcacatcattttattttgtgtttccctgacaatgaggaaggtygaagatctttaaataggtatcttggccaatcaagttttgttttataaaaatttgtgtccatttcccttttagagggaatgggttttgttttcttattgat

SEQ ID NO: 121582 - DNA, 201 bp, Homo sapiens
ctcctttttagaattcactaatgattctaatttggaaagtatcttgagcagctcgggcaacagaaataaaatgcaaatgacctttgagacatgaggtatgyaggctgggaataataactttgtgagcatttgaaaaaggcaaggcagtgaatacacctggggaaagagaatccaaacacagagctgttctgggaagcagat

SEQ ID NO: 121583 - DNA, 201 bp, Homo sapiens
ttattcatgacctggatggaaaaaaaaggaagaagctgctcctttttagaattcactaatgattctaatttggaaagtatcttgagcagctcgggcaacaraaataaaatgcaaatgacctttgagacatgaggtatgcaggctgggaataataactttgtgagcatttgaaaaaggcaaggcagtgaatacacctgggga

SEQ ID NO: 121584 - DNA, 201 bp, Homo sapiens
tggatccaagggtcagagagaacagtgaagagggtattgctgaagtctaggggaaagagccttcagttattcatgtttccatgctgtttcttagaggctcrgcccaagtatctgatctttcccgcatctatgcataagttttctcaagcagtgctggtgatctccacaccgcatcttcctcctaaaatatttactgattat

SEQ ID NO: 121585 - DNA, 201 bp, Homo sapiens
caattaggatattagattttagtagaacttaatttatttctaatttttccagtgacacaatggatataaatgaaagttcaaacctagtttgagttgtgccycccacaggcagtctttccatgtggcttggatttataacaacttggtggctgggttctgagacagagcatctgaaaagcaagcattccaagaaatcaggtg

SEQ ID NO: 121586 - DNA, 201 bp, Homo sapiens
gagcagtaaagagatcagcattcctagagcttaaaatattgagcagagaaagcagaagatgagtctctagaagtcggattacagaaggtctgtctattatrttaaaggttcagatttatctgcttggtgatgaaaagtaaggaaacaatggggtccctccgggggagtatggaacgtggatccaagggtcagagagaacag

SEQ ID NO: 121587 - DNA, 201 bp, Homo sapiens
aatgtggtaagtgtgatgatagatacatgccaaggtgcttgggagcatagaaagggacccctaagtaagtttttagagtcagagagttcagaggaggttasagaaaatacaggaagggagtttcagaggaggaggtggcaagaatgtagccttcaggtgaaaaatagcatagtatattctgagcagtaaagagatcagcat

SEQ ID NO: 121588 - DNA, 201 bp, Homo sapiens
aagcgtcactgcaaagcccttgttgtttagccctagctgcttcaatttctagataatggcccattattaatgtggaagtattagaaagttttccagggaawaatatcaacctggaaccattcccctttgcatgcattatacacttcactgccatctggttatccataatatccccaaacccctaccaattttccaaaaaga

SEQ ID NO: 121589 - DNA, 201 bp, Homo sapiens
cttcttctgagccctccaactgttccaatctctatccattacccagctctaaagttgtttcatattcaggtatctttatagcaatgccccattctgtattmattttatgtattagtcagttcttgtgctactataaagtaatacccgagactgggtaatttataaagaaaataggtttaattgatccacagttctacaggc

SEQ ID NO: 121590 - DNA, 201 bp, Homo sapiens
gcttgcccaggctctgcaggactctagagtctagagcctgctggcccagaggcaagaggggtgccagatgtgcgagctagcaaaccgcggaagctactgtragattagagtggcacagaaatagtcggaaaattaccctttccactgggcttggaatccagggtaactgaggcagcaaacaaacttctgtgtgtgtgaggt

SEQ ID NO: 121591 - DNA, 201 bp, Homo sapiens
aacactttaagcttctcttcttgcctttatgctcctgaatacgttttcttctacctataattccagttcccatctcacctcctcagtacctctcctctgasccaaatctggtgtttccttgatgctcagaaatggcacctcctccacaaaccctccctgctatgcccatgtctaggcagaatatttccttctttcctcagg

SEQ ID NO: 121592 - DNA, 201 bp, Homo sapiens
tcagatggggaggacacacctgttggctggactcctggcagccaaaggctggcgactgatgagcaagtaatgagtgcctgactcagggacacatctgagcstttgatgagcccttgaaattttatctgaaaatgcagtcctcagtttcaccatatcctgagcctaattttaccccagatgttgtgcagctgtgagttttcc

SEQ ID NO: 121593 - DNA, 201 bp, Homo sapiens
gtgagcagggctgtgattcctggtgctgtttgctgcgcggctggccgcgacaatgggctggactcgaaagaaagagaagtgaaagtctctctttgtgaagmgtttgccttatcagagaaagtggtaccagagaagagacacgagaactgctctctagggtgtgggcagtaagaagactgtggggtgcagaggtcagagcta

SEQ ID NO: 121594 - DNA, 201 bp, Homo sapiens
aaacacctttcagatatgtagaatggaagaagtacccaacattgatgtatattaaattccagccctgaacatcatataattaaagaaactaatataatackgatataaaatgtgggactgttttgactgtattggtactttctttttcccaaaaaggcagagctgcttttgcatatgaactcattttcttcaaaatccatt

SEQ ID NO: 121595 - DNA, 201 bp, Homo sapiens
taaaaaaattcagcaagtctttttgaatgtacttgtgactgtcaacatttacattgtccaaaattttcttgtcaggtgagggcatcaaagaactcttaaaygctttcaaatgtggtgggagcatcttgcttctgtgagaagatttatattctccctaccttctcaattctgtttccctatcttatatgctataaacaaaac

SEQ ID NO: 121596 - DNA, 201 bp, Homo sapiens
gtggcagaactgaatattttagtctcagcataaatagtgcctcctcttccctatccaggttgatgactgcttccttgtgactttgcaaacacaacttcttmttattattattatttcaataggatttgggagaaccagtggtgtttggttacatgaatatcttctttagtagtgatttctgagattttagtgcacccatca

SEQ ID NO: 121597 - DNA, 201 bp, Homo sapiens
tttcagaaaagttcagggccccttagaaaaacacactgatgggtatgggaaagaacaggtgggggtaagggggcctgagttataggttgctttggtctccmccttgtacaattcaaaacacctttcagatatgtagaatggaagaagtacccaacattgatgtatattaaattccagccctgaacatcatataattaaaga

SEQ ID NO: 121598 - DNA, 201 bp, Homo sapiens
aagtaggggtataagaaaataaaataaagatcaaatacatttattactatgagagcttctatgcgggaaaaggaaaaacaaagtataataatacaaggcamccacataattaaataattttttcaaaagactgtcagtggtaacacacacacacacacacacacacacaattaggaaaagctacaaaagagccccaagtct

SEQ ID NO: 121599 - DNA, 201 bp, Homo sapiens
acgaatgacagctggtgagctaaaaaaaaaaaaaaaaaaaagcaaatcgcaaaagaaatctcataatgttttaagaatgtttacaaatttgtgttgggccrcattcaaagctgtcctgcgctgcgggttggacaagctatagagcttgtcttttaccttcagtgccaatttagtaaatatttatagggattctgaatttat

SEQ ID NO: 121600 - DNA, 201 bp, Homo sapiens
tgttaaattatctgcttttttgtgttactatatatgctgtagcacttatccactggtgtaaataagaaagtcaattgaactctctctgtctggagagagakaaaatgagattgagaataaagtcttgcagaggttgcagatggccctgtaaggctgaattcagcccttgcgtatattttgttcagttggtacaaagttaaa

SEQ ID NO: 121601 - DNA, 201 bp, Homo sapiens
tggagggagtagatttacaagtgctacctggatcccattaccaaaagctgcagttagctcctggttattaaaaggctcattattcagtttatggattatcsagaccccatttgcctccagccattctgatgtacacgttttatgccttttactgccaattagcgccttcacctgagcagagaaaaaagggggtgctaaacc

SEQ ID NO: 121602 - DNA, 201 bp, Homo sapiens
cttttattagtgattcatgaatccgttcgcatcccatctgtgaagcaacaagggcctcttcagggtgtggcagaagagtggttttcataaggcaacttgarcaggaacaatgaaacagcaagtgcaaaaaatgattggttaacatcatattacttcaggttactttccttgtataggctaaagcacaggaggcttccttat

SEQ ID NO: 121603 - DNA, 201 bp, Homo sapiens
cccgttgaccagcctctctctatcctcccttcttgctcctctccctaatctctggtaaccactgttttactctctgcttctattatatcaactctttattyatatacacacaaacacacacactttttttcttttcgataacagccattctaaatggagcaaggtgatgatatcgcattgtggttttgatttgcatttccc

SEQ ID NO: 121604 - DNA, 201 bp, Homo sapiens
ttcttttttaaaaaattatactttaagttctgggatacatgtgtagaatgtacaggtttgttacataggtatacatgtgccatggtggtttgctacacccrtcaactagtcacctacataaggtatttgtcctaatgctctccctctcctagccccccattccctgacaggacccggtgtgtgatgttcccctccctgtgt

SEQ ID NO: 121605 - DNA, 201 bp, Homo sapiens
ttaaaggtgtgtttctctgtgcacacatagcaaatataaatatacatgcacattcattcaatcttatcttaatatttactcagatttgaaaactatcgcaygtaaaatccttttctggaagggacttctctctgatttcaaaggctatttggtttcttagtgaatttattggctgtgcatttactacacacgaagtaaaaa

SEQ ID NO: 121606 - DNA, 201 bp, Homo sapiens
gaattcaagactgccctataggcattgggaatctagttaatgccactatctgcctgtgaatttcctgccttaaactgtctcggattatacattaagctggktttttttcccctataatgtgtcagaaaacaaaaattcaacaaactgagcttacagatctaattggcttttattagtgattcatgaatccgttcgcatccc

SEQ ID NO: 121607 - DNA, 201 bp, Homo sapiens
aagagcagtgtggttctttcatgtctggccagcaccaggcctcatgcctcacactctgaatggtggggatatttactgagcatagagctaaatacggtacrtggaagaggagactgaagcttagagaggccaagtgactgcccaaagtctcatagtggggctggaattcagacccaaagtctgaactcctaacagttatgt

SEQ ID NO: 121608 - DNA, 201 bp, Homo sapiens
agtaatgttctggaaggggctatgcatttggattttcattctggtaattttctctatgaccttggaaaatgactttatttcttcgcttttgcagatggaakgaattataaaaatggttctgtgaaaccttgaaaccataaaatgctatacagatgctaaatatacagaatttagcacgcgattttcctctgttcttaggac

SEQ ID NO: 121609 - DNA, 201 bp, Homo sapiens
taagtttcctccatgtcttttcacagcttgatagctcatttgtttttagcactgaacaatatttcattttctaggtgtaccagaatttgcttatccattcycctactgaaggccagcttggttgctccaagttttggcacttataagtacagtttctgtattcgtaaacacagaataaacacctatatgaagatttgtgtg

SEQ ID NO: 121610 - DNA, 201 bp, Homo sapiens
attctgactttcttagtttccaatattctagcagatggcatgggtagttgggcacaatcaattttcttgcattgcctcacatcttccagtgagattttgcrgaagaatggtgtgtgcaccacagatcttgggatcattcaaaggattctcaaagctcctcaatggccaatcagcagtgaagagggaaatggtggtaaatga

SEQ ID NO: 121611 - DNA, 201 bp, Homo sapiens
  misc_feature (1)...(201): n = A,T,C or G
actcacagccatccacttacctctaatggccagcatcagagacaaagacttctgccttggttactgctgtcctgagcttctagcacaggtgtgcccctagntgatttcagtgagctattgttaaatgaatgtgaattcactgaagaaccacagactgtgggagctggaggaagtcttggcttgtcgtaatgaaccacagat

SEQ ID NO: 121612 - DNA, 201 bp, Homo sapiens
agaccagagctgttcctatttgaccatcttggtccctctctcgccagatgccctcttttaaaaattcttaaatgtatttgcagtatcaaagttgagactayttttcttctcctttacagccttttcaatatcaccatctccctaagtatgcagttacaagaggtaacttctctctgtatcttatctaaggaaactgagagc

SEQ ID NO: 121613 - DNA, 201 bp, Homo sapiens
tggattgctagtgctattaccgtctggctattacatttaaaaaaatattgtacaaataccacttcaaataattttcttactcttttttttaaactggaacrattagctttttttatgagagacaattcttcacatgatggagaaaatagaattgtcaggtaacatggaaagagtataagctttggagtcgtaccaaactgt

SEQ ID NO: 121614 - DNA, 201 bp, Homo sapiens
tcgcccaggctggagtacagtggcgcgatcttggctcactgcaagctccgcctcccgggttcacgccattctcctgcctcagcctcccaagtagctgggaytacaggcgcccgccaccacgcccggctaattttttgtctttttagtacagacggggtttcaccgtgttagccaggatggtctcaatcttctgacctcgtg

SEQ ID NO: 121615 - DNA, 201 bp, Homo sapiens
tgagctagagttggggggaagatcttagcggtcactgcatgctgagtgcatcacgtctgtaacagagctgggagcaagtgttagggtgatgttgccagatrccttcttttccttttttttaaaaaaatttactttaagttatgggatacatgtgtagaatgtgcaggtttgttacacaggtatacatgtggcatggtggtt

SEQ ID NO: 121616 - DNA, 201 bp, Homo sapiens
gatataaatcctcctctactggagacaactctagactcatcagctgagagacaacgccagaggaatctgcaaactaacctcacttcatcagttttctcctrtatatttaccttcccacagtttcccatccttggaagcccaaaacctcacttctttgtcctgtcttttcttgacaactttattgttctttgttgaacatgc

SEQ ID NO: 121617 - DNA, 201 bp, Homo sapiens
tccctgacagtcactgcagggcaactgacgttctgacagagggaggcatctgccacaggaacacgaggaaagcagctgatagagtcaggaggagtctagargggtcaggggaattgtccatgtagagaagagggacagagtgttcatctatggagggaacagtaaggacaaaatcacggaggcgagggagatcacggtcaa

SEQ ID NO: 121618 - DNA, 201 bp, Homo sapiens
ctcaacatcactcaccaacctagccttctttcttcttcctcttggtactgctctctagattataaacatccatgtgatttctggtcacctgtatgtatacytattaggtgatacgatatgtacactcagtggtcattattaatacatgaaatggctgaggactctagaggcatgaatggagttagagtcctttctgtgata

SEQ ID NO: 121619 - DNA, 201 bp, Homo sapiens
ggggaaggagtgtgggaggggtttatacactttccttcccatcctctcagttgtcctccctcatctccactccctccatctccaatcttttctcccctcarggctgaatgaaattgaatgtcttgtaaacgtgtgcagcctttgccaccgggccctcggacatgcccttttaacattctgacataatggatgaaaacatga

SEQ ID NO: 121620 - DNA, 201 bp, Homo sapiens
taaacgaagttcttactagaggttttgttccctaagtgttcatttctaaacactctagtttagttttgtttcttttgaatttcatgtagaggaagtcatakagcttttttttttttttttttgagacagagtctcgcttttttacccaggctggagcacagtggcgtgatctcggctcactgcaatctccgcctcgcgggt

SEQ ID NO: 121621 - DNA, 201 bp, Homo sapiens
aaaattagtgtatcaaattactcttccaccagaagtatcacagaagttccttttgcttctggacaacaattggtttaaacttttgccattctgttaggtakgcagtggtatctctttgtggttttaatttgcatttccttgattaagaatgaggttgaacaccttttagatatttattggctatttgaatatcttcttgtg

SEQ ID NO: 121622 - DNA, 201 bp, Homo sapiens
agtatcacagaagttccttttgcttctggacaacaattggtttaaacttttgccattctgttaggtatgcagtggtatctctttgtggttttaatttgcawttccttgattaagaatgaggttgaacaccttttagatatttattggctatttgaatatcttcttgtgtgaactgcctgtattagtcttttccccatttaa

SEQ ID NO: 121623 - DNA, 201 bp, Homo sapiens
atgtgtgggcaaaaatacagattttcagctaaaacattttaattcgtatctcagtgtaggtaaggttgaaattaagagttgtacgctaaataacctgaaayggaacttacaagttgggtgctttaagctctatacaccaaaatcaatgaagccatgaaaagaatataaggaagggggcagagaggataactggctggccag

SEQ ID NO: 121624 - DNA, 201 bp, Homo sapiens
gatcccagagggttacctagcagttggagagtatccatggtaacagcttttctttaggagccagagggcttccaactcactgaacttactctgtctgcccyggagagcttgcttgggtccctgacaacatcttctgtcttattattcttagacatttactgacaaatgtctaaatctgccacccctcctacattaaatctt

SEQ ID NO: 121625 - DNA, 201 bp, Homo sapiens
accacaatgagaaaaatatttaaaaatcacaaagagatactaatatacatgaaacgccagattggcaaaaaattaagaagtctgacaataccaagtgttgmcgaggatgtggaacaacagatactattgtatacttgtagtgggagtaaaaattgtaatacccactttggaaaaaacagctccactgttgtattgagcaaa

SEQ ID NO: 121626 - DNA, 201 bp, Homo sapiens
attagaacactcaaagggaatgacagattttctcctaaattcaagtagttctaggctaactcgggagaaaataaaaactttgtgactttttaccacccttstcaatgatttcatcctttgttctgacagtcccacccctaccaccatgtctgtgccatgctcttactcccaaatgattgtgcatttgttctcactgtaatg

SEQ ID NO: 121627 - DNA, 201 bp, Homo sapiens
gtacttttgaaagagcactgaaccaaaagcagaactaggtttaagatacttttgcacctaacagctatataatctttttatttacctattcaacccttctytttcttactgaaaaaaaattataataatctctgtgacttagttgagctatttaacttcctggttaccaggttactcacttgcaaaatgtgtcatggaatt

SEQ ID NO: 121628 - DNA, 201 bp, Homo sapiens
ctgatttcagtcatccaggccgagtttaattatgtataactgtcttcgtttatttggggcactaaaacaaaaataacaaaaatactatagactgggtgtcytaaacaccaaaagtttattactcacagttctgcaggccgggaataccaagattaggttatctgcagattctctggtgaggacctgcttcttagttcacag

SEQ ID NO: 121629 - DNA, 201 bp, Homo sapiens
gcccttgaaaccaccaatctactttctgtctctataggtttgcctattctggctattccatataaatgcactgataaatatgtggtctattgtgagtgacktaatgttttcaaggttcgtctgtattgtagcatgtatctgtacttcattcatttttatggctaagttatactctgtcatattatggaaataccacagttc

SEQ ID NO: 121630 - DNA, 201 bp, Homo sapiens
gtccagggcttggttcaaggtaatcttgctttctcctgttgagatcatggcagatttttgggaaaaaggagaaaacgaacttcaagctaggttctatttgyagttgcctatgagggactcagtcattgtgttgtcttttttgttgtgtgacctggtgtgaagacattgctcagagcaagcagcctgcagtttatttgcatt

SEQ ID NO: 121631 - DNA, 201 bp, Homo sapiens
ggcagaatcagaatcgaagcctcaggcttcctcatttgtagttcagagttcattcattccatctgtactcgaaccatgaacagcttttcctccttggtgcygctctgagtggatgccacccatgtagaatattcttttattttcccactggtgtagcgtgatgggtccattttatttttctcttcatctctatcatcaggt

SEQ ID NO: 121632 - DNA, 201 bp, Homo sapiens
taacctttttttttttttttttttaactgtttaaaaggataaggcccagtaagatagaagtgagcacaaaagcaaggggctgctgggctccattggcatakaatataggcagagtgggcttgggccaccagctgtctcctggggttctcaggcctggagtcctgggggagcctcttgtccttttcgcttctctagcctcct

SEQ ID NO: 121633 - DNA, 201 bp, Homo sapiens
atgtaactggataagttaaatgaaatgagtaatgtaatttgatggaagtatgtagttattttcagatgaataaaggaattaggacttgggtcttggtttcmaaaaagagaaaattaaagggtaaaactacataaatcattagctccggaagtaaaggaatttatttttcaaagttgaaagagaggattaaagaagaggaaa

SEQ ID NO: 121634 - DNA, 201 bp, Homo sapiens
agaagagatgactatgtttctcagtctggttgtgaaatagcaactttcaatcaatgaccatatctccagacaatctatgagtgccagatgagaaggacagrtgccactgtgggttagaatatttccaggaagcttttgtgggagaggtgagacatgtgctttggagaaagatttggatgggacagaggaagaagacaaagc

SEQ ID NO: 121635 - DNA, 201 bp, Homo sapiens
agaaaaagatttgacaaaactgagaggcctaactacagacagcttggttaaggattgcatgtacacataggaatgagtttcagtgtgcaagtctgacaggrtaggttcacctgagttacgaatggggaatgtgtcagtggggaggcagaactggtgatgtggagagaggagaaaagggtcaagaacgtgtgttcatgcgcg

SEQ ID NO: 121636 - DNA, 201 bp, Homo sapiens
caaaggttcagaatatgtattgtgcattttccttcagcccctatgactcccagtaggccaaggacactatatggaaagctacagtaaagccctaatgtctrtgctggtaatcgtcattgcctcacacttggtggatccatttcatacctttctctggattcaatacctttagtcctaatcgtgtggctcttctttttgttt

SEQ ID NO: 121637 - DNA, 201 bp, Homo sapiens
tgtttgctgaatgtatcagtggtgttattaatttttttttatgtcagttatagacacaggtccaacctgtcttctgaaaacagctgagcatttcaaggatrtggcatggattttttactctaatgtatagcaggcagattagagcttgttgattagtttgctccttaaattttttcttagtatgtttcttgtaggtaggtc

SEQ ID NO: 121638 - DNA, 201 bp, Homo sapiens
taatataacaaattatatctacaatggccctacttctaaataaggtcagactctgaggtattggggtttaggatttcaacatacgagttttggaagaatayaattcaacccatgacaccacctcacatggtttggtgtggattaaatgagtacaaaaattgctatgtgagggtttgctctaattattattagtaagtagat

SEQ ID NO: 121639 - DNA, 201 bp, Homo sapiens
gagggaccaggaaggggaatggggaataggagcaggaaaggcagaaaagtaagcttgagaactcccaaaccgttttgtttgtaatttgttagtacagtatrataatactaaataatagatttgtaattctaagttgtaagacaaagaaaatatgctcgttaaaaaaaaatcttaaatttgatagcaagttagggattgatt

SEQ ID NO: 121640 - DNA, 201 bp, Homo sapiens
tgctggtaatcgtcattgcctcacacttggtggatccatttcatacctttctctggattcaatacctttagtcctaatcgtgtggctcttctttttgtttrgctggttatctagtcttgtagtgctcttaccttggccctactgccctgcatactatgtagggggtcacttctaataatgcttctctctgtgtacccctga

SEQ ID NO: 121641 - DNA, 201 bp, Homo sapiens
ctgaatgtaaaaggcagaaaaggctttgttttattcaacttggtatttctaagaactagcttggctctcagtaggtgatccttaagtgtttgctgaatgtrtcagtggtgttattaatttttttttatgtcagttatagacacaggtccaacctgtcttctgaaaacagctgagcatttcaaggatgtggcatggattttt

SEQ ID NO: 121642 - DNA, 201 bp, Homo sapiens
actcctgccagggagaaagaggattggaatgtgtctgaatggacaatgctctgtctgttttatttactcatttttaaatttttttagagatgaagtctcamtctgtcacccaggctagagtgcagtggcacaatcacagctcactacagcctggaactcctgagctcaggcagtccttccacctcagtcccctgattagct

SEQ ID NO: 121643 - DNA, 201 bp, Homo sapiens
aaaaatacaaaaattacctctagaaataccctgctgtggtgtttcataatatgtgtatttgagtatttgctctgttgtcttcttcaaatatgaacatttaygaatcccaaagtatacctggttcaaatgattttagataagggattgcaggcctgtgtcaaacacagactataaaaatgattaagaatgaataaaatacat

SEQ ID NO: 121644 - DNA, 201 bp, Homo sapiens
tcaggaatgagtggattcctttctcttcctcccaaagggtctatggaagatgaagaatacaagcaataatagcaaatcaatcaaatttacattgcaaagartccttcacaaaagtacctgagagggctctacctagataatcagatgctaacattacctttttcccaaatatagtccacctctgcaaagaaccaaggagtg

SEQ ID NO: 121645 - DNA, 201 bp, Homo sapiens
gtgtgcttttatccaccttaccaccttgcttccttgcccttcattcagctctctgaacctctgcttccctccatgtgctttactgcttcccatcctcccaratttctctgtaccctcccccggtagtggcctagattctcctaaactgctctgtcccccttctaggatctgagatcccacctctttggtttcattgttagt

SEQ ID NO: 121646 - DNA, 201 bp, Homo sapiens
acactgtaccactttacagaaagcatgttcagaattgttttacctatagtggttgacgctggacagaaagaaacatcagtaaccaacaatattgaaaagawccctatctatgactgatgtagttcaaggaagtatacttttccagagtttgtagtatttatccattgtatggtggcctctgagcttatttctgtgttgtca

SEQ ID NO: 121647 - DNA, 201 bp, Homo sapiens
caacaaggcttcgaggtagtttctaccattctcatttttcaagggagaaacttcacttacccaaggtcgtatggtttggacaaacagaaccaggctttgayaccatgaagtctggtaccagaacctcactctgcggcacactgtaccactttacagaaagcatgttcagaattgttttacctatagtggttgacgctggac

SEQ ID NO: 121648 - DNA, 201 bp, Homo sapiens
gttctcatttggttggtctttgtttatttccagagggcctagttgggcaagaaatgatattgtccaggagcacgttttaatttcatggtctctgtaggtakgtgattccatgtagctgttgttccttcaggtacattagcatttcctagctttggggtgggggctgtggctgacctgtgagagatgcagccttgctcccac

SEQ ID NO: 121649 - DNA, 201 bp, Homo sapiens
tcattaggggtcctgggaacttcagggtcaatctttcttgtggaattgagcacattgttttaaagctatttgtttatttgtccagttcaatttccttctakacagtgaagcacttgagggcagggactgtatttatctacctttgtatctttatcaccaacttggtgcctagcacagagacagttctcagtaaatctttgc

SEQ ID NO: 121650 - DNA, 201 bp, Homo sapiens
attattattttggtgcttacactagagattatagtatgcatcttgactcaggtcttagaccactttaatggcatttatcactctcttgacttctgtgtcaktgttatgtattttacttctatacctttcagatgcccaagacattattattattattgctttattcagtcataattcattttgattaatcatatatttatt

SEQ ID NO: 121651 - DNA, 201 bp, Homo sapiens
ctagagattatagtatgcatcttgactcaggtcttagaccactttaatggcatttatcactctcttgacttctgtgtcattgttatgtattttacttctayacctttcagatgcccaagacattattattattattgctttattcagtcataattcattttgattaatcatatatttattcttttctttgttcttcatttt

SEQ ID NO: 121652 - DNA, 201 bp, Homo sapiens
tttaatggcatttatcactctcttgacttctgtgtcattgttatgtattttacttctatacctttcagatgcccaagacattattattattattgctttaytcagtcataattcattttgattaatcatatatttattcttttctttgttcttcattttattttcttgtattatttatctttcatctgggagcactctctt

SEQ ID NO: 121653 - DNA, 201 bp, Homo sapiens
agtgtcttatcctgtattttccatccttttgtctttctatactttattctagttattttcttctggcttctaattcctgcttctgctgtgtctgttcttcmtttattaagttattaattttagttaatgtatttttaggcctaaaattttcattcgactctctctgtttctgagtttctcatttttatgagttccatagga

SEQ ID NO: 121654 - DNA, 201 bp, Homo sapiens
gtattctctcactgttcaggaggctggaggtcaaggtatcagcagccacactccctccaaaggctctagggaagaatccaccccttgcctcttttagtttmtagtggctgttggccttcctttgcttgtagctatctctctgtccctccatttcacatggccttctcctctctgtgtctgtcttaaaatttcttctgccaa

SEQ ID NO: 121655 - DNA, 201 bp, Homo sapiens
tttttttatgagagacaattcttcacatgatggagaaaatagaattgtcaggtaacatggaaagagtataagctttggagtcgtaccaaactgtgtgcagrtatttgctctgctatttatcatcactgtgacattaggcacttttcttaaactctctgggtctattttcttctctgtcaaatgacaacaagaatgcttgtc

SEQ ID NO: 121656 - DNA, 201 bp, Homo sapiens
acccatgctcctcaaatgctgaagcagtcatgtcacttggtggggtgaggtggatcatcagcaacaacatacttttcttttctttttgaattaagcacacrgaaaaatccataatctaaacatgagggacattaagttttggatggaagagagtgaattttgcaacaataacaactaaaaacccaggacacagaacaatta

SEQ ID NO: 121657 - DNA, 201 bp, Homo sapiens
atggagcatgtaaaacgtgtataatagtaacaaaagatatgaacagtgggagatgaggaaggtggaaatgttagctctacttattttggaccacaaaatgagggttgctagaatctcctctgaagtactggatttgaaaatcgatcagccaagaatttctggagtcactcaggcccgtgccatataattacattatttgct

SEQ ID NO: 121658 - DNA, 201 bp, Homo sapiens
agtaaagtgcacttcacccaccatgaggtcaagtcaagttacatgggcaagtccaacatcaatggagtgggaagtatactcctcctatgaaggtgagagtrgagagagtgactatttgccaaaaataatttcattcaccattctggtggaatatttatgggaattgcattaaatgttaacttgaaaacagacactattaga

SEQ ID NO: 121659 - DNA, 201 bp, Homo sapiens
ctatgctaggtgccctccagggattgtaatccctgttttatagatgatgaaactgggattcaaataggtttgggaattggtccttaactggcaggtccgtrggactgtaaagcctcaggaagagcaattgcctccatcacagaaagcataagaggttgtaggaagaatagattctgtgggcacaggcctgccttgtattcc

SEQ ID NO: 121660 - DNA, 201 bp, Homo sapiens
cacaagtaattgttaagtaatttgctaaaaaagactatgaatgtacatttcaagtagacttcctgtggtatctagtaggagcttaaaaaatgtttgctaawctgttattcatggatattttgtatttttcttatcttgagtgccagctcttaaaatgatatgtgtaactattttagcatgcaaaaatactattaattttat

SEQ ID NO: 121661 - DNA, 201 bp, Homo sapiens
ttgaacacttgccatagaatgtctcctttgatccttgatagataaagaagatataacccccattttgcagaagacactgaagctcagagaaattataggamttgctcaaggtcacatgaaattccaatctttctctgagctccagggtcagttatcacctgcctacttgataactccacttggatagctaatgggcacctc

SEQ ID NO: 121662 - DNA, 201 bp, Homo sapiens
taggagcttaaaaaatgtttgctaatctgttattcatggatattttgtatttttcttatcttgagtgccagctcttaaaatgatatgtgtaactattttarcatgcaaaaatactattaattttatatatgttttcctgcatttggttgctatactgaactcttctaattaagttctggaagttttgggtttttttttttt

SEQ ID NO: 121663 - DNA, 201 bp, Homo sapiens
aatctttctctgagctccagggtcagttatcacctgcctacttgataactccacttggatagctaatgggcacctcaaatccagcacgacctaaacagagstcccaactcctgctctttctctgaagagcactgatgctctctgtttcagtaaatggcatcccagggaacccaggtacattagtcctattgctgctgcaac

SEQ ID NO: 121664 - DNA, 201 bp, Homo sapiens
aggtacattagtcctattgctgctgcaacaaattaccaccgacataaaagctgtacaaatttatgatttcacacttctggaggccagaaatctaatgtggrtcagctgggctgcaatgcttctggagtcttcagaggaaactgttgtcttgccttttccagctcctagaggcttctgatattccttggcaagtggcttgca

SEQ ID NO: 121665 - DNA, 201 bp, Homo sapiens
aattgccaattgatggtacaaatggacaggtaaatccaagaagtgtatttcaatttttaaaaagttctgtaccctggaattcccttcttcagcttgccttscacctctgcattcaggagtgctatggccctgatcaatcaaaatgaacactggctgtaaacaaccagcatggtggtggtgctatgcctgaatgtcagcctt

SEQ ID NO: 121666 - DNA, 201 bp, Homo sapiens
agtttgaaatttcttaagtttaaatgagaatgttagcttattttgcaaatagctttgtctttttctgacccctcctcccaccatgtggaggtatggaggagagaaaggctcttgcagaaaagtataagcggtgcaagtggagagtgctgcagagatggagatggaggccaggtctgctggtgaagggtcttatagtccagg

SEQ ID NO: 121667 - DNA, 201 bp, Homo sapiens
aagttctggcttgccactaacctgcactgtggctttgggagtgtcagctccctgcatcactataaaatgagtaggttgtattaggtgatcaccagaggccstgctagacctgacagtccaaggataaagttgagtgctaaaggagcaggctgtgtagacagattgcaagtgtccaccagtggatggtcttggcacaacaag

SEQ ID NO: 121668 - DNA, 201 bp, Homo sapiens
ccaaaagtgatttgagttcctagtgtaaatcaaaaccagacgcaactgtaattgccaattgatggtacaaatggacaggtaaatccaagaagtgtatttcratttttaaaaagttctgtaccctggaattcccttcttcagcttgccttccacctctgcattcaggagtgctatggccctgatcaatcaaaatgaacactg

SEQ ID NO: 121669 - DNA, 201 bp, Homo sapiens
gagtttgaaatttcttaagtttaaatgagaatgttagcttattttgcaaatagctttgtctttttctgacccctcctcccaccatgtggaggtatggaggagagaaaggctcttgcagaaaagtataagcggtgcaagtggagagtgctgcagagatggagatggaggccaggtctgctggtgaagggtcttatagtccag

SEQ ID NO: 121670 - DNA, 201 bp, Homo sapiens
ccacacctttaaacaaccagatctcacgagagaactcactcactatcacaagaacagaaccaaggggatggtactaaactattcagggaggatccatcccrcctacacacacccatttccaatcacctcctcacctccaacattggggattacaattcgacatgagatttaggtggggacactgattgaaactttatcaac

SEQ ID NO: 121671 - DNA, 201 bp, Homo sapiens
ctagaaacaccatttgacccagccatcccattactgggtatatacccaaaggattataaaacatgcttctataaagacacgtgcacatgtatgtttattgmggcactattcacaatagcaaagacttggacccaagtcaaatgtccaacaatgatagactggattaagaaactgtggcacatatacaccatggaatactat

SEQ ID NO: 121672 - DNA, 201 bp, Homo sapiens
ggtgccacacctttaaacaaccagatctcacgagagaactcactcactatcacaagaacagaaccaaggggatggtactaaactattcagggaggatccaycccgcctacacacacccatttccaatcacctcctcacctccaacattggggattacaattcgacatgagatttaggtggggacactgattgaaactttat

SEQ ID NO: 121673 - DNA, 201 bp, Homo sapiens
tgtgattgatatttgccctgtcatttagtgccaatccagggaggggatgccccttttgtggggcctgtttgctctccaagggagccttcatggcttccttyggtctagttggagtaacctgttttttcttctagaggattgaattcaattaacagggattacaaattcagttattaggaatttatcagtgatggcaaatgg

SEQ ID NO: 121674 - DNA, 201 bp, Homo sapiens
gtagggtggataaagaaatgtggtacatatacaccatggaatactatgcagccataaaaaagaacaagatcatgtcctttgcagcaacatggatggatctrtaagccattatcctaagaaagcgaactaatgaagaaacaaaaacccgaatactgtatgttctctcttataagtgggagctaaacagtgagaacacataaa

SEQ ID NO: 121675 - DNA, 201 bp, Homo sapiens
gtctagagcctgctggcccagaggcaagaggggtgccagatgtgcgagctagcaaaccgcggaagctactgtgagattagagtggcacagaaatagtcggraaattaccctttccactgggcttggaatccagggtaactgaggcagcaaacaaacttctgtgtgtgtgaggtgtcccagtgtaccagtgtcctccattcg

SEQ ID NO: 121676 - DNA, 201 bp, Homo sapiens
gtggctctcaccagctctagcctctttctgggcttcatagctccccttccccagtgctccctgagaatgtatcattcagaccatcttctgtccttcattcrtagtcatagtcccatgcctcagtgattcaacaatcaggctctcttaccctatttttgcttacccttcttttttctttcatttcagatgttcagtaactga

SEQ ID NO: 121677 - DNA, 201 bp, Homo sapiens
cccagaggcaagaggggtgccagatgtgcgagctagcaaaccgcggaagctactgtgagattagagtggcacagaaatagtcggaaaattaccctttccaytgggcttggaatccagggtaactgaggcagcaaacaaacttctgtgtgtgtgaggtgtcccagtgtaccagtgtcctccattcgggggtgtcttcttctt

SEQ ID NO: 121678 - DNA, 201 bp, Homo sapiens
atagttcttgtgttaaataagttaggattggagagttgcatttctagacccgaggggagcggttctggatcttgctctggtttcctgagttgctgcagcayccaaccctgagcaattcctgtgactcgtggtggttgttatagagagggtacacagtggtgaatgagaaggaggcttattattgttatctgtaggcaccac

SEQ ID NO: 121679 - DNA, 201 bp, Homo sapiens
gcctggggagaatcttaaaggcttgtgagacaacttgagggttgtgacacttcctaggtacttttgtagcctacactggtcctgtgtgattgggatctacrtctagcactgggtctgtggcgatactaacttccctgtctttcctggcccagactgacatttccaaagggctgcgtgaggtggtacatactcaggcaaggc

SEQ ID NO: 121680 - DNA, 201 bp, Homo sapiens
ctgccaccccagcctcctgagtggctgggactacaggcatgtaccaccatgcccagctaaattttaattttctaatttttttttttttttttttttttggkatagagggtcttgctaagttgccagagtgatctcaaactcctggcttaaagtaatcctcccacccaggcttccaaagtgctgggattataggcatgatcc

SEQ ID NO: 121681 - DNA, 201 bp, Homo sapiens
tggtctggcaccaccagtctctcactgtcttcttgaaatcacctctaaagaagagtttgatctggaaggtcaagcctagcagtgaactgaagctgttctcyctgagtgcatttattcatttattcacaaagcagttactggtctatgtgcctcaagattcctaaatctcattgagccaccaacccttttattgaaagctac

SEQ ID NO: 121682 - DNA, 201 bp, Homo sapiens
atttgcctgaagcttgaccacctctcctttagctcccttccgcattctggaaaatgcttctccatttctctagctccatggttaccatggaggcagccacrttgttttaagctactctgtgtcccaaccacagatgattgatccagggattttatttgattccttgggggtgttggaattggattataaagtgaagagctg

SEQ ID NO: 121683 - DNA, 201 bp, Homo sapiens
gccaaaacaggtaaaattaagcgatagtgatacaagttggaatagtgttctgttttccttgtgtacttgttatacttcattaacacatgtttaaaaaaaamccaaaaatatcgcaagataaaaaatgcagaagcattttctgggtaaagaaagatgggcaaacattacaaacagaaggaaatttggggggttcaaattctg

SEQ ID NO: 121684 - DNA, 201 bp, Homo sapiens
agagtttgaaatttcttaagtttaaatgagaatgttagcttattttgcaaatagctttgtctttttctgacccctcctcccaccatgtggaggtatggaggagagaaaggctcttgcagaaaagtataagcggtgcaagtggagagtgctgcagagatggagatggaggccaggtctgctggtgaagggtcttatagtcca

SEQ ID NO: 121685 - DNA, 201 bp, Homo sapiens
taagtcacacgtcattgtgcttagtgaatgtggcaatctgagacaaatacgccctttgatgaatagagagtagaatgactaataagagatcagaagccagvaaagagtaaatccaataacaacaacaagaatgtagagtttgaaatttcttaagtttaaatgagaatgttagcttattttgcaaatagctttgtctttttc

SEQ ID NO: 121686 - DNA, 201 bp, Homo sapiens
taaatggcattgaaataaattactgccttcattatgacacacaatagatgaatgtattctacttcagagtcacagcttctttagccaaaataccttggttkttttccatcctgaagttctataattgcttacttgatattccattgtgagatctcagaataaagtaaaggtaggctgtggtatatatgtgtcttttactct

SEQ ID NO: 121687 - DNA, 201 bp, Homo sapiens
agtagatgctcaattaatggtactgcaattttatcatgtctattatacagatatataatttgtactgtatctgtttgttttttacctacatatctaaattktcttctctatctatctgtctattcctcaagaatcaagagactaacttcccgaagagacagaagaacagctaggagaagtatcagagaagtaaagtttcta

SEQ ID NO: 121688 - DNA, 201 bp, Homo sapiens
taagtaatctagagatgatttaaagtatacaggaatatgtgtgtaggttatatgcaaatactatgccattttataacagggacttgagcatctgcagattkttgtagttttgggaggtcctggtaccaatcctccacagatatggagggaccactgttctcttatacccagttctccttcatggttcagaatttagctcag

SEQ ID NO: 121689 - DNA, 201 bp, Homo sapiens
aattgagcattggccctttgagatcactgggagcaaaccaaccaatgaggaccacccatgggaacagatggagttcagaactggactttaaatcggggctyactctacagagggtattgtggctggacagaggatgctcattgcatgaaaaggaatctgtttgtctgggtcagtggggaagagttctggtgtgtcagactg

SEQ ID NO: 121690 - DNA, 201 bp, Homo sapiens
tatttttatatatcaacatttatctgctttttctttccatgcctcccctctttccgtcctttcttttcctcctggatacatccattcctgcagcttaattyttattagctaagggttatattgcagatgtatgaattaagagcaaaggctttagaatctggcagatctatgtttgaatcccagctctgccacttcacaaaa

SEQ ID NO: 121691 - DNA, 201 bp, Homo sapiens
tatgggatcagcattgtatatgcattctgttgttgaccaaaatgtagtgcatgaatatatatatatatatatatatatgtatgttactgaatatgttatawatttgttattgaaacctacttttattattatatatatacatatacataaatacatagccccacttcttcagtcatgtgaagttacgcctactgatacgtg

SEQ ID NO: 121692 - DNA, 201 bp, Homo sapiens
atgtatgtattcacatgtttatttttatatatcaacatttatctgctttttctttccatgcctcccctctttccgtcctttcttttcctcctggatacatycattcctgcagcttaattcttattagctaagggttatattgcagatgtatgaattaagagcaaaggctttagaatctggcagatctatgtttgaatccca

SEQ ID NO: 121693 - DNA, 201 bp, Homo sapiens
gtaaaattatggtattatagtcttatgggatcagcattgtatatgcattctgttgttgaccaaaatgtagtgcatgaatatatatatatatatatatatatgtatgttactgaatatgttatatatttgttattgaaacctacttttattattatatatatacatatacataaatacatagccccacttcttcagtcatgt

SEQ ID NO: 121694 - DNA, 201 bp, Homo sapiens
tatatctataatgtatgtattcacatgtttatttttatatatcaacatttatctgctttttctttccatgcctcccctctttccgtcctttcttttcctcstggatacatccattcctgcagcttaattcttattagctaagggttatattgcagatgtatgaattaagagcaaaggctttagaatctggcagatctatgt

SEQ ID NO: 121695 - DNA, 201 bp, Homo sapiens
gatatttcatgcccctcccctgccccgggtgatcctaatttgagaaccactggtttaagctgagggaggtcttgacgatttctgttcgctccacttttacrtagtctattaagttacttgcatggaaaaatgcatgctgcatgtagttccgaatgccccacccaaatcttggagcgtatcaggaagagtgtggggacagtg

SEQ ID NO: 121696 - DNA, 201 bp, Homo sapiens
ttgacagaggacatgtagtttaacctcattgtgcaacagacttgtggattaaaaaataatgtcattcactgtgtgatgtggctgccagaatttagattttrgcaataggaataaggtatgcagagtagcacatcagaacgcctaggaagttaaaaatgccaatggctgggttattgccagagattaattaattgatgtggg

SEQ ID NO: 121697 - DNA, 201 bp, Homo sapiens
tctccctctctctacacccaatgtactttattttttggcccatttttgctcctatatgccctttcatcatcctcagaacctgtacccttggcattttgtckgtagacatttatatttcctggcattgaggctatagatctctaatacttgaattgattttcaaaattagggaaaagagctgcgattttagctatatatttg

SEQ ID NO: 121698 - DNA, 201 bp, Homo sapiens
tttcatcaagttaaattagaaaagtccttatgctgtcattgaagaaatggttactgggtcgtagggcagttgggtgagttgccaatgagttaaccagtcaygagaagtagctgacgaagagagcatgagacttgaaattagatagggacctaccttcaattcttggctttcacttaacctgtgtaatcccaggcagccatt

SEQ ID NO: 121699 - DNA, 201 bp, Homo sapiens
tacctctataaatgaaaattgcttgaattttcagagcctctttacccttatctgtagaatgtccaccttaggaattgaaagaattatttatgtaaaaataytttatggctggatgtggtggttcacacctataatccaagcactttgggaggctgaggcaggcagatcacttgaggtcaggagtttgagaccagcctggcc

SEQ ID NO: 121700 - DNA, 201 bp, Homo sapiens
tgacctagagctagctttggtattttcatcttttcatgatgcaatacaattgccaaatttcttacttctcatatactcaaagcaacctcttgaaaaaaaawtttttttttgagatggagtctcacctcttgaaatgtttttaagattgttacagtataaattctggaaaaggttctagaacaaattacaaaagattgattt

SEQ ID NO: 121701 - DNA, 201 bp, Homo sapiens
ataagcagcattctcaaagggctcggcaggctggggcccccagcctgtgcttgtagacatcatgttgatttttaatcaaaagccttattttggcagcttcygtttttttgattgtttgaaaaatacttcctgatggcttggagtttagattctcagttgttggatcctgaagaggagtttgaagccttagtttttcaggaa

SEQ ID NO: 121702 - DNA, 201 bp, Homo sapiens
tggctggatgtggtggttcacacctataatccaagcactttgggaggctgaggcaggcagatcacttgaggtcaggagtttgagaccagcctggccaacayggcaaagcccgactctaccaaaaatacagaagttattctgcacctgtagtcccagctactccagaggctgaggcaggagaattgcttgaacccacgaggt

SEQ ID NO: 121703 - DNA, 201 bp, Homo sapiens
catgtaccctaaaacttaaagtataataaagaataaaaataaaataaaataaagtccccatctccaacatagtcatactgggaattaatgctgcaacataygaattttggggggcataattcagttcataacaattttcacttgccagactttcttatttaagcatatccagtagatattagaacaaaaacaacgtttaat

SEQ ID NO: 121704 - DNA, 201 bp, Homo sapiens
acctcacattcatgggtacatttggcatgaaaggaagtatacaatcatgttcatgcaaatcaaaaataaccctgtgctcattaacagtggaatgaaaaaaktatatgtcaaaatgatacatcatatattcatataatgaaatagtgaatgagctagtggtatgcacagcatgcatgaatcttgcagatacaatggtaagca

SEQ ID NO: 121705 - DNA, 201 bp, Homo sapiens
ggtcctcttttctttttcttggtttttataacaacagtcattgagctatacctgctgttctgttttaaatacctgtttcaagaggttgcaaattccaaaamcttgcaaatttcaagaggttccaaattccaaaggaggtggtacatgaagagaaaagggacagagatcatataatgtcaaaatgtaagtgcctgcatccca

SEQ ID NO: 121706 - DNA, 201 bp, Homo sapiens
aattttatttatttatttactttttgtagagatagggtcttgctatgttggccaggctggtctctaagtcctgggctcaagtgatcctcctgcttcaaccycccaaagtgctgggattataggcgtgagccacggtgcctggcttctgcctttttgtgataacagatggtaacaggaatgacaccacacttatttgtacca

SEQ ID NO: 121707 - DNA, 201 bp, Homo sapiens
ccatatgaaattgacaatttgtgggtcaaaaatacttgaacattggcaatttcatatttttcaaccttctaattttattagttacaaatatgtacatatgtaccatcatcattaattaatataacaagcacaataactctttgggtaaggatcaataatatattgggtgtaaatctgcatttccagtagtctcttgggtaa

SEQ ID NO: 121708 - DNA, 201 bp, Homo sapiens
agtaaaattatggtattatagtcttatgggatcagcattgtatatgcattctgttgttgaccaaaatgtagtgcatgaatatatatatatatatatatatatgtatgttactgaatatgttatatatttgttattgaaacctacttttattattatatatatacatatacataaatacatagccccacttcttcagtcatg

SEQ ID NO: 121709 - DNA, 201 bp, Homo sapiens
gattatgttattgtgggaacatcaaaaagtgtacttacacaaccctaggtagtagagcctactacatcatacctaggctatatgttatagcctatgacccytaggctacaaacctgtacaacatgctactgtactggatactataggcaattgtgacacaatggtaagtatttgtgtatctaaacatatttgaacctagaa

SEQ ID NO: 121710 - DNA, 201 bp, Homo sapiens
gtgtctatggctagacattaggactattacagagtttgcagatgtcactatgtctaatgcagttctaatgcagatctgtttggggttttgtttaatatatrgttatggagaagtctagaaaggaatgacaatgaagtagtagttactgtaaatcttgtggtcacgtaatgaaaatttaggagacttttctgtacaccactt

SEQ ID NO: 121711 - DNA, 201 bp, Homo sapiens
ctctgcccttgcaaaaaggcagagggtccactgagccagttgacacttaagccatgcgtggatggcaaggctaaaagaacacactgtaacatacacccaastgggctccgggagtcacaggctcccatccctggacgctgctgtggggccagagcccagcatcccaacccctgcacctgtccgtctgcatgctcccactcc

SEQ ID NO: 121712 - DNA, 201 bp, Homo sapiens
tcaaatctgatttctttccatctatattacatgtagggtagtacgatgtagtggttaaggacacaactctagagagagactgaggttaaatcccagttcaracatttgggcaagtcacttaaactctctgcatctcagtttcttcactgtaatgtagaggtaatagcaatatctatgtcagagtgctgttttgagaattaa

SEQ ID NO: 121713 - DNA, 201 bp, Homo sapiens
aaatcagtagataggaactaatttgtccaaggtggagatgagaatctcatctctcctgtctctaaatcatcttttcttttgactatattgtctcttgacartaatttaaaagtatctcaatatccacagcaataattattttttgcctgaaaattacaggagcagattatttcattcatttaatgtattgattcaccaaca

SEQ ID NO: 121714 - DNA, 201 bp, Homo sapiens
accagagaacatgaaatcttattttatccatattttggttttatccatttgctttgaaccccctgagtcagctgccctgatggatagttttttttttttttggtgtgggcttggccatgatggggaacttggttgaaagatgagtgaagttaaggcagttcaaggatgtcatactttttagaagtaccagacaatcagaaa

SEQ ID NO: 121715 - DNA, 201 bp, Homo sapiens
ttgacccagcaatcccattactgggtatatacccagagaaatataaatcattctactacaaagatacatgcacatgtatgtttcctacagcactatttacratagcaaagacatggaaccaacccaaatgcccgtcaatgatagaatggataaagaaaatgtggtacatatacaccatggaatactatgcagccataaaaa

SEQ ID NO: 121716 - DNA, 201 bp, Homo sapiens
cacaatgagataccatctcatgccagtcagaatggctattattaaaaagccaggaaacaatagatgctggtgaggctgtggagaaataggaagacttttayactgttggtgggaatgtaaattagttcaaccattgtggaagacagtgtggtgattcctcaatgatctagaaccagaaataccatttgacccagcaatccc

SEQ ID NO: 121717 - DNA, 201 bp, Homo sapiens
accaaatccagcagcacataaaaaaaaaacttatccaccacgatcaagttggctttatcgctgggatgcaaggctggttgaacatacgtaaatcaataaaygtaatccatcacataaacagaaccaaagacaaaaaccacatgattatctcaacagatgcagaaaagacctttgataaaattcaacattcttcatgttaaa

SEQ ID NO: 121718 - DNA, 201 bp, Homo sapiens
ctagtatgctgaagttatagtacatttctatttagcaggtgtttcctgtggttgccttttgttctaaatctatgattgaaccttatctatattgaaccaartctaatatctatttgcctggacacctgtactaacataatatgattctttttgtatccacccttatattaatctggtaggatttccataacaaaatactgc

SEQ ID NO: 121719 - DNA, 201 bp, Homo sapiens
ctattgatgtaattattgcttttagggttctgtattaaatttaaaaaacaacttcttttaattttgtgcttaatacagaaatcctaaaaaatcatagaaamacacaaaggaaaaaaatccagcattaaccactaactaagtggataactaagatcagagaagaaactaaaacaagtaactaataactaagatcagggaaga

SEQ ID NO: 121720 - DNA, 201 bp, Homo sapiens
cagccagcactgttatatcctcccaatttggttcttacattacttcactcttcagaacatcattcatttatttaaatggtatttcttgagctcttttcatrttatggcttggttctagctacagagaaggatataacaaaatgtgagacatggtctttggacccaagaagcttctatttcaagaaatggaaaaataaggcc

SEQ ID NO: 121721 - DNA, 201 bp, Homo sapiens
ccttgtacactcaatagtccacagcctccccctttaccttcctgatggtgggcaggtcactacatctccccatctacctccctgcttgcttagggttcccygacacacaggtcagccctgattcatcattccctacagaagactgaccttggggccaaaaggctggtggatatgatagaggggatgaggagaggaaatgga

SEQ ID NO: 121722 - DNA, 201 bp, Homo sapiens
atgtgcttaggaaaatgccatgcacatagtgagccctcagtaaatgtcagcaattctataacttcccttccactgctgttattcccaacgtcatttgcttyctgaactgtgggacccttgaggtcaggccagatcttttatctttatattccctgtctcctagcacaaggtttggtgcagtatcaacacccttcaacatgt

SEQ ID NO: 121723 - DNA, 201 bp, Homo sapiens
gatgttgagttcaattttttgtcagtgaaaaatctgcccagagtcttaaaaaatgcaagcaagtcatctgtatatagcctcagagcattgtattttcaatktactgatttgctaggtatatattgaagtggcctttggaccctgagtgttaaatatggagatctgaatgttcttcagttcattttaattgtgacgaaatca

SEQ ID NO: 121724 - DNA, 201 bp, Homo sapiens
ggatgttgagttcaattttttgtcagtgaaaaatctgcccagagtcttaaaaaatgcaagcaagtcatctgtatatagcctcagagcattgtattttcaawgtactgatttgctaggtatatattgaagtggcctttggaccctgagtgttaaatatggagatctgaatgttcttcagttcattttaattgtgacgaaatc

SEQ ID NO: 121725 - DNA, 201 bp, Homo sapiens
tatgtgtgtgaagccctaagctttgtttaaataaagctaagggtcaaagaagagtgaagagcaccccacctccaccccaagttctctcccccagcctcttycagtcatggctcttgggaaaccctgcagtaggaacagatgaatgtgtgtataagtagttggaaagggaagtagagatgatacttagacaacataaatgag

SEQ ID NO: 121726 - DNA, 201 bp, Homo sapiens
aaagcattgatgcttccaagccaattctttaaagaggtgtgggtggagagtgtgtgtgcatgcatgtgtgtgtgtgtgtgtgtgtgtgtgtgtgtgtgtaygtacatacacacatatacaattagctccaaggctttaaataaattcaacacaagtatttattcagacctttgttgtgtaaggcctccaccaggtcctggg

SEQ ID NO: 121727 - DNA, 201 bp, Homo sapiens
gtgaaggccagggtttcatggacctctgatttctctccaaatgagtgatgaattaaatgtaaataagtcagaaacataccttaggttttgctttttttttwaattgttataaaaaattaatgtaaaatttagcatcttaaccattcttaagtgtacagttcagtagtatgaagcatatttgcattgttataaaatagatct

SEQ ID NO: 121728 - DNA, 201 bp, Homo sapiens
tccgggattcttctgtgccatctctaaactcctctgaatatggcccacaggtctctgcttcatctggacctccctgccactccaacctcatctcataccaygttgctcttatcttcctttggttcatccttcaaacatagaggacaaactgcgtcttctgtctgggatgctcttctcttctgtttccacctatttagatct

SEQ ID NO: 121729 - DNA, 201 bp, Homo sapiens
tggggagtgaaaaatcttacagagaagccaaagactattttatacaaatccacttttaaaaggggaattcttttccacatacaaagaaccagaaatactcrttttgtcctccttttttttttgtttaatgtatatgcactcacagttgctaagaattaatactgaaaacatgattttttctaaataactccttgagaaggc

SEQ ID NO: 121730 - DNA, 201 bp, Homo sapiens
caccctcttggcatttctctagtgaagctattgatgtaattattgcttttagggttctgtattaaatttaaaaaacaacttcttttaattttgtgcttaayacagaaatcctaaaaaatcatagaaaaacacaaaggaaaaaaatccagcattaaccactaactaagtggataactaagatcagagaagaaactaaaacaa

SEQ ID NO: 121731 - DNA, 201 bp, Homo sapiens
ctacctcccacaccctcttggcatttctctagtgaagctattgatgtaattattgcttttagggttctgtattaaatttaaaaaacaacttcttttaattktgtgcttaatacagaaatcctaaaaaatcatagaaaaacacaaaggaaaaaaatccagcattaaccactaactaagtggataactaagatcagagaagaa

SEQ ID NO: 121732 - DNA, 201 bp, Homo sapiens
agaggctacaactcagtcttgcaaactgctcttacttgcaactgacagctacctcccacaccctcttggcatttctctagtgaagctattgatgtaattaktgcttttagggttctgtattaaatttaaaaaacaacttcttttaattttgtgcttaatacagaaatcctaaaaaatcatagaaaaacacaaaggaaaaaa

SEQ ID NO: 121733 - DNA, 201 bp, Homo sapiens
ttaattagctcattagcatattaaagatactgagaagtccagtagtgaagaattccattaactttgttaaacccttcatttccaaatattacctgtccccyctccttcatatagcattaattagcaccccccttgacttgggttcaatctaacacacttgagaagtgttatattaatagctttccttgtattaaatcatcc

SEQ ID NO: 121734 - DNA, 201 bp, Homo sapiens
gaggatcggatcattccttatatttgttttaaatccctcgaatacctagaactatacaagcaatcaggaagatgggctttctggacagcgagaagggaagwtattttggaaactgactctgttttctctctgtgggtgaggatgagcttacattgatgacaagtttggcttatgaactaggaccttaagtagagctgcata

SEQ ID NO: 121735 - DNA, 201 bp, Homo sapiens
tgtacattggtaagaatgcattttcaaagactatttattttgtttgtttttaactgaacagttattcattgagaggggtgtgtgtgtgtgtgtgtgtgtgytgaagatagtattatcccaaataatcatattatatagaggctacaactcagtcttgcaaactgctcttacttgcaactgacagctacctcccacaccctc

SEQ ID NO: 121736 - DNA, 201 bp, Homo sapiens
ggaagtattagaaagttttccagggaaaaatatcaacctggaaccattcccctttgcatgcattatacacttcactgccatctggttatccataatatccmcaaacccctaccaattttccaaaaagaactacaaataacgctttgtatttttagaacagtcttcctaacacccagagaggaaatctattgtgaagttaat

SEQ ID NO: 121737 - DNA, 201 bp, Homo sapiens
atgatttccagattggttgcattttccccatctctttcagggacatgaatatgtcatagatttggtctctttacataatcccatatttctcagacattttsttcattcattttcattatttttctctattcttgtctaactgtcttatttcggaaagccagtcgtcaagctctgagattattttcttcacttggtctattc

SEQ ID NO: 121738 - DNA, 201 bp, Homo sapiens
gggtggctttccttttgtggagtatgagtagcagtgttgaattttacctcaagttactatgggatagatagggaggctgctcttggataagtaataaatgygttgcagaagttaagaaacagattccagaagtagagaaatctatgcagaagcatatagctagaaagtagcagagtggtaattgaacacaaatctgatgac

SEQ ID NO: 121739 - DNA, 201 bp, Homo sapiens
tgcaactcttgcttttttctgcttggtagatttttctccatccctttattttgagcctatgtgtgtcattgcataagagatggtctcttgaggacagcatrtcaatgagtcttggttttctaatccagcttgccactcagtgtcttttacctggggcacttagcccatttacctttaaggttaatattgatatgtgaggat

SEQ ID NO: 121740 - DNA, 201 bp, Homo sapiens
tgcagaaatatatcttccacctaaaattctgtagtgtaccctgggcagtgttgggagggtgtacacttgggacccagattcgacaacttaaccattttctrtgtgtataatcttgggcaagtcattctttttaagcctcagttaccttgaataaaaaatgaggatagtaccatagttcatttactgtaagactcattttct

SEQ ID NO: 121741 - DNA, 201 bp, Homo sapiens
gaggatggaggtgaaggtggtggatttctttagttatggggagttaagttgggaatgttaggcctctagtcctttccttttctcttttcttttctttttttgagacagagtcttgctctgtcagccaggctggagtgcagtggcacgatcttggctcaccacaatctctgcctcccaggttcaagagattctcatgcctca

SEQ ID NO: 121742 - DNA, 201 bp, Homo sapiens
ggagatgggaaagtactttcctggggacagaggatggaggtgaaggtggtggatttctttagttatggggagttaagttgggaatgttaggcctctagtcmtttccttttctcttttcttttctttttttgagacagagtcttgctctgtcagccaggctggagtgcagtggcacgatcttggctcaccacaatctctgcc

SEQ ID NO: 121743 - DNA, 201 bp, Homo sapiens
tattggagggtggtattagaatagggtctgggctccaggtgtgctggtgcttctggttgctgctgctttataagctctcagctgacagcaagaaaacatgwgcatgtgaaccaatctatagatgcctatctactgatctacaaatatatctgtatgtaaccattggtatctgtattatgctaaacatgtgttcacactgac

SEQ ID NO: 121744 - DNA, 201 bp, Homo sapiens
ttaaaaagttaaattaaactattttttattgtcatatgaacaaaagtatcttcatgttaaattaaatacaattagctgatatttgtatgcatctgcttttyatgagctgtcactagaagatgactttttactgcctttttttttctctgttttttttttttttttttttttttgagacagggtttcactctgtcacccagg

SEQ ID NO: 121745 - DNA, 201 bp, Homo sapiens
tgggactcattttacccttaacctctctccagcatggtatttcatcttactgcattcttcttgctttatagtgggctttttccagttctctgcctaacttratgaagaagattatctcaaagttcccaagattgttacttctcatttcaagctaccaggagagactcagcaataaatttttatattggggattcagtttcc

SEQ ID NO: 121746 - DNA, 201 bp, Homo sapiens
ttcagcataacttcaaaataataataaatttgatgtgttcatggttgcattggtaattagtttcagctgataaatatctgtggctcatagagaatagcaaycaacaacagacctatccccttatgcttcaatcttttctttttttatttttttttttaatgttttatttccataggttattggggaacaggtggtatttgg

SEQ ID NO: 121747 - DNA, 201 bp, Homo sapiens
gaagccttgttgatttgggggttaacacaagtagtgaagcagtttcctccaggtttcttctaccaaggaatgccagagagcagtgtcttgctttgtgtgaktagtgttttgattcattacttttatgggttgatatgtcttgtgagaatatgagatgtggattccagagcttaaaatctgcacgtttagtttgaatgctaa

SEQ ID NO: 121748 - DNA, 201 bp, Homo sapiens
ttttggtaccatttactaagaatatgtatgacttaatttttcataatagccagcaatttaaggcagcaaagtatttgctttcttccactgatctagtaccrcctatcattgtatcatactgacctttaatccagctcttacacacaaagtcagttatctgtatacttatcgttttaatgggttttgatagatttccccatg

SEQ ID NO: 121749 - DNA, 201 bp, Homo sapiens
ggggccttgtttcaggggcttgtgttttggtaagaagatgttttgtttctgaggacagctggttaaaatgcactgccttaactggaatattcacaggtatrttcttctcggcactgtgaatcatttttcaaagcttttcatggcttctgctctttgatcaggataaatcatgccacagtgagactggaatctactttcata

SEQ ID NO: 121750 - DNA, 201 bp, Homo sapiens
tttccctctgtctcactggttattttcaaactttttggtttccttttttttttttttttttttttacctccggccaatctctaattgctggagtgctaaaragcttgagctctttttcttctctatctgcattttattcctgaatgacctaatctaattacattgctttaactccttctgtataactttatacctccagcc

SEQ ID NO: 121751 - DNA, 201 bp, Homo sapiens
taagtagataacgagtttaactgcagtatcaaatttcatgtgggagggggtataagtaggataaaattgtcttaaccaggctccttagagggacaataatraaaaaagaaaaggttgagaaaaatgttataatgctgtttgaataccaccattgattagttcattttatttttctccttaatagtcatttggtgttttcta

SEQ ID NO: 121752 - DNA, 201 bp, Homo sapiens
agctcaatacatttaacgtttatgtaaaaactgtttccattataaatggaacacatcgagaacccccaggtgtatatggaggaagcctacttggtggtaartggagattagatgactttgctcgtgatttgtaacttagtttataacacagatgagcactactaggtgcatcctttatcatcatacatttttaattgtttt

SEQ ID NO: 121753 - DNA, 201 bp, Homo sapiens
gctccacgtgtcacatcctcaaatacatcctaaattaaacactaccaacattagctaacttctactgatcactccccccacttctttttttttttttttttgagactagtctcactctgtctcccaggctggagtacaatggtgccatcttggcccactacgacctctgcctcctgggttcaagtgattctcctgcctcag

SEQ ID NO: 121754 - DNA, 201 bp, Homo sapiens
tatctaggaagaccagtgtttgatgaaatgtactttccgacctcctccttgacatctctcctacatgcttctctccatctcatgctatgtctaatgactcygtgtactgctccacgtgtcacatcctcaaatacatcctaaattaaacactaccaacattagctaacttctactgatcactccccccacttcttttttttt

SEQ ID NO: 121755 - DNA, 201 bp, Homo sapiens
tggagtcaggagacctcttggatttgtgtcttcactctgttatgagttgagtggcctcaggcatcttctgagtttctcattcctttactgaaaataataatgcttatcttaaagtagcttgttcagaacttgccttgtctcaagaatcagccagacatttataaacaaatctgaatcctgaacgtcaacccaggcttgtct

SEQ ID NO: 121756 - DNA, 201 bp, Homo sapiens
ttggagtcaggagacctcttggatttgtgtcttcactctgttatgagttgagtggcctcaggcatcttctgagtttctcattcctttactgaaaataataatgcttatcttaaagtagcttgttcagaacttgccttgtctcaagaatcagccagacatttataaacaaatctgaatcctgaacgtcaacccaggcttgtc

SEQ ID NO: 121757 - DNA, 201 bp, Homo sapiens
acatcgcctgccatcctaaagagatttcttagttgctccccctcctcattgggtctgtggtgtatttgtgaacaacagctgcatttgcaagtagccaggayttcctccagatgacatattgcgctgccagagtggagacaagcggggctgacttcacaggccaaagagggcatctgcatttgccactcagccccaattatt

SEQ ID NO: 121758 - DNA, 201 bp, Homo sapiens
atttttttcagctaatttctccagttcatttgtttattgatatagtattacattattatttagttaagcaaatggtctacaccacatgacttcaagcctcmatgtcttcttttttgttgttgatttgtatactaaatttcagaaatggctttttatggggaaggttggagacaaataatgactatatacacatatatttca

SEQ ID NO: 121759 - DNA, 201 bp, Homo sapiens
attggagtcaggagacctcttggatttgtgtcttcactctgttatgagttgagtggcctcaggcatcttctgagtttctcattcctttactgaaaataataatgcttatcttaaagtagcttgttcagaacttgccttgtctcaagaatcagccagacatttataaacaaatctgaatcctgaacgtcaacccaggcttgt

SEQ ID NO: 121760 - DNA, 201 bp, Homo sapiens
gggatagatagggaggctgctcttggataagtaataaatgcgttgcagaagttaagaaacagattccagaagtagagaaatctatgcagaagcatatagcyagaaagtagcagagtggtaattgaacacaaatctgatgacagagccaatgcttccttttattctagcatgctgctagaaactggttcttttataatagtc

SEQ ID NO: 121761 - DNA, 201 bp, Homo sapiens
tataaatagcttggagcatcatgtagcatgtggaaatgctcagtaaatgaaccaggtctctcaaactctagggcccatgtttttccccttcaccactaagaaacctcatgagcagcatgggctcaggagtagcaggaggcttctggcacagaatgagaagatgggaaagcgtgctgcttggccacaatggaaggaggagaa

SEQ ID NO: 121762 - DNA, 201 bp, Homo sapiens
tcagtggtccttctcttgtatcgtcaatcattccatctttaccaacctcctcctctcaaactataagcccttaaagtatccttcagcccagaaagcaaaamaaaatgaaaaaaaaaatctgtattgagtgaatggcaatgactgttccatttaccactagctttatatgctggcaggaatcccacatgaaaattaagaaaa

SEQ ID NO: 121763 - DNA, 201 bp, Homo sapiens
gtataaatagcttggagcatcatgtagcatgtggaaatgctcagtaaatgaaccaggtctctcaaactctagggcccatgtttttccccttcaccactaagaaacctcatgagcagcatgggctcaggagtagcaggaggcttctggcacagaatgagaagatgggaaagcgtgctgcttggccacaatggaaggaggaga

SEQ ID NO: 121764 - DNA, 201 bp, Homo sapiens
cagatgtgctggtatagagttagtatacttttgcagaggaaaaaaatagccaaaacaaatacagtgctgttaccataaaagaaaatcaatattttagaccytaaataaaaggaagtgtttgacatttgtggctttctttaacaaggacatagggacccagacagggttggctgaatatttgtggtgctctcagtttataga

SEQ ID NO: 121765 - DNA, 201 bp, Homo sapiens
cagtgtcgcaccaagcagatggggtcactgtcccccaggataaggcatttctcatgtgcttgagaagaagactgtggatctgaaaatatgataggggctgyggcttattgaggcctcactattgagagggggcttggagttatggggaacagtgggctctagtgcaggactgctggggtcttaagcccactggaccacttc

SEQ ID NO: 121766 - DNA, 201 bp, Homo sapiens
gtcaaagcctcattaggtgattgcaaaagtactctcccaggacccactttggacttcttaccaagtcgtgtgtgtgtgtgtgtgtgtgtgtgtgtgtgtcygtctgtgtgtgcatgtatttgaaatggaagtgtgggaacatgacagtgtagacaagcttacagcccccatttttcttcgagtggccccctctgataaaag

SEQ ID NO: 121767 - DNA, 201 bp, Homo sapiens
cttttccagtgactgaggaagttcaaagtagaataggatggggatgacacatgaataagctctgaatcctcacctgtctcgaggaggaataaattcaatcytaatgccaaaacgacagaatctctttacttcctcactgctttgccaaacgctcatttagatgtatctatcaatcactggtttattcatatggtgcctctc

SEQ ID NO: 121768 - DNA, 201 bp, Homo sapiens
ttctggcaggaatttatgaccctgagagtcactttatgaccctgagtttgccataatcagcttagtgttctgataggaaaccaaatggtaaatgccaagaygctggggcattggtctcttgtctgcatagtcaccttactttcactaggatctttattcatgttctttatttaagttgggaacttctagcaaggttatgtg

SEQ ID NO: 121769 - DNA, 201 bp, Homo sapiens
agtcactttatgaccctgagtttgccataatcagcttagtgttctgataggaaaccaaatggtaaatgccaagacgctggggcattggtctcttgtctgcwtagtcaccttactttcactaggatctttattcatgttctttatttaagttgggaacttctagcaaggttatgtgtgtgtcatctacagatatgtaagcaa

SEQ ID NO: 121770 - DNA, 201 bp, Homo sapiens
tatatagcactcacatgctcttacaaatatacatataaacatatacacatataaacatacacacatagaaacacacacacatataaacacacacacacacagttgtacatggactgtttcttgggaagaaatgctcattcggcaacagtggcttctttttctctctttgtggatttgctccttggcctttatccctatagg

SEQ ID NO: 121771 - DNA, 201 bp, Homo sapiens
atatatagcactcacatgctcttacaaatatacatataaacatatacacatataaacatacacacatagaaacacacacacatataaacacacacacacacagttgtacatggactgtttcttgggaagaaatgctcattcggcaacagtggcttctttttctctctttgtggatttgctccttggcctttatccctatag

SEQ ID NO: 121772 - DNA, 201 bp, Homo sapiens
ttttaagtttgcattttgtcagttgtaggttttcttttttcttcctttttttttttttttttgcatttgatggcaccagctgagtgtgggatggtgcacaratcccctcagaaatggagttatttggtcacagtaaactgaagcctctccccaaccgccaagataacagcaattactttggattcattttagtaggtgtga

SEQ ID NO: 121773 - DNA, 201 bp, Homo sapiens
gtcatgtccctgcaagggagctagtttgtatgtattgctaggggctttaagatggtgattctccaggctaggaacccttccaagagattctatcacttacycaaagccgaaacacttgtccagtttagcaggaaatatctatatgattttgaatttcttggtttcggccatttgtggctctgaattcactgttgccctgag

SEQ ID NO: 121774 - DNA, 201 bp, Homo sapiens
tgagattatgttatgtgtcaaacaggaagatcaggctgccaatcccaggtggggattatcaacctgtggaggatggcaaagagtataacaccaccaatcaygagaagtcggagcccattgaccttggcccctgcattgcctatgggcttggaatccccaaggagacctcagcatacaaggtgcttgttggaacaatgcttt

SEQ ID NO: 121775 - DNA, 201 bp, Homo sapiens
gagtgaacaaaccagtggctcccccactacctccatagagatgttttaacacagacacattctaaacagcaaactacatcggacgccagtctcctataaaygctagagagtaggcctcctcctggcctttatttttccatgttcctggatatatgagagtctcaagagggaggtttgatgccaacccctgcccttgacctt

SEQ ID NO: 121776 - DNA, 201 bp, Homo sapiens
aaaagtctttctttcttctttctttctttcttttccctccctccctccctcctgcctttccttccttccttccttccttccttcctttgttccttccttcctctctctctgtctcgctctctttcatgacgaatgaatataccttgtagacataagtgaatacatttcatgatactgtacttttttcttttcttaatcaag

SEQ ID NO: 121777 - DNA, 201 bp, Homo sapiens
gggaaaagtctttctttcttctttctttctttcttttccctccctccctccctcctgcctttccttccttccttccttccttccttcctttgttccttccttcctctctctctgtctcgctctctttcatgacgaatgaatataccttgtagacataagtgaatacatttcatgatactgtacttttttcttttcttaatc

SEQ ID NO: 121778 - DNA, 201 bp, Homo sapiens
attttaataaggactcctattgctgagaaggataataagtgagtctggagggcagggtcatactctcaaagcctttctgatgggagccaagattaaaatgsacagcaggctgagagggctgggaagaagctatgatttctcactgtggatttcctcagagtgccattagtgtaccaaggagaacacaggggagattgcatt

SEQ ID NO: 121779 - DNA, 201 bp, Homo sapiens
taagggaaaagtctttctttcttctttctttctttcttttccctccctccctccctcctgcctttccttccttccttccttccttccttcctttgttccttccttcctctctctctgtctcgctctctttcatgacgaatgaatataccttgtagacataagtgaatacatttcatgatactgtacttttttcttttctta

SEQ ID NO: 121780 - DNA, 201 bp, Homo sapiens
cttaagggaaaagtctttctttcttctttctttctttcttttccctccctccctccctcctgcctttccttccttccttccttccttccttcctttgttccttccttcctctctctctgtctcgctctctttcatgacgaatgaatataccttgtagacataagtgaatacatttcatgatactgtacttttttcttttct

SEQ ID NO: 121781 - DNA, 201 bp, Homo sapiens
gagaaaagcattgaaattgcaaaagaaaaaaatgcttattgttcctatgttcaatttgttatttaatataacttgttttttaggaatttaataaaaaaaaagggagggcatcattaattttacattctgcaagaaaatgaaaaatgatctgctgattagtgatgtgcaatttgttccttgaacatctccagtaatgtgtga

SEQ ID NO: 121782 - DNA, 201 bp, Homo sapiens
cctttataacactcatcacctctccccactaagtttgtggacaaggaatgtattctgtttatctatgcattcccagcccagaggaaggtactggcccagastaaatgctcattaaatattgtgaataaatgggcaaaaggatagaagacacattctttacttagatggagttgagataaacttagagagttagtgctagaa

SEQ ID NO: 121783 - DNA, 201 bp, Homo sapiens
cacataccatgacgcctggctaatttttgtattttttggtagtgataggttttcaccatgctggccaggctggtctccaactcttgacctcaagtgatccrcccacctcagcttcccaaagtgttgggattacaggcatgagccaccatgcccggcctcattttaatttggaatgcatttgttttaaaacattaactcatt

SEQ ID NO: 121784 - DNA, 201 bp, Homo sapiens
tgtttgaaggaaggagtaaatattttaataatagtaatcatagctttcacctatcgaatactgaataatagtgtaacaaataatagtaaacacaagtagtycttagcatgctccaggcccaggcctactcattttaattttttttttttttttttttttttttgagacagggtctcactctgtcacccaggctggagtgca

SEQ ID NO: 121785 - DNA, 201 bp, Homo sapiens
ttctgtccactgagaaacagtacccacctgctaatctacaaggcaaagccatccttatttcaaagtgtatttgatgcaacaaaattctttatgctgaaagsctttaaaaggcctctaaatttctagaaatgagatttaatctgatatttgaatcttatgccttatatccaaagaacagtctctccctagtccccatttcta

SEQ ID NO: 121786 - DNA, 201 bp, Homo sapiens
tcatgaagtcagtaagttcatggaatcccatttgttgaatttactacatgcaacgcactgtgctaggctctgaaattgtaaaaaagaaaacactttttgcytagggataaataaaattttttcataatgttaaaggctaataaagaaggtagaataacatgtgaaagattattttaactctttaaatgtagtcatagaaag

SEQ ID NO: 121787 - DNA, 201 bp, Homo sapiens
tgtatttgccattggatttcctctttaatcaataattgcatcttatgccaattttttattgttttggctgattttattatctatatataggaatttgttaygtattttgtatattaacccttcctatgattgtgttctccctctccatagcctgcctttcacttttaatgtcttttgagggatagtataattcattttatc

SEQ ID NO: 121788 - DNA, 201 bp, Homo sapiens
gagtacatactattttactgatttaactaatttttcaaggcccccaaagtattgattctatgctagtgtctttcattgtcctgtgtggcaaaacaagaacytaagactatcctagtcaacaaattcctttaaatggtttcacagagtgtctgccaattcatgaagtcagtaagttcatggaatcccatttgttgaatttac

SEQ ID NO: 121789 - DNA, 201 bp, Homo sapiens
ttgccattggatttcctctttaatcaataattgcatcttatgccaattttttattgttttggctgattttattatctatatataggaatttgttatgtatkttgtatattaacccttcctatgattgtgttctccctctccatagcctgcctttcacttttaatgtcttttgagggatagtataattcattttatcagtct

SEQ ID NO: 121790 - DNA, 201 bp, Homo sapiens
atgtttgaaggaaggagtaaatattttaataatagtaatcatagctttcacctatcgaatactgaataatagtgtaacaaataatagtaaacacaagtagytcttagcatgctccaggcccaggcctactcattttaattttttttttttttttttttttttttgagacagggtctcactctgtcacccaggctggagtgc

SEQ ID NO: 121791 - DNA, 201 bp, Homo sapiens
tgctggttcaattgaaatgattttcatttagaaatactcattgaagttcttgtttttacttgagataagcaagttttattttagacttcaagatatcaaayagaaattcattttccggatggggctaaagtagaaagatagattagagctatccaatgttgtgtttcaaatctggctgtttctacttgctttgaaggtata

SEQ ID NO: 121792 - DNA, 201 bp, Homo sapiens
agcgaagtgtttgttttcctaacaccttccaaaatatcagtcagcacaggtcaaacatgcccctatgtctgctcagaggcaggcaggtgaacaagtgaacrgctctctctctctcaagccaatgaagagccgtccactctctggcaaagcactgagctatttgctgagagtttcccaaggtgaaccgaagactccttgaaa

SEQ ID NO: 121793 - DNA, 201 bp, Homo sapiens
taagaatatctacactttccccccaccctacagtatcagagaacataggaccttcacagggaatcaattcctctgtacttacattcttcagtatttttcaraacaattcatttgtatgcctctcaaatactcatgcttataataaaataaaaataaaaacaggcatggtataaaaagacccatcgtgtgaacatagtaccc

SEQ ID NO: 121794 - DNA, 201 bp, Homo sapiens
gggcagatcatgagatcaggagatcaagaccatcctggctaacacggtgaaaccccatctctactaaaaatacaaaaaattagctgggcatggtgatgggygcctgtaatcccagctactctggaggctgtggcaggagaatggcatgaacctgggaggcggagctagcagtgagccgagattgcgccactgtactccagc

SEQ ID NO: 121795 - DNA, 201 bp, Homo sapiens
gagctgaaatgattattgtatcttctctaaccttatacccagtaatgatgtgtttgtaaggccagtggtccaattttttctgcagagtgaacaaaccagtsgctcccccactacctccatagagatgttttaacacagacacattctaaacagcaaactacatcggacgccagtctcctataaatgctagagagtaggcct

SEQ ID NO: 121796 - DNA, 201 bp, Homo sapiens
gctttacttctgttattttaagtgttagattatttatagagatcacagtaataatcctttcattgtttatgcacgcacatttgcaatgtaaatttgctgtytgccccacctccttctgtgagggaagtctattttccccttctctgaatctggtctggccctttgactttctatggtgaataaactgtggtgaaggtgata

SEQ ID NO: 121797 - DNA, 201 bp, Homo sapiens
attgctgctgcaacaaattaccaccgacataaaagctgtacaaatttatgatttcacacttctggaggccagaaatctaatgtgggtcagctgggctgcawtgcttctggagtcttcagaggaaactgttgtcttgccttttccagctcctagaggcttctgatattccttggcaagtggcttgcattactctgacctctg

SEQ ID NO: 121798 - DNA, 201 bp, Homo sapiens
gacagagagacagagggagatgaaaacagacacacatgcccacacacaaagagagaaacaggcagacacacacccccgcgccccctcccccatctggaccygccccaccaacatcctgacagatacaggaaggcagagagaatgagacagatggagacacaggaaagacatgcagaactagactgacagccataggctaag

SEQ ID NO: 121799 - DNA, 201 bp, Homo sapiens
cttgaaggaagaatctgaagggagtgatccagccttattatcatcctggtcacatggagagaaaagatagaagggtgatgctctttcttctaacaccctaktttttgaatatatggcccaagtcagcatccttgaacttgaccagtcagtgacaatactcctcttccgtggaggaagggggaaggatgtggagagaggatg

SEQ ID NO: 121800 - DNA, 201 bp, Homo sapiens
gaattcctcgtgaataattgaaacaatgattgttaagtcctttaatgctaaatatttactctataatggtcccattctactggacattggtcagactgccrtgttccattgagggtcgtatttaagagagctgtggccaaacctaagttcacataacagcatgcagtgaggatggaaaggagttctaggagttgagttatg

SEQ ID NO: 121801 - DNA, 201 bp, Homo sapiens
aaaaagacatgtaggggacacacattattttatttgcctgaagcttgaccacctctcctttagctcccttccgcattctggaaaatgcttctccatttctstagctccatggttaccatggaggcagccacgttgttttaagctactctgtgtcccaaccacagatgattgatccagggattttatttgattccttggggg

SEQ ID NO: 121802 - DNA, 201 bp, Homo sapiens
gatggattttcttccctcattccacagctacctcccacccttatctcatactgggacatttgcatttggcaactgatttcctagcagtaacatccctgggktggccctacatgtcgctgctccttttctcactgtagatgatggatcagctgctgtgtgtccctgaaggaaggcagctttcaggaggtggacagctgtgtg

SEQ ID NO: 121803 - DNA, 201 bp, Homo sapiens
tgatggattttcttccctcattccacagctacctcccacccttatctcatactgggacatttgcatttggcaactgatttcctagcagtaacatccctggkgtggccctacatgtcgctgctccttttctcactgtagatgatggatcagctgctgtgtgtccctgaaggaaggcagctttcaggaggtggacagctgtgt

SEQ ID NO: 121804 - DNA, 201 bp, Homo sapiens
gcagagatgctcctcacttcctagatgggttggtggcggggcagagacgctcctcactttccagactgggcagccaggcagagaggctcctcacatcccasacgatgggcggccaggcagagatgctcctcacttcccagacggggtggcggccgggcagaggctgcaatctcggcactttggggggccaaggcaggcagc

SEQ ID NO: 121805 - DNA, 201 bp, Homo sapiens
gctcctcacatcccagacggggcggcagggcagaggcgctccccacatctcagacgatgggcggccgggcagagatgctcctcacttcctagatgggttgrtggcggggcagagacgctcctcactttccagactgggcagccaggcagagaggctcctcacatcccagacgatgggcggccaggcagagatgctcctcac

SEQ ID NO: 121806 - DNA, 201 bp, Homo sapiens
tgttttttatagtgattatatgaagagtaatgggtgaaaagcatcaaagctggaattggagctctggggtctacaccgtttccaatgaatcattcctaatktgatgctttcatccatgctcttggctctgtctgggatgtctcctctccgccaggccctgatttcagtcatccaggccgagtttaattatgtataactgtc

SEQ ID NO: 121807 - DNA, 201 bp, Homo sapiens
tctcgtgcctgcccttcctctttggggagactgccttgctgctgatgaaatggaggtagagagctgtgaagctgagtcccgttagcatccccgtgatgaasaaatcatgcgcattctttcaaggtgatgtgaagagatgactaaaaggttttgaaaagttccagatagaaatcttcttagatggcattgactgggctgggg

SEQ ID NO: 121808 - DNA, 201 bp, Homo sapiens
agtaagatacacaccagattacaaaagacttgattaaaaaatgcaaaatatcccattactaacaagaaggtaaaatagctcattaataatttttatattawctagtgaatattttggatctattgggttaagaaaatatatcaaatttaatttcacttgtttctctttactttttgttaatgtaactactagaaaatttaa

SEQ ID NO: 121809 - DNA, 201 bp, Homo sapiens
tgtgtacatgagcaggaccctcaagagccaacctgtgttttttgtctcattaacttggaggaaggcatgaggggtcagggcctacaatatcacttggaaayaaggaatataaagaaaatctggcctgtttggtaaaactgtgcttctccatgtcttgcctcttttgatctcttgcctaagttttgttttgaaaggttaaca

SEQ ID NO: 121810 - DNA, 201 bp, Homo sapiens; identical to SEQ ID NO: 20552

SEQ ID NO: 121811 - DNA, 201 bp, Homo sapiens
ttgagctttgctatactactttgttacctgaattggtaatggttttctttttttctatgttataatagaatctttatatttaaataaacttaaatactttmaggcgctgtggtctagagctcactgaaagtgttatgtgtacatgagcaggaccctcaagagccaacctgtgttttttgtctcattaacttggaggaaggc

SEQ ID NO: 121812 - DNA, 201 bp, Homo sapiens; identical to SEQ ID NO: 20554

SEQ ID NO: 121813 - DNA, 201 bp, Homo sapiens
tttaagtagtttccaagttgtaagtatcttgattaccaaggagcagcagggtgcagagcctgaccggtaaaatcaaaggattgatggcttcctcttcacaygcctgcctttattttcccctgcatggcccattattctgctgcattaatttaagctttcctattgcacagaattaggggcttaaattctcttatcatccct

SEQ ID NO: 121814 - DNA, 201 bp, Homo sapiens
ctacatcaaggtcttgacggcatcattttcccaagagatatgccagtaaatttaagtagtttccaagttgtaagtatcttgattaccaaggagcagcaggrtgcagagcctgaccggtaaaatcaaaggattgatggcttcctcttcacacgcctgcctttattttcccctgcatggcccattattctgctgcattaattt

SEQ ID NO: 121815 - DNA, 201 bp, Homo sapiens
ttttgcattagctgattgggatagaagtacagtcttcctctaagctttactgctttctccattttccattttttgttatttttcaggcctggattcctttyacttggttcattctcttaagaattaccagccacagaatgatgtttttatttatttgaaaagtttatgtccatttgcaaatgattcaagacaagactgaga

SEQ ID NO: 121816 - DNA, 201 bp, Homo sapiens
tgctcagtagcttataagggagtgatgcttcatcattctagacagagagacaaatcactctgttctctgacttttgaatcaagaatcaacatttgtgtgtmtgttcaacctgctatttgctttgcaattttgctcattaggtatttattaccctgacagtgtatgagttagtcattttccttctgccgtgtagttcagatt

SEQ ID NO: 121817 - DNA, 201 bp, Homo sapiens
tgggtaattaacattattgttcctcctttcagggagcagtcttgtgctggcatggtcaaaggtcagttcctggttaacataagtaaacaagcctgtttacrctaaattcccctacacttccttgtacctactccttgccctctgcctcagggtaagagaacagctgccctcagcttattctcccccaaagctatgcagagc

SEQ ID NO: 121818 - DNA, 201 bp, Homo sapiens
gtttgtgaatctatgacagcctgccctgaaggccccacatatagtaaattatacccagtttaagctctgcttcattttatcaattaatctgtttttttttwaaaaaataatctgttcccaggggaaatacaaaaattaaaataaaaggaacacaggagagatgtggttttgcttatatttcaagctgtttatttttttccc

SEQ ID NO: 121819 - DNA, 201 bp, Homo sapiens
ggtttgtgaatctatgacagcctgccctgaaggccccacatatagtaaattatacccagtttaagctctgcttcattttatcaattaatctgttttttttwaaaaaaataatctgttcccaggggaaatacaaaaattaaaataaaaggaacacaggagagatgtggttttgcttatatttcaagctgtttatttttttcc

SEQ ID NO: 121820 - DNA, 201 bp, Homo sapiens
tggtttgtgaatctatgacagcctgccctgaaggccccacatatagtaaattatacccagtttaagctctgcttcattttatcaattaatctgtttttttwtaaaaaaataatctgttcccaggggaaatacaaaaattaaaataaaaggaacacaggagagatgtggttttgcttatatttcaagctgtttatttttttc

SEQ ID NO: 121821 - DNA, 201 bp, Homo sapiens
aaaacagataaatagacaaatggaacagaacagaggcctcagaaataatgccacacatctacaaccatctgacctttgacaaacctgacaaaaacaaacaatggggaaaggattccctaattaacaaatggtgttgggaaaattggctacccatatgcagaaaactgaaactggaccccttccttataccttatacaaaaa

SEQ ID NO: 121822 - DNA, 201 bp, Homo sapiens
caaaacagataaatagacaaatggaacagaacagaggcctcagaaataatgccacacatctacaaccatctgacctttgacaaacctgacaaaaacaaacaatggggaaaggattccctaattaacaaatggtgttgggaaaattggctacccatatgcagaaaactgaaactggaccccttccttataccttatacaaaa

SEQ ID NO: 121823 - DNA, 201 bp, Homo sapiens
aattggctttttttctttaaaagaagaaactatgttttctttttttaaaacaactcacattgagctttgctatactactttgttacctgaattggtaatgrttttctttttttctatgttataatagaatctttatatttaaataaacttaaatactttcaggcgctgtggtctagagctcactgaaagtgttatgtgtac

SEQ ID NO: 121824 - DNA, 201 bp, Homo sapiens
ccaaaacagataaatagacaaatggaacagaacagaggcctcagaaataatgccacacatctacaaccatctgacctttgacaaacctgacaaaaacaaacaatggggaaaggattccctaattaacaaatggtgttgggaaaattggctacccatatgcagaaaactgaaactggaccccttccttataccttatacaaa

SEQ ID NO: 121825 - DNA, 201 bp, Homo sapiens
gccaaaacagataaatagacaaatggaacagaacagaggcctcagaaataatgccacacatctacaaccatctgacctttgacaaacctgacaaaaacaaacaatggggaaaggattccctaattaacaaatggtgttgggaaaattggctacccatatgcagaaaactgaaactggaccccttccttataccttatacaa

SEQ ID NO: 121826 - DNA, 201 bp, Homo sapiens
atttattgagtgtatattagagttctccaggggaataggactaataggatgtgtgcatgtgtatatatatatatatatatatatatatatatatatatatwcacacacacacacacactttccctactttcttccacttattacccttggctgaagcatgaaaatatatttcatgtgtataaacacacacacacacacaca

SEQ ID NO: 121827 - DNA, 201 bp, Homo sapiens
ggaaccggccactgataaatgaagtggaccctaaagattgctatcatccttctgccattattggggttccattgttcagttaagaaagtgaatgaaatctrgaaaatcagcatttccaattaaaaaggcgttaaagcctaaggacatgaagaaaataaccttttaatttctgagatgaatgaacaaagaaatttttctaag

SEQ ID NO: 121828 - DNA, 201 bp, Homo sapiens
tatttattgagtgtatattagagttctccaggggaataggactaataggatgtgtgcatgtgtatatatatatatatatatatatatatatatatatatayacacacacacacacacactttccctactttcttccacttattacccttggctgaagcatgaaaatatatttcatgtgtataaacacacacacacacacac

SEQ ID NO: 121829 - DNA, 201 bp, Homo sapiens
aatatttattgagtgtatattagagttctccaggggaataggactaataggatgtgtgcatgtgtatatatatatatatatatatatatatatatatatayatacacacacacacacacactttccctactttcttccacttattacccttggctgaagcatgaaaatatatttcatgtgtataaacacacacacacacac

SEQ ID NO: 121830 - DNA, 201 bp, Homo sapiens
agacaacaaatgcacagttattaacacaatgtctagtacatataaatgctctaaaaacaatacaattatcaatcgaaaaatattagctttttgctgcatarcaaacaatcctgaaactgaatgatttgcaaaaatatttttatttcctacttataaatctgtgatcagctataactctgctaagcttagctggccgtggct

SEQ ID NO: 121831 - DNA, 201 bp, Homo sapiens
tgaactatgttactatgtaattgcaattacagaactgctgttaatgatgaaagaccctacgcctacctagaccaatcctcttattctaccattagagaaamtgtagcctgggaagaagtgatatgttcataatttcccagaggtttaatagtagagccagtagaagaatggagatcctttgatggctgctgtatcagacat

SEQ ID NO: 121832 - DNA, 201 bp, Homo sapiens
tcatccaatccaacttcgatctttgattgcaaggaacagatgtctcctccagctgacactagccaaagatgggaatttatttaaaagttatataaactaakcactgaaagaaagccaggcctaaagaatgaaggagattccagaatttgatctttatttcaggacctatctctttatttctttgaaaattaatgcatatat

SEQ ID NO: 121833 - DNA, 201 bp, Homo sapiens
ggttgcctcctgcccctgaacgcccccatccctcagtgacctctgagcttccacagtacccaagagtgctccggaacaatggtaagaccactgagctaggwactagctttgttttgtttgtttgtttgtttctatattattatttgttgatgttacagagtatagaaaattggctttttttctttaaaagaagaaactatg

SEQ ID NO: 121834 - DNA, 201 bp, Homo sapiens
aacagatcttttttctcatagattgccagccgaactgtgtagcaacactatggaaaagaccccaaccacttccacaaaagaaattcttcccttcactaagygaggagtttaactcagttagaaaatctggatggacctcaaaggaagaattttctcctttcaaactcaacccatttcaataatagagagaaaaacagattt

SEQ ID NO: 121835 - DNA, 201 bp, Homo sapiens
tcacttgtctagtccttttccttccctttgtcctgccttgagagactggttatattaagcttttgtgaggaatttcaggtgagagggaatggaggaagaaraaagagacttagggacacatattcatacccatgtgtgtatgtgtatttatgtgatatatgtataattttatatatgtgataaatacatacacattacaaa

SEQ ID NO: 121836 - DNA, 201 bp, Homo sapiens
aggccaattctcagaagctaagttaattcataatgaagtggaactcaacttctaatggaattctcaaacctaactaccatttacacagtgatttttaaccytttgctgcataccacattataacgacctaggaattctttaaaaatttaataaataccaaccaggtgcggtggctcacgcctgtaatcccagcactttggg

SEQ ID NO: 121837 - DNA, 201 bp, Homo sapiens
ccgtggggctttgttgattatgaaactggaagccatagcagtaagtgggtgcatgggggcaaccaaaagcaggaggatggccttgcctgtgtctgtaagaygacttgagacagtagctgccaacagagtcccttaggtgtgtgctttataactgcaggatggtacaaatgacactcttaattttctgagagtttgctttgc

SEQ ID NO: 121838 - DNA, 201 bp, Homo sapiens
aatacccaagtaaaggagaactgaaaactctcataaaacaacctgagcttctctaccaaactttaaattgccctccagaaaatattttcttctttggtaamaaagaaaataaattgccttactttttaaatgccttcatgatgaacataaagaaaagaaaaaattggtagttgtgtctttcaaccaactgcataaatgaag

SEQ ID NO: 121839 - DNA, 201 bp, Homo sapiens
aaacatgtatagtagaggaaaatagtggtgatcaacagcaaagtggttccctccactcttctccatacccctctcctcccttcagagaagcacattcatckaagtgaattgttgggaaaaacttatagtccattcctccatccaaggatccctctacgttgcaggcatatgtttaacatgcttattaaatgctattttttc

SEQ ID NO: 121840 - DNA, 201 bp, Homo sapiens
agtgctaactggttgtcagtgagcttgtaattaaatcccctgttagctttattttctttactgatgaggcttcaaatgtcttcatttttcctctttgtggrtaaacatgattgctctttgccccaaacggttgacggttcagacagcctaccctgcttagaagcaatcattccttgctcttgtcactccagttcactgcag

SEQ ID NO: 121841 - DNA, 201 bp, Homo sapiens
gaacacaggcctgtaaacaaatggtttcagtatgatgtaagaagcatactgatgtggcgatcataggaacagggatggcagaggagggagacctactcatwtgaaataagccacctactcattaatagaatctctgaggattactacgattcccacagagcccatcacaagtagcatgagaaagaccccagggtggaaggg

SEQ ID NO: 121842 - DNA, 201 bp, Homo sapiens
cattagataacacaatcttggcatggtgaacccttggaaataagcatttgcctaagatagaaaagagattcagaaagctctgatggccttggacagggcakaattttgagaaattgaatgtggcagaataaaaagaggttttatcaagcatctttctaaagtgctttcataaattttctctttggtaaagaatgtaccaca

SEQ ID NO: 121843 - DNA, 201 bp, Homo sapiens
ttgaagtaaaatccatcaagaatacatgggattaaggaagaacaaagagacggggtgatgaagaaatgtttctggcctacatgactgctgacaccattcaytgagatgggaatacagaaatgagaaaagggttgagaaaatgcaagatcactttggggcatggtatggataaggtgcatgggtgtatgcatgagggaactg

SEQ ID NO: 121844 - DNA, 201 bp, Homo sapiens
tgacataagtctcatttctaaccaacagaccttcccagcaccctggtgtaaaggaatctacctggcccacaggacaaacgtgccctgaccagctttccacratccccttctgagctgaaaaaaaatgtattaagtggttaaagaataaaacttggtaattcttataagaattcagacaatgaatggcttataaaatgggcc

SEQ ID NO: 121845 - DNA, 201 bp, Homo sapiens
tcttcttttccatttttaccggcagccagtctgctcctgaccagaccagatctcagcctagatcccattcctctttgtactgcatattcccctaaagacaycctaaaagagaatgatagacccagtgaatgcttagtagccacaggtagtttttttgtttgtttgtttaaatagggcctgtccaaagaaatatcacttaaa

SEQ ID NO: 121846 - DNA, 201 bp, Homo sapiens
ggcgcttccagagaggcgagagcctaagtgcagacaccacctccaaggcatagttggacacactgggtggaagggcaaacacagagtagatgcacagttcwtgctggaaccagatccacagttgagggcccaggaataatatgaaagaaaacagtatcttcatgtggcagaaagtgaataacatttattttagcattcatt

SEQ ID NO: 121847 - DNA, 201 bp, Homo sapiens
cttaaggaaatcagggctgagggtggagaaacatgttaggcataagaggaagaacaacaccttgcagtcccgggcgcttccagagaggcgagagcctaagygcagacaccacctccaaggcatagttggacacactgggtggaagggcaaacacagagtagatgcacagttcttgctggaaccagatccacagttgagggc

SEQ ID NO: 121848 - DNA, 201 bp, Homo sapiens
atagctgagtaagtggtcatttattcattgcctctgtatatcaggcattctacttcacaagcatcctactagaatctttaaattatcattatatttaacamttacaattaccctacgaggtcattcttaattccactttatagacagagaagctgggagtaaaagaatgtaggtgactttcccagggaagcacagctggtt

SEQ ID NO: 121849 - DNA, 201 bp, Homo sapiens
tctcattgtggtttttgttttcattttcctaatgactaatgacattgagcattttttcaagcgcttgttgaccatttatatatctttagagatatgtcaaktcttttgcccatttttaaattgggtcgtttgtctttgtgccgtggtgtttcaagcataaatctatagacaaaataaaagctacttgttggctgttttatt

SEQ ID NO: 121850 - DNA, 201 bp, Homo sapiens
cctttgtagggacatggatgaaattggaaatcatcattctcagtaaactattgcaagaacaaaaaaccaaacaccacatattctcactcataggtgggaaytgaacaatgagaacacatggacacaggaaggggaacatcacactctggggactgttgtggggtggggggagggggagggatagcattgggagatatacct

SEQ ID NO: 121851 - DNA, 201 bp, Homo sapiens
ttcagtgagcagtttgaattggagtctctaattcatttttaagttcttgaaagttttcttgaattatttacttgataattttctcctatgtatttttttttcagttctgtttctgtaactactgttagttttgtattaaataggaatttattctctagatttcatttttacaaacattcatctcattgtccttttattcca

SEQ ID NO: 121852 - DNA, 201 bp, Homo sapiens
tgcccttataaaaccatcatttctcatgagacttactcactaacacaagaacagcatgggagaaacctgcccctgtgattcagttacctcccactgggtgwctcccaggacacatggggattatgggcactataattcaagataagttttgggtgggggcacatccaaatcatatcaccatccatcagcatggaatgtgtt

SEQ ID NO: 121853 - DNA, 201 bp, Homo sapiens
aattatatgtgttccttgtttttttctccttctgcttgctgaagagttctggtttcacttgtctagtccttttccttccctttgtcctgccttgagagacwggttatattaagcttttgtgaggaatttcaggtgagagggaatggaggaagaagaaagagacttagggacacatattcatacccatgtgtgtatgtgtat

SEQ ID NO: 121854 - DNA, 201 bp, Homo sapiens
acactctgagtttctcctctcccagtgagaaaactgatagccgctggcatggcaggcggtcttccacatttatctttctaaaagtgcaccaaactatagarcctcagagttagattaagggatactagaaaatcctttctcaattttctgaggctggagtaaagacatttttttctgtactctacatgtgttctcaaattc

SEQ ID NO: 121855 - DNA, 201 bp, Homo sapiens
aagatttgtcttccttgaagtctccatttttgaagtctgggaggagcaccaaacttggttttattccatcacatttagtgatagacttcttcttctgtttyttttgttgttgttgttttgttttgttttttaaagacagggtctcactctgtccaagctgtagtgcagttgtggtggatcatagttcacagcagcctcaat

SEQ ID NO: 121856 - DNA, 201 bp, Homo sapiens
aagttacacctactccccgtcttcccagtgggcctgcagtctgggaatatgatgcatttagtttcttttttttctttttttctttttttttgtttttttttgagacagagtttgactcttgttgcccaggctggagtgcaatggcgtgatctcagctcaccacaacatccacctcctgggttcaattgattctccttcctc

SEQ ID NO: 121857 - DNA, 201 bp, Homo sapiens
tggtgcccaatgaagtcttttttttttaacttgtcaaattacttagtacagaaaaatagctataattcttttctttcttttttttttctcttttttttttttgagacggagtctcgctctgtcatcaggctggagtgcagtgacatgatctcggctcactgcaacctctgcctcccgagttcaagctattctcctgcctca

SEQ ID NO: 121858 - DNA, 201 bp, Homo sapiens
ctgagatgagccaatcagtccacacaaacggaagttttcataggcctgtgacagactccaactaaaatgtggttttctacccaaagctttagtgtcctgcytcatatgaagtacaatttcattacaaaatagcaagtgcttcccaagccaatgaggtatctctaagtacatggacctgaggcatgaacatgctgatgtgaa

SEQ ID NO: 121859 - DNA, 201 bp, Homo sapiens
taagtgatccaatggttagctggaacctaccaaactgcaagtcatgggtcacttctgttgattccccaaggctaggctcttactgtcaattgttactaaayggaaaaaaatgcagagaaatagcactgactgccttatgaaatctagtaccctttgttcaatatgacaattagttttgaaagctgctgatgatagcagaca

SEQ ID NO: 121860 - DNA, 201 bp, Homo sapiens
ttctccaacaccagctgggtctcctacaacccaccacagttctgacactagctacccagagttagcatagaccacacaggtaaaggcctcagtcccataaractgccctacacttcaaatgccagttgcagacctgggcctctcataatttctgaccaaccaacaataaatcaggggtgcttactacttcctccttgggtt

SEQ ID NO: 121861 - DNA, 201 bp, Homo sapiens
acctatgtaacaaacctgcatgtcctgcacatgtaccccagagcttaaaataaaataaaaagagtgaaaaaaaaaagaaaaaaagaaaaggaggtccttcyaggtgaggtattactaaaaggcaactgaaagaaaaaaatgtttctctatacttaacaacaattctggacaccaaatgtgtgggttttttttttttttttt

SEQ ID NO: 121862 - DNA, 201 bp, Homo sapiens
ttgtcatgaaaaagacaaatggagaaggtgggatgcatgaaaaatagacttttaaaattcctaaatcaatgccctcaagtcatctaaaatgattagaaacmgtctatagttgtcttttatgaggagacaagaattatatgtgttccttgtttttttctccttctgcttgctgaagagttctggtttcacttgtctagtcct

SEQ ID NO: 121863 - DNA, 201 bp, Homo sapiens
ctaagagctttataaatttaactcttcaatatcatcatagtcttttgagtacttactattactatctcgttttgcagattggtaagctgaagcaaaggagktttaataacttgtttaaagcctcatggatagtaagtagcagagccactaactgatatttttgtgccgacaccttaattcaagcttttttctcctttaact

SEQ ID NO: 121864 - DNA, 201 bp, Homo sapiens
aaaagaaaaaaaaaaaaactataaatattcttaaggaaatcagggctgagggtggagaaacatgttaggcataagaggaagaacaacaccttgcagtcccrggcgcttccagagaggcgagagcctaagtgcagacaccacctccaaggcatagttggacacactgggtggaagggcaaacacagagtagatgcacagttc

SEQ ID NO: 121865 - DNA, 201 bp, Homo sapiens
gtaatttcacactgcccaactatgcacatggtaagtatgggagaaaacttttttgtataataaaactttttagcagtaactgactggaccatggttgggcwtctattccaagttattctgatcagcacctgcatctgagactttgtaattggctctatcatattcccagtatgccttttgtgtgtggccattttctgctat

SEQ ID NO: 121866 - DNA, 201 bp, Homo sapiens
tcaaatatctatcccaggttggattgtatttgtaaactacatgacagcaggatttgatctgaaacagtgcttgcttggttcagaataaacgctgaatgaaygaatatgttgtaagcctgttgatccatgaattcactaataagcatctgtgatgcaaagcccaattcctcctgctgcaaatcatgtctgtcaatcttaatg

SEQ ID NO: 121867 - DNA, 201 bp, Homo sapiens
gtagacaattaggatattagattttagtagaacttaatttatttctaatttttccagtgacacaatggatataaatgaaagttcaaacctagtttgagttktgcctcccacaggcagtctttccatgtggcttggatttataacaacttggtggctgggttctgagacagagcatctgaaaagcaagcattccaagaaatc

SEQ ID NO: 121868 - DNA, 201 bp, Homo sapiens
aataatttttgagcatttaacctcagcaaattaggttgaaccatatgaaattgacaatttgtgggtcaaaaatacttgaacattggcaatttcatattttycaaccttctaattttattagttacaaatatgtacatatgtaccatcatcattaattaatataacaagcacaataactctttgggtaaggatcaataatat

SEQ ID NO: 121869 - DNA, 201 bp, Homo sapiens
ttttctccaggctaaaataaacctagacacagatatttgatagtgtagaattcccttaatcttttaggcacagcatctgtatgctcattcacatggactcrttttacatacactacctacccatgccaccaggatcatttatctggtatgtaaaatctgatacgtgtttttgtgctaattgaaatattggtttgtttgttg

SEQ ID NO: 121870 - DNA, 201 bp, Homo sapiens
ttttgagtgatgatgtgttaaattcaaaatcaggaatttttatctaaactgtgtatctacaataatggattatataaaatgagacagtcttataagccttrtttctagatattttatagccttttgacaattatttaagtctgcatgtagaatttatcaccacttaagtagaatctattaggaccgtagaatctcagagat

SEQ ID NO: 121871 - DNA, 201 bp, Homo sapiens
catccaatcttatggggaagaaaatgttcaaaattcaataaatattcattgaacacctactatgtgctaaggactatttagatagtagaaacactgcaatraataatgcaaaatgcctttgtgaaagttataatctatggaaaatggaagagagagagtagaaatacccagtatgaaacttgacaattcaatacaaagtag

SEQ ID NO: 121872 - DNA, 201 bp, Homo sapiens
tcatttctttttgctctcttttctctaaacctctcttctcgcttcatttcattcatttgatcttcaatcactgttaccctttcttccagttgatcgaatcrgctactgaagcttgtgcattcatcgcgtagttctcgtgccatggttttcagctccatcaggtcatttaaggacttctctacattggttgttctagttagc

SEQ ID NO: 121873 - DNA, 201 bp, Homo sapiens
tcactttatgccatgcactgttctaagagctttataaatttaactcttcaatatcatcatagtcttttgagtacttactattactatctcgttttgcagaytggtaagctgaagcaaaggaggtttaataacttgtttaaagcctcatggatagtaagtagcagagccactaactgatatttttgtgccgacaccttaatt

SEQ ID NO: 121874 - DNA, 201 bp, Homo sapiens
ggaggaatcttacataacttggagtcctagaatagaggaagagaacagtggtacccaggcctcgtttgctgttatggtttatgtcgcagacttgctaggtrtgacttccaacaacacaaacagaaggtgacaggttacaaaagagtagataaaattttttgctgacttttctcctggctacactctccctacttcctcccc

SEQ ID NO: 121875 - DNA, 201 bp, Homo sapiens
gtgtttcgttagtgaaacgtgattgtaacccagggtttttgacgctcacagaagcatccgccttggtaatgctgtacatccaggctgctcttctttgtccytaacctggttgcaatgtggccgtagcatgcttgtgttgacatctgacaggagatgaggacttgacttcctgggctgatcttgcttattttggggagagca

SEQ ID NO: 121876 - DNA, 201 bp, Homo sapiens
ttcttgggattgtgatatttttctgttggacaagtcattttatcattatatgatgcctctctgtgtattttttaactgctgttgctttaatgtttgttttrtctgatgtaagagtagctgttcctgcttgcttttggtgttcatttgtttggaatatctttttccacccctttaccttaagtttagaagagtccttatgtg

SEQ ID NO: 121877 - DNA, 201 bp, Homo sapiens
tgctcaggagtttagtagaaggttcctcttttggaatttgtctaaggttttctaataattagactggggttatgggtttttgagaggaagaaggcagagakaaaatgccattcttatcacatcatattcagggtacatattattaacatgatttaacgttgtagatgttgaacgtcatcacctcgctgagacggtgtttgt

SEQ ID NO: 121878 - DNA, 201 bp, Homo sapiens
ttgttttaacatgtgtgcctccctcactagaccatgtactcttaagaaaatattcatcaccagcttcctagcacagtcagtggcacataataggatcccartaaatgttggttgaaaaagtgaataaatgagtaaatacatgagacctgattttttcctcatcatatagaaacaaacaaatgccgtaacttttagtgatct

SEQ ID NO: 121879 - DNA, 201 bp, Homo sapiens
gtcttccccctttcttctcctttttttttttgtctcataggtgtaataacatttcattttaaaaataaatatgaaaaatggaaaagcataaataaaaaatraacacatttgtgagttttttatgcagatataaatactgttaatattttaatttttatcctctggccttgtacttctaggaagtaatgaatggtctggttc

SEQ ID NO: 121880 - DNA, 201 bp, Homo sapiens
ttacttccctccacccaactatgcatttatttatctgtcaaacatttatattatgctcactttatgccatgcactgttctaagagctttataaatttaacycttcaatatcatcatagtcttttgagtacttactattactatctcgttttgcagattggtaagctgaagcaaaggaggtttaataacttgtttaaagcct

SEQ ID NO: 121881 - DNA, 201 bp, Homo sapiens
agttagctactaaagaatctcttgtctgtctctttagcttctccataaatacacacatttcttcatttgtttttaaggcaatgctgtatgtgtaatcatgkgtgaatctttattgaacacttatggaataagccacctgttcttacaaattagctgagttctcaagaaggcccaaattagtgaattagttgatgaaggaaa

SEQ ID NO: 121882 - DNA, 201 bp, Homo sapiens
aagtcggctctagtttgggagtgttaggagtaatgttgccaatcttctcttatacattgttgtgcctgcatggaaggggtgcccaaatgtacatacatatwtaagaatggcattgccgaatgaaaccatgaacagtctttaatgttactatataatgcaaaattattttccaaaatagaataatattttcaatataagtag

SEQ ID NO: 121883 - DNA, 201 bp, Homo sapiens
ttctgagatgaatgaacaaagaaatttttctaagtggtatcttctatttctatagcagccataaatcataccattgggagctgtaccattttacttttaaatgtacgtttttgaaaagaacacagtcgtttcttattattctccttttgtacaatttcattgcattcataaccagtcaaagggtcctgatgattctccggc

SEQ ID NO: 121884 - DNA, 201 bp, Homo sapiens
ttgggagacggagcttgcagtgagcagagatggcgccactgcgctccagcctgggtgacagagcgagactccatctcaaaaaaaaaaaaaaaaaaaaaaaattaataaataccaatacgcaaactatgcccacaggacaataaaatcagaatctattaccggtagcaatggtggaaaatggaccttaggaaagaatagaga

SEQ ID NO: 121885 - DNA, 201 bp, Homo sapiens
tagacccatattttatcacttgtgccattagcatcagacatttttttaagccatgaaactcctatgttcttggatttgatgttcataaaattaaggaaatmagtttctaccatctatttttctcttcaaaaatcaaattacgtgacatctcatccatgtcaaggcagtctaaatcactgatcattttccatctgaggctag

SEQ ID NO: 121886 - DNA, 201 bp, Homo sapiens
ttccttgtttttatgcaatagatgtgtttctaaaaggtggggcatacattaaaattagagaattaatctttttttccaggtgaggtatatatatatatatwcacacacacatatatccttaggcactaaatgtgtctgctttttaatccatctttagttagtgtttctgagcatgggaactttttaacctctccttatcct

SEQ ID NO: 121887 - DNA, 201 bp, Homo sapiens
attccagtctgaaatggatttcagcttggcaaaaatgaattaatagaggcatggcaggtcacttatttaactaagtacaggggctgccctattaaccttgwgtgagctgagagaactaaagaaaattctttgtttgtcctactgcaaaattggccaaggcaaatcaaaacaagatgcctgggcaaatcaaagtgacacgtt

SEQ ID NO: 121888 - DNA, 201 bp, Homo sapiens
ggttaactcaccgggggcattagccagttccttgtctactacatcattccatcttgtatcattccacgctttgaagcaggtactattacaccctatttgtraggcttagagaggtctagtggcttgcccaagaacagaccacaagtacacagcagaggcatgattagaaccctgcccttctaactgcagtctggtgctctt

SEQ ID NO: 121889 - DNA, 201 bp, Homo sapiens
agaagaggctttaaaaattaaagaaaagaagaaaacactttaaacttaagatgggaatcatatcttattctttcatattcccagcgcctagcagaatgccyggttaactcaccgggggcattagccagttccttgtctactacatcattccatcttgtatcattccacgctttgaagcaggtactattacaccctatttgt

SEQ ID NO: 121890 - DNA, 201 bp, Homo sapiens
gatataactggcaaagtaaggtaccacaagagaacaataatcaaagaaaaagggaggactaccagttgttatttacttatgacattttactggaaaaactyaagcaacatgaaagactatttctaaatgaagtactaaaactaacaagacaatgttataaagtgtcatattttctttccttttatacaataaaacattgaa

SEQ ID NO: 121891 - DNA, 201 bp, Homo sapiens
gacagggaaggagggaggaatctaggacagaaaagaagggagagaggaaaaaaaggatgttaatattttcttgttctatatgtagaaagcaaaagagtatwtttgtaatcttttttcagcaaatgcctggatcaaattcaatatgattttaaagccatgagaccctctcattcttggttttgatgttgcacggtatcataa

SEQ ID NO: 121892 - DNA, 201 bp, Homo sapiens
agatagaaatgggactgaccccactttgtcgacaactagcccacaccggtgatcatggcattaactcatttatgaggtctctggtctcatgagttaatcayctcttaaaggccccgttacttaatagcattactaaggcaattcaattttaacatgagttttggagggggacattcaaaccataccaggtggttacccaca

SEQ ID NO: 121893 - DNA, 201 bp, Homo sapiens
gatatagtattccattgtgtgattaagccacagtttacttatctatgtgttgttgataaactgttaagtcggctctagtttgggagtgttaggagtaatgytgccaatcttctcttatacattgttgtgcctgcatggaaggggtgcccaaatgtacatacatatataagaatggcattgccgaatgaaaccatgaacagt

SEQ ID NO: 121894 - DNA, 201 bp, Homo sapiens
ggtgatgggttagtaggtatagtaaacccccatggcacacatttacctatgtaacaaacctgcatgtcctgcacatgtaccccagagcttaaaataaaatraaaagagtgaaaaaaaaaagaaaaaaagaaaaggaggtccttccaggtgaggtattactaaaaggcaactgaaagaaaaaaatgtttctctatacttaac

SEQ ID NO: 121895 - DNA, 201 bp, Homo sapiens
tgcactccatcctgggtaatagagggagactccataaaaaaaaaaaaaaaaaaaaaaaaaaggatgggcaaaggacatgaacagacatttctcaaaagaaracttttatgtggccaaaaaccatgtaaaaaacagttcaacatcactgatcattaagagaaatgcaaattaaaaccacaatgagataccactatctcatgc

SEQ ID NO: 121896 - DNA, 201 bp, Homo sapiens
cactgcactccatcctgggtaatagagggagactccataaaaaaaaaaaaaaaaaaaaaaaaaaggatgggcaaaggacatgaacagacatttctcaaaaraagacttttatgtggccaaaaaccatgtaaaaaacagttcaacatcactgatcattaagagaaatgcaaattaaaaccacaatgagataccactatctca

SEQ ID NO: 121897 - DNA, 201 bp, Homo sapiens
tcaagtttaattcaatctagatggatgaaatacctggaatatccaagtaattctagtaaaattcgttgtttgattattttattcctcccactaccgtatcktgtgtgtgtgtgtgtgtgtgtgtgtgtgtgtgtgtgtgtgtaatgttgctcagaaaatatagataaatacttccattctccatcacaatttattgttttg

SEQ ID NO: 121898 - DNA, 201 bp, Homo sapiens
gagaagccaaagactattttatacaaatccacttttaaaaggggaattcttttccacatacaaagaaccagaaatactcattttgtcctccttttttttttgtttaatgtatatgcactcacagttgctaagaattaatactgaaaacatgattttttctaaataactccttgagaaggcacttaaagcctccatttgtta

SEQ ID NO: 121899 - DNA, 201 bp, Homo sapiens
aaggaactgaacaactagcaagtaaagagtaatttatattaaaagatcccaataatagatggactatggcaagaacctctgaactagtctctctgcttctwctctacctctttacagtgtattatctacactgcaatcaaaatcttccttccaaatgtaagtaactgttcaatggcttcccatgggactcggaataaaagc

SEQ ID NO: 121900 - DNA, 201 bp, Homo sapiens
tcctctttgtctgatttctaatctctgaaagaaacagtaaatgcaaacataggtattttaaagagatagggtggaggggggtgcttttccagggtactctsttatcattttcctgacaaacttatgtgatttaacagttactggtaaaacctttcaccaacagtttgttactgtgacagcagaagcactcaaattcaggga

SEQ ID NO: 121901 - DNA, 201 bp, Homo sapiens
ttgtgagcagtgttgtattttttgttattgtttcaagggataggttgatattttgatatcacttagaaccgagtcggtaaactacatatttatctttgatyaactaagattctgtttttaaagaaaagaggacatctttggctagtaatgattaggtaacagtgaatggcaggtgccatatggatccttggagcacagacg

SEQ ID NO: 121902 - DNA, 201 bp, Homo sapiens
tgtagtcctatccccatggctgcttgaaattccattattgatgtgatgagctctttgttcctcattttgatacagataagatattgaactgaagaaaatgyacaaaatatatctttctccactaataaaccgagaagtggtagtggtgccgtttgttaatttgggatttattttgctttgccaaatggatttgccattaat

SEQ ID NO: 121903 - DNA, 201 bp, Homo sapiens
acctcagacttcctggtcactccttcctactcactgagggccctgtggactggctcacatttccccactgcccaaattcctgctcttgctcagccgttctyccttgacaaactagctatcatatcaggtattgaccttttcaggacaagaaaaccagaataaatgccaagagacatcttgccttctctagcatagcatttg

SEQ ID NO: 121904 - DNA, 201 bp, Homo sapiens
ctcacatccatctaactgagcaaccaaaatgctttataattttttaattgatttgtctggaaagagtccgttccctataggactcacagatctccatttaygtagggaagaaaattgtagtcctatccccatggctgcttgaaattccattattgatgtgatgagctctttgttcctcattttgatacagataagatattg

SEQ ID NO: 121905 - DNA, 201 bp, Homo sapiens
gatgataaaggttaggaaaggttccctaaagaaatacaaaggagatatgaaagattggtaagagttaaccaggctgtgtgcgtatgtgtgtgtgtgtgtgkctctgtgtgtatgtgtgtgtaggggctggagtggacatttcaggcaaagggaatagctggcatatatacccaggtttcctctggaaattcaccaccctga

SEQ ID NO: 121906 - DNA, 201 bp, Homo sapiens
tctagtttttgtccataccaaacttgggaagtagggatcaacaatcgtccttacattctccctgagaggtgggaggagggctccagttctgctctcgtaahccattttttattcagcgtcaccttctctttcaatgggctaagtatcctacaaactggggatgcatcttaattaattctggccaggttcaatggcatttaa

SEQ ID NO: 121907 - DNA, 201 bp, Homo sapiens
cagtaatagtttagttgtgaatgttttaaaaagacaatgaaaaatctactcacagaatgggagaatatatttgcaaattatatatcagataaaggactcayatctagaatatataaataattattacaatgtaatttaaaaatttgtctaatgattttagtagccatctcccgaaagaagatatataaatggccaataaat

SEQ ID NO: 121908 - DNA, 201 bp, Homo sapiens
gaacttgggcagtggaggttgcagtgagctaagatcatgccactgcactccagtctgggtgacagagtgagactccttctcaaaaaagaaaaaaaaaaaaactataaatattcttaaggaaatcagggctgagggtggagaaacatgttaggcataagaggaagaacaacaccttgcagtcccgggcgcttccagagaggc

SEQ ID NO: 121909 - DNA, 201 bp, Homo sapiens
aggaggcaaataacatttactgattacctaccatgcatctaaattctgcagtggtgaatttatatgtcttattgtttaatccccatggtagccttatggarcaaatactccaattttcaggtaataaatatgagtctaagaaaggttgtcttgccatagtttataaatagtgatgtcaagatttatcttaggtttccacat

SEQ ID NO: 121910 - DNA, 201 bp, Homo sapiens
gtcttagcactctcataaaaaattgatcatagatatatattcttattttgggactcttaagtttattccattgatcttcatgtatttccttcttccactgygtgcagttttgattaccataactttgtggcaaattttgaaatcagaaagtgtgaatcctccaacttttttatcctttcataggattgcttctggctatgc

SEQ ID NO: 121911 - DNA, 201 bp, Homo sapiens
cttcactttttttgcatgtgaatatacagttatcaccgaaccagatgttgaaaaaattaccccctccccgaccctcaccattggattgtcttagcactctyataaaaaattgatcatagatatatattcttattttgggactcttaagtttattccattgatcttcatgtatttccttcttccactgcgtgcagttttgat

SEQ ID NO: 121912 - DNA, 201 bp, Homo sapiens
atgtaattagagttccagatatacatcttacctaaaaacttctgctatggggaggggagaaaccaattaagtcagttttactcagcttcaaaaaaaacccytcaacctgaaaactgatgaaataactaatgaggacacttcatgtggggcatgttatttcttgatagagcaagtgtgttctgggacagaggctctttccct

SEQ ID NO: 121913 - DNA, 201 bp, Homo sapiens
gcaattgcttttggtggtaaaatgccaagcattgtagaaatatgattttgatggtggttgagcagtactgtttctgtctaattacactcacgtattcatayaattactgtgaaattactgtaccaaaagcagtatatacacatagtaataataatgcaatgttctgattggctggctttttaaaagatttcagaaattgat

SEQ ID NO: 121914 - DNA, 201 bp, Homo sapiens
cagattctcctatttactcattgtataaccatagttcagtcaattcccgttgccgagccttagtttctttgtctgtcaaatggggataacaatgcttgccycatcatattcttgcaaataaggtcagataattcatgtaaagcttggagcacagtgtatggcacctggtaatcggtctctctatgatgaagatttgctgat

SEQ ID NO: 121915 - DNA, 201 bp, Homo sapiens
tcatagcacttcatctgagtaccaatagccttggattcttatattaataacagtaccctaactcttagggttctttcgcagacttagatgaattgatataygcaaatgtgcttaggaaaatgccatgcacatagtgagccctcagtaaatgtcagcaattctataacttcccttccactgctgttattcccaacgtcattt

SEQ ID NO: 121916 - DNA, 201 bp, Homo sapiens
ttttcaaagattctgtagaattttcagactgttactctgatgtttacttggtagattgattgctaagttgcattgtcttcagaggaggtttttgaggttgygtctattataatgtctgcttctacccggagtccattgcacttggagtgcttcttgaagcccctgagcttatgctgtgataaaagcgtgaatgttttactg

SEQ ID NO: 121917 - DNA, 201 bp, Homo sapiens
ctatttttaatttgttattattgggtagtactttaatagattttctaatgttgaaacatctttttatcctaggataataatacacattggtaatcaatagygtttcaaagaaatacttgggtcttttcccaaaggacaaaaaacctgaaggtttcaagcaattactttgatttgattttacataagttgtttttagatctt

SEQ ID NO: 121918 - DNA, 201 bp, Homo sapiens
catatttatttttatttttcttttcttaaaatgttgactaagaactcctaacagcattaaagaggagtattgatagcaggcatccttatcttattctaacyctaatggtaactttatgttgcattattaggtttgattcttgctatcggtttttggtagataatatttatcaagtttagaaagttaccttttatttctagt

SEQ ID NO: 121919 - DNA, 201 bp, Homo sapiens
catcacctagaatttttactatttctgtgtgttggtaacatttcaagtcctttcttctaggtgttttgaaatttacgatacatttttgtaaactatagtcrtcatactctgctgtcatatattagagcttatttcttctatttcactgtatgcttgtattcattaaccaacctctcttcatacccctcccaacccccacca

SEQ ID NO: 121920 - DNA, 201 bp, Homo sapiens
tgctcttgtcacccaggctggaatgcaatggagcgatctcagttcggttcactgcaacctctgcctcccgggttcaagcgattttcctgccacagcctccygagtagctgggattacagcacctgccaccacacccagctaatttaatttttgtagttttagtaaagacagggtttcaccacgtttgccagtctggtcttg

SEQ ID NO: 121921 - DNA, 201 bp, Homo sapiens
cagtttcttttttatctgtaaaatggtgacaataatcatatctaacttataatggataaaaagcttttgcctgttttttgttttgttttgttttttgagayggagttttgctcttgtcacccaggctggaatgcaatggagcgatctcagttcggttcactgcaacctctgcctcccgggttcaagcgattttcctgccac

SEQ ID NO: 121922 - DNA, 201 bp, Homo sapiens
tttattaatagcagtattcaattttaatatcatacaatttatcaacctattactttgtggtttgggctttttatgtctcatataagaaaaccttcttcatytccaaaattctaaagattctaccatatttacttataaaagctttacagtttggctttctacaagtagtccagctggaatcattgttatataatataatgg

SEQ ID NO: 121923 - DNA, 201 bp, Homo sapiens
tttttctttatgacagagaactttacccctcccaatattctataccgtttacttacatattttgtttgtcgtctattttacctcaactagaacgtaagctycatgagactgggatatttgtttgttcatgctgtgtcccaagcacctacaacagtgtccagcaaatggcaggtgctcaacacgtgtttccaatacaggcgg

SEQ ID NO: 121924 - DNA, 201 bp, Homo sapiens
tggctcgtgattttgcagagtgtacaggaaacaatggtgccagtgtgtgcttttggtcaggacctcaggaagattttactcatggcagaaggcaaaggggkagcaggtgtgtcacatggtgagagagggagcaaggggggaagggagaagatgccagactctttaaacaaacagctcttgcatgaacaaacagagcaggaa

SEQ ID NO: 121925 - DNA, 201 bp, Homo sapiens
ggcctgatcactcacttttactgctaaggcttttaaaagtattttgcctctttgattgtctatgaaatcaagcacagatatcttaacctgagatgcaagaycatgtgtgttcttggaccaaccaacttgcaatcaatcttcccccttccccagcatttaacattcttctccatgcttgatttttctttatgacagagaact

SEQ ID NO: 121926 - DNA, 201 bp, Homo sapiens
actgggtaatttataaaggaaagaggtttcattgactcacagttcgacatggccagcgaggtctcaatcatggtgaaaggcaaaggaggagcaaagtcatrtcttacatggtggcaggcaagagagagggcatgtgctggggaactcccctttatcaaacaatcacattgtgtgagacttactcactatcaatgagaacag

SEQ ID NO: 121927 - DNA, 201 bp, Homo sapiens
agagtaaatttccatgatcatggagtaggcaattactttttacatttgaaatcagaagcataagcaacaacaataaagaacaatagatacgttaaactttrtcaaaattaaaaacctttgtccttcaaagggtaccatcaagaaaatgaaaaatcaggacttggggtggagcaaggtggagtaggagtctccactgatcat

SEQ ID NO: 121928 - DNA, 201 bp, Homo sapiens
taccaaatgacacctgcactcatacgttcatcacagcactattcacaatagcaaagacagggaattaacctagatgcctatcaacagtgggctggataaaraaaatgtacatatacaccatggaatactaagcagccataaaaaataatgaaatattgccctttgcagcaacatggatgcagctggagcccataatcctaa

SEQ ID NO: 121929 - DNA, 201 bp, Homo sapiens
gctgtctcctggggttctcaggcctggagtcctgggggagcctcttgtccttttcgcttctctagcctccttgaaggaagaatctgaagggagtgatccasccttattatcatcctggtcacatggagagaaaagatagaagggtgatgctctttcttctaacaccctagtttttgaatatatggcccaagtcagcatcct

SEQ ID NO: 121930 - DNA, 201 bp, Homo sapiens
agctgaaatgtgtgtttggtcctaatcaggactgaataatctggaaagtctttacaaactcggctcaaccatcccctcttccagaaggcttccctgactayatcttgttcactttctgggttggttgtcctctatggcatcctcacagttccctatccattctaatgcattgtcactgttggtttattggacattcttccc

SEQ ID NO: 121931 - DNA, 201 bp, Homo sapiens
tacatctgagaaagtaattgaaactttgtaattgcagaacataaaatgtaaatagccgtaaatagacaaccgacaaaataaagcatggtgaatttctaacyggaatactatgcgatccttaagaatggggcagatcttccattatgctctaatagaaagttacctagaatacaaaagaatctcatcttcttcaatgtggag

SEQ ID NO: 121932 - DNA, 201 bp, Homo sapiens
gaatttgagtttaccagtctagtatgcatttttatactatgactatatatgtacatagtcatagcaattacagggcattattttgcaggttttcaagctgytatataaatattatattttgtataaaattatatagattatataaatactaaaaatattattacctttttggtctatttgtttaactacatttttgcatat

SEQ ID NO: 121933 - DNA, 201 bp, Homo sapiens
aaatatcatgattagctttccaacctctatagtaaaggaaggcaagggccaggggtctgtggatatcttttaggcagccaaacttcagtgtctgccatggyatatgcctctccctctcctaccccccatttaccctcagtcatggttccatatttttttctcttcatggcatttaccatgatttgtagttgtacattttaa

SEQ ID NO: 121934 - DNA, 201 bp, Homo sapiens
tggcaaagaaatcaattttattgctactcgaaggctcccctgggatgaagcaatattggaggaggcaatgcattctagaatgtcaactttcagaggtttgragtttgctcaaaaaataaatgatctctgacttgattaaacttcttttgagttcctactatatataagggcctgtggaagggctgggtaccccggcattgt

SEQ ID NO: 121935 - DNA, 201 bp, Homo sapiens
ctgtgtctatgcattttgtagcattcctaagtcaggggactacattgcaaattgtaatattgttagtcatatatagggtcaaaaacacacttgcataaatwtcgcctcttcctgccaatcacagtactgtcattcgtcgtagtattctttcctactgaacctaatataagtttccagatcctcctgttacagtgtccaaga

SEQ ID NO: 121936 - DNA, 201 bp, Homo sapiens
tatgacatccgttctgtcctatcctacattgcaaaatctgtgtctatgcattttgtagcattcctaagtcaggggactacattgcaaattgtaatattgtyagtcatatatagggtcaaaaacacacttgcataaatatcgcctcttcctgccaatcacagtactgtcattcgtcgtagtattctttcctactgaacctaa

SEQ ID NO: 121937 - DNA, 201 bp, Homo sapiens
tcagaaaaaaatatgcagataaattattccaaaatgcaaagcttaaatttgatatgggtgccgtgtttcttcattacttttcttttattggcatttacttragagttctagagccatgcccagagttccagaactccagagctaaaattagacaaagaaacttctccatctcagagagcagagaactcgcccacattagct

SEQ ID NO: 121938 - DNA, 201 bp, Homo sapiens
gtttttagacaggaatatctgacaaccactcactcagggaaggtcgggaactggaacatctggatctcaataaattgttcaatataacaatccaagtgctrtaacacaagctgctactgggaatgtaaatctgactggctggtttaggatcttgtctttctaattaatagaccacgtattatgaattgggatactgtagag

SEQ ID NO: 121939 - DNA, 201 bp, Homo sapiens
taagctgtaaacagcttgcttttctgcagaacagctcatgcctgaaaaagttgataatgatttcaaaatttcttttaattgagtttttaattacaacacaratagcaaatagccctatcacatgtaattttgacaaagataacaagcaatttcatattctttggagaatgacagtgtgggagcctacagttaagtaccgac

SEQ ID NO: 121940 - DNA, 201 bp, Homo sapiens
attacggacaatggtcctcaatgttaatgaagtgacacaatccaattagaagattgcagttacacatggtagtggtagaatgagaggaattgctacctaayaggtaatgtcactgtttgtgccttgtttttgccctctgtggggttgtttctgctttggtccagatctcactctgtccttgggcctactttgggattctgc

SEQ ID NO: 121941 - DNA, 201 bp, Homo sapiens
ggaactctggagtactttgcaatcctgctggaaggcaggggagatgtgggtggccacacagagtcagaggatgtcaacatgcagacatctgtgtaggcatytgagttatgctgatcgaagactctcttctcactctttagtttccccactccaaacacacacacacacgcacacacacacaaacacacacaacctcagaaa

SEQ ID NO: 121942 - DNA, 201 bp, Homo sapiens
cctatctttaaattgggaatcataggaatacccacctgcaatagtttactagggctatggtaacaaggtgccacaaactgggtgacttaaatgagaaactwactgtgtcacaattctacagactaggcatccgagatcgaagtgtcacagcactgttttctttctcagggctcctggctgtgtgctgggaatctttggtgt

SEQ ID NO: 121943 - DNA, 201 bp, Homo sapiens
ttttcccactggtgtagcgtgatgggtccattttatttttctcttcatctctatcatcaggtgtcatcttttaaaacttgtgagcccttggctgtcccagycacccccaaagaacacccttgggatttactgattggctcacaacagtaattgtgagcaatgaaagaataggctaacttagcctcctccctagtttggttg

SEQ ID NO: 121944 - DNA, 201 bp, Homo sapiens
agtttttctctggttgctgtgtttgcaaggagaactactgtgtcatctgtaaataatgattttttttcttctctatttcagtattaatacttcccttcacyctgcctctgggtttctgtgattacatggggtagagcttccagaacagtgtaaaataaatattagtggacattcttattttggttccagtcctagtaagaa

SEQ ID NO: 121945 - DNA, 201 bp, Homo sapiens
agtgacgtaatgttttcaaggttcgtctgtattgtagcatgtatctgtacttcattcatttttatggctaagttatactctgtcatattatggaaataccrcagttcatttatccactcatcctctgacagacatttgggttatttctactttttggctattattatcatgtggttatgaacattcctttacaactctttg

SEQ ID NO: 121946 - DNA, 201 bp, Homo sapiens
caggcctggagtcctgggggagcctcttgtccttttcgcttctctagcctccttgaaggaagaatctgaagggagtgatccagccttattatcatcctggkcacatggagagaaaagatagaagggtgatgctctttcttctaacaccctagtttttgaatatatggcccaagtcagcatccttgaacttgaccagtcagt

SEQ ID NO: 121947 - DNA, 201 bp, Homo sapiens
ttgtccttttcgcttctctagcctccttgaaggaagaatctgaagggagtgatccagccttattatcatcctggtcacatggagagaaaagatagaagggkgatgctctttcttctaacaccctagtttttgaatatatggcccaagtcagcatccttgaacttgaccagtcagtgacaatactcctcttccgtggaggaa

SEQ ID NO: 121948 - DNA, 201 bp, Homo sapiens
gtccttcccaccatgggctctttagtctttcttggagtgaaaaattgtcaaaagattaaatcctatttgggagccagagaaaaagcaaaagaatggctgarcgtgtaaataaagtctcctaggaagatcatatttttgaaggtatttattattcatatctttttgtcattgtcgtgttgtaagtgtttacctgggcttcta

SEQ ID NO: 121949 - DNA, 201 bp, Homo sapiens
ttacagttgtatgatgactaactggttgatttttatgcagtatcttacctctcagtgtagttattttaattcaattgctttcacttcctaacttaaccaaytgagcctttaatgtattccagggactgacgggggaatggagttaaaatgaaaaagataggcattgttctgacatagtttactgtctagtggacagacata

SEQ ID NO: 121950 - DNA, 201 bp, Homo sapiens
atggggaagagaaagaataaggcagaagtaacatttgaatctctattggctaagaatctttcaaaactgataaagcctcaacacacaacttcaaaaggctycatggaccctaagcagcataactacaaataaaaacttacctaggtacgttagaacgaaactgctgaaaacctaagaagaagaaaagaaaatcttaaagtc

SEQ ID NO: 121951 - DNA, 201 bp, Homo sapiens
agtcttcactgttctagaaaatgaagcacatgctgtgtgtatcacatggctggagtaatcatttggacagtgaagattttctgaggtgtccccatcatctygtcacacctgttgcagaatgccacaggcagctctgtgaggcacgtgctgctgcttctgaaatgatgcattcccactcaattacctcattcattacaagtt

SEQ ID NO: 121952 - DNA, 201 bp, Homo sapiens
tcttctaatttgctaagtgttgatggactcaaaacagttactagaacaagccatagatggaatacatttattgatggaataagtcaaacaacttgaaacamggcattgtggtgtcttaaatggtaattcaaataaaatgaagtgattgatacatttttacttgtttggaaagtggagaatatttcggaattgcaaaacatt

SEQ ID NO: 121953 - DNA, 201 bp, Homo sapiens
tatttgtcttaaagaaaaaatcattaaatggtattggtaatgggctgcaggttttataacttaactatatttgcttcacgagcaaaaatagcatttgatgrctattttattctactcttcttgggcaaaagaaatcttaatcaaacatcatttcagtttaatgcttttacatgcaaaattcaatttgtgaatttatctgct

SEQ ID NO: 121954 - DNA, 201 bp, Homo sapiens
agctgaaaatgcaacaacaataaacattttggtctttcacagaaagttatgtggctttccttaagttcgaagaagaatcagggggcccagcccaactatawgaaagaatattttattgtgtctttaccctgcacttcatggcttcagcagtcctccttcttgctctagacttaccttccacctgactccttgacagttgct

SEQ ID NO: 121955 - DNA, 201 bp, Homo sapiens
ttgatgggacagtaatcacaagacacattctgatttctttaagtataaatatttttttccccaggtaatggacaagttctaattctcatggtttttataargtgaagtaaaggaatattgtccttcaagatcagttagcagccaagaatgatatttgggccagaatcctgagttctatatttgcaatctattttaaaaaat

SEQ ID NO: 121956 - DNA, 201 bp, Homo sapiens
actacctgtaaagagcttagaaaagttcctggcacacaataagtcctaaatagtgtctactattatttttataaacttaagaaattctactagcctttatsataatattttacctggcatttggaagttatcacagttataaaccaaacaataccaggaattctagtatcactactgaaattaataggtttctttgatggg

SEQ ID NO: 121957 - DNA, 201 bp, Homo sapiens
tcagatactgttttcatttctaatgtctgccttctgtatagcgcctatgcaaataggggctttcaaggatgcaaaagtagcaacttcccctattaggagcrtaactagcagctgctgtgtttctcataaaagagaaaacatcctgtttactaacatacaaccatacgccctcacccgcgtacactcacaccaagctctttt

SEQ ID NO: 121958 - DNA, 201 bp, Homo sapiens
cgggattgctaggtcaaatggtatttctggttctagattcctgaggaatcaccacactgtcttccacaatggttgaactaatttacactcccaccaacagygtaaaagcgttcctatttctgcatgtcctctccagcatctgttgtttcctgactttttaatgattaccattctaactggtgtgagatggtatctcactgt

SEQ ID NO: 121959 - DNA, 201 bp, Homo sapiens
atgagaaaacatcctatggttccaatctttcgctttcagaatgattggtacaacaaaatgaactactacctgtaaagagcttagaaaagttcctggcacayaataagtcctaaatagtgtctactattatttttataaacttaagaaattctactagcctttatgataatattttacctggcatttggaagttatcacagt

SEQ ID NO: 121960 - DNA, 201 bp, Homo sapiens
ataacaggcttgaaccaccatgcctggcccagtcctatacctttaaagtccatccatgtctctaatactccatggtaggcaaccaccacctttaactcttygctgtcttcataatgtacacatcgagatccctctcaccccctgtaactccccttctctaaaatcccctggccttcatttactataaactagactcttaat

SEQ ID NO: 121961 - DNA, 201 bp, Homo sapiens
tttttcttcctactcctttccccctccctgcagaggcaggcattctattatattttatatacaccttttttattgcacacacccttgtcaaaaaattattrtcatacgtatatgtattttaatttccataaatgacatgtgttaaatttcatctgttttttactttatttacccagtcctatatcttttttcttttttttg

SEQ ID NO: 121962 - DNA, 201 bp, Homo sapiens
ggaaactgcctaaaatgataaataaaatggttagttcagttgtttctttacatccctggagttataagtatctccatctgaccatgagttaatggtattgkgtatatttactgttgtatgattttcagagcttctagcccaaaactggagacaaaagctctatgttctaccaatgctcacagatgaataatgcttttttaa

SEQ ID NO: 121963 - DNA, 201 bp, Homo sapiens
tccagaacagtgtaaaataaatattagtggacattcttattttggttccagtcctagtaagaatatgtctagttaagagcttctagattatgttccaaacyattattccatgagatgttaattgatttcctacaaaaaaaaagagagtcttctaaataatttccttgaactctgaattaaccaaaatgagacaaatctctt

SEQ ID NO: 121964 - DNA, 201 bp, Homo sapiens
tgtaaaataaatattagtggacattcttattttggttccagtcctagtaagaatatgtctagttaagagcttctagattatgttccaaactattattccaygagatgttaattgatttcctacaaaaaaaaagagagtcttctaaataatttccttgaactctgaattaaccaaaatgagacaaatctctttagtgaatgg

SEQ ID NO: 121965 - DNA, 201 bp, Homo sapiens
tgagaaagttgacgctccctagtttaagagatttgcccaaggccacacagggttaatgacagagtgatcctggatttagacccagatatgtcaaccttccmtatactttactgctgttccagtactttcccaggtgatgacttttaagatggcctaataccattcagttccaaccacctttgagcacctttgagcaatccc

SEQ ID NO: 121966 - DNA, 201 bp, Homo sapiens
ttttcctgctggttgtgcgtcttgtaaatgaagtgaatttcccattgctactaaactgctttggacaacctggtacaaagtggataccattctcctacacrtacaggcggccccttcgaactcactatggatacataaatgtgaagacacaagaggtaagatcccagagggttacctagcagttggagagtatccatggta

SEQ ID NO: 121967 - DNA, 201 bp, Homo sapiens
agtgagggagaatttactcctaaacagatttgtcggaggccagaaaaagaggatacttgggtcgttttcgtgttttttgtttttttttttaaaggtgtgtktctctgtgcacacatagcaaatataaatatacatgcacattcattcaatcttatcttaatatttactcagatttgaaaactatcgcacgtaaaatccttt

SEQ ID NO: 121968 - DNA, 201 bp, Homo sapiens
tgaaaactatcgcacgtaaaatccttttctggaagggacttctctctgatttcaaaggctatttggtttcttagtgaatttattggctgtgcatttactasacacgaagtaaaaacttctttggtcagctatggaaacgatttgcatcttgctctgagaagatcatgatcacaagggaattggaagtaaaatgtgtatatt

SEQ ID NO: 121969 - DNA, 201 bp, Homo sapiens
acgagaactgctctctagggtgtgggcagtaagaagactgtggggtgcagaggtcagagctagaccgactctgagtcccatcctggctttgtgattaataygaataaaacaataatacccttatttcatggtctgtagcagtgctgtccagcagaaatataatgtaggctttttatgcaattgtacatttcctaagagcca

SEQ ID NO: 121970 - DNA, 201 bp, Homo sapiens
aagagcttctagattatgttccaaactattattccatgagatgttaattgatttcctacaaaaaaaaagagagtcttctaaataatttccttgaactctgwattaaccaaaatgagacaaatctctttagtgaatgggcttttataacctttactatttaatatgcattgacaatctcctagagatggagaaagtatgtga

SEQ ID NO: 121971 - DNA, 201 bp, Homo sapiens
tttcaaaatgtatgtatttcactattcaatattatcaaatctaagcttttaactatattgagctatgtgctcagggaggtgcagtttctgatatctctggrtgtaatttgaatgctgatgattacttaaaaaccttaggtggatcaactctcctttggtaatgtgggttgatctgaatttaacattttctacttctgagca

SEQ ID NO: 121972 - DNA, 201 bp, Homo sapiens
ttccagtagctgaatggaacattatttttaaaaggtaaattaattaaaatgaaatgaaattttaaaaatgtggtttgttggttatgccagccatgtttcartgctcaaaagccacatgtggctagtggctactgtattggacagcatgctccttcaggtattcatcttcactatcagaagagaccactagactcagacaat

SEQ ID NO: 121973 - DNA, 201 bp, Homo sapiens
ggctctttggtctcagtgtggtagtgtgaactcctggaggctttgagggcagacacagacttgaagcacttttatttgagttgtttcattgctccaggagrgtattacacatatgggagcaatttaaatgtccagaacaaaccacatgtcttcttttaagtccagagagcaaggtgattgcagtttctttgttcggtttgc

SEQ ID NO: 121974 - DNA, 201 bp, Homo sapiens
ggagggaaagacagagggagaaagagggacaatgaatgagctttggattcctttgttcaaatatgatcatctgagaaagagaaattctgaactgtcagtcrgttcagagcagagctctgctggctgaattggatgtgggagatttttcttaggttcccagggccacagaaaggaagcccatgctgaataatccagatttaa

SEQ ID NO: 121975 - DNA, 201 bp, Homo sapiens
gttacaagttgtagctgaccttgatgtttatcgccagaccgtgggaggttttggaatctgactgatgtctttcttccctgtagattgttattcagtgcctmggatgtgggcctaggaacctgtatttttaaaagattatctgatgtacagccgggtatgaaaactactgatcaagatcaatagttttaattaaagtcaggg

SEQ ID NO: 121976 - DNA, 201 bp, Homo sapiens
cttagtaagaaaggcttagagatattaggaactgtaatgtctaatgtgagatattaatttagtttactgtgtgttttgctctctagtttctgtgacttacsaatctctaataactcaaaaatggtttttgagtgaattattttgtgaagactagggaaggcaatgaggatttttttttgcctagattaattggaaacagct

SEQ ID NO: 121977 - DNA, 201 bp, Homo sapiens
aagagacaatctacagaatgggagataatatttacaaaccaggcatctgacaaagatctaatattcagtatgtataaggaattttaaaaatttacaagcartgcttaatgacgagttaatgggtacagcacaccagcatggcacatgtatacatatgtaactaacctgcacattgtgcacatgtaccctaaaacttaaagt

SEQ ID NO: 121978 - DNA, 201 bp, Homo sapiens
tgctatgaaccattgcatcaaggttgaaatgcccaagaggctgacaagcttattgtccatttcaaagattaaatagttttggaaaaattttctcccctggmagttgtaattgtgtccatgaaataagtgttcattctgcttgagccctgtggtttgaatgcttccttctatatttccctccagtggattgattcaaaaaaa

SEQ ID NO: 121979 - DNA, 201 bp, Homo sapiens
gctttatgtatttcttgaagcatctgctcatgatggcaaactgatccatcctaaatatttatttgcctataaatgccatggagtcaacacttcactttcarctactttctttctttcttttctaacccaaacataaaatttctttaaaagttctgtcaataacatcacttgcaatttaaacgctttaaaaatatgatcctt

SEQ ID NO: 121980 - DNA, 201 bp, Homo sapiens
cctttccagatattcatgcctgaagctcattaataattttcttctctcagtaagtgaagacgaatcctttaatttgaagtggccttcacactaatgagtcmtgtcattactctggaatcctttaagttgattttttatcttgttgactcagtgaggtagaaattaaggacagctcccattagctttatgtatttcttgaag

SEQ ID NO: 121981 - DNA, 201 bp, Homo sapiens
tagtcataaacaagacagtgaaaagaaaatgagtaacaatataaatgactttctggaaaatgaggtctattcaaatttcaggaaaaaagttaactctgaartattaattgatcataatgaggaggccaaacttcagatacacagaggagccatggaacatttcccataggcctgcagcttgtgaagacgtctaggaacact

SEQ ID NO: 121982 - DNA, 201 bp, Homo sapiens
agatacatgcattgtgaatacatcactgttttaatattctgtatttaatacaataaatattttggcagagaaatagtgagtattctagaaataattcctgwcctctttaagaagtacaagttcttcaaagattccccaggaacagctgtgcaagtcagtgtggctttctaatctctttcatctatacttacacactataac

SEQ ID NO: 121983 - DNA, 201 bp, Homo sapiens
tagttgaagaaatatataaaaaaattttgtgatatatattttggttatctcctaacatttatatttccctttagaaaagaaaaaaatcccacatgaaaagrgaaattgaagagaaatattacctaccacataaaaagtcatacttttgtaagattatatttccatttctacataatattctctcattatgaaatcatcagt

SEQ ID NO: 121984 - DNA, 201 bp, Homo sapiens
gttaccctttcttctgccaggcagatagagaggctatcaccttaatttatccaggaataggctgactttagacatgctagaagttttgattaagattcagyctatctttggtttcctttgtctgtagtctggagatctctgtggcttgcaattaagacactacttcattcactagctcattcatcctagcaagtttttgta

SEQ ID NO: 121985 - DNA, 201 bp, Homo sapiens
ttctcttgggttttggacccatggccctgtctcttgccatgcccaaaaggattttaataaatgcagaacactgagaataaagactacagaggctccagatrttgtgatcttgcattagaaaagggttaccctttcttctgccaggcagatagagaggctatcaccttaatttatccaggaataggctgactttagacatgc

SEQ ID NO: 121986 - DNA, 201 bp, Homo sapiens
tagaacatgactggttcagattttaattatctgataaaattctccaacattttatctttttgctgtataatttatctatttttcttattcatgttattcaktttttttataatgtttgtcttaatatctacatcatgtgtggatttgtttctgttgcctatttctttttctcttgggttttggacccatggccctgtctct

SEQ ID NO: 121987 - DNA, 201 bp, Homo sapiens
tgagcagcagacaggccttcagctactcctctttcagcttctcggaatcgttagccaaaggtgtgccaactgtatgacgaaggcttttaacttcttgtgcrcaaccattcccactgatggtagaagtagtgagaaactggaaggagcctaggtccatccccatgtgttccagtttattcctgtggattccagtttattctc

SEQ ID NO: 121988 - DNA, 201 bp, Homo sapiens
gtggatattcaatgatgtttatcactctccccctgccgctgcagtcctaccctgcactgctaatcctccctcagcaaacagatgcccctggaacaatgtakgggtgagcacaaagaaattcaggagaagaaagtacattcatgtaattcaaaattgttatctctatcataagattagtaaaaagcctttgttcagattttt

SEQ ID NO: 121989 - DNA, 201 bp, Homo sapiens
atacccagattcttgtatattttctagtttgtgtgcacaaggcttctggcttggctgcttttgccagtggggaagcattagtgaacaaaacagatacagcytccagttttcaagagctcacagtctagcaagtcactgcaactttaaaaaggggatgtacatgtgtggtttaaagtatggtgggtaaagcctttaggggtt

SEQ ID NO: 121990 - DNA, 201 bp, Homo sapiens
ggctgggactaaaattaacccctcactggtggcaccacttgtgtctggaaaaatcagtttgtgattatttctaaaccaaggaattttgttcctgctgattrcatatcaaatcctttctcacactttggaccccccacttctttgctggctaacagggagaattaggggtgcaggaaacagctttcacagttagattatgct

SEQ ID NO: 121991 - DNA, 201 bp, Homo sapiens
ttattttaaagtttaacaatcctattagaaatctattttatctgaggaaactgaggctcggagagaacttaagttctttgtctgaggtcatgtggccagtkagtggaacacctgtggggtcatattatttgtataattgttattgttattagctaacagttactatgtgcagtaaggactaggcattgttctcagcacttt

SEQ ID NO: 121992 - DNA, 201 bp, Homo sapiens
atcctattagaaatctattttatctgaggaaactgaggctcggagagaacttaagttctttgtctgaggtcatgtggccagtgagtggaacacctgtgggrtcatattatttgtataattgttattgttattagctaacagttactatgtgcagtaaggactaggcattgttctcagcactttacatttattaattcactt

SEQ ID NO: 121993 - DNA, 201 bp, Homo sapiens
ttgttattgttattagctaacagttactatgtgcagtaaggactaggcattgttctcagcactttacatttattaattcacttaatcctcattttacaggwaaggaaactgaggcacatagtggttaaagttacaaaactattctgtggcagtggtaagatttgaacccaggcagtttgaccctggcatctataacagatg

SEQ ID NO: 121994 - DNA, 201 bp, Homo sapiens
gaaactgaggcacatagtggttaaagttacaaaactattctgtggcagtggtaagatttgaacccaggcagtttgaccctggcatctataacagatgcgcstatgaccacagactttgtttcctttgccactttggtggtctgtctcctagagcagagaatcactagtactattacaaaccattccagtaacaaattaacc

SEQ ID NO: 121995 - DNA, 201 bp, Homo sapiens
cccagattcttgtatattttctagtttgtgtgcacaaggcttctggcttggctgcttttgccagtggggaagcattagtgaacaaaacagatacagcttcyagttttcaagagctcacagtctagcaagtcactgcaactttaaaaaggggatgtacatgtgtggtttaaagtatggtgggtaaagcctttaggggttgta

SEQ ID NO: 121996 - DNA, 201 bp, Homo sapiens
ggtggagtctcgctctgtcacccaggctggagtgcagtggcacaatcttggttcactgcaagctccacctcccgggttcacaccattctcctgcctcagcytcccaagtagctgggactacaggcacctgccactacgcccggctaattttattttattttatttatttatttatttattttttagaagagacggggtttc

SEQ ID NO: 121997 - DNA, 201 bp, Homo sapiens
gcattagtgaacaaaacagatacagcttccagttttcaagagctcacagtctagcaagtcactgcaactttaaaaaggggatgtacatgtgtggtttaaaktatggtgggtaaagcctttaggggttgtaaaagttcagtcactggggcctaattctgcaaaagagaaattcttcccaaagctgggatacattgagtgtct

SEQ ID NO: 121998 - DNA, 201 bp, Homo sapiens
gcttagttcaggtcagacctggtggaattagtctcactgataagcagatacttgaacagaatcttgatgaataagcatgagcattaacttcagactaactkgccggatggctgtgcctcctggtctacccacctactgctctccctgccacaagttcctcttcttcatttgtcactcttttatctgttcttggcacagcaa

SEQ ID NO: 121999 - DNA, 201 bp, Homo sapiens
ggcacagcaaccagaaggaattttaaaagatgcacgtaagatgatctcattccctttcttatctggtcagtggcttcctttttcatttggaatatattacratctttgaatcatgactccacaggcctacaggatccctttccagtctcctccaaggcactcagcctcttattattttctagctactctagggtcttttca

SEQ ID NO: 122000 - DNA, 201 bp, Homo sapiens
tagtaggatttgatggaaaaacaagtaacttcagggtaataaaatgatggaaagtcctgatgggtcaggtccatatctaatcttaagaagggcagccttargcagcatagtgggtgctagaatcattggtaccatcaagaaaagagtagtaatgtgaatttcaaagaagatcactttgggataatgaacagcatgacagaa

SEQ ID NO: 122001 - DNA, 201 bp, Homo sapiens
attaatgtaggtgttgaaattttcatttagtcagagcagtcctaaatttaaatgtaaccttttgagcccttagatcattgagttaagactctttctcatgyggatgaacagtaaatgcttgttatctgaagatgtaaattgggaggagtaagggacttctgccccattgtgcattaatgcctactgtttgtttccctgact

SEQ ID NO: 122002 - DNA, 201 bp, Homo sapiens; identical to SEQ ID NO: 20553

SEQ ID NO: 122003 - DNA, 201 bp, Homo sapiens
tattataattattatgacgtttacttagtatatagacgtagagaaagttttagttgaaattgtatctgttaatacattattattttctgttaagaatgaayatctacatttggaaatagaacaaaaaaagagcttactgcatatcctttcactgtcatgccacagcattgtctaatgagccgtccgtcctaagggtcatct

SEQ ID NO: 122004 - DNA, 201 bp, Homo sapiens
aagttgaaaaatggtatacaagatttattttataatgtcgcttagaaaaatttgaaaattgactgtgtattagaaattattcactcaaatgcattattcatgtaacatttctgttggttttttttcaacataaaaatttcaagagaaaacctagctcatttcaaaatccagattttaaaaaggttatttttgatttttatt

SEQ ID NO: 122005 - DNA, 201 bp, Homo sapiens
acatgcatgcatgcacacacactgtatgtatattttcatatatatttatacactttaaaaattatatatttttacacttatatacactgaagtgtatatayttttaaatatacactttaaaaaattaaatacatatttccattttatttctgtttcctctatattaactctcattttcttagtggttacctttttgcttgt

SEQ ID NO: 122006 - DNA, 201 bp, Homo sapiens
ttcctgtgttttgttaaaatgatcatcaacatatatattcagcttatttgttctttaaagccattttcttaggaattatttcctggaaattgccctttaargtgtcatttagtgggggcgcagtggctcatgcctgtaatcccagcactttgggaggccaaggcgggcggattactggaggtcagaagttcaagaccagcc

SEQ ID NO: 122007 - DNA, 201 bp, Homo sapiens
tagaccttaaataaaaatgtctcttggatcatcttgtctgaaagcccatctttttgggtttatttctctgattagagagatactttgttttgcctaatacrtatttttagaaagtagtacaggcatcagtcttttgtaaactctttgagatttaaataaggaagtttgctgtttgaaggactttgtggctaatcccttggt

SEQ ID NO: 122008 - DNA, 201 bp, Homo sapiens
cttggatcatcttgtctgaaagcccatctttttgggtttatttctctgattagagagatactttgttttgcctaatacgtatttttagaaagtagtacagrcatcagtcttttgtaaactctttgagatttaaataaggaagtttgctgtttgaaggactttgtggctaatcccttggtaaagaagtatcttataattgac

SEQ ID NO: 122009 - DNA, 201 bp, Homo sapiens
tatggcaactttatgtattatagcatttcaaacctggagggatctaggcagactgtggttgattagttgatgtttagaaagactggttaattcactgccaraatgcagatggggtggttggggaggataactgttttctccaggcagtgggtcagactgttcccaaagtgtgatcttacccatatcacttaacctctctgg

SEQ ID NO: 122010 - DNA, 201 bp, Homo sapiens
cttgaactactgacctcaggtgacccacccaccttggcctcccaaagtgctgggattacaggcgtgaaccactgcgcccagccagagcattgttttatgtrtggcttctgatatggtttggctgtgtcctcactcaaatcttatcttgaattgaagttcctataatccccatgtgtcataggagggacctggtgggaggtg

SEQ ID NO: 122011 - DNA, 201 bp, Homo sapiens
agatatttccagtttttagctataaatactgatgttgtgaacattcctgtacctgtctcttggggcacatgtgcatgcatttctgttggttgtgttcctasaagtggtattgttggggcataagatatatgttatctttggccttagtagtataaaaaggttttgttatttttttttttaacaaaaagcaaaataattgct

SEQ ID NO: 122012 - DNA, 201 bp, Homo sapiens
ttccaatcatatgtgttgcaaatatcttcttccacattttagcttgtcttttcattcctttactggtgtcttttatgaacaaaacaattatactacagccyattttcttaattttttattttacaattaataattgttaaaatccctccttaagaagtctttcactagtttgatttcttgaaaatattttagcatattaat

SEQ ID NO: 122013 - DNA, 201 bp, Homo sapiens
gccccaactctacagtgatataaatcaatcagtggttgactgaagtcagggatgaagtgggcagattagtgggaagagctttacaggggcatgtgggtatsaactggggtgatgattacagagatcactaaaccacatcctaaaaatgtatatattttattgtaaataaataatactttattaagttttcttttaaagact

SEQ ID NO: 122014 - DNA, 201 bp, Homo sapiens
aaaatgagtgtgtttacccacagtatatccttgctggtgggatagtttctaattagataatgaaacaaaccctccatgcttcatcaggataatggaatctrtttccctaccaacaattggcacaatataattcacagactgttttaatcataatgtcaaaatggtaactctcagccacagtcttcatgaacaaatatttct

SEQ ID NO: 122015 - DNA, 201 bp, Homo sapiens
tgtgtgtgtgttctgtgttttgttctgtttgttattgtttgttttcatttccctcagagtccagtctggctcatatctcagcacagggtggtttaccttcmttctggccatggacgcctgttatggcattcacgtctacgggatgataaatgacacctactgcaagtaagatcacaagaaattatttttatgcagctccaa

SEQ ID NO: 122016 - DNA, 201 bp, Homo sapiens
catttcaaccttggagaatctgatgattatgtgcttggggatgatctttagtattagtaaaaagaattttactggggttctctgcattttctgaatttgartgttgccctctctagctaggttgaggaagttctcatgcatgatgtcctgaaatatgatttccagattggttgcattttccccatctctttcagggacatg

SEQ ID NO: 122017 - DNA, 201 bp, Homo sapiens
ttctgatctcttctcattttcaaataagggctttttaagcagatggtgctttaagcaattcccatcattgctgctcctcctcaaaccccagaatgcaggaytgactgcaggttaagttgtctaaaaggcaaagttgttcgttactgtagctcacttccctgagatacgtcttcccattcattttgcatctattgctgcccc

SEQ ID NO: 122018 - DNA, 201 bp, Homo sapiens
taactgcactctgtgttgactctgaaacacatggctgtgctttgttgcactgtattgtgatcaattgttttaacatgtgtgcctccctcactagaccatgyactcttaagaaaatattcatcaccagcttcctagcacagtcagtggcacataataggatcccaataaatgttggttgaaaaagtgaataaatgagtaaat

SEQ ID NO: 122019 - DNA, 201 bp, Homo sapiens
attttgcagacttgtttatgtgattgttttatagtgtgactggtctatgtacctcagtgtgtttttgtagtgctggtaatgctttcctttccatatttagygtttccttcatgagctgttgtaaggtaggtctggtggtaatgtattccctcagcatttgcttgtttgtaaaagattatttctcctttgcttatgaagctt

SEQ ID NO: 122020 - DNA, 201 bp, Homo sapiens
tgtcaattttttatagattttatttattcttgcagagtcgccttttgctgtgattaatcaagccaaccttgattaattaaaccttttaaatttaaaccttytaaaggcttactgtaaattattgctgtgtttattttccacccttattaattatttccttcaactttgttttactttctttgttgtttattaagttgatta

SEQ ID NO: 122021 - DNA, 201 bp, Homo sapiens
ccttaggttttgcttttttttttaattgttataaaaaattaatgtaaaatttagcatcttaaccattcttaagtgtacagttcagtagtatgaagcatatytgcattgttataaaatagatcttcagaagttttttcatcttgcagaactaaaactccatacacattaaacaactccccattcccctgtcccctcatttct

SEQ ID NO: 122022 - DNA, 201 bp, Homo sapiens
tgtcatatagtcaagctgatttttaaaattttatctaacttttatatagtttttcataaacttgtcaattttttatagattttatttattcttgcagagtmgccttttgctgtgattaatcaagccaaccttgattaattaaaccttttaaatttaaaccttttaaaggcttactgtaaattattgctgtgtttattttcc

SEQ ID NO: 122023 - DNA, 201 bp, Homo sapiens
acttgaacccaggaggtgaaggttgcagtgcgctgagatcacgccactgcactccagcctgggcaacagagtgagactctgtatcaaaaaaaaaaaaaaaaaaagagagaaagaaagatacctgagactgggtaatttataaagaaaagaggtttaattggctctgggttccataggctgtacaggaagcatgacactggc

SEQ ID NO: 122024 - DNA, 201 bp, Homo sapiens
aattttttcatttttaatatagatcttacacatttttggtacctctatgtttatgtgttttaatgtcttattgttctagtcaatatgactttttaagtatrattttaatgttttatttttgtcatatagtcaagctgatttttaaaattttatctaacttttatatagtttttcataaacttgtcaattttttatagattt

SEQ ID NO: 122025 - DNA, 201 bp, Homo sapiens
ttttattgttccatataaaccaacaaattatctgtttaaattgattaataatcattaggattttgattgaaattttatctatagatttatatagaatcaayacattaaaatatggactctccccacccaagaacacaatatattgttttatatgttcaaggctttttgaatgtcttatcatacaattttttcatttttaat

SEQ ID NO: 122026 - DNA, 201 bp, Homo sapiens
agacagattccaattaattatggcataatttaaaaatttctttgggattcttgcctattttattgttccatataaaccaacaaattatctgtttaaattgrttaataatcattaggattttgattgaaattttatctatagatttatatagaatcaatacattaaaatatggactctccccacccaagaacacaatatatt

SEQ ID NO: 122027 - DNA, 201 bp, Homo sapiens
tctcaatctaatgagcaaaaagttactgtcttcttattttaatttttattccctctgctagtgagttaacaaacaaacacagcatatgtctcttagttcgygtatattttctcttgtaaatggtcctttgttcagatttctattagcttgtctttatatttttttgaaagagctctgtataaaatgaatattaaacctttg

SEQ ID NO: 122028 - DNA, 201 bp, Homo sapiens
gctacactctgacagatagcttcaaaaagaactgtgcttagataacatctgagcttgctcttttcaccacattttcaaaaatagtatcaacctttttcttrtattctcaatctaatgagcaaaaagttactgtcttcttattttaatttttattccctctgctagtgagttaacaaacaaacacagcatatgtctcttagt

SEQ ID NO: 122029 - DNA, 201 bp, Homo sapiens
gctgttggatggaatgttttgtaaatacctgttaggttcatttagtctgtagtgtagtttaatatgatgtttctttgttgattttctgtctgtatgatctsttcattgttgacagtggagtgttaaagtccgatactattattgtattgctgtctatctctccctttagaactaataatacgtactttatatatctgagtg

SEQ ID NO: 122030 - DNA, 201 bp, Homo sapiens
cattatggtctgaaaagatacttgatatgatctctatgttcttaaatttttaagtcttgttttgtagactgcagtatcatttatcctggatgttctatttkcagttgagaagaatgtgcattctgtagctgttggatggaatgttttgtaaatacctgttaggttcatttagtctgtagtgtagtttaatatgatgtttct

SEQ ID NO: 122031 - DNA, 201 bp, Homo sapiens
accattatggtctgaaaagatacttgatatgatctctatgttcttaaatttttaagtcttgttttgtagactgcagtatcatttatcctggatgttctatkttcagttgagaagaatgtgcattctgtagctgttggatggaatgttttgtaaatacctgttaggttcatttagtctgtagtgtagtttaatatgatgttt

SEQ ID NO: 122032 - DNA, 201 bp, Homo sapiens
caagacattattattattattgctttattcagtcataattcattttgattaatcatatatttattcttttctttgttcttcattttattttcttgtattakttatctttcatctgggagcactctctttttgcctgaagaacatcattcactatttcctttattgtaggtctgttggtaacaaattcttttgttttttgtt

SEQ ID NO: 122033 - DNA, 201 bp, Homo sapiens
ttctttttcacccttatgctgatttttagtttttttttttttttctttgtggttttagcagttttattgtaattggcctgggtgaagttttctttttacakttcctgcttggggtttctaggattctttgtcttggctccttctgaggcctgatatctttcttcagttttggaaagttctcaggcatcattcatcttgtca

SEQ ID NO: 122034 - DNA, 201 bp, Homo sapiens
aaattacagaagtggagggaatagtccaaatattcccccatcactcaaatgcaactcttatcaagattttgtcacatttgcatggaaatattcacaacctrtaagaagagaaagttttaaagcaaggcaatatctcaactcacagccatccacttacctctaatggccagcatcagagacaaagacttctgccttggttac

SEQ ID NO: 122035 - DNA, 201 bp, Homo sapiens
ttagatgtgtaataatggtctggcaccaccagtctctcactgtcttcttgaaatcacctctaaagaagagtttgatctggaaggtcaagcctagcagtgarctgaagctgttctctctgagtgcatttattcatttattcacaaagcagttactggtctatgtgcctcaagattcctaaatctcattgagccaccaaccct

SEQ ID NO: 122036 - DNA, 201 bp, Homo sapiens
aggaaaaaaatatgacaaaaatcggtgtagtgttattgagtgatgagaatatggagaattttttaaatcattttgtccattctttttagtttttgagtttsccatattactttactaattagggggaaaaagtttttaaagcagtttgagtagtttcaattcaataggctgtaccttcagaatatttccagaacataagcg

SEQ ID NO: 122037 - DNA, 201 bp, Homo sapiens
ggagatttttctctctgctaatcacccaaggatgctttacatactctactgagatctaaatttatattgcagatgggccgatgctgatgtcttaaagtacktgctgggaagataatacccaatctctggagaaaagagctttacatttctttttactgagggctgttctgtaatttggctctcctaactctggcttgcccc

SEQ ID NO: 122038 - DNA, 201 bp, Homo sapiens
atgaactttcctcttagaactgtttttgctgtgttccataagttttggtatgatgtgtttccattctcatttgtctcaaggaatttttaaatttccctttygtctacttacccagttggttactttggagcatgttatttaatttccatgtatttgtaagatttccaaagtttttctcgttgttgatttctaggtttgtac

SEQ ID NO: 122039 - DNA, 201 bp, Homo sapiens
aattccacttgaacacagtaattgatctttttaatatgctagtatattctgtttgctagtttcatgttgagaatttttatgtctatgtttatcaggaataktggactttagttttctttttttgttgtgtccttgtgtggctttggaatcagggtaatgctgcctcataaaattagtttggaagtatttcctagtcttcta

SEQ ID NO: 122040 - DNA, 201 bp, Homo sapiens
attggccatttgtgtgtctcactttttcttttgaaaaatatctatttttcaatatattgggttttttttcttttgtttaagtccctaatatattctggatrttaactccttgtcgaatgtatagtttacaaatattttctcccattctataggttgtctcttctctttgttaattgtttttcttgctgtgcaaaacctttt

SEQ ID NO: 122041 - DNA, 201 bp, Homo sapiens
tttcttttcgataacagccattctaaatggagcaaggtgatgatatcgcattgtggttttgatttgcatttccctgattattaatgctgtcaagcattttytcatgtgcctattggccatttgtgtgtctcactttttcttttgaaaaatatctatttttcaatatattgggttttttttcttttgtttaagtccctaata

SEQ ID NO: 122042 - DNA, 201 bp, Homo sapiens
ttcctagatattttattctctttgtagcaattgtgaatgggagtttattcatgatttggttctctgcttgtttattgttggtgtataggaatgctcgtgakttttgcacattgattttgtatcctgagaccttgctgaagttgcttatcagcgtaaggagtttttggggtgagatgatggggttttctaaatatacaatca

SEQ ID NO: 122043 - DNA, 201 bp, Homo sapiens
atgaaagctagcagcaaatagaatcaatatttcaagatgttcctgcctcaggtgaagaggatgaaaagaaagggagtcattttcaaagactgtttaggaamcaatgcacataaatcaatttctaaaaacataaaatgggacactgatttgtgaatacagtatcaagatctctacctggctcatctttgccagcctgttcca

SEQ ID NO: 122044 - DNA, 201 bp, Homo sapiens
ccttatagtatagtttgaagtcaggtagcatgatgcctccagctttgctctttttgcttaggattgtcttggctatacaggctcctttttgttccatatgraatttaaagtagttttttctaattctgtgaagaaagtcaatggtagcttgatggggatggcattgaatctataaattactttgggcagtatggccatttt

SEQ ID NO: 122045 - DNA, 201 bp, Homo sapiens
tgggaggattacatgagaccaggaattccagaccagccttgccaacatggcaaaaccccgtctatactaaaaaatacaaaaattagccgggcctggtggcrtgtgcctgtaatcccagctactcaggaggctgaggcagaattgcttgaacctgggaagtggaggttgcagtgagccaagatcttgccactgcactccagc

SEQ ID NO: 122046 - DNA, 201 bp, Homo sapiens
agaccaggaattccagaccagccttgccaacatggcaaaaccccgtctatactaaaaaatacaaaaattagccgggcctggtggcatgtgcctgtaatccyagctactcaggaggctgaggcagaattgcttgaacctgggaagtggaggttgcagtgagccaagatcttgccactgcactccagcctgggtggcaaagtg

SEQ ID NO: 122047 - DNA, 201 bp, Homo sapiens
ctgctatcacttctaaacattggtctctaaaactaggttggcctttaggcattttctgtgtgaaattcaatctgtttaaatttgacttatctttcctaacsaaaatgtaattgagttaccaagtccacagtcacttacttcaaaatattctttgattatatgctttgtttctatctcgaggctctcattgtctcaggtcta

SEQ ID NO: 122048 - DNA, 201 bp, Homo sapiens
actgctgagctttgagaaggtctaggctaaagatgggcaaattaaagacaattccacactgtggtaagataatcaactactctgattacctagtaactaasctaattgggaagcagtgtagtatatgggataagagcaggctgtgtggattcagacctgtgtgggaattccacctctgctgtctacatgctagatgacttc

SEQ ID NO: 122049 - DNA, 201 bp, Homo sapiens
atgatatagaaactatggtcttcttggcccttgtgtaatagccaagtggatgctgttaaaagtgaatctatccatggtgcctttcctatttctgtacaggrttttgatttcattttaaatgaatgtcataaaccccaggtctgaaaactaatagaatttttgcatttacctactgatccataacctttaagttagactgtg

SEQ ID NO: 122050 - DNA, 201 bp, Homo sapiens
gtgtagtatatgggataagagcaggctgtgtggattcagacctgtgtgggaattccacctctgctgtctacatgctagatgacttcaagcaagttccctgrtctttctgaatctcagttttcctgttgataaaatgaggtaataatagtacctacttcgtgggactattatgatttagtaaaataatatttataagacaca

SEQ ID NO: 122051 - DNA, 201 bp, Homo sapiens
acacagtaagttcttttttttattattactttaagttctgggatacatgtgcagaatgtgcaggtttattacataggtatacatgtgccatggtggtttgytgcacctgtcagcccatcatctaggttttaagccctgcatgcgttagttatttgtcctaatgctctccctccccttgcccccgactccctgacgggcccc

SEQ ID NO: 122052 - DNA, 201 bp, Homo sapiens
atacatgtgcagaatgtgcaggtttattacataggtatacatgtgccatggtggtttgttgcacctgtcagcccatcatctaggttttaagccctgcatgygttagttatttgtcctaatgctctccctccccttgcccccgactccctgacgggccccggtgtgtgatgttcccctccctgtgcccatgtgttctcattg

SEQ ID NO: 122053 - DNA, 201 bp, Homo sapiens
ggtgcccaatgaagtcttttttttttaacttgtcaaattacttagtacagaaaaatagctataattcttttctttcttttttttttctcttttttttttttgagacggagtctcgctctgtcatcaggctggagtgcagtgacatgatctcggctcactgcaacctctgcctcccgagttcaagctattctcctgcctcag

SEQ ID NO: 122054 - DNA, 201 bp, Homo sapiens
tttagtagagacggggtttcaccatgttggtcaggctggtctcgatctcctgaccttgtgatccacccaccacgacctcccaaagtgctgggattaccagygtgagccactgcacctggccgatggcaagtttttacaaggaacctgagtttgtagtcacttcacaggcattacaaggacaagggaggaatctccaagttt

SEQ ID NO: 122055 - DNA, 201 bp, Homo sapiens
gtcaggctggtctcgatctcctgaccttgtgatccacccaccacgacctcccaaagtgctgggattaccagcgtgagccactgcacctggccgatggcaartttttacaaggaacctgagtttgtagtcacttcacaggcattacaaggacaagggaggaatctccaagttttattgccagaaagatgctgggcccttggg

SEQ ID NO: 122056 - DNA, 201 bp, Homo sapiens
aggcaggagagattaagtccacagaaactgcggacttaaccacagccacccctccccctaagtgctctgtcccaggaagatgagagttgtatctgtaagcycctgactggggctgctgcatttccttcgaagatgtcttgcccagtgaggtggaatctagagaagcagtctggccacagctgctttgccatgctgtggtga

SEQ ID NO: 122057 - DNA, 201 bp, Homo sapiens
tgaacaccttggaggtacgaatggattctaagagacaaactcatctcgtttagagtgaaaagatgacaagcagaggttcgcagaagccacatacaaccaaygaagcctataaggtagctgagaattaaacaaaagcacctgttccgattaccttcattgttcctggttagttagcacctccctttcctcaacagaatgccc

SEQ ID NO: 122058 - DNA, 201 bp, Homo sapiens
gtctctaattttctgaagattagattcattagtttaactcatggttatagtttttgtgtcaaccgtattgatgtatacatcaataaacacaatctttcacyttcactcactcttctgtctcctccatctccttccagttcctacattattcagaatccttggcaattcatatgtgttaggtgtgaagatatggaattgtca

SEQ ID NO: 122059 - DNA, 201 bp, Homo sapiens
gattttcataagtttgatagaagaatgccattaatacttctcatttatttttcattatctgttcacattaaaataaattctctcttgtaattttcttatgyatacaaataattggaatatttatgtaagattttgtgtttttttttagttttagagtatgaggttattataagggaactgttgtagattaaacttttttaa

SEQ ID NO: 122060 - DNA, 201 bp, Homo sapiens
tgtatgtaaaaataagtcctagaattcttttacaataatgacaagcatggcctttcaatttttcaacattctgaaaattgataaacaaagtcatttacccwgtctctaattttctgaagattagattcattagtttaactcatggttatagtttttgtgtcaaccgtattgatgtatacatcaataaacacaatctttcac

SEQ ID NO: 122061 - DNA, 201 bp, Homo sapiens
ctcatttaaaccttcaataattatattagatgggtactcttattttccccaattttaggtaagaaaacgtatgctgtgtgcccagggttgcacatattgaytcacttagtgttaccagtggagggtgtccaggttctgggcgttttgaacaaagaattgcacaaaacacacaaacaaagcaaggaaagaatgaagcaacaa

SEQ ID NO: 122062 - DNA, 201 bp, Homo sapiens
ataacataatttcttctttttaaatggttgttttaaatagaaaaatgtcgtacttgaatattttgatttttatgggggaaaaatttactactatgaaaaamatagaataaaactatgtgaaagaacgcctccatttctccttcaaacccacactgctgtccacaggtaatccctaataagagtctgttcctttttctatgc

SEQ ID NO: 122063 - DNA, 201 bp, Homo sapiens
ttttaccttcccccactcactaactcctgctgctgctcacatccctagcctgtgtgcggtgcccctcccctttcctcccacagtgacctgagcacagctcrggtatttatgcctctgttctccccggtaggtttaaagattctttagagcaaagatacagaattttcatcttcccttttccagcccttgtgcagtacctgg

SEQ ID NO: 122064 - DNA, 201 bp, Homo sapiens
ctgtacaggaagtgaaaaccagaatggtcgtatgagtgctcaaagtacagtttctactgaatgcatgttgcttttgcataatcataaaattaaaaaaactrtaggtcaaaccatcataaattggggactatctgtatgtattaactcatttaatcctcataacccaagcctggtaaattggcttcccagatggggtttctc

SEQ ID NO: 122065 - DNA, 201 bp, Homo sapiens
tctcatgtaatctgttaaatactgtacaggaagtgaaaaccagaatggtcgtatgagtgctcaaagtacagtttctactgaatgcatgttgcttttgcatmatcataaaattaaaaaaactgtaggtcaaaccatcataaattggggactatctgtatgtattaactcatttaatcctcataacccaagcctggtaaattg

SEQ ID NO: 122066 - DNA, 201 bp, Homo sapiens
aaacctggcttaccggaaacatgctcagaacacttaaattagcctacggttggacaaaaatcactaagcacaatgtgcattttatgatgaagtgatgaatrtctcatgtaatctgttaaatactgtacaggaagtgaaaaccagaatggtcgtatgagtgctcaaagtacagtttctactgaatgcatgttgcttttgcat

SEQ ID NO: 122067 - DNA, 201 bp, Homo sapiens
gatttaacccacagcatactaggagctctggccaacaactttaaaatgggtcttcaccatttggaggcatgattatgagctaaaaatactacgtgtaagayattgtggcctttgatttctacccttcaccaaaaatatcttgaggactttgtgccaggtgggtgctaggaaaaaaaaaaatgagacacagcctttgcagtc

SEQ ID NO: 122068 - DNA, 201 bp, Homo sapiens
acaggtttcaagtattagagtggggatatctttagggagctattattctatctaacacagggaaaaaaaggattttctcagtcctttaagtatcagcctgrcggtgacagaaagtaagtgtttgttttctgagggctgagactgatcctgtagggcacagttaaaacatagtggttctgccctgaagtgtcatctgctgct

SEQ ID NO: 122069 - DNA, 201 bp, Homo sapiens
taaaatgggttgttagggctgcattccttctggaagatccaagggagaatctatttctttttccagcaaaaaatgcaagactgcctacatccttggctcayggccccactccaccaatttctgcttccattctcacatatcctttcctcacattgctgtttctctatttctcttttaaggacccccatggttacattgggc

SEQ ID NO: 122070 - DNA, 201 bp, Homo sapiens
ttacctaatttgcattcaaagaatggtttaaagaatattggcaggaatccagtaaactagcttgagtcagatgaacttcatattaagaatgggtggaaatktataatattggggtttggctgatgctacaggattttcttggtcagaatcataaaaagatagagaagccatgctaattctgacactttgaaatgtaagagc

SEQ ID NO: 122071 - DNA, 201 bp, Homo sapiens
cccctaacaaattagtggggtttttcctagagttcactatagtttaataagcgggatacacccagatttttgattcaacgatgaaataaaatgaatgaagsttttatttatatactctgtgctttgctacttcaactttgtgcaaatggaaagaagctttattgcattcagagagaattagatttggaacttggtcagtgg

SEQ ID NO: 122072 - DNA, 201 bp, Homo sapiens
cctctttttcaccctaatgtgaagcatgaagttagaatcatctctgtgctccctaatagagcctcatgcagagctgttatcattctggataagggattcakgggcatttgcatccataccccccaaatagtggttcctgagaaaatttctctgacatgctgagaaaaaataaagaattcataaagttgaaattattgaact

SEQ ID NO: 122073 - DNA, 201 bp, Homo sapiens
aattccatggcaggctgtggtgactatgtatttattggactctgttcatatggaaagttgtatgcatacagaaacaggaacatttgctgtaatacttaagrgagtgaaagaggaatgtacagaaggctaaaagaggtgagtattgctttgtcaattctaatgtctttctatgatgttgatatttggatcatctaagtaagt

SEQ ID NO: 122074 - DNA, 201 bp, Homo sapiens
gtagcagtgactgagttttactcaggggatgcagctttaattgatctgtgcagtcccctcatcccatctttttataagctccccaggtgactataatgcgyggccaaggctgggaaccactgcattggaaaatgcagaatttatctctttaattcagacaaacatatgaaatgtggaccttgtgtattaacatgaagcctg

SEQ ID NO: 122075 - DNA, 201 bp, Homo sapiens
aagttgcccgttcttgaaggacactgataatgttctcctcccctgccctttcctttttgttgccagaataacctaatctaaaccagaaactccatcttttyttccccagggctcctatagacccataggcggctagagtgtacctgtgagcctctggggagatgtctcaccgccagagagctgtccccaactcaggacctc

SEQ ID NO: 122076 - DNA, 201 bp, Homo sapiens
tacaaatttttgttttacaataatttgtatttattcattcattcattttccaacccatttattccagctcagccgtgaggatggctggagcctatcccagmtgcttagggtccaaggtagtaaccagcctgggacaggatgtgatctcatcacagggaacacacacacacacacacacacacacactcacactcagtcaga

SEQ ID NO: 122077 - DNA, 201 bp, Homo sapiens
attcagagcaggttctgtgataaggtgacatttagcaaaaacctcaaggaagtgggagagaaagtcatacagatattcaaaggaagaatatttttaatagrggaaatggcaagaatacattccctgagctaggagcttgattctgagattcaaagagcaagggaaccagtgttgataatgataataattacctcacaaggc

SEQ ID NO: 122078 - DNA, 201 bp, Homo sapiens
aaatcatcaagaaattcaaagacctcaactcctgcctggccagggcccagagagaagcagttaggatagcctctgatacccagccttgccagcaactaatstgccagatgatgaaattgaaatatttgaaatataatccatacattctttttccaagacaggtggtgaaatggtctagtttttacaaaaggctgagaaaat

SEQ ID NO: 122079 - DNA, 201 bp, Homo sapiens
gaggagacactgtcttcatttgcctctttacctttcccattttaaagctgttgactaacttcaaaaagaatctttttgaattccttttactcatagaaagmagaacaatggaatagtaaggaagaaaagagaaatcaaggctgcagaagagaagacagaggcacagggagagcacagagtagagagtaaggggtaagagaa

SEQ ID NO: 122080 - DNA, 201 bp, Homo sapiens
tgaggagttggggagatggtggtaagtccacaaacttgggtaaggcacccaattttacaggagcaacatactgaaggaaatccgtagggaaaaggtgaaayggtgtatttaccaatgatggtatttgggcatcagggtctggaagctcttcttcagatatggaagcccaggcttggtagtgtagtggactttatggtagag

SEQ ID NO: 122081 - DNA, 201 bp, Homo sapiens
gtgtaacataacaggggtactttacctgtggggagaggagtgaccactgaaaacactgttcaaaggggtcattcatagtcgtgcatttataaatttttttwaaaatagctttcttttcctattataaaagacatgtatcttggtatatagaataatttgatatatttgataaagaaggtattgcctgggaaaggatgttga

SEQ ID NO: 122082 - DNA, 201 bp, Homo sapiens
ccactttgatgaaagggtctggattatttgcaaagtcttgtgctaggtgaaggtgggctctttcttaaattctgaaatgcccacgagtctttggtaatgtkcatagtgaagcatctgagctgagcctgaggcttcccaggaggctgtgccaaggacaaaacacactgaggatgttgaccatggcctcctgacagaatgaaa

SEQ ID NO: 122083 - DNA, 201 bp, Homo sapiens
gcagcttctaaacatgtcctgccaggtgggtgatgaggtaaagactgcccaggcggccttgtgcacaccacatacttgtggagccactttgatgaaagggkctggattatttgcaaagtcttgtgctaggtgaaggtgggctctttcttaaattctgaaatgcccacgagtctttggtaatgttcatagtgaagcatctga

SEQ ID NO: 122084 - DNA, 201 bp, Homo sapiens
atcatttcagtttaatgcttttacatgcaaaattcaatttgtgaatttatctgctatctaaatgttaagataaaataagatagaaatacaaaataaggacyggagactccatataagctagaaatttttggacaaaggaaggattacaacttctactcaaagggtttgagaaacaggtagataaaatatctagttaccaat

SEQ ID NO: 122085 - DNA, 201 bp, Homo sapiens
tcatctgcttcatatctgaccccaaattatactgcccatttggaggcattgcttctttttcctctcctggattcttgattgttggtgctctggtgagaaamcagaaatgtcttatgaaatctttatagctacgtaggaaacttgagcctgccattttcacccacccagggaaggtatttgcctcccgaaaccgtagggtgg

SEQ ID NO: 122086 - DNA, 201 bp, Homo sapiens
tatggaataacttctaaatgcaaatatggatgacatttgatttttctgacatgtttggaagcagcctggggcaaggtggcagtgaatcagtaaacatcacrggaactacactgggaatgtatcaactgtgcatactattaatgggtttatgccatatgttccataataacatgtttgctaacatgggattggactgcctgg

SEQ ID NO: 122087 - DNA, 201 bp, Homo sapiens
aaagagggtatcagcagaaaaataaaatacaggctcatcataaagcaatcaactgttccctgactttgcccagggtcaacattacatattagtatgctacstgctgacaaatatttgaccttttgagtgacttacagcatttctgtttctaacctggttaggtaaagatcattatgtgttaacacagaccacaacatattc

SEQ ID NO: 122088 - DNA, 201 bp, Homo sapiens
aaatatacagtaggaagaaacataatcccactaaaaaatacaattgccgtcattcttggccactagaaagaaatttcaaaaaggtcagcctctgctccttycttccctaagaagtgaatcgatgatatagattatctcatgagcccatgaacagatgcccagttgttttggcagaatttcaaccctcgggagagaatctta

SEQ ID NO: 122089 - DNA, 201 bp, Homo sapiens
gactggttcagattttaattatctgataaaattctccaacattttatctttttgctgtataatttatctatttttcttattcatgttattcattttttttrtaatgtttgtcttaatatctacatcatgtgtggatttgtttctgttgcctatttctttttctcttgggttttggacccatggccctgtctcttgccatgc

SEQ ID NO: 122090 - DNA, 201 bp, Homo sapiens
agttgaaaaatggtatacaagatttattttataatgtcgcttagaaaaatttgaaaattgactgtgtattagaaattattcactcaaatgcattattcatrtaacatttctgttggttttttttcaacataaaaatttcaagagaaaacctagctcatttcaaaatccagattttaaaaaggttatttttgatttttattt

SEQ ID NO: 122091 - DNA, 201 bp, Homo sapiens
tgttggttcacatcattggtgttgagcagcagacaggccttcagctactcctctttcagcttctcggaatcgttagccaaaggtgtgccaactgtatgacraaggcttttaacttcttgtgcgcaaccattcccactgatggtagaagtagtgagaaactggaaggagcctaggtccatccccatgtgttccagtttattc

SEQ ID NO: 122092 - DNA, 201 bp, Homo sapiens
acacataccatacacacacatacacacatacacacacacacacaataataaacatactggtccaaccacccatagttttctacttctagccttcactactrcttctgatcttgtgcttatttgtggttcatctggaaaaaattacttactttggaggctcttttatctgcatggcttatagatttcagagacctggctaag

SEQ ID NO: 122093 - DNA, 201 bp, Homo sapiens
aatccaaattttcaaacaagttttaaataggtaaactttatcatgcttttatctccctcacaagatttactaagcattgggttcaaaaagaaatatttaarctttaatttttaaaggaataactactgacagttaataatattaagaaaaagaacatgaaaatgtcttttgaatgacacattttaaaaacattagtttgaa

SEQ ID NO: 122094 - DNA, 201 bp, Homo sapiens
tgtgtagctagtgattagtgcagctctacatcacgaagatacgtatagttggttcattaatctttgtggatatgcagtatgggcattctccatgagttaaytcatttttcatacttttcaaccctttgtcatctgtactcttttctaggagaatccctcattttaatcttctattttattattctagtttcaactattctg

SEQ ID NO: 122095 - DNA, 201 bp, Homo sapiens
acattttctggcttcatagataagccttgtgttatatcaactctgtgacatagattaaaattacaataatggattaaaagtattattttatctcatctaaracatgtaatattagtactgtaatgtcttttagtacttacactaatatatgggctgacagtggtgaaacaaatactaggttcctgaagctttcctaagcat

SEQ ID NO: 122096 - DNA, 201 bp, Homo sapiens
ctaagtagataacgagtttaactgcagtatcaaatttcatgtgggagggggtataagtaggataaaattgtcttaaccaggctccttagagggacaataawgaaaaaagaaaaggttgagaaaaatgttataatgctgtttgaataccaccattgattagttcattttatttttctccttaatagtcatttggtgttttct

SEQ ID NO: 122097 - DNA, 201 bp, Homo sapiens
ttgggctttcactgcagtcagaataaacactgaactctgtatcatggccaataaagaaccatgctcccatctcctctccagccaccctggccttctattcycttaacatgcctaaccagtttctgtcatgggcttgcttgctgtttcctctccctgtacgttcttcgggcccacgcgtttctgtggctggccattcttgtc

SEQ ID NO: 122098 - DNA, 201 bp, Homo sapiens
tgaagtgtgtgcctgtgtagattagtatataggagagaagtttttatttcttttcagatgattagttatgctttgccagtatttcctcagaacttctaagmgtgttggtttggggggatgtattcagtattgacaattccacgtttatctacattcagctgtcaggttggttatttaaccattccgaggcttttcttttct

SEQ ID NO: 122099 - DNA, 201 bp, Homo sapiens
gggatgaagtaaaaaattcactccctcacaatggattaattttttttctcagtggagatgccatgcggtcagaatttcttgaaaatgacccacaagcttaytactaagcagctttgggccaatgagcagtcttttaaagaaaacattttatttatttttctaattggagaataatctatgttcattgtaaagaaagaaaat

SEQ ID NO: 122100 - DNA, 201 bp, Homo sapiens
agatcttagcggtcactgcatgctgagtgcatcacgtctgtaacagagctgggagcaagtgttagggtgatgttgccagataccttcttttcctttttttwaaaaaaatttactttaagttatgggatacatgtgtagaatgtgcaggtttgttacacaggtatacatgtggcatggtggtttggtgcacctatcaaccca

SEQ ID NO: 122101 - DNA, 201 bp, Homo sapiens
attttaattaatttaaacttaaatgtaaatagccatgtgtagctagtgattagtgcagctctacatcacgaagatacgtatagttggttcattaatctttrtggatatgcagtatgggcattctccatgagttaattcatttttcatacttttcaaccctttgtcatctgtactcttttctaggagaatccctcattttaa

SEQ ID NO: 122102 - DNA, 201 bp, Homo sapiens
tggaagataaataaaaggggcagcaggcagtgagtagttgttacctaatttgcattcaaagaatggtttaaagaatattggcaggaatccagtaaactagyttgagtcagatgaacttcatattaagaatgggtggaaatttataatattggggtttggctgatgctacaggattttcttggtcagaatcataaaaagata

SEQ ID NO: 122103 - DNA, 201 bp, Homo sapiens
actactatagttatataatgacaggaaaatttcaacattctaatctctgtggacaggacagctcccagagtctgcacagaaagacctaggaaggcagcatygtgtttgaagttcggcacctgggacccagtattgctgaagcataaccccccggagtctacccctacagccccagtgttgctgaggaaggcatccaaagag

SEQ ID NO: 122104 - DNA, 201 bp, Homo sapiens
gaaccctttactctgctgaatcttgaggcccttgcaaatttgtattagctgatgtctacgtggtgcagggaaagcaaccatttctggtactactgacataygacagaagtgatattgcattaaaatggaaaagaaagagaagactcatatcccaggaaggaaggaatctgggcctgtctcaggcaaaactgtgaattaaat

SEQ ID NO: 122105 - DNA, 201 bp, Homo sapiens
tagggtggacagggaagggttagagttaaatcaggtggtagggatgataatgaaagttaactaaaacttaaacaggcatcataaacaaagagaatacatcmaaaagcattctaattatgtcagctagtgtcctgaatcccccagtcctgatacctaggatacatagataatgcacagggatcttcgatgcctgagcataac

SEQ ID NO: 122106 - DNA, 201 bp, Homo sapiens
aaagagaatacatcaaaaagcattctaattatgtcagctagtgtcctgaatcccccagtcctgatacctaggatacatagataatgcacagggatcttcgrtgcctgagcataacgcaatgagaactattataatagccaccaagctgttctccctctctttgagccattcccttcccaggtcagcactttcagcaaaacc

SEQ ID NO: 122107 - DNA, 201 bp, Homo sapiens
caccaagctgttctccctctctttgagccattcccttcccaggtcagcactttcagcaaaaccgtattgcggtctaaacataagaattgtgcttaggagaragtgctaaagttgattcaaagaggcatgtccacaataggtaacccaaggtacgcaagaagaaattccaggggccacagtaagactcaaatcaaaatcaag

SEQ ID NO: 122108 - DNA, 201 bp, Homo sapiens
ccctctctttgagccattcccttcccaggtcagcactttcagcaaaaccgtattgcggtctaaacataagaattgtgcttaggagaaagtgctaaagttgrttcaaagaggcatgtccacaataggtaacccaaggtacgcaagaagaaattccaggggccacagtaagactcaaatcaaaatcaagaataatatttagtg

SEQ ID NO: 122109 - DNA, 201 bp, Homo sapiens
agggtagccatctggtccggctgttctttgatcctttccccttggcccacacagtgttcagcacagatgagggaatgataacaaagtgctcagtggtattktcaatggcctagtttttcaatggcaattcaaaaatattgttgcactggagtgcctccagatgaaggtcctagaaatggtaaaatgtcatgaaatacctaa

SEQ ID NO: 122110 - DNA, 201 bp, Homo sapiens
ggaatgtttagcttggagaagagaaaagtaataataggcaaattttttcagtattcagccccctacctgcctccctgccaacatactacacctttttcatkatttttattaactgaccttctggctatattcatcagtgctcaccacttctttttttaaaaaaccattttctcccctcagtgcatagggtatgtctcgaat

SEQ ID NO: 122111 - DNA, 201 bp, Homo sapiens
atgagtaagattagtaagatgaggtcatactgtagcagagtgagcccctaaaccaataagacttgtgtccttatttttaaaaatatcatgcggaaagatakaaattcacacaggaagaatgctatgtgaagactggggttatgtttccacagatcacggaactaccagaagttagcagagaggcctggaatagattcttcc

SEQ ID NO: 122112 - DNA, 201 bp, Homo sapiens
ataaatcatgccacagtgagactggaatctactttcatagactcccaggtgtccttgttctcaaccactggtctttacttctctgaagagcctgaccttaygaattaaattctttccgattgtaacattagtcagaggaattggggaactggggacttttgtttattaatccttttatcttctgcttttttgcccagaaag

SEQ ID NO: 122113 - DNA, 201 bp, Homo sapiens
agggagaatctatttctttttccagcaaaaaatgcaagactgcctacatccttggctcacggccccactccaccaatttctgcttccattctcacatatcytttcctcacattgctgtttctctatttctcttttaaggacccccatggttacattgggccagaataatccttcaaattcaagatccttaatttaattgca

SEQ ID NO: 122114 - DNA, 201 bp, Homo sapiens
tgccttggagattatagatatacatacatacatgtatgtgtgtatacatatattatacatttccttcttttttctattgtttgcttttgatgagcatatgsttttcctgtttgcttttgtttggtttggcttaaactttttaaaataggtttttataattggcaattaaaaatatacttttttgctattaatgagtatata

SEQ ID NO: 122115 - DNA, 201 bp, Homo sapiens
ctcaatctaatgagcaaaaagttactgtcttcttattttaatttttattccctctgctagtgagttaacaaacaaacacagcatatgtctcttagttcgcrtatattttctcttgtaaatggtcctttgttcagatttctattagcttgtctttatatttttttgaaagagctctgtataaaatgaatattaaacctttgt

SEQ ID NO: 122116 - DNA, 201 bp, Homo sapiens
ggctagctagttttcccagtacatttattaaataggaaatcctttccccattgcttgtttgtgtcaagtttgttgaagatcagatggttgtagatgtgtgrtgttatttctgaggtctctgttctattcctttggtctattcgatttggtaccagtaccatgctgttttggttactgtagccttatagtatagtttgaagt

SEQ ID NO: 122117 - DNA, 201 bp, Homo sapiens
ttctgccttggaatttctttgaagttttatcatgttctcccttcatcatgtccttccctttgtgacttcagattttctgtgggtagctgtaatttcctgcrgaacagtgtctactagattccctctgagcatggctggtgcagtggtaggattctgtgaaacgttgtcagatgtgtgagtgtgcagattgataaaacagcg

SEQ ID NO: 122118 - DNA, 201 bp, Homo sapiens
agagcaatgcaattaatgaaatgtattttggtttttcattagttagagttagccctcagggtatcacccagacatacctataagccctagagtcatttgcrgggaggtatcagagaagagcttagcatgctgttggttcatgtttttatgtgtttatttcacattgacttttgccgtgagctttgagggagacaacaccat

SEQ ID NO: 122119 - DNA, 201 bp, Homo sapiens
agtttaggccccaatttcaaatattttctaccccaactatgttatgcaatatattaatactaaatatgccagtctattttcttgcttagtaataaaaatayaacgtgttgagataaaatatttctggtagctaatcaatattccagttctcaattatccatgctagattatattatgcattaatttgattgcatgctctgc

SEQ ID NO: 122120 - DNA, 201 bp, Homo sapiens
ccattcatctgtctataaacatgtgggttgcttccacttcttgactattgtgaatttcttttttaactaagtgtatttgaaaatatacagtttctgtatcrgttccattttaaattttctctctatgaagatgaaggaagaatatttttatacacttgaaaacttaaaactctttgtcacttaagccttctgtattagtac

SEQ ID NO: 122121 - DNA, 201 bp, Homo sapiens
aaggaagaatatttttatacacttgaaaacttaaaactctttgtcacttaagccttctgtattagtacattctcatactgctataaagaaatacctgaggsccaggcatggtggcttatgcctgtaatcccagcactttgggatgctgaagcaggtggatcacctgaggtcaggggtttgagaccagcctgtccaacttgg

SEQ ID NO: 122122 - DNA, 201 bp, Homo sapiens
aatttgtaaaataatgtagaaaatataaagcctcttgctgtttttctcagtgataaagcagcaggaccgcagcaggaaccaaccatgaaaaatgtggccayctcgttgagctttgcactaggaagctacttcattttcacatacaaggattctccctattccgtgttgcaaataaaaattagtaaattagtagtactaagt

SEQ ID NO: 122123 - DNA, 201 bp, Homo sapiens
aatgacaatattttatgcttcctattctggtttccaaagcagcaatgtggccatcccagtttgctagagcctggaaggattcttgtatgaaatgcaaattyagtctttgatctacattttgtaggtcaacaacctcagtttcgtggtggtaattacagggctcacaaggatgttgttcttgagtaatgaatctaatatatt

SEQ ID NO: 122124 - DNA, 201 bp, Homo sapiens
gcacacattttgtaaccctttcatgagaggtgggatcgtgcatatagtgtttgcatatcccagaattgctccctgaccagcacagctttttgggtaagttwaatatgggggtgattatgcttgagaatgttcactggaccacaaggcacctcccatattctggagatgtgtgtgagctgcaaaaggggtacgtgagctcca

SEQ ID NO: 122125 - DNA, 201 bp, Homo sapiens
ttcatgaaaaaaattccaattttgggtctgttagtatattttatcatttcccccattctcaattctttttcctctaaattcctttccctctcagttaatgmcaccactgtcctatctttccatatacccagaattaaaacttcagtgtcaatgggaaaaactggtcataacatcatctattttaattaaatttaagtaatt

SEQ ID NO: 122126 - DNA, 201 bp, Homo sapiens
agatgtgtgtgagctgcaaaaggggtacgtgagctccaggaacaggtagcatcatttccatcagctcagccagactctgttgtgcatatgcggcatgctgrggattgagacgagagctacagacacaaagctcaaacagctccagttgttgctctggaggagcttgtagtctgcgtcagtgctacttagagtggggtctgt

SEQ ID NO: 122127 - DNA, 201 bp, Homo sapiens
taatgacaccactgtcctatctttccatatacccagaattaaaacttcagtgtcaatgggaaaaactggtcataacatcatctattttaattaaatttaartaatttatttacttaaaaaatcaagatgaaaatacctaatttaaattaccactgaaggctagcattcatttccatggcatggccatttatttgttctttg

SEQ ID NO: 122128 - DNA, 201 bp, Homo sapiens
cattgctcttgctgtttccccaaacctctctgccctgatcatccaatcgaggcagtgaggttatggcttgtacaaattttgcgtgtcctataacatcaccsacctgtacaggggagttgggagttcctgatgctaccagggggattttggtattgtggtgttttatgaccctctcctttcctgtggggtcccaaggaggtg

SEQ ID NO: 122129 - DNA, 201 bp, Homo sapiens
ttaccagctctggggcaatggctcttgccttgtgtctgtgtcatgaaaagcactgtcttcagacagactgtctctttcaagaacgctcaggctaagtaacyacctgttactaaaactataacattttgccattataaaagtaatactttctggccaggtgcggtggctcacgcctgtaatcccagcactttgggaggccga

SEQ ID NO: 122130 - DNA, 201 bp, Homo sapiens
gtctcgctctgttgcccaggctggagtccaatggcacgatctcagctcactgcaacctctgcctcccaggttcaagcaattctcctgtctcagcctcccargtagctggggttacaggcacctgtcaccacacctggctaatttttgtatttttagtagagacaggatctccaactcctgacctcaagtgatccacctgcc

SEQ ID NO: 122131 - DNA, 201 bp, Homo sapiens
taaaaatacaaaattagccaggcgtggtggcatgcacctgtaatcccagctacttggagggctgaggcaggagaatcacttgaacccaggaggcaaaggtygcagtgagccaagatcgcaccactgaactctagcctgggcaatagagcgagactctgctcaaaaaaaaaaaaggaatactttcttcttaaaagtaaattt

SEQ ID NO: 122132 - DNA, 201 bp, Homo sapiens
tcctcacatggacatggacttttctctgtgcatatattcctactgtctcttcctcttatttatttttttgagatagggtctcgctctgttgcccaggctgkagtccaatggcacgatctcagctcactgcaacctctgcctcccaggttcaagcaattctcctgtctcagcctcccaagtagctggggttacaggcacctg

SEQ ID NO: 122133 - DNA, 201 bp, Homo sapiens
atgagttactgtgatggagtttttaagaaggaaactgggaaggacaggtgagccctctctgaagcagctttattgtcttttattatcttttatgctaaatyttcgccaattccttttgcaggatataaaatgaacagttatttatttacgctgattgttatatgttttgactattatgattacttgataagccagcctgag

SEQ ID NO: 122134 - DNA, 201 bp, Homo sapiens
ttacataaattagctcatttactgcagcactctagtgaggtggacattattatccctattttgcagttgaggaaacttaaggctcagactgtttcacctaytcagatcaaatagctaataaggaccaaagtcaaaattcattggacatggggctgacttgaaaagcctgtgttcttttgggtatgcattttactggctacc

SEQ ID NO: 122135 - DNA, 201 bp, Homo sapiens
tgagttactgtgatggagtttttaagaaggaaactgggaaggacaggtgagccctctctgaagcagctttattgtcttttattatcttttatgctaaatcktcgccaattccttttgcaggatataaaatgaacagttatttatttacgctgattgttatatgttttgactattatgattacttgataagccagcctgagg

SEQ ID NO: 122136 - DNA, 201 bp, Homo sapiens
atatggcatctctagagcatggcaactctgggaaactgattgttgcttaaagaaagtttaaagtatttgggaagtaatttctcttttatttttactccctyaggaagatttggatttgcagcctttatcactaacttggtgagaatttttttgtaaagttgtcaaatctataggcctcagaaatggcagttctcatacaaa

SEQ ID NO: 122137 - DNA, 201 bp, Homo sapiens
agcctttatcactaacttggtgagaatttttttgtaaagttgtcaaatctataggcctcagaaatggcagttctcatacaaatcccagtaacgatgctaayatcattcatccagtgtcagtcaatcctaggtgcttgaaaaacatctcatttagtctttacaatagcttatgaagttgatacttttgtctcagtctttaaa

SEQ ID NO: 122138 - DNA, 201 bp, Homo sapiens
aaatggcatatatacatatattcactgttagtttttcactagtgatgtggtatgctggaaagaataaaatatgtagtatgatgttttacgtagaactgcttaaaaatgcctgtctcttctcctctttcaggtctctataaagtttctaacttgttttactttttaccagcaattctgtctcacttcctggcagacttatat

SEQ ID NO: 122139 - DNA, 201 bp, Homo sapiens
tctctcaggagtggactggttcttgcagaaatggataagttccagtgagagtgggttgtcataatgccaggatgcccctcaggattccctctctttacacrcatatgctcttcctttgactttccctgccatgttgtgacgcagcaaaagcccttgcaaaagccaagcatgcttttgaacttctcagcttgcagaactatg

SEQ ID NO: 122140 - DNA, 201 bp, Homo sapiens
ctaaatgtttgctttgttttataaaatcaagctaagagaaataaatgttaggtttcacataaaaaaagtccttttcagaaagagggtgctgtaagtatttycattctctcaaagcattctagagacagaaaaagtgttttctaaccccttcccacccccaccattcttttcttttggtgcctggtgaagagtacattaaaa

SEQ ID NO: 122141 - DNA, 201 bp, Homo sapiens
ctggagcattgcttacagtaggaaatatttggaaataaatcaaatgtctattttttgttcgatcatatttttctgagaagaaaggattgattaaataaatsaggatttattcataaaatggaatactatgcagctattaaaacaaggaagctctgtcactactcaaagctcaaatataagttgataaagcaaggtagggga

SEQ ID NO: 122142 - DNA, 201 bp, Homo sapiens
agaaaacattttattatgagataattatagattcacatgcagttgtaagaaataatacaaagagatcccatatatctttcatccagttttctccaatgatracatcttatgtgaggagtttaatgtcacaattagaaagttgacattaatataatccactgaccttattcatatttcaccaattttacatgcctttgtgta

SEQ ID NO: 122143 - DNA, 201 bp, Homo sapiens
ctgtatcagtcatgagacttctttcctccaaaaaacttacttttgaacttttaaactctattaacattcttatctattatttattatggaactagatatamccacttatagtaattgtctcaaatctgatttctttccatctatattacatgtagggtagtacgatgtagtggttaaggacacaactctagagagagactg

SEQ ID NO: 122144 - DNA, 201 bp, Homo sapiens
aaccttgtggtgattctattgcattatctttatttcaccaaggaagaagctgaggcacagagatgttagttacattgcctaaagtcacacagctagtaatsatggagctaggaatataactcagacactctggttctgagtaaatgccctaaacccatgctgctggtgctgtgatagctgagtctcagcctcttcctttct

SEQ ID NO: 122145 - DNA, 201 bp, Homo sapiens
cctgcattcatatatttatcacagcaccattcacaatagcaaagtcatgaaaacaacctaagtgttcatcaatagtggattggataaagaaaatgtggtayatatataccatggaatactacgcagccatagacaaaaaatgaaaccatgtactttgcagtaacatggatggagctggaggccattatcctaagtgaaata

SEQ ID NO: 122146 - DNA, 201 bp, Homo sapiens
tccacctgcctcggcctcccaaagtgctgggattacaggcgtgagccaccgggctcggccaagaatgttttatatttcctagtttctcttccttttgtggrtcctaatcttttgtttaacaattgatttctacttcattttgactatatattttcttttcaagcctttttctccctgcatcttgccaatatccctaacccc

SEQ ID NO: 122147 - DNA, 201 bp, Homo sapiens
ttactccttataaaaaatccatttccaagcctctagtttttacctcctaatgtatctaaaatctacttagagatagatcatttcctcatataggacaccaytgtcccttgcttacctagatttctgcaaaaactaggctacccccatccacatttgcctcctccactctgttcttcactcctctacagttaccatggtgat

SEQ ID NO: 122148 - DNA, 201 bp, Homo sapiens
tgggcagggaggaagaatctgctgctagagaaagaagggaagacagtcatctttgacatcatgagttgcataagatgggaataaaaactggaaaagacctwatcaccatattagaaaactctagccattctaaagacattgaagaatcctgtttggacctttttagcagtgaggagcgtccagctgtggttatctggagaa

SEQ ID NO: 122149 - DNA, 201 bp, Homo sapiens
aatctcatgacggcttttggtttggggttattgagaactgagcctgcactggaggaagactagaagagctgggaggcagctctttctctttgtggtgtgtrgctcatctcccagaaaaacaggcctctcccagaaagtggtcaaatttggcatctgagacctgagagtggcctcctgtgggtcctttctctcctagcccat

SEQ ID NO: 122150 - DNA, 201 bp, Homo sapiens
tgaagaatcctgtttggacctttttagcagtgaggagcgtccagctgtggttatctggagaatgcaataggcagaacttgctggtagaggccccgcttccytgtcttgaatgcctgcctttttttttttcttttaaatttttcatctgcttctggatcacattgctgtgagccacattgggtcaattcacatggaggatta

SEQ ID NO: 122151 - DNA, 201 bp, Homo sapiens
caatgagataaaaatactaccagaataactaaacaaaaaatgatggatcaaaccaagtgttggccaggatatgcaggaattgaactgtatgacagtgccgktgtgagtgtaattagtgcaacccctgtggtaaactatttattgctattgttagaattgaacatatgcatatcctacatcatggcaatgctatttctaggt

SEQ ID NO: 122152 - DNA, 201 bp, Homo sapiens
cagctgtggttatctggagaatgcaataggcagaacttgctggtagaggccccgcttccctgtcttgaatgcctgcctttttttttttcttttaaattttkcatctgcttctggatcacattgctgtgagccacattgggtcaattcacatggaggattagatctgggcacaccgtatcttttatgtcttttatttctttg

SEQ ID NO: 122153 - DNA, 201 bp, Homo sapiens
taagcacactcagtgaggtgggagctgtgaaacgttatgaggtaggagaaggtgatgtctaatgtttctctactgccctgttggcgccccccaaccaagtmtctctcagtgcctttgcccagccttcctctgcacacactacagctagctctatcatttcctcatgccccatcaagtcctacctgtcttcgcagaccctca

SEQ ID NO: 122154 - DNA, 201 bp, Homo sapiens
ttgggttttacgtaagtatattgagagcaattatgtgcaaatgtatgtcccaaaagtttaaaactgatccatttaattgttaattaaaatccgaacattcycatttatgtaatcataaagcaaaatgaaatttgagtattaaatgttatagaaaaggaaacagctaaattaacatataataaatcaaaactttgtgacttt

SEQ ID NO: 122155 - DNA, 201 bp, Homo sapiens
ccaagtgttggccaggatatgcaggaattgaactgtatgacagtgccggtgtgagtgtaattagtgcaacccctgtggtaaactatttattgctattgttmgaattgaacatatgcatatcctacatcatggcaatgctatttctaggtgtatacccaggcacaatgagaacatatgaccactgagcatcatgtacataaa

SEQ ID NO: 122156 - DNA, 201 bp, Homo sapiens
ttctgattcactggcttcatatggagtcaaggaagcaattacttgttttcctggtggtttgtggcacaacgtacatatctctccatttagaagctctgatyagcagttaccagctggagaactagctggcttgatttcctgtaggtcaactggttggggagagctctttatagaacttcaaaaatgcatttatactcctta

SEQ ID NO: 122157 - DNA, 201 bp, Homo sapiens
tgtttatagcaattgattttgccacaacattttaatagcatattttatgacaaaattagactctaagggattataaataaaaaggaaaaatattaatcacractagtttcagaaacattggtataacataagtatgttggagtcccagaaatggggaagagaaagaataaggcagaagtaacatttgaatctctattggct

SEQ ID NO: 122158 - DNA, 201 bp, Homo sapiens
tttggtgttttttaaattgaggttttgttttataggtcctatgagatttgtactttaaggaggttctattttggtgtgttttgaggatttgtttcaagatwtggagctacctctagcagttcttatagtgctagcttggtagtacaaattctctcagcatttctttgtctgaaaaagactatatctttccttcatttatga

SEQ ID NO: 122159 - DNA, 201 bp, Homo sapiens
aagtctgtcagaaaacaaaacaaaaaaaaccaatcttcaaaggaactgtagttcctgaagctgctgccttttcaatggaaatggtctagaatccagaagtygatgaagtggcatcttcaaagtactgaaaggaagtaaccaccaacttaattctatatcaagtgaaaatatctttcaaaataaaaataaaatatttgtgga

SEQ ID NO: 122160 - DNA, 201 bp, Homo sapiens
gatggagaaagtatgtgacttttcccaatatatttgtcatagaacactgtttttgaagaacatttactaacatcttataaaacgatacatcagtggtatckttctggtattgttctggtagggtactgttaattgtgatgtttggggtttttggtttcaaaatgatgttctttaccgtgttaagaaaatatcctactttta

SEQ ID NO: 122161 - DNA, 201 bp, Homo sapiens
tggataaacaaaagcaggtaatttgtaaacagcaaacccacattaaaatattatttatctatttatttattttttttaaagttgtagagacagagtcttgytctgtcacccagtctagagtgcagtggtatgaccaaagctcactgcagccttgaattcctggactcaggcgatccttctacttcagactcctaagtagct

SEQ ID NO: 122162 - DNA, 201 bp, Homo sapiens
aagttccgtaagtctgaaatctggtcctaaaactgtgtccagtaggtaccattgtattcaatatagcattttggtttaatcttgatcttctaaagtctgartatgttctttagtttgtctagtttctgcagtcttgtgtactaaaagggtagtaattttcagttagctaattactatgctttacacagttataaggacgaa

SEQ ID NO: 122163 - DNA, 201 bp, Homo sapiens
tgaaaccaacatgtccccaggcccctggagcatgaggggacaggccgtgctgagggtgatgctgaggcgggctggttgggcctctgtccccgcagtgtgtracacaggcctgggcctgctggggccgctgggggaggacgccgtggcctctgtactggatgtgaatgtagtaggtactgtgcgggtgctgcaggacttcct

SEQ ID NO: 122164 - DNA, 201 bp, Homo sapiens; identical to SEQ ID NO: 20563

SEQ ID NO: 122165 - DNA, 201 bp, Homo sapiens
aggccgtgctgagggtgatgctgaggcgggctggttgggcctctgtccccgcagtgtgtaacacaggcctgggcctgctggggccgctgggggaggacgcygtggcctctgtactggatgtgaatgtagtaggtactgtgcgggtgctgcaggacttcctgccagacatgaagcggccgggttcgggacgcgtgttggtga

SEQ ID NO: 122166 - DNA, 201 bp, Homo sapiens
ggtcccgaccaggtgatggaccgcacgaacacccggaccttccgcctcttgcactaatacctccaccacagcaaggagatctaccgcgaggaggcgcagcmccctgaggaggtggtgaaggtgagcggggggcgggactccgggagcgggggcggtgcgtcgtcctgcgcgcagccggggccagagctcctctcccgccgc

SEQ ID NO: 122167 - DNA, 201 bp, Homo sapiens
agatctaccgcgaggaggcgcagcaccctgaggaggtggtgaaggtgagcggggggcgggactccgggagcgggggcggtgcgtcgtcctgcgcgcagccsgggccagagctcctctcccgccgccgcaggtcttcctcaccgctatgcgcgccccgaagccgaccctgcgctacttcacaaccaggcgcttcctgcacca

SEQ ID NO: 122168 - DNA, 201 bp, Homo sapiens
gctgcgtgccaggcacttaggctggagcattggcacgcattgtgccacttgctgacctggctgctgaagtgttggtattgttatggggaagctccagccargagaggttaggtgactggcccaaggtcatgcagcggccggggatcccgccaggttcgaattctgacaccagggctacctggcagcctcagatgggtttgg

SEQ ID NO: 122169 - DNA, 201 bp, Homo sapiens
ggcctctgtactggatgtgaatgtagtaggtactgtgcgggtgctgcaggacttcctgccagacatgaagcggccgggttcgggacgcgtgttggtgactkggagcatgggaggattgatgggtgagtggcagggaccgggccccggagctccagattctttgtgtgcagagctgagccttgaaggcaggctccttagggg

SEQ ID NO: 122170 - DNA, 201 bp, Homo sapiens
ccgctgggggaggacgccgtggcctctgtactggatgtgaatgtagtaggtactgtgcgggtgctgcaggacttcctgccagacatgaagcggccgggttygggacgcgtgttggtgactgggagcatgggaggattgatgggtgagtggcagggaccgggccccggagctccagattctttgtgtgcagagctgagcctt

SEQ ID NO: 122171 - DNA, 201 bp, Homo sapiens; identical to SEQ ID NO: 20567

SEQ ID NO: 122172 - DNA, 201 bp, Homo sapiens
catccagcttctgagcaggaaccttcataatgccagcaacaaaagagaaaattaaatatgagtgatgttgagaaaggcaataagatttttgttcagaagtktgcccagtgccataccgtggaaaagggaggcaagcgcaagactgagacaaatctccatggcctctttgggcagaatacaggtcaggctgttggattctct

SEQ ID NO: 122173 - DNA, 201 bp, Homo sapiens
ggatcaaatgaatctttgtaaaaactttgttaatggtaaaatagtatagaaatatgcattcttgttgtaatgcacatatgtattacaccttgtgtataatrtacacgtttaccaagtgttagccatgaaggccatatcttccagttcatttgctcgttcattcagttcatatactaatatgtattcattcggttcgtatac

SEQ ID NO: 122174 - DNA, 201 bp, Homo sapiens
ctgctttatggaggttactttaatacatttgattaacagtctctacatccagactttcaaggaaagattctaagatattaccttcatcttataagcattaraacatatttcaaaacatatgaggatatatcaaaacatctgaagatatatctggtatttgcccaacagagataattgattctgcaatgtgtgccaaattat

SEQ ID NO: 122175 - DNA, 201 bp, Homo sapiens
ttcattcagttcatatactaatatgtattcattcggttcgtatactaagggccctgtcctaggtgctggaggtaccaaagtaagatagatatgacttctarcatcaagggcaatctagaatgcctgacaagtctaggaacatctgcatagctgtgtctttttcgttgcttttagtatataataaaattattttaaaagtaa

SEQ ID NO: 122176 - DNA, 201 bp, Homo sapiens
caatttcccgcagaagattagtgtgtgggcccaacgccattgaggttgaaatccaacccatatggaagctgcttgttaaacaggtaactgttttcttttcttttttttttgaaaaaatagatttctgccccttacttcttacttcctagaaggaacacataaatactttgatgtgaatgatatcttgtttcatgcgacttc

SEQ ID NO: 122177 - DNA, 201 bp, Homo sapiens
tgtgaatgatatcttgtttcatgcgacttctttttgttactgcttattttaaactcaggtttactttaaaattcctttccagtgtgagacagattcctgcytcataatctcctgtttgttttgttttgttctctttagtttggatggtggttttggtggtggtggtggtggtggggtggttagtccactgggttgctataa

SEQ ID NO: 122178 - DNA, 201 bp, Homo sapiens
tgtttcatgcgacttctttttgttactgcttattttaaactcaggtttactttaaaattcctttccagtgtgagacagattcctgcctcataatctcctgkttgttttgttttgttctctttagtttggatggtggttttggtggtggtggtggtggtggggtggttagtccactgggttgctataacaaaatgtcatgca

SEQ ID NO: 122179 - DNA, 201 bp, Homo sapiens
attcttttggtctttttcaaatggctttattattttcattttcttgagagtaacttctccctttgttagtgttttatttttgtttttgtttttaaaaataytttccttgtgtgcttggattttttttttttaatgcttaccttaagtgggacactttccccatcaatttttctctttctctctgtgctttctgtgcttctt

SEQ ID NO: 122180 - DNA, 201 bp, Homo sapiens
actttttaaaaagccacccaagagtgattccatttcagaggaacgttcctacataactaatgcaacccagttggactataagccatcactttcaaattccraaaactgttcagagccctgtctgatgccagtaaatattattcaaggcgacagatggaaactaagatgaatgacactgtattcaactactactatcgtgtc

SEQ ID NO: 122181 - DNA, 201 bp, Homo sapiens
ttcttttggtctttttcaaatggctttattattttcattttcttgagagtaacttctccctttgttagtgttttatttttgtttttgtttttaaaaatatwttccttgtgtgcttggattttttttttttaatgcttaccttaagtgggacactttccccatcaatttttctctttctctctgtgctttctgtgcttcttt

SEQ ID NO: 122182 - DNA, 201 bp, Homo sapiens
tttcattttcttgagagtaacttctccctttgttagtgttttatttttgtttttgtttttaaaaatattttccttgtgtgcttggattttttttttttaaygcttaccttaagtgggacactttccccatcaatttttctctttctctctgtgctttctgtgcttctttgatggctttgtttgcctccagttggcccctat

SEQ ID NO: 122183 - DNA, 201 bp, Homo sapiens
ttatttttgtttttgtttttaaaaatattttccttgtgtgcttggattttttttttttaatgcttaccttaagtgggacactttccccatcaatttttctytttctctctgtgctttctgtgcttctttgatggctttgtttgcctccagttggcccctatgtggtccctgaaggtttgggtgcttgtccttcagggattt

SEQ ID NO: 122184 - DNA, 201 bp, Homo sapiens
atctttttaatattaaaaaattatttaccattattctgtgtctgaagcagaaaacaggttgctttttttaactttattttttagactagttttcggttcayagcaaaattgggtggaacatacaaagatttcccatatacgtcctgcctccacatatgcatagcttccctaactatcaaaaagtaggcagctttttaaacg

SEQ ID NO: 122185 - DNA, 201 bp, Homo sapiens
ttaatggaaagatgagaatctgaggaaatctttactgggagtgctgaagcttttctaatttttgttaaaacacagagaaggttcataataatgtatgtatragcgtgtaacactaccagaacttcccaacctgtgcccccaaagaattctgttaatggttgctgcatgaaataggcgtccattattgaacaaacttgggaa

SEQ ID NO: 122186 - DNA, 201 bp, Homo sapiens
aagaagtttaatgtggatctagagtacagggcatagaggacattagtaggagtggacactgtaaggtaaggtagatccgaagtggacaagactttgaataycaggctaaggggtttggactttatcatttggagcatagggagccatgggaaggttctgagcatgaacgttaggtgtttggagctccactttagtaagatt

SEQ ID NO: 122187 - DNA, 201 bp, Homo sapiens
gggtacttagaagatacccatttttagcaagcaacccccataattctcacacacaccaagtctaagagttactgatctgttgtttataagtttttcctctrtcagacactgtgaaaaatgaaccagacatctggactaggacaatattgcaaaatgccttagaaatggtattattatgtaagatttcagatgtaatgctca

SEQ ID NO: 122188 - DNA, 201 bp, Homo sapiens
ttcttaattatttaatctagaaacccagaaagagctttgtctttccacataccccgtatgattcacttaacatttgctagtttggaggaagactccagaarggctggattttggttctgcctctccaacctacaggccactatgacattaggctcctcatttcacctctaacctgcctccaccctgttaactcagttgtga

SEQ ID NO: 122189 - DNA, 201 bp, Homo sapiens
tctgcaaagagcttgacctaactcagaggattggtttaggttacatcttgatcccatcattctgtgaatcattactgtccaaaagagcttcttagacagcrgaaatgttctcatgcctagtttgcccccagtgtttaggtaatatctaaaacactatgcaatcagtgggtttcccatgtgttctggttagggtctgaaatg

SEQ ID NO: 122190 - DNA, 201 bp, Homo sapiens
ctcaccttgctccatgagcttatgagggcaagatttctgtctctcttgttcatcatattcctagcacctagcacagttcctggaacagaataagcacctamaatagctgaatgaatgggtgaatgaataaacaaatgaataaatgagtgaatgcaaagcaaatagtaattactattcacgtgctggaaagctccttcattg

SEQ ID NO: 122191 - DNA, 201 bp, Homo sapiens
tgtatttgagatgtgtgtggggcgagagtgcagtgacctgagttggacatgcagggattttcctaagtgatgatctcacatcgatatcctgtcagacgagmttatcatcagttgataggtcagatctttttctctcttcctttgatcctttcgtcctctctttttatcatcctccttctccctttccttttacttatttgt

SEQ ID NO: 122192 - DNA, 201 bp, Homo sapiens
gcaccttgtaacactccacaaaatgagccagtttcctgaaactgtgtatttgcaatttaaatcacaagtcctcattcatcaacatctgtttaggactttayggtttacaataggcgcccacattcacaatgtatgtgtttgtatgggacatggcaaattatgaaataaaacatacatgatttttatagcctcctaaccacc

SEQ ID NO: 122193 - DNA, 201 bp, Homo sapiens
agagagtgtggcagtgagcagacatggggaggaaacacagaaagtctcactgcccttgggctgccctctctcctttcactgtagcgggtgtatagaacttsccttgattcccaggaaaactcagagagttccagaggaatagaaatgacaaacaacgctgcctttcaacaaatgtgcaaaatggctccaaataaccttaaa

SEQ ID NO: 122194 - DNA, 201 bp, Homo sapiens
ctcacacctcccagcagcctgacagtgaagaatgacttctctcattggtaacagagagtgtggcagtgagcagacatggggaggaaacacagaaagtctcrctgcccttgggctgccctctctcctttcactgtagcgggtgtatagaacttgccttgattcccaggaaaactcagagagttccagaggaatagaaatgac

SEQ ID NO: 122195 - DNA, 201 bp, Homo sapiens
ataatggtatttgtttttcaacagttgatcccaaccataacatcgtggagggttttaattttggtggtagccctcacccaattctgtgtggctttctttgyagaggtaaagtaatctctatattttttctaggaagataaacaaattaaggatctcattttcagcaggtgcttattttctagagcaaccactttgatcccc

SEQ ID NO: 122196 - DNA, 201 bp, Homo sapiens
accgacatccaaacaggaagaggcagtaccttccagggctggcccagcatggaactttctctcgctgatgttgccccaacagtcagtctggggaactgtayggatgaaatcatctctcacctctgcctttctgtcccctgtgttatcctataagatgctttctccacttctccaggctccttccattttctccacttttca

SEQ ID NO: 122197 - DNA, 201 bp, Homo sapiens
gtgtaatgcttgtcttagcctggtgacatttgtaacattaaatatcaccaacagaacagatcaaaacaatttaacagctaaaagaaaaaaagttttacatwtgaattaggttaaggtgaattaagtattgctgacagtattcaaacccacttccagttagaggcatccaagtcaccgacatccaaacaggaagaggcagta

SEQ ID NO: 122198 - DNA, 201 bp, Homo sapiens
ccttccaccagcaaccatttgattattttgctgtttatatccacctctacctgagtgtgggttggaagcggaggggagtaaagggagatgagacacttccratgctttctggaaactcctagaataataaacacaaaggaaggctacttagactcccatatttcaggttccaaagatggaactttacaagtctatctgctt

SEQ ID NO: 122199 - DNA, 201 bp, Homo sapiens
agatatattttcatttctgctgctagctgccttgggcctcacaattttcattctgttttctgactttcaagttatataccgtggaatggaggtaagtggcwttcatttgcacatctggcatgactcatgtacatggaccatgtattcattgtaattcacaagtcaattattactgtattctctttgaccaccaaatactgt

SEQ ID NO: 122200 - DNA, 201 bp, Homo sapiens
cacaactcactggacacgcagtgatagtgcaccagggcagctgctttatggaggttactttaatacatttgattaacagtctctacatccagactttcaargaaagattctaagatattaccttcatcttataagcattagaacatatttcaaaacatatgaggatatatcaaaacatctgaagatatatctggtatttgc

SEQ ID NO: 122201 - DNA, 201 bp, Homo sapiens
gggcaaataagatatctggatttcacctatactggcctctaatggttttcatattattaatattattgggtacatttatcctgtacctacctgaaatattrtttggatactttattatgctatgttataccaatacaataaaattaatgcaataatacaataattttccaagtacaattttcaaaaaaataaaccatatca

SEQ ID NO: 122202 - DNA, 201 bp, Homo sapiens
aaaattggagcatgccaagacaggaagattattatgtacacaggtacacagggcttttttttttttttttttttttttttttaacaaagacacagaagctrgagagtgttgggcctccgtggaagctggaggttttatggtttacctttccaattgcccataaggaagagcagtcagagaccaggttagaaaggctgattg

SEQ ID NO: 122203 - DNA, 201 bp, Homo sapiens
tgccaaatattctccaggggtcaatgtgttctaatttgaaaggagtgctagtattttctggcacctatttactagccctttagtagaaagaaaaaaaaaaccaagtacaactatttctctacatttggtttcaaaagaatattaaataagagaactgaattaattagaatagtgttgtttcttctgcaaaaagtatttaac

SEQ ID NO: 122204 - DNA, 201 bp, Homo sapiens
ttcatccaattcataatgattagaaagaacactttctcagaaaaataatccttgctttgctctgatgggctctttagttcactttctgcatgtatatcctrtgacttttctctggcttctcaggtttgccctctctgctctcattattagcatgagttagcaggacccaaatgggaaaaattgagggaacaaaaaaagttg

SEQ ID NO: 122205 - DNA, 201 bp, Homo sapiens
cagaaacacacaagagtgtttatttcccctggattcatcagtttctggagttatattgatatttacgatttttaaaatctaacgtctttaaaaaaaccggrtctcattgatgttttaaggtacattttcctgattgctggtgagactagacactttttgttgtctaatagtgttttgcattttcattttatattaagggcc

SEQ ID NO: 122206 - DNA, 201 bp, Homo sapiens
atattaagggcctctttatattcatcatatatgtgaaaaagttttactttttagtctatttctctagactttgactttagctgtggatgaacatttatatkgagtcaaatatatttctgctttcctttatggtttattgttttgcttataagaactccccttccaaagttaggtaatacctgttttctaatacttgtaatt

SEQ ID NO: 122207 - DNA, 201 bp, Homo sapiens
agaaaaggttttagagtcagatgaacctaggtttgatttacctagtaagtaaatgatggtgaaaagattactttaacatttttcaaccccttttttttggkttttacatgtatgttagagataacattttcatcatagaattattttgagaattaaatactgttgttcaagtgcctacaacaatgcctggcacataataac

SEQ ID NO: 122208 - DNA, 201 bp, Homo sapiens
tttatgatgtgaagaacagcctcttggtgttttaagaggtaaagcctaacctgaaaagtcatgggtgagacatgggcttatcattccaggctttgaaagcrgctcatgcaggcatttcattatcagagcaggaagcatctgtggcatccccttttacctctaaaacaaccaacatccagtgtgtgcctcatctcatcaggt

SEQ ID NO: 122209 - DNA, 201 bp, Homo sapiens
cagcttgcttgccttaccctcacccaagccctcattccgtcattcttacccaatgtctgggttccttcaaattccctctccccttcacatgtcactcattygaataacattgggtaaaccttcttaaggttcctttatttcccagtctaactatcccaaacagaccctgcatcacacaatttgaactgccatctggaacct

SEQ ID NO: 122210 - DNA, 201 bp, Homo sapiens
ttgtgcagggtcattttatatctggctttggtcctggccctaactacatccccctctccattataggagggctgatctgtctttacaaataacatacttgkttgggaatataaatctttagtattagctctgtaagaaccatctgttaagaatagttgtatccatcccaaacaaagcataaaaatgcatgatttttcactg

SEQ ID NO: 122211 - DNA, 201 bp, Homo sapiens
gccctcattccgtcattcttacccaatgtctgggttccttcaaattccctctccccttcacatgtcactcattcgaataacattgggtaaaccttcttaargttcctttatttcccagtctaactatcccaaacagaccctgcatcacacaatttgaactgccatctggaacctgggcctgaatggggcttttagatagct

SEQ ID NO: 122212 - DNA, 201 bp, Homo sapiens
ccgtccttctcttctgctgtctttcctgaaacaataatcaacttcaagatctagcttctctcaaatgggaggagtctggagacaaaagggaatatcatttgggagggggggggaatatgttaatttagaaattatctcttggcactatagctttttttcttagttctcatatgtattaggcattgtgctaacattttacat

SEQ ID NO: 122213 - DNA, 201 bp, Homo sapiens
tccttctcttctgctgtctttcctgaaacaataatcaacttcaagatctagcttctctcaaatgggaggagtctggagacaaaagggaatatcatttgggagggggggggaatatgttaatttagaaattatctcttggcactatagctttttttcttagttctcatatgtattaggcattgtgctaacattttacatata

SEQ ID NO: 122214 - DNA, 201 bp, Homo sapiens
tcaatgtgcacaaatcacaagcattcttctacacccataacagacaaacagagagccaaattatgagtgaactcccattcacaattgcttcaaagagaatmaaatacctaggaatccaacttacaagggatgtgaaggacctcttcaaggagaactacaaaccactgctcaatgaaataaaagaggacacaaacaaatgga

SEQ ID NO: 122215 - DNA, 201 bp, Homo sapiens
tatataatggcaattcaccaagtaaataaataattataattcatgtttttaaaataatactataatattccatgatatatcataatttattcaactattcygttacttgttgaaagtaatttcccctcaatcttttgccaccacaaataatgttgaattaaaagttactactacagtatgggcgtgttcttacatattagt

SEQ ID NO: 122216 - DNA, 201 bp, Homo sapiens
agcttatatggagatttatgtctttattaatttttaaaattaaaataagatcttactatgcacattaatctggaactttcatttttcactttatatataayggcaattcaccaagtaaataaataattataattcatgtttttaaaataatactataatattccatgatatatcataatttattcaactattccgttactt

SEQ ID NO: 122217 - DNA, 201 bp, Homo sapiens
ttttaggagaatgaaggggtagcatctcaactgtgtgcattaatcaagatattatgccccttagaacatttccatctattttccctgacttaaatattgtrtttgttctataggtttcctatttaattgtctttgaaaaattttagtctccctcttagaagtcctttataatgtctatgtgttcatttgatattcgggtat

SEQ ID NO: 122218 - DNA, 201 bp, Homo sapiens
actctattaagtgcatatatatataccagcttatatggagatttatgtctttattaatttttaaaattaaaataagatcttactatgcacattaatctggractttcatttttcactttatatataatggcaattcaccaagtaaataaataattataattcatgtttttaaaataatactataatattccatgatatatc

SEQ ID NO: 122219 - DNA, 201 bp, Homo sapiens
ctttataatgtctatgtgttcatttgatattcgggtatatctttacggaaatcccaaagaaatacagaaattcctgtgtgggagttaggggatgggttgtrgaaaaaattaggtttgattctatactcaataaggcagtgtttcagcaagagaattccttgacatttttgagcttctggcttattaaatcaaaatatccag

SEQ ID NO: 122220 - DNA, 201 bp, Homo sapiens
aggagaatgaaggggtagcatctcaactgtgtgcattaatcaagatattatgccccttagaacatttccatctattttccctgacttaaatattgtatttrttctataggtttcctatttaattgtctttgaaaaattttagtctccctcttagaagtcctttataatgtctatgtgttcatttgatattcgggtatatct

SEQ ID NO: 122221 - DNA, 201 bp, Homo sapiens
gagtcagtctgtttaagaaggtgaattgttaaattttgttattggtaaaatatttttgaaattcaaaatgaataagaatgatcaacttgtgggcatggctctgaatgcataaaataattttgcttccaccatatcacattctatgtgtttgacattttctcaacccaaatcaatagagatctaagtgaattcttaaatatt

SEQ ID NO: 122222 - DNA, 201 bp, Homo sapiens
gccagattctatttagcttctagctaaagaagtaaagcccatggtatttccactgagagccaggagttgctttgtcaaccataagtcataaaacaaaaagygagggcttaccaaatatgggatgacagaaggactttggactaccagggagagttaaatgtctttgcaaactctgattatcatctgaagccttcatcgaat

SEQ ID NO: 122223 - DNA, 201 bp, Homo sapiens
ttgactgttatctccattgtcttaagtgtgtatgatttgcgacaggtaagacctgaaatcacagccagattctatttagcttctagctaaagaagtaaagyccatggtatttccactgagagccaggagttgctttgtcaaccataagtcataaaacaaaaagtgagggcttaccaaatatgggatgacagaaggactttg

SEQ ID NO: 122224 - DNA, 201 bp, Homo sapiens
acctaacccaacctgtaaagcaccttgtaacactccacaaaatgagccagtttcctgaaactgtgtatttgcaatttaaatcacaagtcctcattcatcarcatctgtttaggactttacggtttacaataggcgcccacattcacaatgtatgtgtttgtatgggacatggcaaattatgaaataaaacatacatgattt

SEQ ID NO: 122225 - DNA, 201 bp, Homo sapiens
ggtttcaccatgtaggccaggctggtctcaacctcctggcctcaagtgatccgcctgcctcagcctccaaaagtgctgggattataggtgtgagccaccgyggccagccgagaccaaatacataaagccaacaaacacagaaagcttcacaatcaatgaacgtggagctgcttgtttcctgggtaggtgcaaagtaggccc

SEQ ID NO: 122226 - DNA, 201 bp, Homo sapiens
gggtttcaccatgtaggccaggctggtctcaacctcctggcctcaagtgatccgcctgcctcagcctccaaaagtgctgggattataggtgtgagccaccrcggccagccgagaccaaatacataaagccaacaaacacagaaagcttcacaatcaatgaacgtggagctgcttgtttcctgggtaggtgcaaagtaggcc

SEQ ID NO: 122227 - DNA, 201 bp, Homo sapiens
accttactgaataacacttgagaatttcatgaactggattgtcttttccaggacgaatttcaaagatatatgaggaagaaggtattctgcctctacttatmcacactgaagtttcctgtaagcaagaagtgggaagaatccctggtggctgaccgccactctgtcataaaccaagccttaataaagccagaattaaaagta

SEQ ID NO: 122228 - DNA, 201 bp, Homo sapiens
tttctactaagttctgagataaagctgatgcgcttgtttgggtcaaagttttgtaccacttggtaggtatttggttgattgagcaccttactgaataacayttgagaatttcatgaactggattgtcttttccaggacgaatttcaaagatatatgaggaagaaggtattctgcctctacttatccacactgaagtttcct

SEQ ID NO: 122229 - DNA, 201 bp, Homo sapiens
ctctatctgcactggttcagcgctagacaaggctgagtccttagggtcaaaactcttccgtgtctgtggttgggaaaagaagggagtaatgaattttgtgwtaaattgatattgggcaaaagatgtcccagcagacattgctactgaacttgaatcccatgtttccaatacttaaaaaagtatttatggctaaaatgatgg

SEQ ID NO: 122230 - DNA, 201 bp, Homo sapiens
aaaaaaagagcccacattgccaagacaatcctaagccaaaataatgaagctggaggcatcatgctacctgacttcaaactatactacaaggctacagtaaycaaaacagtgtggtactggtaccaaaacagagacatagaccaatggaaaagaacagagccctcagaaagaataccacacatctacaaccatctgacaaac

SEQ ID NO: 122231 - DNA, 201 bp, Homo sapiens
tgatcacaaagccagagccaggactgagtctgtgacctcatctgtacgtttggggtaataatgcctcattcacggacttatgaccactgagactatgaatytaaaggggctttgagcacaatgaagagccaaacaagtagagggtgttcactaattaactggttagttaattacatcctgttgcctccgaagaacatccta

SEQ ID NO: 122232 - DNA, 201 bp, Homo sapiens
actttcattaacccatcagacatagggccagaagcaatctgcatctagtctcaatcaaaatatacttacatttctctgtcctccttaaagaatgaattccmcgtagaatttgctttgggagaattggaaatattaacattatttgatgaatgatttaatcttagccttctgtttgaaaagataaaaatggagacagacaca

SEQ ID NO: 122233 - DNA, 201 bp, Homo sapiens
  misc_feature (1)...(201): n = A,T,C or G
cacctgcttaatttttcttgtgggtactcctctctgatttaaaatttggtacttataaacaaggtatttagactactggatctactataatatcttagaancttgggttttgtttaaattactatataattaaaagctttaaatcttatgctaatattgcttttaatttttactcagactggcactctcactgaagatggg

SEQ ID NO: 122234 - DNA, 201 bp, Homo sapiens
gctgggcttaatgaatgcttgggagaatgattcagtgataactcatctataataggctgcttttaaaattatgacaacaaaccatgcaggccaggtatagsatagataggcagatctaatctaaatatttgcaatagaatcaagtctaccattgcttgtaccaccagcatctctatgaacagtcatctgactcatgggatg

SEQ ID NO: 122235 - DNA, 201 bp, Homo sapiens
  misc_feature (1)...(201): n = A,T,C or G
gcaactggggagatgggatggaagggagacaagactgaagaaagaggccatctggggacaacagaagacatcattgcttgtcccagacaaaaaggacaagnatggagagtagaaggcaaatgggagtgactccaatgagtagactcgaccaggcttggtccccaggtgaaaggggtatatctcttaggttatgtcagttct

SEQ ID NO: 122236 - DNA, 201 bp, Homo sapiens
gttttcagaacatgaactatctaatgtttaaatgttaacttttacttggtagcaatcagttaagctgcataacctcgtggaggaccacaacaaagtccagrttacaatcattgtaaaagacaaaggtaagtgatgtgttaggccatcttcagcatcttaatatttcaggggggaattggtctcatttgtccttaattatta

SEQ ID NO: 122237 - DNA, 201 bp, Homo sapiens
agacgtggttttttcagtgctcaatactacaacatctccttcgtatctgtgaaggtaacaagggcaaattgaattacttatgagaaataaaattcagtatycttaattacattacagggataagttgtcctcattagaggataatttataaattattatttctttcaacgttcttcagtttttaaaggctattttcaaatt

SEQ ID NO: 122238 - DNA, 201 bp, Homo sapiens
ctttcattaacccatcagacatagggccagaagcaatctgcatctagtctcaatcaaaatatacttacatttctctgtcctccttaaagaatgaattcccsgtagaatttgctttgggagaattggaaatattaacattatttgatgaatgatttaatcttagccttctgtttgaaaagataaaaatggagacagacacat

SEQ ID NO: 122239 - DNA, 201 bp, Homo sapiens
taccccagtcctgaggtctgttcttactgaacccagttggtacatttgacacccagtttgtctgagtcagcttgtgctattataacaaaagaccatagacygcgtgcttgaacaacagaaatttattcctcacagttctgggggctggaaaggccaggatagaggtgttgcccaacgtggttcccggagagggctttcttt

SEQ ID NO: 122240 - DNA, 201 bp, Homo sapiens
accatgaggctgtcaaaggtacacaggccaagaggtagtccattctcctttgaattctggttctgccatttatttataggctttgagtccttcagttgtaytatctgtaaagggacaaagtaatgcccaccactaagctcagagagttattacaaatctataaattaaataattaatatggtcttttttcaaagtgtgaag

SEQ ID NO: 122241 - DNA, 201 bp, Homo sapiens
atttttgttaaaacacagagaaggttcataataatgtatgtataagcgtgtaacactaccagaacttcccaacctgtgcccccaaagaattctgttaatgrttgctgcatgaaataggcgtccattattgaacaaacttgggaactgttgtttaaacaaagttaaactcatttcttgactgcctgatttctttaatatact

SEQ ID NO: 122242 - DNA, 201 bp, Homo sapiens; identical to SEQ ID NO: 20575

SEQ ID NO: 122243 - DNA, 201 bp, Homo sapiens; identical to SEQ ID NO: 20574

SEQ ID NO: 122244 - DNA, 201 bp, Homo sapiens
atcaacttgtgggcatggctctgaatgcataaaataattttgcttccaccatatcacattctatgtgtttgacattttctcaacccaaatcaatagagatstaagtgaattcttaaatattagaggtttgtgtatgttgtaaaaaaatgagaaaaaaattgataatgaaatgacatcttcttgattgctactaaggttcat

SEQ ID NO: 122245 - DNA, 201 bp, Homo sapiens
ggtcaatgtgttctaatttgaaaggagtgctagtattttctggcacctatttactagccctttagtagaaagaaaaaaaaaaccaagtacaactatttctytacatttggtttcaaaagaatattaaataagagaactgaattaattagaatagtgttgtttcttctgcaaaaagtatttaaccagtattctactggattt

SEQ ID NO: 122246 - DNA, 201 bp, Homo sapiens
catcggtagaatgggagggagtatccttaatttgttaagtcctgagggaaggactaaacaaagcattttatggaatgggcctagcacaatttatgtaaagrgtctggcacttataataggggctcaaaaaatcttacttactttccctgtgtattaatttaagtagagttttttaaaaactcttcaaagctacaattaagg

SEQ ID NO: 122247 - DNA, 201 bp, Homo sapiens
agtctatcaagtgtgcaatagcattatgtctaaaaaagtacatgccttaatttcaaaataatttattgctaaaaaattctaatgatcatctgagccttcakcaagtcataatctttttgctggtagagagcctttacctcaagctgagcggctgctgactgatcaaggtagtggttgttgaaggttggggtatagctgtga

SEQ ID NO: 122248 - DNA, 201 bp, Homo sapiens
cctaagggacacgttctgtctctattcctccgagaaaggggctcctagattttgctgtctagtccttgtctggaacccatgaatctgatgatgtgagcccycactcaatggtgcatgtttccagtctatttctaacccataaagatggtcattttgttttggaacatggacatatctttttaatattaaaaaattatttac

SEQ ID NO: 122249 - DNA, 201 bp, Homo sapiens
gaacaggaagcccatggccacccttgttttccaccatatgcctcatttctatcctcagccacctaagggacacgttctgtctctattcctccgagaaaggrgctcctagattttgctgtctagtccttgtctggaacccatgaatctgatgatgtgagcccccactcaatggtgcatgtttccagtctatttctaacccat

SEQ ID NO: 122250 - DNA, 201 bp, Homo sapiens
tggaacaggaagcccatggccacccttgttttccaccatatgcctcatttctatcctcagccacctaagggacacgttctgtctctattcctccgagaaargggctcctagattttgctgtctagtccttgtctggaacccatgaatctgatgatgtgagcccccactcaatggtgcatgtttccagtctatttctaaccc

SEQ ID NO: 122251 - DNA, 201 bp, Homo sapiens
ttagactgtcaagaattttagcatttgatgggatgtcagaatatttttcagaagaaattgagatctacagaaataaagtggtgtccccaagattaaacagrtaagtggcagagtggaaaccagatactatctcctgttttctgacctctactatttatatatatgactgtctttcccatattttaatattggttaatattg

SEQ ID NO: 122252 - DNA, 201 bp, Homo sapiens
ctaccttcatgacctcatctaaacctaattgcctcccaagggacccatctccaaataccatcacactgggggttagggcttcaacctatgaatttagaggrgacacaaatgttcagtccacagcatggggcaatgttattatttctataattattgaggatttgaaatgtattcttttggtctttttcaaatggctttatt

SEQ ID NO: 122253 - DNA, 201 bp, Homo sapiens
tttttaattttttaaaacattggatcaccaggtgatccaatggtccaaaatcccacttctgagtatatatccaaaagaactgacattgggatctcaaaaawaggtatcttcacctttatgttcattgcagcattatttataatagtcaagatatggaaacaacctaaatgttcatcattggatgaatggattttaaaaatg

SEQ ID NO: 122254 - DNA, 201 bp, Homo sapiens
gcatgcatgtacacacaccacttttctacctctgggtcattgtttagttagtgactttgtggatcaggggagagagggcactccaggtggagggacagcattaaacagagacccaaagatgaaacagtacagtgttatacctttatgatgtgaagaacagcctcttggtgttttaagaggtaaagcctaacctgaaaagtc

SEQ ID NO: 122255 - DNA, 201 bp, Homo sapiens
gtgtctgcaaactcaggaacctggtgtaactgtgcatgaaatgtggaactagaaataagtacatgtagatgagttttctagtgtgttgtttttctcttgayaacctgagactcttcacctctccaaacccctgtttcttcttttggaatatgaagagagcttcaaagcagcctaagtataattcagcaggaaatggatgag

SEQ ID NO: 122256 - DNA, 201 bp, Homo sapiens
aaacaaatgaataaatgagtgaatgcaaagcaaatagtaattactattcacgtgctggaaagctccttcattgcctaaaatagtgctgggcttaatgaatrcttgggagaatgattcagtgataactcatctataataggctgcttttaaaattatgacaacaaaccatgcaggccaggtataggatagataggcagatct

SEQ ID NO: 122257 - DNA, 201 bp, Homo sapiens
tggtgtcatgggttttttctatgccctaggggtatatatgtaccatggagtaagtactgggggtaaggcttttcaatagtatagattctgcaaagagcttracctaactcagaggattggtttaggttacatcttgatcccatcattctgtgaatcattactgtccaaaagagcttcttagacagcggaaatgttctcatg

SEQ ID NO: 122258 - DNA, 201 bp, Homo sapiens
ggtcagtctggttatggaggaaatagttgcaccatgcgatatggtaaatatattaattacaaaacttcctaacccacttttttatttctgaaggtgaagamagagcatggaagagacaaaggctggtggaactggatgtgccaccaggcaatgtgcttacctaggtgtaaatcttctgttcgtgtttgcttagtctgaatc

SEQ ID NO: 122259 - DNA, 201 bp, Homo sapiens
gtgtgagcctcctctggagacctgctgtattagtctgttctcatgctgctaataaagacatacctgagactgggcaatttataaaggaaagaggtttaagrgactcacagttccacatggctggggaggcctcacagtcatggttggaaggcaaagcagaagcaaaacatgtcttacatggtggcaggcaagagagtttgt

SEQ ID NO: 122260 - DNA, 201 bp, Homo sapiens
catttctttaggtgttttctatcccaccaggggcaactggggagatgggatggaagggagacaagactgaagaaagaggccatctggggacaacagaagasatcattgcttgtcccagacaaaaaggacaagaatggagagtagaaggcaaatgggagtgactccaatgagtagactcgaccaggcttggtccccaggtga

SEQ ID NO: 122261 - DNA, 201 bp, Homo sapiens
  misc_feature (1)...(201): n = A,T,C or G
atgaagctgggttgagggcaattgttaagggcctcatatgccacgctaaggagtgggtccttgtcttgaagcagaataggagcctttactttttaagaagnctggtgacatttctttaggtgttttctatcccaccaggggcaactggggagatgggatggaagggagacaagactgaagaaagaggccatctggggacaa

SEQ ID NO: 122262 - DNA, 201 bp, Homo sapiens
tctgttttctgactttcaagttatataccgtggaatggaggtaagtggcattcatttgcacatctggcatgactcatgtacatggaccatgtattcattgyaattcacaagtcaattattactgtattctctttgaccaccaaatactgtgaggctatttctatatactagaagggcaaataagatatctggatttcacct

SEQ ID NO: 122263 - DNA, 201 bp, Homo sapiens
tactgcatcaaggcatatgtatgttttgaattttaatagatgctgctatattattttccacaaatgaaagaatttttttaaatcagaaacacacaagagtrtttatttcccctggattcatcagtttctggagttatattgatatttacgatttttaaaatctaacgtctttaaaaaaaccgggtctcattgatgttttaa

SEQ ID NO: 122264 - DNA, 201 bp, Homo sapiens
agtttcagagacagacacatgaagtaaaaatacattatttcttttttgttaacttcttcagaaagatctaaatcccagtctggtctaaatactttattgcwcagcctacatagatcctcccactcatgtacatatttgtggaaaggatcttgattaaacagaggattaaggtaagattcctgaaactgcaaatgtattcct

SEQ ID NO: 122265 - DNA, 201 bp, Homo sapiens
taatttattcaactattccgttacttgttgaaagtaatttcccctcaatcttttgccaccacaaataatgttgaattaaaagttactactacagtatgggygtgttcttacatattagtgtttgcattttttagcatagcaaccaaaagccaggttactgcatcaaggcatatgtatgttttgaattttaatagatgctgc

SEQ ID NO: 122266 - DNA, 201 bp, Homo sapiens
cataatttattcaactattccgttacttgttgaaagtaatttcccctcaatcttttgccaccacaaataatgttgaattaaaagttactactacagtatgrgcgtgttcttacatattagtgtttgcattttttagcatagcaaccaaaagccaggttactgcatcaaggcatatgtatgttttgaattttaatagatgct

SEQ ID NO: 122267 - DNA, 201 bp, Homo sapiens
taaatactccatcaaggctcaccccttcaccagtttagcaaatctgtattgaacttaactgtatgtcagacgctcaaggaattgagaacttatttggaagygaataaaataaaatccttgtcctcatgaatatatcctagttggggaaatagattagaaaataaacccataaaatattatcccactagtggttcttaaatg

SEQ ID NO: 122268 - DNA, 201 bp, Homo sapiens
tagatactcagccatcagatcagcatttacagaaggatcaaggaagggctggttggaggagaggaaaggggctttgctcattcttctggaagccaataacrtagtctcaactattagaattcaattagaagttaacgagttacttaaaaatgtaacatatatatatatatcctttctttaaaatttaatgcataagctatt

SEQ ID NO: 122269 - DNA, 201 bp, Homo sapiens
ataggatagataggcagatctaatctaaatatttgcaatagaatcaagtctaccattgcttgtaccaccagcatctctatgaacagtcatctgactcatgsgatgggcattaagaccggattagttgtggtttgtataatttcttgaaactggcatgcaccagttctgaccaactacctgagcttacatagattcaacaaa

SEQ ID NO: 122270 - DNA, 201 bp, Homo sapiens
ttctcatgtaagagccactagtgggatagacattataaatataacaaaataagaaaatgaagataaaatgtgctatatttccaaccattccaggttttttyggggaatatcaggaacttattatacttcttagaatttagttactattttcaaacagggtaaaaggatagggttttggtttttcttagaatcaaattctat

SEQ ID NO: 122271 - DNA, 201 bp, Homo sapiens
cttcctacaaggacactaatcccatcgtgggatctctaccttcatgacctcatctaaacctaattgcctcccaagggacccatctccaaataccatcacaytgggggttagggcttcaacctatgaatttagaggggacacaaatgttcagtccacagcatggggcaatgttattatttctataattattgaggatttgaa

SEQ ID NO: 122272 - DNA, 201 bp, Homo sapiens
gctaagtgcagtttctgacactgtcaactctgtttaaaagttacattgtaggccgggcgtgctggctcacgcttgtaatctcagcactttgggaggctgargcgggtggatcacctgaggtcaggggttcgagacgagcctgaccaagatggagaaaccccgtctgtactaaaaatacaaaattagcctggcatgatggtg

SEQ ID NO: 122273 - DNA, 201 bp, Homo sapiens
tgacactttgcttaacaacagattattgccccagattgtgtaaaagagtcctgagtactgaaatggtttgagttatgggctctttccagcgggaggtttasggacttaagaagtcaaagagcgtgatgggctgtttgccctctctgattcccaacatccttgaacctcagtgttttcatggcatggagtcagaagacctcg

SEQ ID NO: 122274 - DNA, 201 bp, Homo sapiens
attcggaatgtatcgatgtcctctggaagcttacattatagtggaagatacagtcttttttttttttgcaaacttattaaaatgtgaaacataacgtgtamtttcaggtaattatatgcactataatgaaaaatatggcaggataaggagatgaagagaatctgaattaagagtcagggtagctatttcaaggagcattgt

SEQ ID NO: 122275 - DNA, 201 bp, Homo sapiens
gggaggtttgtacatacagcaagcaaagtttctttgtcttctaggtgataaccttcaaacggccattactgttgcaaagaattctgaaatgatccctccargcagccaagtgatcattgttgaggccgatgaaccagaagaatttgttcctgcctctgtgacctggcagctggtggagaaccaagagactggacctgggaa

SEQ ID NO: 122276 - DNA, 201 bp, Homo sapiens
tcacatttgcaatcgtagctgcggtgcatggaagtgcagaaaatcaggtatgtttggaacgacctggagaagcggtttcagaaagttgggtaagtacaatrttttgtcaccccttggtcaggatataggggaaaaacactgatttgttgagtgctatgaactgaagtgtggttcctatcctgaatacatcctaggttgcta

SEQ ID NO: 122277 - DNA, 201 bp, Homo sapiens
gatctgcatcctgcattggacaccactccctctcccagtgagctttatgctgtgaatgacacctgctctatcacatttgcaatcgtagctgcggtgcatgsaagtgcagaaaatcaggtatgtttggaacgacctggagaagcggtttcagaaagttgggtaagtacaatgttttgtcaccccttggtcaggatatagggg

SEQ ID NO: 122278 - DNA, 201 bp, Homo sapiens
tctccaaaacatcagtgttttccaaaacactatcagagaaacagtagtcaaaagcagtgttctctggtagagcagccacgagccatatgtggctactcagyccttgaaatgtggctctgcaactgagaaactgaatttttaatctgatttaattttaaatagtttaaatttaaatagctacaagtggctggtggcgactgt

SEQ ID NO: 122279 - DNA, 201 bp, Homo sapiens
acaatcctctttaggagaaagtatacctgttacaaagacaccattgccccagatggagaacactatgccttggaaatgtcacagtttggaggattataggraacacgtccttttctgtggaacagaagttatccaggtcaagccctctgggcaggggcctgtacgagcagtcgttttgcaaacaggttagtggattccact

SEQ ID NO: 122280 - DNA, 201 bp, Homo sapiens
aacattctgacaacaaataggtcttagtcacaaaaaactgtcaacgtagtccaagttctttgtagttttatgtcttgtacatagaaaaatgaatacaaaayctagaaagggaattttttaaaacccaaaggtcactttccattattcagctatgcttcacattgacgtgaaaccagatttttttctaggtctttgatgtgt

SEQ ID NO: 122281 - DNA, 201 bp, Homo sapiens
ctgacaaacctgacaaaaacaagcaacggggaaaggattccctatttaataagtggtgctgggagaactggctagccatatgcagaaaattgaaactggaycccttccttacaccttacacaaaaatatcctgtcaaatgccctcaaacatggcaacacccacatttaggcaataggcacggggttcattggtgaattcat

SEQ ID NO: 122282 - DNA, 201 bp, Homo sapiens
tgtgaaaaatgaaccagacatctggactaggacaatattgcaaaatgccttagaaatggtattattatgtaagatttcagatgtaatgctcaaaacattgwcacaaaaaagtttttagagttattaaaatatattggtttaatagcactaaatacaaggcatgtaaaggatttatctaggacatttaagaattctagttga

SEQ ID NO: 122283 - DNA, 201 bp, Homo sapiens
tgaatgaaggtgggatcgtgaaattcagatccatttaggccagccattccagcccctaggagaaggcagtatccagagaaggaggtgcaggagggactcayccattatagaagtgcatctcgtacaccccatctgtgtttcaatgactcctaatcttttctgggtcttggtccccttaaataatctgatggaaaatacaaa

SEQ ID NO: 122284 - DNA, 201 bp, Homo sapiens
aagagcagtcagagaccaggttagaaaggctgattgggaccagattgtggaaggccttgaatgtcaatagaggatccctgaactttattctccaggcaacrgggaagaatgagatggtgccaagaacactgactgtttatcccacgcaagcacaactcactggacacgcagtgatagtgcaccagggcagctgctttatgg

SEQ ID NO: 122285 - DNA, 201 bp, Homo sapiens
cttctcatctctgcataccccacagactctagcccagcaccctgccgggaaaacattgattgatctggtataggtaaagacttagtcatagagctttagawaaagagttgaaagggcctttgggtaccatttaggcattccaacacattttatatgtgagaaaatgaaggaccaaggagtttacatgattaccccagaaca

SEQ ID NO: 122286 - DNA, 201 bp, Homo sapiens
tattaaaaaatggtgccaatagacttgctagatgcaaggttgccacaaacattcaatttgtagaaaaatgcaatatctgggaagcaaaataaagtgaaacataataaagcaaagtgtgcctgtatgtgcaaaaagcatttctagactacagggagcccaggataataagtattaagtcttgcatttgagttcacgttagaa

SEQ ID NO: 122287 - DNA, 201 bp, Homo sapiens
ttggctcactgcaacctccgcctcccagattcaagcaattcccctgcctcagcctctcgagtagctgggatacaggcacccgctaccatgcccagataatktttgtatttttagtaaagatggcgtttcaccatgttgtccaggctggtctcaaactcctgacctcaagtgattcacccacctcagcctcccaaagtgcta

SEQ ID NO: 122288 - DNA, 201 bp, Homo sapiens
attaaaaaatggtgccaatagacttgctagatgcaaggttgccacaaacattcaatttgtagaaaaatgcaatatctgggaagcaaaataaagtgaaacataataaagcaaagtgtgcctgtatgtgcaaaaagcatttctagactacagggagcccaggataataagtattaagtcttgcatttgagttcacgttagaaa

SEQ ID NO: 122289 - DNA, 201 bp, Homo sapiens
caccacgcctggctaattttttgtatttttagtagagacggggtttcaccatgttaaccaggatggtcttgatctcctgacctcatgatccacctgcctcrgcctcccaaagtgctgggattacaggtgtgagccaccgcacctggcctgttattgtggtttttaactattacttgggaacaaggcataaaaggaacagag

SEQ ID NO: 122290 - DNA, 201 bp, Homo sapiens
ttaaaaaatggtgccaatagacttgctagatgcaaggttgccacaaacattcaatttgtagaaaaatgcaatatctgggaagcaaaataaagtgaaacataataaagcaaagtgtgcctgtatgtgcaaaaagcatttctagactacagggagcccaggataataagtattaagtcttgcatttgagttcacgttagaaaa

SEQ ID NO: 122291 - DNA, 201 bp, Homo sapiens
cacacacttgaggttaagtccagaccaatcaccttgctggtgacctagctctcaggaagaaaaaaagctttgatagacagggtttgctggtttctatggtwggaatattccatccatggccaacttaagccaccaaggtgacatcactgaatgcaaagctgggaagagaggctccccgttgatttagtgattctgcaaggc

SEQ ID NO: 122292 - DNA, 201 bp, Homo sapiens
ataaatttattctgaccatcaggcatccctggagtctctctgaatctgctgtgattctggtggctgcctgatatgcgaatcactttttttctcttcctcarttaaactcccattaaatttaatttgtctaaagtttcttttaacaggttccttggcttaggtccttgaggcagtgactgtgcattattttttcttgggagt

SEQ ID NO: 122293 - DNA, 201 bp, Homo sapiens
gaccaatcaccttgctggtgacctagctctcaggaagaaaaaaagctttgatagacagggtttgctggtttctatggtaggaatattccatccatggccarcttaagccaccaaggtgacatcactgaatgcaaagctgggaagagaggctccccgttgatttagtgattctgcaaggccaaatttaattctcaatgttta

SEQ ID NO: 122294 - DNA, 201 bp, Homo sapiens
tctttgttccataaatttattctgaccatcaggcatccctggagtctctctgaatctgctgtgattctggtggctgcctgatatgcgaatcactttttttytcttcctcaattaaactcccattaaatttaatttgtctaaagtttcttttaacaggttccttggcttaggtccttgaggcagtgactgtgcattattttt

SEQ ID NO: 122295 - DNA, 201 bp, Homo sapiens
aaaaaaaatgagctctgcttcagcgagatagcaggtgacaactaaaagtcagactcgagctgattcttgtactgaacctctcctggttaacaacagcaacrgtcatagcaatacacaaaccaaaccaaaacaaaacactttcattttttcctcatcattagtaactgaaatcacctaattatcgacatggtcttttgggga

SEQ ID NO: 122296 - DNA, 201 bp, Homo sapiens
taacttatgcgtctgttacaatacctgagtcttggccaatcttcagcgactcatacagcagccatacttccaccactcatacactgctgagtgctcaaacwgttactataaggcaaacaccaacctgtaaccaatccagctgtttctgtacctcacttccgagttctgtagtcatttcccttctttgttccataaatttat

SEQ ID NO: 122297 - DNA, 201 bp, Homo sapiens
agtactcggctccatttttctttctctgtttcattatctaacaaatactctcccatagtatggcgaatcaaatctctgaactatttttcccttgatctaamaataaaatccacttatgggcattaattaatatttattattagcatttactttctctctatagtctcaaagccctttatcaacatttcattatcaatctgg

SEQ ID NO: 122298 - DNA, 201 bp, Homo sapiens
aatgcacccaataggagggtggttctcaaataattgacttttgtcgctaatatgaagtaggttaaatgcagggaaaatagtcgtctggcctcattctacaraatgagatgctaataattttaggttagtcattttcttcctgaagagggaaaaaaaagtaacagctgcctcctaacgacttaaaaagagtgtagggaataa

SEQ ID NO: 122299 - DNA, 201 bp, Homo sapiens
ctttcctgaaaagtattatctttctttttattttctagcacagtggttatcaaatttcagtgcatatcagaatcatctggagggctcattgaaacaaggaygctggccccacccagagtttttaattcagtaggtctgaagtggggctgagaatttgcatttctactaagttctgagataaagctgatgcgcttgtttggg

SEQ ID NO: 122300 - DNA, 201 bp, Homo sapiens
gcaaaattacctctgcaatccatttgctatctctcattttgacccaggaaggaagagcatttcttctgcttcagcttggggaaatttcgaccccatcaggytaacagggagtgctcttagccattacatgagcagtggctgtcagtgttacagcgtttagagaccataacatgggaatggtcattcagtttttcaaaaata

SEQ ID NO: 122301 - DNA, 201 bp, Homo sapiens; identical to SEQ ID NO: 20580

SEQ ID NO: 122302 - DNA, 201 bp, Homo sapiens; identical to SEQ ID NO: 20582

SEQ ID NO: 122303 - DNA, 201 bp, Homo sapiens; identical to SEQ ID NO: 20584

SEQ ID NO: 122304 - DNA, 201 bp, Homo sapiens
aggaaaataatatttatagtagaaataaaatgtgatgagattttgttaagatcttctgctggctcactcaaaagactactgcttctccgttcaagctgccrcagtacatctatgctagcaggggaaaaaaatttcattggctcaatgataagataatatcagtaagcaatttattaaagagtctgccatccatcataggaa

SEQ ID NO: 122305 - DNA, 201 bp, Homo sapiens
atctaatctaaatatttgcaatagaatcaagtctaccattgcttgtaccaccagcatctctatgaacagtcatctgactcatgggatgggcattaagaccrgattagttgtggtttgtataatttcttgaaactggcatgcaccagttctgaccaactacctgagcttacatagattcaacaaaatacaatcctctttagg

SEQ ID NO: 122306 - DNA, 201 bp, Homo sapiens
gattagggaaatttagtttaggattatggagtctgccacattctggtagtaacaacatgcttttttccaaacagacacttattattctaaagtgtcactayttttaattaaatggtttattggtaaaacccttctatgtgatgaagggtatgtgtaggtgaagtaaaatttgtcaaaggtaaaactatgctcttctttttg

SEQ ID NO: 122307 - DNA, 201 bp, Homo sapiens
ttttaaaattaaaaatatctaatttttttaaatgttcaaactagttagcaggcactagacactagagcattgctcagcctgtggcctacatggaagctcakggttaaaaatcatgaaaaccacctgaaaacttataaaatgattaggtagaaggttagaggacactctactcttttcctcaaagacagtaaagccattttt

SEQ ID NO: 122308 - DNA, 201 bp, Homo sapiens
ggaggccaatgtgggcggatcccttgagcccaggagtttgagaccagcctgggaaacatggcaaaacctcatctctattaaaaaaataaaaacaaaaaatkagctgagtgtggtggtgcttgcctgtagtcccagctactcaggaggttgaggcaggaggatcgattgaacctgggaggtcaaggctacagtgagtggtca

SEQ ID NO: 122309 - DNA, 201 bp, Homo sapiens
gtgctagcagataaagaggcttcaaaacaagacacacttggctctgggttggaggaacaggtagactcatagaaaaatcaatataggtgcagataagtgcracacaatgtgccaaatgctataatcaaggctgaagaaagagtttcaagagtcctgacatgggaatgaatactgtttctgggagataaaagcaccgcagag

SEQ ID NO: 122310 - DNA, 201 bp, Homo sapiens
aagtgcaacacaatgtgccaaatgctataatcaaggctgaagaaagagtttcaagagtcctgacatgggaatgaatactgtttctgggagataaaagcacygcagaggagatgacctgtgagcttggcctggaaggtgattaggatttctccaggggaaggtccttgcagtccagacaacttgttgagggagtcactttaa

SEQ ID NO: 122311 - DNA, 201 bp, Homo sapiens
tctggcccacagtgctttgccttcagtcatgacagagccaagctcaagaggcacctgagttaataccctcattactcatctctagaggaaatccagccacracaaacacaagggcacgtagcaacagatgctgaataataacgatatgcaaattcatcttggaaactgatcctggtcctgctgaacagggacagaagaaac

SEQ ID NO: 122312 - DNA, 201 bp, Homo sapiens
tgtacatgtatgagtgaccagctttcaggttggtaataccttctgctttctgctcatgatttgctctgcagccttggggaagacatttctctccagtcttyctccttgttcaagagaagaacttggctgactcttatgtgaccttgctaggacctgtgacatgaaagatatgctatttttaaatgacctgaataaaaaagt

SEQ ID NO: 122313 - DNA, 201 bp, Homo sapiens
atggagggcttgaaatcctctaagagcccaacttctcgagttttcctgaggctatctgaaaacatgcaatttaggcaatgaaagaaatgggcaggtcacasatgaggacaaatgtaaaaaactaaaataactttcatgtcatttgtagaatggagatacattctctgtgtaagtgtttcattaaagtacacaagcaggttc

SEQ ID NO: 122314 - DNA, 201 bp, Homo sapiens
cacattataaaattctatcaccatcatgttggaataaagcactctgccattaattgaattttcatctagtgttatttccagtttcggagatatctgtcacygggtttctgagtccatttgttctcatatctatttctattttctattggtttgttataacttctgtaagacaagttctttctttttattcaattcagccca

SEQ ID NO: 122315 - DNA, 201 bp, Homo sapiens
aatcgtctctgagtttctttccagctttcacattataaaattctatcaccatcatgttggaataaagcactctgccattaattgaattttcatctagtgtyatttccagtttcggagatatctgtcactgggtttctgagtccatttgttctcatatctatttctattttctattggtttgttataacttctgtaagacaa

SEQ ID NO: 122316 - DNA, 201 bp, Homo sapiens
gtgattctcctcagcctcccgagtagctgggattacaggcgtgcaccaccatgcccagctaatttttgtatttttagtagagacggggtttcaacatgttrgccaggatggtcttgatcgcttgacctcgtgatccaccctcctcggcctcccaaagtgctgggattacaggcgtgagccaccgtgcccggcccatctctg

SEQ ID NO: 122317 - DNA, 201 bp, Homo sapiens
aaaggaaatgatctctaagtattcgcctcttacaaaggctgatttcaaaacaatgtagtaccataatttggagatttgtcaaaacattctaacccttctaygaagccatagaatgcaattgatacatctacacaatggatgaatatcataattgttttaaagaaaatggcatagggaacaacacttgcctaaaagaatttc

SEQ ID NO: 122318 - DNA, 201 bp, Homo sapiens
ctttagtaagatttaagggacagaatgtgcaaaatgattttatcaaagactttaacattaccttctctaccagcttccaggaagcccacagctttgcctcrggccaggctgtgccatggagcccactgtgtgcggccatggccagctgccactctctgatccttctcaatgggaccatccagggagaccctctggacctca

SEQ ID NO: 122319 - DNA, 201 bp, Homo sapiens
tgattgatcaatacatgactgcctccagtttcattggttttgtgtgcagaaaacagtttactgatgttagcctaagtatatattgtggattaatattctgwgattcaaaagcaaaaaaaaaggaaatgatctctaagtattcgcctcttacaaaggctgatttcaaaacaatgtagtaccataatttggagatttgtcaaa

SEQ ID NO: 122320 - DNA, 201 bp, Homo sapiens
tgcattcttgttgtaatgcacatatgtattacaccttgtgtataatatacacgtttaccaagtgttagccatgaaggccatatcttccagttcatttgctygttcattcagttcatatactaatatgtattcattcggttcgtatactaagggccctgtcctaggtgctggaggtaccaaagtaagatagatatgacttct

SEQ ID NO: 122321 - DNA, 201 bp, Homo sapiens
gccacattcataaactccttccaggatagctagctctagcctggctaatttccatggcttctacttaacctaccagacagtaaatagcttgctctcgctgmtgcctgccctttccctctgctattaccatgaaggggagtgagcaaggccaatatcctctcttaaaaccacttccagtctctctaacagtggctcttatga

SEQ ID NO: 122322 - DNA, 201 bp, Homo sapiens
tcttgtacagacagcatgcagcgaatgaggcaggaacagacatgcttatagttaaataaccaatatggatctctcttgctagacactatggagatatggcrataatctctcttcacaataaattggcacttgcaattcactgtcctcacatataaggctcggcacaattttctagacaagagaagcaccattcaacattcc

SEQ ID NO: 122323 - DNA, 201 bp, Homo sapiens
cttttgttggtatgcatttggaaatatcacttagcagcttgttaagctccctgttgttgatgggcttgcagagtccagtggaagccatcatcaccttgtgycagtttccattttcctcgagcctgcagaggatgtccgtgatcgctcagctagctggggagaatcatttccatgtctacatgaaaggtgccccagaaatgg

SEQ ID NO: 122324 - DNA, 201 bp, Homo sapiens
caagaaatgtagctttggtttgttaaagtgaactaaatatggcctgagaaggactctgtacttctatatttgagtccttgtggaccaaccttaacctaacytaatagacaagattgaaaacctaacttatgcgtctgttacaatacctgagtcttggccaatcttcagcgactcatacagcagccatacttccaccactca

SEQ ID NO: 122325 - DNA, 201 bp, Homo sapiens
tctgacaccaaccacccagaattaggccaaactttacagattaagggtaaagcctccacaagaatgccctcacttcagacaccagccacaggtgtggggckctcgataccacctgaacttctgattagttggctacaaacttaggagttcccattactcccttgggttcaacaatttgctacaatttacagaactcaggaa

SEQ ID NO: 122326 - DNA, 201 bp, Homo sapiens
gtccattcccttctgcatccctatgcctgggaatgctcaaggcctttccccagaaaagctgactggaagcgcctcacttagctcacatggagggcttgaartcctctaagagcccaacttctcgagttttcctgaggctatctgaaaacatgcaatttaggcaatgaaagaaatgggcaggtcacagatgaggacaaatgt

SEQ ID NO: 122327 - DNA, 201 bp, Homo sapiens
atgccaaataattaaaaactataagaatagaatttgaaactgcgaagtcttcccatgcaatagatcctgtgctgggtttagtaagaaacagaatgtggaawgagacaggatttcttccttcagggagctcacagtctgctgagtgcagatgtaaacaactagatttaatgcaagacaccctgcactatagcagcaatgtga

SEQ ID NO: 122328 - DNA, 201 bp, Homo sapiens
catcaagggcaatctagaatgcctgacaagtctaggaacatctgcatagctgtgtctttttcgttgcttttagtatataataaaattattttaaaagtaamtcaaaatgaaagtgtctttccaactttttttttgagttgtactacatttaagatatatttgtatcgaggactacagctctgtccatcatacactgacttt

SEQ ID NO: 122329 - DNA, 201 bp, Homo sapiens
atcaaggaagggctggttggaggagaggaaaggggctttgctcattcttctggaagccaataacgtagtctcaactattagaattcaattagaagttaacragttacttaaaaatgtaacatatatatatatatcctttctttaaaatttaatgcataagctatttaataaaaattaaatgaactgagatcattttctttt

SEQ ID NO: 122330 - DNA, 201 bp, Homo sapiens
gtacctatagatgcacataaattaggaaatgcttatgctattattaactcacagagatacagagtccctgctttcttcagctattatttgaaatgatgaaycctggcaaatctgaaaggaaatcattacaagtcttccccagaatcttataatcacctttatttctcacccatttttagagagagtgtctgcttaaccttt

SEQ ID NO: 122331 - DNA, 201 bp, Homo sapiens
catctcattctgaatatataattttaccactctcaggtgaaaagaagaggaaaggatatgagaaagaaaagtaaagaagacaggaagaattggaggttgayagggacactgaggaaccaatggcagcctttcaaacatgtgaaagcagaaattcattttccaaagcctccacggatggaggtagaaaccatagtccactct

SEQ ID NO: 122332 - DNA, 201 bp, Homo sapiens
tagaaaggctgattgggaccagattgtggaaggccttgaatgtcaatagaggatccctgaactttattctccaggcaacggggaagaatgagatggtgccaagaacactgactgtttatcccacgcaagcacaactcactggacacgcagtgatagtgcaccagggcagctgctttatggaggttactttaatacatttga

SEQ ID NO: 122333 - DNA, 201 bp, Homo sapiens
tcattatcagagcaggaagcatctgtggcatccccttttacctctaaaacaaccaacatccagtgtgtgcctcatctcatcaggtaagtcattttttcctyttccagccctacaatcaatgggcccattgtctggctctgcagacagaattcaactacaagctaaagtgataaatactgcaacagaggaatgggtgaagtg

SEQ ID NO: 122334 - DNA, 201 bp, Homo sapiens
ttgagggaacaaaaaaagttgaaggtattctcatgcgaccagaaatgtacatgtatgagtgaccagctttcaggttggtaataccttctgctttctgctcmtgatttgctctgcagccttggggaagacatttctctccagtcttcctccttgttcaagagaagaacttggctgactcttatgtgaccttgctaggacctg

SEQ ID NO: 122335 - DNA, 201 bp, Homo sapiens
ttggttaatgcttttggatttgattcaggtctactccacatttttcattctgaggccaggttgaacggacagatttggtattttctcattgtgagtcacaraaagcagagccacagggcaagcccggctgtgcaagcatgcttgaagtctatgctaacatctctttggccagagaaagtcacacagggaagcccaaaatta

SEQ ID NO: 122336 - DNA, 201 bp, Homo sapiens
aaaatattgatgtttaaaaacatcatcaggaaaacatatcagtttgaattaagttgcaaactctttttgaaatgcaacaacttgaggggatttggaaaccraacatggtggagtcctttataaaatgcaggagagaaatgaaacaaatagctctttttcaaaaagttgttgtttaagaaataattcactcgtgtgttagca

SEQ ID NO: 122337 - DNA, 201 bp, Homo sapiens
aaatcaatgttgtgacaaatatactacatcaagatgtctctgggctcattgcacagtaaagcccttttgttggtatgcatttggaaatatcacttagcagsttgttaagctccctgttgttgatgggcttgcagagtccagtggaagccatcatcaccttgtgccagtttccattttcctcgagcctgcagaggatgtccg

SEQ ID NO: 122338 - DNA, 201 bp, Homo sapiens
cagggcaagcccggctgtgcaagcatgcttgaagtctatgctaacatctctttggccagagaaagtcacacagggaagcccaaaattaagggatgacaaartacaccccaccactctgaagccagcaattcagtctaccacagttactgtgtaaaagaaaggcaagaaactacaatgagcatgagagagaagaccaaagag

SEQ ID NO: 122339 - DNA, 201 bp, Homo sapiens
gtaccatttaggcattccaacacattttatatgtgagaaaatgaaggaccaaggagtttacatgattaccccagaacacatattgaacaaagcaaagaaayactatagagttttatcatcccacattggacactcatttaccactactctacctgtacactcataaatacaaacttaaatatgcacaccccacttcttccc

SEQ ID NO: 122340 - DNA, 201 bp, Homo sapiens
tcagtaaacattgtacataatcaaatttaaatctgatccatgactgggcgcagtggctcacacctgtaatcccagcactttgggaggccaaggcgggtggwtcacctgaggtcaagagttcaagaccagcctggccaacatggtgaaactccgtctttactaaaaatacaaaagttagccaggcgtggtggcctgtacctg

SEQ ID NO: 122341 - DNA, 201 bp, Homo sapiens
taagattatttatcagttgagcatctcttcaccttatttttcactcagcccacccaccctgcttctgtcccttttgtttaggctgcagaaaataaaaggartaaatgacttcctggcagcagaaatggaaggaccctctcccagcccccctgcaccaccaccaccaccaccacacacacacacacatgcacacacacacac

SEQ ID NO: 122342 - DNA, 201 bp, Homo sapiens
aaaataaaaggagtaaatgacttcctggcagcagaaatggaaggaccctctcccagcccccctgcaccaccaccaccaccaccacacacacacacacatgmacacacacacacttgaggttaagtccagaccaatcaccttgctggtgacctagctctcaggaagaaaaaaagctttgatagacagggtttgctggtttct

SEQ ID NO: 122343 - DNA, 201 bp, Homo sapiens
aattttcacagcaatttcatctttctgggccagactttgagctgatttgtattgctttttagtcttataaacatatgcactctttaagcggcagccagatktataagaatgttgttgcattcaaatgagttcatttggataaaattggtctttttgtcttccgattttcatgtagactctccttatgattgctgatggcca

SEQ ID NO: 122344 - DNA, 201 bp, Homo sapiens
caaagcaaatagtaattactattcacgtgctggaaagctccttcattgcctaaaatagtgctgggcttaatgaatgcttgggagaatgattcagtgataaytcatctataataggctgcttttaaaattatgacaacaaaccatgcaggccaggtataggatagataggcagatctaatctaaatatttgcaatagaatca

SEQ ID NO: 122345 - DNA, 201 bp, Homo sapiens
ccaccaccacacacacacacacatgcacacacacacacttgaggttaagtccagaccaatcaccttgctggtgacctagctctcaggaagaaaaaaagctytgatagacagggtttgctggtttctatggtaggaatattccatccatggccaacttaagccaccaaggtgacatcactgaatgcaaagctgggaagagag

SEQ ID NO: 122346 - DNA, 201 bp, Homo sapiens
cagggagaatcagatcgatgggaggagaatatagaagaatatagaacagaaataaaagtgatcagagtaaattcaatggtattagagcaagataattcatmattttcacagcaatttcatctttctgggccagactttgagctgatttgtattgctttttagtcttataaacatatgcactctttaagcggcagccagatg

SEQ ID NO: 122347 - DNA, 201 bp, Homo sapiens
aaatacaatcctctttaggagaaagtatacctgttacaaagacaccattgccccagatggagaacactatgccttggaaatgtcacagtttggaggattayaggaaacacgtccttttctgtggaacagaagttatccaggtcaagccctctgggcaggggcctgtacgagcagtcgttttgcaaacaggttagtggattc

SEQ ID NO: 122348 - DNA, 201 bp, Homo sapiens
aggagaggaaaggggctttgctcattcttctggaagccaataacgtagtctcaactattagaattcaattagaagttaacgagttacttaaaaatgtaacatatatatatatatcctttctttaaaatttaatgcataagctatttaataaaaattaaatgaactgagatcattttcttttttaataaagtggaattatca

SEQ ID NO: 122349 - DNA, 201 bp, Homo sapiens
cagcaactacaactctttggaaattaccagtatctcatgcaagatgtagccattactttgatggtctgtttaacaagtaagctctttagcaaagaaaactrtattgtttttatttatctatgaaattctagaaacagtcacacaaaaaggaacttttgagaaagaggcacccttatttccaaaacctcattatttacaatt

SEQ ID NO: 122350 - DNA, 201 bp, Homo sapiens
tcatgcttgaacatggggagagttggattagggaaatttagtttaggattatggagtctgccacattctggtagtaacaacatgcttttttccaaacagayacttattattctaaagtgtcactatttttaattaaatggtttattggtaaaacccttctatgtgatgaagggtatgtgtaggtgaagtaaaatttgtcaa

SEQ ID NO: 122351 - DNA, 201 bp, Homo sapiens
ggagaggaaaggggctttgctcattcttctggaagccaataacgtagtctcaactattagaattcaattagaagttaacgagttacttaaaaatgtaacatatatatatatatcctttctttaaaatttaatgcataagctatttaataaaaattaaatgaactgagatcattttcttttttaataaagtggaattatcag

SEQ ID NO: 122352 - DNA, 201 bp, Homo sapiens
tgagcacttgaagagccttagaatgtgtacagatagaccagtgtcattagaaatccaaaaacatggatgatcttcctagttctagtcttgcctccgacttrctatatgacactgagcaagttatttggagcttttgcacacttaattccatgatattagttatgtggtaatggggctgcttaaatctttcccacagcaata

SEQ ID NO: 122353 - DNA, 201 bp, Homo sapiens
gccagaatctcctggcttgacattgtatgtatggaaaactatagacgtccctgcctgccagagactctgttggaaacttatcagaatggaagcagtgagcaaaaaataggtgtagtttgaaaaactccaccataattctaacatgcccttccttcctccttgaggactccttcagtctttaccacctggagcctaaaatgg

SEQ ID NO: 122354 - DNA, 201 bp, Homo sapiens
cttcctccttgaggactccttcagtctttaccacctggagcctaaaatggctaccacacgacacattattaacaattattggtaagttaattgaatgaatgaatgaatgaataacaaatgaaaagggacatggacctcctccaagagaaagtcctcctagtcatctgcattttgttttctcagaaataaataaattctaac

SEQ ID NO: 122355 - DNA, 201 bp, Homo sapiens
acagtgatcactgaggttgcctcacagttagagaataaacacccccaaaggagtactgctcctgaaaaagttttctggccctttttatgccttctcggtcycaggcagacccacggcctcccgttcagagtttgagttctggtaccttctctcacccctgtggccagttcagccttcctccttctttccctccccacccag

SEQ ID NO: 122356 - DNA, 201 bp, Homo sapiens
gattgcaagctcaaaaaagacaaagcactgagaaattaaaaaataaagtatatttgattaacatatttaaaaaccaacagaagagttggaagataagcacwttgtttttaaaaataaagttggaaactggaaaaaacagatttagaagtggttgcctctaggaaggagggggtgaggtggtgtggagacagactactggtt

SEQ ID NO: 122357 - DNA, 201 bp, Homo sapiens
aaggaactaaggatctaaagacaaaggtttagtcattgtcccagagacacggactagtcagaaagagaggcataaatggtggcacaatcatgagattggtmcctatagatgcacataaattaggaaatgcttatgctattattaactcacagagatacagagtccctgctttcttcagctattatttgaaatgatgaatcc

SEQ ID NO: 122358 - DNA, 201 bp, Homo sapiens; identical to SEQ ID NO: 20576

SEQ ID NO: 122359 - DNA, 201 bp, Homo sapiens
tttacttggtagcaatcagttaagctgcataacctcgtggaggaccacaacaaagtccaggttacaatcattgtaaaagacaaaggtaagtgatgtgttargccatcttcagcatcttaatatttcaggggggaattggtctcatttgtccttaattattagtcaaggagaaataatcttttcagattgaacccagaactg

SEQ ID NO: 122360 - DNA, 201 bp, Homo sapiens
agcagtggctgtcagtgttacagcgtttagagaccataacatgggaatggtcattcagtttttcaaaaatatgtattttggaggatattacacattttaarcacctagatgtcactttaatatagctagaaactattttctggatagaaagctttcctgaaaagtattatctttctttttattttctagcacagtggttat

SEQ ID NO: 122361 - DNA, 201 bp, Homo sapiens
tgcaagacatcagggagaggggtctgatggagggcagctcttcttcctgctgctcccactccactctgagctgtctgaggcctatttacctggacagggcrgcagatcctggtgctgttcgcgctgtttccacaaccttgttgcatgttcccgtgttctactgtggtgcacacctcttctctcagggacacaccacatcta

SEQ ID NO: 122362 - DNA, 201 bp, Homo sapiens
cacacagtttaattgacatggtctatttactctttgaattgataggaattcataaaatattgtcatccaggccctttcaaggtagatcacttgttctaaayggagtgccagacaaagaacaatcttgacttccttttatttctgctttgtcatagcaagaggtgaacaaagtatgtcttggtagttactggctgacatagt

SEQ ID NO: 122363 - DNA, 201 bp, Homo sapiens
acttatgaccactgagactatgaatctaaaggggctttgagcacaatgaagagccaaacaagtagagggtgttcactaattaactggttagttaattacaycctgttgcctccgaagaacatcctaaagctgtgtccaatgatgtataaaatacagtacagcagttaaacatagctgcaaaagaatgggaacaaatgattg

SEQ ID NO: 122364 - DNA, 201 bp, Homo sapiens; identical to SEQ ID NO: 20593

SEQ ID NO: 122365 - DNA, 201 bp, Homo sapiens
cagcctggtagagggcaaaaatatcaagtaaatgagtaagtaagtaaacagataacagatggcaataaatgtatgaagaagattaaaaggtgatatgatayagataaggacatatagctaagaggagctcttgttttaactgagatcagaatgatagtaattaactagccacaacaagataagaagaagccccttttcagg

SEQ ID NO: 122366 - DNA, 201 bp, Homo sapiens; identical to SEQ ID NO: 20587

SEQ ID NO: 122367 - DNA, 201 bp, Homo sapiens
ccagaggctactgacaaaatagtggtgctagccgttccagtttcagcagcagccatgcaagcagcagacacagtggtggaggtggccacggcagcagcagmagatttggtggaggtggctatggaggcttttgcaacactaatagatatggaggaaattataactcccagagagttgactggtgggtaactgagcctgctt

SEQ ID NO: 122368 - DNA, 201 bp, Homo sapiens; identical to SEQ ID NO: 20589

SEQ ID NO: 122369 - DNA, 201 bp, Homo sapiens; identical to SEQ ID NO: 20590

SEQ ID NO: 122370 - DNA, 201 bp, Homo sapiens; identical to SEQ ID NO: 20591

SEQ ID NO: 122371 - DNA, 201 bp, Homo sapiens; identical to SEQ ID NO: 20592

SEQ ID NO: 122372 - DNA, 201 bp, Homo sapiens
gtggaaatggaagggattcattcaaaggtagggataaggacaaaatccatttcaattaaaaaattaccttatgtataggataagattattgaaatggaaaytattctgtttattagtattgcttaacttatttgcttctgtgctcaacttcactgtttaaaaaacctcatcgaacatcaaactgtaatatctacataaaaa

SEQ ID NO: 122373 - DNA, 201 bp, Homo sapiens; identical to SEQ ID NO: 20594

SEQ ID NO: 122374 - DNA, 201 bp, Homo sapiens
ttacttgttagttaggagtcacataaaggagaataaattgcagaaattttttttagaatttttttctctttttaaagacaagatcttgctgtgtcgcccaygctggagtgcagtgatgcaatcatggctctctgcagcctcaatctcttaggctcaagcagtcctcccaccccagcctcccatgtagctgagactacaggc

SEQ ID NO: 122375 - DNA, 201 bp, Homo sapiens
atggatccgacattcttccttttcaatccacgtgagtttccttttttcatgatgtgagcaaattgaaacctgtgtgctagtaccttgcaaaacataccccrccacagagaaggtttctgattagcctagtcctgttataatcattggttttgcaagagtaattccggaaatgttctcaatacaacctaattcccacacgcg

SEQ ID NO: 122376 - DNA, 201 bp, Homo sapiens; identical to SEQ ID NO: 20597

SEQ ID NO: 122377 - DNA, 201 bp, Homo sapiens
ggactccgggcccccctttctgtttaattctctcacttttgtttctaatttaagctttcttcttttcactctggcttcctcattctttcagcgtccccctktcattgtctctcttgtttttttcacatttttcactttattttttttaacacaaataatgttaaaaagaaatttaaaggatactttttaaaaagttaaaag

SEQ ID NO: 122378 - DNA, 201 bp, Homo sapiens
catcttgtccagggcaaatgctggacccagtacaaatggttcccagttttttacctgcactgctaagaccgagtggttcggcaaggtgaaagaacgcatgrttattgtggaggccatggggcgctttgcggggaatgggaagaccagcaagaagatcgctgttgctgactgtgggctactctaatatgtttgacttgggtt

SEQ ID NO: 122379 - DNA, 201 bp, Homo sapiens
aaggcaaggaaatgttcacagtcctataaaatcagtgcccagagagttagctagacctacactgtttaatactatagccactagttacatatggctatttmaattaattaggctgtgcacggtggctcacgcctgtaatcccaatactttggaaggctgaggcgggtggattacctgaggtcaggagtttgggaccagcct

SEQ ID NO: 122380 - DNA, 201 bp, Homo sapiens
gaaacctgtgtgctagtaccttgcaaaacataccccaccacagagaaggtttctgattagcctagtcctgttataatcattggttttgcaagagtaattcmggaaatgttctcaatacaacctaattcccacacgcgcaatgaaacacaggaggattttgcaggtagatatttaatatacaaatagtccaaagagctgttc

SEQ ID NO: 122381 - DNA, 201 bp, Homo sapiens; identical to SEQ ID NO: 20599

SEQ ID NO: 122382 - DNA, 201 bp, Homo sapiens
gacactgccaccactgggcgcctcatactgccagccatggtcaaccctactgtgttcttcgacatcaccgtcgatggcgagcccttgggcagcgtctcctycgagctgtttgcagagaagtttccaaagacagaagaaaactttcatcttctgagcactggagagaaaggatttggttataaaagttcctgctttcacaga

SEQ ID NO: 122383 - DNA, 201 bp, Homo sapiens; identical to SEQ ID NO: 20595

SEQ ID NO: 122384 - DNA, 201 bp, Homo sapiens; identical to SEQ ID NO: 20596

SEQ ID NO: 122385 - DNA, 201 bp, Homo sapiens
gcttgaaatgttagcagagaaaggcctggtaaggtttctgctcagagaaaatgtggtggccccctgggatggatcccggattgtggaaggttactgatacmagttgggtggggatgatattggaatcacccatccaacacagagaaaaccatactcatatgcactagaaaaccagtgaagaaacaaaaattataatgagtt

SEQ ID NO: 122386 - DNA, 201 bp, Homo sapiens
ataccactaaatcctcatcacatcactgtaagggaggcacattctcctatttatagaaagaaaccaagtattagagaggttaggtgacttatccaaggtcrtaaactgctaggaagctgagctgaaatcttaactttttctggtcccaaagacatcttcctacgacatggtttcctaattgagcatctacaacttccgagg

SEQ ID NO: 122387 - DNA, 201 bp, Homo sapiens; identical to SEQ ID NO: 20601

SEQ ID NO: 122388 - DNA, 201 bp, Homo sapiens; identical to SEQ ID NO: 20602

SEQ ID NO: 122389 - DNA, 201 bp, Homo sapiens; identical to SEQ ID NO: 20603

SEQ ID NO: 122390 - DNA, 201 bp, Homo sapiens
ccatgcccgtgacactggggtactgggacatctgagggctggcccacgccgtctgcctgctcctgcaatacacagacttaagctatgaggaaaagaagtayatgatgggggacgctcctgactatgacagaagccagtggctgaatgaaaaattcaagctgggcctggactttcccaatctgccctacttgattgatgggg

SEQ ID NO: 122391 - DNA, 201 bp, Homo sapiens; identical to SEQ ID NO: 20605

SEQ ID NO: 122392 - DNA, 201 bp, Homo sapiens; identical to SEQ ID NO: 20606

SEQ ID NO: 122393 - DNA, 201 bp, Homo sapiens; identical to SEQ ID NO: 20607

SEQ ID NO: 122394 - DNA, 201 bp, Homo sapiens
gatagagtaaatgggcctttctgcagaatccacaccgaccagcaccatgcccgtgacactggggtactgggacatctgagggctggcccacgccgtctgcytgctcctgcaatacacagacttaagctatgaggaaaagaagtacatgatgggggacgctcctgactatgacagaagccagtggctgaatgaaaaattcaa

SEQ ID NO: 122395 - DNA, 201 bp, Homo sapiens; identical to SEQ ID NO: 20609

SEQ ID NO: 122396 - DNA, 201 bp, Homo sapiens; identical to SEQ ID NO: 20610

SEQ ID NO: 122397 - DNA, 201 bp, Homo sapiens; identical to SEQ ID NO: 20611

SEQ ID NO: 122398 - DNA, 201 bp, Homo sapiens; identical to SEQ ID NO: 20612

SEQ ID NO: 122399 - DNA, 201 bp, Homo sapiens; identical to SEQ ID NO: 20613

SEQ ID NO: 122400 - DNA, 201 bp, Homo sapiens; identical to SEQ ID NO: 20614

SEQ ID NO: 122401 - DNA, 201 bp, Homo sapiens; identical to SEQ ID NO: 20615

SEQ ID NO: 122402 - DNA, 201 bp, Homo sapiens; identical to SEQ ID NO: 20616

SEQ ID NO: 122403 - DNA, 201 bp, Homo sapiens; identical to SEQ ID NO: 20617

SEQ ID NO: 122404 - DNA, 201 bp, Homo sapiens
tctaagaaatatgggactatgtgaaaagaccaaatctacgtctgattggtgtacctgaaagtgatggggagaatggaaccaagttggaaaacactctgcasgatattatccaggagaacttccccaatctagcaaggcaggccaacattcagattcaggaaatacagagaacaccacaaagataatcctcaagaagagcaa

SEQ ID NO: 122405 - DNA, 201 bp, Homo sapiens
tctgagacaaaacttccagaggaacgatcagacagcagcgttcacggttcacgaaaaaccactgttctgcagacactactgctgatacccaggcaaacagrgtctggagtggacctctagcaaactccaacagacctgcagctgagggtcctgtctgtttgttagaaggaaaactaacaaacagaaaggacatccacacca

SEQ ID NO: 122406 - DNA, 201 bp, Homo sapiens
caaactgcaaagtggcagcgaggctgggggaggggcacccaccattgcccatgcttgcttaggtaaacaaagcagctgggaagctccaactgggtggagcycaccacagctcaaggagggctgcctgcctctgtaggctccacctctgggggcagggcacagacaaacaaaaagacagcagtaacctctgcagacttaaat

SEQ ID NO: 122407 - DNA, 201 bp, Homo sapiens
cgaatactgtgcttttccgacgggcttaaaaaacggcgcaccaggagattatatcctgcacctggcttggagggtcctatgcccacggagtctcgctgatygctagcacagcagtctgagatcaaactgcaaagtggcagcgaggctgggggaggggcacccaccattgcccatgcttgcttaggtaaacaaagcagctgg

SEQ ID NO: 122408 - DNA, 201 bp, Homo sapiens
cacaggttccacatctgaggcctcaaccaaccgtggattgaaaatgtttgtaaaagagaaacaataaaacataacaacacaacaataaaagataatataartaaaaaatacagcataacaactatttacataacatttacattgtattaggtattataactaatctagagatgatttaaagcacacaggagaatgcatgta

SEQ ID NO: 122409 - DNA, 201 bp, Homo sapiens
gaggaacttgttagcaaaggagacaatgttagtcagggctctccagagagaaagaaccaataagatatatgcaggggtgtgtgtgtgtgtgtgtgcgtgcrcgtgtgtgtgtgtgttatatataaattatatatatatataaattatatatacatatataaaaaggccaccaatagaagacaattctcttactaattccac

SEQ ID NO: 122410 - DNA, 201 bp, Homo sapiens
ggtacttttttttttttttttttttttgagacggagtttcactcgtgtcccaggctggagtacaatggcgtgatctctgcttactgcaacctctgcctccygggttcaagtgattctcctgcctcagcctcccaagtagctggaattacaggcatgtgccaccatgcctggctaatttttatatttttagtaaagacaggg

SEQ ID NO: 122411 - DNA, 201 bp, Homo sapiens
gtctaaggactaatgagcagagagaaaagtctaggtttttttctttattaatgtttacctgctatagtatgcaaaatatccttgccataaaagccttatttcttttttaaaatttttaattgtattttaagttccaggatacatgtgtaggacgtgcaggaaaaagcctttattctgaaagatacaggagaaaaaaactca

SEQ ID NO: 122412 - DNA, 201 bp, Homo sapiens
cgtctaaggactaatgagcagagagaaaagtctaggtttttttctttattaatgtttacctgctatagtatgcaaaatatccttgccataaaagccttatttcttttttaaaatttttaattgtattttaagttccaggatacatgtgtaggacgtgcaggaaaaagcctttattctgaaagatacaggagaaaaaaactc

SEQ ID NO: 122413 - DNA, 201 bp, Homo sapiens
gcgtctaaggactaatgagcagagagaaaagtctaggtttttttctttattaatgtttacctgctatagtatgcaaaatatccttgccataaaagccttatttcttttttaaaatttttaattgtattttaagttccaggatacatgtgtaggacgtgcaggaaaaagcctttattctgaaagatacaggagaaaaaaact

SEQ ID NO: 122414 - DNA, 201 bp, Homo sapiens
gtacacctatgaatcgttttatatgtgtgtgcatacattatgatacagccctgatctttaaaaggagcaaaaatcagagaatcgtatgtcttaaagaactrtttccttacttttttatgctaggtaatgcccatgtgacaaacatgtaaatattcatcaaagaccacatgtatatattttaaaggcattttttcttctccc

SEQ ID NO: 122415 - DNA, 201 bp, Homo sapiens; identical to SEQ ID NO: 20622

SEQ ID NO: 122416 - DNA, 201 bp, Homo sapiens; identical to SEQ ID NO: 20625

SEQ ID NO: 122417 - DNA, 201 bp, Homo sapiens; identical to SEQ ID NO: 20618

SEQ ID NO: 122418 - DNA, 201 bp, Homo sapiens
gaaagggaaagcaaatagcttggaatttcttagaaaactcacctataccatctgttcagaacttactaaagaaatgactattaaaatgtcatttctttaayagtctttaaacaacaacaaaaaaaatagcctcagaatttcatggaaagtcatctctaaagggccaagtaaaaacatcctttgaatgagactttacaacat

SEQ ID NO: 122419 - DNA, 201 bp, Homo sapiens
tatgcagggctataaagtgcattggtctctgatccacctgctggtgaacatatttggagagtcaatagcagaagtcttgttctcaagagcatgagtactcyatgctgatgagactggaaggagggataagcactggtttggaggctgcaaaaagcaggctgaggaggtgtgaagagaagaaaacacataggaccaccagca

SEQ ID NO: 122420 - DNA, 201 bp, Homo sapiens
aagaatcatgaaccaaaaggaaattgtaaaagaggagaatgcctagaaatagaaatctcaagcataaaatggtatccagtgagagtgaagctgagcaaatrtttggtgagtagcttgtgaatccaagcaatgctggagattggcagcggggaggactgtggagagccagcataaatgactgagcatgggaacaaaacaaaa

SEQ ID NO: 122421 - DNA, 201 bp, Homo sapiens
caaagtacagacagttctccactttgatgagctgacttaggattttttgacattaccatgatgccaaaccatcatgatttcaagtaatgtacagcattcartaaattatgtgagttgttcaacacgttattaagaaataggctttgtgttagataattttgtccaaccaggcagcacatttaagttaggcttggctaatct

SEQ ID NO: 122422 - DNA, 201 bp, Homo sapiens
ccattctcctgcctcagcctcccgagtagctgggactacaggcacccgccactacgcctggctaattttttgtatttttagtagagacggggtttcaccgyattagccaggatggtctcgatctcctgacctcgtgatccgccccccttggcctcccaaagtgctgggattacaggcgtgagccaccgcgcccggccgaga

SEQ ID NO: 122423 - DNA, 201 bp, Homo sapiens
taaagtttcaaaacttgctgcacatcacatccttctttttatcagctttggtgcaccttagaacagaaatttctcccgggaggacaggatacaggagcctrtatttagaaagtacttattatgggttggatgaaggcctaactatgcctagagtcaagctgcttgaagccattctaatattcatttagttagaacggtaac

SEQ ID NO: 122424 - DNA, 201 bp, Homo sapiens
ctggaaaagagatatgaggccatgggtgagatttcctatcttgaaagaagactttagtgccagaaagtatgtcactgttaaaaaaaaaaaaaaaaaatacstcatgtgaagagggggaattcttatttaaaaatgactaatgttccgcttacttcaccttcatctagaatttataatctatgtatttcttaattgggtatt

SEQ ID NO: 122425 - DNA, 201 bp, Homo sapiens
ttgcagagttaagaggaagatttatgagtcatggaaccctccatcagatttggaagaaagtagaatgagcgcagaggtgacagacagccactgaggcccayggacaatctccacctcacgcttctctatcaaacttgaagatttattagtaatatgctgcctttggaagatgaaaacaaactagtgccaaggaggcgtatt

SEQ ID NO: 122426 - DNA, 201 bp, Homo sapiens; identical to SEQ ID NO: 20623

SEQ ID NO: 122427 - DNA, 201 bp, Homo sapiens
tctcatcctctttcacatttctaataaaaaatactggcatttcctttcccagtggagaagccccacccgaagcccaatcacattgccgggcttctaggctytaatgattaaataagtgattgctctgcctagctttaaaaatgtgtcttatataaggcagtcaagacacaatatccatcactgtaaaggaagccaagcatt

SEQ ID NO: 122428 - DNA, 201 bp, Homo sapiens
agcgtctaaggactaatgagcagagagaaaagtctaggtttttttctttattaatgtttacctgctatagtatgcaaaatatccttgccataaaagccttatttcttttttaaaatttttaattgtattttaagttccaggatacatgtgtaggacgtgcaggaaaaagcctttattctgaaagatacaggagaaaaaaac

SEQ ID NO: 122429 - DNA, 201 bp, Homo sapiens
gaccatgcttgatttcctgaacttgtagtaagaagaaggaaaacacagcacgctggagccaacaggtaggcgagaaaccaggtaggcgagaaacacgtttytcagttatgcagcccagcgtcgaggaaaaataacagcaactctacaaaatcagaaatcagcgtctaaggactaatgagcagagagaaaagtctaggtttt

SEQ ID NO: 122430 - DNA, 201 bp, Homo sapiens
ccaccagtttcaagatatcaacatgatgtcattgaatgtgaagttgggaagaagtgcgcaccaccagctctgcccaagcccatgcaagctggcctggcacscactggactctgcagaaccatcccagccccagagctccctgcagggtcagctcaggtctgtgctgtgactgcatcaaggttcagactctccctttgcctt

SEQ ID NO: 122431 - DNA, 201 bp, Homo sapiens
cgtctgaagacaacaggaaaaaaggtcagtagaaatagtgattctgtgtgcatgcatgtatgtatgtgtgtgtgtgtgtgtgtgtgtgtgtgtgtgtgtgkatgtttcaggtcttcatagaaaagaacctgcaatgtgtttctaaacttctttaacagtttcagcttccccaccctgctctcagcatcttcaagctttaat

SEQ ID NO: 122432 - DNA, 201 bp, Homo sapiens
ttccatcctgttatttaaacaaacaggtctggatcagattcagccagtggcagagtggtcataagtgacactaaaaggtcttaagtgaaagggaaggtgcrcatgcctaaaatcccagctgtgccgtgaatgaaccaaatgtctttgcccaaaggcagcttcagccctctggaccttttttatcacttggaaagttaagat

SEQ ID NO: 122433 - DNA, 201 bp, Homo sapiens
cttcttagtagaagtaattattagtgagattgtatacattatttgtaaaacactgtatagactgtcacatacagaaggtattgattaaatagaagttaccrtttaacattactttaaaagaagtaattactaaatgtcacaacattgatttaacaaatctttaaaaatatgtgctgtagtaatccatccagctatgaaaat

SEQ ID NO: 122434 - DNA, 201 bp, Homo sapiens; identical to SEQ ID NO: 20619

SEQ ID NO: 122435 - DNA, 201 bp, Homo sapiens
cactcattagctatgtaaagctggggcaagttgcttaatctctccaggcctcagctttctcttctgtaaaatgggaaccatgcctacttcttagtagaagtaattattagtgagattgtatacattatttgtaaaacactgtatagactgtcacatacagaaggtattgattaaatagaagttaccgtttaacattacttt

SEQ ID NO: 122436 - DNA, 201 bp, Homo sapiens
tatttttttaaagtggcagttctgttttcatttctctgaacccaattcatttccgttatttctaaatttttctctcttcttggtgtccacttagggctacrcagcttgctcctggcacgggcaccttgaatctcctcctcacacagatggagaccatgcttgatttcctgaacttgtagtaagaagaaggaaaacacagca

SEQ ID NO: 122437 - DNA, 201 bp, Homo sapiens
ttccctacctctcacattaagtcatggataattaaaggaaataagaaaataaatttgattctgacgaccatgtaaaaagtgagatgcagaatatggtgtayagacctacatattacagtttgatagacttgtattcaaatccaggtttaatcactcattagctatgtaaagctggggcaagttgcttaatctctccaggcc

SEQ ID NO: 122438 - DNA, 201 bp, Homo sapiens
tattataatgttaataaatgttaatagtgggattatcaaatatgatgaattaataaatgcaaacaaaagcatagtggttttcagtaccaaaaaatggaaaragaataacaagttgtcagcatgtctccagactcaccaacaggcacatgtatgttggcacatgtaattataaataaaaattaacacatcacaataaatgaa

SEQ ID NO: 122439 - DNA, 201 bp, Homo sapiens
gtgaacccgggaggcggagcttgcagtgagccgagatcgcgccactgcactccagccccgggaaaagagcgagactctgtctcaaaaaaaaaaaaaaaaaaggacttaaacctaagacctgaaactgcaacaattctgaagataacattggaaaaactcttctaaacattggcttaggcaaggatttcataaccaagaacc

SEQ ID NO: 122440 - DNA, 201 bp, Homo sapiens
ttagaggtgacagcagggaacgagccagggccattagtcagtttgctaagtagaaatgggaagcaagttcaatggagcaaaaaggtttctgctctgcagasttgatggagagcagtgtgattggtttcttaagggacaggcagaggggcaatgcgtaatttctcctcccctcactgaacatgcctgtttatcagagatgat

SEQ ID NO: 122441 - DNA, 201 bp, Homo sapiens
atttgaagatgatgctaccattgttgattatcctggatgtgtatgaatttagttgaaaagactgctgcatgctcagctgtttcctctgttgcacaaaaaaytgatttcaaactgtagccgtttgaaaatatataccaccaaaaagtttgatgtaaaaataagcaagtgcttccttaacccgtgttttcacaaatagctgat

SEQ ID NO: 122442 - DNA, 201 bp, Homo sapiens
ggcagttgttcagaaagcacaccactcttgactccagctcctgtagaaatgagagacactgtgattgtgcatctgcccctctgactttgtctcgggcttgrgcagggagtctgtgccacagcccttggctccactcttctatctctgttgccttgcataggtgtttaacaacttatccagcttgtaattcaatatccactg

SEQ ID NO: 122443 - DNA, 201 bp, Homo sapiens
atatcatcttaatataaaatctgctgaaataaagatcagctgtgaactatcactgcacctaattctaccaaggcttgacttttccttggctgtaatttagrtgtttgggaaggcttccatttctctgagatttcttctggtttcaatgaataagtgactaggtcagtgtgttgccttgatatcccaaggtgctgaaagtag

SEQ ID NO: 122444 - DNA, 201 bp, Homo sapiens
ctggagccccccgtaggagttgatagcaaacagatagacacaatgaataagtggaagtcatggcttgtttctgcaaaacacgatctctcatcccccaccckaaaggacctgatatgagacaagacttcccatcccttaacacatcttcatcttatggtcagcaggactgctggttttgattagacaatagcaattaggtaa

SEQ ID NO: 122445 - DNA, 201 bp, Homo sapiens
tcctttttttaatttactttttggaaaaacgtttctctttggtggctagtttcggtggcttggtgtcttcttatattggaacaagtgtccatttcaatatrtaatattgtatttttaaataaccagaatcaacaaagcgaagatcacttttaatttggattcaattcagaagaataaaacccctttgcgtgacacgatatg

SEQ ID NO: 122446 - DNA, 201 bp, Homo sapiens
acttttaatttggattcaattcagaagaataaaacccctttgcgtgacacgatatggggaaaataaactatttacagaggagccaaggaagaagtttttcratcaaatctcttctatcaaaagacaatggaatatttacctaaagcatctgggattcattttttacctttcctaatatgtgggtttagtgggagaattgat

SEQ ID NO: 122447 - DNA, 201 bp, Homo sapiens
acatcagcattggaactgtcttcccatgcagccaggaaaatgacgatgtagtcatgataatgaattgcattaaaaaccaacagctgcatatatttttgaamtatttccttgttttctctgagtaattttttaaaattataaaagcttgattctaattgtcacaattacccacatcttaattaatatattgcttaaagatgt

SEQ ID NO: 122448 - DNA, 201 bp, Homo sapiens
gaaactggaaaagagatatgaggccatgggtgagatttcctatcttgaaagaagactttagtgccagaaagtatgtcactgttaaaaaaaaaaaaaaaaaatacgtcatgtgaagagggggaattcttatttaaaaatgactaatgttccgcttacttcaccttcatctagaatttataatctatgtatttcttaattggg

SEQ ID NO: 122449 - DNA, 201 bp, Homo sapiens
ggaaactggaaaagagatatgaggccatgggtgagatttcctatcttgaaagaagactttagtgccagaaagtatgtcactgttaaaaaaaaaaaaaaaaaatacgtcatgtgaagagggggaattcttatttaaaaatgactaatgttccgcttacttcaccttcatctagaatttataatctatgtatttcttaattgg

SEQ ID NO: 122450 - DNA, 201 bp, Homo sapiens
cggaaactggaaaagagatatgaggccatgggtgagatttcctatcttgaaagaagactttagtgccagaaagtatgtcactgttaaaaaaaaaaaaaaaaaatacgtcatgtgaagagggggaattcttatttaaaaatgactaatgttccgcttacttcaccttcatctagaatttataatctatgtatttcttaattg

SEQ ID NO: 122451 - DNA, 201 bp, Homo sapiens
ggtctacagctcccagcatgagcgacgcagaagacgggtgatttctgcatttccatctgaggtaccgggttcatctcactagggagtgccagacagtgggygcaggttagtgggtgcagcacaccatgcgcgagccgaagcagggcgaggcattgcctcacacaggaagcgcaaggggtcagggagttccctttcctagtc

SEQ ID NO: 122452 - DNA, 201 bp, Homo sapiens
ccaggctccaagaacaccagtgggacagaatgtacaaaggtcaagactcagacaccagcacaaatggcacatattctctgtgccagatgcctcacaagctrtttcatctactgcccaaaacagcccttcaagtcagtgctttaagattcacctgccagttaaagaaacaaggctccaaaggttggggtacaaagaacaaga

SEQ ID NO: 122453 - DNA, 201 bp, Homo sapiens
gttctgttttcatttctctgaacccaattcatttccgttatttctaaatttttctctcttcttggtgtccacttagggctacgcagcttgctcctggcacrggcaccttgaatctcctcctcacacagatggagaccatgcttgatttcctgaacttgtagtaagaagaaggaaaacacagcacgctggagccaacaggta

SEQ ID NO: 122454 - DNA, 201 bp, Homo sapiens
tggagaccatgcttgatttcctgaacttgtagtaagaagaaggaaaacacagcacgctggagccaacaggtaggcgagaaaccaggtaggcgagaaacacrtttctcagttatgcagcccagcgtcgaggaaaaataacagcaactctacaaaatcagaaatcagcgtctaaggactaatgagcagagagaaaagtctagg

SEQ ID NO: 122455 - DNA, 201 bp, Homo sapiens
gctaggtcactattacatattgatttattacatatccaggttcagaagaggtgctaaacagagctggttataataggctgtactctgctaactgtgcatcytccctttgttccacctcatcctgtgtaattaacacagtcttgaaagtagaagtttccatgacattaaaattcttacacagcgcaccctctaattatttca

SEQ ID NO: 122456 - DNA, 201 bp, Homo sapiens
tctctaaaaaataaatgctaggtcactattacatattgatttattacatatccaggttcagaagaggtgctaaacagagctggttataataggctgtactytgctaactgtgcatcctccctttgttccacctcatcctgtgtaattaacacagtcttgaaagtagaagtttccatgacattaaaattcttacacagcgca

SEQ ID NO: 122457 - DNA, 201 bp, Homo sapiens
ttttatgggactcatcataggcccttgaatgtttaagtcttttgcacttaagatcttgtttgcaaacaaaacaaaacccccaagcagaaagcaaattgcaygatatccaatttatcttctttggaagaaaagaagagctgagtcagccctcatgagatttgacaaggaaggtacttttttttttttttttttttttgagac

SEQ ID NO: 122458 - DNA, 201 bp, Homo sapiens
gggtttcaccgcattagccaggatggtctcgatctcctgacctcgtgatccgccccccttggcctcccaaagtgctgggattacaggcgtgagccaccgcrcccggccgagaagctctttttttctattcctagtttctctcacttccttttgcttactgtttaaagtttcaaaacttgctgcacatcacatccttctttt

SEQ ID NO: 122459 - DNA, 201 bp, Homo sapiens
cattctcctgcctcagcctcccgagtagctgggactacaggcacccgccactacgcctggctaattttttgtatttttagtagagacggggtttcaccgcwttagccaggatggtctcgatctcctgacctcgtgatccgccccccttggcctcccaaagtgctgggattacaggcgtgagccaccgcgcccggccgagaa

SEQ ID NO: 122460 - DNA, 201 bp, Homo sapiens
cttaaacctggccgggcgcggtggctcaagcctgtaatcccagcactttgggaggccgaggcgggtggatcacaaggtcaggagatcgagaccatcctggytaacacagtgaaaccctgtctctactaaaaaatacaaaaaaaattagccaggtgtggtggcaggcgcctgtagtcccagctactcgggaggctgaggcag

SEQ ID NO: 122461 - DNA, 201 bp, Homo sapiens
acaggggtagaggaagcagcagaaaggccttgggagctcgctgggtccccaaacaggcccttcctgctgggcaccacaaggatccgtcgagagggcagccrgaggagcaggaggtaaaactccacagaaagaaagaaatctctagctgaactgtataacaatttgaatggggcgagaagcctcctggccagaactcagggg

SEQ ID NO: 122462 - DNA, 201 bp, Homo sapiens
aaataaataagtaaaaataaaaatatgccttcaccacaaagaaaaaaaaaaaaaagaaaagcctttttgaaaagccattcaagagccatctcctgccccasggtgttagagcacaatacaggtcagcacaacatgcttagccttacaacaggaaggtggactttctggttcctcagatctgacatttaatcattgtgacca

SEQ ID NO: 122463 - DNA, 201 bp, Homo sapiens
ccatcagagaaatgcaaatcaaaaccacaatgagatatcatctcacaccagttagaatggcaatcattaaaaagtcaggaaacaacaggtgctggagaggrtgtggagaaataggaacacttttacactgttggtgggactgtaaactagttcaaccattgtggaagtcagtgtggcgattcctcagggatctagaactag

SEQ ID NO: 122464 - DNA, 201 bp, Homo sapiens
agaaaacctaggcattaccattcaggacataggcaggggcaaggacttcatgtctaaaacaccaaaagcaatggcaacaaaagccaaaattgacaaatggsatctaattaaactaaagagcttctgcacagcaaaagaaactaccatcagagtgaacaggcaacccacaaaatgggagaaaatttttgccacctactcatc

SEQ ID NO: 122465 - DNA, 201 bp, Homo sapiens
atgtaaatagactaaatgctccaattaaaagacacagactggaaaattggataaagagtcaagacccatcagtgtgctgtattcaggaaacccatctcacrtgcagagacacacataggctcaaaacaaaaggatggaggaagatctaccaagcaaatggaaaacaaaaaaaggcaggggttgcaatctagtctctgataa

SEQ ID NO: 122466 - DNA, 201 bp, Homo sapiens
aacaacacaacaataaaagataatataagtaaaaaatacagcataacaactatttacataacatttacattgtattaggtattataactaatctagagatratttaaagcacacaggagaatgcatgtaggttatatgcaaatcctgcaccatgttatataaggaacttaagcatttgctgattttgtatggtggaatctt

SEQ ID NO: 122467 - DNA, 201 bp, Homo sapiens
ctatttacataacatttacattgtattaggtattataactaatctagagatgatttaaagcacacaggagaatgcatgtaggttatatgcaaatcctgcaycatgttatataaggaacttaagcatttgctgattttgtatggtggaatcttggaatcaatccccatcagatactaaggatgacagtattggtaaataaat

SEQ ID NO: 122468 - DNA, 201 bp, Homo sapiens
gaatgggcaacatgaagccaagcagctctcgctatgggcagtagtgagctaaggagcagggagtcaggcctgttttctgcaaatagcgcccaccccacccsttccctctctggcagtccctgctcagtgcgtggctgctgctcagagtgcactttctgatggcgtgtttgcatatggcctcggatgctctatatccaaagt

SEQ ID NO: 122469 - DNA, 201 bp, Homo sapiens
gcagcttcctgaatgacaaacctcactaaggccgggtctttttcacagacctgggagcaggggtcagtagcgggcaggctgtgcggcaaacataccattgkcatttggatgaggaaagacattaagcgggaacagggcagggtagggattcgttcatacttaaaaaaaaaaaaaaagtttggttagacaatcaaggagacg

SEQ ID NO: 122470 - DNA, 201 bp, Homo sapiens
tttaagcttgaagttaataataaatagcacccaaatggagcctaggtttttccttataaaaagcaagcagtgtctgaataatggtttccttattgtgcatmctttgtaaggtcataaaatgagaagatggagaaagattggcttgtcctggcttgtccgtccttgaaagccattgtggtctcttttccagaagatgacaag

SEQ ID NO: 122471 - DNA, 201 bp, Homo sapiens
ctgctttagaaagggtggttaggggaggtgtgagagtcaagagagctctccctgcttcccttcccttctgggcacatgaaaggaccagataacttggggcyatgggatgtgggatgaccagtgagttgtgagtagaaaggatctatggcacttccatgctggagcatttaattgctgttgcaggactccctggctcccttc

SEQ ID NO: 122472 - DNA, 201 bp, Homo sapiens
tgtaagaggaggcaaggatcatcatggtggacgggaggcaggactggattgcagctccacacagagcagcatgcagagactcgcattatgaattttagctmcagatcgactgcaagaacaaaccagaaatcccgagaggacccacagaccctctgaaggaagcggactgctcctgcaggactcgggagacatcccaagtac

SEQ ID NO: 122473 - DNA, 201 bp, Homo sapiens
tttccctaaaaattggacgttgtgacatcattgggcctgtttatctttgtggcatcagtcaaaatcatcaactagacctgagcagtagctgccccttcagrtggggcatgggctcagtagctcatcacagtacccaccattccttattatctcacacccagtctgctggctcattgataccacctgcatgggcttgaaggc

SEQ ID NO: 122474 - DNA, 201 bp, Homo sapiens
cacctttccagcacatcacataaaaacttactctagaatatagtccacttttctatgatatctcagcaaaggactcttgttgaagctaatactggatgacraattactgtttatggctatctggaagccatttactcagattatttcttcctcaacaatgcttcttgcactgtgctagtatgctgaggcaaaaatgataaa

SEQ ID NO: 122475 - DNA, 201 bp, Homo sapiens
tggaaatggagcagatggtcattaaaatgaaaagtggaggctactctaaagcatctccaatattaggaatgccattttctcatttgcaagcagctgtctasaattttgtaaacaatctcataggtgactaatttggtatagcgaacaaaaggaatacccagttttcatgttaaaatatgccctggttcatttctcatttga

SEQ ID NO: 122476 - DNA, 201 bp, Homo sapiens
gcagcaacgctaggttgttacacaagaaataaccacctattgtgttaaggcttagaaatttagggcttatttgttacagctgctggtgtggacctaacagmgagtatgcatctttctaagtgtgtgcttgagtgtgtgtgcttttagaagccccaaaaggactggaactaaaaaaaaaatcattcttaactgtgtgtaaaa

SEQ ID NO: 122477 - DNA, 201 bp, Homo sapiens
ttgaggaaggaggtatgcctcctctatgctttttgccttgctgccatcagtaaaggagctctgagacccccccaggtgggggccccatggggtgaagaaarcctgggttcccaaatcaccaggtgaaaagctttctggccaagcagcaacgctaggttgttacacaagaaataaccacctattgtgttaaggcttagaaat

SEQ ID NO: 122478 - DNA, 201 bp, Homo sapiens; identical to SEQ ID NO: 20626

SEQ ID NO: 122479 - DNA, 201 bp, Homo sapiens
ggccccagttcagtactgcctgcaaacgagtcggtcccattctggaatttgctcttaacaagccacttgctatcagacctaacaatgtgactgctgtagcrtgccctttttcagtaagaaaacagatattttggctttcatattttgctatttttattatcaatgttttcagaacccaggtagacaagaaggttgttactt

SEQ ID NO: 122480 - DNA, 201 bp, Homo sapiens
taagatactattatcattattattatttattttattagctttctattttgcctgttttcttttactctgggcttcaattatctaaaattagtttaccctayttgtggcatcacaatgaccttgaagtagagtgtctgtctcagataaatggatgaaagaatgagtcattgaataaatctgggagaccacacggcatggtgg

SEQ ID NO: 122481 - DNA, 201 bp, Homo sapiens; identical to SEQ ID NO: 20638

SEQ ID NO: 122482 - DNA, 201 bp, Homo sapiens; identical to SEQ ID NO: 20636

SEQ ID NO: 122483 - DNA, 201 bp, Homo sapiens; identical to SEQ ID NO: 20637

SEQ ID NO: 122484 - DNA, 201 bp, Homo sapiens
ggaagaatcacttgagctgatgttgcagtgagcagagatcacactgctgtactctagcctgggtgacagagcaagacccatctcaaaaaaaaaaaaaaaaatggagaaggaatggccagtgagggaggagaaaattgatagagttggtgtcctaagagcaaaatgaagagtaagtatcaaggaggatggagtgattcacta

SEQ ID NO: 122485 - DNA, 201 bp, Homo sapiens
ctactaaaaatacaaaaattagccaggagtggtggcacgagcctgtaatcccagctactcaggaggctgaggcagtagaatcacttgaacccaggaggcaraggtggcagtgagccaagatcgcgccactgcactccagcctgggcaacagaatgagactccgtcaaaaaaaaaaaaaaagtttgattgccttcagaatgt

SEQ ID NO: 122486 - DNA, 201 bp, Homo sapiens
taggcagtgttaatgctagtgtttctattctaacttattttattacattattaaacaatgatggctatgacctcctaagctgatgtcacaacccatcaatkgatcacattctccaattttaaaaatcctgtaaaaaggtaaagagaaaattaaaaactttgaagagatagttgaatagaaaactaaagacaactacaaaag

SEQ ID NO: 122487 - DNA, 201 bp, Homo sapiens
cttaagttaatatatagcaagggctcgaaatagatcctagcacaaaatcagcattcagtctgtgttaactttcataatggtgatgaagatgatgataattragatggggataatgctaacagtgattatgctgctggtgatgataaagatggaaaattagatctctaccaccagctggctgggttacctgggagtacatct

SEQ ID NO: 122488 - DNA, 201 bp, Homo sapiens
atgaaatcttgtgccttccctcttgggatgtgaatcatccacagtctacactgtgagtcacttagtagccctctcggttatcagatctgctgtctcggtaytgcagtgtttgttttcaagtgaccctcattttatttcataatggccccaaagtgaaagaatagtgatcttggagattcagatatgcccaagagaaagcgc

SEQ ID NO: 122489 - DNA, 201 bp, Homo sapiens
tccacacctaactggctgctaacctgtcccacatttcctgtgaaaggtgtatatgtgtagttagaacacacacacacacacacacacacacacacacacamtccaaacaggattgtgtgaatatttcttgctcaccttgtaatgaaaaattctatggatggacatgtaatacacagacaaacaggttagtggttaagaatg

SEQ ID NO: 122490 - DNA, 201 bp, Homo sapiens
ttgaccagattcagagccaaaaggaggtcctgacacactggaagtgaaaagtgagggaaaaagaagagtgaagaatgactccaaggtttggctagagtaamtgaaaggatggaggtggcactcactgagatggagaagcctggggatggagtagatttaagagcaggagtttggtatttgacatgttatatctgagctgtg

SEQ ID NO: 122491 - DNA, 201 bp, Homo sapiens; identical to SEQ ID NO: 20642

SEQ ID NO: 122492 - DNA, 201 bp, Homo sapiens
agaggcagaaggaataacgcttttcattttcgggtgctaagtttttgctaggtaatattctacaatattaacactcttgctccttgcattttgacagaaasaggctatagatagcatttgcctcaaacactagacttggtatactgcacgtcagctttacctttttctgtttaaggactatttacttctgaacagtctgat

SEQ ID NO: 122493 - DNA, 201 bp, Homo sapiens
acatacacatatgaaaataacatagggttcactactacctgtagtttcaggaatccactgaatgtcttggaatgtatccactaaggataaagggacactaytgaatacagtcttggacaggacacaatatctatctcttatgatttaaaaaatgtttgattgccagccaggtgcagtggctcacacctataatctcagcac

SEQ ID NO: 122494 - DNA, 201 bp, Homo sapiens
acctgtagtttcaggaatccactgaatgtcttggaatgtatccactaaggataaagggacactactgaatacagtcttggacaggacacaatatctatctyttatgatttaaaaaatgtttgattgccagccaggtgcagtggctcacacctataatctcagcactttgggaggtcgaggcaggtggatcacaaggtcagg

SEQ ID NO: 122495 - DNA, 201 bp, Homo sapiens
atcaaaattcttaacatgtttctagagaaatataggcaattgtttgtagtcagcctggttttacatgtaaacttcactttttaaaaacctgtacgattctrgtggggagaaaatgaatgaatgcatgtaaaatctcttagaatagtatctgacaaatgttaagtactcaaaacttttaagatactattatcattattatta

SEQ ID NO: 122496 - DNA, 201 bp, Homo sapiens; identical to SEQ ID NO: 20639

SEQ ID NO: 122497 - DNA, 201 bp, Homo sapiens
aaaaaaaaaaagtttgattgccttcagaatgttttcagttattcgctacagtgttgtttgtttgtttctttgtttctttgtttttctctcaatcagtaagygaaggaacatcagaaaggtccttaaagtgatttattttaactgataagtagtacttaccccaacattctggagcagtattggactgagccatacatgaac

SEQ ID NO: 122498 - DNA, 201 bp, Homo sapiens
gatactctgttattgcaacagaaaacagactaagacacagcatatgttaatcacaaggatttcaaacagcctggtgtcttcagggactctgaaattctggrtggctggtgtgtaggatgtgtaggatatgggaaaagaataggagtaggaagggaggaggggatttatccaggtaggagaattctgatggggcttcattat

SEQ ID NO: 122499 - DNA, 201 bp, Homo sapiens
caattgaggccaggagtttgagaccagcctggccaacatggtgaaacctcgtctctacaaaaagatacaaaaagtagccaggtatcatggcacatacatgyagtcccagctactgaggaggctgaggtaggagaatcgcttgaatccaggaggcggaggtttcagtaagctgaaatcatgccactgcactccagcctgggc

SEQ ID NO: 122500 - DNA, 201 bp, Homo sapiens
gtcattacatggataaggagttctaaaagtaaagcaagaggcaagatatttattcattaattttctgttcattaatcatcttctattgtgatgggggcccyggaaatacagaatgaataaagcaaaattataacctaggaggatttttagtctaacgagaaatggaaatatgaacaaatgtatacactcaaaagtactaag

SEQ ID NO: 122501 - DNA, 201 bp, Homo sapiens
gaggtgggtggatcaattgaggccaggagtttgagaccagcctggccaacatggtgaaacctcgtctctacaaaaagatacaaaaagtagccaggtatcayggcacatacatgcagtcccagctactgaggaggctgaggtaggagaatcgcttgaatccaggaggcggaggtttcagtaagctgaaatcatgccactgca

SEQ ID NO: 122502 - DNA, 201 bp, Homo sapiens
tagttttaaaaaaaactctgctacctaaaatatttcctttgttttgttttttacagcttccagcaagaaatgcatccctgatcctatagctattgcatctstctcctttttgaccagtgtcatcatcttttccaaaagcagagtataaagaaatcttgtggctccttttatttaaaaaaaatatttaaataaaatcttttt

SEQ ID NO: 122503 - DNA, 201 bp, Homo sapiens
gcagtgaaattattatgtaaaatattgcagacagacagagtaaagcttgactggaaggtggagcataaagatagcacttttaccttctccctcaaactcaytgcttttctcattgtcattacatggataaggagttctaaaagtaaagcaagaggcaagatatttattcattaattttctgttcattaatcatcttctatt

SEQ ID NO: 122504 - DNA, 201 bp, Homo sapiens
gggaggccgaggtgggtggatcaattgaggccaggagtttgagaccagcctggccaacatggtgaaacctcgtctctacaaaaagatacaaaaagtagccrggtatcatggcacatacatgcagtcccagctactgaggaggctgaggtaggagaatcgcttgaatccaggaggcggaggtttcagtaagctgaaatcatg

SEQ ID NO: 122505 - DNA, 201 bp, Homo sapiens
cacatatgaaaataacatagggttcactactacctgtagtttcaggaatccactgaatgtcttggaatgtatccactaaggataaagggacactactgaawacagtcttggacaggacacaatatctatctcttatgatttaaaaaatgtttgattgccagccaggtgcagtggctcacacctataatctcagcactttgg

SEQ ID NO: 122506 - DNA, 201 bp, Homo sapiens
gatagattagagaaaatccactttatttattgacttctcttttcttcctactccattacctccaggacaataagttctgcagtgaaattattatgtaaaawattgcagacagacagagtaaagcttgactggaaggtggagcataaagatagcacttttaccttctccctcaaactcactgcttttctcattgtcattaca

SEQ ID NO: 122507 - DNA, 201 bp, Homo sapiens
acacacatacacacacagagtaatttctgtcttttctgtcttggaatttctacttgtatacacacacacacacacacacacacacacacacacacacacaytcctatatagaaattccaaaaaactaaaaaatgtatatattgtgtgaaaatagtagaaatgtatttctccctcatctggttatcctatcaaacaatatga

SEQ ID NO: 122508 - DNA, 201 bp, Homo sapiens
gagccagtcccatgtatatctgaggaaagagcattccaggaagaaagcacagcaagtgcaaatgtctcaagtaagaagcaacagcaaggatgccagtgtaygggaatgagagaaaaataatagaaagcgaagacagaagatgatgtagattcgatcacataggaccttgaaggcagttgtaaggactttggcttttcctct

SEQ ID NO: 122509 - DNA, 201 bp, Homo sapiens
agaacctcagaagacttttgtgaaaatgaaataaaatgtaaaattattggccaagtgcggtggctcacacccgtaatcccagcattttgggaggccgaggygggtggatcaattgaggccaggagtttgagaccagcctggccaacatggtgaaacctcgtctctacaaaaagatacaaaaagtagccaggtatcatggca

SEQ ID NO: 122510 - DNA, 201 bp, Homo sapiens
gtctcagataaatggatgaaagaatgagtcattgaataaatctgggagaccacacggcatggtggaaagtgaataaactttggagccagaaagatttgggyatatgttagtagctaggtgaccttgtgcaaatgacttaacctctgagcctgtttcttcatttataaaatggaagtgatactcatcttgtgggaatgttgt

SEQ ID NO: 122511 - DNA, 201 bp, Homo sapiens
cctgggtgcacctgtacagtacttctccctcaagaaggaagtcttgatccctccctatgagctgtttaaagttataaatatgagctaccacccaagaggaractggttgcagttgaggtcaactgggaacctgagcacatataactgtcagctgctaaaaggtattctttatctaaattgaggccactcaggatcacagac

SEQ ID NO: 122512 - DNA, 201 bp, Homo sapiens
cccagacccactctgtttgaatttatatcccactgtaccacttaatagctatgtgttcttggtcaagttgcttaaactcttttttcatctacctaataatyatcgtaacagaacctcagaagacttttgtgaaaatgaaataaaatgtaaaattattggccaagtgcggtggctcacacccgtaatcccagcattttggga

SEQ ID NO: 122513 - DNA, 201 bp, Homo sapiens; identical to SEQ ID NO: 20643

SEQ ID NO: 122514 - DNA, 201 bp, Homo sapiens
tcaatttggtcaacatcttagaaagggctctgatgacactgtgaaaaatgaactgaagcaggaaaatttagagatatcaaaatacaaaaaaaagttaaacwttttttaagaaaaacatggctgattgaattttatgttgccacctagccatttcatggaggggtagttgtgtagcaaatcctgtgccctttttgattcaga

SEQ ID NO: 122515 - DNA, 201 bp, Homo sapiens; identical to SEQ ID NO: 20644

SEQ ID NO: 122516 - DNA, 201 bp, Homo sapiens
ttattgcaacagaaaacagactaagacacagcatatgttaatcacaaggatttcaaacagcctggtgtcttcagggactctgaaattctggatggctggtrtgtaggatgtgtaggatatgggaaaagaataggagtaggaagggaggaggggatttatccaggtaggagaattctgatggggcttcattataaaaggtct

SEQ ID NO: 122517 - DNA, 201 bp, Homo sapiens
tggaagaatcacttgagctgatgttgcagtgagcagagatcacactgctgtactctagcctgggtgacagagcaagacccatctcaaaaaaaaaaaaaaaaatggagaaggaatggccagtgagggaggagaaaattgatagagttggtgtcctaagagcaaaatgaagagtaagtatcaaggaggatggagtgattcact

SEQ ID NO: 122518 - DNA, 201 bp, Homo sapiens
ctatttttattatcaatgttttcagaacccaggtagacaagaaggttgttacttatgagagcccccttagtactattcatagcttaaggataaagttcaasgatttaatttggttttgggcattcataaaagtgatatttttgaaaacaccagtgagagactagaaagaggggggaaagtagaggaaacagaaagtgtaat

SEQ ID NO: 122519 - DNA, 201 bp, Homo sapiens
aacacactttgctctgtgaacgcccgtcctgggcagggcctatcagcagggccagatgagcctatagacacccagggtggcgcgttcccagccgccctgcrcatgccaatcttatcagttttgatggaagcctggggctccagataatgctacttggccccaaacgctggacagagcatgctttttcctgtttggctggga

SEQ ID NO: 122520 - DNA, 201 bp, Homo sapiens
cttccagagaccatgtattcattggaatgtcgtttgtttttcatccagtaaccacaaatagtaatggggcagctagtacatgtcagacactgtgtttggcrctggggatacaaaggtgattaaaactttgcctacagccccaaggaactgagactagccatgaaagacatgggaacaaatcatattatgacattattctaa

SEQ ID NO: 122521 - DNA, 201 bp, Homo sapiens
gggagtgaaccacttagccacgtccctttctgcaatgtggagacttgatgaaggaattattttctatccagaaaagctaagtcaacttgctgaaatagagkcaggttaataataattccgccctatttaaacgtgagcattgcaactcacgggagattgaattttgtatttgatttcaattagcaaagcataaattatgtt

SEQ ID NO: 122522 - DNA, 201 bp, Homo sapiens
ctcccttaatccttatactacagtgtgaagtcagtgctatcattatctctgtttcagggattatacaactaatacgtagagaaatcaagggtgtatctagkttaaacataactggtaagaggtagaatagccatttaaacctagggatatataagggagagaatgtatatgccttgtgttgccttttctgataatacgtag

SEQ ID NO: 122523 - DNA, 201 bp, Homo sapiens; identical to SEQ ID NO: 20646

SEQ ID NO: 122524 - DNA, 201 bp, Homo sapiens; identical to SEQ ID NO: 20645

SEQ ID NO: 122525 - DNA, 201 bp, Homo sapiens
tttgatctgaaaacaccacgctgcccaaccattatactaacaacatccagctctttgtgaatttctctacgaggcaaattcctcttgcctcataaaagtgyttgccgagatagctcaaaacccagttgcaattaattattgacagagcatgtgaattagagataaaagaaaagtcattctttctccacacacgcgatagta

SEQ ID NO: 122526 - DNA, 201 bp, Homo sapiens
gtgaagaatggatgaaaagaaaagttgagcagctgctcctacactaaagaaaaatgcaacaaaataatgtgtttagttttgtgtgtcaaaagtacatcagrggaactaaaatctggaaaaggccgtataaaaatagctattttcaggtgatgtgtttttgcatcaagatttatctaatatttttataatatgatatgagtt

SEQ ID NO: 122527 - DNA, 201 bp, Homo sapiens; identical to SEQ ID NO: 20647

SEQ ID NO: 122528 - DNA, 201 bp, Homo sapiens; identical to SEQ ID NO: 20648

SEQ ID NO: 122529 - DNA, 201 bp, Homo sapiens; identical to SEQ ID NO: 20649

SEQ ID NO: 122530 - DNA, 201 bp, Homo sapiens; identical to SEQ ID NO: 20650

SEQ ID NO: 122531 - DNA, 201 bp, Homo sapiens; identical to SEQ ID NO: 20651

SEQ ID NO: 122532 - DNA, 201 bp, Homo sapiens; identical to SEQ ID NO: 20652

SEQ ID NO: 122533 - DNA, 201 bp, Homo sapiens; identical to SEQ ID NO: 20653

SEQ ID NO: 122534 - DNA, 201 bp, Homo sapiens; identical to SEQ ID NO: 20654

SEQ ID NO: 122535 - DNA, 201 bp, Homo sapiens; identical to SEQ ID NO: 20655

SEQ ID NO: 122536 - DNA, 201 bp, Homo sapiens
actctgccatgttgctacatggtctttatggctatgtaatggtcataccacaattcactcagcctctactttactgtaggacatttgaattgtaaactacwttttttttttgctgtcataaataacagtgctatgaacagtgttgttcgtacagcttctccttgaattacttccttatgatgcatttccatgagagaaatt

SEQ ID NO: 122537 - DNA, 201 bp, Homo sapiens
gacagatgatcagggtgttaacccacgtggacacaccaaagccacaggaagactcttcatcgggccttacatacaaccttcccacagagcagcaaagcacrccctcctggagcaccctcggttgaatcatgcataagacaaacagccagaaaagaatctcagggaaaatcatggccaggaacctgggtaaatttatttttt

SEQ ID NO: 122538 - DNA, 201 bp, Homo sapiens
cagagacagatgatcagggtgttaacccacgtggacacaccaaagccacaggaagactcttcatcgggccttacatacaaccttcccacagagcagcaaakcacgccctcctggagcaccctcggttgaatcatgcataagacaaacagccagaaaagaatctcagggaaaatcatggccaggaacctgggtaaatttatt

SEQ ID NO: 122539 - DNA, 201 bp, Homo sapiens
tctggttacagctggagaaactgatttctgtgctgtccaggtgctcccagacccccaaggcatctccaggacacagtcaccaaacccccatcctggtattmctggcattgagtgccacgtaggcacacagcactccataatttggaaatgtggatttcattgctattgctcttcatgagggaacaaataatatccatgatg

SEQ ID NO: 122540 - DNA, 201 bp, Homo sapiens
tgagggtcttgggaattgctggagataatggtgctctgtgcttgcggcgagagcagtgaagtggtgagaccagtttctgaatgtaaactttttatgacaayggctgcgaagatgcccaaagtgggcccctgttgcctatcactgaggttttgaggccactttttagggagtaatgctaggcgatacagcccctccctaacc

SEQ ID NO: 122541 - DNA, 201 bp, Homo sapiens
cagctggagaaactgatttctgtgctgtccaggtgctcccagacccccaaggcatctccaggacacagtcaccaaacccccatcctggtattactggcatygagtgccacgtaggcacacagcactccataatttggaaatgtggatttcattgctattgctcttcatgagggaacaaataatatccatgatgtattggca

SEQ ID NO: 122542 - DNA, 201 bp, Homo sapiens
cttaaaagaataacatggggatgtctccaaatgctgaaacacaggtgtcaggctcatttaaaaaagtgtttaaaaacacataaaaataccttttaaaacaytggtatgcattcttcattcatatagcacatggagagaaaccgtaaaggcagtcacatagtgaccagatcacacacagatcagaatggtcgtcttctaatc

SEQ ID NO: 122543 - DNA, 201 bp, Homo sapiens
ggcattataatcagagcaagatcaaattataaatgtaatcaaagaaaatatgatagttgaaactgtaataacatacatacattataaagactgcacataarttaaacacaacttagttaaacaaacaaacaaaaaagtatcagtaattatacacttaaaagaataacatggggatgtctccaaatgctgaaacacaggtgt

SEQ ID NO: 122544 - DNA, 201 bp, Homo sapiens
catgcaggagtattcattatacagttgaattatagaattgcagcatgtggaaagaagttaatgtctgtcactggggaggtggaggtgactctccagacttygttatgtttatactgtggaatgccaagcagccattaaacagaagtaggaagctgtgtacgtgctgacatgtccaggcagaatgttgaccaaagagggcca

SEQ ID NO: 122545 - DNA, 201 bp, Homo sapiens
aaccaacgaggaaaactcagttggtgcaatgaggaaaatggatgaaactatgaatgatgcttcactgatgaaacacaacccacttgtgaaaacatgctcarcccaatagaactctgggacatgcaaattaacatgaagtctgatttttttttttttttttttttgcctctcaggtgtgcaacgtcccgggtgagtgacttc

SEQ ID NO: 122546 - DNA, 201 bp, Homo sapiens
ttgcggcgagagcagtgaagtggtgagaccagtttctgaatgtaaactttttatgacaacggctgcgaagatgcccaaagtgggcccctgttgcctatcaytgaggttttgaggccactttttagggagtaatgctaggcgatacagcccctccctaaccaggcttgcaatggattgcatgcctgttacattttgagtgcc

SEQ ID NO: 122547 - DNA, 201 bp, Homo sapiens
ttactgagaaagcactgggattttccatgctcattcagatatcctctttaatcacaagcattagtgctcaccacacaagggccccaaagaactggtgttgygtttgttggcctctgttctgaatggcatctgtttgcatccttgagggaggttttgctcaggaaagggttatcagtgagggcgggatgccctaggcaacct

SEQ ID NO: 122548 - DNA, 201 bp, Homo sapiens
gtgcagggcgagtgagggtcttgggaattgctggagataatggtgctctgtgcttgcggcgagagcagtgaagtggtgagaccagtttctgaatgtaaacwttttatgacaacggctgcgaagatgcccaaagtgggcccctgttgcctatcactgaggttttgaggccactttttagggagtaatgctaggcgatacagc

SEQ ID NO: 122549 - DNA, 201 bp, Homo sapiens
aggtgtcaggctcatttaaaaaagtgtttaaaaacacataaaaataccttttaaaacactggtatgcattcttcattcatatagcacatggagagaaaccrtaaaggcagtcacatagtgaccagatcacacacagatcagaatggtcgtcttctaatcactatttggcatttgaacccaactgcatgcaacaaaggaaag

SEQ ID NO: 122550 - DNA, 201 bp, Homo sapiens
tgtcctcagcacctccctgcttctttccaacacattgcacttgggctcttctcagcacacagtgaacaaatatctaaatgcttttgggtggaaagatgccraacagctagcttagcccttcctgagtcccggtctggccaggatgggaaggagctgagttttccagagaaggaaaaggtgagcctgaaactttgcttctga

SEQ ID NO: 122551 - DNA, 201 bp, Homo sapiens
ggctctgcagaggtttactgcgaaacattgcagctggctcttttccttgggaattttaccttcccacctcccccatgtacttaaggtcctttaatgaaacrtacatcaaatacaacatgaaataattctccactcttctggtaacatccttattcagattcttaccagggtttgcaccatatgtggtctctgaagtcgtaa

SEQ ID NO: 122552 - DNA, 201 bp, Homo sapiens; identical to SEQ ID NO: 20659

SEQ ID NO: 122553 - DNA, 201 bp, Homo sapiens
agctggtggtgagggagcacattttaaacagtttaagcaggtgaggccatcttgaaggtttgccccagcagcctgggtgaatggagggagtcttgggagartagataagatgcagtcaccacttttaactcttgcccttaaaaaatacttttacaacacggcttataatggaaagagcattaaaatggacattagaaaact

SEQ ID NO: 122554 - DNA, 201 bp, Homo sapiens; identical to SEQ ID NO: 20662

SEQ ID NO: 122555 - DNA, 201 bp, Homo sapiens; identical to SEQ ID NO: 20663

SEQ ID NO: 122556 - DNA, 201 bp, Homo sapiens; identical to SEQ ID NO: 20665

SEQ ID NO: 122557 - DNA, 201 bp, Homo sapiens; identical to SEQ ID NO: 20666

SEQ ID NO: 122558 - DNA, 201 bp, Homo sapiens
cagatgatagagccaggatttgaaagcaggcagcctggctccagaccctgtgctcttaactcccgttttgcatcaagaacagaatcctatgaaaggcttgyacagtgcttggtactgagtaggcactccgtcagtattttagtagctattattccaaaggacactgtattctaggtactaagacaatgtgaatggaatgga

SEQ ID NO: 122559 - DNA, 201 bp, Homo sapiens
agaagccaactgtctaggaagacagataatgacattattaaaataatcagaacattggcaaaataaagaagattgaaatgcagttcatatgacagtgctarttaatcatactttttagatctaggaaaggccataaaggttaaattgacttggaaatggtaaacaagacaatggttgtgtcactgatcggtgatggccagt

SEQ ID NO: 122560 - DNA, 201 bp, Homo sapiens; identical to SEQ ID NO: 20668

SEQ ID NO: 122561 - DNA, 201 bp, Homo sapiens
tgtgtgatctcaagtaagttctttaagtctctcagcctcggtttgtacatttgtgtgataaggataatgatagttttcagattattttcatagtcattgcktgatttgattcttccaatggttcctctcactttgcagataagaaaactgaagaaccagctgggcgcggtagctcacgcctgtaatcccagcactttggga

SEQ ID NO: 122562 - DNA, 201 bp, Homo sapiens; identical to SEQ ID NO: 20660

SEQ ID NO: 122563 - DNA, 201 bp, Homo sapiens; identical to SEQ ID NO: 20661

SEQ ID NO: 122564 - DNA, 201 bp, Homo sapiens
acgcacgcacgcactcacgcactcacgcacgcacgtacggcgcgagtccgagggcgacagcagcgcgcaggcgcacgtcagtccccgcgcttttcggaggytgccagcgtcccacaccagccgcaggtaggatgcggtgacgggaggcggggcaggggcgctgctgacccctgtggagcatcagggttggggcgtagggga

SEQ ID NO: 122565 - DNA, 201 bp, Homo sapiens
cgcggtagctcacgcctgtaatcccagcactttgggaggctgaggcgggtggattacctgaggtcaggagttcaagaccagcctgactaacatggcgaaaycccatctctactaaaaatataaaaattatccaggggtggtggcaggtgcctgtaatcccagctacttgggaagctggggcaggagaagcacttgaacccg

SEQ ID NO: 122566 - DNA, 201 bp, Homo sapiens
ttcaagaccagcctgactaacatggcgaaaccccatctctactaaaaatataaaaattatccaggggtggtggcaggtgcctgtaatcccagctacttggraagctggggcaggagaagcacttgaacccgcgaggtggaggttgcagtgagctgagagcgccactgccctccagcagcctgggtgacagagcgagacact

SEQ ID NO: 122567 - DNA, 201 bp, Homo sapiens
tttcggaggctgccagcgtcccacaccagccgcaggtaggatgcggtgacgggaggcggggcaggggcgctgctgacccctgtggagcatcagggttgggkcgtaggggagaggcgggcgtgtgcctctggaatgctgggggtcgcggggcggtgacttcgcgggaggccgtgggaggcgggagccaggcagtggctgtgc

SEQ ID NO: 122568 - DNA, 201 bp, Homo sapiens; identical to SEQ ID NO: 20669

SEQ ID NO: 122569 - DNA, 201 bp, Homo sapiens; identical to SEQ ID NO: 20670

SEQ ID NO: 122570 - DNA, 201 bp, Homo sapiens; identical to SEQ ID NO: 20673

SEQ ID NO: 122571 - DNA, 201 bp, Homo sapiens
tttgccttgagtggatctcaataagctattttaaagaagtgacaacttatcttagatcacaaagtaaagaatagaaacaaagaaaaaattttaaaaaaatwctctatgctttaactccatccccaccacatttcaactgcttattatctaaatttgtgtatttttatattacctttctcttaataggttgctgtagctatt

SEQ ID NO: 122572 - DNA, 201 bp, Homo sapiens
accagggctcagccaagttgacagataaaattaactatcacaaatttcagtcgacactgtggattagaatagagctctgagcactagcatctttattcagraagcttaggaaaaagaggtgcattcgggagaagcataggagaagtgagaaactcattttgagttcttccattagggtcccatgtgtgataaaataagggc

SEQ ID NO: 122573 - DNA, 201 bp, Homo sapiens
gagtcagagctaattgtgcagtagacctacagatggtttgttgatgcagtaggtcaggggtgtgagatctccaggcagggcggtgttgccgtgggtgtatrgctgatgtggcacccatagcctagggttttctgcccagcagacagctgtggggacttcccagttctttttgccttgagtggatctcaataagctatttta

SEQ ID NO: 122574 - DNA, 201 bp, Homo sapiens
tatcatagtacatacctgaaaccatcaaatgagtatgaccaataccaaggtttaataaattttaagtaaaattgctgcagtttgaagaaagaaaatggggrggggggaggatttacgcaaaagaatatgaggaaaagaaaattagatgattatcagatttttaagagtaatgctttaatacaaaagaagatggaataataa

SEQ ID NO: 122575 - DNA, 201 bp, Homo sapiens
gctctgaaacaggatcagtctgccatgcaagcctctctgccacgtgggctgtatgatctagcagatccagtggtgcttgaagtgtcattggcagataaggrtgctgtttggacctttggcagacccctttagatgaatcacagtgcaggcacgtaggattttagagcaaattcctgccaccctctctggactctctttttg

SEQ ID NO: 122576 - DNA, 201 bp, Homo sapiens
tgaaaattctgttattcctctattgaattattgttgtacctttgtcaaaaattattgggcatatttgtatgggcctatttctggttccgtattctgttctrttgattagtgtgtctatccttctgccggtaccaccctttggattattgtagtgatatagtaagctttaacatcagatagaatgattcctcccacgttatt

SEQ ID NO: 122577 - DNA, 201 bp, Homo sapiens
aaatttaagttatttaaatttatgtaaaataacaaattgagttcctcacctgcaagtagccacattttagggcttatgagtggcatgttgatagtggctaytatattgccactatttaagacatttgcttcagtataggaagttctgttgagaagcattggtctagaataattcatggattccttggtctaatagacttag

SEQ ID NO: 122578 - DNA, 201 bp, Homo sapiens
cttttgcattgaccttggtgaatctgttaactatatgtcttgaggatggtcatcttgtatggtatctcacaggactttgctgaatttcttaaatttgcctwttgacttctctagtgagattgggaaaagttttgcgcactatattttcaaatatgttttccaagttgtttactcttcttctctttcagaaatgccagtgag

SEQ ID NO: 122579 - DNA, 201 bp, Homo sapiens
ttttccctttgtcactgtgtaatgccctactttgtccttttagatcattgttggtttaaagtctgttttatctgatataagaatagtgacccctgctttcsttttgttttccatttgcatgatagatctttctccatccctttactttgagcctgtgggtgttcttacatgtgagatgggtctcttgaagacagaatatgg

SEQ ID NO: 122580 - DNA, 201 bp, Homo sapiens
tgactcttctcagggtatttctttcttcaggcacatgtagtgcttcctgtgggttgaggtagggacaggtttcctgccaggtaacccagatggtgggaaamctggatgtcaccttttctggtatagaaatcatgaatcaggtggagattttttgcactcttggtgctgggcaaattggagaaatgggcattgcagatgtgg

SEQ ID NO: 122581 - DNA, 201 bp, Homo sapiens
gtcatctttgtcatttctgattgggcttagattttcctttttttgttgtttagctagcagtctatcaattttgtttattctttcaaaaaacagaccaggcrcggtggctcatgcctgtgatcccagcactttgggaggccgaggcgggtggatcacctgaggtcaggagttcgagaccagcctgatcaatatggcgaaacc

SEQ ID NO: 122582 - DNA, 201 bp, Homo sapiens
cccacttggtcatagtgcattatctttttgatgtgttgttacatttgttttgctagtattttgttgaggatttttttttttttttgcctctatgttcatcrgggatattggcttgaacttttttttcattgtgtctctgtcagattttggtatcaagttgataatggcttcatagaatgagttagagaggagtccctcctc

SEQ ID NO: 122583 - DNA, 201 bp, Homo sapiens
ttggtgaggggctaagttgctgccttctttttggcactagatgtcaccttacgaccaagtttgccttggctccagtaaacaataagagagctgctcattcmaattagggaaagtctcaaaggagatatcatggcagtgtgggaaaggtggctagagattcatgcccaggggtcctgtgcaatgtatcttctgcaatgtggt

SEQ ID NO: 122584 - DNA, 201 bp, Homo sapiens
acctgttttccagttcttagaagaaaggctttgagcttttccccattcagtatgatcttagctgtgtgtttgtcatatatcgtctttattgtgtttagatmtgttccttctatgcctcatttgtttagagtttttttttttatcatgaaagcatgttgaattttatcaaatgcttcttccacatctattaagattctcata

SEQ ID NO: 122585 - DNA, 201 bp, Homo sapiens
tcattccaattagggaaagtctcaaaggagatatcatggcagtgtgggaaaggtggctagagattcatgcccaggggtcctgtgcaatgtatcttctgcartgtggtgctactaaacaaccactctggtttggcatctcctttagctgagttacagaccagagtttccagggctggggatggtagtcccacctcacctgtt

SEQ ID NO: 122586 - DNA, 201 bp, Homo sapiens
gtaacccagatggtgggaaacctggatgtcaccttttctggtatagaaatcatgaatcaggtggagattttttgcactcttggtgctgggcaaattggagraatgggcattgcagatgtggaaacccaattctcttactgcctacttagagtttttttcccatctctgtggatccaggaactgtcttctcctcgtatttga

SEQ ID NO: 122587 - DNA, 201 bp, Homo sapiens
tgaggatttggagaattatgtgaagatttggagaaactgtattgctcatacattacccatatgtatgagacattgggaatgtagactggtaccagccactrcggaaaacaattgagcagtttcttggaaagaaaacaaaaacaaaactaactaaagttgacatataacccagcaatagcactcttggggcatttatcccag

SEQ ID NO: 122588 - DNA, 201 bp, Homo sapiens
gtttattagttcttagagtgttttggtagagtcattagttttgggggatatatatatatatacatatatatatgaatatatgaatatatagtcatgttacwtgcaaagaaggacaatttaatttcctttttttccaatttggatgccccttatttctttctcttgactaattgcaatggctaggacatccaacattatact

SEQ ID NO: 122589 - DNA, 201 bp, Homo sapiens
atttacatgtgtccacaatgtcttgctgaaacgactcattctcagcttgtcccacatgtgactctccaggcaagttcagcaacacctgagctggtctatawcctgttcagttgagcacacttctcagtgctgtgccagtgtcaaattgccataagagtttctgagcacttactcccagtttcttgactcattgtggaccag

SEQ ID NO: 122590 - DNA, 201 bp, Homo sapiens
cattgaagaattttagtaagtgacatgatcaactacggctgttggcatgggggtggaaagcacagacgcaagtgttttgcagataaaattgggagacataygtgacttatgacttatgatttataagtgacagaggaggggttgaaaatatattcaatacagtaaccacatgtggatatttaagtttaaatttaagttatt

SEQ ID NO: 122591 - DNA, 201 bp, Homo sapiens
tgtgtccacaatgtcttgctgaaacgactcattctcagcttgtcccacatgtgactctccaggcaagttcagcaacacctgagctggtctatatcctgttmagttgagcacacttctcagtgctgtgccagtgtcaaattgccataagagtttctgagcacttactcccagtttcttgactcattgtggaccagcaacaga

SEQ ID NO: 122592 - DNA, 201 bp, Homo sapiens
tctgcagtgaattccacagtttgcttctgaaattcgttttttacattccccttgtatgcgctgtgtcttttaccattttaatcattattgtaggttttttwaatcttttttttctgagttctgggaaaattttttaagctgattttctaaacataaatttgtttttctgttcaattcctgctttaggagtttgagttgaat

SEQ ID NO: 122593 - DNA, 201 bp, Homo sapiens
gagatccacagcacactggaggcctgctgatcctctgtgcttgggagtcagagctaattgtgcagtagacctacagatggtttgttgatgcagtaggtcargggtgtgagatctccaggcagggcggtgttgccgtgggtgtatagctgatgtggcacccatagcctagggttttctgcccagcagacagctgtggggact

SEQ ID NO: 122594 - DNA, 201 bp, Homo sapiens
ctcaagttttatctgttaaaatgattccatctatgttgtttttccttttatttttagttgacatgtaataattgtacatatttgtggggtacagagagtgrtatttagatatatgtatacaatgtgtagtgatcagatcaaggtagttaacatatgcatcacctcaaacatttgtcatttctttgtgttgtgaacatcaaa

SEQ ID NO: 122595 - DNA, 201 bp, Homo sapiens
tttaaatttaagttatttaaatttatgtaaaataacaaattgagttcctcacctgcaagtagccacattttagggcttatgagtggcatgttgatagtggytactatattgccactatttaagacatttgcttcagtataggaagttctgttgagaagcattggtctagaataattcatggattccttggtctaatagact

SEQ ID NO: 122596 - DNA, 201 bp, Homo sapiens
tgtttcaccacataagcagatgtcttagaactagaagttaggagtaggatggaaaatcgatcgatgatacttcttaagtaactttttacttgtccctggtrccagaagccaccaccacttctacttctcctcaaccagattctgtggagaagaaaaaattggaaaagagaggtggggcagggagagtgactgttgaagttg

SEQ ID NO: 122597 - DNA, 201 bp, Homo sapiens
tgtaatagatgattcaacacgcgttcctcttggaaaaagcaaggactacatcaatgctagttatattagaatagtcaattgtggagaagagtatttttatrtcgctactcaaggaccactgctgagcaccatagatgacttttggcaaatggtgttggaaaataattcgaatgttattgccatgataaccagagagataga

SEQ ID NO: 122598 - DNA, 201 bp, Homo sapiens
agaagtccgtaagtttttaaacatcagtattagatatatgtttcaccacataagcagatgtcttagaactagaagttaggagtaggatggaaaatcgatcratgatacttcttaagtaactttttacttgtccctggtaccagaagccaccaccacttctacttctcctcaaccagattctgtggagaagaaaaaattgga

SEQ ID NO: 122599 - DNA, 201 bp, Homo sapiens
taccaatttaaatgttaatctcacctaaaaaataccttcacagaggcacaaaataatatttggcctagtatctggataccagggctcagccaagttgacasataaaattaactatcacaaatttcagtcgacactgtggattagaatagagctctgagcactagcatctttattcagaaagcttaggaaaaagaggtgcat

SEQ ID NO: 122600 - DNA, 201 bp, Homo sapiens
ccttcagctgattagatgaagccaacccactttatggagaataacctgctttactcaaattctaccaatttaaatgttaatctcacctaaaaaataccttyacagaggcacaaaataatatttggcctagtatctggataccagggctcagccaagttgacagataaaattaactatcacaaatttcagtcgacactgtgg

SEQ ID NO: 122601 - DNA, 201 bp, Homo sapiens
atataaaatagcataaggtgtgtgtagagacaaatataagtagttaagtgtttctgaaatgtaaaagttcagtgccagggagtaataaaagatgagatgakgttctcaaaagtaagcaggggccagctagaatgtgaaatgtcttaaatttcagctaagtagcatgaactttattatgaagataattgggagacattgaag

SEQ ID NO: 122602 - DNA, 201 bp, Homo sapiens
actctggtttggcatctcctttagctgagttacagaccagagtttccagggctggggatggtagtcccacctcacctgtttgtttctgactcttctcaggrtatttctttcttcaggcacatgtagtgcttcctgtgggttgaggtagggacaggtttcctgccaggtaacccagatggtgggaaacctggatgtcacctt

SEQ ID NO: 122603 - DNA, 201 bp, Homo sapiens
aatgagagaacaacgttctggcatggttcaaacgaaggtaagctttcaccacatacataataataagaataatgaatataaagattaacattgcataacaytttaccacttaaaagctcttttattgacataatctcattgaattcctactgtttgaggtagacattagttttgctctgattctctggtattcctgaccaa

SEQ ID NO: 122604 - DNA, 201 bp, Homo sapiens
taggtgagacatcaggttgttcatttaagatcttcctaacttctttgatgtaggcatttagcactataaactatactcttagcactgctttagctgcatcscaaagattttgatttgttttgtctctgttttcattaatttcaaagaatttttttgatttctgaattcatttgtttacccaaaagtcatttaggagcaagt

SEQ ID NO: 122605 - DNA, 201 bp, Homo sapiens
ttacttttttggttaaatttatcctaggtgttttttttttttaatggctattgtaaataagatcaccttctttatttcctttcagctagtttgttattggmgtctagaaatatcactgatttttgtatgtcgactttgtatcctgcaactgtactgaattagtttattagttcttagagtgttttggtagagtcattagtt

SEQ ID NO: 122606 - DNA, 201 bp, Homo sapiens
acttggggttttgagacaggtttactggaggaggtggcatttgttttgagaattatgcaaatgaaaaagatggagggagaaagtagatgatcaaaatataraatagcataaggtgtgtgtagagacaaatataagtagttaagtgtttctgaaatgtaaaagttcagtgccagggagtaataaaagatgagatgatgttct

SEQ ID NO: 122607 - DNA, 201 bp, Homo sapiens
tggtgcctatctcacatggttgatgtgaagattaaaggagagaattcatgtgaagcccctagcatagtaactgccacatagcaagtgcttaatttttgttrcctgttaatactggtatttttattgttgttactgtgctctcctttgtaaaatggagaaaacctctattcctagcaacttccagaattcttataaacatca

SEQ ID NO: 122608 - DNA, 201 bp, Homo sapiens
gcccatttctctgaagaagccattggaattgaaacacttccgtgtattcctggagaactaccagatacttcaatatttcatcattcgaatgtttcaagttrtggagaagtccgtaagtttttaaacatcagtattagatatatgtttcaccacataagcagatgtcttagaactagaagttaggagtaggatggaaaatcg

SEQ ID NO: 122609 - DNA, 201 bp, Homo sapiens
tgaggagggaggattgtagtttgagattgcagtgaaatatgatgacaccgctgtactccagcagctgagacaacagagcaagaccctgtctctaaaaaacwaaaagttttttcaaagggttaattaaaaattttaattataaaaatgataagctatgaaaataaaggaatgcttattgttttctatttttatatgctttgg

SEQ ID NO: 122610 - DNA, 201 bp, Homo sapiens
cagctctgtatctggactgtggttatagttacatgaatcttcacatatgatataattgcatggagctctgtgcatgcacacatgcacacatacacactctcacacactcactaacagttgcatgtaaaactggtgaaatctgaattaagctttgtggattgtcccaatgtcagtttcctggttttgatattatatcttgtt

SEQ ID NO: 122611 - DNA, 201 bp, Homo sapiens
ttgaattcctactgtttgaggtagacattagttttgctctgattctctggtattcctgaccaagtacttcaaattcagagcaataaagcctgctccatggrgtcactcagatagaaggggaggagccaagcctgaagttgaggtctcctcgtgtccaaacacatgccttgtccataatgccgtgctatttaagtaacatct

SEQ ID NO: 122612 - DNA, 201 bp, Homo sapiens
acagctctgtatctggactgtggttatagttacatgaatcttcacatatgatataattgcatggagctctgtgcatgcacacatgcacacatacacactctcacacactcactaacagttgcatgtaaaactggtgaaatctgaattaagctttgtggattgtcccaatgtcagtttcctggttttgatattatatcttgt

SEQ ID NO: 122613 - DNA, 201 bp, Homo sapiens
agagtgactgttgaagttgtctgattctgggttatacctgcctctgccaaatgtagcagatacgtattgagtccttaaagtatgctaatcactgggccagrcactatcagtacttaccgaatagtggagaggttggttacactcactgatagatacctaacttaccgtgttcagtgataatgttgagatatgtcttgggca

SEQ ID NO: 122614 - DNA, 201 bp, Homo sapiens
tctgtcctcttcgtttctttcatcagtgttttatagttttcctcatagaagtcttttacttttttggttaaatttatcctaggtgttttttttttttaatrgctattgtaaataagatcaccttctttatttcctttcagctagtttgttattggcgtctagaaatatcactgatttttgtatgtcgactttgtatcctgc

SEQ ID NO: 122615 - DNA, 201 bp, Homo sapiens
ggtcttttgaggtaattgtctatatttggtgatgatcttcattcttttttattctttttccacctatgactgcattttcaagtagccggttttcaagctcmctgattctttcctctgcttgattcattctgctattgtgaggctgtaatgaatttttcagttcagctaatatatttctcagctccaagatttctatttgat

SEQ ID NO: 122616 - DNA, 201 bp, Homo sapiens; identical to SEQ ID NO: 20674

SEQ ID NO: 122617 - DNA, 201 bp, Homo sapiens
ttaaagaacaaaacacagaagcaattattagctatttggaaaaatctgaatactgactagatctttgatatactgaagaattactggtaattttttggtgwgatgatggtattgtggttatgatttttaagggtgtttggtttcagattagtatagtatataataatggatgaaattataccatgtctgggatttgctttt

SEQ ID NO: 122618 - DNA, 201 bp, Homo sapiens; identical to SEQ ID NO: 20675

SEQ ID NO: 122619 - DNA, 201 bp, Homo sapiens
tgccacatatagaggtccttctgaaagatttacaagtgataaatttccttcggaaggcttacttgacttcaattttgagcagccagaaagccaaaccactwaacaaacagacactgcaacttccaaaattagtggaaagaacagcagtgcagcaacggggaaagccttgttgccagactccttacccttctaaaataaaaa

SEQ ID NO: 122620 - DNA, 201 bp, Homo sapiens; identical to SEQ ID NO: 20676

SEQ ID NO: 122621 - DNA, 201 bp, Homo sapiens; identical to SEQ ID NO: 20677

SEQ ID NO: 122622 - DNA, 201 bp, Homo sapiens
agggcttccacagcttacctcaaagatcattcgctgaagaccaaagcagaatgtggaaccaaatgggttggtgttgtttggggaggaagacctgaggccaragaattcagaattagagaggcagacagaggccacggccttaaagcaagggatccagtcttttctggggtatgggatactggccagtagtctctcatggct

SEQ ID NO: 122623 - DNA, 201 bp, Homo sapiens
cgggggaggggccgaggctcccagtctccctgcccggccctgggtcgcagtcctgggccggagctgaggccgcgggggagttggctacatgggtgaacttsttgtcccttcaggctgccggtcccggcggtgcgacacggccgggaggaggagaacaacgcaaggggctcaaccgtcggtcgctggagccccccccggggc

SEQ ID NO: 122624 - DNA, 201 bp, Homo sapiens
cagcaaccccccaggcagtttatttctagggcttccacagcttacctcaaagatcattcgctgaagaccaaagcagaatgtggaaccaaatgggttggtgktgtttggggaggaagacctgaggccaaagaattcagaattagagaggcagacagaggccacggccttaaagcaagggatccagtcttttctggggtatgg

SEQ ID NO: 122625 - DNA, 201 bp, Homo sapiens
ggagaggcccgcccgggatggtggccaggttcatgcgcatttggaaccggcctgctcaggggctcctagcagcccaggctccgccccactccagagacgcsggagtggggagtggatagttgggggagctaaccaggggagttgatgcttcttcccaatccccagaaaggcgaatttggggtgtgagcacccagaccagcc

SEQ ID NO: 122626 - DNA, 201 bp, Homo sapiens
ttctagggcttccacagcttacctcaaagatcattcgctgaagaccaaagcagaatgtggaaccaaatgggttggtgttgtttggggaggaagacctgagrccaaagaattcagaattagagaggcagacagaggccacggccttaaagcaagggatccagtcttttctggggtatgggatactggccagtagtctctcat

SEQ ID NO: 122627 - DNA, 201 bp, Homo sapiens; identical to SEQ ID NO: 20678

SEQ ID NO: 122628 - DNA, 201 bp, Homo sapiens; identical to SEQ ID NO: 20679

SEQ ID NO: 122629 - DNA, 201 bp, Homo sapiens; identical to SEQ ID NO: 20680

SEQ ID NO: 122630 - DNA, 201 bp, Homo sapiens
cctgcagtgcatccggggagagagtatgagggtagttgggtctgtagttctgagttcaggatgagggttcaatctaaagattgatgaatagacaggtggggagtgggtggggtggccccaggggatgtcctgaaggacaccaaccagaatgggaacagccaaagaggaaggaggaaaaccaggagatttggaaaccagggg

SEQ ID NO: 122631 - DNA, 201 bp, Homo sapiens
aaatgaaaggaatttaaattaagagaagggagagattgaaggatggtgccaagattgaaaggagaaagaggttgagggatagtgagagaggttggagaagragtaaaagaggccacttacccaatttaaaatcagtgagatgttccttgggctggttggtctgcggacctgaggttgtaggtggatctcttcagggagtga

SEQ ID NO: 122632 - DNA, 201 bp, Homo sapiens
attctcctgcctcagcctccggagtagctgggaccacaggcgcccgccactacgcccagctaatttttttttgtatttttagtagagacagggtttcaccrtgttagccaggatggtcttgatcttctgacctcgtgatctgcccgcctcggcctcccaaagagctaggattacaggcttgggccaccgtgcccggcctac

SEQ ID NO: 122633 - DNA, 201 bp, Homo sapiens; identical to SEQ ID NO: 20681

SEQ ID NO: 122634 - DNA, 201 bp, Homo sapiens
cttaggtcttggcgtcgggatcccttttcgtcacactcaggtgacctacagggagctccgctcgacactgcaaggcttagaccagttcggtccaacagagraagcaggcaaccaccatgtcatttgaaaacagtttcatcgggatataattcgcaacccatacagtgaatccatttaaggtgtgtaagtcaaaagtttttc

SEQ ID NO: 122635 - DNA, 201 bp, Homo sapiens; identical to SEQ ID NO: 20683

SEQ ID NO: 122636 - DNA, 201 bp, Homo sapiens
tataattcgcaacccatacagtgaatccatttaaggtgtgtaagtcaaaagtttttcgtgtattaccttatgtttatttatttatttatttatttatttattttgagatggagtctcgctctgtcccccagtctggaatgcagtggcactatctcggctcactgcaagctccgcctcccgggttcacgccattctcctgcc

SEQ ID NO: 122637 - DNA, 201 bp, Homo sapiens; identical to SEQ ID NO: 20684

SEQ ID NO: 122638 - DNA, 201 bp, Homo sapiens; identical to SEQ ID NO: 20685

SEQ ID NO: 122639 - DNA, 201 bp, Homo sapiens
attcgcaacccatacagtgaatccatttaaggtgtgtaagtcaaaagtttttcgtgtattaccttatgtttatttatttatttatttatttatttattttkagatggagtctcgctctgtcccccagtctggaatgcagtggcactatctcggctcactgcaagctccgcctcccgggttcacgccattctcctgcctcag

SEQ ID NO: 122640 - DNA, 201 bp, Homo sapiens
cgcaacccatacagtgaatccatttaaggtgtgtaagtcaaaagtttttcgtgtattaccttatgtttatttatttatttatttatttatttattttgagrtggagtctcgctctgtcccccagtctggaatgcagtggcactatctcggctcactgcaagctccgcctcccgggttcacgccattctcctgcctcagcct

SEQ ID NO: 122641 - DNA, 201 bp, Homo sapiens
ctcagcctcccgagcagctgggattacaggcatgagccaccacactcggcttatttttgtatttttggtagaaacagggtttcaccatgttggccaggctrgtctcaaactcctgacctcaagtgatccacctgcctcagcctcccaaagtgctgggattacaggcatgagccaccaaacccggctattatttatttattt

SEQ ID NO: 122642 - DNA, 201 bp, Homo sapiens; identical to SEQ ID NO: 20686

SEQ ID NO: 122643 - DNA, 201 bp, Homo sapiens
gtggcactatctcggctcactgcaagctccgcctcccgggttcacgccattctcctgcctcagcctccccagtagtagctgggacaacaggcgcccgccaycacgcttggctaattttttgtatttttagtagagacggggttttaccatgttagccaggatggtctcgatctcctgaccttgggatctgcccacctcagc

SEQ ID NO: 122644 - DNA, 201 bp, Homo sapiens
ttttatttttttaagacaaggtcttgctccatcacccaggctggggttaagtggcatgatcacagcttgctgcagcctcaaacttccagactaaagcaatycccccaagtagctgggactacaggcgcatgccaccttgcccggcaaatttttgtatttttagtagagttgggattttgccatgttgcccaggctggtctt

SEQ ID NO: 122645 - DNA, 201 bp, Homo sapiens; identical to SEQ ID NO: 20687

SEQ ID NO: 122646 - DNA, 201 bp, Homo sapiens
ccaaacccggctattatttatttatttatttttgagacacaatctccctctgtcacccaggctggaatgcagtggtgtcatcttggctcactgcaacctcygcctcctgggttcaagtgattctcgtgcctcagcctcccaagtagctgggactacaggtgtgcaccaccacacccagctaatttttgtatttttagtaga

SEQ ID NO: 122647 - DNA, 201 bp, Homo sapiens; identical to SEQ ID NO: 20688

SEQ ID NO: 122648 - DNA, 201 bp, Homo sapiens; identical to SEQ ID NO: 20689

SEQ ID NO: 122649 - DNA, 201 bp, Homo sapiens; identical to SEQ ID NO: 20690

SEQ ID NO: 122650 - DNA, 201 bp, Homo sapiens; identical to SEQ ID NO: 20692

SEQ ID NO: 122651 - DNA, 201 bp, Homo sapiens; identical to SEQ ID NO: 20691

SEQ ID NO: 122652 - DNA, 201 bp, Homo sapiens; identical to SEQ ID NO: 20693

SEQ ID NO: 122653 - DNA, 201 bp, Homo sapiens
tgagctgtcctcatccactgctcgctgcctctccaggtaagttatcccattctaccttttccccccacccagaatgcctgggagacctcccaggaaaggcytcctggctccgtccctcctcccctcggcccccatcctatgggccctgattcatgatgtggctgggctggcacaaaatcccggtggagagtcaccaaactg

SEQ ID NO: 122654 - DNA, 201 bp, Homo sapiens
atcacctgaagtcaggaggtcaagatcagcctggctaacatggcgaaaaccagctctattaaaaaaatacgaaagttacccagtgccgtgtcacgcgcctrtagtcccagctactcgggaggctggggcatgagaatcgcttgagcccgggaggcataggttacagtaaactgagactgtgccactgcactccagcccgag

SEQ ID NO: 122655 - DNA, 201 bp, Homo sapiens
gaccctcactcctctctcctctcttcccagatactctgacccatggatcccctgggtgcagccaagccacaatggccatggcgccgctgtctggccgcackgctatttcagctgctggtggctgtgtgtttcttctcctacctgcgtgtgtcccgagacgatgccactggatcccctagggctcccagtgggtcctcccga

SEQ ID NO: 122656 - DNA, 201 bp, Homo sapiens
tgcagtggcactatctcggctcactgcaagctccgcctcccgggttcacgccattctcctgcctcagcctccccagtagtagctgggacaacaggcgcccrccatcacgcttggctaattttttgtatttttagtagagacggggttttaccatgttagccaggatggtctcgatctcctgaccttgggatctgcccacct

SEQ ID NO: 122657 - DNA, 201 bp, Homo sapiens
cttgatcttctgacctcgtgatctgcccgcctcggcctcccaaagagctaggattacaggcttgggccaccgtgcccggcctacaaagaaccttcttaagkgtgggggagattacaaagtatattgatcagttagggtggggcagaaacagatcacaatggtggaatgtcatcagctaaggctattttcacttcttttgta

SEQ ID NO: 122658 - DNA, 201 bp, Homo sapiens; identical to SEQ ID NO: 20695

SEQ ID NO: 122659 - DNA, 201 bp, Homo sapiens; identical to SEQ ID NO: 20696

SEQ ID NO: 122660 - DNA, 201 bp, Homo sapiens
gtgtgaagagaccaccaaacaggctttgtgtgagcaacgaggctgtttatttcacctgggtgcaggcgggctgagtccaaaaagagagtcatcaaagggtrgtgggattatcattggttcttataggttttgggataggcggtggagttaggagcaatgttctgtgggcaggggtggatctcacaaagtacattctcaagg

SEQ ID NO: 122661 - DNA, 201 bp, Homo sapiens; identical to SEQ ID NO: 20697

SEQ ID NO: 122662 - DNA, 201 bp, Homo sapiens
tccttgggctggttggtctgcggacctgaggttgtaggtggatctcttcagggagtgaaggtgaggacaggggactgctgtcccgaaggagtcccgctgayccgggtcttcggcaccaaatgtctcatgcgtccgtgtgaagagaccaccaaacaggctttgtgtgagcaacgaggctgtttatttcacctgggtgcaggc

SEQ ID NO: 122663 - DNA, 201 bp, Homo sapiens; identical to SEQ ID NO: 20698

SEQ ID NO: 122664 - DNA, 201 bp, Homo sapiens
agaggccacttacccaatttaaaatcagtgagatgttccttgggctggttggtctgcggacctgaggttgtaggtggatctcttcagggagtgaaggtgargacaggggactgctgtcccgaaggagtcccgctgacccgggtcttcggcaccaaatgtctcatgcgtccgtgtgaagagaccaccaaacaggctttgtgt

SEQ ID NO: 122665 - DNA, 201 bp, Homo sapiens; identical to SEQ ID NO: 20699

SEQ ID NO: 122666 - DNA, 201 bp, Homo sapiens; identical to SEQ ID NO: 20700

SEQ ID NO: 122667 - DNA, 201 bp, Homo sapiens; identical to SEQ ID NO: 20701

SEQ ID NO: 122668 - DNA, 201 bp, Homo sapiens; identical to SEQ ID NO: 20702

SEQ ID NO: 122669 - DNA, 201 bp, Homo sapiens; identical to SEQ ID NO: 20703

SEQ ID NO: 122670 - DNA, 201 bp, Homo sapiens; identical to SEQ ID NO: 20705

SEQ ID NO: 122671 - DNA, 201 bp, Homo sapiens; identical to SEQ ID NO: 20704

SEQ ID NO: 122672 - DNA, 201 bp, Homo sapiens; identical to SEQ ID NO: 20707

SEQ ID NO: 122673 - DNA, 201 bp, Homo sapiens; identical to SEQ ID NO: 20706

SEQ ID NO: 122674 - DNA, 201 bp, Homo sapiens; identical to SEQ ID NO: 20708

SEQ ID NO: 122675 - DNA, 201 bp, Homo sapiens; identical to SEQ ID NO: 20709

SEQ ID NO: 122676 - DNA, 201 bp, Homo sapiens; identical to SEQ ID NO: 20711

SEQ ID NO: 122677 - DNA, 201 bp, Homo sapiens; identical to SEQ ID NO: 20710

SEQ ID NO: 122678 - DNA, 201 bp, Homo sapiens; identical to SEQ ID NO: 20712

SEQ ID NO: 122679 - DNA, 201 bp, Homo sapiens; identical to SEQ ID NO: 20713

SEQ ID NO: 122680 - DNA, 201 bp, Homo sapiens; identical to SEQ ID NO: 20714

SEQ ID NO: 122681 - DNA, 201 bp, Homo sapiens; identical to SEQ ID NO: 20715

SEQ ID NO: 122682 - DNA, 201 bp, Homo sapiens
ctaggacttagtgtttagatctaccatcactagaactgtatcagaataggaagtaaaattagataatgcatctcccagtggacacattgcacaagtgtttscttctgaaacttgtttagaaagatggcctagccaggtgcggtggctcacgcctgtaatcccagcactttgggaggccgaggtgggtggatcacctgaggt

SEQ ID NO: 122683 - DNA, 201 bp, Homo sapiens
agtctaagtattgtaccttgttaaatttattcctaaatattttattctttttgataccattgtaaaaggaattgttgtctcaaatccattttcagaatggwaaactcttaatatacttattttctttcatttaaacctaaccactagtgtaagaggtaagtattatttatttttgcagatgagaaaataagcttaaagaat

SEQ ID NO: 122684 - DNA, 201 bp, Homo sapiens
gataccattgtaaaaggaattgttgtctcaaatccattttcagaatggtaaactcttaatatacttattttctttcatttaaacctaaccactagtgtaaraggtaagtattatttatttttgcagatgagaaaataagcttaaagaatttaaatgattttgcccacaagacaaccaagtcagtatctctgagaagacatc

SEQ ID NO: 122685 - DNA, 201 bp, Homo sapiens
ccgctcccttccgcgccctgtcgagtccgtcccggcccagccaagcaagcttcccagacgggccggaagccccggtgcagtccttagcgacctcctcagamccccgccccgaggcgcctgtcgcctggtgcgggaatccccgtacgggagctgggagggtgggggacggcgacagtcaacaaaggcgtggagcggaggcta

SEQ ID NO: 122686 - DNA, 201 bp, Homo sapiens
agaatatcttaaaagctggctgctcagagttaaatatgccaacttttggcatgctgtagttttatttctttcaccctccatttgaatacactatcacctctttttttttttttttttttttaggtggagtctcgctctgttacccaggctggagtgtagtggtacaatcttggctcactacagcctccgcctcctgggttc

SEQ ID NO: 122687 - DNA, 201 bp, Homo sapiens
ggaaaggcagaactaatttatgctgctaataacatgcacatcaacctgatttttgacatccctaacagtactaagttttatttatttgtaattatttgtctttttttttttttggtaagcacaagaaggcatctgaaagtctgaaagtcatggtttttcatttttgtttttgagaccaggtttctctctgtagcccaagtt

SEQ ID NO: 122688 - DNA, 201 bp, Homo sapiens
gtaccagttgttttattttttaaagaagctattgtcatgactgtgcccagagaccatcccatgcccctccccaggaaatacattcttaactatcttttttsttagcccccaacctcctacccatattgcagggggggctagcttgcttctctacaaagtgggtgtctgaccaagttgcttccatctctcaaaaattttctg

SEQ ID NO: 122689 - DNA, 201 bp, Homo sapiens
gttggccaggctggtctcgagctcttgacatcaggtgatctgcctgcctcagcctcccaaagtgctgggattacaggtgtcagccactgcctccaccctasaaaaattaaaaattagctaggtgtggtggtgcacactggtagtcccagcaacttgggtggctgaggattgcttgagcctgggaggttgaggctgcagtga

SEQ ID NO: 122690 - DNA, 201 bp, Homo sapiens
catgcgtcaccacatctgactaatttttttttttttttaagacagtctcgcactttcacccaggctggaatgcagtggcacgatctcggctcactgcaagytccacctcccgggttcacaccattctcccgcctcagcctcccgagtagctgggactacaggtgcccaccaccatgcccagctaattttttgtatttttag

SEQ ID NO: 122691 - DNA, 201 bp, Homo sapiens
aataaatattgaatgagtaagaatgtttgaaatatggttgtattaatttcttaagtctcataaagagaaaatacaggctgatgtgatgtgataaatatacmacttaccctaacctagtatatctgggtgaaggaaaaaaacaatctaatagaagttaattgtgagctcttcagaggaacaatttaaaacctaccaaaaagc

SEQ ID NO: 122692 - DNA, 201 bp, Homo sapiens
tgggttcaggctattctcctgcctcagcttcccaagtaactgggattacgggagcacgccaccatgcccggctaatttttttttttttttttttttttgaracggaacctcactctgtcacccaggctggagtgcaatggcgctatctcgactcactgcaacctctgtctcctgggttcaagtgattcttctgcctcagcc

SEQ ID NO: 122693 - DNA, 201 bp, Homo sapiens
attttctacagaaagcttttttttttttttaaatacctatcattgattctgctggtacaaataagtatgatactgcattttctttcaatgatattcttcaygtagtctttggaagtaatttgaaattgagctctctagggttacccaagtcccagaaccctgatgacaactgcctgtacaaagctgctccctccaggtttt

SEQ ID NO: 122694 - DNA, 201 bp, Homo sapiens
caaatgctccctgacactacacactaatcaacaggaccctggaaaagggtagcaaacaagaacttggagcaaatgtattcaagtaatgaatgtctccattyattcattacttgaatacatttgaaattcatggctcattcaaactcaaaacccaacatagaccaaaccctctggtccatgttgatctcttgcttgcctggt

SEQ ID NO: 122695 - DNA, 201 bp, Homo sapiens
ctcccaagtagctgggactataggcgcatgccaccatgcctggctaactttttgtatttttagtagagacggggtttcaccatgttagccaggatggtctygatctgctgacctcgtgatccacccgccttggcctcccaaagtgctgggattacaggggtgagccaccacgcccagcctaattttttttctttttgagac

SEQ ID NO: 122696 - DNA, 201 bp, Homo sapiens
caaatagaacagcgtaacttcgatctcttaaaaagagttcagcattgtacaatgagaatacattgcccaaaagacactaggaagctgtattttggggggayttctttcaaagtaggtgcttctttgtggtagctcctggattatcacaaaccccctactaccactactctgaaaggctccagggtacaaaggaaagcaaga

SEQ ID NO: 122697 - DNA, 201 bp, Homo sapiens
ttttaagaaaagcattttaataaaatataacagtattttaaatctgtaaaaatctgcactggctactagaaggctcagtgctagaatgagtcaggctatasaataaacccttaaaaaacccgacagcatgactgagcaaaaatacttttgaggctccaaatgctccctgacactacacactaatcaacaggaccctggaaa

SEQ ID NO: 122698 - DNA, 201 bp, Homo sapiens
tttagtagagacggggtttcaccatgttagccaggatggtctcgatctgctgacctcgtgatccacccgccttggcctcccaaagtgctgggattacaggkgtgagccaccacgcccagcctaattttttttctttttgagaccaagtctcactcattcaggctggagtgcggtggtgcaatcttggctctctgcaaactt

SEQ ID NO: 122699 - DNA, 201 bp, Homo sapiens
tgaactactctttagagtagaatccttaataagtaaaacagatttttaaaaagcaccactattctgcttggataggccaaagtaagtggcctggagctatrcttaccagccttcttcctacttatttccactcctccctgatggcctctgagtttctttcaaggaactttagggcacctaagctcacagtttaggaaccaa

SEQ ID NO: 122700 - DNA, 201 bp, Homo sapiens
atgtgtagtgcatggtgcttgccaccaagtagggagtcagtaattatctgttgaatgttgaatgagtgtatatcatcttggggtaactttcattcatgttscccttattaattgtggttgtacattttttttttctagagacaaggtcttgctctgtggtccaagctggagtgcagcggtgccatcatagcttattgtaac

SEQ ID NO: 122701 - DNA, 201 bp, Homo sapiens
aactcccaacctcaggtgatccgcccacctcagcctcccaaagtgctgtgattacatgcgtgagccaccgtgaccagcctaattttttaattttaattttwattttcattttttgagacagtctcgctcggttgctcaggctagagtgcagtggtgccatctcggctcactgccacctccgcctcctgggttcaagtgatt

SEQ ID NO: 122702 - DNA, 201 bp, Homo sapiens
caacctcaggtgatccgcccacctcagcctcccaaagtgctgtgattacatgcgtgagccaccgtgaccagcctaattttttaattttaatttttattttyattttttgagacagtctcgctcggttgctcaggctagagtgcagtggtgccatctcggctcactgccacctccgcctcctgggttcaagtgattctcctg

SEQ ID NO: 122703 - DNA, 201 bp, Homo sapiens
ccacatgcagttggaattataattatgtagcataattttatagaactttggagctagaaggaatctagaggtcatctaggccagggtttgcaatttctctragagattcagagggccgcgttaggcctatggaatttgtttgaacagcacagttcgttttgttttaccttgttttgttttgttcttaatgtaaatttgaat

SEQ ID NO: 122704 - DNA, 201 bp, Homo sapiens
ttagttgaaaatgtagtacattcacactggaaaaataagtacaaaaagatatgcagtgaaaagtctcccttagatgccagacactcaatccttcttcctarggacaatcacagttatcagtctcttttataatcttccagaaatattctgtgtatagacaagcacacatgtgaaatagacatcatacatcattctccacct

SEQ ID NO: 122705 - DNA, 201 bp, Homo sapiens
ataaactacatcttgtctcatcatgttacttttgttgtcctgctgcttgttcttatctgatttttgtgtgtgaccttctccttatttaaagtgcaaattaytaagttattttagttgaaaatgtagtacattcacactggaaaaataagtacaaaaagatatgcagtgaaaagtctcccttagatgccagacactcaatcc

SEQ ID NO: 122706 - DNA, 201 bp, Homo sapiens
atcctcatccaagggaaagctcaatttgacattcatatgacttaatcacaaattcttttgtattttctgaatcatgccactttaattaaactcatttaatrtagtaattttagctctttctaaaattggcttttttttttttaaagatggccttttcttacataattactttcttttaggatcacagtttctgagttgata

SEQ ID NO: 122707 - DNA, 201 bp, Homo sapiens
atgtttatatgaggccaggtgcagtggctcacagctgtaatcccagcactttggtaggccgaggcgggtggatcacgaggtcaggagatcgagaccatctyggctaacgcagtgaaaccctgtctctactaaaaatacaaaaaataagccaggcgtggtggtgggcgcctgtagtcccggctacttgggaggctgaggcag

SEQ ID NO: 122708 - DNA, 201 bp, Homo sapiens
gcattttctttcaatgatattcttcatgtagtctttggaagtaatttgaaattgagctctctagggttacccaagtcccagaaccctgatgacaactgccygtacaaagctgctccctccaggttttggagccaactgtttgctccctgtctttttatagtcgtttcccacttgagaaagtacaggaggagctactagcaa

SEQ ID NO: 122709 - DNA, 201 bp, Homo sapiens
aaggaagaagagactagtgaactagtggtgaaatcttaacgtttagacacaggaatctgagtcaccaggtgctttgccagtcatgggctgttaaaatgcawgaatactgctggggaggggcattggtggaggcagatccttgatcaaccaggggaataccttcaatagacattttttgttttgttttgtttttttgagaca

SEQ ID NO: 122710 - DNA, 201 bp, Homo sapiens
tatgtaatctttttttcttttactttttttttgagacggagtctcgcactgtcgcccaggctggagtgcagtggcgcgatctcggctcactgcaaacgccrcctcccagtttcatgccattctcctgcctcagcctcctgaggagctgggactacaggtgcccgccaccacacctggctaattttttgtatttttagtaga

SEQ ID NO: 122711 - DNA, 201 bp, Homo sapiens
ttgtgttcttagggcctaacacattacctgtgacatgacaggaccttagtaggggtttgttgaattcattattgtcgaatgaacttttatcctgatcctctttttttttttttttttgtgatggagtcttactcggttgcccaggttggggtgcagtggcgcgatctcagctcactacaacctcctcctcccaggttcaag

SEQ ID NO: 122712 - DNA, 201 bp, Homo sapiens
tacctgtgacatgacaggaccttagtaggggtttgttgaattcattattgtcgaatgaacttttatcctgatcctctttttttttttttttttgtgatggwgtcttactcggttgcccaggttggggtgcagtggcgcgatctcagctcactacaacctcctcctcccaggttcaagcgattctcttgcttcagcttcctg

SEQ ID NO: 122713 - DNA, 201 bp, Homo sapiens
cctgtgacatgacaggaccttagtaggggtttgttgaattcattattgtcgaatgaacttttatcctgatcctctttttttttttttttttgtgatggagycttactcggttgcccaggttggggtgcagtggcgcgatctcagctcactacaacctcctcctcccaggttcaagcgattctcttgcttcagcttcctgag

SEQ ID NO: 122714 - DNA, 201 bp, Homo sapiens
ctgtgacatgacaggaccttagtaggggtttgttgaattcattattgtcgaatgaacttttatcctgatcctctttttttttttttttttgtgatggagtmttactcggttgcccaggttggggtgcagtggcgcgatctcagctcactacaacctcctcctcccaggttcaagcgattctcttgcttcagcttcctgagt

SEQ ID NO: 122715 - DNA, 201 bp, Homo sapiens
ggccgggcacagtggctcacacctgtaatcccagcactttgggaggccgaggcaggtggatcacctgaggtcaggagttcaagaccagcctggccaacatygtgaaaccccatctctactaaaaatccaaaaattagctgggaatggtggtgggcacctgtaatcccagctacttgggaggcagacgcaggagaatcactt

SEQ ID NO: 122716 - DNA, 201 bp, Homo sapiens
ggtggatcacctgaggtcaggagttcaagaccagcctggccaacattgtgaaaccccatctctactaaaaatccaaaaattagctgggaatggtggtgggyacctgtaatcccagctacttgggaggcagacgcaggagaatcacttgaacccaggaggcagaggttgcagtgagccaagatggcaccattgcactacagc

SEQ ID NO: 122717 - DNA, 201 bp, Homo sapiens
tgtttccaaatatttatctgaagtggtgcctgaaatttcaccattagaaattcactgttcttgccgggtgtggtggctcatgcctgtaatcccagcacttygggaggcctaggtgggcagatcacttgaggtcaggagttcaagaccagcccggccaacatggtgaaatctcatctctactaaaaatacaaaaattaggcc

SEQ ID NO: 122718 - DNA, 201 bp, Homo sapiens
attgattaaaaggcccgagagcttgatgggaaaatctttgggagtaggaaggctttcttgtacttttgaaatcatattaggggctgggcacagtggcttaygcctgtaattccagcactttgggaggccaaggcaggcagatcatctgaggtcaggagttcgagaccagcctggccaacatggtgaaactctgtctttact

SEQ ID NO: 122719 - DNA, 201 bp, Homo sapiens
aggcaggcagatcatctgaggtcaggagttcgagaccagcctggccaacatggtgaaactctgtctttactaaaaatacaaaaattagccgggctcagtgscgggcacctgtaatcccagctactagggaagctgaggcaggagaatcacttgaaaccgggaggcagaggttgcagtgagctgagattgcataccactgca

SEQ ID NO: 122720 - DNA, 201 bp, Homo sapiens
tggtggttgcagtgaggccaagatggtgtcactgaaccccagtctggccgacagagtgagactctctcaaaaaaaaaaaacaaaaacaaaataaaaaacaraacaaaaaaagcctttaaattataaagagatggctagaatattcagcaaaattgcctatataataaacagtgtaatattctggcaaccagttacttgtta

SEQ ID NO: 122721 - DNA, 201 bp, Homo sapiens
tgaggcaggagaattgctggaacccgggaggcagaggttgcagtgagccgagatcgtgccactgcactccagcctgggcgatagagcgacactccatctcaaaaaaaaaaaaaatatatatatagatatagatatagatatagatatagatagatatacacacacatatatacacgtatatatacatacgtgtatatatat

SEQ ID NO: 122722 - DNA, 201 bp, Homo sapiens
ttattaaaaaaaagccaagatatttaatttagagatttttgaactactctttagagtagaatccttaataagtaaaacagatttttaaaaagcaccactaytctgcttggataggccaaagtaagtggcctggagctatacttaccagccttcttcctacttatttccactcctccctgatggcctctgagtttctttcaa

SEQ ID NO: 122723 - DNA, 201 bp, Homo sapiens
gagtttgagaccagcctggctaacatggtgaaacccctctctactaaaaatacaaaaattagccagacatagtggcgtatgtctgtaatcccagctactcrggaggcggaggttgcagtgagcacctctgcaactccagcctgggtgacacagcgagactcagtctcgaaaacaaacaaacaaaaaaagtgtggacttcta

SEQ ID NO: 122724 - DNA, 201 bp, Homo sapiens
ttgtctctttattaaaaaaaagccaagatatttaatttagagatttttgaactactctttagagtagaatccttaataagtaaaacagatttttaaaaagyaccactattctgcttggataggccaaagtaagtggcctggagctatacttaccagccttcttcctacttatttccactcctccctgatggcctctgagtt

SEQ ID NO: 122725 - DNA, 201 bp, Homo sapiens
tgtgtattgttgattagattaaacaaataaatttatggagaactgttagaacagtgtttgacacatatggaattgttaagtatatcccttccagttctaawgtcttctaattcttgaggttttgactcatcaccaggtatctactgtgaatcctacaacataggaattacttaagaggactcatgaagaaccataattaaa

SEQ ID NO: 122726 - DNA, 201 bp, Homo sapiens
aaccatttgggatttattattcactttgtattactgatgacactgaagctcagaaaggttagtgaatttcatcaaggttgcttaaccaattacattaaaakaatacagtaccagattagatactattagtgttaattttctgatttgataacggttaaaaggagaatgtctttttcttttaggaaatatacattaaagtac

SEQ ID NO: 122727 - DNA, 201 bp, Homo sapiens
cttaacctctggctctacacttcagctctatgactttgagcagtttatttaacttctctgtgcctcagatttctcatctgtaaaatactccattgtgtatygttgattagattaaacaaataaatttatggagaactgttagaacagtgtttgacacatatggaattgttaagtatatcccttccagttctaatgtcttct

SEQ ID NO: 122728 - DNA, 201 bp, Homo sapiens
gggtttcgccatgttggccaggctggtcttgaactcctgacctcaggtgatccgcctgccttggcctcccaaagtgctgggattacaggccaccaagcccrgccaaagttaataatttcttgcttgcatgtcacttttattgctattgtgttacttactcttcttaacactaaaagacagtgtatgaggcctgtttattgt

SEQ ID NO: 122729 - DNA, 201 bp, Homo sapiens
aaagaaaagaaataatcacaatagcctggggccagattgtagagttataaattgaactgtccactaatatttcataatatggacagaccacctaacctctycacataacagtttcctcatccttatgagggtgtaggactaagtttctaaatgtagcatagtgtttaatagcactttgaagtcagactgcatgggcttaac

SEQ ID NO: 122730 - DNA, 201 bp, Homo sapiens
aagacttgaaaagtcaaagattttgagtgccaggtacaaggaacttagttgcctgtggagcaatgctaaccaaacctggctgtgcatcagaatcatctggsggtttgcattctggaagctatttccccttatatatttaagtaaaatcttcagaacatgggctaatctgcatttttattaagcttcccaggttaggcttag

SEQ ID NO: 122731 - DNA, 201 bp, Homo sapiens
ttctttctaattctctttataactgtataatcttcttcccttgttaaatcatcaacttgtaagggaagacttgaaaagtcaaagattttgagtgccaggtwcaaggaacttagttgcctgtggagcaatgctaaccaaacctggctgtgcatcagaatcatctgggggtttgcattctggaagctatttccccttatatat

SEQ ID NO: 122732 - DNA, 201 bp, Homo sapiens
gattaagggtcattatcattagtatgagagaacacacatttctaaaattttgggtcatattaaataatttgaaaagagtatattcaataatttttagtacygtaagaatggcttaatgatataccagataaatgaaaatatgtgtagtgtcttcagtatattcagactgatagagtagctagaatatttcagtaggtctgc

SEQ ID NO: 122733 - DNA, 201 bp, Homo sapiens
taaagcctgtatcttcagctcagactgtttcttttcattcactagatttgtctgcctctgctcattccaaggtggtgatcttcacagtcaactctttgggwagttctcagtcgtaccttgatgtggtacagagcaatgtggatatgttcagagcccttgtcccagctctgggacattatagtcaacacagtgtcctgctcg

SEQ ID NO: 122734 - DNA, 201 bp, Homo sapiens
atgtatttttcccacatttcaaatattccatggacacctatggtaagaatcatatcctctagtttaaatgctgcattatttgaactactaatttttggtcytaaagagctgcaaaattgtaatttctctttttctcttttatcctctgattttcagctatactttatgacctgcaatttctgagaaagcttaaattaatac

SEQ ID NO: 122735 - DNA, 201 bp, Homo sapiens
gtgtagattatttccattatggcagaaagctttgtcagacagttctgtatcataagtgggtgggtcaattcaccagtacttattattctgcaaaaagcgtrtgctttttcttttttttaaagagacagagccttgctccgtctcccaggctggagtgcagtggtaccatcatagcttactgcagcctcaaactcttgggct

SEQ ID NO: 122736 - DNA, 201 bp, Homo sapiens
attggtgactttaggtactcattcacaatgttgtgcaactatcaccactaatttccagcattttcaccaccccaaaaggaagctctgtacacattgagcarttactccccattttcccttctcccaggttctggcaactactaatctgtctgttctgtggattttcctctactagctaatttatataaatggaatcatata

SEQ ID NO: 122737 - DNA, 201 bp, Homo sapiens
gtcatctatactttgatgccattaaaataaaatattaacattgatgatatctaggttagaggtaacttttaaaaatttatagttttctgtgtagtaaaaayatgtagtatttatataatttttaagaaaagcattttaataaaatataacagtattttaaatctgtaaaaatctgcactggctactagaaggctcagtgct

SEQ ID NO: 122738 - DNA, 201 bp, Homo sapiens
acagtatctggcacacagcaaacgctcagcaaatggtagctattattacagtgattggcaagatggtgatgaatagaaaattggcaaaaaacatgtaaaakaactctttgaagtaaagcaacattaggatttggaaacagatataagagtaacaattgtgtaaataaaatatcctcttcaagtatttcagagacaagtgac

SEQ ID NO: 122739 - DNA, 201 bp, Homo sapiens
taatcacatctaaaaaatccctttgccaagtaaggtgacatattcacaggttccaagggttagatatggacatctttaaaggacctttattcggcctatcrtatgtatatggttgattctaaatcattaacagttttagttattctgttcacctaatagtaagaatttggttttctaagaaatattttactttattatctt

SEQ ID NO: 122740 - DNA, 201 bp, Homo sapiens
ggtagaataattgcttgaacccaggaggcagaggttgtagtgagctgagagtgtgccactgcactccaccctaggtgacaaagtaagactgtgtatcaaawaataataataataataatattaaagtgtgatataaatttctagtctggccaggcgcagtggctcacacctgtaatcctagcactttgggaggccaaggtg

SEQ ID NO: 122741 - DNA, 201 bp, Homo sapiens
tgtggtggcgggtgcctgtagtcccagctactcaggaggctgaggcaggagaattgtttgaaccgggaggcggaggttgcagtgagccaagatcacaccaytgcacaccaggctaggtaacagcgagagtccgtctcaaaaagaaaaagaaaaaaaaaaaaaatatatatatatatataaagaaatttccagtctgtgtat

SEQ ID NO: 122742 - DNA, 201 bp, Homo sapiens
accgggaggcggaggttgcagtgagccaagatcacaccattgcacaccaggctaggtaacagcgagagtccgtctcaaaaagaaaaagaaaaaaaaaaaawatatatatatatatataaagaaatttccagtctgtgtatgcagctttgaagttttgaattgtttttgtaaatgatgtagtaaaaggaaatgggtaaccca

SEQ ID NO: 122743 - DNA, 201 bp, Homo sapiens
tcccagcactttgggaggccaaggtgggaggatcacttgagcttaggagttcaagatcagcttgggcaatatagagagacctcatctcaaaaaaaaaaaaragaaaagaaaagaaaagaaaaaatagccagaagagaccatttggaatgttttcaacacaaataaatgataaatgtttgaggtgatggatagccccattac

SEQ ID NO: 122744 - DNA, 201 bp, Homo sapiens
gtgcatagcatagagtctggcacataggtagcttattattattattactgtttgttttgagacggagtctcgctctgtcacccaggttgaagtgcagtggygcgatctctgctcactgccatctccgcctcctgggttcaagcgattctcctgccttagcatcctgagtagctgggactacaggcgcccaccaccaagccc

SEQ ID NO: 122745 - DNA, 201 bp, Homo sapiens
acgaggtcaggaattcaagaccagcctggccaacatagtgaaaccctgtctctactaaaaatacaaaaattagccgggcatcctgcaatgggcctgtagtcccagctactcaggaggctgagacaggagaatcgcttgaacccgggaggtggaggttgtggtgagctgagatcacgccactgcactccagcctgggcaaca

SEQ ID NO: 122746 - DNA, 201 bp, Homo sapiens
gaggcaggacaatcgcttgaacctgggcagtgcaggttgcggtgagccgggattgcgccattgcattccatcctgtgcaacaagagtgaaactctgtctcaaaaaaaaaaaaaaaaaaaaagtaatactggacttaatatataagattccttcctgctaaaaacttcttttaataaatgatactacaaagtattattattc

SEQ ID NO: 122747 - DNA, 201 bp, Homo sapiens
caccatgttggtcaggctggtcttgaactcccaacctcaggtgatccgcccacctcagcctcccaaagtgctgtgattacatgcgtgagccaccgtgaccrgcctaattttttaattttaatttttattttcattttttgagacagtctcgctcggttgctcaggctagagtgcagtggtgccatctcggctcactgccac

SEQ ID NO: 122748 - DNA, 201 bp, Homo sapiens
tgtgttacttactcttcttaacactaaaagacagtgtatgaggcctgtttattgtcctttagtcctcattgttgaatgaatttaaattgagtcactggccrtgttcagtgtaatgttctttctcttactgtacagggtattgcagacaggcttgtcctcttagacctctcagaagggactaaaggagccacgatggacctt

SEQ ID NO: 122749 - DNA, 201 bp, Homo sapiens
ctcaggcaggagaattgcttgaacccgggaggcggaggttgcagtgagccaagatagcgccactgcactccagcctgggcaacaagagtgaaactctgtcaaaaaaaaaaaaaaaagctgggcacaatggctcacgcctgtaatccaagtactttgggaggctgaggcaggtggatcacttaagctcaggagttcgagacc

SEQ ID NO: 122750 - DNA, 201 bp, Homo sapiens
taaatctgcctatttgctaactcctatccaaaaaacataattctatcaaaggcataccctgtactaagtactgtgaagagctagaacaatgagggaaagaygattcctgctctcaagttgtttataatcaggcttctcttctagcaaattcttccccatcttagaatgaccttcccttttccccctaattttctttttttt

SEQ ID NO: 122751 - DNA, 201 bp, Homo sapiens
ctgaaagtctgaaagtcatggtttttcatttttgtttttgagaccaggtttctctctgtagcccaagttggcatgcactggtatgatcatggcttactgcrgtctctatctcctgggcttaagagatcttcccacctcagcctcctgagtagctgggaccacaggggtgtgccactacacctaggtaatttttagtttttt

SEQ ID NO: 122752 - DNA, 201 bp, Homo sapiens
ctattgtatacatattttgtttattatctcacttttacatatgttaattgtaagaccttcatacacacctgttgaagtttgtaggcagtagagctatatcttttttttttttttttttgagactgagtctagctcttgttgcccaggctggagtgcaatggcaccatctcggcccactgcaacctccgcctcctgggttta

SEQ ID NO: 122753 - DNA, 201 bp, Homo sapiens
ttgtgtgtgtatttgtgtgtgtatattcatgagcacacacatgtgcacacttacatactttactacagttctttctgtttctgattgcacattttggggcttttttttttttcttctagtttttaaagatagttctcagaaagacctgctgaattttactggcacaattcctgtgatgtatcagggtaagtgtggaagttg

SEQ ID NO: 122754 - DNA, 201 bp, Homo sapiens
caaagtgctgggattacaagtgtgagccaccgtacctggcctgctattacctcttaattagaatttgagttgtattcagtcttttgtcactaaataaatgyttctataaacatttcaagttgcttgttttctcatctgaatttttatttggtcatacattattttattttatttagacagggtcatgttctgttgcacagg

SEQ ID NO: 122755 - DNA, 201 bp, Homo sapiens
cttaaatgaattacagtaagtaaagctctgggcatagtgcctggcatatagtgtgtgccagtgtatgctcagtaaatgtggccattattatttgtctgccttttttttttttttttgagatggagttttgctcttgttgcccaggctggagtgcaatggtatgatctcagctcactgcaacctccacctcccaggttcaag

SEQ ID NO: 122756 - DNA, 201 bp, Homo sapiens
ttttttttaagacagtctcgcactttcacccaggctggaatgcagtggcacgatctcggctcactgcaagctccacctcccgggttcacaccattctcccrcctcagcctcccgagtagctgggactacaggtgcccaccaccatgcccagctaattttttgtatttttagtagagatggggtttcaccatgttagctagg

SEQ ID NO: 122757 - DNA, 201 bp, Homo sapiens
tttccttttctttaatgtgtagtgattaatgtaggaagtgactccatcaggatttgggctgccactctggctatattagtaaacatttttgaaaatttgattttttttttttttttgagaggcagggtggatgatttggccattgttttaattaaacttactcaaatgttataccagtgatctaataggaacatatttcca

SEQ ID NO: 122758 - DNA, 201 bp, Homo sapiens
ggaaagagtaccatagttgctttaaggatcttttttgtaggtctcatgtagaagttctttggggaactggatattctcttgtgcctgtgattttcaggtaytgaagttcttaaaggacctcttaactcttcaaaatcactttaggagactcttcagtatatggactctagaggttgtgaggccacgtaggactgaagaaat

SEQ ID NO: 122759 - DNA, 201 bp, Homo sapiens
ttctcagaaaaaaaaagaaaagaaaagaaaagaaaaagaaacctgcagacctgggcacggtggctcacacctgtaattccagcactttgggagaccaaggygagcacatcacctgaggtcaggagtttgtgatgagcctggccaacatggtgataccccgtctctactaaaaatacaaaattaggtgggcatggtggtgca

SEQ ID NO: 122760 - DNA, 201 bp, Homo sapiens; identical to SEQ ID NO: 20717

SEQ ID NO: 122761 - DNA, 201 bp, Homo sapiens
ttcgagaccagcctagccaacatggtgaaaccccatctctaccaaaaatataaaaaatagccaggtgaggtggtgcacgcctgtaatcccagccacttggsaggctgagacaggagaatcgcttgaacctgggaggtggaggttgcagtgagctgagctcgtgctaatgcaccccagcctgggcgacagagcaagactcct

SEQ ID NO: 122762 - DNA, 201 bp, Homo sapiens
ccatggtcagatactcagtctctaccagggatcaggtgctacttgctacttttcaaatgttttattgtttcgtgctgcatttagcattgccttgcactagraccctagggttctgtgctaagactccctattggggcttaccaaggattactcaatagagctttattggcacaaatatctgggactctatgagatccatta

SEQ ID NO: 122763 - DNA, 201 bp, Homo sapiens
gccactagcttttccaggtatttacatgtgtgcaatccttttcagctcttctcaacagtcacccataggttgtgttattagccaggggagaaaagtcaccwgtgaaaagatgaagctgaaccacctagtgacacgggtttagtgactgccaaagttttcaagatatattagacaaagccatgaatcaaatttcaaatgact

SEQ ID NO: 122764 - DNA, 201 bp, Homo sapiens
cagatactcagtctctaccagggatcaggtgctacttgctacttttcaaatgttttattgtttcgtgctgcatttagcattgccttgcactagaaccctarggttctgtgctaagactccctattggggcttaccaaggattactcaatagagctttattggcacaaatatctgggactctatgagatccattaggtcctg

SEQ ID NO: 122765 - DNA, 201 bp, Homo sapiens
tctgaccctgggttgggcggcctcatgtcccccgtggctccactctgcatgagaagcaccagcagtggagccaactataggctcaaactagccatcaaagytgccatgatcacaggatctacaaacaggtgagagcaactctttgggaatttgggaactgtgggtatctttgggtcttgttgacctcattttcttaggctc

SEQ ID NO: 122766 - DNA, 201 bp, Homo sapiens
tacaaacaggtgagagcaactctttgggaatttgggaactgtgggtatctttgggtcttgttgacctcattttcttaggctcatccccacaaagcaaagcytactagatttaactgctagtagatttttgggaaggtgatcttaatgagaaatattgaggaaaaggaaaggaaactggaaaaggagacaaaaccagtgcag

SEQ ID NO: 122767 - DNA, 201 bp, Homo sapiens; identical to SEQ ID NO: 20722

SEQ ID NO: 122768 - DNA, 201 bp, Homo sapiens
cactattgaccctataggaatcgaaaggattactctaaggaataacttgaacaactttctactaacaaatttgttcctagaaagaaacaaattatcaaacygactcagagagatatataaaatctgaataaacctataacaagaaattgaagtaataattacaaatatcacaaagaaaagtccaagtacaaatggtctcac

SEQ ID NO: 122769 - DNA, 201 bp, Homo sapiens; identical to SEQ ID NO: 20723

SEQ ID NO: 122770 - DNA, 201 bp, Homo sapiens
atatcatcttctttagtaaaccccatatgaaaggatgataaagaaattttaaagttctacacagataaatgctggtcccacatgagacacataaactcttytacctttgtcctccctatgtctcccacagctggccaacaactgcataattatatttatttttgtatagaaagagataaacttatagaaaagttgaaaaga

SEQ ID NO: 122771 - DNA, 201 bp, Homo sapiens; identical to SEQ ID NO: 20724

SEQ ID NO: 122772 - DNA, 201 bp, Homo sapiens
attctcaagatcaagttcaaaaaaaggggtccccgtgaaagtgaccatcaagatggcaccacctcaccagacctccttggagctcttcgtgtacctgaacraagtcacgggcaagcacggcatgggctgtattgacattatggagaactgcttcattagaataaagtccagaggtatctacaagaccccagcaggcaccat

SEQ ID NO: 122773 - DNA, 201 bp, Homo sapiens; identical to SEQ ID NO: 20726

SEQ ID NO: 122774 - DNA, 201 bp, Homo sapiens
aacgtgcaggggaattatgagccaatcgatgccaccggtttcatcaacatcaattacctcagactgaaggaatatcattatttccagagtaaggtcactgycaaatagacccatgtacaatggagacctggggcctcctcactttgcagctctcccaactacaggtgctaattgttgtgacgatttgtaattgtgacttgt

SEQ ID NO: 122775 - DNA, 201 bp, Homo sapiens
ccaggtgcacatcctcagccaggagtctctactctctctctacaaggaggagctggtgagcgtcaacgtgcaggggaattatgagccaatcgatgccaccrgtttcatcaacatcaattacctcagactgaaggaatatcattatttccagagtaaggtcactgtcaaatagacccatgtacaatggagacctggggcctc

SEQ ID NO: 122776 - DNA, 201 bp, Homo sapiens; identical to SEQ ID NO: 20730

SEQ ID NO: 122777 - DNA, 201 bp, Homo sapiens
tcattatattaaaacatctaattcaaccagctaacaagtgaattttatttattagaaatgaaatttatttattagaagtttgctgatttggttaattggtrcttttaccttctttctggacaaacgcaaagatgttggaatgctttaactttatttataccaacctgccctcacagaaatggtgttgttttcatgtacatt

SEQ ID NO: 122778 - DNA, 201 bp, Homo sapiens; identical to SEQ ID NO: 20732

SEQ ID NO: 122779 - DNA, 201 bp, Homo sapiens; identical to SEQ ID NO: 20735

SEQ ID NO: 122780 - DNA, 201 bp, Homo sapiens; identical to SEQ ID NO: 20729

SEQ ID NO: 122781 - DNA, 201 bp, Homo sapiens
tatatttttatatatatatatatatatatatctttccagagttccttttacaaaatctcagaatggtttataagtattttacacataatttataaaatatyattttctatatagtataaaaaattcacacggtctcacagaatgatagagggaaattcacactcactatctagggtattaaatctccaagactacattctt

SEQ ID NO: 122782 - DNA, 201 bp, Homo sapiens; identical to SEQ ID NO: 20731

SEQ ID NO: 122783 - DNA, 201 bp, Homo sapiens; identical to SEQ ID NO: 20733

SEQ ID NO: 122784 - DNA, 201 bp, Homo sapiens; identical to SEQ ID NO: 20734

SEQ ID NO: 122785 - DNA, 201 bp, Homo sapiens
tatctcaatcactaagagtattttatgcctgtgaaataggcattttgagtcatcttgtgactttcatctgactaactccatctgaagtagttgtctatttrtggaaggaggtgtcctttatttttgtttctagggaacacagtaggagcaagggaagggcagaggggcttatttcatataagggcttcttgtcgcctgaac

SEQ ID NO: 122786 - DNA, 201 bp, Homo sapiens
tctatatattctgaaagtggatgtggcttctcctgtcctaatcatgtaagcagactgcaacaacattactgctcaaaccaacgaggtcttttaaaatgtgstgcccgtttcctttttcaatccaccgaatagctgcagttgtttctaaacctctttagttctctatgcacacacagtatcatgcctatctctttgtgcagg

SEQ ID NO: 122787 - DNA, 201 bp, Homo sapiens
ttgcagaatttggtaattagacttctaaatgatctataaggaagttctttccagtttaaaaatactgtaatttcaaggttttccttttttttctgtttgcttgtttgttttcaactaagtatttctttttttcctttaggtttattattaataaaaagaaatcaacacagaattatgtttgcaatatgcaatcacctatat

SEQ ID NO: 122788 - DNA, 201 bp, Homo sapiens
atgggcttatttcaatttagagtatgagctatcctgttgcttaaaaataattacccatatctgaaaaagcaaggaatttactacggtattcactttgcacyagggggaaaaaggaatgagtgataaaaattgtattacaaatttcagtaataggaatatggcttttacaattagaaaataatagcactgattacattgatc

SEQ ID NO: 122789 - DNA, 201 bp, Homo sapiens
acaaatcatttctcaatcagtttgtgacgttcaatgaaatgtggattttatacgacaactggtgatgaccagctcagtggctagaccaagaagctccaaarcacttcccaaagccaaacttggaccaaaaaaaggtcatgttcgctgtttggtggtctgctgctggtctgatccactattgctttctgactcccggcgaaa

SEQ ID NO: 122790 - DNA, 201 bp, Homo sapiens
tgcagaatttggtaattagacttctaaatgatctataaggaagttctttccagtttaaaaatactgtaatttcaaggttttccttttttttctgtttgcttgtttgttttcaactaagtatttctttttttcctttaggtttattattaataaaaagaaatcaacacagaattatgtttgcaatatgcaatcacctatatt

SEQ ID NO: 122791 - DNA, 201 bp, Homo sapiens
gctgctcttaggcaaacacctatttaaacctcagcaatgtataatcttaacttcaggcagcatggttgtataggtttggtaatttgtaatacctctgcaamtagggataaaatactaactttcaataatataagcagtatctgcagtacaaatactaaaagtgctacattatatcccaggaaagatattttataaaaaaga

SEQ ID NO: 122792 - DNA, 201 bp, Homo sapiens
gcagaatttggtaattagacttctaaatgatctataaggaagttctttccagtttaaaaatactgtaatttcaaggttttccttttttttctgtttgcttgtttgttttcaactaagtatttctttttttcctttaggtttattattaataaaaagaaatcaacacagaattatgtttgcaatatgcaatcacctatattt

SEQ ID NO: 122793 - DNA, 201 bp, Homo sapiens
ttctattttagactaatttcaaataaatgttttgtttattgaagcctagaactaagtgttcattacaccccgggtttctcacttgttttgaaaataatcarcatcctaaagtcaatctacaagacttcctttagaatttttttttatgttggtctcaatgcaagaatctgcaacaagaaaaaaggtatctaaatttgttga

SEQ ID NO: 122794 - DNA, 201 bp, Homo sapiens
ggatctgtctttcttggcttgtctttccttttctgctgtgtatacaaatgctgtgtgttaagatcaaggagtggacacctggtttgcttctccaagttctrtcgctcagtctcataaagattttgctttgggcattgcagctggcattcttttctttctcttccttgctgctgaacggttacacaggaaagaataatgaag

SEQ ID NO: 122795 - DNA, 201 bp, Homo sapiens
cagaatttggtaattagacttctaaatgatctataaggaagttctttccagtttaaaaatactgtaatttcaaggttttccttttttttctgtttgcttgtttgttttcaactaagtatttctttttttcctttaggtttattattaataaaaagaaatcaacacagaattatgtttgcaatatgcaatcacctatattta

SEQ ID NO: 122796 - DNA, 201 bp, Homo sapiens
aaagaaggaaggaaggaagggtgggaaggagataggtgtccaaaccagagtgacctcctcttgaataggggctgggtaaaataaggctgagacctactggrctgcactcccaggaggtcaggcattcttaatcacaggaccctgttgataaagaggatgtggtaaagaagatggccaaatcccaccgaaacccaaaaccaa

SEQ ID NO: 122797 - DNA, 201 bp, Homo sapiens
tactttctttctccatgttccccagggatctgtctttcttggcttgtctttccttttctgctgtgtatacaaatgctgtgtgttaagatcaaggagtggamacctggtttgcttctccaagttctgtcgctcagtctcataaagattttgctttgggcattgcagctggcattcttttctttctcttccttgctgctgaac

SEQ ID NO: 122798 - DNA, 201 bp, Homo sapiens
agaaatttagatatcccagtcccacagattttgttaatgatgtttcctgagagttactttataattttttcagtatatagttacagttgaaatctaattcrctggtacaagttctttattttaaatgaaaattaaagagtccattgaaacagtctcctaattagagagaatatggaaggaaggaaggaaagaaaaggaagg

SEQ ID NO: 122799 - DNA, 201 bp, Homo sapiens
tcagcatgcctgtgtgaacacactacgaggacccgcagcctcttaagatttctcactctactttctttctccatgttccccagggatctgtctttcttggsttgtctttccttttctgctgtgtatacaaatgctgtgtgttaagatcaaggagtggacacctggtttgcttctccaagttctgtcgctcagtctcataaa

SEQ ID NO: 122800 - DNA, 201 bp, Homo sapiens
gtggggtatggtaaaatagtttctattccatgcaacaattgtgaatattaaatgagattatgtatagcacctagtccattgttgtgcataggtaccatatyaaaaacaaatttctagaggtgaagatcggcaatctttctattttcttactcccatccatatttatgcatcaaatgatgccatgaagcataacatattttt

SEQ ID NO: 122801 - DNA, 201 bp, Homo sapiens
ctcttgaagggatcccagttgtaatccttgacaccagaacacttattgccagaaagcccacgggcgttgaaaacattgatcagaaagtaacagagagaagrggttcaatttcaaccgtttttcactgtttggcttcccttacaagaccttcttaaattgttttaattaatcctagttatgattctatttttaaaggctgat

SEQ ID NO: 122802 - DNA, 201 bp, Homo sapiens
aactaagcttcataagtgaaggagaaataaaatcctttacagacaagcaaatgctgagagattttatcaccaccaggcctgccctacaagagctccggaargaagcactaaacatagaaaggaacaagcggtaccagccactgcaaaaacatgccaaattgtaaagaccatcaaggctaggaggaaactgcatcaactaat

SEQ ID NO: 122803 - DNA, 201 bp, Homo sapiens
ttcatttgggatcatgtcaaggattaattgacattacttaatcattgagtcattgtcttaatcacagttcatttattgcccaaatcactgggagttgactrtattctgttaagtgagtggtgcccatattgataaagggaatgggtgagaatttattgatgaatatttgagagagaatagtaagggaattggtataacaaa

SEQ ID NO: 122804 - DNA, 201 bp, Homo sapiens
gcgtgtgaccttggatagcctctgagcttcagaatgacaattctgagctttagttttctcatctttaaaaatgcagaaattcctactttattgactgctayttgtttttgaagagaatcatatgttacagtacccagctgtatatattttgtacctaagtttttgggctccatatggtaaatctagatgagaaagaagggg

SEQ ID NO: 122805 - DNA, 201 bp, Homo sapiens
actgggtggagcccaccgctgctcaaggaggcctgcctgcctctgtagactccacctctgggggcagggcatagctgaacaaaaggcagtagaaacctctrcggacttaaatgtccctgtctgacagctttgaagagagtagtggttctctcagcacggagtttgagatctgagaacggacagactgcctctgcaagtggg

SEQ ID NO: 122806 - DNA, 201 bp, Homo sapiens
ttcttaaaaagtgtactgagtggtgagaaaacaattttctaacagaaaagcttccataaagttacattaagaaacagttaagagctttagaagattttggwctgtttaagattccagtcctgactaaattctagctttgtggcctgagctaaaataaagatccttcggaatctcagaatctgacagatcttagaaaaaaat

SEQ ID NO: 122807 - DNA, 201 bp, Homo sapiens
atcttaacactggatgttaatgaagactttaaagacaaatatgaaagtctggttgaaaaggtagatttagacagactacaaacaaatatttgttttttctwaaaaagtgtactgagtggtgagaaaacaattttctaacagaaaagcttccataaagttacattaagaaacagttaagagctttagaagattttggactgt

SEQ ID NO: 122808 - DNA, 201 bp, Homo sapiens
ctttcagaaagaattttgacttgggagattgtatagcgtggttgttgagaggatagactttgttattagtcagatcttggctcaagtccagtcttactggygtgtgaccttggatagcctctgagcttcagaatgacaattctgagctttagttttctcatctttaaaaatgcagaaattcctactttattgactgctact

SEQ ID NO: 122809 - DNA, 201 bp, Homo sapiens
acctcagcctcctcagtagctgggactacaggcccacgccaacatgcccggctaatttttgtattttttatagcgataggattttgccaatgttgtctggwtttgtctcaaactcctgggatcaagcaatccgcctgcctcggcctcccaaagtgctagaattaggcatatgagtcaccatgcctggcctgttggctattt

SEQ ID NO: 122810 - DNA, 201 bp, Homo sapiens
tttttttgagtcttgctttattgcccaggctggagtgcaatggtgaacctcagcccactgcagcctccgcctcctgggctcaagtgatcctcccacctcarcctcctcagtagctgggactacaggcccacgccaacatgcccggctaatttttgtattttttatagcgataggattttgccaatgttgtctggttttgtc

SEQ ID NO: 122811 - DNA, 201 bp, Homo sapiens
agaacagaggttctcaaacatttgatctcagggcccttttcaattcttaataactatcgaggtgtccaaagagcatgtcctattgatacttaacattactrgaaattaagatgcacaaaaatgatttaaaattagcaataataaattcattacatattaatataaatacatttgacaaaaagttatattttctaaaataaa

SEQ ID NO: 122812 - DNA, 201 bp, Homo sapiens
ggagtgcaatggtgaacctcagcccactgcagcctccgcctcctgggctcaagtgatcctcccacctcagcctcctcagtagctgggactacaggcccacrccaacatgcccggctaatttttgtattttttatagcgataggattttgccaatgttgtctggttttgtctcaaactcctgggatcaagcaatccgcctgc

SEQ ID NO: 122813 - DNA, 201 bp, Homo sapiens
tttacttttaattaaaaaaattaagatatttttatttttaatttacagataaaaattatatttaattttatattatatttatatataaatcatatgtaatrtaaattatatacataagttatatataatataaaaattatatacataatataaattatatataatataaaaattatatttatggtatgcaacatgatgttt

SEQ ID NO: 122814 - DNA, 201 bp, Homo sapiens
aatattaaaggtgaaaattgtataaattactttgattccattttaagtggagacatatttcagtgatttttagtaacctttaaaaatgtataatgacttttaaaatttgtagaattgaaaagacgctaataaaaatttattatttatttgtcatgactcaaaagttgtctcagtgtggtggtcataatagaattgagccta

SEQ ID NO: 122815 - DNA, 201 bp, Homo sapiens
gatggggtttcaccatgttggccaggctggtcttgaactcctgacctcaagtgatccacccatctcagcctcccaaagggctgggattacaggtgtgaggkctcttttttttttttttttttttttttaagacggagtcttgctctgtcccttagtaagtcattcttgaaaattagttaagaatgcttgataaagcacttc

SEQ ID NO: 122816 - DNA, 201 bp, Homo sapiens
cgtgacctggcgtgcggagcgcgcacgcgggaacccgcgctggaggcgggcgagggccgaggggcagctagggagcgcggcttgaggagggcggggccgcyccgcaggcccgccagtgtcctcagctgcctccgcgcgccaaagtcaaaccccgacacccgccggcgggccggtgagctcactagctgacccggcaggtca

SEQ ID NO: 122817 - DNA, 201 bp, Homo sapiens
gaatattaaaggtgaaaattgtataaattactttgattccattttaagtggagacatatttcagtgatttttagtaacctttaaaaatgtataatgacttttaaaatttgtagaattgaaaagacgctaataaaaatttattatttatttgtcatgactcaaaagttgtctcagtgtggtggtcataatagaattgagcct

SEQ ID NO: 122818 - DNA, 201 bp, Homo sapiens
tttcaataaaactttcaaatctcgctttaggtatatatcttcatctaggtggtggttacatggatatatatacagttggctctccatatcaatgggtttcrgattgatatggattcaaccaatcatgaatagaaaatattcagaaagaaataatacaaaaaaatacaaataataaaggattactgttcatatagcatttac

SEQ ID NO: 122819 - DNA, 201 bp, Homo sapiens; identical to SEQ ID NO: 20741

SEQ ID NO: 122820 - DNA, 201 bp, Homo sapiens
gaagaccatatataaagacaggagaaagtggctgaacaaagccatctgaaaagtaaatttgaggcagggcatggaggctcatacttgtaatcccaggattkggggaggcttaggcaagaggatcacttgagtccaggagttccagatcagcctgggcaacatagtgagaactcatctccacaaaaaaattaaaaaattagt

SEQ ID NO: 122821 - DNA, 201 bp, Homo sapiens
tgcagtgttcttaagggttactaggctaaaagaatttggtaaatccctaggtgccctttacagtcgtccaattggttgcaccctatgaaggattggcctgygaccaatcagaggctgaaatggagatggccgaggacaatcagaggcgatgtggaaacttctgtcttgtaatcacaggagtgaaggtgtggcctgtatgct

SEQ ID NO: 122822 - DNA, 201 bp, Homo sapiens
actctgttaaaaacacagaaacaaaacagtaaagttgaatgaataacccctcggatcaataccacaatacattcatcccctttccctctctccaatccagktaggtagcatcatatttagaaatatttcctcaaagcatctttaatcttttcagcagctgaaataatttcctaatatatcatcccatctccagtttctctt

SEQ ID NO: 122823 - DNA, 201 bp, Homo sapiens
gcattaggaattctgttagtttccatgactttttaaagtattaacatcagtgtctttggttcttgttctcctttgccttcatagaaaattaatttattaaytagcttattttctagctcccactttgccccaataagttaaggaactagatgtgttagtgtgattgggaactctagctgttattactctgcttgaactaaa

SEQ ID NO: 122824 - DNA, 201 bp, Homo sapiens
tgttacccaggctggtttcaaactcctgggctcaagcgatctgcccatctcagcctcccagagtgttgggattacaggcttgagccactatgtggggcctrtagtatttaattttattcgtctatcactgtttgtccattttatacctttaattgatttttgagtgatttccaatttagttgcttatgtaaacagcattgc

SEQ ID NO: 122825 - DNA, 201 bp, Homo sapiens
ttttgatagatttaaaaaaaaatttttttagctccaggttgggtgctggtcattcatgcatacagcaaattttttaaaattcttaccacattcaaagcackgtaccttcttgaaaaaggccaggcaagcagatgctttaagcattcaaatgaatagaaaaactgcattctcaaagaggacttcttatttcattgctccaga

SEQ ID NO: 122826 - DNA, 201 bp, Homo sapiens
tcactgttatccagtttatcgttaaaagtttttctcctctcctctggatacagtttactttgtgtttttcttctaaactgtctacctgtgtcaccttcttyactgcctcgctcctgttttttctctgtgtgtaattctttaaagttcttccaggtttttcttcttttctattgccctgtctaatgtcctagatttaaatat

SEQ ID NO: 122827 - DNA, 201 bp, Homo sapiens
ttttgttggcttgtatttttttgagtcttgctttattgcccaggctggagtgcaatggtgaacctcagcccactgcagcctccgcctcctgggctcaagtratcctcccacctcagcctcctcagtagctgggactacaggcccacgccaacatgcccggctaatttttgtattttttatagcgataggattttgccaatg

SEQ ID NO: 122828 - DNA, 201 bp, Homo sapiens; identical to SEQ ID NO: 20737

SEQ ID NO: 122829 - DNA, 201 bp, Homo sapiens
cttacattatggtcagtaggctaggttcattgactccttacatgattttctgcacacactgacattgcaaagtatgtgattcacatatgtgcttcagaaayatgacaaatctactacatgtttgattttcaaagttgcttgaactattgtgcttattaatgttatcagtgttaaagctgcatatgtcagtggtctatgata

SEQ ID NO: 122830 - DNA, 201 bp, Homo sapiens
ccactgtactctagcctgagtgacagcaagaccctgtctaaaagaaaaaaagaaattgaaagcagtaaggcagaaaccttaaaaatggaaatgtatgctarcaacttactttgatctgaggagtacagaaaattgaaaaaaaagtatctaaaaaaatttagctgttggtataaggaattctgggaataataattgaatatt

SEQ ID NO: 122831 - DNA, 201 bp, Homo sapiens
ttagttgggcatggtggcacgcgcctgtagtcccagctacttgggaggctgaggcgggagaattgcttgaacctggtaggtggaggttgcagtgagctgaratcgtgccactgcactccagctggggcaacagagcaagactccatctcaaaaaagaaaaaaaagaagatgtaaatccaaatattttatgtgaaattattt

SEQ ID NO: 122832 - DNA, 201 bp, Homo sapiens
tatgtttctaaatgcaataatatcatagataatccagtatgaaagtgtccaattaccgatttttctagtttatcaacatagtctgtttttaaaaggcttastttttagacctcagtggattgaattattctatttttaaatgacagattagagctcttaattttattattctcaaaactccattacagagagagcagtttt

SEQ ID NO: 122833 - DNA, 201 bp, Homo sapiens
ccagctatcagtagagtggtcatttgcatccaaaatgtgtggcctggggtggaggcagcctgaaggagttgggggcttcatcaagagccactcccattacrgttcagcacaactctcccacccttcaatgcttccctgtaccccaccccaccctgctcaacatgttcacacaattctctatgttccaaggatctttcccag

SEQ ID NO: 122834 - DNA, 201 bp, Homo sapiens
ttttgctaacttcctgcattgcatttaggaatgaaaaatatgttatgtttctaaatgcaataatatcatagataatccagtatgaaagtgtccaattaccratttttctagtttatcaacatagtctgtttttaaaaggcttagtttttagacctcagtggattgaattattctatttttaaatgacagattagagctctt

SEQ ID NO: 122835 - DNA, 201 bp, Homo sapiens
ccaaaaaagtagtaagaaaactgccttagctcagaagttgggtagagaaggacagtggggtatttctcatgagaaatcgaaattctaagcctagtcaagcrtgagctcaggcttggaaattataccatgggaatgccataaatcccatgacaggatgttaatgttaaaaactggcctaaagatgagtaagatgccttaacc

SEQ ID NO: 122836 - DNA, 201 bp, Homo sapiens
aaggaatgtttagaagataatgctagaagtctctggaatttataaaagacaccaggcctcctaagctatctgaagctcctaagcttctatctaagctcctmcgctaccctgagcagggtaaataaacaaaaccaatatctagatacatcataccaaaatttctgaatatgaaaaccaaagataacacctcctaaacaatta

SEQ ID NO: 122837 - DNA, 201 bp, Homo sapiens
gacagatccagctatcagtagagtggtcatttgcatccaaaatgtgtggcctggggtggaggcagcctgaaggagttgggggcttcatcaagagccactcscattacggttcagcacaactctcccacccttcaatgcttccctgtaccccaccccaccctgctcaacatgttcacacaattctctatgttccaaggatct

SEQ ID NO: 122838 - DNA, 201 bp, Homo sapiens; identical to SEQ ID NO: 20742

SEQ ID NO: 122839 - DNA, 201 bp, Homo sapiens
acagaatgaaataatcaataggatttatcttggtagagccataggaaataaagaagtgatatcagagatgaaaaatactaaagacttttaaatttttaaaygtaaacaaaataagcaaagggtctttcacctctcaaattggcaatggtgtttttaaattctaagacctaatacttaagaggcagagaaacactctcatat

SEQ ID NO: 122840 - DNA, 201 bp, Homo sapiens
gactataggcgtgagccaccacgcccagccagttgaagtttttaaaaatgttttcgagacggggtctcgctctgttacccagactggagtgcagaggcgtratcacagctccctgcagccttgagttcctgagctcaggtgatcctcccaactcagcctcccaggtagctgggactacaggcttgcaacaccatgcctagt

SEQ ID NO: 122841 - DNA, 201 bp, Homo sapiens; identical to SEQ ID NO: 20743

SEQ ID NO: 122842 - DNA, 201 bp, Homo sapiens; identical to SEQ ID NO: 20756

SEQ ID NO: 122843 - DNA, 201 bp, Homo sapiens; identical to SEQ ID NO: 20745

SEQ ID NO: 122844 - DNA, 201 bp, Homo sapiens; identical to SEQ ID NO: 20746

SEQ ID NO: 122845 - DNA, 201 bp, Homo sapiens; identical to SEQ ID NO: 20759

SEQ ID NO: 122846 - DNA, 201 bp, Homo sapiens; identical to SEQ ID NO: 20748

SEQ ID NO: 122847 - DNA, 201 bp, Homo sapiens; identical to SEQ ID NO: 20761

SEQ ID NO: 122848 - DNA, 201 bp, Homo sapiens
tctcgaagagtgacatcagtcttccttggaatatgaagagaatttctttggttcttcttttgcatttctatttgatttattttattttattttattttatkttttttggtacagaaagctcattactagtcctgtccagcaacgtgcctctcctggccctagagttcttggaaatagcccaggccaaagagaaggcctttc

SEQ ID NO: 122849 - DNA, 201 bp, Homo sapiens; identical to SEQ ID NO: 20750

SEQ ID NO: 122850 - DNA, 201 bp, Homo sapiens
cgtgatctcgaagagtgacatcagtcttccttggaatatgaagagaatttctttggttcttcttttgcatttctatttgatttattttattttattttatkttatgttttttggtacagaaagctcattactagtcctgtccagcaacgtgcctctcctggccctagagttcttggaaatagcccaggccaaagagaaggc

SEQ ID NO: 122851 - DNA, 201 bp, Homo sapiens; identical to SEQ ID NO: 20752

SEQ ID NO: 122852 - DNA, 201 bp, Homo sapiens
ttcttaagatgatttaatagcattcttaacataagtcaaaggaggaggcaaagcgaagttctatgaaggcattctgtagggccaagaaaaagcaacgcaarggtgtggctctctgatgatctagtttgatccagggataaaatctaaactagcagataatcaatttatgcccttcaaattacccattgtgagaaccacttc

SEQ ID NO: 122853 - DNA, 201 bp, Homo sapiens
aaaaaaatctagatgtctagcttttcttgaaaaattgtaagatctggcaatccaggcttgccttacctcaagaaaaccaatctaaccttcgggtctgagcrgcagctgcctccatctgatagggcgcactctctccagtcttctgctgcagaacctggctggcttcttcacttagccagctgagttgcaatccctatctta

SEQ ID NO: 122854 - DNA, 201 bp, Homo sapiens
tctccatctctgggctcagagggagttggggctggggcggactcacccctggatggtggctgtagcagaaggttattaaagctaacagtttgggtggtggycttctaattccctatcttcctgatatcctggaggttgtaatgatcctggcaagcctgttctgtatcattgctcagtgttctgggaatcattccgggatac

SEQ ID NO: 122855 - DNA, 201 bp, Homo sapiens; identical to SEQ ID NO: 20765

SEQ ID NO: 122856 - DNA, 201 bp, Homo sapiens; identical to SEQ ID NO: 20764

SEQ ID NO: 122857 - DNA, 201 bp, Homo sapiens; identical to SEQ ID NO: 20766

SEQ ID NO: 122858 - DNA, 201 bp, Homo sapiens; identical to SEQ ID NO: 20751

SEQ ID NO: 122859 - DNA, 201 bp, Homo sapiens; identical to SEQ ID NO: 20768

SEQ ID NO: 122860 - DNA, 201 bp, Homo sapiens; identical to SEQ ID NO: 20753

SEQ ID NO: 122861 - DNA, 201 bp, Homo sapiens
aactaggaatggaaagtgttaaagctggagcctctggaaaaccagaaatgaggctgggcactcaggaagaaacaagtgaaggtgatgctaatggtaagtargggaggaaagagggttgccttaaagacctatgcagttagggagcgggcagggtgttgaaccaagaagggaaagttgtagcttaagaacatgtatacagaa

SEQ ID NO: 122862 - DNA, 201 bp, Homo sapiens
tgattcttcctgccttggactggatgtgttgtgcagagtgagggtggaaaatgagccagtggtcctgaactaataaaataagtctccctgggggacaggtrtttggcttcccattccacaggatggggtagatgtggcttatggaaccaggattattcacaaagaggttgttctcctgtatgtaaaggctggaagagccgt

SEQ ID NO: 122863 - DNA, 201 bp, Homo sapiens; identical to SEQ ID NO: 20754

SEQ ID NO: 122864 - DNA, 201 bp, Homo sapiens
ggggccttgctctgttgcccaggctagagtacgatgtagtgatcacggctcactgcagccttgaactcactggctcaagcaagcctcccacctcagcttcycaagtagctgggacaggcgtgtgccactgtgcctggctaggttttgtattttttgtagagatggggtcttgctatgttgcctaggctgatctcaaactcc

SEQ ID NO: 122865 - DNA, 201 bp, Homo sapiens
cagacacaggatagtgagtctgactcagacctcctgcttggggttgacccggtgtcccctcccaggccctcaggaaagcagagagcttgaagaaatgtctstctgtcatggaagccaaagtgaaggctcagactgctccaaacaaggatgtgcagagggagatcgctgaccttggagaggtaggggcggcttccctccctc

SEQ ID NO: 122866 - DNA, 201 bp, Homo sapiens
atgaagccttgaagctcttcaagatgcactcccctcagacttctgccatgctcttcacggtggacaatgaggctggcaagatcacgtgcctgtgtcaagtyccccaggtcagcaccacctcgcaccagtgggaagtgttaggtcttaaggttgttggctgaggcctgtgtgtgtacagcctgcattcgaaacagcctttct

SEQ ID NO: 122867 - DNA, 201 bp, Homo sapiens; identical to SEQ ID NO: 75462

SEQ ID NO: 122868 - DNA, 201 bp, Homo sapiens
tctggccatctaccccctcctgtctccatgtggaggagggtaagacatagattcgctgtggcatcggggcccccagcgctgatccatgtactcctaggggygtgcttagtctgaggccgtgcagtagaggatgggtgctctttcatgggaactggtgtgtctgacttgtgctaaagccccaggggtggccacttcctgggg

SEQ ID NO: 122869 - DNA, 201 bp, Homo sapiens
actggtgatccacccgcgtcggcctcccaaatgctgggattataggcatgagcccccgtgctcagtcagtattttaaacatttatttcagatgtatttaarttaccaggagaattactggagagactaaaagaaacgttgcaagcttcgtatttcgcaaagctttacatactcttggtagctggtatttttctaaagacat

SEQ ID NO: 122870 - DNA, 201 bp, Homo sapiens; identical to SEQ ID NO: 20771

SEQ ID NO: 122871 - DNA, 201 bp, Homo sapiens; identical to SEQ ID NO: 20772

SEQ ID NO: 122872 - DNA, 201 bp, Homo sapiens
agggtttcaccatgttggccaggctggtctcgaactcctgacctcaggtgatccacccgccttggcttcccaaagtgctgggattacaggcataagccacygtgcctggcctcttctagggtttttatggtttggggttttacattaagtctttaatccatgttgagttaatttttgtataaggtgtaaggaaggggtcca

SEQ ID NO: 122873 - DNA, 201 bp, Homo sapiens
atccacccgccttggcttcccaaagtgctgggattacaggcataagccactgtgcctggcctcttctagggtttttatggtttggggttttacattaagtmtttaatccatgttgagttaatttttgtataaggtgtaaggaaggggtccagtttcacttttctgcatatggctagccagttttcccagtaccatttatta

SEQ ID NO: 122874 - DNA, 201 bp, Homo sapiens
taattttatgcattcggatgaaggaggatatatatgctgcaacagagatcaaaagtgacagaagcttacctctaagagaagtttatttctctgccaggtgyggtggctcatgcctgtaatcccagcactttgggaggccaaggtgggagaatcacttgaggtcaggagttcaagaccagcctggccaacatggtaaaaccc

SEQ ID NO: 122875 - DNA, 201 bp, Homo sapiens
ttcggatgaaggaggatatatatgctgcaacagagatcaaaagtgacagaagcttacctctaagagaagtttatttctctgccaggtgcggtggctcatgsctgtaatcccagcactttgggaggccaaggtgggagaatcacttgaggtcaggagttcaagaccagcctggccaacatggtaaaaccctgtctctactaa

SEQ ID NO: 122876 - DNA, 201 bp, Homo sapiens
taatcaatagtgctgtgaattatggaaggaatgatcagggtgtaggaaacatttgcaaccacctataggaagagcaactgtcaacagtgggacctctgcarcctgcaggtatctgcagtggctctgaagaaagagctcatggtgtcctctccacattatctatttgccagtttaggcctctgtatgtctcatgccccttcc

SEQ ID NO: 122877 - DNA, 201 bp, Homo sapiens
ctaaggtgctatgagagatacagggtgtattagtctgttctcatgctgctaataaagatatatccgagactgggtaatttataaaggaaagaggtttaatkgactcacagctccacatggctggggaggcctcacaatcatggctgaagacaaatgaagagcaaagtcacatcctacatggcagcagccaacagagtgtgt

SEQ ID NO: 122878 - DNA, 201 bp, Homo sapiens
gttttgtttgagacagcatctcgctctatcacccaggctagagtgcaatggcacgatctcggctcactacaacctctgcctcccaggttcaagtgattctyctgcctcagcctcctgagtagctgggattacaggcacatgtcaccacacctgggtaatttttgtatttttggtagagacggggtttcaccacgttggcca

SEQ ID NO: 122879 - DNA, 201 bp, Homo sapiens
ggcattaaaagccatttatatacacatttctttggtcttcattaaaaacaaaaacaaaacttgaggtaaataaaatttaaaagttggctttctgtctggtmgtgaatactacctttgattttaaaatagataccttcaactgttaacagatatgacaaatagaactaatattactataaaactgatatttgctacatggaa

SEQ ID NO: 122880 - DNA, 201 bp, Homo sapiens
aactctttaactgcaggagcctatatcactagaatgatgtttggaccatgtatattaacttaattaactataattgttacctctccaactcacacttttcyatataaatgcaagattaaagaaggaaggattctgcttctgagctccctagcaggtcaaatttactaaactaacaattgtttaatgcagtgaaaagaaatt

SEQ ID NO: 122881 - DNA, 201 bp, Homo sapiens
ttcccatattttttcttaagacatcattctactaaatgagacccctgagcagaagcagaattaactggctccttttaagtttggtaattacaaatgcaaartgagtatcctcctgcagacagagccagaggactactcaagctgatgcaataacgggagctgtgataaataatctatgcctgttatggaaagctgaatgga

SEQ ID NO: 122882 - DNA, 201 bp, Homo sapiens
acactaaagtcatttatacacagacagcatttggcaaacctgctaagtagtatacaaagacaaagtaccacatctaaagagatgtggtatccagatgccayaatcttaggatagtcaaagttcatttcatctaactgattggattattcagcaatcatttactgagtatcaatgaccctaaatgctggagataactcaata

SEQ ID NO: 122883 - DNA, 201 bp, Homo sapiens
gaaaatagttccctccacacacagcccagagtaactgtcaagccccagcttcggacactgcaaggcaccgatgatatggatatttgactttgcctgaggaytatcctcactcaacttaatgctgaaacaaaaatgaagataaagtctctgccacttagccagcatccattgtttcgttttcaaagcctaggaattacctgc

SEQ ID NO: 122884 - DNA, 201 bp, Homo sapiens
gctaagtagtatacaaagacaaagtaccacatctaaagagatgtggtatccagatgccataatcttaggatagtcaaagttcatttcatctaactgattgrattattcagcaatcatttactgagtatcaatgaccctaaatgctggagataactcaataatgcacaacacatacttcttaatctcacagaatttaatgta

SEQ ID NO: 122885 - DNA, 201 bp, Homo sapiens
tggaataattctgctatataagttcagtcgtttttaatgaattttgctgctattgttcctcttattgtttttactggtaccaagggcttgtggtaaccatstctacaagcctttgagcagcacttgaacacatctttattattattatttttgaatctccttatttctttgtttcatctggggactcatttctttctttgc

SEQ ID NO: 122886 - DNA, 201 bp, Homo sapiens
actcattttaatgcaaggagagtgagggaagtgagtcctactttttccaggttagtggtagagccatctgtggctgagttttctgataacatacaaggcartatagaatagtgattatgaatgtgagctctggaattggatggcctaaattcaagtccccacttctgctacttactagctgcgtgaccttggacaccttca

SEQ ID NO: 122887 - DNA, 201 bp, Homo sapiens
ttccctggccctaacgtgacatttatttcagaacaaataagtatagtttgtagttacctgttcaactatttctctaataaagcaagcggcctattttcatrtgttttttcttcaagctgagttaaaagtctacttgtatatattgtgttaatagccaataaggcagaattgagtgacaataattatacatttaagtatatt

SEQ ID NO: 122888 - DNA, 201 bp, Homo sapiens
tgctatgatattgtatcttagcacatagtctgagactggttacaaaacagaatgagatttcactttctgtctgctagagagcctcattagaaacttctggyttggcatcctcatttctcaaaaattccaagagatttcagctcaagaagagaaatattgactgtgtgtgtatgcatgcgccatcttgctttgaacaaaaaa

SEQ ID NO: 122889 - DNA, 201 bp, Homo sapiens
atagcagtatgtctaaaaaatgtacatactttaattaaaggtaatctattgctaacgatcatctgcaccttcagtgagtcctaatctttttgctggtggarggtcttgccttgaggttgatgatggctgactggtcaggtctgtggtcgctgaaggttgggtggctgtggcaatttcttaaaataagacaacagtaaactt

SEQ ID NO: 122890 - DNA, 201 bp, Homo sapiens
gtgagaagctgactgtccacactgggacctcagaaggaagggcatagactttcaagaggaagtgattgaacttgatccagtgaacaaccaaaaatagatgrgggacaaaataacttatattaggaagattaatagtactatacagggccatagaaaatgaacaaggggagcatacccaaatgttaaggaacaagggaggca

SEQ ID NO: 122891 - DNA, 201 bp, Homo sapiens
gcgagactccgtctcaaaaaaaaaaaaaaaaaaaaaaaaaagaaaggaaaaagaaaagaaatcttctcagctaaatatcctataaatatcctatttcattmcttgcaaattctaccttccacaaggcactagaacatgaacacaatttaggcaagttctttgctgctttacaacaaagctcacttattttccattgtttaa

SEQ ID NO: 122892 - DNA, 201 bp, Homo sapiens
ccagtggtatgctaggggctctccggccttcagccacagactgaaggctgcactgtcagtttccctgcttttgaggttttgggacttggactgagccactrctggcttcctggcttctcagcctgcagatggtctatcgtgggacttgaacttgtgtttgtgtgagtcaattctccttaataaactccctttcctattagt

SEQ ID NO: 122893 - DNA, 201 bp, Homo sapiens
agaccttaaagaatgggtggactggagctaaaaacagacaggtggaccaaggagctggtgaaagtggacgaagcattgtgcagtacagttttaagcaggarggtgtgggcactatgtttaaatagcagaggaggtcgataacttccctagccttcctctgaattggtcccctgtatgaggctggagacccttgcaaaggcc

SEQ ID NO: 122894 - DNA, 201 bp, Homo sapiens
atagttgttgtgaggattaaatgattaaatattaaatgattagtatttagcacagtgtctggcatatgctcacatctcagtgaattggtaactacatacakctgccaaagttagagaatgtgaggtctgaattgcatttgtttattcataccccaaataattattgcttgcttactatctgccaggcaagattttaggtgc

SEQ ID NO: 122895 - DNA, 201 bp, Homo sapiens
aaggatcagagcccaaagcacgcaggtctaactgaggacttcagacatcaacctgtagacaggagattggttctttcagtgaagctctgaatcacattacrtaggtaactgtctttgtcttcacattatctgtcagttgtgtgatcacaggcaagttggagaaaattgtgagcttcacttgacctatgaaatggaaataac

SEQ ID NO: 122896 - DNA, 201 bp, Homo sapiens
tgttcttttgttgctttagaaatatgcctgattttcctgtattattttggggtaacctttgttcatgtatatagaatccaatcagagcagctaagggaagmattggtatcagttgcctatccttgtatgcttaaagaaaagaaagccaaaaactgttaagagcaagtcttttagcaaaatatcaatgaataagcaattttg

SEQ ID NO: 122897 - DNA, 201 bp, Homo sapiens
aaagagtgctataatatgccatcatactttagaaataaggcacatttaagagggttctttattgccttctgagagttggatattgctaaccttagccacastaccacagaagatgctttgctttgcattagcaaaagcagggtggttgatccatttgagcgccacttgattacatacacacttaaaaaatgtcaagacttt

SEQ ID NO: 122898 - DNA, 201 bp, Homo sapiens
tttaagagggttctttattgccttctgagagttggatattgctaaccttagccacactaccacagaagatgctttgctttgcattagcaaaagcagggtgsttgatccatttgagcgccacttgattacatacacacttaaaaaatgtcaagactttaggaacactagagtgattatcattctgtggcattatgttcccat

SEQ ID NO: 122899 - DNA, 201 bp, Homo sapiens
cagtggctctgaagaaagagctcatggtgtcctctccacattatctatttgccagtttaggcctctgtatgtctcatgccccttccaccctggttcaccartctagaagtcatttatagagaaaaccagcgtcaccaagttcacccatgtctctctccacctgctcccctggtgtttctgagcctccttaccctgtgcaac

SEQ ID NO: 122900 - DNA, 201 bp, Homo sapiens
gaatatgagttggatatgaaatccaaataaaactagaggatagattaaatggtgcatgatgtattccaaggtcaagaattaattaaatgtaattttcacartgatattcttagaaaataggaaattgccctatgctttttgaagagaatgaaatttggttgtttaattgttagaaaatagtacactatacatattttaaat

SEQ ID NO: 122901 - DNA, 201 bp, Homo sapiens
caagtgattctcctgcctcagcctcctgagtagctgggattacaggcacatgtcaccacacctgggtaatttttgtatttttggtagagacggggtttcaycacgttggccaggctggtctcgaactcctgaccttgagatccacccaccttggcctcccaaagtgctgggattacttctttattgtttatctctcttgct

SEQ ID NO: 122902 - DNA, 201 bp, Homo sapiens
cctcagcctcctgagtagctgggattacaggcacatgtcaccacacctgggtaatttttgtatttttggtagagacggggtttcaccacgttggccaggcyggtctcgaactcctgaccttgagatccacccaccttggcctcccaaagtgctgggattacttctttattgtttatctctcttgctttactgtaaatttcc

SEQ ID NO: 122903 - DNA, 201 bp, Homo sapiens
gcagtggcgcaatctcggctcacagcaagctctgcctcccgggttcatgccattctcctgcctcagcctccggagtagctgggactacaggtgcccaccasgatgcccagctaattttctgtattttttttttttagtagagatggggtttcaccatgttagccaggatggtctcgctctcctgacctggtgatccgcccg

SEQ ID NO: 122904 - DNA, 201 bp, Homo sapiens
cagtggcgcaatctcggctcacagcaagctctgcctcccgggttcatgccattctcctgcctcagcctccggagtagctgggactacaggtgcccaccacsatgcccagctaattttctgtattttttttttttagtagagatggggtttcaccatgttagccaggatggtctcgctctcctgacctggtgatccgcccgc

SEQ ID NO: 122905 - DNA, 201 bp, Homo sapiens
caccacgatgcccagctaattttctgtattttttttttttagtagagatggggtttcaccatgttagccaggatggtctcgctctcctgacctggtgatcygcccgcctcggcttcccaaagtgctgggattacaggcatgagccactgcacccagccactgcttagtacatttaaaatgacacatctaagcatttgtatg

SEQ ID NO: 122906 - DNA, 201 bp, Homo sapiens
agggtgtgcccttacagatggagcaatggtgagtgcacccttggacaagggaggggaaggggttcttatccctgacacatgtggcccctgctgctgtgttkttcccctgttggctagggttagaccacacaggctaaactaattccagttggctaatttaaagagaatgacggggtgagtaaggtttggcaggaaaaatgg

SEQ ID NO: 122907 - DNA, 201 bp, Homo sapiens
tgttcccctgttggctagggttagaccacacaggctaaactaattccagttggctaatttaaagagaatgacggggtgagtaaggtttggcaggaaaaatrgttatgacagagcaggtaattggaatgagtcagggtggagcaggtaatcgaaaaaggttgctttccgaggaagttaagtttaaaagtagaaggcaaagaa

SEQ ID NO: 122908 - DNA, 201 bp, Homo sapiens
ggtgtggtggcacgtgcctgtaatcccagctactcagcaggctgaggcaggagaatcgcttgaactcgggaggtggaggttgcagtgagccgagattgcgscactgcactccagcctgggtgacagagcgagactccatctcaaaaaaaaaaaaagaaagaaaagaaaaatatccaattgtgcctgctttgccaaatcaaa

SEQ ID NO: 122909 - DNA, 201 bp, Homo sapiens
gtagagttaaacacattagcattaagcctgagagatattgttctacaagataattagcataaatttgttcaacaaatacgtctcaagcacctcctactctwagggtgcctctccgtgctgggtcaatggcagtgcacagaatgcatggcctgccctcccagagcggacattccagctgggggtggggtggtggaggggaga

SEQ ID NO: 122910 - DNA, 201 bp, Homo sapiens
ttatcttgaaagagggattggatttatttttaataagaaaggctgaattgggaacttgcatttttccccaaaatttaataacagcactagtaaagccctaygctcctcagctggccttatttcaggtatatgagaacagagcttccaggtaagcttctttcatgatctaagagtgagaccaatatcaccaaacctgtctaa

SEQ ID NO: 122911 - DNA, 201 bp, Homo sapiens
gaaaggctgaattgggaacttgcatttttccccaaaatttaataacagcactagtaaagccctacgctcctcagctggccttatttcaggtatatgagaamagagcttccaggtaagcttctttcatgatctaagagtgagaccaatatcaccaaacctgtctaaattcattgacagccaggggaggtcacatagcaaaag

SEQ ID NO: 122912 - DNA, 201 bp, Homo sapiens
aattataccttgccttgtttttgggggatagcgtggggtgaagaggtagttttttttagaatcatttaccctgagtaggcattcagtaaatgctttgttgycaatctgactccatttccagccgcaaccccatggagttgagttgaatgacatctaaacctgtaggtaagcatgcatgtatacataacccttgttgtgaat

SEQ ID NO: 122913 - DNA, 201 bp, Homo sapiens
tatgctcaaaatgataacttatgaactgggatttcaaattcaccttgttattctgaagcagagccttcagtttatggttgccctgctgttaagcctcaagytgctcttttttttttttttttttctgagacaggtcttctctgtcacccaggccagagtggagtggcatgatcgcagctcactgcaacctccacctcttgg

SEQ ID NO: 122914 - DNA, 201 bp, Homo sapiens
ctcttgagtagctgggactacagatgcaagccaccatgcccagctaatttttgtatttttagtagagatggggtttcaccatgttaggcaggatggtctcsatctcttgacctcgtgatctgcctgcctcggcctcccaaagtgctgggattacaggagtgagccaccgtgcccggcctgcattttgctttatagagatag

SEQ ID NO: 122915 - DNA, 201 bp, Homo sapiens
tactagttagtatccttccccattgagttagtatttgatcttataacatggtccaggaaaagaaaggtaagttttgctaagtacctgttacatcatgacamttgtgagagttggtatgggatctgctctttgtgcagtgtcacttatcacctgtcttccacctctgcttagctctgtgacaaccaacagagcctctaagag

SEQ ID NO: 122916 - DNA, 201 bp, Homo sapiens
gtcaagatccatttgtattccgtgtgcattgacacttgttttcaggaaagggataaagctgtgtacagtaaaaatgtcatttaatagagctcagttggtcygtgtgcatctggtgttgacctctagctgtagcaaaacagtgatgatgtatctatgtatctttcttttgaaatttatgagtggacacttaatgtgctatca

SEQ ID NO: 122917 - DNA, 201 bp, Homo sapiens
tttttgtatttttagtagagatggggtttcaccatgttaggcaggatggtctccatctcttgacctcgtgatctgcctgcctcggcctcccaaagtgctgsgattacaggagtgagccaccgtgcccggcctgcattttgctttatagagataggtggtatgagaaaagtcttaaaccaaaacgagaaacttgttccagct

SEQ ID NO: 122918 - DNA, 201 bp, Homo sapiens
ggcaggatggtctccatctcttgacctcgtgatctgcctgcctcggcctcccaaagtgctgggattacaggagtgagccaccgtgcccggcctgcattttkctttatagagataggtggtatgagaaaagtcttaaaccaaaacgagaaacttgttccagctaaatgaaataaccaaatgggaacattagtgttaacccat

SEQ ID NO: 122919 - DNA, 201 bp, Homo sapiens
gcattattatttagttgatgattcttttcatttttttaactctgtctctagtctctaaggggatagcttttatttggaattgaattgtttggtgggctttstaaaagcctctcacttcagactttgagattatgtctgaaggtaacaggcttatttaggcccactctccagtaactgaagaccctgctttctgggagggag

SEQ ID NO: 122920 - DNA, 201 bp, Homo sapiens
agctgtggagattaacagtaaaaaaaatagacattgtcttagcccttatgctgcttacactctggtgggggtacaggccagtaaagagataattgcatcaytctgtgatagggactttgattggagagaacagggttgtaaggatctagagaaagggcacctggaaaaagaactgccagaaaaatcttcctgaggaaagtg

SEQ ID NO: 122921 - DNA, 201 bp, Homo sapiens
taccatcccttccaatcctaaacctgtatgatttttcagtctgggacccatactcagaatccatgctttcagaagtgggaaagaatatgatattttctcawattttcacattctatcttgagttagggagtccaaaaagcgactattctgcaggatgtgatctcccagggtagaagatagaaagaggaaggaagtaaagaa

SEQ ID NO: 122922 - DNA, 201 bp, Homo sapiens
agccaggctgattaggatagtgatctaggcagaggagcaaagcccagagtattcaaggcattgaaagcagctctggatgaatgaatgggccaggcagggtrgagtgggaacagatgaagctggggagcaattaggaccccagtcacgcaaggtcacaatcagggggaggggcagtttgggggagccagagaggtctttgaa

SEQ ID NO: 122923 - DNA, 201 bp, Homo sapiens
cctgcctttcactttttcttaatgattttaactggtgagctgttaaaaagctattagtatggctggtgccacttgtctatcctgtactgcaaacagaagtrcacgccgtagtcaattaagtgcttggagaataaaaaattttaaggagcactaataaaaaaattcatcaattatgtgtgctccatttaatacatggttgct

SEQ ID NO: 122924 - DNA, 201 bp, Homo sapiens
tgcagttaactgcatttcactgtctgacagatgaaatgcagaattaaaatctcaaactagtttctcaaagttttcttttccccccagtcatttaaaaatcytttagcctaggggaagatggtagctggaaaagaatgggaaaccagatggcatttaaaggccttagcaagatttacaaagcagatgtgcctgtatttttac

SEQ ID NO: 122925 - DNA, 201 bp, Homo sapiens; identical to SEQ ID NO: 20775

SEQ ID NO: 122926 - DNA, 201 bp, Homo sapiens
tacgataatgtttgatagttgaaatgttaaactgaaaatcaatagataattggctttgattactacctaatactgtctaatctaaataggaggaatatttrtatgtgttactcatattctttgcagaaaacacactgaagcctagctcttgagcggggatatcgttcattggaagaaacagaaacagatggcagttgtggt

SEQ ID NO: 122927 - DNA, 201 bp, Homo sapiens
cttcaagattgaggaataacactcaaaaaatcattttataaattatggatatatatactctatatttacatttgtaacaatatacatatgtacatacatayataaatttgtattttttaaaaaaaatcatcagctagtttttctagtgcaatgtaattatcatttagcataaactctgacacttaataaatgtttgtaaag

SEQ ID NO: 122928 - DNA, 201 bp, Homo sapiens
acactcaaaaaatcattttataaattatggatatatatactctatatttacatttgtaacaatatacatatgtacatacatatataaatttgtattttttwaaaaaaatcatcagctagtttttctagtgcaatgtaattatcatttagcataaactctgacacttaataaatgtttgtaaagtaagtgaataaataactg

SEQ ID NO: 122929 - DNA, 201 bp, Homo sapiens
tcagctgtctataccataccatgcacagatatgatcattgcacaatacttatctttctcattttgtcacttttggcaccagtttgtgtttgagaacctctyaactatgatataagctatgagaatattgaaaaagggaatcattaatatgcaaaaaacaaattaaaatttagggtgcaaataagataacaattcaaaagat

SEQ ID NO: 122930 - DNA, 201 bp, Homo sapiens
aacatagtcagtggcagggtatagggagaagcaaaaaagctgggaagaaagacttagaaaagtcaaaaagagaaagaaaaggatcacaggggtctcagaawtgaaaacaggcctctgtaaaaaggcagaatagagagggaggctaaaaacagaagatgaggggtaggcccccttcttttttagaagagttattggcaacat

SEQ ID NO: 122931 - DNA, 201 bp, Homo sapiens
aaagaaatctgttttggtatactcgctttgatccgaaacagtatttactatttgctaatccatttccaactgacagtactgtagttctacagacacctaaraaaagccctagtaactgaaacagcatttactactgcaacagaaaatagttacattttgtaaaggaaattgatcctttttatagaggagactccaaggaat

SEQ ID NO: 122932 - DNA, 201 bp, Homo sapiens
ttaaaaaaaatcatcagctagtttttctagtgcaatgtaattatcatttagcataaactctgacacttaataaatgtttgtaaagtaagtgaataaataastgataaattttataaaatgtcttttaaagggctctctcttaaaatcattttttgttagctcttaccttctactttaaccttctccattgaaagagctgat

SEQ ID NO: 122933 - DNA, 201 bp, Homo sapiens
tagaacgatgtgggcaatattggggttgtgaggtgaagagttgacaagaactcaactggaagaaattggaaataatttatgaaagtatgttaatcagagasgagacacagtagactcagtagctggctattagccaagtgtatacatttttaacacctttttctttacttgaaagagattgtctgtgtgtgtgtgtgtgtt

SEQ ID NO: 122934 - DNA, 201 bp, Homo sapiens
ctttttgtcaactgcaattgaatatatattagtgaaatgatgtattagggtcctacaatctgtttagatgtcatatacactcttaacagcagcctgaaagwgtaattaaatattacttttaaaaaagagcttggcattgcagtctgtttcatttttctcatctctttcttttttttcatcccactaatacaacactttagt

SEQ ID NO: 122935 - DNA, 201 bp, Homo sapiens
cccaagagccaaaccttcagcatctggatttgcctttgcttctgcccacttgtctgagacccaggaactaaaacttcctgtgatcctctctgctccccacraaaccctctcctgctcctgtgcacattcagtccccctgagcccccttgataacccttccctgctcaccactgtgcagttgaagggacgtgaacagcgaag

SEQ ID NO: 122936 - DNA, 201 bp, Homo sapiens
ttgaagggacgtgaacagcgaagagctaaaagcaaaataatcttgacctttctgcatcttagtttcctcatctgcaaaatgggcctcaccatgcccagcckgcaggattgttgtgagtactaagatagtagttattaataaggtgactatagctgacaccactgagtccttgatctcatcagaggaaaagagaggagaaaa

SEQ ID NO: 122937 - DNA, 201 bp, Homo sapiens
tttccacctatacctattgttatttaatggggattactggacattattcaattagctatcctggagcagggctgacctgggtttaggacctggcactcccrcaccagcatggaacatacaaaaggagatatcccagctgttggtactgtgaggaagtctaaaccaggagacagagcccaggatccaaacggcagctctgcc

SEQ ID NO: 122938 - DNA, 201 bp, Homo sapiens
ggtaaagtctcaaccattgggtggggatcagtggcaagacttcaactccttgtagagtcaagaggggtgtgagggctgagagaaagactaggactagcccwaagcaaaataaagagcatgaaaattattaggcagatccccaggcagattcagttaacaaaactgggagccaatcattcaagataaggaagatttggaatc

SEQ ID NO: 122939 - DNA, 201 bp, Homo sapiens
gtacattatcctgtgctggcatcctttacggccataaaaacttaagtcatttttgcagtcaaatttgtagtttcttattgttttccctgtttattttggtrcatggtatgctattttaatgtctctagttttatatttggttaaaacataaacattatatatttctattttatcactttcataataatggcatcaatattt

SEQ ID NO: 122940 - DNA, 201 bp, Homo sapiens
gtattgaaagtattcttaaattaaaaccatttatgtgacaatattgagcagaagactagttttcagtaagaatatttaatggtcatcaagaaaaacatagkcatttcctactccctatagaatacaaattcttgtatttaaaattaacactagccaaaagtaccagagcatcctcctaacatgaatagcctcacttatctt

SEQ ID NO: 122941 - DNA, 201 bp, Homo sapiens
cacagttaatctgtcttttgtgagttcagcaagccttcagagggaaaaggggaggtttcccttggcccctacatcttttaagttaacgtgaaatgtacatsttttaagttaacgtgaaatgtacaaatgtacaaagtattaattgtcaatttcccactttagccactttcgcagttaactaaccaccagttctgattacaa

SEQ ID NO: 122942 - DNA, 201 bp, Homo sapiens
agctgactgaacaaacaaaacagcaagtctactactagaaggtacatggggatattttggccttacaaactttccttcaatgccttgttacttttatcctrgagtagagaaatatttgaagggttttatgtagaagagactataagtcatgctattggaagtttcaaggagatgaattttggcaaaatttgaaaaaactta

SEQ ID NO: 122943 - DNA, 201 bp, Homo sapiens
gaggtcaggagttcaagaccagcctggccaacatggtaaaaccctgtctctactaaaaatacaaaaattagcgaagtgtggtggtgcctgcttgtagtccyagctactcgggaggctgaggcaggaggatcacttgagcctaggaggcagaggttgcagtgagctgagattgtgccactgtactccagcctgggtgacaga

SEQ ID NO: 122944 - DNA, 201 bp, Homo sapiens
cagaaatcccctccacaaaggtatagaacaagaaagtacttttattattgaatatgcattaaaccaaaatgtgatgctcgttacaggcaattcactgtgayatccactaagatttttcaaagacaaaaaggaatctcaccaccttgtataaccgagcatttacaaacccattatatacatgttttcaaaataaacaataac

SEQ ID NO: 122945 - DNA, 201 bp, Homo sapiens
gccagtcttctcaactggagtttcacaatagagttaagcctgcttgccttaaaacatctcttgtatctaataaattaagttatatcttatatgtacaaaayagtactggttatggagcatccttgagagaattgatgaatcattttttgtgcgttctctgaggtgctgatgaggaagtgcaaatgagaaatgttgcttgca

SEQ ID NO: 122946 - DNA, 201 bp, Homo sapiens
ggatttttattagacatccaagtagaaatgtcaagtcagcaattgcacgtatgagtccaaagttcagaagaattgttatcagcttatagactgctctgttygtagaggagctgatgatcagccagtcttctcaactggagtttcacaatagagttaagcctgcttgccttaaaacatctcttgtatctaataaattaagtt

SEQ ID NO: 122947 - DNA, 201 bp, Homo sapiens
ggagtgagggaatgggggaaggtgccatacacttttaaatgaccaaatcacatgagacctcatcaaatattgcaaagacgcaccaagccatgagggatccmcccccatgatgcaaacatatcccaccagtccccacttccactgttgggaatttcagttcaacatgagatttgggcaggagtgaatatacaaaccgtatca

SEQ ID NO: 122948 - DNA, 201 bp, Homo sapiens
ttagatagagcagaaagctgacaaagtggcaagatgctgagaacactggcagtcccaagcccatgtctgtaggacaggagccaatgggcaggaagggcacrctcaccttctcagcctcgccttccaaacagcccctactgccttgtcacattccaactgagtttcatgcatttggtattgtacatattgttaaaatgaaaa

SEQ ID NO: 122949 - DNA, 201 bp, Homo sapiens
tacaatagatagtttcaaaattcagtttcctgaaagaagtattttaagaaatttttttaaatttcaaattgtcccccttctccaactttttaatcatgatrtaacaccatgttccctaagaagtttaaggacacttttttctctatatggcatattcttttacaagacatcttttaagatctaatattctatgtattttta

SEQ ID NO: 122950 - DNA, 201 bp, Homo sapiens
catccctgcgtatatccccaggccttggaaaagtgcctgacatgtagacaggcaatcaacattagttacataaataatgaccgaagttctaaatatttacrtggctgcactatgttcctctgcctcacttttttttggtgcaattttgccacctttaaaaaaggttattatttacacaaagtaattgtatttacataaaat

SEQ ID NO: 122951 - DNA, 201 bp, Homo sapiens
ttattatttacacaaagtaattgtatttacataaaataatcagaacatggaacaaaaacgcagcatacaaaattgaaagttaaaaattcttaaaatgtcarttatttaagtagattcagatgtgatcacagaaacttttcagtggttaaccagaggtgtatatcagaattatctggaggagttctttaaaactatagaggc

SEQ ID NO: 122952 - DNA, 201 bp, Homo sapiens
tcatttctacttataaccacatgatttacaaagtaaagtccacaatcagtatagaatgcttccaactatgcacaattatttctttagtttatttaattgtrcattgaattttgtgaatttacagagttttctcagaatttcttcatacaacctggtgaatcactttctgtgtcagctctgccgatgtgtagaacagaaggt

SEQ ID NO: 122953 - DNA, 201 bp, Homo sapiens
tacacctgggaatagaggtgtgtgtgtgtatatgtcataaacagatgtttggtcatcatgagaattaggcatacaacctgtgattatctaatgcatttatwaaaaaaaaaacttgtactaagtagcagatatttccattaatctctcatttctacttataaccacatgatttacaaagtaaagtccacaatcagtatagaa

SEQ ID NO: 122954 - DNA, 201 bp, Homo sapiens
ctaaaatggccaaatctacaacattttgaaatcttggcataggtcatgataccatgtactctggtgttcttcaggatttcctaccacaccaatagcagctyaatacaaggttagagaacaaggctgttgttactaacaagagcatgtaacaggcgttatttttttctttgtgataaggaagctttataataactaggtcag

SEQ ID NO: 122955 - DNA, 201 bp, Homo sapiens
taggccaattcactgctcgagggcactgagtctctaggtagctacacctgggaatagaggtgtgtgtgtgtatatgtcataaacagatgtttggtcatcakgagaattaggcatacaacctgtgattatctaatgcatttattaaaaaaaaaacttgtactaagtagcagatatttccattaatctctcatttctacttat

SEQ ID NO: 122956 - DNA, 201 bp, Homo sapiens
gctcatgttttattggtcagaatagtcctattctactcctgtcttctaaaggggatggagaaatactctcctaccacctgtcagaaagaagaactgtaaayatcttgtgaagagattaatgactgagacatatacctttctatcaattcattttggtcatgaggcctgtcccacctgtgggagctcatatttacttccatg

SEQ ID NO: 122957 - DNA, 201 bp, Homo sapiens
gattagctcgtggcatctttaggtagccattattctgcccagctcaccatggttgaggttttgccaaatgaagagaatggaaaagagtgacagtgtttatragggataattatacagcggaaccatggactccaagccaaggagaaagtgaggttatgagaaggacggcaaggaggaaacacactagtcatgtaaaggagt

SEQ ID NO: 122958 - DNA, 201 bp, Homo sapiens
gactgtatctaccttctcatatatctatatttacatgcacacacgcacacacatctgtttatatctgtatacctatatctgccttcccatgtgaatttccmtatgaattttagaactcctatcaatttctacccaaaaaagcctactggaatattgagtagaattacactgaatctataaattaatataaggagaaatgac

SEQ ID NO: 122959 - DNA, 201 bp, Homo sapiens
gaagaaaatgtcgtgtgattaatgctacagtttaggctgttgtgattagtcacaggaaaaacagttaaacttcctcccccaagaaacatggtatgttaacrgcaaatggcctgcctcaagcccaataggaagaaatagttgggcagtgttaaaagctgcctattgatttgtgccccgactgaaagccatgtgctgatgtaa

SEQ ID NO: 122960 - DNA, 201 bp, Homo sapiens
agtaactgggaagacaaatgaggtcttacaaatgatctaagtagatggaacttttcaattagggctgctgccttaaaatccttaaaattaacttgtacttyttaaaacaggtgtagcttgctggccctgtaatttgactaacaagctaaggcttatggctgaccctctagtgtattcctaaggtggctattttctgcagca

SEQ ID NO: 122961 - DNA, 201 bp, Homo sapiens
tgactaacaagctaaggcttatggctgaccctctagtgtattcctaaggtggctattttctgcagcatggaagagcagccctttctgcaacatggaagacyagcgctgactcagagatctttgcctatctatcaggagttctagaccagctcttgactgctccacctcacatcatttcttgtattgttatttaacttcggg

SEQ ID NO: 122962 - DNA, 201 bp, Homo sapiens
gactagcgctgactcagagatctttgcctatctatcaggagttctagaccagctcttgactgctccacctcacatcatttcttgtattgttatttaacttygggtatatatttattatctccaacaggacattaaactcaataaaaacatgcattatagttcattgtgttggcaccagtgcataaattcataactgctcaa

SEQ ID NO: 122963 - DNA, 201 bp, Homo sapiens
tggggtttcactatgttggtcaggctggtttcgaactcctgacctcaggtgatctgcccctccacccccttagcctcccaaagtgctgggaacacaggcgygagccaccgtgccctgcccaaacctcatatctttacaacaggaggtagctttgcaaattggagcaaggtgcccattgaagttaagctacttgccacaaaa

SEQ ID NO: 122964 - DNA, 201 bp, Homo sapiens
ccattcttaacacaaatcatattttctcttccaaataatttcctcttggcctctatacaaagcaggcttgttttcgttttttttgtctgctcagattttasttccagcttgggttgtccatgcatctgtcatcatgtctgccctaagtcatgatgaatagatactgcacaatggggagcccaggtaaagagtaagaggaaa

SEQ ID NO: 122965 - DNA, 201 bp, Homo sapiens
tttgtaaaaccaatttgatcgctgcttgtatttttagagaggattttgttatttttctctaagagtatcctttttttctctgttaagtatttttagactctgctgaaaagcaactttatatcttccatgtgacttactagaaaggttctcaaatcatagcctataaatcattaatgtcccctgattttctataactatttt

SEQ ID NO: 122966 - DNA, 201 bp, Homo sapiens
gctttgctattcttactcctttagtgccttcgttctttttgaatcaggtgaattgtctcatagggacagtacatgttatgctttgattacaaacaaccctscaatctaagtggtttataatatatgtttttctctttctcatgctacatatccatcatggcttgggtactcctgtgttcctcttggtcttagtccaggacc

SEQ ID NO: 122967 - DNA, 201 bp, Homo sapiens
ctttttctgatccaaggataatattaacatacctctctaggtccttgtgaagcataatatatagaattgattgcaaaggcattttcagaatatgagacactatagagacatttgttgcactctgaattccctacgttgcccacagtgccactcctagaggtagatgtctggatagggagtgaatatttgagggaaggggta

SEQ ID NO: 122968 - DNA, 201 bp, Homo sapiens
tttttctgatccaaggataatattaacatacctctctaggtccttgtgaagcataatatatagaattgattgcaaaggcattttcagaatatgagacactatagagacatttgttgcactctgaattccctacgttgcccacagtgccactcctagaggtagatgtctggatagggagtgaatatttgagggaaggggtag

SEQ ID NO: 122969 - DNA, 201 bp, Homo sapiens
gtggatctgaaggtagagcccctaggggatttcaccctgaggaagagtcctcaatggtcagcaattttgctcttggtatgaaaaaataatacataaatgcwtatatatatatatacacacacacatatagatacaaacaccttccgcttaaacctttaatcagtgcaagggttgcttctgttaggagagtagtggaagact

SEQ ID NO: 122970 - DNA, 201 bp, Homo sapiens
acccataaacaagttatactgctccatttatacatgcatctttaatttctctcgataatgctttttaattatcagtgtacaggttttgcatattctttgtmaaatttatttcctaaatacttcacacatttatgttactgcaatgacattgaaattcatattgatcactgctagtatatagaaatacagctgagtttatat

SEQ ID NO: 122971 - DNA, 201 bp, Homo sapiens
actaacttattctagtagcatttttataaattccatcagtctttctatgtaatcatgtcatctgcaaacaaagacagttttaccactccctatccaatctstcttttctttttcttgcccatcgcactggctggaactttcaaaacaatgttgagtagaagtggtaagaacagacgttgtcttcttcctgattttaggagg

SEQ ID NO: 122972 - DNA, 201 bp, Homo sapiens
tactcgggaggccgaagcaggaggatggcgtgaacctgggaggtggagcttgcagtgagccgccactgcactccagcctgggagacagacactccgtctcaaaaaaaaaaaaaaaaagaagaagaaaaagaaagaaagaaaattagaacaataaagaatacagttaggcttgaggccaggagtttcagacaggcaacagag

SEQ ID NO: 122973 - DNA, 201 bp, Homo sapiens
gctgcttaatatgcccattcatcaagtatttcctagttgtctttcacgctcaagcatataaatatataatttcaaatatataatcattttcaaatatatawtttaatattatatattaaaatatatatttgatagtgataaatatatacatatcatacatatatatgtacttgaggaaaaataatttgagagtggccataa

SEQ ID NO: 122974 - DNA, 201 bp, Homo sapiens
ctgcccaaacctcatatctttacaacaggaggtagctttgcaaattggagcaaggtgcccattgaagttaagctacttgccacaaaactggaagatagagrtgctatcttttttggtgtttgcatttcaaaaagatgactctcatgtccttaagaaaaacatttttgagacataaagctgacaaaaggcctatctagctct

SEQ ID NO: 122975 - DNA, 201 bp, Homo sapiens
gctgagatgggaaaccagaaaataatgagaatatatactatactttgattttttttaaaaaaggaaagaataaggaagtagagctcaggaaaattaccttccttttctcattccctaaatcttctatccccaaaataattttgattacttcaattcaaagtgctcatattttccagagcacaaaatagactccaaatatag

SEQ ID NO: 122976 - DNA, 201 bp, Homo sapiens
tatgtcatgtataaaaatcacaacggtgacattgcatcacctttgctatgtgggctagacacaagtcacaggttctgcccatactcacggggaggagattmtacaaaagcatgaatatcagggaccagggatcatgacagccaccctgtctatcataggagtacttttataatgtttacaaaatgtgaaattactgagtgt

SEQ ID NO: 122977 - DNA, 201 bp, Homo sapiens
ccccgcacatccacacaaaacattggggtgtccccagtttttagaagaagcattatcagtgtctcaatgattaagttttcagttggctagggtttttaatygctactatttctagttttaattcatcattatctacttaggttattatgaattatttggttaaccgtgaagtatttagtgatccctacttttgtgagtgat

SEQ ID NO: 122978 - DNA, 201 bp, Homo sapiens
ttgaggcaggggaatcgcttgaacccgggaggcagaggttgcagtgagccgagatcacaccactgaactccagcctggcagcagagggagactccgtctcaaaaaaaaaaaaaaaaagaaaagaaaagaaaaaagaaattttctaagagtttgaaaatatgcttaagtttgctgctgccactggagccactccaattgctg

SEQ ID NO: 122979 - DNA, 201 bp, Homo sapiens
tgtgtttttaaaaattaggccctcataaactaaaattgatgattatcagaatttattgagaatgtgcctaagaatgggccaccaacactcagaagcccccrcacatccacacaaaacattggggtgtccccagtttttagaagaagcattatcagtgtctcaatgattaagttttcagttggctagggtttttaattgcta

SEQ ID NO: 122980 - DNA, 201 bp, Homo sapiens
tattagccgtttgtcaggtggatacattgcaaaaattttctcccattctgtaggttgcctgttcactctgatgatagtttcttttgctgtgcagaagctcyttagtttaattagatcccatttgtctattttggctttggtggccattgcttttggtgttttagtcatgaagtctttgcccatgcctatgtcctgaatggt

SEQ ID NO: 122981 - DNA, 201 bp, Homo sapiens
attgtcctcaaacatgtgacatcctgatagtcaccactgataacttcagtaagtatcacttcgatttcacccccttcttctactcacaactaaaacaaaayaaaaacatatgtaattaaaatatgtcattgctatgctcaaaatgataacttatgaactgggatttcaaattcaccttgttattctgaagcagagccttca

SEQ ID NO: 122982 - DNA, 201 bp, Homo sapiens
caaaatgataacttatgaactgggatttcaaattcaccttgttattctgaagcagagccttcagtttatggttgccctgctgttaagcctcaagttgctcttttttttttttttttttctgagacaggtcttctctgtcacccaggccagagtggagtggcatgatcgcagctcactgcaacctccacctcttgggttcaa

SEQ ID NO: 122983 - DNA, 201 bp, Homo sapiens
caaactattctcctgcctcagcctcccaagtagctgtgattgcaggcatgtgccacacacccagctaattttgtattgttagtagagacagggtttcactrtgttggccaggctggtttcgaactcctgaccttaggagatccacctgccttggcctcccaaagtgctgggattacaggtgtgaaccactgtgcctggctg

SEQ ID NO: 122984 - DNA, 201 bp, Homo sapiens
aatttggcagagagaggctagggaatgggtgcagttgatggttggggatgaaatcagaagagtgtttaaactgtctttgtgtgctgagtcagtttcagggkagggggagtagtcacaggaccagttgacttcattccttggtatgacttagttccttgctgtgcatttgggctgtcatcagaatgcaaaagtctgaaaaat

SEQ ID NO: 122985 - DNA, 201 bp, Homo sapiens
cttccttagccatttgatagagcaattatgagcatcctgactgatacactttctgcttaatctactaacaaatggtgtccattttcctcttaatctctacyccatctcccattcgacttgacacgtgcacaacactgctttttgtgccctgttcctgtgcccctcttcatttgtttctttctcattacagtgctcttacgt

SEQ ID NO: 122986 - DNA, 201 bp, Homo sapiens
cttcattgataaagtagagacacattttgagaggacacactccaattttgaaataaattctactgtggttaaaatgctgtcaaacaatattgcatcccacygaaaactctttcataaaaagaagagtcaatcaatgtggcaaatcactgttgtcttaatttaagaaattgccacagctaccccaattttgatcaaccacca

SEQ ID NO: 122987 - DNA, 201 bp, Homo sapiens
agttctagacatgtttagaagatagacccagcaagatttctttactataggtaaaaaagagaggtcaaggatgactccaaggtttttgtacctgacaactrgaagaattgagttgccgtcaagtgaaatagaggagatagtttgaggagcaggtttatggagaaagatcaaatttagtactggacatatcaagctgggatt

SEQ ID NO: 122988 - DNA, 201 bp, Homo sapiens
tttctttttactttatacccctagggtagaagctatgactctgggaccaattttccccaaattgtatagttctgaggtctctagctgaataatctgtggcyctccctctgagtcttctaaattttccaaaatggagtgccaccctttttcctgggtcttgcctttttaattgacactttagaattacaggacagttggctc

SEQ ID NO: 122989 - DNA, 201 bp, Homo sapiens
ttccaagtactatactagtgaaagaagtagagaagtaaatgtctgtacatgagtcatgcatttgtcttttgattgtagagaagaaaaagaaaatacatatmtacacatataaacctaaaaataagaatgaattatttgccagcccacaaaatttttcactactccatttttgtcctttaggggtagagttagttaaaaatc

SEQ ID NO: 122990 - DNA, 201 bp, Homo sapiens
cttcaatatttgaaggctgacttggagaatatggaatttagacataggataaaagagggaggaaagtgtggaatggtatgtaaatcttgtctcaatttacrtagaaattttataactatgaccaagatgtctggcaagtagcagttgtccctgaattgggcaaaggccaatcactgctcattgcaaatgctgagcgagcta

SEQ ID NO: 122991 - DNA, 201 bp, Homo sapiens
ttcaagaattctctaactataatagttccatttggaggataatgttatatgtttggttccattagtgttaatatgtcttaattctctggtgtaacatacgkttagtttcaccattattacaaccagctgcggttggcctacgattttgttcattctgtctgaatccaaagtaattagctctttagtttaatgacaatattt

SEQ ID NO: 122992 - DNA, 201 bp, Homo sapiens
tcactttgggaggcggaggcaggcaaatcacgaggtcaggagattgaggccatcctggccaacatggtgaaaccctgtctctactaaaatacaaaaaattwgccaggggtggtggtgcgcacctgtagtcccagctacttaggaggttgaggcaggggaatcgcttgaacccgggaggcagaggttgcagtgagccgagat

SEQ ID NO: 122993 - DNA, 201 bp, Homo sapiens
tgtttccaggtttggtgaccactcagtgtttgcaaatatattgtaaaggtatatacatttaacaaattaactgatcttctgattttaacttcagttaccargttgaaggtttttctttacttgctttttttgttttaaataaaagaaagcaaatgattttaggaagagaattgtcacagccaaaaacttccaggttaagca

SEQ ID NO: 122994 - DNA, 201 bp, Homo sapiens
gctcttacatacattagatacctcacttcattctcaaaataatcttttgaggtcagcattattatccccatgtaacaaatgaataaacagtcccaagaatrcttaagtaatttcttcaaaattacactgcacatagctggaggatcctgtttcttaatctcaaatctgcatatgtgtatagatagtgcttttcataccacc

SEQ ID NO: 122995 - DNA, 201 bp, Homo sapiens
tactagttatgttctttggacttcaggattagacataactgggaagaattgggtaaataatttctaggtttctctcaggcctaaaattctgtaattcagcmcttctttacaatggagagcattggcatagatttcaacaaaaggcagataatgagaatctgctatttggttttctactatatttctctatttgcatttgca

SEQ ID NO: 122996 - DNA, 201 bp, Homo sapiens
accaggtcattagcacaaacttttttttttcctttttctgtggatgtttgaaagtgctcttgtaaaccgcaaagatgactggtatcccagagcacaggtayctgcttcaaaatctgtcaaagttttaagtggatggacaaaggtggtaaaaattgaggtttgggtgttcactgagcctgaactgaggaaaatgatacacaa

SEQ ID NO: 122997 - DNA, 201 bp, Homo sapiens
ctcatctctctctttctttctttttttcttattacttattttttctggaaaaaggaacaggtagagaaagaatgaattgtgtcttgaagtgaatcatgttyattatcattggtgtatttatcagactatgtttttaagttgcagtttcttaaagaaaacttacaatgtagtttcagggaacctgagcaagacagtctcaat

SEQ ID NO: 122998 - DNA, 201 bp, Homo sapiens
agattagggtgatgtaatagaacataaaagtataatgtcctgacaatgtaaaactaaaacaactaacaaaaattaggaaagacacaacagaaagaagtcggtgtgtgtgtgtgtgtgtgtgtgtgtgtatatatatatgtatatatatatgtataaaataagttatttgattactttattctcaatatcaaggaatcaatg

SEQ ID NO: 122999 - DNA, 201 bp, Homo sapiens
ttttgttcattctgtctgaatccaaagtaattagctctttagtttaatgacaatatttgttaatgggtttttagggccaaattctgctgttcgagagtggstggtatatttgaagataaaacctggcccttatgttgtaagcataagctgtgtaattttacttcaagatgatggtttacagagtttggggtaggaaaacta

SEQ ID NO: 123000 - DNA, 201 bp, Homo sapiens
gattagggtgatgtaatagaacataaaagtataatgtcctgacaatgtaaaactaaaacaactaacaaaaattaggaaagacacaacagaaagaagtcggtgtgtgtgtgtgtgtgtgtgtgtgtgtatatatatatgtatatatatatgtataaaataagttatttgattactttattctcaatatcaaggaatcaatga

SEQ ID NO: 123001 - DNA, 201 bp, Homo sapiens
attatcaaacaggctttagatacattcttttatgtgacaggacacacactgagtttttaaagtgcagtgcaacagttttgatcattgtatttttgaaggayttagtgaagtggaaagaatccttgcctgggagtcactagggttcaaagtctgactcagcttcctagtagcggcatgaccctaagaaaatattttcacctt

SEQ ID NO: 123002 - DNA, 201 bp, Homo sapiens
attagggtgatgtaatagaacataaaagtataatgtcctgacaatgtaaaactaaaacaactaacaaaaattaggaaagacacaacagaaagaagtcggtgtgtgtgtgtgtgtgtgtgtgtgtgtatatatatatgtatatatatatgtataaaataagttatttgattactttattctcaatatcaaggaatcaatgaa

SEQ ID NO: 123003 - DNA, 201 bp, Homo sapiens
atgaggatttgcatttacacatttttctctatggtttagattgcatactaaattgctgtgggaaagtagaactgtttttaaaacattctgcttaaccactytacgggtaacaaagaaatgccaaatccagtttcaatctaatttgggaagtaaagtacagaggcacaagaagtcacattacacaagagttaataataaata

SEQ ID NO: 123004 - DNA, 201 bp, Homo sapiens
ttagggtgatgtaatagaacataaaagtataatgtcctgacaatgtaaaactaaaacaactaacaaaaattaggaaagacacaacagaaagaagtcggtgtgtgtgtgtgtgtgtgtgtgtgtgtatatatatatgtatatatatatgtataaaataagttatttgattactttattctcaatatcaaggaatcaatgaat

SEQ ID NO: 123005 - DNA, 201 bp, Homo sapiens
gagggaccaatggtaaaagcagggagactagtaaacgactattggaataacaagtaggagattatgatttcccactcctgagtgatagcagaggagatgargagtggccagttctagacatgtttagaagatagacccagcaagatttctttactataggtaaaaaagagaggtcaaggatgactccaaggtttttgtacc

SEQ ID NO: 123006 - DNA, 201 bp, Homo sapiens
tgtcttaaaatcagaatatgtgaattagatttggagagtggagtctttattaaatgagtgttgcgcaaattttctttgtttaataatcagcttctctacatttgatattcatacttgagatacttacaagctctccccaagcaatactgtgggatttccaaaagggtcaaacaatgaagaatattaaatttaaatttattt

SEQ ID NO: 123007 - DNA, 201 bp, Homo sapiens
gtttaatttgttcaaatattcattgactatttctatgtaacaggaactctctgggcacttgagatacaaagattcctgccttcatggtacttatattttaraggggaggggagaagataatcagaaaatagcaataaatacaacaggaaaattaatgagtatattagaaaacagtacaatgggaggaaggcagcaggataa

SEQ ID NO: 123008 - DNA, 201 bp, Homo sapiens
atgatgtgtttttaaaaattaggccctcataaactaaaattgatgattatcagaatttattgagaatgtgcctaagaatgggccaccaacactcagaagcycccgcacatccacacaaaacattggggtgtccccagtttttagaagaagcattatcagtgtctcaatgattaagttttcagttggctagggtttttaatt

SEQ ID NO: 123009 - DNA, 201 bp, Homo sapiens
gctaattgcaccttaaacctattccctatttttctgcattaactctgattgttcctttgggttgatcttggaaattctgatgactatgtgcctggggaatkatcgaattgtataatatcttgcaggggttctctgtttcttgtatttccatgttgacctctctagcaaaattgggaacattttcattgattatattctcaa

SEQ ID NO: 123010 - DNA, 201 bp, Homo sapiens
gagcgagctatatctaaatgcagttggtctgagggaacagagcgccttgtccttggtaccttctaaacctagatgtgaatgacacagaagtgtcccagacsttaactgggtatagtacatgctcttatggactataatgctgttatggtccatttgtctcttggaattgtaacaaaatatcagtttcgcgttcatagtaag

SEQ ID NO: 123011 - DNA, 201 bp, Homo sapiens
ttataaagttaaatgcttgtcttagtaaatggagtctttatattaatagaatatggcataattttaggaaatatattcatgagtctcataaaaaattcctraagttactaaaaagaaaaatcatttatatagccatcatataaaatgtttgtataatttcatctttaattttattattttgaaatggcttttagaatgagt

SEQ ID NO: 123012 - DNA, 201 bp, Homo sapiens
agtaactgtcaagccccagcttcggacactgcaaggcaccgatgatatggatatttgactttgcctgaggattatcctcactcaacttaatgctgaaacaraaatgaagataaagtctctgccacttagccagcatccattgtttcgttttcaaagcctaggaattacctgcctcaccactgcttctcatagaatttgatt

SEQ ID NO: 123013 - DNA, 201 bp, Homo sapiens
cttcaattcattcgtgtgacctgattcttcctgtatgctgaacgagagctcaggatacagaaggctgtcacattgagctgttaaacacttaagccatttgsagacagcaaagctaaaagtcctgtcagcacccagaagcactcgacctagcccctgcatccactcacctgcattctccccctcccatgaggggttgagggt

SEQ ID NO: 123014 - DNA, 201 bp, Homo sapiens
caataattatacatttaagtatattttcattttatagtaattactctgtaattgaaaataaggagagagatcaaaagagagagagagagcacacacatacrtggaatacacattgtgaagaacttcccataagaggaaaaactgtcaggatatatgcagtgggatccttttgtgagtctatgtttttctttgtcccatatt

SEQ ID NO: 123015 - DNA, 201 bp, Homo sapiens
ttaaccacgtggtgcttttttaggagcatgtgaggagaataacatcccaggagagtcctactctaaaaagatactgctgtttgggacaatatagatataaygcaatatcatataggaagttgtctttttgtatatttttaaaacatgttacttttgtgctttggagttgccctaaataaatatgttgtaaacctttgtgag

SEQ ID NO: 123016 - DNA, 201 bp, Homo sapiens
taccttccacaaggcactagaacatgaacacaatttaggcaagttctttgctgctttacaacaaagctcacttattttccattgtttaataagatattccycattttcagttgagacctcatcagaatggccatttttactatctgtgtttctactaacactctgtacatgattatctgtgtattctctaataagatggaa

SEQ ID NO: 123017 - DNA, 201 bp, Homo sapiens
ttgtttttgggggatagcgtggggtgaagaggtagttttttttagaatcatttaccctgagtaggcattcagtaaatgctttgttgccaatctgactccayttccagccgcaaccccatggagttgagttgaatgacatctaaacctgtaggtaagcatgcatgtatacataacccttgttgtgaatgaaaagcaaaatta

SEQ ID NO: 123018 - DNA, 201 bp, Homo sapiens
tctacgtgctctcgcagtccattatctggcattccctactttcatccgtgttatatacctgccatctcatcactcacagccactcggaatcccctggtggycctccagcaggaggtctttctcctctcttgagcttctaaaacactgtacaaaatcactttaaactgcttcctgcctcagtattgcccacatagaaacctt

SEQ ID NO: 123019 - DNA, 201 bp, Homo sapiens
ccttagcttaattacaagtgtagtgttttcccacaggcaatataatatctacttaccctaaataccccaaagtaaagaacacttggagcattaagtaaaaytgatttgttgagcccaaatcgaaaacaacattacagcttactggttaatcaatgtaaatttcactaatgccacaaggagtcaaatccatttgtaaaagaa

SEQ ID NO: 123020 - DNA, 201 bp, Homo sapiens
aaaaatatacattatgtcacttaggtgtatgatataatgggttccttcttgaactctgcatcttcacagagtggttttgttgcttaaagggtagatgaggycgacactctaattatatctgttttatagaaaggtaaagtcagaatctgagaaattaagtcatttgcctaagtaggcatctggtaagtaacaagacctgga

SEQ ID NO: 123021 - DNA, 201 bp, Homo sapiens
aataggctcttccattaagatacactcatttttaacactaaggatttcgtgatgcaagttgaaaaggaattgcttcactttatttcgttggcatttttttscaaactatccatagtacccaaaaaggaaatgggagaagggagggctgcagcacaagggaatagcagacatttacccaagcttcctaaaactgaaaagctg

SEQ ID NO: 123022 - DNA, 201 bp, Homo sapiens
gaatagtatgaagcaggagattcggttcatccaaattgttgagcagctggagcaagtgagtcatgttcaactgacactggacagctgtccgtcagctcatmatcatgagaagagctttatgaaaaagcagctggcttcagcactgcagcatcatcagagaaatgcaactgcctgaaataacccaaactttcctcccatcct

SEQ ID NO: 123023 - DNA, 201 bp, Homo sapiens; identical to SEQ ID NO: 20773

SEQ ID NO: 123024 - DNA, 201 bp, Homo sapiens
ttgttcctttgggttgatcttggaaattctgatgactatgtgcctggggaatgatcgaattgtataatatcttgcaggggttctctgtttcttgtatttcyatgttgacctctctagcaaaattgggaacattttcattgattatattctcaaatatgttttccaagttgcttactctgtcttctctctccagaatgccag

SEQ ID NO: 123025 - DNA, 201 bp, Homo sapiens
agcactcttttaaaaggttcatactgctgcagcagaactccttgacattttagtaatgtctaaaatggccaaatctacaacattttgaaatcttggcatargtcatgataccatgtactctggtgttcttcaggatttcctaccacaccaatagcagcttaatacaaggttagagaacaaggctgttgttactaacaagag

SEQ ID NO: 123026 - DNA, 201 bp, Homo sapiens
cggcaataaaatcctctgcatttaccatcttcaattcattcgtgtgacctgattcttcctgtatgctgaacgagagctcaggatacagaaggctgtcacaytgagctgttaaacacttaagccatttgcagacagcaaagctaaaagtcctgtcagcacccagaagcactcgacctagcccctgcatccactcacctgcat

SEQ ID NO: 123027 - DNA, 201 bp, Homo sapiens
tacctgctatgaactgaattgtgtaccccaaaattcatatgttaaaaccatacctcagcaatgtatttggagatagagcttttaggaagtaattaaggttmaatgaagtcatgaggatgtggtcctaatctgatagattggcagctgtattggaataaagatagaaatgtctccacaatcatacaccaaggtaaggccatg

SEQ ID NO: 123028 - DNA, 201 bp, Homo sapiens
attaccctgaaaggagaacaaacttgaagtttatgctactgtgcagcaacatacacaagcattcatatgtgtgtgtttgtattttcactccctttcttccctctcctccttctcccatttcttttttcccccttctgacttccagtcattcacccaagatatttgaggttgtattctttaactgatatgggctatttattt

SEQ ID NO: 123029 - DNA, 201 bp, Homo sapiens
ccttgatcttggactttcaagcctccagaatgatgagaaaataaatgcctattgtttaagccacccaatctatggcattttgttatggcagcccaagcagmgaaagacctcaccagcgtgacatacattgggagataggagtgttgaagcaatatttgccttatgtgcagtataggatccccatgtccagagttagagagc

SEQ ID NO: 123030 - DNA, 201 bp, Homo sapiens
ttaccctgaaaggagaacaaacttgaagtttatgctactgtgcagcaacatacacaagcattcatatgtgtgtgtttgtattttcactccctttcttccctctcctccttctcccatttcttttttcccccttctgacttccagtcattcacccaagatatttgaggttgtattctttaactgatatgggctatttatttc

SEQ ID NO: 123031 - DNA, 201 bp, Homo sapiens
ccctgaaaggagaacaaacttgaagtttatgctactgtgcagcaacatacacaagcattcatatgtgtgtgtttgtattttcactccctttcttccctctcctccttctcccatttcttttttcccccttctgacttccagtcattcacccaagatatttgaggttgtattctttaactgatatgggctatttatttctaa

SEQ ID NO: 123032 - DNA, 201 bp, Homo sapiens
cctagagaaattgggctcagaaatagtgtctgaaaagagagctgtctattttataatttctcagtcttgctctctaccttttgtaacagctaaaattctgygtggcatacaactcagtatttaattatgcagattttgttactgtcctttctaattgtttctgacgtgcagttaaggagtaattatgagctcctatcatgt

SEQ ID NO: 123033 - DNA, 201 bp, Homo sapiens
gggaggaaggcagcaggataagtggggtcaggaggaccaaggattggagaatggggttgcaggatttttaaaaattttttatagagacgaggtcttggctrtgttgcccaggctagtgtcaaacgcctggtctcaagcaaccctgctcctcaacctctcaaagtgctaggattacaggtgtgactcattttccccggcctt

SEQ ID NO: 123034 - DNA, 201 bp, Homo sapiens
aatgatgtagcagtcatgggggtgaagtgagcgcgaggttcagtgtcctgaggtaggtactctgacactgacgtcaagttgcctcaggcatattatagaayttcttcatgcttcaattttctcatctcacatgacattactatgaagatcaagatattttatttgtgaaatagctttgaaatgattagaggtgctataaat

SEQ ID NO: 123035 - DNA, 201 bp, Homo sapiens
aagacctcagtgtttgtttttattcttgtgaaaccaataaagtgctgacaaagagtgctataatatgccatcatactttagaaataaggcacatttaagarggttctttattgccttctgagagttggatattgctaaccttagccacactaccacagaagatgctttgctttgcattagcaaaagcagggtggttgatcc

SEQ ID NO: 123036 - DNA, 201 bp, Homo sapiens
ataagagttccatttatctttgtgcaagtagcttcttctcttcctcctgtgtcctcctccctcacgtgccctcccctacctgactccattcctcctccccyttagccaaaggcatttgtgaaatatagaagcagttatgtcatgctgttattttgggtattcttaataaatgcttactgtatttcagaggtggtctgagga

SEQ ID NO: 123037 - DNA, 201 bp, Homo sapiens
aggatacatgaggtctattggtagtgaggtccaacagcaagtcatgctagatgctgggactgaggctgtatctgccctttctattggccaccaggtttccktgtgccatgattagcttaagagttggaagcatcagtgattcttgttctggggcctagagaaattgggctcagaaatagtgtctgaaaagagagctgtcta

SEQ ID NO: 123038 - DNA, 201 bp, Homo sapiens
atgtattcaagattcatccatgttgtagcatgtgtcagaatttccttcttttttaaggctgagtgaatatttcatttgtatgtatagattacattttgttkattaattcatctcttgatggacacttgtatgcctggcttctttcagtaggcatagtgctttaagattcaccccttttatggcttgtatctgtggttattt

SEQ ID NO: 123039 - DNA, 201 bp, Homo sapiens
gagggggagaacaaataagtaaacagattattataatacagtaagtgctaaaatgtaacaaaggatggcaccaaacccaaaaggaagggcagcaattaagrtgaagtaagccattacttaaactcattaagtaagagttaggtcagtggtgggggaaaatggagatctagctgttagggcagaagttccattagttctgga

SEQ ID NO: 123040 - DNA, 201 bp, Homo sapiens
gcaggatttttaaaaattttttatagagacgaggtcttggctgtgttgcccaggctagtgtcaaacgcctggtctcaagcaaccctgctcctcaacctctyaaagtgctaggattacaggtgtgactcattttccccggccttttgaaatttttttttaaacttttttgtagaggttgcagttttaaatagggtggtcaag

SEQ ID NO: 123041 - DNA, 201 bp, Homo sapiens
tgaacaggaccaaatatgtgcaagaacttggtaagtgattttgtggcagttcattcatttatttgtctattcaaaaaataaagtactcattaaaaacaacaaaaaaaaaaaaagaaagaaagaaagaaaaaacactgttccatggaatagagaggtctcttctcattttaacaaaaatggctggttcttgaccaactggtt

SEQ ID NO: 123042 - DNA, 201 bp, Homo sapiens
tagaattacaggacagttggctcttgtcttgtaattttgacaagacaaagccttgttttgtaaagtttgaatgtatcattattcaaattccttcaaaaaawcctgggtggaagaggtgattaaaataaaatttaaaaaagctaggcaaaacaaagttgaatgcaccttaaatagacaggtttggccttgtactcttgcctc

SEQ ID NO: 123043 - DNA, 201 bp, Homo sapiens
gaaacagagtagttgaggctttattttgttatgtttcatactgaggtcagcaggcttatggatatgccaagaagttctcacaagcaaaggagccagttttytgggcatgactgatatgtgccatgttctaaaatagctggatgtgtttttttctactctctctctgatttctctagaacgatgtgggcaatattggggttg

SEQ ID NO: 123044 - DNA, 201 bp, Homo sapiens
tagcttgtcacatatatggtattactgttttccttttttttcaaaaatgcatgaaggactcttgacatggcattttgttaaaagctacttgtcacccttcttttttttttaaccccctcaagccaacttttcccaactccaggaagaaccaggaagagaagctatcacccttattttctaaaggcttccttctccctcatc

SEQ ID NO: 123045 - DNA, 201 bp, Homo sapiens
tcattcaaggaccacattgcaaccgtggatcatttatgtataacttagtagatgatagacattggaaattaccgtgacaggtgttttcacattgtttctgmtgatctgagaaaaagcacattgccagaaaagagtgtggagaactcaaattcctcagaatcaatttgaaacagtcttttgaaataagaactgctttaaaga

SEQ ID NO: 123046 - DNA, 201 bp, Homo sapiens
ttagaaaacaagtaatatcatttttgattgcttatacttagtgaaaatattgagtgccaggcaaatgcaaccttcttccctaacacatacacacatacackccattgcattttatatatatatatatatatatatatatatatatatatatatatataaaacttcaggaagcaactgtcgttttagaattacttagatgct

SEQ ID NO: 123047 - DNA, 201 bp, Homo sapiens
cagtgatgttaagcaaagcctaattagttcaaaaagattcaaatgtcaggtaagagtatgttaacttttagaatttaccttgattttgaaggtatgtcatyatggaaccattagataaaattgttacttgattatcagaaaaatgaggactgaactttaaattcgaatacatatttttatgtactatatgtattttttaat

SEQ ID NO: 123048 - DNA, 201 bp, Homo sapiens
caagtaatatcatttttgattgcttatacttagtgaaaatattgagtgccaggcaaatgcaaccttcttccctaacacatacacacatacacgccattgcwttttatatatatatatatatatatatatatatatatatatatatatataaaacttcaggaagcaactgtcgttttagaattacttagatgctgtttttaa

SEQ ID NO: 123049 - DNA, 201 bp, Homo sapiens; identical to SEQ ID NO: 20774

SEQ ID NO: 123050 - DNA, 201 bp, Homo sapiens
ttggcaaaatatgaaagcacctctgttgggtctattccaaggagtggaatggctgggccacagaataaatagaagttcagctttcatagatatggccaacmagttttcatgagttactggtagtctcacagttactagttatgttctttggacttcaggattagacataactgggaagaattgggtaaataatttctaggt

SEQ ID NO: 123051 - DNA, 201 bp, Homo sapiens
atttattcgtgtcctattatttatatctctacaggccacttaaaactggcatggggatgaataagaggacactttattaagtcacaagataatattgtcattaacaaaatttgtatcataataaaatacaatatgtaagaagtagagttaaacacattagcattaagcctgagagatattgttctacaagataattagcat

SEQ ID NO: 123052 - DNA, 201 bp, Homo sapiens
gtagcatactagctgaaacatgctttggctaaaattttactgacatttctttggcttagaatttaggaggatttggagggattatatatcacttttcagcrctcctgaagctgtccatagacatttgagctgctgccttctttttcctaatgtatttttcctctagcaagcaaaagtgttcattcataattattcctttga

SEQ ID NO: 123053 - DNA, 201 bp, Homo sapiens
taacccttttgtggcttttgaataatgtaagaatttgattcattatttagaaatctgagttgctgcagcaatgaaccagatattacatttaatcgagactkccaatactgcacagattgccagcctcacaggacatcagacctaactgaactttcctgctagttttagaaaaaaagacagaaaaataattcacttccaaaa

SEQ ID NO: 123054 - DNA, 201 bp, Homo sapiens
aacccttttgtggcttttgaataatgtaagaatttgattcattatttagaaatctgagttgctgcagcaatgaaccagatattacatttaatcgagactgycaatactgcacagattgccagcctcacaggacatcagacctaactgaactttcctgctagttttagaaaaaaagacagaaaaataattcacttccaaaag

SEQ ID NO: 123055 - DNA, 201 bp, Homo sapiens
tactaacacaaaagagggactctataataaatgctgatgggtataatacataatgaaggtatatgatcttgaataagtaatagctttaagagctaccataraagtttgttcagcaaataaacttctgaaaacatcccaagaaatagaaataacccattttttaggtggtagactaagtttaaaaattcagctcctgtatta

SEQ ID NO: 123056 - DNA, 201 bp, Homo sapiens
gtacttgttcaatgaatgaatgtaaatttggacatataatggactaaggaatcagaaatgggtgctaatttaattactactacttctccatctgaccaatrtgacttcagacaaggtacccaactctcagagcctccttttttttttaatctataaaatgctagtgttatttttaagattaggattaagtatttagagtac

SEQ ID NO: 123057 - DNA, 201 bp, Homo sapiens
atctcacagaatttaatgtagttagagttacacacaaataaacagagaattacaatatggcttaaatagaattaagtagagactgctgtggtgccatatasgaagaacatctaaaccagccctaaatgatcaagaaagactttcccaaggaatctgagagcagtgagaacctaagatctaaaacataggaattaaaccaag

SEQ ID NO: 123058 - DNA, 201 bp, Homo sapiens
taataaataaagtctacccgtgataaatactcagtaactattgggtggtgttatagatgttttttcaattttaagatgagtattcttccaacctctgcctmagatactaaagattctgctgctcataatttatgcatagacagacatgttatataatcaactagaatctgacaattagattttattctttcttttattaat

SEQ ID NO: 123059 - DNA, 201 bp, Homo sapiens
catttgggttggtttcaagtctttgctattgtaaatagtgcttcaataaacatgtgtgtgcatgtgtctttatagtagaatgatttgtaaccctttgggtrtatacccagtaatgggattgctgagtcaaatggtatttctggttctagatccttgaggaatcgccacactgtcttccacaatggttgaactaatttacac

SEQ ID NO: 123060 - DNA, 201 bp, Homo sapiens
taatagagacagggtttcaccatgttggccaggctggtctcgaactcctgacctcaggtgatccacccgccttggcttcccaaagtgctgggattacaggyataagccactgtgcctggcctcttctagggtttttatggtttggggttttacattaagtctttaatccatgttgagttaatttttgtataaggtgtaagg

SEQ ID NO: 123061 - DNA, 201 bp, Homo sapiens
agagtttattgggaaaggcggaggctatgcgttggttttggaagaaagcttattggtgctggcagcaacaaaagagctggtgagttctgactggcgagtgycaatagttattaggtaggacttgtaatcctggagttacagttaggcccttgtagttttggactgggcttgtgagactgtgtcaggcacatgttcttgtat

SEQ ID NO: 123062 - DNA, 201 bp, Homo sapiens
gcaacttatcaaagaccgtcccaaagctgaaagagttttctttctttgtgatgtaactaaaaatgtctttatcgggctctgattttatttgtgaaatttcaatctttgaacaatgactggtgggaaatccagttaataatgtgaactcttcgctaaatgtatcggtcataggtcatccaaaggtgatgagaagtctgccaa

SEQ ID NO: 123063 - DNA, 201 bp, Homo sapiens
tctcactcacaaactctcagcactacataaagcatgcttgagcctcataagacagatatactgcacacatttagcatatttctttctccccttatggaackttttcttacccctcgtatgcttagctttaaatatattcagaagctataaatattacatggaattttgagatctgaaaaatgacttcttcattgctgatat

SEQ ID NO: 123064 - DNA, 201 bp, Homo sapiens
gaaaaaaaaatgagatggaacatgaagcagggaagcatttgttttattcaaatagataaggatctgagagccattcgcatggcaggcttgtatgcaaaatacacacacacacacacacacacacacacacacacacacacacaaactatcatcttagatagagcagaaagctgacaaagtggcaagatgctgagaacactg

SEQ ID NO: 123065 - DNA, 201 bp, Homo sapiens
agagcccttcttgaagcaactattatctatccagccaataagtgactatagaaattactgcaaaaaaactgattgcaagcattgaatatttaactctagcwctaaatctaagataaatatagagattagggtgatgtaatagaacataaaagtataatgtcctgacaatgtaaaactaaaacaactaacaaaaattaggaa

SEQ ID NO: 123066 - DNA, 201 bp, Homo sapiens
aatttaattactactacttctccatctgaccaatgtgacttcagacaaggtacccaactctcagagcctccttttttttttaatctataaaatgctagtgytatttttaagattaggattaagtatttagagtacctagctcataacagggatttaataagtggtagctctttttattatacttataagtggatctatttg

SEQ ID NO: 123067 - DNA, 201 bp, Homo sapiens
aaaaaaaaatgagatggaacatgaagcagggaagcatttgttttattcaaatagataaggatctgagagccattcgcatggcaggcttgtatgcaaaatacacacacacacacacacacacacacacacacacacacacacaaactatcatcttagatagagcagaaagctgacaaagtggcaagatgctgagaacactgg

SEQ ID NO: 123068 - DNA, 201 bp, Homo sapiens
ctcagccctggcagtcccagcatagaaggagctagataggaatgatgctttccagcagcccttgttgcacactagaatcacctgaggagcttttaaaaaamtgattctccatccctaattaaatgggaatctctggggtaaggcccgagcaggtatttccttgacaattccacgtgcggcttaggctgagaacaactgagc

SEQ ID NO: 123069 - DNA, 201 bp, Homo sapiens
cacattagctatgccagagaccctgcagtcctacctaatgtaaacagctcactaggagtccacaatagaaaccaacaaaagatgcaaatcgatcctgctayattttaatattaaaattttacagcactttttgaactattttataaattaattaatttcaaaatggatgaggcagtaacattgaactttagctaattatgt

SEQ ID NO: 123070 - DNA, 201 bp, Homo sapiens
tatttattttatatatatataaatttctccatatatatgaataagtttctctatacatatgtctctctctctctatatataagtctctctctctctctctmtctatatatatatatatttgtcctttttgactgaatgatttcacttagcataatgtattcaagattcatccatgttgtagcatgtgtcagaatttccttc

SEQ ID NO: 123071 - DNA, 201 bp, Homo sapiens
ctacctttgcctttcgttgttttttcacacattatgtaaattggtaagaataaaaataatgtgattggaagtacagcttgacagacaatatagtgtaatayaatatccaaatacttatgaggtagcaatagtgccttggggcaccacatttattgtgaatgaggatttgcatttacacatttttctctatggtttagattg

SEQ ID NO: 123072 - DNA, 201 bp, Homo sapiens
tttattttatatatatataaatttctccatatatatgaataagtttctctatacatatgtctctctctctctatatataagtctctctctctctctctctmtatatatatatatatttgtcctttttgactgaatgatttcacttagcataatgtattcaagattcatccatgttgtagcatgtgtcagaatttccttctt

SEQ ID NO: 123073 - DNA, 201 bp, Homo sapiens
aaaattaaataattaaagcaacatcagttattttcaaagacagttctgagtttaagcattataatacatcataaaaaattatgcatttggtgcttataaayggattctaaatttccttgaaatgaaagataaaaccatggctttatataatggcaaaatgaggctttctcattgcacagaatagaattttcgtatgtattt

SEQ ID NO: 123074 - DNA, 201 bp, Homo sapiens
tattttatatatatataaatttctccatatatatgaataagtttctctatacatatgtctctctctctctatatataagtctctctctctctctctctctmtatatatatatatttgtcctttttgactgaatgatttcacttagcataatgtattcaagattcatccatgttgtagcatgtgtcagaatttccttctttt

SEQ ID NO: 123075 - DNA, 201 bp, Homo sapiens
taattgtgattactttaaatttaaatagccaaatatggctagtggctaccatactggacaacacagaaccaatagatgtggcttgttatctatatacttcrtttcattgagatggaacctttgtttgtattttcatttaccccatgtgcgcctcaattttcttacctagatgaaggtgtagactacgtgatttctaatatt

SEQ ID NO: 123076 - DNA, 201 bp, Homo sapiens
tcattccttgctcaggtaactcactttgttcttccattccttgctcttccttcacgagcagggtatatatacactgtgccatagcaaccacatttctatcrtgcgtcatcaacatagccaaatttaatgactgattttaataatagaaaaagtaagtttccagccaagctcaatatgaactttataaatgatagtggcttg

SEQ ID NO: 123077 - DNA, 201 bp, Homo sapiens
tagctaacattttacagccacaaaccattctatcttcattccttgctcaggtaactcactttgttcttccattccttgctcttccttcacgagcagggtayatatacactgtgccatagcaaccacatttctatcatgcgtcatcaacatagccaaatttaatgactgattttaataatagaaaaagtaagtttccagcca

SEQ ID NO: 123078 - DNA, 201 bp, Homo sapiens
aatggaatgtttggactccccctaccctaaacagctattctaaacagcaggatataattccagagtttctgcagtcaagaggtttctgctgagcagaaatwcttcttcaatttaggaatgcagatgataataattttcctatccttctcgcagcaggtttcctgccttcattttgcagactcctaagctcagttaaaaaca

SEQ ID NO: 123079 - DNA, 201 bp, Homo sapiens
gacacatgtgcagaatgtgcaggcttgttacatgtgccatggtggtttgctgcacctatcaacccaccatctaagttttaagccccacatgcattaggtawttgtcctaatgctctccctcccctgccccccacctgccaacaggccccagtgtgtgatgttcccctccctgtgtctatgtgttctcattgttcaactccc

SEQ ID NO: 123080 - DNA, 201 bp, Homo sapiens
atggaatgtttggactccccctaccctaaacagctattctaaacagcaggatataattccagagtttctgcagtcaagaggtttctgctgagcagaaattmttcttcaatttaggaatgcagatgataataattttcctatccttctcgcagcaggtttcctgccttcattttgcagactcctaagctcagttaaaaacaa

SEQ ID NO: 123081 - DNA, 201 bp, Homo sapiens
gcaaatgattttaggaagagaattgtcacagccaaaaacttccaggttaagcaaaagatcataataactttatcttaccaactaccttgaatgttctaaastatgttcttcactcgcttagtaaaacgtctgaattagaaagcttatattaccatttaattcccagcctttcctttctggggccaccctcacttttccaag

SEQ ID NO: 123082 - DNA, 201 bp, Homo sapiens
gctcctgtgcacattcagtccccctgagcccccttgataacccttccctgctcaccactgtgcagttgaagggacgtgaacagcgaagagctaaaagcaarataatcttgacctttctgcatcttagtttcctcatctgcaaaatgggcctcaccatgcccagcctgcaggattgttgtgagtactaagatagtagttatt

SEQ ID NO: 123083 - DNA, 201 bp, Homo sapiens
tcaactccgtctccctgcaccccaattcataggcaaaacagaaaatcctaagaacaaactggcaaagctacagaatatagacccccatactaatttccctratttaatgtagatcttactgttacagtctcgccaatgcatcacaatgtagcagtgtctcattgtgaagtaccacccggagttcttcatctcacaaccaag

SEQ ID NO: 123084 - DNA, 201 bp, Homo sapiens
gggaatggcatttttcatttctttaggctatgctgtttaaataccagctgtttaaataccagttcactcccagctcatcataaaaccacatcattccttcraaacctcgcacctactgatgagcttagtaacctttcaactaagtttttcagttttccaaaagaagcaaaatttttaacattgaggttttgagtgttgttt

SEQ ID NO: 123085 - DNA, 201 bp, Homo sapiens
aagaagaaagctctctgtcatggagagggggcccagaagagggttgctgtttttacagttgaacgcaaaggcttttataagaaactgaagagggctgggcrtctcatttgcataagccacgaatttctggtagctccactcctgttctcctagtgtgcatacaggcccttagcttgagttactccatattgctttgctccc

SEQ ID NO: 123086 - DNA, 201 bp, Homo sapiens
ataactggttgaaaggtaggattttggaacatgcagagtggttagatgctagatgttgggcataagggacaggaagaaggccagaatggctccagggtctytgtcattgcaactgggaagatggaagcactaatcactgtttatacagccaatgaaagaggagggccaaaagtgaagtgtatttgctttctatgctgtgtt

SEQ ID NO: 123087 - DNA, 201 bp, Homo sapiens
ggacaagagagggaccaatggtaaaagcagggagactagtaaacgactattggaataacaagtaggagattatgatttcccactcctgagtgatagcagasgagatgaggagtggccagttctagacatgtttagaagatagacccagcaagatttctttactataggtaaaaaagagaggtcaaggatgactccaaggtt

SEQ ID NO: 123088 - DNA, 201 bp, Homo sapiens
ccaccatttgttaactgtgtggccttggacttgttattgaacttccacaatcctgacttcactaatctgtaacatgtggatcattctaccagtctcatggrgttataagaattaaatgtgattacatatactatatgaaatgcctgacatcggccaggtgcagtgactcacacctataatcccagcactttgagaggccaa

SEQ ID NO: 123089 - DNA, 201 bp, Homo sapiens
tcctaaccttgtggcctttcatcagtcttacaaaggcggttcagtctccaagcaaggagggagttaatttcaggaaggaactgttaccatctttgtgttamagctaaccaaggcagatagcttgtgaggttagaagccagatggagtcccttaggttagatttctgtcactgttataatttttaaaactacaaaggcagtt

SEQ ID NO: 123090 - DNA, 201 bp, Homo sapiens
attatgagcatcctgactgatacactttctgcttaatctactaacaaatggtgtccattttcctcttaatctctaccccatctcccattcgacttgacacstgcacaacactgctttttgtgccctgttcctgtgcccctcttcatttgtttctttctcattacagtgctcttacgtaattattattacagaaggaaaacg

SEQ ID NO: 123091 - DNA, 201 bp, Homo sapiens
agctcattatgtaccaagcattgtgctaaaggatttatattctcacttctcactcacaacatctatgaggtagatactattacagtctctgtttaataaaygtatgataaatggacaaataaacaatccagaaacttggctttttcttttcctggagtttgacttgtgcattacagaaagatgaagagaatttatcagcag

SEQ ID NO: 123092 - DNA, 201 bp, Homo sapiens
caaaatgaaaacattcttttccattttgttttgcaccttagcactgagagtcatcacttacaggaaacaatatatttaaatttgtatgtagaccgggcacrgcggctcactcctgtaatcccagcactttgggaggccaaggtggacagatcatctgaggtcaggggtttgagaccagcctggccgacatgacgaaacgct

SEQ ID NO: 123093 - DNA, 201 bp, Homo sapiens
ctcttctaaaaatacaaaacttaactgggcatggtagcaggcacctgtaatcccagctactcaggaggctgaggcaggaaaatcacttgaacctgggaggyggaggttgcggtgagccgagatcatgccactgccctccagcctgggtgacagagcgacactctgtctcaaaaaaaagaagaaaagaaaagaagaaatacg

SEQ ID NO: 123094 - DNA, 201 bp, Homo sapiens
ttgtttcttactgagcgccctaaggaactgatgatattaatcgtggtgaagaaagaacaagaatataagattcacgctgctctttgattaaagcttcttaratagaattttacctcaagagctttgttgtctcaatggcctcctataggtatttttctgagcggtctctgagggttttgtttcctagttccctgtaatact

SEQ ID NO: 123095 - DNA, 201 bp, Homo sapiens
gcaaagaactgccaggctccaagatcttgcctttgcctctgccctgtactgcttccaacttgaaaaataacaaactagccatttttgacagaacagtcacrtttctcccttgtggctcaatctcagagcagccctctctgcattcctcgtgctcctctgcccagcgtgctcttctgtgtaccgttggagcagatctgaaca

SEQ ID NO: 123096 - DNA, 201 bp, Homo sapiens
aacactttagttttagagccaaacatgtactctgcagctagagaattagaattactggtagcttacattcaatttaggaagaagcagcaactgcataatayatccaaatagtagcaaaggtaagaatgattgatataaataatcatatagctatcaacaggtctggagatacacaatacataacattttaaaggagaataa

SEQ ID NO: 123097 - DNA, 201 bp, Homo sapiens
tttactcctatctagaggcttatagttaggggaaaaaaatcaggtaaaggtacagtcataatcactaatgaatactaaatatttaataaatgctactgggkgcttgtctgttcattgtttatttggggttttttttgttgttttttgttttgttttgttttgttttgtttgagacagcatctcgctctatcacccaggcta

SEQ ID NO: 123098 - DNA, 201 bp, Homo sapiens
aggcttccttctccctcatctctcccctttgaaaagaaagctttatataaagccagcttccttagcctaaacagaagtataccttgatctgttcattgtcstgcaatgttttgcttgctctcttgaaccttgtctctgaaagatttcagcctaacacaaaagaaaacaggtgttaaaacactttggggaattaaaacttca

SEQ ID NO: 123099 - DNA, 201 bp, Homo sapiens
ctgagtctaaattacagcaaagcaactgatcaatacgatttttttaaaaagtaacttgcagtttcaactgcagcattttctttaaatatttttgtcctctmagtaatatatattgcttcatttagatattatactatgattaatttagtcaagaaaggaaaaatcaaaacataaatattgtgccaatcataaaaacatatg

SEQ ID NO: 123100 - DNA, 201 bp, Homo sapiens
gaggtgggaagtggaaggcgaagggcaaagtaaaaggtaagcaagggttaaaccttgaaagatatctatggcctgctaagaaatttaactttattcttaaygctcttggagatactgctgaaacttataaaaatagaaaggtctgtggggtaaatggatttggagacctagtaagtttgtcagctgactcaaaaacacttc

SEQ ID NO: 123101 - DNA, 201 bp, Homo sapiens
ccagggttccatattccctctgaggtccagggcaggtctgacctgggttgggactcaggagctgggattgtatggggttgtcagcccagtcatttagtgcwacatcaggaagaacaggggtctaaggtatcaggtccatggtggttgtcagtcacagcaagagctggacagaaaggcagggactgcaatgggaaaaatcaa

SEQ ID NO: 123102 - DNA, 201 bp, Homo sapiens
atataagattcacgctgctctttgattaaagcttcttagatagaattttacctcaagagctttgttgtctcaatggcctcctataggtatttttctgagcrgtctctgagggttttgtttcctagttccctgtaatactgcctgtcagcttccatgctgcatgtatttcacttcaaaagagagcctggataatttgcctat

SEQ ID NO: 123103 - DNA, 201 bp, Homo sapiens
tgtgcaaaggaaatgtcaaggacatatcaatatttgatttcattacacattagctatgccagagaccctgcagtcctacctaatgtaaacagctcactagragtccacaatagaaaccaacaaaagatgcaaatcgatcctgctatattttaatattaaaattttacagcactttttgaactattttataaattaattaat

SEQ ID NO: 123104 - DNA, 201 bp, Homo sapiens
catggcctttggcaaaatatgaaagcacctctgttgggtctattccaaggagtggaatggctgggccacagaataaatagaagttcagctttcatagatayggccaaccagttttcatgagttactggtagtctcacagttactagttatgttctttggacttcaggattagacataactgggaagaattgggtaaataat

SEQ ID NO: 123105 - DNA, 201 bp, Homo sapiens
attaattccttggaaagattctttatttcttgtatcaaataagacaatgtactttcaagaattctctaactataatagttccatttggaggataatgttayatgtttggttccattagtgttaatatgtcttaattctctggtgtaacatacgtttagtttcaccattattacaaccagctgcggttggcctacgattttg

SEQ ID NO: 123106 - DNA, 201 bp, Homo sapiens
caatagacaaatgtgcacagcttagaagtttttcccaccaagcacactaaggattgtaggacattcatggatatagttttttactgcaccaggaaaccccrtccaaatggatgcaggagtgtttcagaatatcctcagaatctatagaccaggaaacattgttgtacatcactacccactatttaaactgtttgtttaaat

SEQ ID NO: 123107 - DNA, 201 bp, Homo sapiens
cctcttctctccatggccataacctattttgccaggatggtatacacgcttccgaaccctgttggagggtagggaatcactctgtggttctccctatgtayacattaataaatttgtatgccttttctttaattgtaactgcccaatgggttcctcttgcctgctgcacagaaaatccaatcacactaagacagtggtgtt

SEQ ID NO: 123108 - DNA, 201 bp, Homo sapiens
gaagtgtcccagaccttaactgggtatagtacatgctcttatggactataatgctgttatggtccatttgtctcttggaattgtaacaaaatatcagtttygcgttcatagtaagccatttaatgcagcccctgttaatccagttcatattagttgatgttcacattgccgctgcttaagctggagaattgctaacagttt

SEQ ID NO: 123109 - DNA, 201 bp, Homo sapiens
taaacagtttaaccatgaggtcattttataacttcactcacccctacatgcaaaagccttgcaagttttattcccaagcccagctattatcctttggtccygtaattatttatacaatggacatgacccattcctacccaccagtggaatgcatattgggatttttcccctaaactccacatccaccgagatcaagatcac

SEQ ID NO: 123110 - DNA, 201 bp, Homo sapiens
aggtaagcttctttcatgatctaagagtgagaccaatatcaccaaacctgtctaaattcattgacagccaggggaggtcacatagcaaaagcatctagtcygaacatgtttcagaacccaggactgagcagaggacatggagggaaacatcaggttccccaaggccattgtcctcaaacatgtgacatcctgatagtcacc

SEQ ID NO: 123111 - DNA, 201 bp, Homo sapiens
tacctcatccccttttttctatttacacaacttctcaacactggtgcaagctgttactgtcttatgtctggataaatcagcatcaccatcctatttggtayccttactctacttttcccttccctcttctgtcagagctattcaagattgaatttttattatatataaacagctttgaacatgcagtttcttttttcagtc

SEQ ID NO: 123112 - DNA, 201 bp, Homo sapiens
tcttcttgaactcccccaaataagtcaagattttttaaaaactagggcagtcctaaaatggcatatattatatccggtcgtcttctaagtcctaacaactytttctttaaaatattaatactggctctacctcatccccttttttctatttacacaacttctcaacactggtgcaagctgttactgtcttatgtctggata

SEQ ID NO: 123113 - DNA, 201 bp, Homo sapiens
actttaaattatttccttgtgcacctcttcttgaactcccccaaataagtcaagattttttaaaaactagggcagtcctaaaatggcatatattatatccrgtcgtcttctaagtcctaacaactctttctttaaaatattaatactggctctacctcatccccttttttctatttacacaacttctcaacactggtgcaa

SEQ ID NO: 123114 - DNA, 201 bp, Homo sapiens
tgtagtttggagaatagagcaaaaaaaattgttttattttatgctttagtatcaaaaaataactgctcattgttaatgagaattatagggccagttcaacygcagtgataagttcagggcataaaagatcatatatcaacatgacctcactaaccttctctgtactaaatgacaaactgctaggaatagcctttggatcag

SEQ ID NO: 123115 - DNA, 201 bp, Homo sapiens
agggaagatgcaatgacttgagctgactgaacaaacaaaacagcaagtctactactagaaggtacatggggatattttggccttacaaactttccttcaaygccttgttacttttatcctggagtagagaaatatttgaagggttttatgtagaagagactataagtcatgctattggaagtttcaaggagatgaattttg

SEQ ID NO: 123116 - DNA, 201 bp, Homo sapiens
atatgactaaggaatatactttaaattacagagcatttttattcattattctattacccctgctgtgatagtcaggcctcccacctatggaatattagagwgccccctagtggcacttatatgcctattaaatttccaaacgaagaataaagttagttactttccttactaactgctaggaccagttttgatacctaaaca

SEQ ID NO: 123117 - DNA, 201 bp, Homo sapiens
catggtgatgttaacatttagacagttcttaccagcagtctcattcgtgtgatctcatttggttttcttctgagaacgccaaagtctttttactcctgtgrgtaaaaataaagataccctaaatttctctggtggaatactttaaacttcaagcagtgccttttctttatattgtagtttggagaatagagcaaaaaaaat

SEQ ID NO: 123118 - DNA, 201 bp, Homo sapiens
actggatacccacaaagcctctgcccttgcctaaaattatccttcttaataggtgagtgaacgcttcctgaaggtttaaaatacatccatggaatcttaamaggtaaggtgaaggtagtcttacaaatgctggaaaagaatgttctgcacagtgaaaataacttcaacaggaatatggagatgaaactagcatgaatatgc

SEQ ID NO: 123119 - DNA, 201 bp, Homo sapiens
acgtatccagagatgtaacagggaccaactacactatggaaggctttggggactacagtaagggttttaatttatcctaaatactagtagaaaatattgtwagataaaccaggtttctgctttaggaaatcagtctgggaatagacgtgaggataaattagagggggaataagattccaagtcagagtgaacatttggtcc

SEQ ID NO: 123120 - DNA, 201 bp, Homo sapiens
tttctatcaattcattttggtcatgaggcctgtcccacctgtgggagctcatatttacttccatgttttaaactttcaaatttactttatttgttcactayatattcttgagtagagaaatgagaataggtagtcaagataatggtaaataatggtaataaccccatataattgctttcttatatatagattgtttataat

SEQ ID NO: 123121 - DNA, 201 bp, Homo sapiens
atttatccattttgtcaaatggttttttatgagctttggggattgcatagaatcctagctctgccaactgacttttgccaaatgcttcatctccctcagcytcattttctttgtctgctatgtggaaaaaataatagtccctgcctcccagatcactgtgagaacaaaatgacataacacacatgaagcacttcacacatg

SEQ ID NO: 123122 - DNA, 201 bp, Homo sapiens
ttgccctattatcttcttcttttcatgaaattacctccttagcttaattacaagtgtagtgttttcccacaggcaatataatatctacttaccctaaataycccaaagtaaagaacacttggagcattaagtaaaattgatttgttgagcccaaatcgaaaacaacattacagcttactggttaatcaatgtaaatttcac

SEQ ID NO: 123123 - DNA, 201 bp, Homo sapiens
tcagtgccgaacacatattcagtacctaataaattatagcaatcatcatcaatagacaaatgtgcacagcttagaagtttttcccaccaagcacactaagrattgtaggacattcatggatatagttttttactgcaccaggaaaccccatccaaatggatgcaggagtgtttcagaatatcctcagaatctatagaccag

SEQ ID NO: 123124 - DNA, 201 bp, Homo sapiens
tttgatcagtttaagttaacttctttgagtctttggctccacatttcaaagtggaagcgctaataaaaactaataagtttgctttgaaaatttgatgatayagaatacataagacaggtgctctgtaaaatatcaagcaacaaataaatgtatgaaagggaccaggacacgaaaggataggggatcaatgaaaatccatca

SEQ ID NO: 123125 - DNA, 201 bp, Homo sapiens
tcagcattcaaaagcgtagctgctccttatagctgctattcctgtagagttctctttacccctggttgctccaatcccttgttatagttagtaattctttwtattttctctgttttaattactgtacagattccctctcttgactggacccagactgtatctaccttctcatatatctatatttacatgcacacacgcaca

SEQ ID NO: 123126 - DNA, 201 bp, Homo sapiens
ggttagctctgagggatacctgctatgaactgaattgtgtaccccaaaattcatatgttaaaaccatacctcagcaatgtatttggagatagagcttttasgaagtaattaaggttaaatgaagtcatgaggatgtggtcctaatctgatagattggcagctgtattggaataaagatagaaatgtctccacaatcataca

SEQ ID NO: 123127 - DNA, 201 bp, Homo sapiens
aatatcaagcaacaaataaatgtatgaaagggaccaggacacgaaaggataggggatcaatgaaaatccatcactgataattaggaaaattattgaaaacwcatatatactcttttctgcacagaaaaatgccagcaagatcagcactgaccaacttggagagggtcattcaaaaaggaaggaaaggtgtaattaactatt

SEQ ID NO: 123128 - DNA, 201 bp, Homo sapiens
tccatcactgataattaggaaaattattgaaaacacatatatactcttttctgcacagaaaaatgccagcaagatcagcactgaccaacttggagagggtmattcaaaaaggaaggaaaggtgtaattaactattgtgaatccacatatgcctagatgccattgccagaaaaactgttaaatggctaatttaatggttggc

SEQ ID NO: 123129 - DNA, 201 bp, Homo sapiens
tctgtgttctcctctgcaatgctaactctgataatgtgatggccaggatgaagatctggaaagatcaagaaatccctgaggaactacttttggaaaagtgyatcagaagaataacttgactacagggagagttttaacagttcttcaaatccaatacacatttaacctagatatgcacattgaatctctaaattactgagg

SEQ ID NO: 123130 - DNA, 201 bp, Homo sapiens
agatgtgaattacagcacaaaattcaggtgctgggattttatgctgtaggctagcacatcccagtagagtataatacaagccacaaatgcaaaccacgtakgtaatttacaattttagaggcctcattagaaaaagtaaaaagaaacgggaaattaatttcagtgataaattttctttacccaatataggcatcacaacat

SEQ ID NO: 123131 - DNA, 201 bp, Homo sapiens
accagtgaaagggcacattggaatattaaacgcccacatggttacaagcaaggcttattgtgaccactgataatgaatgttactaatcagacagagaggtrcagaaacaatagtaaataatgatttcacagaagtaaaatttgtggattttttatttttacataaaaagaaacgtaatcagataaagataccaagtaggtc

SEQ ID NO: 123132 - DNA, 201 bp, Homo sapiens
gaacaggttaaaatgaaaaggaagattgttgacatcactttctgatgttactttattttactcgttcctttcattggtttaccaatcccaaactgtaaacsttatttgacccaggactttttccatgttttaaacgttcattacaattgcacagctcctataaatgcatgctcctcatatccctgtctaaagaattctata

SEQ ID NO: 123133 - DNA, 201 bp, Homo sapiens
gggaccactgcaaataatacctgagatgaaactcgaagcacactaaaccattttgagaaagaatctttcacaataaagaaactctattcctggagagatgrtgaaatttcagtgtgaggtgttttgttttttgttttgttttagcaaggcagtctttgagctgtgtgagataggactggaatgtgctatcaggaccaacct

SEQ ID NO: 123134 - DNA, 201 bp, Homo sapiens
atagctaacacaatgcttgcatatagtaggcaataaataaatattaaattaaggcagaattgctatttgacataaagaagactggggagtgagaaagggarggcagtcagtacgctctaagactgcaaaggtagcacacactgtggtaacatggtgtattatctacacctctcatgaacagcagccatggaccaggtcctc

SEQ ID NO: 123135 - DNA, 201 bp, Homo sapiens
tttctcctaaaaggtaagcaccatgaaggcaaagactatgtctgcactgtcccttgttgtagccttcatagctaacacaatgcttgcatatagtaggcaayaaataaatattaaattaaggcagaattgctatttgacataaagaagactggggagtgagaaagggaaggcagtcagtacgctctaagactgcaaaggtag

SEQ ID NO: 123136 - DNA, 201 bp, Homo sapiens
tacttacaagctctccccaagcaatactgtgggatttccaaaagggtcaaacaatgaagaatattaaatttaaatttattttctttttcccgatagtttasaacccatggagtaattttaaattattatagtatcactataactgtaattcttgtcagtgatgttaagcaaagcctaattagtttaaaaagatgcaaacat

SEQ ID NO: 123137 - DNA, 201 bp, Homo sapiens
ggggcccgccacgacgcctggctaattttttgtattttttagtagagacggggtttcaccatgttagccaggatggtctcgatctcctgacctcgtgatcygcccgcctcggcctcccaaactgctgggattacaggcatgagccaccgcgcctggccctgagtttttatcaggaaactacaggacagaaactaaggttta

SEQ ID NO: 123138 - DNA, 201 bp, Homo sapiens
tgtaaccctttgggtatatacccagtaatgggattgctgagtcaaatggtatttctggttctagatccttgaggaatcgccacactgtcttccacaatggwtgaactaatttacactcccaccaacagtgtaaaaatgtttctatttctccacagcctcaccagcatctgttgtttcctgactttttaataatcaccattt

SEQ ID NO: 123139 - DNA, 201 bp, Homo sapiens
aaatcaatatatttgacattctttttttcatactatgtctttgaaatccagtggacatttaacacttttggtacatctcaagctgtgctcatggctagggrctagtgactaccatattagaccatgcagttctaggctatggaaagttattacggggttttagagggagagttgtttagtaaaagcaacttttaggcagct

SEQ ID NO: 123140 - DNA, 201 bp, Homo sapiens
agctgaatgaggcttttgtatgtagatgtgtatcagattgtaaggatgttatagcacaggacagagagatgaacctgttgaaatcatctggttttgaagcrtggtggtcgactcacaggttatgaaaacttgggagaaacattgaggctacacaatccaattaaagagaaagtagtgagcaatatgctgactcatacattt

SEQ ID NO: 123141 - DNA, 201 bp, Homo sapiens
taccaaaaaactgaaccatagtaatggaaaagtattaatataaactaggatatttccaaaatgtattcacctaaatgtctgtttgatataggcaaaaatamaaacaaaacacaaaaacctcacgtattattttagtcacatatgtggttgggcgccagggaatgggtgtggttagttgaagcccctgtagaataagaagct

SEQ ID NO: 123142 - DNA, 201 bp, Homo sapiens
tgaaggtgagcttttgttgtttggcattctgtgttccccgaacaaaaagcttcaagaaaaaatcactagttttgttttttcttaaagctacaggtgatagrgaaatatgcctgcattagttttctattgctgcataacaaatgcccaccaccatggaaacttaacatccatttattagcagatagttctttaggtcagaaa

SEQ ID NO: 123143 - DNA, 201 bp, Homo sapiens
attgttaataatacgatctaaaagagagatttcagttactttgtctcatggaccaagaaagcaggataataatgttaaatcctttgtgtattttttttccwctggttatcaaggtttattttcattagctggtcccatttgattaaaaaaaaaaaaaaagagctaatcctggacagagctgcttaccaaaaaactgaacca

SEQ ID NO: 123144 - DNA, 201 bp, Homo sapiens
tatttagctgtctttatggttggccgttaggataaagctctctactctcaaagattgcttcttgtagaactgtggtttacagagaagagacatatctagargcaactggactctgtaattttttttaattttagtagaaatgctaaaggtgattttatttctaaatcagactatttttttctattgaaaattatgagagtt

SEQ ID NO: 123145 - DNA, 201 bp, Homo sapiens
gcctggaaccttcactaaccaaatccaggcagccttccaggagccacggcttcttgtggttactgaccccagggctgaccatcagcctctcattaaggcakcttatgttaacctacctagcattgctctgtaacaattctcctctgcactatgtggactttgccatcccgtgcaacaacgagggagctcactcagcgggtg

SEQ ID NO: 123146 - DNA, 201 bp, Homo sapiens
tcagaacttagtcaatttaggtcagccaactgtatcttctgtaagggaggaacaaagttgactacctttaaaaaacaaaaagtactctttcacagtgctcrcagatttctatttcaaatattctatttagctgtctttatggttggccgttaggataaagctctctactctcaaagattgcttcttgtagaactgtggttt

SEQ ID NO: 123147 - DNA, 201 bp, Homo sapiens
tgccatcccgtgcaacaacgagggagctcactcagcgggtgtgatgcggtggacgccggctcgggaagttctgcgcatgcgtggcaccatttcccgtgaayacccgcgggaggtcatgcctgatctctacttctacagagatcctgaagagactgaaaaagaagagcaggctgctgctgaaaatgctgtgaccgaggagga

SEQ ID NO: 123148 - DNA, 201 bp, Homo sapiens
ctttcaaaggagctttaaatatattggaatttattgggcaactgctaactcagaagcaagtggttgtccatctattggcttccagagagaggttgcactgsttcatttaggcaactggaatcccatttaccagaaagctaatcaacaagatggctagttacatttatgagtatttcttttagaggcatttagtttcaatcc

SEQ ID NO: 123149 - DNA, 201 bp, Homo sapiens
tatagaaaacatgaaacataggttattacagaggctagtgtaagaaggtttagcatacatctaatcagagtttcaggcggagataatagagataatggagmagaggaatactcaatggggtgacaagaatttccccaaatttttaaaagatccagtcttagaaatgggaaacctagtggatcccaaacaagataaatgaaa

SEQ ID NO: 123150 - DNA, 201 bp, Homo sapiens
atcccagcactttgggaggccgaagtgcgtcgatcacgaggtcaggagttcgagaccatcctggctaacaagatgaaaccccgtctctactaaaaaattcrccgggcatggtggcacgcgcctgtagtcccagctacccaggaggctgaggcaaaagaatcgcttgaagccgggaggcagagtttgcagtgaaccgagatc

SEQ ID NO: 123151 - DNA, 201 bp, Homo sapiens
tttttttgggggatgatgaaaacgtaaatgtaaagttaattatggtgatgattgcacaatactgtgaatatattaaaatgtaggtacacttttaaataggkgagttgcatgtgaattatatctcaataaagctgagaccaataaaaaaggaatagtgagcgatggtattgataaatgtggataaatctaaaacaaatatta

SEQ ID NO: 123152 - DNA, 201 bp, Homo sapiens
tcgtttattgaatgtgtttaagcttactgttgagacctactgtttatttaaaaaggctcctttcaaaagattactgttcactgacagtaatcttgggtgayctaatcacccaagagtcctgatggagatgtacaaggagattaatgttgctttcatgccttctattacaatatccattctacagtacatggatcaaggagt

SEQ ID NO: 123153 - DNA, 201 bp, Homo sapiens
tggcagataataattcaaaaccccccgccctcaaagaactttacaaattaattaaggagaaaaggcagggtaaccattaagtaacaaaagccaaagttacrtaatattgcaactgtgaaataaatcatgcttaaaaaaaagagtgctccaacttcatggctggaggtgctgactatgggttgaagtggtcagaaggactcc

SEQ ID NO: 123154 - DNA, 201 bp, Homo sapiens
ttactcctggtgaggatgctgtgaacattgttgagatgacaacagtgggtttagaatattacataaacttcattgataaagtagagacacattttgagagsacacactccaattttgaaataaattctactgtggttaaaatgctgtcaaacaatattgcatcccactgaaaactctttcataaaaagaagagtcaatcaa

SEQ ID NO: 123155 - DNA, 201 bp, Homo sapiens
attcatttactacttcagaataagtcaccttgttaagttacagccagaaaaaaatatcactggcattcgagacacaatttgttacaaagtatactaataarccagattgccaaattatgtcagtcacatctaaataacaacaagcaaattgccttacacagacggagaatgtgtaaggtgcatagatttcctgtgaggcaa

SEQ ID NO: 123156 - DNA, 201 bp, Homo sapiens
taagtagggtgaaaagaaagtcagggctgcctagggaagctacatttgcttctcaaggcttgcacctgcatatttcatgcccgacatgttgctgaacacarccgagtaaagtgccagaataaaatcagctctgtccacgtggtaccaggaatgctgctgaaatgaaggtaagtataggattccacaggatctaagacagtc

SEQ ID NO: 123157 - DNA, 201 bp, Homo sapiens
acgctcccttcatctttggttttcccctttctgttgcacagaaacacgatggctctgttaacagccgaaacattccgcttacagtttaacaacaagcgcckcctcagaaggccttactacccgaggaaggccctcttgtgttaccagctgacgccgcagaatggctccacgcccaccagaggctactttgaaaacaaggtg

SEQ ID NO: 123158 - DNA, 201 bp, Homo sapiens
gggtcgagaggcctgtggacctcaaggagggggtgtccaactgcagctggaaagagggatctgggactcaggccagaggcgtgtgagcagctcagagcagstctgagcccaggggagccagaaaggcacacccacagttctcaggcaggggatccccacccaacccaggaagaatagtgacgaggtcggggcatccccatg

SEQ ID NO: 123159 - DNA, 201 bp, Homo sapiens
ggttggcagggggtgggggggtggcggggagcggggggtctgtgggaggccaggaaggaaggattgtggctcagtcaaggcccaagatctgacaccacccrggagggagaattccccggacagagcaatgtccagggagaggaagagaagagaggggaaaggaagcaagagctcctggcactgcagctgctgcccctgggg

SEQ ID NO: 123160 - DNA, 201 bp, Homo sapiens
ggggtgggaggatgggaggtgagccacctccatcagacttcccctgccaagcccgaggaaatagagaaagaaaggagcctgagggatctgaagcaccccagggccctcccactccagtcccacaaaaggaagagggtggagccaccctcatcaagcagtgactttttgtgacttttgggagagctgaccttttgtgacttt

SEQ ID NO: 123161 - DNA, 201 bp, Homo sapiens
aaccagggaaggcaggaagcgggtgcttgccctgcactaggccaggccacgcactagaaagttcaccggacagacccctctgcccccccatccccgccccygtcccggcccccgcccccagacacatgactcctggcctctctcttctcccctcccttctctctgtttgggaccctccccagaaaaagtgccatgcagaaa

SEQ ID NO: 123162 - DNA, 201 bp, Homo sapiens
ggtgggaggttgcagtgagccgagatcatgccactgcactccagcctgggcaacaaagcaagactctgtcccaaaaaaaaaaaaaaaaaaattaactcaasatgtgctgggcatgaggactcatgcctgtaatcccagcacttcaggaggccaaggcgggtggatcgcttgagcccaggagttcaaagaccagcctgggca

SEQ ID NO: 123163 - DNA, 201 bp, Homo sapiens
ggggtggcggggagcggggggtctgtgggaggccaggaaggaaggattgtggctcagtcaaggcccaagatctgacaccacccgggagggagaattccccrgacagagcaatgtccagggagaggaagagaagagaggggaaaggaagcaagagctcctggcactgcagctgctgcccctggggcctggctggtttccctc

SEQ ID NO: 123164 - DNA, 201 bp, Homo sapiens
gcttacagtttaacaacaagcgccgcctcagaaggccttactacccgaggaaggccctcttgtgttaccagctgacgccgcagaatggctccacgcccacsagaggctactttgaaaacaaggtgccacacgggctctctgggcacagggccggcaggggctaaccccatctgatgtgtgcagaaaatacatgaaatgcct

SEQ ID NO: 123165 - DNA, 201 bp, Homo sapiens
ctgtgcctgggagctggttgacttcatcaaggctcacgaccatctgaacctgggcatcttcgcctcccgcctgtactaccactggtgcaagccccagcagraggggctgcggcttctgtgtggatcccaggtcccggtggaggtcatgggcttcccaggtaggaaagaggctttgcagttataagagtgcaaacccccggg

SEQ ID NO: 123166 - DNA, 201 bp, Homo sapiens
gggaaaactttgtggaccacgagaaaccgctttccttcaacccctataagatgttagaggagctagataaaaacagtcgagccataaagcgacggcttgasaggataaaggtgaggcactgtcctgcctgctgcccccgacctcctcaccgcctgccgcagccccatacccagtcacacctctgcccactgcccttacccc

SEQ ID NO: 123167 - DNA, 201 bp, Homo sapiens
gtgcctgggagctggttgacttcatcaaggctcacgaccatctgaacctgggcatcttcgcctcccgcctgtactaccactggtgcaagccccagcagaasgggctgcggcttctgtgtggatcccaggtcccggtggaggtcatgggcttcccaggtaggaaagaggctttgcagttataagagtgcaaacccccggggg

SEQ ID NO: 123168 - DNA, 201 bp, Homo sapiens
cttcgcctcccgcctgtactaccactggtgcaagccccagcagaaggggctgcggcttctgtgtggatcccaggtcccggtggaggtcatgggcttcccargtaggaaagaggctttgcagttataagagtgcaaacccccgggggcacaggcttggcaggggctgggggttgggggttgggggttggaggaggttggcgg

SEQ ID NO: 123169 - DNA, 201 bp, Homo sapiens
ctcagtgcaacctctgcctcccgggttcaagtgattctcctgcctcagcctcccgagtagctgggagtacaggcactcgccaccatgcccagctaattttygcatttttagtagagatggggtttcaccatgttgcccaggctggtcttgaactcttggcctcaagtgacctgccttccttggcctcccaaagtgctggga

SEQ ID NO: 123170 - DNA, 201 bp, Homo sapiens
gtcacccaatctactggaacatagcacccaataggtagtttttcaaccctggcccccctcccaccctctcttcttttggagtctccagcgtctattatttmcatctttatgtccatgtgtacctctcaccatatacaaaaattaactcggccaggcacagtggctcacgcctgtagtcccagcactgggaggccgaggcag

SEQ ID NO: 123171 - DNA, 201 bp, Homo sapiens
caggcgtggtggcaggcatctgtaatcccagctacttgggaggctgaggcaggagaatcgcttgaacttggaaggcggaggttgcagtgagccaagatcgsgccactgcactccagcctgggcgacagagcgagactctgtctcaaaaaacaaaaaagagttgggtttgaaaagtggcttgagcctggggtgactcaagag

SEQ ID NO: 123172 - DNA, 201 bp, Homo sapiens
gcagctcagagcagctctgagcccaggggagccagaaaggcacacccacagttctcaggcaggggatccccacccaacccaggaagaatagtgacgaggtyggggcatccccatgcaaagagcctcagctgtgggcagcagccggtgccctcccaggtgggaggatgggagatagcagacaaggtgggagggagcactccc

SEQ ID NO: 123173 - DNA, 201 bp, Homo sapiens
ccatgcaaagagcctcagctgtgggcagcagccggtgccctcccaggtgggaggatgggagatagcagacaaggtgggagggagcactcccctcctcctgycctcctgccagcccttccttcccctgctccactgcagtcctcctggccaacaactaaaggggagaccctccctcaccaaggggaagggcccaaatgaaca

SEQ ID NO: 123174 - DNA, 201 bp, Homo sapiens
gagttcgagaccagcatggccaacgtggcgaaaccccatctccactaaaaatacaaaaattggcagggcatggtggcaggcgcctgtaatcccagctactaggggggctgaggcaggagaatcgcttgaacccagaaggtagaggttgcagtgagccgagattgacccattgcactccagcatgggggatggagtgagact

SEQ ID NO: 123175 - DNA, 201 bp, Homo sapiens
gtgggcagcagccggtgccctcccaggtgggaggatgggagatagcagacaaggtgggagggagcactcccctcctcctgtcctcctgccagcccttcctycccctgctccactgcagtcctcctggccaacaactaaaggggagaccctccctcaccaaggggaagggcccaaatgaacagaaagggttgggtttggctg

SEQ ID NO: 123176 - DNA, 201 bp, Homo sapiens
tctttcccgtccccggacctctgaagaggccaacccttctgtagaatgctccttctgcccctctcatttactcattctcccgatctcagctcagtcactayttcgggaaagccgaggtgccgtgccacggtccgagtgcaactccatcacacccctgtcctctccgctctattgccagcccctacctgccctgcctccccg

SEQ ID NO: 123177 - DNA, 201 bp, Homo sapiens
acctgtaatcccaacactttgggagaccaaggtgggtggatcacctgagatcaggagttcgagaccagcctggccaacatggtgaaaccccgtctgtactraaaatacaaaaattagccaggcgtggtggcaggcatctgtaatcccagctacttgggaggctgaggcaggagaatcgcttgaacttggaaggcggaggtt

SEQ ID NO: 123178 - DNA, 201 bp, Homo sapiens
accatgacctatgaatgacatgctgagacccacaacccaaaatgataacagagtggtgataaggccctaagttttggtcacactctcacttaagtgagaamctggccaaaaagggggaatttttaaaacaaaattaaggacggccattattttggactgagctcatacactaggcctcaacagaccaaaccaaacaaaatg

SEQ ID NO: 123179 - DNA, 201 bp, Homo sapiens
tgtccaaaggcagggtccacagagcttcgggactggggcgtggaggtgttgtctcctcctctggacacagggatctttgtccaatttacagaaagatgtgraagtcctgggacagatgaattaacacacgggtgcgtgagtgcagggctgtataaaccagggaaggcaggaagcgggtgcttgccctgcactaggccaggc

SEQ ID NO: 123180 - DNA, 201 bp, Homo sapiens
ggtgcttgccctgcactaggccaggccacgcactagaaagttcaccggacagacccctctgcccccccatccccgcccctgtcccggcccccgcccccagwcacatgactcctggcctctctcttctcccctcccttctctctgtttgggaccctccccagaaaaagtgccatgcagaaatttgctttattaacgagatca

SEQ ID NO: 123181 - DNA, 201 bp, Homo sapiens
cctcctcctgtcctcctgccagcccttccttcccctgctccactgcagtcctcctggccaacaactaaaggggagaccctccctcaccaaggggaagggcmcaaatgaacagaaagggttgggtttggctgggcgcaggggctcacacctgtaatcccaacactttgggagaccaaggtgggtggatcacctgagatcagg

SEQ ID NO: 123182 - DNA, 201 bp, Homo sapiens
tactcaggaggctgaggcgggagaattgcttgaacccaggaggtgggaggttgcagtgagccgagatcatgccactgcactccagcctgggcaacaaagcragactctgtcccaaaaaaaaaaaaaaaaaaattaactcaagatgtgctgggcatgaggactcatgcctgtaatcccagcacttcaggaggccaaggcggg

SEQ ID NO: 123183 - DNA, 201 bp, Homo sapiens
ccttgaactttgggttcataatctcacaactgagaagcgaccctccacattcttggaactgttcacccaccagaacccttaaagtaaaactaaccagagaygtcactccccagaagaagatggcatccttaatgtgaacagcttttcccaagatcacagatcaagacttctctaggctgggcgtgggggctcacgcctgta

SEQ ID NO: 123184 - DNA, 201 bp, Homo sapiens
gattacaggtgcctgacaccacgctcagctaatttttgtatttttattagagacggggtttcaccaggttggccaggctgatcctgaactcctgacctcasgtgatccatctgcctaggcctcccaaagtgctgggattacaagcgtgagccactgcgaccggccaaggaaatagtttaaaatcaatgtttggttgcatat

SEQ ID NO: 123185 - DNA, 201 bp, Homo sapiens
ttaaatggagcacagcaaaagaaactatcaacagagtaaacagacaatctcccttttctaagatgctcttgtcacctccgtgtttttctccaggccttctkggcccttctggtgccagttcttttctctccctaatgatctcatcctcacctctccctcccttcctccctgtggtgtctcaccagttggtacctcctaact

SEQ ID NO: 123186 - DNA, 201 bp, Homo sapiens
tttaaaatttaggaagaagagagcctggttcccaaaggctccctcctgcagggcccgtgatgcagaggctggcagggctggccaggaaagtggcccagctscacggcctgggcaggttaccccacctctctgcacctctggcccctcctctgtaagatgagaatggcccctgcaggcctagggcagcctcacgtgagctca

SEQ ID NO: 123187 - DNA, 201 bp, Homo sapiens
aacagagtaaacagacaatctcccttttctaagatgctcttgtcacctccgtgtttttctccaggccttcttggcccttctggtgccagttcttttctctycctaatgatctcatcctcacctctccctcccttcctccctgtggtgtctcaccagttggtacctcctaacttctctctttccctctcagcagtcctgaag

SEQ ID NO: 123188 - DNA, 201 bp, Homo sapiens
cgtgtttttctccaggccttcttggcccttctggtgccagttcttttctctccctaatgatctcatcctcacctctccctcccttcctccctgtggtgtcycaccagttggtacctcctaacttctctctttccctctcagcagtcctgaagtgtggatgttttagagaatgacttaagaagtttgcagcttggacccgta

SEQ ID NO: 123189 - DNA, 201 bp, Homo sapiens
aaaatttaggaagaagagagcctggttcccaaaggctccctcctgcagggcccgtgatgcagaggctggcagggctggccaggaaagtggcccagctgcayggcctgggcaggttaccccacctctctgcacctctggcccctcctctgtaagatgagaatggcccctgcaggcctagggcagcctcacgtgagctcagat

SEQ ID NO: 123190 - DNA, 201 bp, Homo sapiens
gtacctcctaacttctctctttccctctcagcagtcctgaagtgtggatgttttagagaatgacttaagaagtttgcagcttggacccgtatcccactcaytatcaagaagcaactcaagatgactttccctggggcatgtcagttgcctcatagcctgctggtcctgtaagcaagcactaagctccacagtgccagttcc

SEQ ID NO: 123191 - DNA, 201 bp, Homo sapiens; identical to SEQ ID NO: 20779

SEQ ID NO: 123192 - DNA, 201 bp, Homo sapiens
acttggaaggcggaggttgcagtgagccaagatcgcgccactgcactccagcctgggcgacagagcgagactctgtctcaaaaaacaaaaaagagttgggyttgaaaagtggcttgagcctggggtgactcaagaggacgctcccttcatctttggttttcccctttctgttgcacagaaacacgatggctctgttaacag

SEQ ID NO: 123193 - DNA, 201 bp, Homo sapiens; identical to SEQ ID NO: 20781

SEQ ID NO: 123194 - DNA, 201 bp, Homo sapiens
ggtggatcacctgaggtcaggagtttgagaccagcctgaccaacatcgcgaaaacctgtctctactaaaaatataaaaaatagccaggcatggtggcacgygcgtgtaatcccagctacttgggaggctgaggcaggagaatcacttgaacctaggaggtgggggttgcagtgagccgagatcacgccactgcactccagc

SEQ ID NO: 123195 - DNA, 201 bp, Homo sapiens
acagctccaagggaattcacgaccaaggctgagctgacaggaaccacccagctgaatcgtggatcctaatcactaaggcgagggaacagaatcactaaacraaacaagtgcggtcagagccgtcaggcgctcatcggccagagacaggaagatgcaggctccgctcctctgcagatgcaccccagtgtcgctgcgctgggg

SEQ ID NO: 123196 - DNA, 201 bp, Homo sapiens
tgatgtgaacctctgagatcctgctctgcagggccaggtcttgatggaaaaggatccctttctgctgagcacctgagtgagagatgccggctcaggggcamctgtctgcagcctgatcctccttcttccgagcagctcagccctgcagagccatcctagcctggcccatccttgtgtctctcacttgcggatgcagcagag

SEQ ID NO: 123197 - DNA, 201 bp, Homo sapiens
gtgggtggcgcgggtgtgctggggtcacacacaccctgaacactgtagaggtcactgcaggctctgaccgagggatgctgagaagcaggagctgaggatcyctccctgtagacaggcagggcaccagctcaggactccccttcccaacccactcagtgatgggcaggtgggtagatgtggcgcaggcgggacagccgttgg

SEQ ID NO: 123198 - DNA, 201 bp, Homo sapiens
ctgaccatatcttctttcgtgcttctttatgtctctccagacacactgggtgtcaagagtgctgtcaccccagggcccttgcacagctgattccctctatwacccttggttcacatgttgccttctcagtcagaactcctcccacatactcacctttggcctcaagctctcccagtcctcctccccctactgtgtttttct

SEQ ID NO: 123199 - DNA, 201 bp, Homo sapiens
tctgaccatatcttctttcgtgcttctttatgtctctccagacacactgggtgtcaagagtgctgtcaccccagggcccttgcacagctgattccctctawaacccttggttcacatgttgccttctcagtcagaactcctcccacatactcacctttggcctcaagctctcccagtcctcctccccctactgtgtttttc

SEQ ID NO: 123200 - DNA, 201 bp, Homo sapiens
ctctgaccatatcttctttcgtgcttctttatgtctctccagacacactgggtgtcaagagtgctgtcaccccagggcccttgcacagctgattccctctrtaacccttggttcacatgttgccttctcagtcagaactcctcccacatactcacctttggcctcaagctctcccagtcctcctccccctactgtgttttt

SEQ ID NO: 123201 - DNA, 201 bp, Homo sapiens
cctgaaccatgcacagtgagcctggctttacacttgagcatgacacgtgatacccactgtctcctccagcagctctcttgaaggccagggaagccagcccrtccgtgacctctgtgacagagctactgctgcagccacacactcagtgtgtcaggcactagatagaaatggaaaggcttcaggccacacacaaggccgtgg

SEQ ID NO: 123202 - DNA, 201 bp, Homo sapiens
gagggagactcagtcatgaggacagaggtgagctccatagggtgctgctgcgttagtctgacttctggccctgccctctgtggaccacatctgagtcctgygggatgggcttggaataagcaagaagagcatctagggcatgttgagaaagactctggcacagggagctgctctgctggcttctagcaggcgtgggcagag

SEQ ID NO: 123203 - DNA, 201 bp, Homo sapiens
actggccgcaagtggggtccccaggccacctgcaccgctggccaactggctacagagtcaggtgttcctgtgaatctgtagccagctggccagcagtgtargtgctggggcccctccagtttgaaaatttgttttaaagatgcagaacacaggcaagtactatacttaaaattgcatttttattagaaaggatacccatag

SEQ ID NO: 123204 - DNA, 201 bp, Homo sapiens
cagtgtccccctgtccagtcctcacaggtaaaatggaacaggaccacagcccactgccctccgaggctgtggggacagtgccagtgggaggtcatggcctyaggggctgcaacctcaacaagcacatggccttccatcttccccccgactggcaggatcccttttggaagtggcttctcagccccactcttggccaaatct

SEQ ID NO: 123205 - DNA, 201 bp, Homo sapiens
accagatatattctttttttttttttttttttgagatggagtcttgctctgttgcccaggctggagtgcaatgacatgatcttggctcactgaaacctccrcctcctgggttcaagcaattctcctgcctcagcctcccaagtagctaagattacaggcccccacaacaatgcccagctaattttttgtacttttagtaga

SEQ ID NO: 123206 - DNA, 201 bp, Homo sapiens
atcggctgcgggagagaaaggagctctggaggctcgtgctgggacagctgcagtaatgatgggatggggaagaggagggggtggctgtcaaggagggaaayagactctgggcatggcagggggtggcaatgagcagcttgattctaaagactcctctctcaggccaggcacctgctacttacaccccacaccctgaagggt

SEQ ID NO: 123207 - DNA, 201 bp, Homo sapiens
aacacttttttttttttggtgggaagacagattagagaggtttatgcttttctgtgataactaatatgaaaggtttatcaaagttaaaaaaaaaaaaaaaacctcttgacgctttctccaaaattgatctgaagacttggcagatttgaggaatcattcagtaacgttttacgagtcgatgctaatttgatgcggcagacc

SEQ ID NO: 123208 - DNA, 201 bp, Homo sapiens
agctcagggaattcaggctgtccattccagggctgaccttgcatctccttcctggcctgctaatgactgaaggagacgtgcgggcacggcctcagccttasattgtctggggcatggcagtggctgagtctgtaaaactggacctcatggagaaatccacagaatctctggctcagggaagacctggagatcccttcacca

SEQ ID NO: 123209 - DNA, 201 bp, Homo sapiens
tattttggacctggaaacattattcaacaaatttgaaaatttcctttcgtccccaaattgtagaactcacttccatccccacattgtggaaacgtctggcrgtgcttctgatttcttctgggcgggtttgaatctcccaggctggaagccaagggatggagtagacaagagtttctctggatgagtctggggaactggcca

SEQ ID NO: 123210 - DNA, 201 bp, Homo sapiens
ccaggacgtggagacagccaggaaagtggtgggacactggaacccccctcccgcaggcagcagccaggatttgctcaggtgtggtcgggcatggtgccccrgcgcgccagccagaagatccagctctctccttaagggatagctggctctgatggtgaccatggcttttggcagagcctcaggacgaaaatgtccacccac

SEQ ID NO: 123211 - DNA, 201 bp, Homo sapiens
ttgttttgttttgttttggtattttttgtagagacagggtttccccatgttgtccaggctggtctcgaactcctgggcttaagcgatcctcccgccttggmctcccaaagtcctgggattacaggcatgagccaccactcccgactccattgctggactgttttctaaaggggtcgtactgatgtttccacctcctcacca

SEQ ID NO: 123212 - DNA, 201 bp, Homo sapiens
gatgtacttagaagagaattgttgggccccagggtgcaggtactgttgaacagttttctttttcgtgtgtgtgtgtgtgtgtgtgtgtgtgtgtgtgtgtgtgtttaagacaagatctcactctgttgcccaggttgtagggtagtgacgtgatcatggctcacggcagccttgacctcccacgttcaggtggtcctcctg

SEQ ID NO: 123213 - DNA, 201 bp, Homo sapiens
cagcatctgggagcagcttggagacagtgaggatgacacagcccctcccctgggtgagcgtgtgtgtgcgtctgcatgtgtgtgtcgggggagaaggcacrtgcacttgtatcatctctcagagaaacgccggctcaagctggacagacgtggacacacaacgcatccatcagtggggggcttttgttgcaggtggtgatg

SEQ ID NO: 123214 - DNA, 201 bp, Homo sapiens
ctgatgtacttagaagagaattgttgggccccagggtgcaggtactgttgaacagttttctttttcgtgtgtgtgtgtgtgtgtgtgtgtgtgtgtgtgtgtgtgtttaagacaagatctcactctgttgcccaggttgtagggtagtgacgtgatcatggctcacggcagccttgacctcccacgttcaggtggtcctcc

SEQ ID NO: 123215 - DNA, 201 bp, Homo sapiens
ttttggtttgatccaaggacaggatcgactttaccaaagaggaggctcatcctctcccagacgtccaaccaggatggagctttagcttgactggtgggaayagtccagggtgctgtgtggcagcccctcaagtgtttgcccacctgcatgccagctccagcctctgccacgtctcacagggacaactgtcccagctgtcag

SEQ ID NO: 123216 - DNA, 201 bp, Homo sapiens
ggactgatggccagagcccctgagtgctccgggcagtctctggccttgtccctgcaacctgtgaattgccagagtctctgttctgttctggtggggtgggktgggggggcacacaggatgacccctcagctgcagctgcccctcggtgttccctgagatgccagagagaagacactggagatgttggtgtaggggtggggg

SEQ ID NO: 123217 - DNA, 201 bp, Homo sapiens
atctccccatcatcagtgcatcacatctgacaaggaagacacccttgtgtggtacaaaccccctcctcactcacacttggcagtcaagtgtgctatgagcygggcctggggcctcatacctgctaatggactgctttatccccgcacctggcatccccaagtcacccgggtccatgacctcttatgagcaaaccgtccttg

SEQ ID NO: 123218 - DNA, 201 bp, Homo sapiens
tgacctctggtggtcctcactgctacactcccaccagcgccatgacagtttacaaatgccatggcaacgtcaagaagttaccctatatggtctataaaggrgaggcatgaataatccacctcttgtttagcatatcatcaagaaataaccataaaaatgggcaatgaagaatggaatagccattcttcattcctttacttc

SEQ ID NO: 123219 - DNA, 201 bp, Homo sapiens
aggttgcagtgagccaaaaccatgccactgcactccagcctgggcaacagagtgagacgcggtctcaaaaaaagaagaaagaaagaaagaaagaaagaaakaaagaaagaaagaaagaaagaaagaaagaaagaaagaaagaaagaaagaaagaaagaaagaaagaaagaaagaaagaaagaaagaaagaaagaaagaaag

SEQ ID NO: 123220 - DNA, 201 bp, Homo sapiens
gtagcccctctggggactaaattctctcaggaaacaggttgaaagctcaacatcatctccagaagctattttcttgcagttcgcacacccagcattcctgkggtcttgtcatcaggctgcctctggccctgtctttcttacctctttgttccttggttgcaccccttccccctcttccctggggctgggcattctcaattg

SEQ ID NO: 123221 - DNA, 201 bp, Homo sapiens
acaaactgttggctaaaattgctgtaccattttacattctcaccagcagggtatgaaggttccaattgctccacattctcatcaagacttgttattatctrtctttttaattatagctattctagtgggtgtgaagtggtgtctcattgtggttttaatttgcatctctctaatgagtactattaagcatattttcatgtg

SEQ ID NO: 123222 - DNA, 201 bp, Homo sapiens
acagggatgtgcacacaaccacacactccccacccagggcacgctacatcacacacacaggaagcaggcacctgtgcagcacaaatgtgtgctgtggtgcrtttcctcggcatgcctggtgtgacagaccataggacatgcacacctgatcccatgcgacatgcacatgtgtaaggggtgatgcagtgggtggcgcgggtg

SEQ ID NO: 123223 - DNA, 201 bp, Homo sapiens
cacccctgatcccctaattccctctcctccaactgccctctggatgtctgcacttgggagacctgtagtcaggtctcctcaaagtccacagggatctgtcytcctgcgcagggaatagcatcagcattcaccactgctaaagtcagaagccagcgtctccctctgcagtcagccagtcccaggtcctgctgatgtagtggc

SEQ ID NO: 123224 - DNA, 201 bp, Homo sapiens
gctagcctctaggagccacagccagcctctaggagcactttctcaacggcccacacaccatcataactgcagcctgctgcagagagctctacaaacttccrtcgttgatctgtgatctatgaggcaagcctcctctccctgtgagcagacagcggtgtcagaggtgtgtaaaccagagcaactccatcttgactagggcct

SEQ ID NO: 123225 - DNA, 201 bp, Homo sapiens
gcctccagggttcaagcaattctcctgcctcagcctcctgagtagctgggattacaggcacacaccagcatgcccggctaatttttgtacttttagtagaratgaggtttcaccatgttggccaggctggtcttgaacttctgaccgtgggtgatccacccctctcggcctcccaaagtgctgggattacaggcatgagcc

SEQ ID NO: 123226 - DNA, 201 bp, Homo sapiens
ttctgaccgtgggtgatccacccctctcggcctcccaaagtgctgggattacaggcatgagccaccgtgcccggccggagtccaagatttttagcaagtgygcatactgttctgtggctagagagggagatggtgggtggggaggatattgccaggattaaagccgggaggaccctgcatcctttgccttccagtagggtt

SEQ ID NO: 123227 - DNA, 201 bp, Homo sapiens
ccgttgacctctctcccccctcctccacaagatgaagtgttaacaagcagaggaaaattagctccactcccccagcacaacatcccctgccctgcagaagwcgtggaagccataagccatccctccctgccttcctcccccttcatcagggctgagtggccagttgtcttcctcccctgaggatttcatcatcctcagata

SEQ ID NO: 123228 - DNA, 201 bp, Homo sapiens
cccctgaggatttcatcatcctcagatatcccagagagtgtttgcagttgttcatcctaaattacactgttgttttagcctgttgtgtgctcagagctgawtaataaacagaaattaagtcacttatttactttttgcttcaaatcacagtgtgcgactcgagtggttgatatctcactgatatttgtgaatgcgtggatg

SEQ ID NO: 123229 - DNA, 201 bp, Homo sapiens
catgcccagctaatttttgtgttttagtagagacgaggtttcaccatgttggccaggatggtcttgatctcttgtggtctcgcgatccacctgccgtagcytccaaagtgctgggattacaggtgtgagccaccacgcccggccaggaaggcattttttagatgtgatttgctgtaaaatgtgtagcctttgagtagagga

SEQ ID NO: 123230 - DNA, 201 bp, Homo sapiens
gagtgactggatctgcttgtgtgttgaatggaattcaaggttccttccatcagtcccaaaacatcattcctaagagctcacatgtgcctgtctgttttttyacaaaaacaccttttgtctcttctaatagtccctgaatgcttaggtaagagtggagaatgagagctctcttctctgacatccaggctctgggcatctctc

SEQ ID NO: 123231 - DNA, 201 bp, Homo sapiens
cctttgggtggttttgagacccagtcactgccacaagaggagggaggcagtttcgtatacacaaccctgacttagctagcagggagggagggcaagggatyctagctgggattcctcctgtaatgccagctctttgggaggcccaggcaggaggatctcttgagcccagaagttggaggctgcagtgagttatgatggcac

SEQ ID NO: 123232 - DNA, 201 bp, Homo sapiens
agtctctggacccatctcttcatcccaggagccttgctttcatggtggaaggccatgaagctctgccagaaatgtcctcattaccctcaggtgccaatttrttgtcacgatcttcaggagctgtcacctgcaacactgagctagctaacatgtcaactgtcccacattgcctgcaaagtcctccatggctgccatcacaca

SEQ ID NO: 123233 - DNA, 201 bp, Homo sapiens
agtaaacctctctagagattagttatttatctttccatcagcccccagaactggcatcatatgggacagtgcacacacaagtcttggtttctgaacttatyggcatcttgtgggggctgtccatggtgttgaggccccactgtagtcatttcagttaatcatataaatggccagaacctcacgggttatccatggtgttga

SEQ ID NO: 123234 - DNA, 201 bp, Homo sapiens
gtccatggtgttgaggccccactgtagtcatttcagttaatcatataaatggccagaacctcacgggttatccatggtgttgacagatttcacaccttacwttccccgggtcctcctatcccagagaacagaacctggagctaaacccttagagcggggtatcattgggagctgtccgtggttctgaaaacagcactccct

SEQ ID NO: 123235 - DNA, 201 bp, Homo sapiens
tgctctgaggtacctacatggtcctgcttgtattgactctgcctgtaacgtcagtcctgccaggccctgaccaaggactggcctctgactgcaaggctgcrttttattccagcctgttgtatgtcaggttccctggaaagcagactgaggcagcgatttgcactcaggaagcttgttgggtttatattatgacaaagaaga

SEQ ID NO: 123236 - DNA, 201 bp, Homo sapiens
tcctttccagaaaaactcattaataatctacccgttatttagcatgtagtcaaaaataaccataaaaataatcaaccagcagccctaagggcttctctgcrtatggaatagccactttttattcctttactgtcttaataaacttgttttcactttgctctgtcagctcactcttgaattctttcctgcacaaagccaaga

SEQ ID NO: 123237 - DNA, 201 bp, Homo sapiens
ggactcagggaaacaagacagcctgtctcaatggctcagtccacacggacagagattgaggtgcaaggggagggagtcccttaatccacacactgctcacrctgggacagctgcgtctccacttcaacccagccagctctgccctgcatgagcttggccatgtgagttcagctgcataccgactgtgctctgttgcaatgc

SEQ ID NO: 123238 - DNA, 201 bp, Homo sapiens
taatgcattataattagcgtataataagcagtgaggacaaccgggggtcactttcatcaccatcttggatttggtgaggtttggccagcttctttaccacrgcctgctttatcagcaaggtctttgtgacctgtatcttgttccaacctcctatgtcattctgtgacttagaatgcctaacctcctgggaatgcagcccag

SEQ ID NO: 123239 - DNA, 201 bp, Homo sapiens
gtaggtcagggctgagccttcctggcacaggggctgaagtcatcagccagggctgccgtaacaaagtccacagactggggagcttgaacaaccatgtttargtgccatctggtcacagagctgtaggaaccagcttctgaccagtgaggctgtagcagcctctcttcccagaggatttttctccctcagctgattttgcac

SEQ ID NO: 123240 - DNA, 201 bp, Homo sapiens
aagacatgcctatcactgtggaaattccaagggtttttgaagcactgtgtctggaaccaagagacaaagaccagatatattctttttttttttttttttttgagatggagtcttgctctgttgcccaggctggagtgcaatgacatgatcttggctcactgaaacctccgcctcctgggttcaagcaattctcctgcctca

SEQ ID NO: 123241 - DNA, 201 bp, Homo sapiens
gaagtgtctttgaaggaggtgaggcagacacgaagtccaaagctgaggggatggggagttgctgaaaatgagtgttccctggagagtggcaaccatccctrgaggtggcaggcgctgagagacagaactcggggggacacctagggagactggactgcagccccagggctgacttcccagccatctgaccagagggaatgg

SEQ ID NO: 123242 - DNA, 201 bp, Homo sapiens
tgaccatatcttctttcgtgcttctttatgtctctccagacacactgggtgtcaagagtgctgtcaccccagggcccttgcacagctgattccctctatawcccttggttcacatgttgccttctcagtcagaactcctcccacatactcacctttggcctcaagctctcccagtcctcctccccctactgtgtttttctt

SEQ ID NO: 123243 - DNA, 201 bp, Homo sapiens
ttgaaaagcaccgattttcacatgagaatggtggacagatttccacatcctggcccgagatttctcaccgatcctgttgctgttgtctcttcccaggccamcctgtttctgcctggcctcttcctccaaggccaagaggggtcctgccaaagtccaggtcagagagtgtcctccctctgctcctgtctcattcagagtcaa

SEQ ID NO: 123244 - DNA, 201 bp, Homo sapiens
tccaggctcggtccaggctcaccactggtacccctcagcagcaggcagatgcacccccacccccacccagccctgcaaccctcccagccaagccagggagrgcctgaggatttcattatgagctcagattatcatcaaggacaagggggagtgatggggaagttacaagctctccttttaataatgaatcccatttcctct

SEQ ID NO: 123245 - DNA, 201 bp, Homo sapiens
agggcccagagcaggtctcaggtgtggagtgaccccgttcccactctgcctggcccagaatgcattggagggaccgggggaggaggaagcggaggtcacartctgtgcatgagatgcctcaggattacctcgggtctggagtgctgggactgctccgagggccaggcattgagcccaaggaggactgaaggctgggggctg

SEQ ID NO: 123246 - DNA, 201 bp, Homo sapiens
tgccgtgtgagtcacagcccagagggcccagagcaggtctcaggtgtggagtgaccccgttcccactctgcctggcccagaatgcattggagggaccgggrgaggaggaagcggaggtcacaatctgtgcatgagatgcctcaggattacctcgggtctggagtgctgggactgctccgagggccaggcattgagcccaag

SEQ ID NO: 123247 - DNA, 201 bp, Homo sapiens
tgagctgtgatcgcacccctgcactccagcctgggtgacagagcaagaccctgtttaaaaaaaaaataaaaataaagagtgttaaaaactttatgtgtcgrgatttatcaagtccccttcttttgccctaatcatttgttttgtagacttggaagctatgttgtgagacgtacaggtttctgttcatggcagtcactccac

SEQ ID NO: 123248 - DNA, 201 bp, Homo sapiens
atttttaaatcaaataaataaggaaatgggaggaatccttcgccctgccctgtgtcccaggaggggtttataagattaattggatctttttttttttttttcttaaagtaaaaattggtgacgccattcaggcctgggggagaaaagccaccaggaggactaggaattgtgaggccaggcaggagctgctggaaactcgct

SEQ ID NO: 123249 - DNA, 201 bp, Homo sapiens
cagacaccccaggctgtctgggtccagggagcttcacagggtcctaaagagggggatggggacctggagcaatttactgtgagttacaaaaaaaaaaaaaatcacatgcagtcggacctgaaccatgcacagtgagcctggctttacacttgagcatgacacgtgatacccactgtctcctccagcagctctcttgaaggc

SEQ ID NO: 123250 - DNA, 201 bp, Homo sapiens
ttgtatgtactttactcttgttttagtccgtctgctggtttggaagttacacattctattttttattctcccagtgtttacctttatgttgctaatatacrcacttggtttaacccaatatgatttaaataaaaatgtctactttcctccaaaacaacataatgatcttggaacactttaattctgatcatactcccatcc

SEQ ID NO: 123251 - DNA, 201 bp, Homo sapiens
tatttttttttttaggattggagaaatcacagtatatctgtatgctgatgagactgatagaatagaatgtgaaaaacaggtagttcagaggggagaactgyttgagcccagtccttgagaagcttagagtattggagctggtggatgtgggggattggccataggtagaagcacagacaattctcgtagggtcaaagccgg

SEQ ID NO: 123252 - DNA, 201 bp, Homo sapiens
ccctgggcagggtttgaggagcagcagggttaagggctcccccagatctgagctgccacacctcagcttgcggtgaggagttttctgcaaggaaacttctrtctccccaggggggcaaggtggcacaccggctggggattggtggtgtattggaactggttcccatagctgaagatggaagggaagaagggggctggtaaa

SEQ ID NO: 123253 - DNA, 201 bp, Homo sapiens
gttttatggctattcctgaattatttctgtttcctccgatgtcatctttttctgtttgcttcttttgatgtctcttgtggtggaggctgtcctcagatgcytgatgagccctagttacccattcatagttgagagtggagcaataaacatgtgattgattttgttttgtttttgagacagggtctcactcggtcacccaga

SEQ ID NO: 123254 - DNA, 201 bp, Homo sapiens
ctggctcttagggacttacctgttcctaaacccatggtaggctgggtgagtcctcttctgccaggatcagagtcctcggggaacaggattgctgtttctgscccgagaccccttcttgaggtcaggactgggggtgaggcactgaccagcttctcagtctcagcctagatctccgccccaccaccccctgggcagggtttg

SEQ ID NO: 123255 - DNA, 201 bp, Homo sapiens
tctgccaggaagcagacctgaccttgggcagcaactaggaggaagacctgctgagctggggtgaaggttgccagggtcattctcccgttggccaggagctrggtgtgttctggctgtagctggactgctcccagctggtggccacaggcagaggagtgggagtttctgaaatgagtatacgtgtgtgcacacatgtctaca

SEQ ID NO: 123256 - DNA, 201 bp, Homo sapiens
taaggtgtttaaaatggatactggcacatggtcagctctacgtaagccttggtgattaatgttctcttgagtgccctagagactctgtactgacactgacrcagttgcccagaagtcattagtgtaagtgatccggaaggaccctgcctttgttttagtccctggggatgcattttggccagagtctatgattatcagttt

SEQ ID NO: 123257 - DNA, 201 bp, Homo sapiens
gatgtatataaggtgtttaaaatggatactggcacatggtcagctctacgtaagccttggtgattaatgttctcttgagtgccctagagactctgtactgrcactgacacagttgcccagaagtcattagtgtaagtgatccggaaggaccctgcctttgttttagtccctggggatgcattttggccagagtctatgatt

SEQ ID NO: 123258 - DNA, 201 bp, Homo sapiens
ttagtagagacgatgtttcaccctgttagccaggatggtctcgatctcatgaccttgtgatctgcctgcctcggcctcccaaagtgctgggattacaggcrtgagccaccgtgcccagtcgaaagtgaacctttcactgggtgtggtggctcacgcctgtaatcccagctctttgggaggcccaggcaggaggatcgcttg

SEQ ID NO: 123259 - DNA, 201 bp, Homo sapiens
aagatgttgggtgagtctatgggctgaagtttaccgtatttttaatcatctgagaaaagaccaactgcaccaaactttcaaaattgatcattctgaatagygcttggcatactcagcagacatgattgaaatagttttgcagacacagcgtaaacataaaataccaaccccatcacctgtcctgacacacaccagcagtgg

SEQ ID NO: 123260 - DNA, 201 bp, Homo sapiens
gccaccactcccgactccattgctggactgttttctaaaggggtcgtactgatgtttccacctcctcaccagtatatgcatgagtgttccgtacgtaactytcccactccacgtcctgtccaatacttggcattgtgagtttttcccattttagccattctatgagtatgccgaggtatcacaccgtggttttaattttat

SEQ ID NO: 123261 - DNA, 201 bp, Homo sapiens
ttgggattacaggcataagccaccacacctggccacacacttatttttaagggacaaagtcttgctctgttgctcaggctggaatgtagtggtgcaatcayagctcactgcatcctcatcctcctagctcaagggatcctctcacagcagcctctcaaatagctgggaatacaggcacacaccaccatactcaactaatat

SEQ ID NO: 123262 - DNA, 201 bp, Homo sapiens
cttgaacttcttgcctcaagcaatccttctgcctcagtctcctaaagtgctgggattgcagatgtgagccagcatgcctgtcctctttttttggggggggsgcgggtggggtgacggagtctcgctctgttacccagcctggagtgtacagtggtgtgatctcggctcactgcaacctctgtctcccaggttcaagcagtc

SEQ ID NO: 123263 - DNA, 201 bp, Homo sapiens
tctgtccagcctttaacacccctcagcatggggcctgcggcaccagctcccaaatgaacaatgacagaatgagtgttttccctccaacggcgccaggaggrgtcagggatcggggtagcatcgtggtgtttcccccttctgggcagcggaggggccctgcttggccagccattcagaccccaccaaccctgcacctaggat

SEQ ID NO: 123264 - DNA, 201 bp, Homo sapiens
tcatggatcttagggactctgccaggaaaggctcagggtcacacaaagaccccgtgatggtgtctgtgttgtagaggaagaccgaggaactctccaatatrcctgggtggaggtatcttcaaatggacaggatgcgtggccggagcctgccgtccatccactgaaaagtcactttctgaagtgacccctggacaaaggatc

SEQ ID NO: 123265 - DNA, 201 bp, Homo sapiens
ccagcatgcttctggttgccttgacaactcaacaggttaaacttcttttctgggcatcagtgtctgctcaggcaggaggtgacagaacccctggaggtgtscagatcttcagcaggcagatgactcagagctcaggctgaccttcaccttgctgggctagctggccttgggttgtccctggctgcctgcatgagcttacga

SEQ ID NO: 123266 - DNA, 201 bp, Homo sapiens
cccaggaagtcaaggctgcagtgagctgtgatggcaccactgcctccggcctgggggacctagtgagaccctgtcccccaaaaaggtttaaaaagcaggakgggccaggtgcagtggctcacgcctgtaatcctagcactttgggaggcagaggcaggcggatcacttgaggccaggagttcgagaccatcctggccaaca

SEQ ID NO: 123267 - DNA, 201 bp, Homo sapiens
ttttttttgagatggagtctcactctgtcgaccaggctggagtgcagtggtgcagtctcggttcactgcaacctctgcctcccaagctcaagtgactctcytgcctcagcctcccaagtagctgggattacaggcacctgccaccacgcctggctgatttttgtattttagtagagacagggtttcaccatgttgaccagg

SEQ ID NO: 123268 - DNA, 201 bp, Homo sapiens
gtggaaaccagcagatggtgatgaaagcagtcccgggctgccctcattgcccattagcataaaacacacttgccagcgccatgacagtttacaaatgccayggcaatgacccggaagttgccgcccctttcacatcagcaacccggagtttactgcccctttcctgcaaagctctaaataacccaccccttgatttgcatt

SEQ ID NO: 123269 - DNA, 201 bp, Homo sapiens
ctgcactgtcagatcctctaacccaagagaatcctcccttatcaattactgctctatccaactttgtgttctgcttttttctttttttcttttttttttttgagatggagtctcactctgtcgaccaggctggagtgcagtggtgcagtctcggttcactgcaacctctgcctcccaagctcaagtgactctcctgcctca

SEQ ID NO: 123270 - DNA, 201 bp, Homo sapiens
ctttctgtctctatgaattggactactcctggtacttcacacaagtggaattatacagtatttgtccgtttgtgtctggcttgcttcacttaacatgatgkcttcaagagtcacccatgttgtagcatgtgttgctatcattgactttttgattgacacatgcaagctgtaattttttgggggggttcctagcatcacaat

SEQ ID NO: 123271 - DNA, 201 bp, Homo sapiens
caatatattttaaaggtttggggatgcattagtccacttttgtgttgctgtaaagaaatacttgaggttgagtaatttataaggaaaagaggtttaattckcttgtggttctgcaggctgtacaggaagcatggtgttggcatctgctcggcttctggggagggcttcaggaagctcacaatcatggcagaaggcaaagtg

SEQ ID NO: 123272 - DNA, 201 bp, Homo sapiens
aattttgtggcatctcaatggtgtgtgtcttttgtgtaaacattgcacctgttaatgtgtatgtatatgtagagggagaatcaacatttgtctttaaaagkgtatttgtcttcaagctctgtgatctgaaatctgtcatactgacatgaggaggcaaaagtgaggtcctggtggcgagcgggcctcgggtatttcaagctt

SEQ ID NO: 123273 - DNA, 201 bp, Homo sapiens
agggctatggtggcaagctttaggaccttgtgagcctgattcacccggtaatctccacctcggaacgccctttctccccgctgcagagcatggggctgggsgggagtggagagaaccctgccttgtaacagggcagcggacagcaggtaaattgccttccccgggagtagcgtgccgcccggcaggggcctgggtgtgcca

SEQ ID NO: 123274 - DNA, 201 bp, Homo sapiens
tctcccagacgtccaaccaggatggagctttagcttgactggtgggaacagtccagggtgctgtgtggcagcccctcaagtgtttgcccacctgcatgccmgctccagcctctgccacgtctcacagggacaactgtcccagctgtcagaggcaggggtgacagcctctcaaatagactagctaagaacagagctgggaga

SEQ ID NO: 123275 - DNA, 201 bp, Homo sapiens
cggctcaggggcacctgtctgcagcctgatcctccttcttccgagcagctcagccctgcagagccatcctagcctggcccatccttgtgtctctcacttgyggatgcagcagagctaaaggctggaaatgacattctcaggatgcccaccacccatgcaccccccaggggctcaggatggtgccttcctgtggacttccgg

SEQ ID NO: 123276 - DNA, 201 bp, Homo sapiens
tgtaaagatgcaccattagtttatttagccagctcctttctggttcatatttaaactgtttgtagttttatggctattcctgaattatttctgtttcctcygatgtcatctttttctgtttgcttcttttgatgtctcttgtggtggaggctgtcctcagatgcttgatgagccctagttacccattcatagttgagagtg

SEQ ID NO: 123277 - DNA, 201 bp, Homo sapiens
atccttcgccctgccctgtgtcccaggaggggtttataagattaattggatctttttttttttttttcttaaagtaaaaattggtgacgccattcaggccwgggggagaaaagccaccaggaggactaggaattgtgaggccaggcaggagctgctggaaactcgctggggctgtttatttttcttgcctgaaccctccct

SEQ ID NO: 123278 - DNA, 201 bp, Homo sapiens
gagggaccctcagttccaggaactcccagctcctttccagaaaaactcattaataatctacccgttatttagcatgtagtcaaaaataaccataaaaatartcaaccagcagccctaagggcttctctgcgtatggaatagccactttttattcctttactgtcttaataaacttgttttcactttgctctgtcagctcac

SEQ ID NO: 123279 - DNA, 201 bp, Homo sapiens
aaaagccctggaggctccctggcctgttgggcaatggaagtggacgtggagtggacagcgccaatgggtgtggggcaacctgccagcagactcagccaccrgaagccccgggcacatggaaacgcggccacacaaacggccccatcaggaaatcccaaaagaccaagaagcacgactcaaactccaccacagacagggacc

SEQ ID NO: 123280 - DNA, 201 bp, Homo sapiens
aaaagaacagcaatccatccctgcaccatgcggccccctgagcttttccaacaccgtcttttcatagatgatgtgcccttggtcaaactaaggcagaaggrccattcctgtcatcagctgctccactcctgcccctcagcgttttcatgaagaccgtggtgaagcctcctttctttgggtgtggcttgcccctccctcctc

SEQ ID NO: 123281 - DNA, 201 bp, Homo sapiens; identical to SEQ ID NO: 20795

SEQ ID NO: 123282 - DNA, 201 bp, Homo sapiens
ccattgcccccgccactaaatcttttgtgcccacttcaatcactccccattttcaccctcagccccaggcaactacaaatctcctttttatcactatagcrctaccctttctaaacatttcatatcaatgtaatcatacactgtgtggtctatcatatctggtttctttcactctgcatgatggttttgagagtcatattt

SEQ ID NO: 123283 - DNA, 201 bp, Homo sapiens
gatttcgaactcctaacctcaggtgatccaccttccttagcctcccaaagtgctgggattacaggtgtgagccaccccaaccagccaggtaatgacttctrttgagatttttttcctgtagtccaatataagcccattttgctaaataatctgtaagtaaactatattctgtttgctgagcacaaaaatgtgagagggagt

SEQ ID NO: 123284 - DNA, 201 bp, Homo sapiens
aataaagttcaacatcaggccaaggcagccccaccacgtaagttctgagagtcagataaatctcagtgcacacagcccttgggaaactggggagggctggraagaaaattaggagctcacattggatccattcttggaaagaaaaatgtgtccagcctttcccaggagccttgggaacaaagcccagggctctggacccat

SEQ ID NO: 123285 - DNA, 201 bp, Homo sapiens
tctctgccaagatgacacgtctaagaggcttagtcttctttatgctgtggatcctgaggaaatccacttagatattctgtgttccctgatccgccacatawgattcctttatctcttgttgtcatgggaagtatatattaactgattaatattaatgtgttggccgattaatattcatatctgaaccgattcgtatttcac

SEQ ID NO: 123286 - DNA, 201 bp, Homo sapiens
gactctgaggaggagaggtggtttagcagagccagctgccataaccagaagaaaataattaaggaaatctggcagagtagaggaaaaccaagtggtgcagygggtcccttctagtgaagggagctgtcatcatcggctgcgggagagaaaggagctctggaggctcgtgctgggacagctgcagtaatgatgggatgggga

SEQ ID NO: 123287 - DNA, 201 bp, Homo sapiens
ccttgtgtctctcacttgcggatgcagcagagctaaaggctggaaatgacattctcaggatgcccaccacccatgcaccccccaggggctcaggatggtgycttcctgtggacttccggatttccaaaatccctgctgtctgcaaccacagattttcacagaagcctctggcactggaaaccttctgatgcccctgtcaaa

SEQ ID NO: 123288 - DNA, 201 bp, Homo sapiens
acctgactccagcttcaaggccctgccctgggagattcaccccggctctgaaatgtagactgcagctatccagaccctcggcagggaagagccggactgayggccagagcccctgagtgctccgggcagtctctggccttgtccctgcaacctgtgaattgccagagtctctgttctgttctggtggggtggggtgggggg

SEQ ID NO: 123289 - DNA, 201 bp, Homo sapiens
tactgtcctctcctctgtttgcttttcaggaataaagttcaacatcaggccaaggcagccccaccacgtaagttctgagagtcagataaatctcagtgcayacagcccttgggaaactggggagggctgggaagaaaattaggagctcacattggatccattcttggaaagaaaaatgtgtccagcctttcccaggagcct

SEQ ID NO: 123290 - DNA, 201 bp, Homo sapiens
ccaccaggaggactaggaattgtgaggccaggcaggagctgctggaaactcgctggggctgtttatttttcttgcctgaaccctccctcttctctgcccctggaaggctggattttcttattgtctgttggtcttgggatgggtgtaagcaggtgaaggcaggttttgcccttgtcatcggagctgagagtgatatagtct

SEQ ID NO: 123291 - DNA, 201 bp, Homo sapiens
tctctccctccttccaaaatgtcttgatgttggaggctaccctaggtcaaactggcttcccggtgtctgactcaggaggctgcaggaagcgcacccacacsgtggccagcttactcaggggctcgcgacagttgctttccagctggggccttgctggggaccatcgatggtatgtgtgcaggcactggccggcatgcaccc

SEQ ID NO: 123292 - DNA, 201 bp, Homo sapiens
aatgtgtccctcagccctggggcagtggagacctcacaagggcagagcctgagccggtgggagaggagccagagaaggtgtggcccggtcccaaagcaggscccggcctggcatactgtggatggtgaaaggagctggcagagccagtcttcatggccacccagccagggctgggggtggacagactcctccagtgggatt

SEQ ID NO: 123293 - DNA, 201 bp, Homo sapiens
gggctcgcgacagttgctttccagctggggccttgctggggaccatcgatggtatgtgtgcaggcactggccggcatgcacccgggcatgtatgcatatgygtgttattgaacccgcgtctgcttaggtccgtgggtgcggtgcacatgtgaacaccgtccccatgaccgtgcaatagcagctgctcccgagagaccttgc

SEQ ID NO: 123294 - DNA, 201 bp, Homo sapiens
ctcagccaccagaagccccgggcacatggaaacgcggccacacaaacggccccatcaggaaatcccaaaagaccaagaagcacgactcaaactccaccacrgacagggacctgggactggcatggccgctcctgccctccttccccagttctctcccatgcctgtccctctgcagatttgactctttaaggacagtcgcag

SEQ ID NO: 123295 - DNA, 201 bp, Homo sapiens
catgtgcaggaaagtgtccctggtcatgggtgcatttggtgaagccagaggcagtgcccctatggcatctgctcagcagggaacacctgaactctccgctracacagcatctgggagcagcttggagacagtgaggatgacacagcccctcccctgggtgagcgtgtgtgtgcgtctgcatgtgtgtgtcgggggagaagg

SEQ ID NO: 123296 - DNA, 201 bp, Homo sapiens
tgtgaacaccgtccccatgaccgtgcaatagcagctgctcccgagagaccttgcaggttcttcctggtccccatctgagagccatggcccccctgtgtcgktgcgtgacatcttttccattcttctaactcctttctatgactgcctggggctcccccgagtgaggctggagagaacagctttgcctgccttgtcagctgc

SEQ ID NO: 123297 - DNA, 201 bp, Homo sapiens
ctggggcttaaacagccacccagctgtggcctcagaggctactgggagctgcctacctggcctcacctccctcaggcactgacctgtgccagggtggggawgttccctccagcgctcttgggtggaaaaagggtgatcctctcggcctagccagcaaggcccgctggaaagtaaggggacagagtgactgaccttcaaagc

SEQ ID NO: 123298 - DNA, 201 bp, Homo sapiens
aattctccggcctcagcctctcgagtagctgggattacaggcatgcaccaccacccctggctaattttgtatttttagtagagacagggtttctccatgtyggtcaggctgatctcgaatccccaacctcaggtgatctgcccacctcggcctcccaaagtgctgggattacaggtgagagccaccgtgcccagcctcagc

SEQ ID NO: 123299 - DNA, 201 bp, Homo sapiens
agggacccctggcacagacaatgggattggacagcccccgatgactcctaggtctgtggcctgtcttggggcactcctgcagggcatggggaaatttaacratgaagataataatgaatattgactgaacatttaccatgggccaggcctcgtattgagaactttacttttttgagacagagtctcgctctgtagcccagg

SEQ ID NO: 123300 - DNA, 201 bp, Homo sapiens
tgtggcctgtcttggggcactcctgcagggcatggggaaatttaacgatgaagataataatgaatattgactgaacatttaccatgggccaggcctcgtaytgagaactttacttttttgagacagagtctcgctctgtagcccaggctggagtgcagtggcatgatcttggctcactgcaacttccgcctcccaggttca

SEQ ID NO: 123301 - DNA, 201 bp, Homo sapiens
aatgccataacctcacactgttcagtagattttcttgaataaacgcttcttgatatgttgtatgcttttggtcaatttctggagtttttttttttttttttaaggggtagggtctcactctgtcacccagactggagtgcagaggtatgatcatagctcactgcagcctcaagctcctgagctcaggcgatcctccctcag

SEQ ID NO: 123302 - DNA, 201 bp, Homo sapiens
actcttcttgattccctcttccacgagttaatgtgtcagcgcacagccatggcaaccactccccgccctccctccaccccaggcagccacctctaggttgyggctgaagctgggacctggagtcagaccacctgggttcaatcctagccttaccactcggtcactgtgtgggctagggacccagtttcctcatccacaaaa

SEQ ID NO: 123303 - DNA, 201 bp, Homo sapiens
ggtgtaatcctcaggccagagccttccagagcttctcttgccccagcccttggctggacctgactccagcttcaaggccctgccctgggagattcaccccrgctctgaaatgtagactgcagctatccagaccctcggcagggaagagccggactgatggccagagcccctgagtgctccgggcagtctctggccttgtcc

SEQ ID NO: 123304 - DNA, 201 bp, Homo sapiens
gactgggcagtttataaagaaaagaggtttcattggctcacggctctgcaggctggacaggaagtgtggccccagcatccacttggtttcttggcgggggsgggcggtgctcaaagagcttttactcatggcagcgggcaagcgggagtgtgcgtgtcacctggtgaaagcaggaacaaagggtgagacttgggggcaggc

SEQ ID NO: 123305 - DNA, 201 bp, Homo sapiens
aataacaggaatcacctaattaaattaggaaacagacatcacatcgctgtaatctgaaaattgatattaatagaaacggtcccagaattgttatgctaaargttcctaggggcggggaaattaaaaaggagagcagaatagaaaattgggacaatcatgtccaataagagtgagacttatgttttaaaaggaactacagta

SEQ ID NO: 123306 - DNA, 201 bp, Homo sapiens
tcattattactgttgattatttcaacttacagctgtttaccagtttcttttctcactcttgcttattgcattctactcttttttgtgtgtgtgagagttcygttttcaactgcctcacataaccccttagtagttctttcagggaaggcctatgtaaactctcttggacattgttcatttaaatattatttttccctgcat

SEQ ID NO: 123307 - DNA, 201 bp, Homo sapiens
tatcagcttgtttttcctcatggcgaatcatttcctttggtagattataatttctgtgcaatattctagggaagcaaaaattatccaaactaatttaagaytgttgacttttaaacattggtagccctgtgcttcctaggttgtggagatgttgcttcagaacatttcaaaaattgtttctgctgggagcctccatgggtt

SEQ ID NO: 123308 - DNA, 201 bp, Homo sapiens
tgcaattatggctcactgcagccttgaaatccagggctcaggcgatcctcccacctcagcctcccaaaatagctgggaccacaggcgcacaccaccacacygggctaattttaaaaatatttctgtagtgacagcatctccctgtgttgctcaggctagtctcgaactcctgggctcaagtgaccctcctgccttgacctc

SEQ ID NO: 123309 - DNA, 201 bp, Homo sapiens
cagcctcccaaagtgctgggattgcaggcgtgagccaccgcacccggtcaccacattttctttatctgctcattggttgatgggcacttaggttggttccrtatctttgcagttgtgaattgtgctgcaataagtatgcatgagcatgtgtctttttcatatgatgagttttcctctgagtagatacccaggagtgggatt

SEQ ID NO: 123310 - DNA, 201 bp, Homo sapiens
tcctggattgaatggtagttctacttttggttttttaaggcaggggtctccaacccctgcgttaggacccaggccgcacagtaagaggtgagtggtgcgcragctatcaaagctgagctcggcctactgtcagatcggtggccacattagagtccagaagagctcgaaccctcttgtgaactgcatatacaagggatctag

SEQ ID NO: 123311 - DNA, 201 bp, Homo sapiens
tcctggtgccaaaaatgttggggaccgctgctttaaggaatctccacactgtttcccatagtggttgtactaatttacattcccaccagcagtgaaaagcrttcccttttcaccacatccatgccaacattattgttttttaagtttttttttttttttgagacggagttttgctctcgttgcccaggctagagtccaatg

SEQ ID NO: 123312 - DNA, 201 bp, Homo sapiens
ccaccacgtaagttctgagagtcagataaatctcagtgcacacagcccttgggaaactggggagggctgggaagaaaattaggagctcacattggatccaytcttggaaagaaaaatgtgtccagcctttcccaggagccttgggaacaaagcccagggctctggacccatgaattttcccttccttgttagaaggcttct

SEQ ID NO: 123313 - DNA, 201 bp, Homo sapiens
tgctttaaggaatctccacactgtttcccatagtggttgtactaatttacattcccaccagcagtgaaaagcgttcccttttcaccacatccatgccaacrttattgttttttaagtttttttttttttttgagacggagttttgctctcgttgcccaggctagagtccaatggtacaatcttggctcaccacaacctctg

SEQ ID NO: 123314 - DNA, 201 bp, Homo sapiens
gttcactgtaccacactgtctgcccagcacttggggtacccagtattgttgtgttccggacctggagcagagcctgggcagagagaacagtgtggataaargattggagtcctgagagaatgcggcacgtggagaactttaagtgatttaggggctgcagcatgacctgtggatctagactcctggctgaagacacagccg

SEQ ID NO: 123315 - DNA, 201 bp, Homo sapiens
tctcaaaaagaaaaaaaaaaaaaaagaaagaaagaaagaaagaaagctcattctggtggctgcctgttgtgtggccgtgggcagagagcagacagggagakgcaacaaatgcaaggagattgggggcagccaaggatatcgcatgcagtgttggagacctttcaaatgagaggacaaggaggtgaggagggcggggagggc

SEQ ID NO: 123316 - DNA, 201 bp, Homo sapiens
cagggagaggcaacaaatgcaaggagattgggggcagccaaggatatcgcatgcagtgttggagacctttcaaatgagaggacaaggaggtgaggagggcrgggagggcagtggtcttggttcagggggacttgggtttctggctctagaggagggaggttgggggtgccattcactggggcagatgtgccagatggggag

SEQ ID NO: 123317 - DNA, 201 bp, Homo sapiens
tatctacctggagatgcgggtgtgggtgcccgtgggtgtaaatggaggaggatttctgacttggcagcctgcttcccacagtgatggggtgtggcaggcawggccaccctggctccctttctgcccccctagggcaccatggcagccacactcagcaagggtccctttggagaggggcctggcctggcccagcaagggact

SEQ ID NO: 123318 - DNA, 201 bp, Homo sapiens
gaagtaataacaggaatcacctaattaaattaggaaacagacatcacatcgctgtaatctgaaaattgatattaatagaaacggtcccagaattgttatgmtaaaagttcctaggggcggggaaattaaaaaggagagcagaatagaaaattgggacaatcatgtccaataagagtgagacttatgttttaaaaggaacta

SEQ ID NO: 123319 - DNA, 201 bp, Homo sapiens
caaactacatcaagacagcccctttatggggccaccccagcctcgggctccagcctgactcacttgcttctatttgctggtaaccccacaatgggaattcmccattatttagaccaaatgaggtgccttcctgcagagctggctgcagagtggtcaccacgtgccatgtcagccagacaagaggaggcgttgacatccgtc

SEQ ID NO: 123320 - DNA, 201 bp, Homo sapiens
ggcagccctgccacctggaaccccacgtacctgtcccgtgtcctagggcagcaggtggccgtgactgtgacagaggctggtctccaggctgtgccctgggracccagcagagaatgtaagaagttggattttcccatgaacacagatgagaattgaagcccttgggtgaggcttttttccgggcgttctgtgcccaggagt

SEQ ID NO: 123321 - DNA, 201 bp, Homo sapiens
tctgtttatgtaagctaataagtctgggaaagttcaaaaacgacttttttgccgtatggttgttgagaaagtgtgtctggtgggctactctcagaatttgycttcagttctcttaaaaaggggagagtcagatttgcctgattggaaacctcgcgcaggctgctcccctgctctgagctctgagttcctgccagaggcagc

SEQ ID NO: 123322 - DNA, 201 bp, Homo sapiens
cccttctccttggacatgctggtatagcctcctccccaactctgccccaaacccaggcctgatgactaagaaactggcctcacacactcatcagtctctgyctctcctcaatcaggaggcttttcagctaaacgctgagaacttcagccaatgaagagttcacactgtggaacacatttggcagtgcccataactcacgcc

SEQ ID NO: 123323 - DNA, 201 bp, Homo sapiens
gacaggagaagagaggtaactcaagacaccgaaagtggggtgtgcgtggttggtcttggattctgtcgcaggggtggaggtggggaggcagggaaggtgcrtggcagcattggtggcgttggatggaagaggaggtgggttgtggctggagttgctctgcaaggccactgatgttatctagattgtacgttttatttgggg

SEQ ID NO: 123324 - DNA, 201 bp, Homo sapiens
gccattgtgcccagccaacatacatacttaactataaattttttagcaagtctaaagttattatctctgttatcctccaaaacaagcaaggacctttgcayaccagaactgtacactgagcattctctcttgtcttccttattgttataactgagaatttttcccaccttaatacaaaaaagtatcattaatatttacagt

SEQ ID NO: 123325 - DNA, 201 bp, Homo sapiens
tcccacccataagtgccccccacggcactggtaccactgacccctggtggcaaaccttcctcatcctcgtgagcccttagctgtacttccctgagcgctgrtggagctgtccagggtcctgacgtgcagcccacttggggatgtgcagacccctgccccaggatacctaaggtttctcctggttttcacttgcccagagcc

SEQ ID NO: 123326 - DNA, 201 bp, Homo sapiens
ttactacattgtttcctgggcatctcttgatgccagaatgtttacagctgttctaactgttggtaagtctcttttcttcctgtaaactttgaggtttttcyctttgttttgatattctggagttttaccaagattacgaatttatttttactgtttagcagtttgtgtacatttttctggaacattctcagccattatcct

SEQ ID NO: 123327 - DNA, 201 bp, Homo sapiens
attttttcatctttgtgtaccatctcatgtcagcgacggaaagtgcaagttcttaggcagatgtgtttgcgatgggggaagatgcggagaaacaggaagaraagctgggcagggactctgactggccgggcagtcggggcccacacaaccagaggagctgactgtcaaagcaagagtgttggggaacgatgagaaatgagg

SEQ ID NO: 123328 - DNA, 201 bp, Homo sapiens
agaaagagaaatgacattttctgagccgccaagaaagaagaggcctgaatggggaagggctgagttcagggacctggatgaagacatcacgtggggtgacrctgtggttgaggatggacccaggcaggacgcgcccaggtccaccactccctgtgaccccatgagattccccaaatcctcagaaggggagacacttcctgg

SEQ ID NO: 123329 - DNA, 201 bp, Homo sapiens
gcgcagtggctcatgcctgtaattccaacactttgggaggctgaggcggtggatcacctgaggtcaggagttagagaccagcctgggcaacatggcaaaamcccgcctctactaaaaatacaaaaataagccgggcgtgatggcatgggcctgtagtcccagctacttgggagactgaggcaggagaattgcttgaactca

SEQ ID NO: 123330 - DNA, 201 bp, Homo sapiens
caagaaagaagaggcctgaatggggaagggctgagttcagggacctggatgaagacatcacgtggggtgacgctgtggttgaggatggacccaggcaggaygcgcccaggtccaccactccctgtgaccccatgagattccccaaatcctcagaaggggagacacttcctgggtttgcaatcacctccagtttatgtatat

SEQ ID NO: 123331 - DNA, 201 bp, Homo sapiens
cctttatccagtgagctgagatcacggcaactacaatcctttatccagtgagctgagatcgtgccactgcacttcagcctgggcgacaaagcgagactccrtctcaaaaagaaaaaaaaaaaaaaagaaagaaagaaagaaagaaagctcattctggtggctgcctgttgtgtggccgtgggcagagagcagacagggaga

SEQ ID NO: 123332 - DNA, 201 bp, Homo sapiens
aggcccttgcagtgtggtagaggatccagccttggcctctggcaacaaggagctctggggaccccggagtagggagtggtgcatcagaaagctcattctgrgctgggcgcagtggctcatgcctgtaattccaacactttgggaggctgaggcggtggatcacctgaggtcaggagttagagaccagcctgggcaacatgg

SEQ ID NO: 123333 - DNA, 201 bp, Homo sapiens
gacgagtgaatattcatttggaaatgtcaatgagtaactggagatgatgcctgcagtgacttgcctggcaggatcaattccagacatgaggtgaaccagaygttggcggggacctaaggtgggagccagggaccctgggtggggcagggggagtggtggaggccagagaatgtgtaggacagtgaggtcagacacatttcc

SEQ ID NO: 123334 - DNA, 201 bp, Homo sapiens
ggcaaaaacacacacaaagccacactgtatgtcctctatttacatatttgtaagttcatatctaaaagtctgaaaggaattatgccaatgatcgcagttcsgagtggactggattggggcgactttcaaaggaatcttcacttccactgtattgtttgaagttttttcctgtgagaatgcattcctgtgtacttgtgtaat

SEQ ID NO: 123335 - DNA, 201 bp, Homo sapiens
gttgtagttcttttaaaagaactacaatcctttatccagtgagctgagatcgcgccaactacaatcctttatccagtgagctgagatcacggcaactacartcctttatccagtgagctgagatcgtgccactgcacttcagcctgggcgacaaagcgagactccgtctcaaaaagaaaaaaaaaaaaaaagaaagaaaga

SEQ ID NO: 123336 - DNA, 201 bp, Homo sapiens
aagccacactgtatgtcctctatttacatatttgtaagttcatatctaaaagtctgaaaggaattatgccaatgatcgcagttcggagtggactggattgrggcgactttcaaaggaatcttcacttccactgtattgtttgaagttttttcctgtgagaatgcattcctgtgtacttgtgtaatttaaagagatatatgg

SEQ ID NO: 123337 - DNA, 201 bp, Homo sapiens
catcatggagctgggggaacatacaacctccaccatattggatgttgggcttgtccaaagatgtgtcaaatgggaagagctgtctgggctttgtgaggggkgaaagatagcctccgagcaattagggtttggaaaaatagggtaatcatcttaccacctaccccagaagtggtcatgaagagcagcagctctccagggagg

SEQ ID NO: 123338 - DNA, 201 bp, Homo sapiens
gaagtggtcatgaagagcagcagctctccagggaggtggaagggaggaagaacagatcaggtgaccctctggcaagtgtatgagaatctccaaggagggargggaagagttgtaagacttgaatattgaataattggagaggctttttttgtggggggcttcaaaatataaagttatatttttataatcaaatgatagaaa

SEQ ID NO: 123339 - DNA, 201 bp, Homo sapiens
tgggttcttctgatatgaactgaaattgtcaaagatgttgggtgagtctatgggctgaagtttaccgtatttttaatcatctgagaaaagaccaactgcaycaaactttcaaaattgatcattctgaatagtgcttggcatactcagcagacatgattgaaatagttttgcagacacagcgtaaacataaaataccaaccc

SEQ ID NO: 123340 - DNA, 201 bp, Homo sapiens
gttgggggtgccattcactggggcagatgtgccagatggggagaggtcggggcaatggggcaagagatcacaggttccatttggggcttatggtgtctgaratgcttggcagggtgtgtggagtctccctgtagctcctccaccgaggggtgtccagccccacagaatgaaggaccaggcaagacaggcaggaagccccca

SEQ ID NO: 123341 - DNA, 201 bp, Homo sapiens
gcccaagattggcatccatactcaggtttggtgtctttttttaagagatgggatctcactatgttgcccagactcaacatgggagctcaaactcctgggcycaagcaatcctcctgccccagcctcccgagtagctgggattccatgtgtgcaccaccacgccagtattatgctcaagtttgacccctcaaagaagctggt

SEQ ID NO: 123342 - DNA, 201 bp, Homo sapiens
ggagtctccctgtagctcctccaccgaggggtgtccagccccacagaatgaaggaccaggcaagacaggcaggaagcccccaccatgccctcgcccctctrcacctgcgtttccactcacaggtcgacacactcactcctttaccctcatacaccccaggcctggacgctggcaccatgcagggtggggagggctatggga

SEQ ID NO: 123343 - DNA, 201 bp, Homo sapiens
tgtagctcctccaccgaggggtgtccagccccacagaatgaaggaccaggcaagacaggcaggaagcccccaccatgccctcgcccctctgcacctgcgtytccactcacaggtcgacacactcactcctttaccctcatacaccccaggcctggacgctggcaccatgcagggtggggagggctatgggagagccttgcc

SEQ ID NO: 123344 - DNA, 201 bp, Homo sapiens
agagccttgccctgggagaggggctggcagctctggacttacatctactccacatttccaggccaggaaaccagtatcctggaagctgtccctgctccccrttgggctggatgccagcatggagattcatgcttttcagcccaaacctcacattgtcctgggatgggacctccatgcctgggtccctgggcttgccagcca

SEQ ID NO: 123345 - DNA, 201 bp, Homo sapiens
tgggtggggtccttgtcacagtgtttcttccaagcgtggctctggaagtcctgccctccttttttctcataaactccagaatgtcttcgtgggggttcctyctaggccaggccagccatcattatgcacaattggaggtggggaggggcagagagggtggccagagcccaggggcacagaaagccaagccccagttgctac

SEQ ID NO: 123346 - DNA, 201 bp, Homo sapiens
aagacttctgagagggtgggctggccccatcctagctccccaccaagctctgtgcctggtcttggttttccaccagggcgggactgcagggatgatgatcygtgagcccctcactacatctggttgtgtccaaaggtgcttcaccatgggaaggctgctcctggcattcctcaagtcctggatggagtcccaagaccccat

SEQ ID NO: 123347 - DNA, 201 bp, Homo sapiens
atacgggattgttgatacttttggccattaggactaatgctgctatgaacattcatgtgaaagtttttatgcaaacctatgttttcatttttcttgggtaratatttaggagtagaatggctaggttgtaatagtaaatttacgttaaatttaagggatactgacaaactgttggctaaaattgctgtaccattttacatt

SEQ ID NO: 123348 - DNA, 201 bp, Homo sapiens
acgttttgtgtattgtgtgaggtctgacttcttctctttgcatgtgaatatccagttatcccagttcccagcacgtgctgaagactatctgttccctatcraattgccttcgcaccttggtcaaaaataaattgaccataaatttaagagtttatttctggaatctcaatttatttcattgatctgtatgtctattctttt

SEQ ID NO: 123349 - DNA, 201 bp, Homo sapiens
gaacaacacctgctgtgacttgataggaatggcattgactgtaataataaacttgagagaattgtcttcttaacaatattgaatcttacaatccatgaacrtggaatgtctctccacttgtttaaatcatctttaattcttcttaccattatattgtagctttcagtatacaagtcttatctttctttagttaaatttatt

SEQ ID NO: 123350 - DNA, 201 bp, Homo sapiens
ggtacattaaaatatgctaaatgaaaaataatgagcatgtaggaagtaataacaggaatcacctaattaaattaggaaacagacatcacatcgctgtaatmtgaaaattgatattaatagaaacggtcccagaattgttatgctaaaagttcctaggggcggggaaattaaaaaggagagcagaatagaaaattgggacaa

SEQ ID NO: 123351 - DNA, 201 bp, Homo sapiens
caagagattattactcccattttgcagatgaggaaactgaggcatgaagaggttaagtagcctatgtagctggtaagtggaggagccagagtctggacccmggcatcctggcagttccagcctccttctcccagtcatcactgtatgttccattgttccgtttctatttcactcacatataacgagcagctaagtttcccg

SEQ ID NO: 123352 - DNA, 201 bp, Homo sapiens
cttctctgagcatataaaccttgattacatttatctgttggaaaccagtgcttacaaagtgtatgtgtccagttgcatggctgggtggccccaagggcccytgacaattctccctgtgaatttctgttggtgggaggaacacattctgggagttgccctgccatcctgatcaggcaaacaggcaggtgttggggtggaggg

SEQ ID NO: 123353 - DNA, 201 bp, Homo sapiens
accgcacccagccttttctcctcacttctgtcagtaggtcccagctgtgcacaagtcagggctggggccaggggaggctaggagattttggttagggtctycttgcactgggatggagggatggagggattcagccacttcaccccaggagctctggccctggctagaggcctcctggacagaggagggaagtcatcgctg

SEQ ID NO: 123354 - DNA, 201 bp, Homo sapiens
ccggcatcctggcagttccagcctccttctcccagtcatcactgtatgttccattgttccgtttctatttcactcacatataacgagcagctaagtttccygagtttttggatatgacaacaagcagcaggggcccagcttactgagaagagtgaattacagttttttcaagatccagaatatccacatcagaaaagctca

SEQ ID NO: 123355 - DNA, 201 bp, Homo sapiens
ctcccagtcatcactgtatgttccattgttccgtttctatttcactcacatataacgagcagctaagtttcccgagtttttggatatgacaacaagcagcrggggcccagcttactgagaagagtgaattacagttttttcaagatccagaatatccacatcagaaaagctcatggccggcaagtgtgatatcaacacacg

SEQ ID NO: 123356 - DNA, 201 bp, Homo sapiens
tttccctgagcaaagtgcctctgacacaggctgtttgtgttgatttgttactattcatttattccttccctgtacttctcacggcagcctaattgtgattyggtaccaagaaagcaatatcaaagtaattttccacaacattagttacaattttcttctgatctttcaagtgaaacaatcccatcctgttggcttctctga

SEQ ID NO: 123357 - DNA, 201 bp, Homo sapiens
aggtgtatggtttatataagtggtggaatcctcttctccattgaaagtatttcttttctttttttgtgtgtgtgtgtggtggggtatagagtctcactctkttgcccaggctggagtgcagtagtgcaatctcagctcacagcaacctctgccttccaagttcaagcaatcctcctgcctcagcctccccaggagctagga

SEQ ID NO: 123358 - DNA, 201 bp, Homo sapiens
ggtctggggcccccctggtcagcccacatggccctgtgggggctcctgctgctacagggtgctgggctgggcggaggaagagctggccattcaggatgggygcagtggctcatgcctgtaatcccagcactttgggaggcccaggcaggtggattgcttgagcccaggagttcaagaccagcctgggcaacatagtaaaac

SEQ ID NO: 123359 - DNA, 201 bp, Homo sapiens
agttcaagcaatcctcctgcctcagcctccccaggagctaggattacaggcgcacaccaccacacccagctgatttttgtattttttgtagagatggggtmtcaccatgttggccaggctggtctcaaactcctgacctcaaagtgatccaactgcctcggcctcccaaagtgctgggattacaggtgtgagcccctgtgc

SEQ ID NO: 123360 - DNA, 201 bp, Homo sapiens
ctgcctcggcctcccaaagtgctgggattacaggtgtgagcccctgtgcctggcccccatcaaaagtattttttcatctttgtgtaccatctcatgtcagygacggaaagtgcaagttcttaggcagatgtgtttgcgatgggggaagatgcggagaaacaggaagagaagctgggcagggactctgactggccgggcagt

SEQ ID NO: 123361 - DNA, 201 bp, Homo sapiens
ggacgtgcacttgctggaagaatgcatgggtctgctgaacctgccttcctcctgggcatgctgggaggaggggctgcaagaaggtcaagctggaggggtcyctaggctctagctgagacccttctcccactttttttttattttttattttgagacagtctccctctgccgcccaggctgaagtgcagtggcatgatcttg

SEQ ID NO: 123362 - DNA, 201 bp, Homo sapiens
tgcagccgcccacacttgctccaggtgtcaaggtagcacataattttaagggtcttaactttaggccttgcactgcagcggcagactgtctcacaggagcytaagggtgggagcactccctctatcctgagtaggggctgacccaagccaagtgagttgaggaggagactccttgcccgagtctcaaaacccccaccccca

SEQ ID NO: 123363 - DNA, 201 bp, Homo sapiens
gtcaaggtagcacataattttaagggtcttaactttaggccttgcactgcagcggcagactgtctcacaggagcctaagggtgggagcactccctctatcytgagtaggggctgacccaagccaagtgagttgaggaggagactccttgcccgagtctcaaaacccccacccccaactttggtgctgggatcccctgctca

SEQ ID NO: 123364 - DNA, 201 bp, Homo sapiens
ctcctgacttcgaacgggcacccgccttggcctcctagtgttggaattacaggcgttgagttaccacacccagccactgggggttttgaacctgccactcktttgagctgcagaatccctgacagagcctggctgaggagtgcagggctgggggcaagaacagccagaacactgtggcttccttcaatctacctgcaccag

SEQ ID NO: 123365 - DNA, 201 bp, Homo sapiens
tttgccctgttgccctccaagcttctccagacaagaaagaactttggtcctgcccttgaccaagtcactttctcaccctgtgccctggtcctccccttccyaactcgcccagggctgctgtttggtcaaggtcatggacgtgtgtgaatgccagaagctcccaatcccctctctggctgtggcatcacctgccttgtcctg

SEQ ID NO: 123366 - DNA, 201 bp, Homo sapiens
ttgccctgttgccctccaagcttctccagacaagaaagaactttggtcctgcccttgaccaagtcactttctcaccctgtgccctggtcctccccttcccractcgcccagggctgctgtttggtcaaggtcatggacgtgtgtgaatgccagaagctcccaatcccctctctggctgtggcatcacctgccttgtcctgc

SEQ ID NO: 123367 - DNA, 201 bp, Homo sapiens
caaccagctgcctctgcctcctatccctcctattcatccatccattcatccatctgtttatccagtaagcagtcattgagcacctgctgtgtgcctggccycatgctagcttctccaggcaggtacatgagttcctggccctctctccaggtcaaacaggaataagctgggaggtcaggaagtccatagaggctttacacc

SEQ ID NO: 123368 - DNA, 201 bp, Homo sapiens
ggattcagccacttcaccccaggagctctggccctggctagaggcctcctggacagaggagggaagtcatcgctgctggcctgtgaaggggccctgtcagmttattgccaggtgcactgtcacctaggtgtggcctgctacttcccccagtcccaattaaccatctgcaggagctgccatcggcatgggggaggggctggg

SEQ ID NO: 123369 - DNA, 201 bp, Homo sapiens
aggcagaacctgaggtctttccatcactaatgatcgtggaaaattagcttccaattcccaggggtctccagagtgatgcaccctgaggcggagagcgggcrgagaggggatggagcagggagaggagcgggaggcacagatggcagatggtcctgctgggccgccactctggagtccccccaaccacaggccaccctccca

SEQ ID NO: 123370 - DNA, 201 bp, Homo sapiens
gtttcatcccgctgtttccagtagccaggcctgcaccacccccagcacagagcatcccctcagccccaggcacactaggtcaagaagttctattggctcargatccaggggcttgttcccttgttgcggatggggctccctcccttctactggacataatgaggatgcctgtagcttggactatgtctgtagccattgaac

SEQ ID NO: 123371 - DNA, 201 bp, Homo sapiens
caggaaatttcaagttaaaaatccagtttccaaattggaaggtctaaaggtctgcattgctacaagggtcatcagatgtgtcatttaaaaaataattttgrgtccagtgcagtggcttatgtctgtaatcctagccctttgagaagctgaggcaggcggatcgcttgaggccagcagtttgaggccagcctggccaacaca

SEQ ID NO: 123372 - DNA, 201 bp, Homo sapiens
gaaatccaggtttccaaataggaagatctgaaggtcttgatctgctaccaagggtcattggatgtgtcatttgaaacataatttttattatgaaagtgtcwtgtggttattataggaaatgagctgcttcaaacagctgctcactagagaccaatgactgacattttgagtcccactataaaaacgcctgtcttcattcct

SEQ ID NO: 123373 - DNA, 201 bp, Homo sapiens
ccagcaaccccttgtgtgatcagccggcaggggggggcactggggcatgagtgtggggtctgtgtggatgctcttttgctttaagatgctcccagttagcygagtgctgcccacatccctgccccacctgcccctgcctggcagacagatgccacagagccccacgtacagggatcataatggtttacacctcttctgcct

SEQ ID NO: 123374 - DNA, 201 bp, Homo sapiens
cctggcagacagatgccacagagccccacgtacagggatcataatggtttacacctcttctgcctgtgtccttgaggttgagcgatgagggcatgtgaaayccaggatggtagaaaagaggctgcaggcttagggaaagaaaccagagaaaccagactcccttggatgttgttcaagataagcaaataattcagcagagcc

SEQ ID NO: 123375 - DNA, 201 bp, Homo sapiens
tggtggctacagcccagggacactgctaaacactctacagtctataggacagcccccatgacagaggaccatctgaccccaaatgtccgtagtgtggaggytgagaaattctgacctgggtgaagatgagtgtgggcagagagggcacccagtgaaaggaacggcgaggaagtcaggagttgggggacagggcccgctgga

SEQ ID NO: 123376 - DNA, 201 bp, Homo sapiens
gcaaaaagaagattaaagtcttaccgtcctttgaatccttctggctctggtgttggcatacattgtcccagagaaggggctaccttacgtctctatcgctytatatacgtaaactcgtaaatcattttcattttatcaaaatgcaataatctttatgcctaccgcacataacctgtttaatcactttgcatatcatgaatt

SEQ ID NO: 123377 - DNA, 201 bp, Homo sapiens
ccttgagagcccatggatgtcttttatgtttttaatttctcctgctttgtcagctttctgaggaatatattacattatgtggaagttggatgctaacaagwtttgtatgaataaattagactcttaacttttttatgttattacaaaattgaaatggactctaatgacagtcggaattaatgttctgttgccaataaatgc

SEQ ID NO: 123378 - DNA, 201 bp, Homo sapiens
atttgctgagggaagtgctagggtgctgtctggagcccaggggcaggggcatggcactgggatggtgtgggggctgcagaggtggccaggaggagcctctyagcatcggggcagccttgtaaccataacaggtccattgcctgatgcacgcagcaagtcaatgtgctaagatgccaggttgcggcagaaaaagaggattaa

SEQ ID NO: 123379 - DNA, 201 bp, Homo sapiens
gggacccattattagctgttttaccaggcagttctgggcgctagccatgaagctgttctccttcctctctccctccttccaaaatgtcttgatgttggagrctaccctaggtcaaactggcttcccggtgtctgactcaggaggctgcaggaagcgcacccacaccgtggccagcttactcaggggctcgcgacagttgct

SEQ ID NO: 123380 - DNA, 201 bp, Homo sapiens
ggaacgccctttctccccgctgcagagcatggggctgggggggagtggagagaaccctgccttgtaacagggcagcggacagcaggtaaattgccttccccgggagtagcgtgccgcccggcaggggcctgggtgtgccaaggcccggctctggggatttcaggacccaggccagcgctccccagcagcagggcaggaggc

SEQ ID NO: 123381 - DNA, 201 bp, Homo sapiens
tctgggggcagtggaggggagacctggccctggctcagcggcgcctgggggacacttaaggcaggttgtaaacctttcttgagaggtgagtgctgaaggakccaggaggacttcctggaagaggggaactgtgggctgcttgtttgtcctctctagtgaacaggaggtgctgacctccaatggaagcagtgaagcgggctt

SEQ ID NO: 123382 - DNA, 201 bp, Homo sapiens
aaattcctttgcttattcaaggatcattgaaaattaattgtagctggtgttattgaactcacagcagtctttagttttataaaagccttttccttccaagkgttgccatttggtgttactgagatacaagcaagatgtctgcaaaactaaaatagcatttttttaaaaaacatggcactttagagttctaaaatatgttca

SEQ ID NO: 123383 - DNA, 201 bp, Homo sapiens
gaactgtttctgatagtcctttttgacagggatggaaaacaacctatttttcaaaccagtggtcacacaccacatacctgaggccacaaacatcttccctmgcaaatataccatcatcccaccaacatggtggttgcaactggggctatatcttgatagagtttatgggattctggtgggacttgcgtgtcttttgtagga

SEQ ID NO: 123384 - DNA, 201 bp, Homo sapiens
aggggacggctgggatttctgggaagatcggatcctcaggctggcaggggatgtcagatggcacggagccgaggccatcatccctttgcagctggcagacytggcaaggagcacacgtgggtcttctgatggtccatgcagccagaccaccctcaccacgtgccaggtgatgggcagacttgacggtctgggtaaatcaca

SEQ ID NO: 123385 - DNA, 201 bp, Homo sapiens
cttccagttctcaggggctaagaccccagatgtaaatgtcaaaaaaaaatctagaaatgtctgagtgttctccttccccaagtgtacacctgtttaaccaratggctgtgggtcctgttggggaaagactgagaaaacattcccatgtgtatttgccatgatgccatggggttcttcttggggatgtggtctctcctttgg

SEQ ID NO: 123386 - DNA, 201 bp, Homo sapiens
tgtgagagggcatgaggagcaccatctgggagctgtgggaaggcccatgtcgccagcagagtgaagaagcaggtgacatgtggctggagacccatctgtgyagggtcttcacaaccagggagggacttgggactttatcctatgaactgctgcagagtaggaagaccagcgaggctggagctgcaggaatcttgcagaaag

SEQ ID NO: 123387 - DNA, 201 bp, Homo sapiens
tcccacactcctggtgccaggcctgttgtcactgtccctcgccctgcccctgcatgtttatggagcaggtattaggtgtcttgcactgtaccaggccctgkggacatgaggtgagcaaagctaagggtggtccctgcccttgtgagttagatggagaccctcctcatttattcctcattcactaattcattttctgccaga

SEQ ID NO: 123388 - DNA, 201 bp, Homo sapiens
ttgaacttcttgcctcaagcaatccttctgcctcagtctcctaaagtgctgggattgcagatgtgagccagcatgcctgtcctctttttttggggggggggcgggtggggtgacggagtctcgctctgttacccagcctggagtgtacagtggtgtgatctcggctcactgcaacctctgtctcccaggttcaagcagtcc

SEQ ID NO: 123389 - DNA, 201 bp, Homo sapiens
gagagggctgtccaagaggggcaaagagggagcgtcaatgatattgatagaattctgtttctgaaactgggtggtgaatacctggctgtttgttttcttcrtctttatagtgttatatattttcttttgcatgaatgaaatgtttcatgacaaaaaacaagtctaaggaaggcttttaagctttgagatttttttttaact

SEQ ID NO: 123390 - DNA, 201 bp, Homo sapiens
agaggaattcaggacgccatgtgagatgaggcctgggtggtgccagagggacagcagcaaggggggcccccagcaggagaggccctggtgggcagaagggktgtgcatgccccagggatggcagcaaaagcagctatgtccggggctcccccacctcaccacaggtcccgccttgcagccatgaacaaagctctgagggaa

SEQ ID NO: 123391 - DNA, 201 bp, Homo sapiens
gtgatcagcaaagcctcacggttctcttacaaggccccaggcaccagccgcccacccccaacggagggaagaggcagtggtgggccctgggccaagcctcytggctggggcatctgataccctttcagaccgagcctctccaggctcggtccaggctcaccactggtacccctcagcagcaggcagatgcacccccacccc

SEQ ID NO: 123392 - DNA, 201 bp, Homo sapiens
ggagacctggccctggctcagcggcgcctgggggacacttaaggcaggttgtaaacctttcttgagaggtgagtgctgaaggagccaggaggacttcctgkaagaggggaactgtgggctgcttgtttgtcctctctagtgaacaggaggtgctgacctccaatggaagcagtgaagcgggcttgggtgagattccagtgg

SEQ ID NO: 123393 - DNA, 201 bp, Homo sapiens
gatcagcaaagcctcacggttctcttacaaggccccaggcaccagccgcccacccccaacggagggaagaggcagtggtgggccctgggccaagcctcctrgctggggcatctgataccctttcagaccgagcctctccaggctcggtccaggctcaccactggtacccctcagcagcaggcagatgcacccccaccccca

SEQ ID NO: 123394 - DNA, 201 bp, Homo sapiens
tttatgctaattctggggtatggttcacatagattgcagtgtgaagggtgtcccctggagttgtgcaaagaccagtactgatggagggatggacatggagygctccttgcgtggtgattgcccaagtgccagaaataggcagggtcggaacatggaaccttcaggtctggataccccgagcctagtgggtttgatgcgtct

SEQ ID NO: 123395 - DNA, 201 bp, Homo sapiens
cggtccaggctcaccactggtacccctcagcagcaggcagatgcacccccacccccacccagccctgcaaccctcccagccaagccagggagggcctgagkatttcattatgagctcagattatcatcaaggacaagggggagtgatggggaagttacaagctctccttttaataatgaatcccatttcctcttggagttg

SEQ ID NO: 123396 - DNA, 201 bp, Homo sapiens
gccacactccctgggaggccctgatttggagggggagcccactgtggaccctgtctctgcagtgaaagtttctcagttcaagcctctctcacctgagcccrggccgttccccttagcagtgccatcctgtgtcttcccagtcttctacgtggccacgatttcctgggttcctccaccccctgcaattggagtgaatattcg

SEQ ID NO: 123397 - DNA, 201 bp, Homo sapiens
ctccctgggaggccctgatttggagggggagcccactgtggaccctgtctctgcagtgaaagtttctcagttcaagcctctctcacctgagcccaggccgytccccttagcagtgccatcctgtgtcttcccagtcttctacgtggccacgatttcctgggttcctccaccccctgcaattggagtgaatattcgcctctt

SEQ ID NO: 123398 - DNA, 201 bp, Homo sapiens
ttagacgctagcctccaagtccagcccacctgggaagggattgcaagagcatgttgccaggtggtgaggattgctggcaccatcttggaggctgcctgccrcaggtgaggtatggttgaggtgctttcatagggaaattgtaaccatcataggtccactggccaaagcatacagcaagtcaatacacccaaacctggttgc

SEQ ID NO: 123399 - DNA, 201 bp, Homo sapiens
gtgtggagtgaccccgttcccactctgcctggcccagaatgcattggagggaccgggggaggaggaagcggaggtcacaatctgtgcatgagatgcctcasgattacctcgggtctggagtgctgggactgctccgagggccaggcattgagcccaaggaggactgaaggctgggggctggggagggatgccacatggctg

SEQ ID NO: 123400 - DNA, 201 bp, Homo sapiens
actagtttctctctctgtacaatagatgtaaggttaatcatagaagctgtctcaggcgacattgtaagaattaaatgagataatacagggaccacgctaarctcattctttggtcttttcccctaaggaaagaagtggcacatgccccactgccttttcgagagtctggcttatgctgctgcctactcgagttcattggat

SEQ ID NO: 123401 - DNA, 201 bp, Homo sapiens
ctgcgtaggtcttggttttttaaaactctgaaaaagttacggtggtagttatgacaacagaagcctggaggtccagttctggaggccaaatgcgtgggtcsgtaggggcgggcgcgggcccacacaccctggggctagacgcaccttctgctgggctccaactgcctgccggtggggttatcccgctcttgcattgaggtt

SEQ ID NO: 123402 - DNA, 201 bp, Homo sapiens
aggagctcctgggggcttctcatgttcgcgtctggggtcccagagggaagtcgggggctgcctgtcatcttgccctcaggcctggatgaggcatttttcarccctccccaaaaggcctgaagacttctgagagggtgggctggccccatcctagctccccaccaagctctgtgcctggtcttggttttccaccagggcggg

SEQ ID NO: 123403 - DNA, 201 bp, Homo sapiens
agaaggaggctttaaaaaaggcttgtgtttgttggcaagcagcagtgccaggcctggcttttgatcaaaacatcctagctgttggcagagacaaaggcaayccctggaaacagcctggctggggagagatggaagagagggcagggttgggtaggggggtcagctctggcccctccccagctggctcacagcttcctaccc

SEQ ID NO: 123404 - DNA, 201 bp, Homo sapiens
caccatagttctattcaggttttctatttcttcttgagtcagctctagtaatttatgtctttctagggctttgttcatgtctttctagggctttgttcatktcattcaagttgtctcatttgtttagcataacagtgttcatagtattctcttataatcactagtgatgtcctcattttcattcatgatgttagtagtttg

SEQ ID NO: 123405 - DNA, 201 bp, Homo sapiens
gggcccagttatcccaggaacagggataactgttccttcctagagtgtagaactctggggcacagccctggcagcctccctgaggacatgtcatgggaccracccagttccctggtgagggacaggcggcaggtgtgggtgaggggtgcccttgactgaagcctacctggcatgcttgaaagtaaccctatgcaaatgaaa

SEQ ID NO: 123406 - DNA, 201 bp, Homo sapiens
gccaccatgcctggcccaaactttttaaatggtgatggttgttgtttttcctgttccgtcatttcattttgggaaagaagctaccaggcttctcactcagytctttcagaagccctaagtctaggactggggtcttgatatctacacagacaggagatgaggtctctgactcaaccacagtgctgagctggaagtgcaact

SEQ ID NO: 123407 - DNA, 201 bp, Homo sapiens
aaatggactaagacagtccgtatgcaggcctggggctgggggcagcagacacagctgtcctcccaggttggtggcctgggtcttacatccgcactccgcaygtagaacaccatacatttctgggaaatagtatttcttggtgctggtgactgagggcaagatgccctttccctgccaagccatgaccagtgttggccctga

SEQ ID NO: 123408 - DNA, 201 bp, Homo sapiens
tttttctgtagagacagggtcttgctgtgttgcccaggctagtcttgaactccttgcctcaagtgattctcctgccttggcctgccaaagtgctgggattrcacgcatgagccacctagcctgacctaattttaggataattccattgcccccgccactaaatcttttgtgcccacttcaatcactccccattttcaccct

SEQ ID NO: 123409 - DNA, 201 bp, Homo sapiens
agcagggcagaggccggcagcctgggctgtccgggacaacagtgttcatcccaccagatgccactgtaaggagtccaggtggagccgaagctcagaatccrggtactgcacgtgctgaggaccaagatgcagtcgggaccttgccttcagggaactccccacccccagtcgggccagcctgagccaagagaagcagccaaa

SEQ ID NO: 123410 - DNA, 201 bp, Homo sapiens
aagataaaaaggcaagtcattaacgtggccaaaaagccttcccagcagatgttggggatggcggggcagggtgcccacagcctgcccaccgcaccctcgcytggcccggctgaccagctgccacggcagggacccatatgttctcaggattcacggcttggctcggtgttgggaagcacagagccaccctcccgctgttca

SEQ ID NO: 123411 - DNA, 201 bp, Homo sapiens
gacgtagacatccaagggaaataattagtgcttaaaatgttaattgtgctcagatatgcctgtgctgtggcggcagcttgccagtgagcaggcataggtargtcaccttctgccctcaagcagcccccatcaggcaggctggtctccccagggacccagtgtgggcagcccaaggccaagaccctggcagcttttctgatg

SEQ ID NO: 123412 - DNA, 201 bp, Homo sapiens
tcctgcctgaccggcccaccgtccccgggcactggcaggcagcatcagagagtggttacagcaaggacatggaatcagacagctcgggcctggacccaccrctctgccagcctacctgggcagcagtgtggatgagggtgacccacttaacctctttgagactcagtgagtgccctcatgccaaacagggatagtaaaacc

SEQ ID NO: 123413 - DNA, 201 bp, Homo sapiens
ggtttcaccatgttggccaggatggtcttgatctcttgtggtctcgcgatccacctgccgtagcctccaaagtgctgggattacaggtgtgagccaccacrcccggccaggaaggcattttttagatgtgatttgctgtaaaatgtgtagcctttgagtagaggaaatgaccttccacaatgtgggtgggcttcatccaat

SEQ ID NO: 123414 - DNA, 201 bp, Homo sapiens
cgggcactggcaggcagcatcagagagtggttacagcaaggacatggaatcagacagctcgggcctggacccaccactctgccagcctacctgggcagcartgtggatgagggtgacccacttaacctctttgagactcagtgagtgccctcatgccaaacagggatagtaaaacctatcctgctgaagcccccacgggag

SEQ ID NO: 123415 - DNA, 201 bp, Homo sapiens
cagcagtgtggatgagggtgacccacttaacctctttgagactcagtgagtgccctcatgccaaacagggatagtaaaacctatcctgctgaagcccccaygggagcgggatcatttctctgtccagcctttaacacccctcagcatggggcctgcggcaccagctcccaaatgaacaatgacagaatgagtgttttccct

SEQ ID NO: 123416 - DNA, 201 bp, Homo sapiens
acctaggattggatgagatttcctgcccaggggttggagtgagatttgctgccacagctgcctgagccccaggacgaaggggaggctccgcctagcgggtmttggacgccccagctgcctgagcccgggagccctgggatgaagtaggggctgcccatgccaaccgcagttcccccaacctgcccgccgcctagggggaag

SEQ ID NO: 123417 - DNA, 201 bp, Homo sapiens
acgccccagctgcctgagcccgggagccctgggatgaagtaggggctgcccatgccaaccgcagttcccccaacctgcccgccgcctagggggaagcaccrccccctgcccggggagaggaattcactcccacagggattctcctgctcattactcgacccacgcgtgagccaggcttcgctctctgccaagatgacacgt

SEQ ID NO: 123418 - DNA, 201 bp, Homo sapiens
aagaaagtcggtactttaaaatattttgtaagtcaatttgtccaggatgcctgcaagttttcctggaatttgatgcaaatacgaggctatgctaaagccaytcagcaagctgtaggagccccaagtggagaaactcaaactggttcacaggagcaaacatcatgcagctccctccaaggctacatcactcgtgggttgtgg

SEQ ID NO: 123419 - DNA, 201 bp, Homo sapiens
aggcttcgctctctgccaagatgacacgtctaagaggcttagtcttctttatgctgtggatcctgaggaaatccacttagatattctgtgttccctgatcygccacataagattcctttatctcttgttgtcatgggaagtatatattaactgattaatattaatgtgttggccgattaatattcatatctgaaccgattc

SEQ ID NO: 123420 - DNA, 201 bp, Homo sapiens
ccaggatgcctgcaagttttcctggaatttgatgcaaatacgaggctatgctaaagccactcagcaagctgtaggagccccaagtggagaaactcaaactrgttcacaggagcaaacatcatgcagctccctccaaggctacatcactcgtgggttgtggtgtttctttgtggaagtccccaagctcttagggtgagaggg

SEQ ID NO: 123421 - DNA, 201 bp, Homo sapiens
tggtgtttctttgtggaagtccccaagctcttagggtgagagggctcttcagtgacgcccagggacctttctcaaggctgtgggcatcggtttgcagaacygtgtcatggaaaccacatgccatactaagtttgaagtctgagcaactgctgggctgagaagatcttcaggtttccctgtggccgtgcagcctgtgtggca

SEQ ID NO: 123422 - DNA, 201 bp, Homo sapiens
aaacagacccagactggcaatgtaagtcggactgtcataccactgtgttgaaactgcagcacgaagtttctctgcctcttctttctctgtttcagctctcygtttcaggaggttcagcaagccctaaaggccattacctggccacctacctatcttccccactagagagtaaacctctctagagattagttatttatcttt

SEQ ID NO: 123423 - DNA, 201 bp, Homo sapiens
actcctgacctccggtgatccacctgccttggcctcccaaagtgctgggattacaggcatgagcccccgtgcccagcctctctgatctcttgtctacccckcacaccctgccccagcgtcaaggtctatgtgtactctcctggttcctgccaatacctgatttctggatccttcttttcttttggggtatagttcctttct

SEQ ID NO: 123424 - DNA, 201 bp, Homo sapiens
gaagagaatagagccctgatttgtagcacttgccaatatctatggtgtaaatactcccactgcatccagctctaagctaccatgtaaaaataaacaatacrttgcttaggggatatagacatatgccacacacacatacacacacacacacatacacactactaagaagagaaaggaatgataaacacagaattctgtgaa

SEQ ID NO: 123425 - DNA, 201 bp, Homo sapiens
ctggccagctgtgtgaccttagtggctaaatatgtgtatatcacagcttcatcagtgtcaagctggggcaaaataataacctttctcccaccagccacccwccatcctcctaccatcccccctccatcctcctatcatcccccctccatcctccccatcatccccccatctccccaccatccccccaccaaccaaccacca

SEQ ID NO: 123426 - DNA, 201 bp, Homo sapiens
gtgaccttagtggctaaatatgtgtatatcacagcttcatcagtgtcaagctggggcaaaataataacctttctcccaccagccacccaccatcctcctaycatcccccctccatcctcctatcatcccccctccatcctccccatcatccccccatctccccaccatccccccaccaaccaaccaccaatctcatggcct

SEQ ID NO: 123427 - DNA, 201 bp, Homo sapiens
tcaagctggggcaaaataataacctttctcccaccagccacccaccatcctcctaccatcccccctccatcctcctatcatcccccctccatcctccccaycatccccccatctccccaccatccccccaccaaccaaccaccaatctcatggccttctgtaggggccgatgctatgagctcttcacaacacatgggtggc

SEQ ID NO: 123428 - DNA, 201 bp, Homo sapiens
ggaggagaagccaccagagttggcacatccctgtgtcctgggccactctgcctctgcatcccacaccccgcccctgtatcccccacccctaagcctcgggmtaagccatccctgaaggctgctggaggcgagagccactccccagtgtccaccagccgctcagtttcccatcagggtccagaagtattgattctcttaatt

SEQ ID NO: 123429 - DNA, 201 bp, Homo sapiens
gccagcctacctgggcagcagtgtggatgagggtgacccacttaacctctttgagactcagtgagtgccctcatgccaaacagggatagtaaaacctatcstgctgaagcccccacgggagcgggatcatttctctgtccagcctttaacacccctcagcatggggcctgcggcaccagctcccaaatgaacaatgacaga

SEQ ID NO: 123430 - DNA, 201 bp, Homo sapiens
tattcagatcctttgcccataaattaattgagttgtgagactatctattcagatcctttgcccataaattaattgagttgttaaattttttaaattatcargttggaaggatttttttaatctattctggatacaagtttcttttttttcttttctttttctttttctttttcttttcttttttttttttttttttttttt

SEQ ID NO: 123431 - DNA, 201 bp, Homo sapiens
ggggcgatctcggctcactgcaagctccaccccccaggttcacaccattctcctgcctcagccacccgagtagctgggactacaggcgcccgcaactaagyccggctaatttttgtatttttattagagacagggtttcactatgttggccaggctggtctcaaacttctgagctcaattgatctgcccacctcagcctcc

SEQ ID NO: 123432 - DNA, 201 bp, Homo sapiens
tgatcgaggtcagcgagggagtgcaaatagagacacaaagaggaccaataactgagagcgggaatattccaacgcgaagactccagggagatgaggaagasccaaagcaaggcaagaagggaccagtgagacaggaagaaagcaggagactatcacgtcctgggagccaagtgaggaaagtgcaccacagaggaatgcatg

SEQ ID NO: 123433 - DNA, 201 bp, Homo sapiens
cctcagcatggggcctgcggcaccagctcccaaatgaacaatgacagaatgagtgttttccctccaacggcgccaggaggggtcagggatcggggtagcakcgtggtgtttcccccttctgggcagcggaggggccctgcttggccagccattcagaccccaccaaccctgcacctaggattggatgagatttcctgccca

SEQ ID NO: 123434 - DNA, 201 bp, Homo sapiens
taccattattccttatctgcctggaattagaaaggtttcagaattagtgttccaatggtttcattatcaaaatttgccagactttataaaacaaacaacawtttttttgcccttgtgttcaacaaagatgggcaaaggctttgtcttctgacattggagattgctttcagcgttcggtggagaaagaagccacagccttcc

SEQ ID NO: 123435 - DNA, 201 bp, Homo sapiens
aaggctcgcttgcatttgaattggagccaccactgtcacctgtgccactgcctgggcatcagaggccacacaggtcagggaggtcactcttgcccgtgggracggcacagccagagcctgcaccttcaccagggggagcggccaggagcctgcctatgtagcctgcatgtagcttctccatctctgctcctgtctccctcc

SEQ ID NO: 123436 - DNA, 201 bp, Homo sapiens
ctgggcttctcactcatgctggtgcttcctgaactctctgggctgcagaggcattctgccctctgcaatataggctggtggccctctgttcattgaagactactacagagatctctgtcctacaacacaacatatgccccctgatcctccttcccctctcaccagtgtgttctatattgctttagaaaggggtgggggtat

SEQ ID NO: 123437 - DNA, 201 bp, Homo sapiens
gctgggcttctcactcatgctggtgcttcctgaactctctgggctgcagaggcattctgccctctgcaatataggctggtggccctctgttcattgaagamtactacagagatctctgtcctacaacacaacatatgccccctgatcctccttcccctctcaccagtgtgttctatattgctttagaaaggggtgggggta

SEQ ID NO: 123438 - DNA, 201 bp, Homo sapiens
tatttttcaaaccagtggtcacacaccacatacctgaggccacaaacatcttccctagcaaatataccatcatcccaccaacatggtggttgcaactggggctatatcttgatagagtttatgggattctggtgggacttgcgtgtcttttgtaggactggactggtgaaattccatggtgatttgatggtgatgactact

SEQ ID NO: 123439 - DNA, 201 bp, Homo sapiens
atggtgtgtcactgccattctgagataggagttcagcaggactagtttcccaggaccctgatgaaaaaacaggatgcagtagagaagctggccaaaacccrccaaaaccaaaggtggtgatggaagcaacctccggttacccttactgctcctaagatgctaattataatacattagcatgctaaaagacatacccaccag

SEQ ID NO: 123440 - DNA, 201 bp, Homo sapiens
ccctgtgtccactgaaaatacaaaaattagccgggcgtgctggtgcacacctgtaatcccagctacttgagacgctgaggcaggagaatcatttgaacccrgagggtagaggttgcagtgagccgagatcgcgccactgcctgggggacagagcgagactccgtctcaaagaaaaacagaaacaaaaacaaaccaaaatca

SEQ ID NO: 123441 - DNA, 201 bp, Homo sapiens
tacgtcaccttgcctaggccatggtgccacagggtttagacaaatgccagtctttgtgtgtgtgtgtgtgtgtgtgtgtgtgtgtgtgtgtgtgtcgagabagagagagagagagagagagagacggagtcttactctgttgccaggttagagtgtagtggcgcgatctccgctcactgcaacctccacctcctgggttta

SEQ ID NO: 123442 - DNA, 201 bp, Homo sapiens
ttacaaatgccatggcaacgtcaagaagttaccctatatggtctataaaggagaggcatgaataatccacctcttgtttagcatatcatcaagaaataacmataaaaatgggcaatgaagaatggaatagccattcttcattcctttacttcttaataaacttgctttcactttactctatgaactcaccctgaattattt

SEQ ID NO: 123443 - DNA, 201 bp, Homo sapiens
atacgtcaccttgcctaggccatggtgccacagggtttagacaaatgccagtctttgtgtgtgtgtgtgtgtgtgtgtgtgtgtgtgtgtgtgtgtcgagwgagagagagagagagagagagagacggagtcttactctgttgccaggttagagtgtagtggcgcgatctccgctcactgcaacctccacctcctgggttt

SEQ ID NO: 123444 - DNA, 201 bp, Homo sapiens
gcctcagcctcccaagtagctaagattacaggcccccacaacaatgcccagctaattttttgtacttttagtagagatggggtttcatcatgttggccaasctggtcttgaagtcctgaactcaggtaatctacccgccttggcctcccaaagtgctgggattacaggcgtgagccacagtgcctggcccagatatattct

SEQ ID NO: 123445 - DNA, 201 bp, Homo sapiens
atatacgtcaccttgcctaggccatggtgccacagggtttagacaaatgccagtctttgtgtgtgtgtgtgtgtgtgtgtgtgtgtgtgtgtgtgtgtcgwgagagagagagagagagagagagagacggagtcttactctgttgccaggttagagtgtagtggcgcgatctccgctcactgcaacctccacctcctgggt

SEQ ID NO: 123446 - DNA, 201 bp, Homo sapiens
cgcctcctgggttcaagcaattctcctgcctcagcctcccaagtagctaagattacaggcccccacaacaatgcccagctaattttttgtacttttagtaragatggggtttcatcatgttggccaacctggtcttgaagtcctgaactcaggtaatctacccgccttggcctcccaaagtgctgggattacaggcgtgag

SEQ ID NO: 123447 - DNA, 201 bp, Homo sapiens
tatatacgtcaccttgcctaggccatggtgccacagggtttagacaaatgccagtctttgtgtgtgtgtgtgtgtgtgtgtgtgtgtgtgtgtgtgtgtcgagagagagagagagagagagagagagacggagtcttactctgttgccaggttagagtgtagtggcgcgatctccgctcactgcaacctccacctcctggg

SEQ ID NO: 123448 - DNA, 201 bp, Homo sapiens
ctacagtggcccaatcaagctcactgctgctttgaactcctggactcaagtgatcctcccatcttggcctcccaaagtgctgggattacaggcgtgagcckctgtgcccaactgccactagatttttaagcccacatttcacccctgccatctgcctgtcctggtgcttccaagtcctgcactttgctgcattctgtgggg

SEQ ID NO: 123449 - DNA, 201 bp, Homo sapiens
ttatatacgtcaccttgcctaggccatggtgccacagggtttagacaaatgccagtctttgtgtgtgtgtgtgtgtgtgtgtgtgtgtgtgtgtgtgtgtygagagagagagagagagagagagagagacggagtcttactctgttgccaggttagagtgtagtggcgcgatctccgctcactgcaacctccacctcctgg

SEQ ID NO: 123450 - DNA, 201 bp, Homo sapiens
aaagtggagatttcttagaactgtagtgccacacgtttttacaccaaacatgggtggtctcggaactgtcacagcactggtgggtgagtgagttaggatgytaatgagcatacagcgaggtcctaggagaaaccgaggtcatatctagtgccatgttgggcccagttggtcttagccagcttggtccacaccctgtttttc

SEQ ID NO: 123451 - DNA, 201 bp, Homo sapiens
attatatacgtcaccttgcctaggccatggtgccacagggtttagacaaatgccagtctttgtgtgtgtgtgtgtgtgtgtgtgtgtgtgtgtgtgtgtgkcgagagagagagagagagagagagagagacggagtcttactctgttgccaggttagagtgtagtggcgcgatctccgctcactgcaacctccacctcctg

SEQ ID NO: 123452 - DNA, 201 bp, Homo sapiens
aggaacaaaccaaagcacctcccgtgatggttaattatatacgtcaccttgcctaggccatggtgccacagggtttagacaaatgccagtctttgtgtgtrtgtgtgtgtgtgtgtgtgtgtgtgtgtgtgtgtcgagagagagagagagagagagagagagacggagtcttactctgttgccaggttagagtgtagtggc

SEQ ID NO: 123453 - DNA, 201 bp, Homo sapiens
gtgcaacagctgtgtgaagacgaagcagagattgatcttctgttgttgcaagccaaggaacgcctgggctgtcgaaagctggaagagtcgaggaagcatcwgcccgtacccaagaggcagtggagggagtgtgaccctgctggcaccttcatttcagacatctagccttcggaactgtgagagaacacatttttgtcattt

SEQ ID NO: 123454 - DNA, 201 bp, Homo sapiens
agtctgaggcccagaggacggggggcccagcggtaagggatgtcccgcactcccttagccattgccttggaccaaaccacgtggtttgcagcttttctacragccaggggggaggttcccttggattaaggttccaaataaagcacatggtttccagagcagcggtgtgtactctgtggtggcgtgggagcacgtggaccc

SEQ ID NO: 123455 - DNA, 201 bp, Homo sapiens
tcggctgctcattttcccttcttgatgaatgcttacgggccagtttctggaagccctttccaggagcgtcacatttttctgtgggtctgcctgcagcccgrgctcctgagacatttcctaaagacctccattagaagcttccactgctccccttactggcaggcgttcagcctttgccaactgcaggttgatggaattgtc

SEQ ID NO: 123456 - DNA, 201 bp, Homo sapiens
acctgccttcctaaaaatttggaggctagagtctttcaaggatagtttggtggacagggtactagggaatggggaatgctggccggctgtgttagggatgraattatagggggtagaagttatagcttcttcatttattgtgctatgacagtttccgggtgggggtcacaagatcatttgagccagtttcttggtatgggt

SEQ ID NO: 123457 - DNA, 201 bp, Homo sapiens
gtagatgtggcgcaggcgggacagccgttgggtttgtagactggctgaccagctgaccggctgactgacaggcagctctgatgctcgactctctgacagckccaagggaattcacgaccaaggctgagctgacaggaaccacccagctgaatcgtggatcctaatcactaaggcgagggaacagaatcactaaacgaaaca

SEQ ID NO: 123458 - DNA, 201 bp, Homo sapiens; identical to SEQ ID NO: 20796

SEQ ID NO: 123459 - DNA, 201 bp, Homo sapiens
tgggaggccaaggcagacagatcacctgaggttgggagttcgagaccagcctgaccaatatggtgagaccctgtctctaataaaaatacaaaaattagccrggcgtggtggtgcgcgcctgtagtcccagcttctcaggaggctgagacaggagaattgcttgaacccaggaggcagaggttgcagtgagccgagatcaca

SEQ ID NO: 123460 - DNA, 201 bp, Homo sapiens
atggaaagggcacccctgggtaacttgtagagggcagagtcatccggggattgcacttggattgctgcagtgagcagggcctacacctgcccgggtgcctygcgcctcggtgatgactatccctcctctgccccgtagatctcggcctgatggacgcctggtgtggacgatgagggaagaacgtgccccccacacccaaga

SEQ ID NO: 123461 - DNA, 201 bp, Homo sapiens
agtgcaagtatagggatttattacaaagtgaaaagtacatgctctggctgggtgaggtggctcatgcttataatcccagcactttgggaggccaaggcagrcagatcacctgaggttgggagttcgagaccagcctgaccaatatggtgagaccctgtctctaataaaaatacaaaaattagccgggcgtggtggtgcgcg

SEQ ID NO: 123462 - DNA, 201 bp, Homo sapiens; identical to SEQ ID NO: 20800

SEQ ID NO: 123463 - DNA, 201 bp, Homo sapiens
tagagacaaggtcttactctgttgcccaggctgatctcgaactcctgggctgaagcgatcctcccgcactggcctctcaaggtgctggaattacagatgtragccaccacacccagccacctgattttgtaatcggaaggagggggaagagcttttcttcagggtattcgggtgaggagtcaaccctcttggttccaaggg

SEQ ID NO: 123464 - DNA, 201 bp, Homo sapiens
gctaaaggtttgtcaattttgttgatcttttcaaagaaccaacttttagtttcattgtttttgtctgttgttttcctgctttgtattttattatttccttkctttagtttgcttcaggtttagtttgtccttttttcctctcttttgtttgctttatttgttacttcctctcttttgtttgcttcagatctagtttgttct

SEQ ID NO: 123465 - DNA, 201 bp, Homo sapiens
ggcaactacaatcctttatccagtgagctgagatcgtgccactgcacttcagcctgggcgacaaagcgagactccgtctcaaaaagaaaaaaaaaaaaaaagaaagaaagaaagaaagaaagctcattctggtggctgcctgttgtgtggccgtgggcagagagcagacagggagaggcaacaaatgcaaggagattgggg

SEQ ID NO: 123466 - DNA, 201 bp, Homo sapiens
tgtttcttcacctccttcaggctatcctgccctgtcttcagaacatccagctgggcgtggtggctcatggctgtaatcccagcactttgcgaggccaaagygggaggatcatttgagcccaggagttcaagactgcagtgagccaggattatgccactgcactccagcctgggtgactgagcaagactttgtctcttcaaa

SEQ ID NO: 123467 - DNA, 201 bp, Homo sapiens
cggcaactacaatcctttatccagtgagctgagatcgtgccactgcacttcagcctgggcgacaaagcgagactccgtctcaaaaagaaaaaaaaaaaaaaagaaagaaagaaagaaagaaagctcattctggtggctgcctgttgtgtggccgtgggcagagagcagacagggagaggcaacaaatgcaaggagattggg

SEQ ID NO: 123468 - DNA, 201 bp, Homo sapiens
acggcaactacaatcctttatccagtgagctgagatcgtgccactgcacttcagcctgggcgacaaagcgagactccgtctcaaaaagaaaaaaaaaaaaraagaaagaaagaaagaaagaaagctcattctggtggctgcctgttgtgtggccgtgggcagagagcagacagggagaggcaacaaatgcaaggagattgg

SEQ ID NO: 123469 - DNA, 201 bp, Homo sapiens
gtttattcatagatatgtatataaaactacaatgttaccatacagattctgttgtagtttattcatatatatatatatatatatatatatatatatatatwtaaatgcaatgttaccatacagattctattgtagtttattcatatatatatatatatatatatatatatatatatatatatatatatatataatgttacc

SEQ ID NO: 123470 - DNA, 201 bp, Homo sapiens
gattggtttttgttttcttctaggggagttttgggggacaggaattcatgggtggttctgtattattccatcaggaggctcctgtctgcctggctgtcttrtgttatcagccgccagagatcgtgcctagatccagccattcattaggggttacacagtggcaatgttctgattttatcactccttcttcattcttttaag

SEQ ID NO: 123471 - DNA, 201 bp, Homo sapiens
tggatcagccagccaagctcacctggctcaggcagtagatggaattgtagggggttgccagacttttgtaaatcaaaccacattttaaacattttttttttactacagtccaaatcaaatctttggaaacaggaagagctacccagtaagctatccgatgcgaagatgaagttttgtgtaacagagaattcacttctccag

SEQ ID NO: 123472 - DNA, 201 bp, Homo sapiens
ttagcccattttaccaatgaaacacgttcagcaaggtcaaggcacttgtccaaggtcacacagcagtgggtgtgtgcgctcagttttctctcttttttttkttttttgagatggagccttgctctgtcgcccaggctggagtgcagtggcacgatctcagctcactgcaatctctaacctccacttcccaggttcaagtga

SEQ ID NO: 123473 - DNA, 201 bp, Homo sapiens
gatgaatttttagcccattttaccaatgaaacacgttcagcaaggtcaaggcacttgtccaaggtcacacagcagtgggtgtgtgcgctcagttttctctctttttttttttttttgagatggagccttgctctgtcgcccaggctggagtgcagtggcacgatctcagctcactgcaatctctaacctccacttcccagg

SEQ ID NO: 123474 - DNA, 201 bp, Homo sapiens
tccggcctgctggcagattttagattgccagcccccagaatcacatgagccagtttcttaaaatcaacccgtctcgctctctcctctctctctcttcttcytcctttcctccttctctcctctccctgtctcgcttccctctctccttctcccctcctccacctctacctctcccttccctctctctttctctccgtctct

SEQ ID NO: 123475 - DNA, 201 bp, Homo sapiens
tgagtttgatcatctcagagcctaggggaagaagccccccacccagaggccaaagctggaggagagaggccaatacatgaccagtctgatgcagctctccrgtgtgtctggcctgactgctgcctcccctcgaagtccacactctgaccacagagctgtcatcagggcccaggaacagccggctcctgtgctggggcagcc

SEQ ID NO: 123476 - DNA, 201 bp, Homo sapiens
aattttaaaaaatcaaacaggatcaaaaagtaaaagaggtgtatggtttatataagtggtggaatcctcttctccattgaaagtatttcttttctttttttgtgtgtgtgtgtggtggggtatagagtctcactcttttgcccaggctggagtgcagtagtgcaatctcagctcacagcaacctctgccttccaagttcaa

SEQ ID NO: 123477 - DNA, 201 bp, Homo sapiens
aaattttaaaaaatcaaacaggatcaaaaagtaaaagaggtgtatggtttatataagtggtggaatcctcttctccattgaaagtatttcttttctttttttgtgtgtgtgtgtggtggggtatagagtctcactcttttgcccaggctggagtgcagtagtgcaatctcagctcacagcaacctctgccttccaagttca

SEQ ID NO: 123478 - DNA, 201 bp, Homo sapiens
ccgatgaatttttagcccattttaccaatgaaacacgttcagcaaggtcaaggcacttgtccaaggtcacacagcagtgggtgtgtgcgctcagttttctctctttttttttttttttgagatggagccttgctctgtcgcccaggctggagtgcagtggcacgatctcagctcactgcaatctctaacctccacttccca

SEQ ID NO: 123479 - DNA, 201 bp, Homo sapiens
ggaaatttatacttttctactaaaaacaatgctatagccaatgattttatttctctctttttgctagattctatttttattgtttcatggttaggtaatgwcttttttttttttttttttttttttgagatggcgtcttgctcctgttgcccaggctggagtgcagtggcacaatctcggctcactgtagcctccgcctcc

SEQ ID NO: 123480 - DNA, 201 bp, Homo sapiens
tctaccacaaatccaaaaagtagctaggtgtggtgctgtgcacctgtgatcccagctacttggaaagctgaggcaggagaattacttgaactcgggaggcrgagattgcagtgagccaagatcacaccactgcactccagcctgggtgacagagtgaaactccgtcccaaaaaaacccatatttacagtagatagttaatt

SEQ ID NO: 123481 - DNA, 201 bp, Homo sapiens
cacacacacacacacaaacacacatatacttatacacacatacacatacacacatacatatacatacacaaacacacacgcatatacacatacacacacayatatatatacacacatacacacacacacttttttttttttttttgagatggactcttgctctgttgcccaggctggagtgcagtagcacgatctcagctc

SEQ ID NO: 123482 - DNA, 201 bp, Homo sapiens
tgttaaaaccttccattttgatggtggatttgttaattttccttgtgattgccactttttgctttattacacacacacacacacacacacacacacacaaacacacatatacttatacacacatacacatacacacatacatatacatacacaaacacacacgcatatacacatacacacacatatatatatacacacata

SEQ ID NO: 123483 - DNA, 201 bp, Homo sapiens
atatttttttaattagctgggcttggtggtgcacacctgtagtcccagctacttgggaggctgaagtgggaggatcacttgagcccaggagttcaggattrtagtgagccatgaccacggcactccagcatgggcaacagaatgagacactgtctcaaaaaagaaaggaaggaaggaagtgggggagggagagagggaaag

SEQ ID NO: 123484 - DNA, 201 bp, Homo sapiens
ggatacaagtttcttttttttcttttctttttctttttctttttcttttcttttttttttttttttttttttttttttgagacatagtctctcactctgtygtccaggctggagtatagtggtgtgaccttggctcactggtactttctcctcccaggttcaaaccattctcgtgcctcagcctcccaagtagctgggatt

SEQ ID NO: 123485 - DNA, 201 bp, Homo sapiens
cctgtatcttgtgctgacctcctatctcatcctgtgacttggaatgccttgaccatctgggaatgcagcccagtaggtctcagcctcattttacccagccmctattcaagatggagttgctctggctcacacgcctctgacagaaggatccctgtggggtgtgagatacctaaagaaaggttcgctttctttttttttttt

SEQ ID NO: 123486 - DNA, 201 bp, Homo sapiens
ttgccttcagggaactccccacccccagtcgggccagcctgagccaagagaagcagccaaaagccctggaggctccctggcctgttgggcaatggaagtgracgtggagtggacagcgccaatgggtgtggggcaacctgccagcagactcagccaccagaagccccgggcacatggaaacgcggccacacaaacggcccc

SEQ ID NO: 123487 - DNA, 201 bp, Homo sapiens
gctttgtgtcccatttggtgtgcacatttgtggatttgcaagatgcatatgtttggcacattttaccgatgaatttttagcccattttaccaatgaaacasgttcagcaaggtcaaggcacttgtccaaggtcacacagcagtgggtgtgtgcgctcagttttctctctttttttttttttttgagatggagccttgctct

SEQ ID NO: 123488 - DNA, 201 bp, Homo sapiens
gctttgtggctccgatggtctgtagagccagccctgagtgggctgcaatcctcccatttctccattcagcctgtcagatgctgctcctcttcaaggttcakcccaacaccctgtcacccctccacagcccacccttccccacctctgcccaccatggggaagccttctgatttcttgcaggggagccttccctggaggagt

SEQ ID NO: 123489 - DNA, 201 bp, Homo sapiens; identical to SEQ ID NO: 20804

SEQ ID NO: 123490 - DNA, 201 bp, Homo sapiens
gtcagccggaacacctgcccggccatctggcacttttatcctctagaccgggccacacaggcctctttgcccacctcctcaaaggcagtgggctgcagggstcccaggacacctgctggggagaatgagtgtcccccagccaccccaccgccaagccccaggtgctgcaaggcagcattctgggtcctcaggtaacacttc

SEQ ID NO: 123491 - DNA, 201 bp, Homo sapiens; identical to SEQ ID NO: 20805

SEQ ID NO: 123492 - DNA, 201 bp, Homo sapiens
agtgaaaagtgagggtgtgataggattagagttggttcttaggaagatcattccaggagcagtgggaggacaggcaagaagagtggagtcaggaaggtgasagagcccacagactggcccatgcttccaggggaggagagcaaggctggggaaggacagcagtaagtgcagccaaggagccccctcttattggccagcagg

SEQ ID NO: 123493 - DNA, 201 bp, Homo sapiens
ttcgctgggtcgctgaccccgcctgactgcgagcccacggtgctctggaccgtcttcgaggaccccatacccatccggtgggtgcaggtggagccaccgtyccccctcgccccccacacccctccccgggccttgcctggctcctcccgcaggcgctgcccctctcccaccccgttttgatctctttgccctgcaccctca

SEQ ID NO: 123494 - DNA, 201 bp, Homo sapiens
ctgagcccagggctgggtcatttctcctgggccgagtgtggcactaagcatactgagtgctagcctgcacagaggccaggcccgggtgggccccaggacasagctgtcagtggctgtcttgccatggagtgagtggatgaatcagcagggctgggatcctctcccattttacagtaggaggctggggagaggagctggcca

SEQ ID NO: 123495 - DNA, 201 bp, Homo sapiens
acctggagatttgggaggctgggctgctgttgcctgtctaccgcgcactgcagctgcacttcaactgccggcggtgggggggcccgaggcgagcagactcrgagcacagcctggacaggcagcgccaggctatggaggtagactcgggaacaaggtggggtggccggagtgctcccacggaggtgagagagagcaaggtga

SEQ ID NO: 123496 - DNA, 201 bp, Homo sapiens
cagtagactgactgggcatcaggtgcaagtgcgtgactgtccccctgtgtgtgagtctgggcctgctgtgattgccggtcccgagtcagtcaaggctggtrtgcccgttactgtggccagcccaagtgtgtgcaggtgatagaggtcccagtgtgggtgtgcaactgtgtgccggagacccttccaccttcatctcaccat

SEQ ID NO: 123497 - DNA, 201 bp, Homo sapiens
gactgactgggcatcaggtgcaagtgcgtgactgtccccctgtgtgtgagtctgggcctgctgtgattgccggtcccgagtcagtcaaggctggtgtgccygttactgtggccagcccaagtgtgtgcaggtgatagaggtcccagtgtgggtgtgcaactgtgtgccggagacccttccaccttcatctcaccatggggc

SEQ ID NO: 123498 - DNA, 201 bp, Homo sapiens
gcaactgtgtgccggagacccttccaccttcatctcaccatggggcagccaactgggagactagatggataggtcagatgcagggtacaagagaagggggrtgctgtgacctgttcaggtgtgggggaagcagggagctaggtttcctgaggctgggctatcctctgggtgtatgggggccactctctgctgcacccccag

SEQ ID NO: 123499 - DNA, 201 bp, Homo sapiens
gcaggtttctgtctgtagtcgtctgccccagtagactgactgggcatcaggtgcaagtgcgtgactgtccccctgtgtgtgagtctgggcctgctgtgatygccggtcccgagtcagtcaaggctggtgtgcccgttactgtggccagcccaagtgtgtgcaggtgatagaggtcccagtgtgggtgtgcaactgtgtgcc

SEQ ID NO: 123500 - DNA, 201 bp, Homo sapiens
gtcctctcgcccgcgcccgccgccccggcccccgcacgctccaccagcttcagcagccgcggcacctcggaccgcgaagccgcttcggcccggagctggcsgagcaggcgagccagccggcccggggctcgggcgtcttcctggcccggcccattggattgcggccccgggtcccgccggcggcccgtgacgcgccgcagc

SEQ ID NO: 123501 - DNA, 201 bp, Homo sapiens
cattctgctgggccgtccggggcgtcgtctgcgggcctggaggcggcgaccagggcgctcacggtgccgagcgtccgcagcagggtcgggccgcggggcgyggcgcgggggacggcgcggggctcgcggcgggcaggcggggacggcggcggcggcggcagcagcgcgcgcagagcgtccagctccgctcgaagctccgcg

SEQ ID NO: 123502 - DNA, 201 bp, Homo sapiens
ctcaggggcggggggtttgctggggatggcaccagcagggcacagggaggctggttccaatccccctccctctgccgcccggggctctcagtgaatctgakgtccaccttcccgctggcgtcgatgcggcccaacacctcgagctactgtcgcttcgctgggtcgctgaccccgcctgactgcgagcccacggtgctctgg

SEQ ID NO: 123503 - DNA, 201 bp, Homo sapiens
aggggctacagatgtgggggctggcacttgtggcagagggttccaaagtcatgggcatagagaagacaggttggcaggagcaagggcagaatgggagcggrgtcctgggggtcctgttgggccctgaggaggactgcagaggtgtcggtgaggggtggacaggcaggcgtgtcagcacaaccctgagcccctgagctcaag

SEQ ID NO: 123504 - DNA, 201 bp, Homo sapiens
tgggagcctcctgcttagagtaccccagctgagttccctcttcagagactccctcactcagaacccctcgcacttggagcccctcccaggagcaggactgyagcaacaccaacttctgcgccatagtgtcgggcttgaggaaggtgcctgagccaggtgaggagccaccgggtcgttttccggctcaggggcggggggttt

SEQ ID NO: 123505 - DNA, 201 bp, Homo sapiens
agccaccgggtcgttttccggctcaggggcggggggtttgctggggatggcaccagcagggcacagggaggctggttccaatccccctccctctgccgccyggggctctcagtgaatctgatgtccaccttcccgctggcgtcgatgcggcccaacacctcgagctactgtcgcttcgctgggtcgctgaccccgcctgac

SEQ ID NO: 123506 - DNA, 201 bp, Homo sapiens
ggaatgcctgaatcggcagggccagtggcggcgagaaccctccaccccatttcccagatgccagatgcctcctgccactgggagcctcctgcttagagtaycccagctgagttccctcttcagagactccctcactcagaacccctcgcacttggagcccctcccaggagcaggactgtagcaacaccaacttctgcgcca

SEQ ID NO: 123507 - DNA, 201 bp, Homo sapiens
cgagaaccctccaccccatttcccagatgccagatgcctcctgccactgggagcctcctgcttagagtaccccagctgagttccctcttcagagactcccycactcagaacccctcgcacttggagcccctcccaggagcaggactgtagcaacaccaacttctgcgccatagtgtcgggcttgaggaaggtgcctgagcc

SEQ ID NO: 123508 - DNA, 201 bp, Homo sapiens
cccctccccgggccttgcctggctcctcccgcaggcgctgcccctctcccaccccgttttgatctctttgccctgcaccctcagatgaccctgttctacascctgccccaggctggaccctcccactttcaccccataccgctcacgggtaacttccgcccccagcagcctcttttttttttttttttttttgagacggag

SEQ ID NO: 123509 - DNA, 201 bp, Homo sapiens
gcaggagccatggacaccatgggttccattccatggaggcaatggggccgcactggggagaaacctggcctgaggaagggcctctgctcataccctgtgcyctaatggcacaagatggacaggtggtgaggtagagagggtgtcgtgtgcctcctccccttcattgctactctgaatggacactgatcctcagaaccacct

SEQ ID NO: 123510 - DNA, 201 bp, Homo sapiens
ggctctcagtgaatctgatgtccaccttcccgctggcgtcgatgcggcccaacacctcgagctactgtcgcttcgctgggtcgctgaccccgcctgactgygagcccacggtgctctggaccgtcttcgaggaccccatacccatccggtgggtgcaggtggagccaccgtcccccctcgccccccacacccctccccggg

SEQ ID NO: 123511 - DNA, 201 bp, Homo sapiens
cagagactccctcactcagaacccctcgcacttggagcccctcccaggagcaggactgtagcaacaccaacttctgcgccatagtgtcgggcttgaggaargtgcctgagccaggtgaggagccaccgggtcgttttccggctcaggggcggggggtttgctggggatggcaccagcagggcacagggaggctggttccaa

SEQ ID NO: 123512 - DNA, 201 bp, Homo sapiens
ccccccagatgcacgtggtccacagtaacacaaagtaccagagcatggaggaggcaccacgccacggtgatgggctcgagtgcaggccctgctgctggagktgctgctggcggtgaaggcagggctgtgattctatgtatgtttccaaaaaaggggtccatggggatcctggaagtggacaggccaggcctgtggagtccg

SEQ ID NO: 123513 - DNA, 201 bp, Homo sapiens; identical to SEQ ID NO: 20820

SEQ ID NO: 123514 - DNA, 201 bp, Homo sapiens
atctcctgacctcctgatccgcctgcctcggactcccaaagtgctgggattacaggcttgagccaccgtgcccggcccacagcagcctcttaaggggcacrcagtcttggcctctccgagagcctcggtccccgcagcagccccctgctcttcccccaccctagcagttgtgcactgcgctctgatgggcctggggctcag

SEQ ID NO: 123515 - DNA, 201 bp, Homo sapiens
acccttgctgaaccttgtgctccaggggtcctcctcctctaggaccagcttgccacggtttctcagagcccaggtgccctctgacctgccatgcggaggtkggatttgatactgtacattgtcttgatgcctgtttttttatgttttcattaagggtttttagtttttggttgggttgacactaacttttcttaagatgct

SEQ ID NO: 123516 - DNA, 201 bp, Homo sapiens
gtggccaagagacagtctgcaccctgcactctgtggcctttgcaggtttctgtctgtagtcgtctgccccagtagactgactgggcatcaggtgcaagtgygtgactgtccccctgtgtgtgagtctgggcctgctgtgattgccggtcccgagtcagtcaaggctggtgtgcccgttactgtggccagcccaagtgtgtg

SEQ ID NO: 123517 - DNA, 201 bp, Homo sapiens
gacctcctgcagggctccgtcttggcctggatccgcaggggggcctgggtaggagggaggctgtggtcttgggatggggtggcagttccgggcccacagtrgggcaagagacatcctacaccttcctcccatccttgccccgaaagtcatgggcactggggtccaaggtgccctcactatttgacctttcttgctggtggc

SEQ ID NO: 123518 - DNA, 201 bp, Homo sapiens
taataggtcacccctcccctgcaggattaacctcagcgattgttgctggcatcagtgcagccctgggaccagagcacacctgggtgagtttggagcgctcscgctcttcctggtggccctgcctgggcaccgacccctcccatcctctcctcagtagccacgcccctagcccagctagctaatgaataaatatgtagtagc

SEQ ID NO: 123519 - DNA, 201 bp, Homo sapiens
ggagtgaaggtgcattactccggcgcctggagcagcctctgcccactgcgggggcctctctggcagacctggaagactctgccgacagcagcagcgccctsctcgtgccccctgaccctgcccagagcgggagcaccccagctgcagaggcactgccagggggtggccgccacagccgcagctccctcaatactgtggtgt

SEQ ID NO: 123520 - DNA, 201 bp, Homo sapiens
cctggttttgcctagctcccctgcatcccctgtgccaggcccgtacctgcctctgacacccctctgtctcttcctgcagacgatgatgcttttgagcctgyggaggtcagcctgccagcccctggggatggtgggagtgaaggtgcattactccggcgcctggagcagcctctgcccactgcgggggcctctctggcagac

SEQ ID NO: 123521 - DNA, 201 bp, Homo sapiens
caccagcttcagcagccgcggcacctcggaccgcgaagccgcttcggcccggagctggccgagcaggcgagccagccggcccggggctcgggcgtcttccyggcccggcccattggattgcggccccgggtcccgccggcggcccgtgacgcgccgcagcacctcgctggctctgtacgcactacgcgcctgggcccacgg

SEQ ID NO: 123522 - DNA, 201 bp, Homo sapiens
tgactccagctacatttcccgaggccaagagatgagaagctgctggctccaggctccgctgcaggctgccctggctgagcgggtgctgggcaccgcggagsgctgcctggtgctctgaagccatgccccagtgcctccctgggagttctgctgtggagtctgtgtggagggtgactctggagagatgtttgtgtcccggtg

SEQ ID NO: 123523 - DNA, 201 bp, Homo sapiens
gcagaggcactgccagggggtggccgccacagccgcagctccctcaatactgtggtgtagacggcctggcctgtaccccaacggtctgggagcacctgtcygttgtagaaaacaccggtccctggggagacttgaaaggcccctgtcccagcctggacgccacgcactgccgcacgtcactggcgggctcgcgtgtgtaca

SEQ ID NO: 123524 - DNA, 201 bp, Homo sapiens
gatgtgggggctggcacttgtggcagagggttccaaagtcatgggcatagagaagacaggttggcaggagcaagggcagaatgggagcggggtcctggggrtcctgttgggccctgaggaggactgcagaggtgtcggtgaggggtggacaggcaggcgtgtcagcacaaccctgagcccctgagctcaagtgcagggatg

SEQ ID NO: 123525 - DNA, 201 bp, Homo sapiens
atgtgggggctggcacttgtggcagagggttccaaagtcatgggcatagagaagacaggttggcaggagcaagggcagaatgggagcggggtcctgggggycctgttgggccctgaggaggactgcagaggtgtcggtgaggggtggacaggcaggcgtgtcagcacaaccctgagcccctgagctcaagtgcagggatgg

SEQ ID NO: 123526 - DNA, 201 bp, Homo sapiens
ccatttcccagatgccagatgcctcctgccactgggagcctcctgcttagagtaccccagctgagttccctcttcagagactccctcactcagaacccctygcacttggagcccctcccaggagcaggactgtagcaacaccaacttctgcgccatagtgtcgggcttgaggaaggtgcctgagccaggtgaggagccacc

SEQ ID NO: 123527 - DNA, 201 bp, Homo sapiens
cttccgcacctcgcctaggctgcccttgtgcggccgccctcagtccccgccaccttgcggggccccaggcggcactggcatcttcttgtggttcttcctgrccggggctcggtgcgctccgcattctgctgggccgtccggggcgtcgtctgcgggcctggaggcggcgaccagggcgctcacggtgccgagcgtccgcag

SEQ ID NO: 123528 - DNA, 201 bp, Homo sapiens
gtttccaaaaaaggggtccatggggatcctggaagtggacaggccaggcctgtggagtccgtggggggatctctagggtctataggatctgtgggaggatrgggcggtgggaatgcctgaatcggcagggccagtggcggcgagaaccctccaccccatttcccagatgccagatgcctcctgccactgggagcctcctgc

SEQ ID NO: 123529 - DNA, 201 bp, Homo sapiens
gggaggatggggcggtgggaatgcctgaatcggcagggccagtggcggcgagaaccctccaccccatttcccagatgccagatgcctcctgccactgggarcctcctgcttagagtaccccagctgagttccctcttcagagactccctcactcagaacccctcgcacttggagcccctcccaggagcaggactgtagcaa

SEQ ID NO: 123530 - DNA, 201 bp, Homo sapiens
gcagcagccccctgctcttcccccaccctagcagttgtgcactgcgctctgatgggcctggggctcagcctgtggttctgtcaaccgtgggcgaccctccrtgtgaaataatgaaataatgcacagagtgaccttagcctaatgtagcctggagggggtgggtgcgtgacccggcgtggtcccccattgcaagaggggcat

SEQ ID NO: 123531 - DNA, 201 bp, Homo sapiens
ctatgtatgtttccaaaaaaggggtccatggggatcctggaagtggacaggccaggcctgtggagtccgtggggggatctctagggtctataggatctgtrggaggatggggcggtgggaatgcctgaatcggcagggccagtggcggcgagaaccctccaccccatttcccagatgccagatgcctcctgccactgggag

SEQ ID NO: 123532 - DNA, 201 bp, Homo sapiens
ggcatgagagctcctgcgtgtacacagggaccaggaccccctacacacgggagctgagacaacctacagggccaaaaaccctccacaggggctagcttcasaggaaaggagcatcctcacacagcagtccagatgcaccctctgtgtaggtgccaggtcccaccttacaaatcacaaccagccatggcccctgaggaccag

SEQ ID NO: 123533 - DNA, 201 bp, Homo sapiens
tcaggacccctcctaggcagaggcaggagccccacacagggcatgagagctcctgcgtgtacacagggaccaggaccccctacacacgggagctgagacaycctacagggccaaaaaccctccacaggggctagcttcagaggaaaggagcatcctcacacagcagtccagatgcaccctctgtgtaggtgccaggtccca

SEQ ID NO: 123534 - DNA, 201 bp, Homo sapiens
ccattggattgcggccccgggtcccgccggcggcccgtgacgcgccgcagcacctcgctggctctgtacgcactacgcgcctgggcccacgggcggccggrcgtcgccatccgccctgctgcctccaccgccgccagcgcccgggatggccgggagccccaggctgcagcctagcgaccgctggggcccaggcgacgcacc

SEQ ID NO: 123535 - DNA, 201 bp, Homo sapiens
gccaccgggtcgttttccggctcaggggcggggggtttgctggggatggcaccagcagggcacagggaggctggttccaatccccctccctctgccgcccrgggctctcagtgaatctgatgtccaccttcccgctggcgtcgatgcggcccaacacctcgagctactgtcgcttcgctgggtcgctgaccccgcctgact

SEQ ID NO: 123536 - DNA, 201 bp, Homo sapiens
ccgccaccttgcggggccccaggcggcactggcatcttcttgtggttcttcctgaccggggctcggtgcgctccgcattctgctgggccgtccggggcgtygtctgcgggcctggaggcggcgaccagggcgctcacggtgccgagcgtccgcagcagggtcgggccgcggggcgcggcgcgggggacggcgcggggctcg

SEQ ID NO: 123537 - DNA, 201 bp, Homo sapiens
agtcagtcaaggctggtgtgcccgttactgtggccagcccaagtgtgtgcaggtgatagaggtcccagtgtgggtgtgcaactgtgtgccggagacccttycaccttcatctcaccatggggcagccaactgggagactagatggataggtcagatgcagggtacaagagaaggggggtgctgtgacctgttcaggtgtgg

SEQ ID NO: 123538 - DNA, 201 bp, Homo sapiens
gagtattcttggtgtcactgtccaaagcaaagttgtgtccacgggacacagactaggtgaggctctgtgtccaggtgatgctgtccagtgagagggggttscagtcagagtgaggctgaccggaggccgctgtccaattggtgccgtgtggaatgtgattacatactggttgacaccatcctgagggccatcaccagctga

SEQ ID NO: 123539 - DNA, 201 bp, Homo sapiens
ttttgatctctttgccctgcaccctcagatgaccctgttctacaccctgccccaggctggaccctcccactttcaccccataccgctcacgggtaacttcygcccccagcagcctcttttttttttttttttttttgagacggaggctcactctgtcgcccaggctggagtgcagtggtggaatctcagctcactgcaagc

SEQ ID NO: 123540 - DNA, 201 bp, Homo sapiens
cacgccacggtgatgggctcgagtgcaggccctgctgctggaggtgctgctggcggtgaaggcagggctgtgattctatgtatgtttccaaaaaaggggtycatggggatcctggaagtggacaggccaggcctgtggagtccgtggggggatctctagggtctataggatctgtgggaggatggggcggtgggaatgcct

SEQ ID NO: 123541 - DNA, 201 bp, Homo sapiens
tccactcaatcactccctgcagcccgtctctctggaaggtgcaggaggaggtgagaattgggcactctgtcaacccctcagactcccccattcctgctgastcacccgtcctctgggacctccagcagctggctgtgctgatccctagagcctcattagccattctctccctccccccagtcattaaaacactgccaacaa

SEQ ID NO: 123542 - DNA, 201 bp, Homo sapiens
gggcccgcgggacggctgtgggaacgaccaaagccctgggggttccggtctggggcgcagggaaccccggcagggccgggtctcgggcagcccggttcccmggggaccctgcgggaacgacgacgttgtgggcaggtcctcacaaagggcatggcccagtttctgggcataggtgacatggagcatcgccagccaaagacc

SEQ ID NO: 123543 - DNA, 201 bp, Homo sapiens
tggccgggagccccaggctgcagcctagcgaccgctggggcccaggcgacgcaccgtggagggggcccgcgggacggctgtgggaacgaccaaagccctgrgggttccggtctggggcgcagggaaccccggcagggccgggtctcgggcagcccggttcccaggggaccctgcgggaacgacgacgttgtgggcaggtcc

SEQ ID NO: 123544 - DNA, 201 bp, Homo sapiens
tggaggaggcaccacgccacggtgatgggctcgagtgcaggccctgctgctggaggtgctgctggcggtgaaggcagggctgtgattctatgtatgtttcmaaaaaaggggtccatggggatcctggaagtggacaggccaggcctgtggagtccgtggggggatctctagggtctataggatctgtgggaggatggggcg

SEQ ID NO: 123545 - DNA, 201 bp, Homo sapiens
tggattgcggccccgggtcccgccggcggcccgtgacgcgccgcagcacctcgctggctctgtacgcactacgcgcctgggcccacgggcggccgggcgtsgccatccgccctgctgcctccaccgccgccagcgcccgggatggccgggagccccaggctgcagcctagcgaccgctggggcccaggcgacgcaccgtgg

SEQ ID NO: 123546 - DNA, 201 bp, Homo sapiens
gagcgggagcaccccagctgcagaggcactgccagggggtggccgccacagccgcagctccctcaatactgtggtgtagacggcctggcctgtaccccaayggtctgggagcacctgtctgttgtagaaaacaccggtccctggggagacttgaaaggcccctgtcccagcctggacgccacgcactgccgcacgtcactg

SEQ ID NO: 123547 - DNA, 201 bp, Homo sapiens
gcaccctgtggtcaggacccctcctaggcagaggcaggagccccacacagggcatgagagctcctgcgtgtacacagggaccaggaccccctacacacggragctgagacaacctacagggccaaaaaccctccacaggggctagcttcagaggaaaggagcatcctcacacagcagtccagatgcaccctctgtgtaggt

SEQ ID NO: 123548 - DNA, 201 bp, Homo sapiens
taatgttgcactgattatccctgtgtgtttattttaatgtacttgtacaaatagaaaacaacaatttaaatgtatgaacagggccaatttgaggaaaaatrtttctcatttgctggttgcaattgatttctcccattgtggaaagacatttatgtagaaaattctacattatgtagaaaattctaaatccaatggtggaaa

SEQ ID NO: 123549 - DNA, 201 bp, Homo sapiens; identical to SEQ ID NO: 20826

SEQ ID NO: 123550 - DNA, 201 bp, Homo sapiens
caaagcacagtgccctatccttcccggcagggtcacagttcagaagatgtaacctgattttcatctgtagttaatagaagcattttgccttgacattcatmctaaaaatagaaaacactagtaattccagggatctgggttagtctcttaagcatgtcaactattgatgagaatactctttgtaaaactaactccagaaat

SEQ ID NO: 123551 - DNA, 201 bp, Homo sapiens; identical to SEQ ID NO: 20827

SEQ ID NO: 123552 - DNA, 201 bp, Homo sapiens
taacattcccgcctggtgagtttttagtgctggagtgactcccagccggcccctaccccgctcaagctcctgctgactgtcccagtgtgggtcctggccargactggcaccaaggcagtgggatcctttataagtaggcctccagcgccatacaccagaaagcaggagcccacttctgggacactgggagagggtgcaggc

SEQ ID NO: 123553 - DNA, 201 bp, Homo sapiens
tctttgttttgaaatgtggctgatgtctgaatacagtatccaacaaaataattaaagtgctgtttggagatttagcttgaagggcaatcactttttaactkaatacgtttcttagatcttgatttaactgtctttttttggggtgaaaatttgtttgatcttgtcttatcattagaaaagatacagcatgggaattctatg

SEQ ID NO: 123554 - DNA, 201 bp, Homo sapiens
catttaacatgagcaattccagttttttgtgcatcattttctcagtccataaaatatagaattgtaatatatcaatcaatatgatttccactgaacaggtrctgttttaggtgcgtaaaaaaaaatcagtgaccccaaaaacacaataatccctactcacatggaacctacattttaatgaaaaagaacaacaataaacat

SEQ ID NO: 123555 - DNA, 201 bp, Homo sapiens
tgactacgtcatctggccctcgtttgaacggctggaagcaatgaagttaaatgagtgtgtagaacacactccagaacttaaactgtggatggcagccatgrgggaagatcccacagtctcagccctgctcactggtgtgaaggactggcaaggtttcacagagctctacttacagcctggaggcctgtgactatgggctct

SEQ ID NO: 123556 - DNA, 201 bp, Homo sapiens; identical to SEQ ID NO: 20831

SEQ ID NO: 123557 - DNA, 201 bp, Homo sapiens
tgaaggagggaaggcagggaggagggagggagggaggggaagagagaaaggagagaaaggaaggaaaaaaggaagggagggagaaagataggaagcaggargaaagaagaaagaaaatagacaatcattatttaggagaatcaaaagagcataaaggagataggccttgaaattccaggagatgataagaaaaattgcttt

SEQ ID NO: 123558 - DNA, 201 bp, Homo sapiens
gggtggcacttgtgctatcacctaactatgcacaggcaggacgatggagtaatagttactgtatgccctgtgaccaaagttctctttgatgcagggagccwgctaggcaatcaatctaatatggagaagccgagatgtccatttgtttccagaggagagaaaatccttgggaccaaaggagggttaagagaagtggggaag

SEQ ID NO: 123559 - DNA, 201 bp, Homo sapiens; identical to SEQ ID NO: 20828

SEQ ID NO: 123560 - DNA, 201 bp, Homo sapiens; identical to SEQ ID NO: 20829

SEQ ID NO: 123561 - DNA, 201 bp, Homo sapiens; identical to SEQ ID NO: 20832

SEQ ID NO: 123562 - DNA, 201 bp, Homo sapiens; identical to SEQ ID NO: 20833

SEQ ID NO: 123563 - DNA, 201 bp, Homo sapiens
gctgcattcctaagtacagaaaaggagtggcttgttgaattttatcaggagcaatgtggagtcctgcattggcaacagctaattttaaagaggtaaaacaytgaattaattcatctttagtgggggcagcaattagtatatcaaccatataatgaagaatgtaattatttttaaaagtctgtcagataggttgtaacacag

SEQ ID NO: 123564 - DNA, 201 bp, Homo sapiens
tgatgtttttaactgggaccaagtttttcaaatacaaggtgaggtcaagtgcaagacttatattacacagtcttttttttcctccttagcatatatccagrtagttatagatatttcatatatatgaaaatatatagattatctatacacacctgtatgtataaatacatacacatacattttatgcatttaccatttcta

SEQ ID NO: 123565 - DNA, 201 bp, Homo sapiens
gaagaatgtgatgtttttaactgggaccaagtttttcaaatacaaggtgaggtcaagtgcaagacttatattacacagtcttttttttcctccttagcatrtatccagatagttatagatatttcatatatatgaaaatatatagattatctatacacacctgtatgtataaatacatacacatacattttatgcatttac

SEQ ID NO: 123566 - DNA, 201 bp, Homo sapiens
ggtgtggagttgcaagagctctggaaaagatgttggtgctaaactgttctaccaaattactgatactggagaaaatgttgaagagttgctttcctgaatcwctcaaggtaccataaaattaataattttattttatttctttattgtgttaatctgtaaaataatgtcaaacttgtggctattttcctttttttctgataa

SEQ ID NO: 123567 - DNA, 201 bp, Homo sapiens
ataataagactctctaggagcacttgttaaacatacagcttcccagctccctcctgctggagacagattgaatagactgtggataaggcccagggaattayacttttctttttttttttttctttcttttttttttttttttaactttaagttctgggatgcatgtgctgaatgtgcagatttgttacataagtatacatg

SEQ ID NO: 123568 - DNA, 201 bp, Homo sapiens
gccctcagggaatgcttatagagccttgctccatcaaatctaaagtacagtttttgtttgtttgtttgttttaatttgagttggtgtcaccctctaatgaygtctaattgtaatttagggttgaagaagtagtcgcatttcacaggttattttcaagtagtatactgggcttgaaaagaagctgagcatcaaaattatttg

SEQ ID NO: 123569 - DNA, 201 bp, Homo sapiens
atgcctaccttcaagtttctaattaggtgtggagttgcaagagctctggaaaagatgttggtgctaaactgttctaccaaattactgatactggagaaaaygttgaagagttgctttcctgaatctctcaaggtaccataaaattaataattttattttatttctttattgtgttaatctgtaaaataatgtcaaacttgt

SEQ ID NO: 123570 - DNA, 201 bp, Homo sapiens
tttttcctccttagcatatatccagatagttatagatatttcatatatatgaaaatatatagattatctatacacacctgtatgtataaatacatacacayacattttatgcatttaccatttctatattctagtgttgtaagaacactcatttgtcacttctaatgaggcatgcatggccttcagggtaaaaagagacca

SEQ ID NO: 123571 - DNA, 201 bp, Homo sapiens
aagacttatattacacagtcttttttttcctccttagcatatatccagatagttatagatatttcatatatatgaaaatatatagattatctatacacacmtgtatgtataaatacatacacatacattttatgcatttaccatttctatattctagtgttgtaagaacactcatttgtcacttctaatgaggcatgcatg

SEQ ID NO: 123572 - DNA, 201 bp, Homo sapiens
gtgtgaaaaatcatggtaataattggatggatcttggtgctagaggcctattatcactaaatcacctcaatccatcattatatagaaaaaagttatataayttccaatatctttttcagaaggctgagctgatagttgtaagttatagtcatctaaattgacccaatcattctttctgaaggtttggtggggacaaatgtg

SEQ ID NO: 123573 - DNA, 201 bp, Homo sapiens
tggttagaccagaaatcttcagaagggagtatgccttaaccctaaagaggcctagaagagctgtgcaagatgagggcattacagccctatcttatccatayggacaggtgcccctcatgcatccgtttataggctctccacaacggtcgcattcctttcccagagctatgaatatctgcttttctgggataggaatcttgg

SEQ ID NO: 123574 - DNA, 201 bp, Homo sapiens
tctttctgaaggtttggtggggacaaatgtgaattagtatcacctaatatagctggagtagtaacggtccctcatttagcacataagtcagcctggacatwaccttcggcttctcctgtggtattttgactacagacttctgtggtaatagctgtaatgttcttggaatactgaataccttctaagaagtcattggtatgt

SEQ ID NO: 123575 - DNA, 201 bp, Homo sapiens
agggaggagccaaggctccgataccacactgtgttcaatacaccttcccactcatgcattcttcaagaagtcccaggcccacactgaagagccttaccagwggggaagaaacaagccattagtcgtgggaagaggggaagtcagtttgcagagaattcaatccaacaggacacaggctggaaaggatggagtagatgggga

SEQ ID NO: 123576 - DNA, 201 bp, Homo sapiens
cacactgtgttcaatacaccttcccactcatgcattcttcaagaagtcccaggcccacactgaagagccttaccagtggggaagaaacaagccattagtcrtgggaagaggggaagtcagtttgcagagaattcaatccaacaggacacaggctggaaaggatggagtagatggggatttggaaaggtggagaaaggaatc

SEQ ID NO: 123577 - DNA, 201 bp, Homo sapiens
acaacacctactgaatcaagatttatcaaataactatgacaagtggaatctgggtgaggtaagttcagggtaaatctcaccaacactgagttacaccttgmgttctgtaatggcgaggtgtaatagagagtctttgaagttggtttgccacgccaaacaaatctaagctcttgtatacttcatagacttttagagctctaa

SEQ ID NO: 123578 - DNA, 201 bp, Homo sapiens
tggtggctcatgcctgtaatttcaatactttggaaggccaaggtgggaggatcacttgaacccaggagttcgagacctgcctgggcaacataatgagaccscatctctacaaaaaaaatttttttaattatccaggtgtggtggtgcttgccttagttccagctactcaggaggctggggtgggagaattgtttgaaccca

SEQ ID NO: 123579 - DNA, 201 bp, Homo sapiens
tccctcttcagggggagcaatggcagtcagaattatacccaatgaaaatagaattacaagaaaactcctaaatagatccaaatattaacaggcaaaaattraatgcctaccttcaagtttctaattaggtgtggagttgcaagagctctggaaaagatgttggtgctaaactgttctaccaaattactgatactggagaaa

SEQ ID NO: 123580 - DNA, 201 bp, Homo sapiens
ttatactaatgcctatgctgtgttctacaaggatgtcagggcttatcgacagctattggaagaatgtgatgtttttaactgggaccaagtttttcaaatamaaggtgaggtcaagtgcaagacttatattacacagtcttttttttcctccttagcatatatccagatagttatagatatttcatatatatgaaaatatat

SEQ ID NO: 123581 - DNA, 201 bp, Homo sapiens
ctaatttgactggcttcagagtgtcaggaacttgaaaaacctctagtccaaacatgttcaataaagtggttccttagtgtttcatgatctctagaaggatsaagcacaaatggctgacttacagatactagctttttccctgggtgaatgattccttatgactgatgactttggtcatgtgggtatttggaagaagagtga

SEQ ID NO: 123582 - DNA, 201 bp, Homo sapiens
acataatttaatgattaacagaacaaacatgacccttccaggttactttagatcttgaattttcactaagggtgatccatgttacacaataatataagccraacccaatttggaaagactccttctatgaggatatgtgaatgaggtccagattgggtaatatagaagaaagttgtacaattctaggcattgaagaaaatg

SEQ ID NO: 123583 - DNA, 201 bp, Homo sapiens
tgcctgtaatttcaatactttggaaggccaaggtgggaggatcacttgaacccaggagttcgagacctgcctgggcaacataatgagaccccatctctacaaaaaaaatttttttaattatccaggtgtggtggtgcttgccttagttccagctactcaggaggctggggtgggagaattgtttgaacccaggaggcggag

SEQ ID NO: 123584 - DNA, 201 bp, Homo sapiens
acggtgaaaccccgtctctactaaaaatacaaaaaaattagccgggcatggtggcgggcgcctgtagtcccagctactcaggaggctgaggcaggagaatrgcgtgaacccaggaggtggagcttgcagtgagccgagatcgcgccactgcactccagcctgggcgacagagcgagactccatctcaaaaaaaaaagaaaa

SEQ ID NO: 123585 - DNA, 201 bp, Homo sapiens
tgctagaggcctattatcactaaatcacctcaatccatcattatatagaaaaaagttatataatttccaatatctttttcagaaggctgagctgatagttdtaagttatagtcatctaaattgacccaatcattctttctgaaggtttggtggggacaaatgtgaattagtatcacctaatatagctggagtagtaacggt

SEQ ID NO: 123586 - DNA, 201 bp, Homo sapiens
ggcgtggtggcacacctgtaatcccacacgcacgtgaggctgagatacgagaatcgcttgaaccggggaggtggaggttgcagtgagccgagattgcaccmccgcaactccaaactgagagacagagcaaggctctcaaaaaaaaaaaaaaaaaaaaaaaaaaaaaaaaaaattcagcaacgtttatttgagcaaagaaca

SEQ ID NO: 123587 - DNA, 201 bp, Homo sapiens
ccaggcgtggtggcacacctgtaatcccacacgcacgtgaggctgagatacgagaatcgcttgaaccggggaggtggaggttgcagtgagccgagattgcmccaccgcaactccaaactgagagacagagcaaggctctcaaaaaaaaaaaaaaaaaaaaaaaaaaaaaaaaaaattcagcaacgtttatttgagcaaaga

SEQ ID NO: 123588 - DNA, 201 bp, Homo sapiens
gatcaagaacaccatgaagaggcaatcaacaaaatccaagactgtgaaaactgcacagcaaacacctcggtgttttaaacaaataaactgaaagaatcaaagagtgggggtagggattgaaggaaaacaggtagattaaaaaatttgagaccaaaattaaactatagtgtgtttaagaacacacacttgaaaagtaggcac

SEQ ID NO: 123589 - DNA, 201 bp, Homo sapiens
atcaagaacaccatgaagaggcaatcaacaaaatccaagactgtgaaaactgcacagcaaacacctcggtgttttaaacaaataaactgaaagaatcaaagagtgggggtagggattgaaggaaaacaggtagattaaaaaatttgagaccaaaattaaactatagtgtgtttaagaacacacacttgaaaagtaggcact

SEQ ID NO: 123590 - DNA, 201 bp, Homo sapiens
gtaaaataatgtcaaacttgtggctattttcctttttttctgataataagactctctaggagcacttgttaaacatacagcttcccagctccctcctgctrgagacagattgaatagactgtggataaggcccagggaattatacttttctttttttttttttctttcttttttttttttttttaactttaagttctggga

SEQ ID NO: 123591 - DNA, 201 bp, Homo sapiens
tttaaacagagatgaagtaacacacaagggcaaattatagagccaagaaagaatcccaagtccaactccagatgcaatctttcaaaacactgattagtttrtatctgcatttattcttcttttggagtccctgctctgtcatttactaattacctttctgagtctcaatttcttctgaattcgttcctttaagtgtttttt

SEQ ID NO: 123592 - DNA, 201 bp, Homo sapiens
tttgagcccaggagttcatggttatagtaagctatgatcattccactgcactctaacctgggcaagagagcaagaccctgtttctaaataaaataaagaawagaaaccataccatttttgtgtaccactatgaacattgtctagtacagtactttatatatatacaacacctactgaatcaagatttatcaaataactatg

SEQ ID NO: 123593 - DNA, 201 bp, Homo sapiens
aaataattatttttccagagataatgaaaaaaatttcagtgacctttacaggataataaaaggtgttagagaattaaaatattaaagaaaatacagtttcrtttatttaaacttcctccattttttggagtttttggctatggattttgtaacctcagcttagtttttaagtgattaaatatccttccaaagttccttcat

SEQ ID NO: 123594 - DNA, 201 bp, Homo sapiens
cttagtagataaaaatatgtggctgcatatggtggctcatgcctgtaatttcaatactttggaaggccaaggtgggaggatcacttgaacccaggagttcragacctgcctgggcaacataatgagaccccatctctacaaaaaaaatttttttaattatccaggtgtggtggtgcttgccttagttccagctactcagga

SEQ ID NO: 123595 - DNA, 201 bp, Homo sapiens
tttcctttttgctttttcaactaaaatgcccacatattaaattatgtctttctatacacagggctgcagagtgagttatatgatgtttccaaagcggttgmcaattcaaagcagttgaatataaagctaacttccttcaaggctgttcatttttctcctgtttcatctctgccagataccagtttcctgtatgtaaaccaa

SEQ ID NO: 123596 - DNA, 201 bp, Homo sapiens
cctggatgacagagtgagatactgtcgcaaaataataataataataaaagaagggcaaactttaaagaaagaaaataaaaaatgtgaaaggccacagaaaraattataatattattccagtttggttgagtcaccaagcattcaatcatctatgtcaggctccgtggacataataatgaatgagacatcattatagccctc

SEQ ID NO: 123597 - DNA, 201 bp, Homo sapiens
ctctaatgatgtctaattgtaatttagggttgaagaagtagtcgcatttcacaggttattttcaagtagtatactgggcttgaaaagaagctgagcatcaraattatttgcagaaatttttaaatatgcatgaaccctaagagcatatgttatcctgattcattcagcaagtatttactgctgacctatgtgccaagtacc

SEQ ID NO: 123598 - DNA, 201 bp, Homo sapiens
tcctgattcattcagcaagtatttactgctgacctatgtgccaagtacccacctagtaagcctatgaatttggtacctctcactgctatcctataaaaaastaggtttggaaagagtttttataggatttcatagactttttacaagttttcaagtgcactgataaaataatagaaaaattaatatacgtgtctattatgt

SEQ ID NO: 123599 - DNA, 201 bp, Homo sapiens
gtgaaatagatgtcttaaaaccttcctagccagatgtggtggcttgtgcctgtagtcccacctacttgagaggctgaggcagggggtttgcttgagccccrgagtccgagactacagtcagctatgatttcaccactgcactccagcctgggcaacaaagcaagaccctgttgctaaaaaataaaaaataatttttaaaat

SEQ ID NO: 123600 - DNA, 201 bp, Homo sapiens
accctgttgctaaaaaataaaaaataatttttaaaatttttaaacaaaacaaaacctttcctaatcccagaagaaagaatcaagaaaaaatcagctgagcrcggtggctcatgcctgtaatgccaacactttgggaggcctaggcgggcagatcatgaggtcaggagatcaagaccatcctggccaacacggtgaaacccc

SEQ ID NO: 123601 - DNA, 201 bp, Homo sapiens
ctgctcacttacctgcctgtgattgacttgtataacaaactcagctgtgcattatagttctagggttggttttgtgtcaagttaggttgcagttcaacacrcggggactcaaggtatggagggagctgcaggccaaacttaatttatttaacaacagaaacactttccttaacctgtgctgaaggcaaaagcaagtgaaca

SEQ ID NO: 123602 - DNA, 201 bp, Homo sapiens
caaaacctttcctaatcccagaagaaagaatcaagaaaaaatcagctgagcacggtggctcatgcctgtaatgccaacactttgggaggcctaggcgggcrgatcatgaggtcaggagatcaagaccatcctggccaacacggtgaaaccccatctctactaaaaatacaaaaaatagctgggtgtggtggcgtgcacctg

SEQ ID NO: 123603 - DNA, 201 bp, Homo sapiens
taggtcgggcatggtggctcacgcctataatctcagctctttgggaggccgggaggggtgaatcacgaggtcaggagttcgagaacagcctggccaacatygtgaaatcccgtctctactaaaaatacaaaaattagctgggatggtgacgggtgcctgtaatcccagctacttgggaggctgaggcaggagaattgcttg

SEQ ID NO: 123604 - DNA, 201 bp, Homo sapiens
tagttatgtataaccacatgagtctgaggtcctatttgtttttgtgtcattctggtctagcaaggggccttccccacgactaacctacctgagtgttgccratgcggatctactcaaccggacttggtcccggggaggcaatgaacaatgtctccggtacatcgccaacctcatctcctgcttccctagtgtgtgtgtccg

SEQ ID NO: 123605 - DNA, 201 bp, Homo sapiens
gtatcccataatctgtttactattgtatgcctgaggtattattttaaaatttcctctgtccagtcaagccttttgaaatggggttttaacttgaactcttytgcatacagttagacattttgtcttttttttttttttcttaacttcccacacaacactgatgcaaacaatttgcctttaacacctaagtcattactcaac

SEQ ID NO: 123606 - DNA, 201 bp, Homo sapiens
tttagtttgccatatgaaagcaggaagtgaaaaagtatacagctacccacacaggccaggctcttctgctcactactggttgcactgacgtgaaaaagatwatctacatgtgtactaacctgagagtttcagaatcctgcttattggtaactagtctaataaatgtcctgaattctggcttatccagttagccactcttct

SEQ ID NO: 123607 - DNA, 201 bp, Homo sapiens
gtatgcctgaggtattattttaaaatttcctctgtccagtcaagccttttgaaatggggttttaacttgaactcttctgcatacagttagacattttgtcttttttttttttttcttaacttcccacacaacactgatgcaaacaatttgcctttaacacctaagtcattactcaactgcgtgaactctattttgaacacc

SEQ ID NO: 123608 - DNA, 201 bp, Homo sapiens
ggcgacagagcgagactccatctcaaaaaaaaaagaaaaaaattattcgtaaatgcgcaaaaagaccttatgcaagaagctctaaactatctctcaccttyacagatttgccccagtcacgctggttagaaatgagacatgattctatcacttccacagccaatttagaaaaaaatgttctgaccggtattactttaacat

SEQ ID NO: 123609 - DNA, 201 bp, Homo sapiens
agatcgcgccactgcactccagcctgggcgacagagcgagactccatctcaaaaaaaaaagaaaaaaattattcgtaaatgcgcaaaaagaccttatgcargaagctctaaactatctctcacctttacagatttgccccagtcacgctggttagaaatgagacatgattctatcacttccacagccaatttagaaaaaaa

SEQ ID NO: 123610 - DNA, 201 bp, Homo sapiens
aagagaaggggcggagaaacacgacactgaggcggtgatatcacccacagccaacggcatggaattcagaaagttaagtgtcacccagcaatctcggtgcrgactcgcggcgcgcctgcacagcgtggcggctgcatcccagccaagcaggaagggggagggggaggcctgactgagttcgcttgggggcagctgagggga

SEQ ID NO: 123611 - DNA, 201 bp, Homo sapiens
cctccttcgggtcgccaggccctcgggtgattcagaaattcatcaaatccaaatggcagcgggctctctgtcaggcaggaaacaagccgcaccgaaggctmggcaggttcctccttgctgctgtggtaatggaaaaggagccgccgagtggagctaacgaggaaggaaggaccctccgtctggcgcgcctctttcccgcgc

SEQ ID NO: 123612 - DNA, 201 bp, Homo sapiens
tgttatctggcccggattccgcaggatggcgggtccaccccagcgcccccactccccgccctccttcgggtcgccaggccctcgggtgattcagaaattcrtcaaatccaaatggcagcgggctctctgtcaggcaggaaacaagccgcaccgaaggctcggcaggttcctccttgctgctgtggtaatggaaaaggagcc

SEQ ID NO: 123613 - DNA, 201 bp, Homo sapiens
ttcccaccaaattagccagtttgattgagtttttgctttgtctgttttggttccaccaagaactagccaagcaactgggcaattcagttctgcgggggccsgggggggggccttcgttttcccatctgtaaatgaagagttgggctacataaattcgaagctcaaaccttctctgtccaccttttctggagaaaaggtaaa

SEQ ID NO: 123614 - DNA, 201 bp, Homo sapiens
agcctctataccagctgttcaatgaaaagtaccaaggctcactgaatgttataacctagcagattgttacataaatgatctaacatttttgagcaccgctwctggatgctagaagctaagctaaagtgtttcacatgccctactttgcttattctataaaataactgcgtgaaagaacaggttatccccattttatagatg

SEQ ID NO: 123615 - DNA, 201 bp, Homo sapiens
atcctctagtatcctaatctggtcttgttgttggctaacttcagcagttactattctgtgattggtgtaatattaaccaaataaattactggatttgttcyacaaatattatatcttagattggttctttcctgtctctgaaaataaagtcttgcaatgagaataaattattttacaacagttaattagcaatgtaaagtt

SEQ ID NO: 123616 - DNA, 201 bp, Homo sapiens; identical to SEQ ID NO: 20841

SEQ ID NO: 123617 - DNA, 201 bp, Homo sapiens
aaagctcattaacttaactgacattgtcaaacaggagaagaaggatgaaacacaaaagttgtgtgactctagtctgtgtttgagactcttttcactgcagkggggcagagttgtttagaagcccagtgtatatacagatcatggtccttggaatcaagcagattaggatttggaaccaagttccactgcctctcatctgtg

SEQ ID NO: 123618 - DNA, 201 bp, Homo sapiens
acagcagcatcaagaggcagcctggtatattgcacttaggaaatttattgattcatagctgtgttctcagtaaggtgtttaccactacttttcggaaaacraattatcttttctgcatgtatatttttctgcatttaaaagatacgagtctcttttttgagcagttctctttgtaaggattgatatttgatgactgtattc

SEQ ID NO: 123619 - DNA, 201 bp, Homo sapiens
aaatatgtgccggtaatatttcttcatgctgctgaataagttaacagcatataaacacatacaaaccaagtggcatggatgtctgctttcatttttagccwtttaaaaatatatgtaacccatcctaaggggtttatatttgttttgcataatacattaatatgtactcattattcattacacagttaatatatctatatt

SEQ ID NO: 123620 - DNA, 201 bp, Homo sapiens
cactataacagaggctctgttagtgcagggtcttttactcttttgtaatcccaacagcaagaacaaaacaaggtacatagtacatatttaataaatacctrttgaacaaatatgtgccggtaatatttcttcatgctgctgaataagttaacagcatataaacacatacaaaccaagtggcatggatgtctgctttcattt

SEQ ID NO: 123621 - DNA, 201 bp, Homo sapiens; identical to SEQ ID NO: 20845

SEQ ID NO: 123622 - DNA, 201 bp, Homo sapiens; identical to SEQ ID NO: 20846

SEQ ID NO: 123623 - DNA, 201 bp, Homo sapiens; identical to SEQ ID NO: 20847

SEQ ID NO: 123624 - DNA, 201 bp, Homo sapiens; identical to SEQ ID NO: 20848

SEQ ID NO: 123625 - DNA, 201 bp, Homo sapiens; identical to SEQ ID NO: 20849

SEQ ID NO: 123626 - DNA, 201 bp, Homo sapiens; identical to SEQ ID NO: 20850

SEQ ID NO: 123627 - DNA, 201 bp, Homo sapiens; identical to SEQ ID NO: 20851

SEQ ID NO: 123628 - DNA, 201 bp, Homo sapiens; identical to SEQ ID NO: 20852

SEQ ID NO: 123629 - DNA, 201 bp, Homo sapiens
tccaggcaaaatgaagctgaatctggtgcagatctttttcatgttgctgatgctgctgctgggcctggggatgggcctggggttgggacttcatatggctrcagcagtcttggaggagagtgatcaaccgctcaatgaattttggtccagtgactcacaggacaaagctgaggccactgaggagggagacggcacccaaac

SEQ ID NO: 123630 - DNA, 201 bp, Homo sapiens; identical to SEQ ID NO: 20854

SEQ ID NO: 123631 - DNA, 201 bp, Homo sapiens
cgcccccggccgcgctcctgcagcccccaccgcctccggggtacgggccctcagcgccgctgtacaactatcccgcagggggctacgcagcgcagcccggmtatggcgcgctcccgccgcccccaggcccacccccggccccctacctgaccccgggcctgcccgcgcccacgcccctgcccgcgccggcaccgcccaccg

SEQ ID NO: 123632 - DNA, 201 bp, Homo sapiens
atggaggctggaaactgcatcttacgtgctgtgccacgagtcttgttgtgttacaagatagtgagggcaggaattggaggagtgaggctggaggagtcagyggggacctcactatggagggccttccatgccctgctaggagctggggctctatgatgaagcctttgtgggagtttagggggccgaggacaggactgattt

SEQ ID NO: 123633 - DNA, 201 bp, Homo sapiens
aaaacaaacaaacaatgcccagaaaagatcctgacttgtggtggtcttggtggggtgtcaggaaaacttcctacccaggaggggagggggatagctgggcmaagtatggaggctggaaactgcatcttacgtgctgtgccacgagtcttgttgtgttacaagatagtgagggcaggaattggaggagtgaggctggaggag

SEQ ID NO: 123634 - DNA, 201 bp, Homo sapiens
ctggcacccagggcctgtgctggcctaggagtgctgaccagaaggctgctctgttcccccccacccccgttgctttctggccccctctttggagccagccrcccacagggctttggtgcctcagaagcagtgggctgccgggtcacagccgcaggctgcaaaagaccctcggagggagcatggagtgaggggttctctctc

SEQ ID NO: 123635 - DNA, 201 bp, Homo sapiens
cttggggagctttgcacaaggagactgcccccagcctagtggcacctacctcatgggctctggggcaggtaggggaagggccagtccagctctggtaatgytggggggaggcataccaaagaatccaggggcagggagtggggagggtgacttccgagctggcctctccccttcctctacccagactggggctgggatcct

SEQ ID NO: 123636 - DNA, 201 bp, Homo sapiens; identical to SEQ ID NO: 20855

SEQ ID NO: 123637 - DNA, 201 bp, Homo sapiens
tgtccaagccgcagtctaggcggactggcctatggctagcagtggcccactgggtcctcggtggctagacctcaccagacctcctgtctcttgcccgcagytctgttgaagatgcactggacaccagaacacgcccagcccctcaaccagtggccagagcagcacctggacgtctcctccaccaccccgtcgccggcccac

SEQ ID NO: 123638 - DNA, 201 bp, Homo sapiens
atggcgcgctcccgccgcccccaggcccacccccggccccctacctgaccccgggcctgcccgcgcccacgcccctgcccgcgccggcaccgcccaccgcmtatggcttccccacggccgcgccgggtgccgaatccgggctgtcgctgaagcgcaaggccgccgacgaggggcccgagggccgctaccgcaagtacgcgt

SEQ ID NO: 123639 - DNA, 201 bp, Homo sapiens; identical to SEQ ID NO: 20858

SEQ ID NO: 123640 - DNA, 201 bp, Homo sapiens; identical to SEQ ID NO: 20859

SEQ ID NO: 123641 - DNA, 201 bp, Homo sapiens; identical to SEQ ID NO: 20860

SEQ ID NO: 123642 - DNA, 201 bp, Homo sapiens
ttaaagtatgcatatcattaatggaaaataataggtaacaaaagaaattgggggaaaagctttaagagttctgatgcctatttaagtaaattaactctttyccccccaaaattcttaggcttgaagatgcagtggacgccagagcatgcccagtggccagaacagcactttgacatcacctcaaccactcggtctcctgcc

SEQ ID NO: 123643 - DNA, 201 bp, Homo sapiens
tatgcatatcattaatggaaaataataggtaacaaaagaaattgggggaaaagctttaagagttctgatgcctatttaagtaaattaactcttttcccccmaaaattcttaggcttgaagatgcagtggacgccagagcatgcccagtggccagaacagcactttgacatcacctcaaccactcggtctcctgcccacaaa

SEQ ID NO: 123644 - DNA, 201 bp, Homo sapiens; identical to SEQ ID NO: 20862

SEQ ID NO: 123645 - DNA, 201 bp, Homo sapiens; identical to SEQ ID NO: 20863

SEQ ID NO: 123646 - DNA, 201 bp, Homo sapiens
gtctttacactgaacagtattagcaacctaaatgataagacgcattagtgaagtgtggcagggtagataatgcacgagtacttgggatactgatggacttytaattgtattcataacacaagactgcttaaaagaacttaaaagaaattatgcactgtgtaggtcttcatcgaggtcccatttgggacattatatacagaa

SEQ ID NO: 123647 - DNA, 201 bp, Homo sapiens
ttgttctttataaccatttctacctcattgctacatattgtacatgtagtatttatttgttgtctttttttgaatgtcatgcatttcgtaagaaaaagacytgtccttgaacttgaacagtctacctcagaaagactgtctttacactgaacagtattagcaacctaaatgataagacgcattagtgaagtgtggcagggt

SEQ ID NO: 123648 - DNA, 201 bp, Homo sapiens
agtcttatttagacaactttggaaaatccaatattgacccacatttttttgtggctagtaagatttaatgccaaatatatgactgcactattgtgttttayactcatttataaaactgaaaataaattgaagtcatacatcttggcttttagctttaagtgacttaaaaattagaactctgagtgacttaaaaattaattt

SEQ ID NO: 123649 - DNA, 201 bp, Homo sapiens
aattagcacagcatcatcctgctaattaacttccagtgtctggtgcagtggttttgcaaacaaggaagagggagtcagaagggaatcaacatgccattctrttaccaaactgtgtgttatgttcagtttatcgcagtaagtcagagccggccatgtcagaagccagagtcaggcaatgaagagccacagagcttggaggaa

SEQ ID NO: 123650 - DNA, 201 bp, Homo sapiens
taggtattataaacagtgtagatcttttaaagtatgcatatcattaatggaaaataataggtaacaaaagaaattgggggaaaagctttaagagttctgaygcctatttaagtaaattaactcttttccccccaaaattcttaggcttgaagatgcagtggacgccagagcatgcccagtggccagaacagcactttgaca

SEQ ID NO: 123651 - DNA, 201 bp, Homo sapiens
tactcacagcatatgtgtgttcttattttctctactctgtattttgataatattttaaagaaaagaaccataatagaaattccctagaaataatttacagkactaatgaatttgtaggtctcttagacagttctacattacagtcacattaatattctctcctttttataaggcttgaagtaaatcccacgacactagaag

SEQ ID NO: 123652 - DNA, 201 bp, Homo sapiens
agcatatgtgtgttcttattttctctactctgtattttgataatattttaaagaaaagaaccataatagaaattccctagaaataatttacaggactaatkaatttgtaggtctcttagacagttctacattacagtcacattaatattctctcctttttataaggcttgaagtaaatcccacgacactagaagcatttag

SEQ ID NO: 123653 - DNA, 201 bp, Homo sapiens
tgctttctgcaagattcagcctagcatatctcaaaaggagcttgatatgtatgttgaatggaacaaaatgtttggttgcagtcagtgataacttctttagaaaaaaaaatgtaatgaatgttggcacacacacataaaacctgctacatagggaatagagcccctttccagtagagtttaaattgcaaagggtactgggga

SEQ ID NO: 123654 - DNA, 201 bp, Homo sapiens
catatgtgtgttcttattttctctactctgtattttgataatattttaaagaaaagaaccataatagaaattccctagaaataatttacaggactaatgamtttgtaggtctcttagacagttctacattacagtcacattaatattctctcctttttataaggcttgaagtaaatcccacgacactagaagcatttagat

SEQ ID NO: 123655 - DNA, 201 bp, Homo sapiens
atttgctcttaataatttccagttgaatttaatgaaagtatgattcctgaaatgctgcttcattaaaattgcagcttttcccctttaagtgtggtttcggwcatttcacccattttgcggtgtgttttcctcccccttaaaaagtaatgattgagaaagcagaaataattaagaataccactttagttctccctggaactc

SEQ ID NO: 123656 - DNA, 201 bp, Homo sapiens; identical to SEQ ID NO: 20861

SEQ ID NO: 123657 - DNA, 201 bp, Homo sapiens
atggaatgacctgctatgtctgtgtcatattgttctgcgcagggagcattatactgtgctaactaggtgttcagtaccaaataagagaggtatcctagatktgatctgtcagctgtgtctcatttttatattgcttaaaatgtaaaacaaactgtgatgtgaacagacagaatagctagatattgtacatgttaatactgc

SEQ ID NO: 123658 - DNA, 201 bp, Homo sapiens; identical to SEQ ID NO: 20864

SEQ ID NO: 123659 - DNA, 201 bp, Homo sapiens
atctaagggcaaaagtaatgttatttgtctttgttttccttgtttaagggatcatggacattacagtatattttgaaagaactggttataagaactctaggaacaaattaaacttggaaatattaactgctatcttcagcaacaggtctgagctgttccctctgagaactttagcatgcattgtggggaacacatggagta

SEQ ID NO: 123660 - DNA, 201 bp, Homo sapiens; identical to SEQ ID NO: 20866

SEQ ID NO: 123661 - DNA, 201 bp, Homo sapiens; identical to SEQ ID NO: 20867

SEQ ID NO: 123662 - DNA, 201 bp, Homo sapiens
ccctgtgagggaagaatatgggatttctcaggtacaatggcagaaataggtgaccacttctgagtctaccaagaatccttgggcatttcactaaaactgtyactcaaaactcccagatggaataatctgtaggtttccaaacaaaaagatggcgtctttcctggatttcaagcttctagatacctagacctcctctggata

SEQ ID NO: 123663 - DNA, 201 bp, Homo sapiens
tgaccagtgtctcacaggagaaagaaaccagggggcatcagaggctgttggaagggaggtgttgggacggactactgtggcttgcctgggactgtccaggktgtagcacggaacatcctgccccacagctgacccttcagttccaagcaaaccgaaacagctgggccaaccaagttccctctgtgaaagtaaggtagcatt

SEQ ID NO: 123664 - DNA, 201 bp, Homo sapiens
tttgacttgacaaatcatgttttttggcatatgatttgtgtgtgcgcgtgtgtgtgcacacgcatatacttattttaacttttactagccgctcagttgcragtagggacttcaatactgaaagtctctctttgaaaatgatcatatctacatgccatatacacaattagctgtgctttgacagagcagagcatgcagaag

SEQ ID NO: 123665 - DNA, 201 bp, Homo sapiens
aaccatatcaccttctttttcttttcccgtggtgttccccacaaatagagaaggcattcctcttctgtactgttatttcacaaaccctgactgacacttaktctcgtgatccttgtctccatctcctgccactacagctgcagtgatgtcaatggggaggctgtctttttcaccttcaggctctccctctccccttgggca

SEQ ID NO: 123666 - DNA, 201 bp, Homo sapiens
ggtggaggaggaagggctgagggtatttcaggccaagaggactcggtgagaggcggagcacaggtaaaaaggcctgccaagggcagatggcggcgagcccygtgccaggctaaggaattcacattttatctcgtagccatcatacagcctggcgagcacacgatgtctagaagggtggtgcttctgatgatgtggactgtt

SEQ ID NO: 123667 - DNA, 201 bp, Homo sapiens
acaagcattgacctcacattgttacccaatcctctgatctagtcagataaccaagaattagtgctatttggaaaaataagccctgcttctttttattcccycccctcattttctgcccatttcctcctttcctgccctacctcttctttgaggtggtaaggccttgcaaaactttcttggaaatatacctttgtttatccc

SEQ ID NO: 123668 - DNA, 201 bp, Homo sapiens
gtgttccttcgattcatgaacccgactgacttttcacagcaggaccaccagttgccagatactgagacaactgagtcaaatgaatacaacagcatccctgttcttcaggggactgcaggcaggggtgctgtaatttgtacgggggcgggggtggacatgatctgttcttctatattatcatcattcatctgctagagacaa

SEQ ID NO: 123669 - DNA, 201 bp, Homo sapiens
tgttccttcgattcatgaacccgactgacttttcacagcaggaccaccagttgccagatactgagacaactgagtcaaatgaatacaacagcatccctgttcttcaggggactgcaggcaggggtgctgtaatttgtacgggggcgggggtggacatgatctgttcttctatattatcatcattcatctgctagagacaac

SEQ ID NO: 123670 - DNA, 201 bp, Homo sapiens
gttccttcgattcatgaacccgactgacttttcacagcaggaccaccagttgccagatactgagacaactgagtcaaatgaatacaacagcatccctgttcttcaggggactgcaggcaggggtgctgtaatttgtacgggggcgggggtggacatgatctgttcttctatattatcatcattcatctgctagagacaact

SEQ ID NO: 123671 - DNA, 201 bp, Homo sapiens; identical to SEQ ID NO: 20869

SEQ ID NO: 123672 - DNA, 201 bp, Homo sapiens; identical to SEQ ID NO: 20871

SEQ ID NO: 123673 - DNA, 201 bp, Homo sapiens
ataatgttaactatttttctttctttagctctatttctgtgtgtagctgttttactacaccagaattcagcaagtgatagtttcttaagagttagttgctwtgtggaaattgaagccctatcagtaaccttttcctcctcgtgtatcttcaaatctattaccgagccttaaactttgaatggatcttgtatccctagctta

SEQ ID NO: 123674 - DNA, 201 bp, Homo sapiens; identical to SEQ ID NO: 20873

SEQ ID NO: 123675 - DNA, 201 bp, Homo sapiens
cgttcgatatgaagacaagccgccacaaggagttcttcagcttgttttcccacattgtgctgggagatgaccccgaagtgcagcatggcaagccagacccrgacatcttcctagcttgtgccaagaggttctctccccctcctgctatggagaaggtaagtgggtgccggtgacacgggccgtgttccacaaccatgttcc

SEQ ID NO: 123676 - DNA, 201 bp, Homo sapiens
acacattgtgggtcttcctcctgtgatgtgcatattgtaatactaaaggaagtttttcccaagctcctgtcagggaagcagccctggttttgtacttggcrtttgtgtcaggaatacaggaggcagtggccaggggccgtgtggacgatcttggagctcttcagtcaggccctgctgctgcttcttgcccgcagtgtgggt

SEQ ID NO: 123677 - DNA, 201 bp, Homo sapiens; identical to SEQ ID NO: 20878

SEQ ID NO: 123678 - DNA, 201 bp, Homo sapiens
tgttgactgctggagtctcaacattcagaacacgggtccaacatggcatgtgtattgacagagaagcttcaggtaatttttatgtccttgaatgaatgggyacatgttacatgacagagcagggactagatggagccaatatattagatccccttctctccacacctcattttctatatagtgcagccagtatgagaatat

SEQ ID NO: 123679 - DNA, 201 bp, Homo sapiens
ttacagtcccaagaatctaagatttttgattgtgtgaaggatcaagccatctggaccaatgttttcctgaatttctgggcagacctttccaggaaggtggkcagcaaatggcccaggtctgttcagttagaggatcaccagagaagtttctccattctcagctcctatcatctttttacagctgaattttctgacattcct

SEQ ID NO: 123680 - DNA, 201 bp, Homo sapiens
tggcgtagagggggcatggagattagttcattctgattggtcattaccaaaggctgggcaagggcatgtggtaagggatgcaggagtgcctgtggaatatrgaatggtgaatgaggctgagcagggcaggggtcccagggcccagagagaagtgcctggcccaccatccacctgggaacatgctaggggtttgctaacgga

SEQ ID NO: 123681 - DNA, 201 bp, Homo sapiens
tgtaatcccagcactttgggagtccatagtgggaggatcactccaggccaggagttcaagactagcctgggcaacatagggagaccgtgtctctacaaaawaaattaaaaatcagcctggtgtggtggcgcacacctgtagccccagctacttgggaggctgaggcgggaggatcacttgagcccggggggtcagggctgc

SEQ ID NO: 123682 - DNA, 201 bp, Homo sapiens
tggaaactgggttcatgagatgtgactcatgcaactgaggacctgaatttctcgtgttatttaaatagcccccaatgactaattgccaaaacgtaacataragacacaaaatatagagtggacagcacaactctagaggaatgcattcactcatccttaatctatttagaaaatactctgctgggtgttacaaaggcttca

SEQ ID NO: 123683 - DNA, 201 bp, Homo sapiens
ttttagacaatctgtcctaggtcagaaattcctcaaaaggagcagcctgagagtgtgctgccacacagctggagggactgtccctgcaagaaggtcttatkgtggaggcctcgcccctcacctcagtccttccctcctcctccccaggggcggagaaactcatcatccacctgcggaaacatggcatcccctttgcactag

SEQ ID NO: 123684 - DNA, 201 bp, Homo sapiens
agacaggctaagaaacttgtcccagggcgtgcagctgagctgggagttttctgcaggtctcttgggtccccaaagccctaggtcttgtatgaacatgaggrtaggagcaaaatcaggccttcccatgtgtattaatgttactctgttctcacactgctataaagaacttccctgagactgggtattctgtagaggaaagag

SEQ ID NO: 123685 - DNA, 201 bp, Homo sapiens
ctttcttttccctaagcttttactttctgcttattctgcttataaattagtaaatgttggccgggcgtggtggcacacatctgtaatcccagcactttggkaggccgaggcatgtggatcacttgagcccaggagttcaagactagcctgggcaacatggcgaaaccctgtctctacaaaaaatacaaaaatcagctgggt

SEQ ID NO: 123686 - DNA, 201 bp, Homo sapiens; identical to SEQ ID NO: 20877

SEQ ID NO: 123687 - DNA, 201 bp, Homo sapiens
ttatcagacatatgacttatgaccattttctcccattctggctcccttttcgcttagttgttggtgtgcataagtttttgattagatgaatttgacatatrtcatctcatttgtctaattttgctcttgttacctgtgcttttggtgtcatagccaagaaatgattgccaattccaatttcatgaaactttaatttatgtt

SEQ ID NO: 123688 - DNA, 201 bp, Homo sapiens
gctgcataagtacaggaactgaacatcagactttaataaacattaataaacccttatgctatatgtttttcaatgagttattatatagtatatataatatktagatactatatatactttaaattctcaacattgttttgataatttgctctaataatgctctaataatttgagcacttgtagagaatatttagttaagtg

SEQ ID NO: 123689 - DNA, 201 bp, Homo sapiens
atcaagccatctggaccaatgttttcctgaatttctgggcagacctttccaggaaggtgggcagcaaatggcccaggtctgttcagttagaggatcaccakagaagtttctccattctcagctcctatcatctttttacagctgaattttctgacattcctccacccccaccagcacacaaaaataagtgaaccaaaagca

SEQ ID NO: 123690 - DNA, 201 bp, Homo sapiens
gctatatgtttttcaatgagttattatatagtatatataatatgtagatactatatatactttaaattctcaacattgttttgataatttgctctaataaygctctaataatttgagcacttgtagagaatatttagttaagtggttaatggaagaaactcgttggggatttttggattccgtttctaggagggcagttct

SEQ ID NO: 123691 - DNA, 201 bp, Homo sapiens
gtctccaaatttccctctcctttctttggatttagggtccaaccttaatttagtatggcctcataataacttgattacatctgcaaagaccctatttccawctaaggtcctattcccacgttttaggtgaacatgaattttgtggggagagcactgtcaagccagtacacctccacccatactttcctactcccagctcag

SEQ ID NO: 123692 - DNA, 201 bp, Homo sapiens
ggtgtcatgtatcccattgctgtttgttttgggctgagatcacccatggctgtttacatcagaggctgtacttacttttgaccttttagaatagttaactytgcaagggtcttgtgctggaaaacccaagccaactggcctgtcttcctaggtttcccctcaatcatttgaacactgagggttttacttactcacatggac

SEQ ID NO: 123693 - DNA, 201 bp, Homo sapiens
tttcttgaagaactgacaataattcttcctattagtgtcacaggcaagggggcaaaggggttaggtgtcaatgcctggctgatttcctgcattacaaaatktacctcttacttttctgtcttcctgatgttaccccctcttttctttcacctcttgggcctgcacatgatttgtttgctatcaggggccaataagctttct

SEQ ID NO: 123694 - DNA, 201 bp, Homo sapiens; identical to SEQ ID NO: 20879

SEQ ID NO: 123695 - DNA, 201 bp, Homo sapiens
caccccaagctgtgcattcagaatgccacctggggcagaaaacaggtttatacacagagccagagagacttcagatctccggtgatcaggcacagtggagracgtagataaaagatccctgcaccctgcgctgtgagcccaccaggtcccttcacctcactctcttttatgcacaaccaaaaaagatcctggagaactctt

SEQ ID NO: 123696 - DNA, 201 bp, Homo sapiens
tgcccaaactgtacctagagctccatccatagacctcgtctgctcaccgcacagaaatgccagggctgccgggatcccttctcagcgctcctccttctgtstaatcaactgcttctctgctctgatgacacctgaccgcacctccagctcacagccacagtgcatggagaccccgagccttctacttgggtgtcccacgat

SEQ ID NO: 123697 - DNA, 201 bp, Homo sapiens
atgacatgcacggccctctaagcggttccctctcccactttgcgttgtcaacccccggtaccccccacttgattctgttgctcactgcaggtcttaggtastacagagaatgttcaggcttgtagggttctgatggccagatcacccaacaaaagaatgccacgaacacctgagaccgcgcggcagctgcctgtcttctgc

SEQ ID NO: 123698 - DNA, 201 bp, Homo sapiens; identical to SEQ ID NO: 20868

SEQ ID NO: 123699 - DNA, 201 bp, Homo sapiens
atcatgacattattaaaataggcatgattatacaattatttaaaataattttaggccaggcgtggtagctcatgcctgtaatcccagtactttgagaggcyaaggcaggcgaatcacctgaggtcaggagtttgagaccagcctggccaacatggtgaaaccccatctctactaaaaatacaaaaattagctgggcgtggt

SEQ ID NO: 123700 - DNA, 201 bp, Homo sapiens
cagcttgttttcccacattgtgctgggagatgaccccgaagtgcagcatggcaagccagacccagacatcttcctagcttgtgccaagaggttctctcccsctcctgctatggagaaggtaagtgggtgccggtgacacgggccgtgttccacaaccatgttccaccaaataatatccatgtagtgtttgctaaatgtgaa

SEQ ID NO: 123701 - DNA, 201 bp, Homo sapiens
tctccacaaaaaattagccatgttttaaaatgtatatggaagcaaagtgtatgtggaaaccacatgctgccattgcatgggaccagttatggtgaaacccwcagagcaagggccctcatgaggaggaatttctctcacaaggtaccctgcaaagaggcccatggaatgaattgtgttttaacatcttggtgttctcattga

SEQ ID NO: 123702 - DNA, 201 bp, Homo sapiens
ataagaagatgacaattattaaacagtatctcagcagctggacagggaagattattctgtttgtaaataactgaaattaggaacacaaaagatggtcccartttctttaaaagagaagacagtttgttgtccagagcagttctgtctcatagaattgagccaggtaaaaattttggggagcaatttttaataagtaaaaag

SEQ ID NO: 123703 - DNA, 201 bp, Homo sapiens
tatatttctcttgcagaaatgaaatgtttcctctcatgcttcttacttagagacagtgacacattgtgggtcttcctcctgtgatgtgcatattgtaataytaaaggaagtttttcccaagctcctgtcagggaagcagccctggttttgtacttggcgtttgtgtcaggaatacaggaggcagtggccaggggccgtgtg

SEQ ID NO: 123704 - DNA, 201 bp, Homo sapiens
aaacactgcagatgacatagctgttcaaggacagagcaaggagcaaaccaaagtttgctctttgactcccaatagactgttccatgtgtctatgaagtaaragcaaatggtcatagttggcacatcgaagcttatctgagccttcagacaaaagccaaaataagcaccaaccctctctcccacttgtgtcagctgccatgc

SEQ ID NO: 123705 - DNA, 201 bp, Homo sapiens
gatggatcagtcaggaaataataccggggtagatgtcttgccagtggagagggggacataaaccccaaggctctggcttacttccaacactaaggtgaatmctactccaatcaaatattaacatgtaaaactcgaaccaagtctccttctggtgataggacctaagcaagctgcgctaactctccccttaagaacagtgag

SEQ ID NO: 123706 - DNA, 201 bp, Homo sapiens
ttgggtgaccaggtacgttgtcagtgggcagaaatattttgaaagaaatatttgtttttgagcagtaattcttaatagtgggcttaaaatattcggtaaaycatgctgtaaacagatgtgctgtcatccaagctttgctgttccatttacaaagcccaggaagagaagattcagcatcatttttaagagcactaggatttt

SEQ ID NO: 123707 - DNA, 201 bp, Homo sapiens
gagctcatctcaagatttttaacttaattacatctccaaagaccctttttctaaacaagacagaagtaccatgggtgaggacttctgtttgggggctaccrttcaacccactgctctcagtcacacaaagcttttgaagcataacacctgctgttcaggcagttgcaaaagtagcccctaagaaagacagcatgccaaagc

SEQ ID NO: 123708 - DNA, 201 bp, Homo sapiens
aaacatcaaccactgtgcctcaggggcggacttagtgagcatttaagatacattttcagttataaaatgttacttgatttgcagcaattacccagtctccrccttagacagaaacttagaggccatcggcctagacttcctccaggcacagggcttccataacagttgaattaatttaagccttaatgcctcccataagcc

SEQ ID NO: 123709 - DNA, 201 bp, Homo sapiens
ttgctcttgtgtttggactgtttccctcccccaattcagatgctgaaatcctcacccccagtgtaatgcgttagggggagaccagggagccagagaccacrctggctccctgatctcacaccgcctggccccagacctatgggaaatccctgtctggggtttaagccacccagtctgtggtattttcttacagtaacctga

SEQ ID NO: 123710 - DNA, 201 bp, Homo sapiens
agcatggcaagccagacccagacatcttcctagcttgtgccaagaggttctctccccctcctgctatggagaaggtaagtgggtgccggtgacacgggccrtgttccacaaccatgttccaccaaataatatccatgtagtgtttgctaaatgtgaaaagttgtggtttgtgctgttgaaggccactttgcaatgctccct

SEQ ID NO: 123711 - DNA, 201 bp, Homo sapiens
ttagaggcggcacagattataatagacgtcttgcagctcccgatgtccaaagaggagctggtggaagaaagccaaacgaagttaaaggaagtgttccccayggctgcgctcatgccaggtgcggttgcctcgctgtttgcagggttatgtttgtgactattagcaatggttttgtaaatcacctttaaagtctagcatagg

SEQ ID NO: 123712 - DNA, 201 bp, Homo sapiens
cacctgtaatcccagcactttgggagtccatagtgggaggatcactccaggccaggagttcaagactagcctgggcaacatagggagaccgtgtctctacaaaaaaaattaaaaatcagcctggtgtggtggcgcacacctgtagccccagctacttgggaggctgaggcgggaggatcacttgagcccggggggtcaggg

SEQ ID NO: 123713 - DNA, 201 bp, Homo sapiens
catcaattatcccagaggtgactgggcattttaaagggaaattcagggagtagggaggggtcagcaggggctcagcagagttggggaagtgaaaattgcaraaagcgggaagagggtttggtcagtgtgaagccatctgggtttcactggtgctgatagaagtcaggctcctgcccttccacagaggcttgtctgcaggag

SEQ ID NO: 123714 - DNA, 201 bp, Homo sapiens
ttatcccagaggtgactgggcattttaaagggaaattcagggagtagggaggggtcagcaggggctcagcagagttggggaagtgaaaattgcaaaaagcrggaagagggtttggtcagtgtgaagccatctgggtttcactggtgctgatagaagtcaggctcctgcccttccacagaggcttgtctgcaggagtggctg

SEQ ID NO: 123715 - DNA, 201 bp, Homo sapiens
ggatgaatccctggtccactatttcccttttaaaggcagatacttgtatgacaatggaaaatgtaacaaaacttcatttaatcagcactgtgtgtgtgtgygcatgcatgtgcgcacacgtgtgtgtgtttatgtgtgtgtgattgatatgtgttatggaaaaagctcatgtctctggaaatactttccagcaaaaaacat

SEQ ID NO: 123716 - DNA, 201 bp, Homo sapiens
gaaaggggtttccccttataaaaccatcagatcttgtgagacttattcactaccatgagaatagtatggggaaaactgcccccatgattcaattgtctccyaccaggtccctcccacaacacgtggggattctgggagctacatttcaagatgagatttgagtagggacacagcaaaactgtatgaccccctttaggtgag

SEQ ID NO: 123717 - DNA, 201 bp, Homo sapiens
tgttgcccaggctggtctcgagccgtgcacccggctaatttttgtatttttagtagagatggggttttgccatgttgcccaagctggtctcaaactcctgractcaagtgatccacctgcctcggcctcctaaagtgctgggattacaggtatgagccactgtgcctggcccctggaagccattttaaacttatttctaag

SEQ ID NO: 123718 - DNA, 201 bp, Homo sapiens
gactccacgcaccatgccggggataaacatggaaaataaccatttgttgggcggtgctccgtgtcacatattctagtatgtagttttatacccagccattscccttaccctttcgatttttgttagagcgggacggtgccctgcatgctgtgtgctgtctgagtatgacatttctagtagtaaggaaggttaggatggctc

SEQ ID NO: 123719 - DNA, 201 bp, Homo sapiens
tgtctggacatgtgtatgtctgcatgcttggcaccctgttacaaattcctctgcaacatgttcatttttccttagaatttcccccttgtggaagaattatkccatagcttcaggctataaagccttcttcccagaaacaccatttttgttgttgttgtttaacctgagttattgttcactagaaaagtgaaggtgctgcac

SEQ ID NO: 123720 - DNA, 201 bp, Homo sapiens
gtgcatgcctgtaatcccagctactcgagaggctgaggcaggagaattgcttgaacccgggaggtggaggttgcagtgagctaagatcttgccattgcacyccagcctgggtgacagagccagattatgtctcaaaaaacaacaacaaaaaaagaaaataaataaaccttttgggacatttttaataggtgcttcaggaca

SEQ ID NO: 123721 - DNA, 201 bp, Homo sapiens
caatcatttgaacactgagggttttacttactcacatggacatatttcaaatggcccttctgttgcataagcttattatgtcaccttctctctttttttctttttttttttttgagacggagtctcactctgtggcccagtctggaatgcagtggcacgatcttgactcactgcaacctctacctcctgggttcaagccat

SEQ ID NO: 123722 - DNA, 201 bp, Homo sapiens
gctttattgctcacacaaagcctgtttggtggtctcttcacagggctgcatgtaacagatgagatttaggtggggacacagccaaaccgtatcaccatatrtgcttcttaatgacagttggctcaaggtgttttccccgtaaataacgcaactcacagttataaaattgaagataggtccccatttgcatggtaagcaggt

SEQ ID NO: 123723 - DNA, 201 bp, Homo sapiens
aaattagccggcttggtgatgcatgcctgtagtcccagctgcttgggaggctgaggcatgagaattgcttgagcctgggaggtagaggctgcagtgagccragatcgcaccactgcacttcagcctgggtgagagagcaagactctgtctcaccaaaaaaaaaaaaagaaaatgcagagggacaaaggagacaaagaagag

SEQ ID NO: 123724 - DNA, 201 bp, Homo sapiens
aagactctgtctcaccaaaaaaaaaaaaagaaaatgcagagggacaaaggagacaaagaagagatgagtggagagctgaaaggccccacctcaacaactcstggagttctaggccacatgtggagaagagcaggggagactcctcagcataggtcgccatggcgaggacctctcttcccttacagatgtctgggcctctgc

SEQ ID NO: 123725 - DNA, 201 bp, Homo sapiens
tggtggaggcctcgcccctcacctcagtccttccctcctcctccccaggggcggagaaactcatcatccacctgcggaaacatggcatcccctttgcactrgccaccagctcggggtccgcatcgttcgatatgaagacaagccgccacaaggagttcttcagcttgttttcccacattgtgctgggagatgaccccgaag

SEQ ID NO: 123726 - DNA, 201 bp, Homo sapiens
tgatctgtccatgccttccttttaaaaatctttagagggtcaggtgctccagatatctgttaccttatcctgaatgactgtaggtgttcggaaaaaatgastctgttgattgttttgtgtaacaattgacaaagtagggacattaaatcatgacattattaaaataggcatgattatacaattatttaaaataattttagg

SEQ ID NO: 123727 - DNA, 201 bp, Homo sapiens
ctaattccatctgtctctatcatttctgtgtctatttctcctgattgtgggtggtatttgcttctttgcagcatggtaatttttgattgaatgttagacastatgaattctacacccagtggagtgctagattttgcttgatttcatttgctttatttaactttgtcctggaactacattatgatctgtccatgccttcct

SEQ ID NO: 123728 - DNA, 201 bp, Homo sapiens
tgtgtttataatacttataaagccgttacataaggtcatgatctgctaattccatctgtctctatcatttctgtgtctatttctcctgattgtgggtggtrtttgcttctttgcagcatggtaatttttgattgaatgttagacactatgaattctacacccagtggagtgctagattttgcttgatttcatttgctttat

SEQ ID NO: 123729 - DNA, 201 bp, Homo sapiens
attgcttgaacccgggaggtggaggttgcagtgagctaagatcttgccattgcaccccagcctgggtgacagagccagattatgtctcaaaaaacaacaamaaaaaaagaaaataaataaaccttttgggacatttttaataggtgcttcaggacacagtagttgttctgctttataattctactgtttctaggggaaaaa

SEQ ID NO: 123730 - DNA, 201 bp, Homo sapiens
tactagacaatttagaattgaacgttaatatgggcatgggaggccagtgaaaacaacataagcctcacctggtactgcaacacatctttgtttgggaaacrctgactttgcaaccacagctataaacaccggcttttatttcaggagtcagcagttactatatttgcaggaaggagaactgagggcatccctgtgaaaacc

SEQ ID NO: 123731 - DNA, 201 bp, Homo sapiens
gaccctgtctgaaaaataaaatgaaattttaggcaaaccgtcacaccttgtgtggatttagatgttcctgttgtgctagtcgcataagttaaaggtaggarggactcctggtatttttgattctttctgataactagtcctctcatgattggctctatgatgacctccatggacctgtgtggtccctgtagttaatccgtg

SEQ ID NO: 123732 - DNA, 201 bp, Homo sapiens
gtgttttggcaaagctcctgtgcagatgaggtagaaagcctgtagtgagtagacacaaatgtggtttttcacataagtgttgtggataagtgcatctcctyatccccaacagaatcatacactcttatcagggaagacaggtgtctctcatacgccccaagcacctgggtcatggggacttgggcccagtgtcatgggcag

SEQ ID NO: 123733 - DNA, 201 bp, Homo sapiens
tatcagggaagacaggtgtctctcatacgccccaagcacctgggtcatggggacttgggcccagtgtcatgggcaggtttgagtgaggtcaggagtacctygcaccacgcctactctcttgaggtggtttctgcaccacttctatacggtgggacctttcatctccatagcatggtagacacaagaatacagggaaagtct

SEQ ID NO: 123734 - DNA, 201 bp, Homo sapiens
attctcgtgatccttgtctccatctcctgccactacagctgcagtgatgtcaatggggaggctgtctttttcaccttcaggctctccctctccccttgggyacatcatcagctttgataggaggtggagctgtgctttggccaggtcacagctcagtaagtgttctggcttcttggcagacccacagccacctgcgttcct

SEQ ID NO: 123735 - DNA, 201 bp, Homo sapiens
aaacccactccttcaaatccaccttccaaatcctggtgaatggactgctgtccctgctccagaggactgtgtgcctcaaacagggctccccacagtgggcytgtattagcagggattccccagtgcatgtttcctgccttggagaccatgaactccagggaggctggagagctgtctgctctgctttctgtcttctgcctg

SEQ ID NO: 123736 - DNA, 201 bp, Homo sapiens
gcggcgcccccgcagcccgtcacccacctcatctttgacatggacggacttcttctgggtgggtagtgtgcagccgccgcctccagtaagggcggtcttgkgtgggcgtggggacggtcggcgcggggtacgtcacggcctgggggccgcggcggggcggtgttcatgcagggacgctcgggctcccgcgcgctctgcccc

SEQ ID NO: 123737 - DNA, 201 bp, Homo sapiens
ccaaatcagaggctatcaatgcacgatatacggaagcagaagccaatagacacagaatccagtcactgattctgtaggtaaagaaacagattcacaccaarggactcaattcccctctgtaagcttttattgaacctttcgtgtacgtgccattttatcagattgcaagatgccaggaataccgagtgatttaggagcaca

SEQ ID NO: 123738 - DNA, 201 bp, Homo sapiens
tcatgacattattaaaataggcatgattatacaattatttaaaataattttaggccaggcgtggtagctcatgcctgtaatcccagtactttgagaggccraggcaggcgaatcacctgaggtcaggagtttgagaccagcctggccaacatggtgaaaccccatctctactaaaaatacaaaaattagctgggcgtggtg

SEQ ID NO: 123739 - DNA, 201 bp, Homo sapiens
cctcagtccttccctcctcctccccaggggcggagaaactcatcatccacctgcggaaacatggcatcccctttgcactagccaccagctcggggtccgcrtcgttcgatatgaagacaagccgccacaaggagttcttcagcttgttttcccacattgtgctgggagatgaccccgaagtgcagcatggcaagccagacc

SEQ ID NO: 123740 - DNA, 201 bp, Homo sapiens
gatggaaaaactgactacaggtagtaacttcgagtttggagaaggctcccacctgtgcccccaggtggtgctgtgtagcttactgagaatctgcctggcgrctcagcccccactcttctgttgtggcaacccacatctgaaatgttgtcctctggggaacatgcatcctttccagacactcctgtaatctatatatttgtt

SEQ ID NO: 123741 - DNA, 201 bp, Homo sapiens
tttcacaggttataagatcatattttttgactcttttcatttaaaaacaggtagtaagttgaatttgtgtttcaaaaaaaaacaaaaggcaggataaaacraagagctaaaacaccacagagcaggttgaaatcccggatgtgaagtagtggagccattgggccctccaccccaagctgtgcattcagaatgccacctggg

SEQ ID NO: 123742 - DNA, 201 bp, Homo sapiens
aatggccttgtgagccgcctcaccacctatgaggacttgcagtgtaagggggattgctctggacatgggtccaggccagcccaggggcgggggcggcttcyactctctctggggtcattgctggcctctgtgtgcctggaataaggggggttgaaggctaggggagctggcctggctgcggcaagtgtccatcggccccac

SEQ ID NO: 123743 - DNA, 201 bp, Homo sapiens
gtctgctgctcctgaactcccgtctcaccatcctgtcccagctgccctcatggtgtatgagcctcttcctgcaacaacaggtcagaatactttggggcagyaagtaggtcagctacctggtccctttagttacactcagtacattgccagcattgatgggaggtgcaggttgttcacaggcttaacaccaaaactgcctgg

SEQ ID NO: 123744 - DNA, 201 bp, Homo sapiens
tctccaagctgcccatttcctacaaaaccaacacacccaaggaggaacacctgctgcaggtggcagacaacttctcccgccagtacagccatctgtgcccrgaccgcgtgcccctcttcctgcaccccctgaacgagtgtgaagtgcccgtaaggctggcatgttgagggcagggctggggagcctggggctggagagcag

SEQ ID NO: 123745 - DNA, 201 bp, Homo sapiens
gctggggcagcggggccccagctgtgctgaccgtcccactgtgaccagccctcgcacctgtactcctcgaccactgtgctcaagtaccagaaggggaactsctttgacttcagtacgctgctctgctccatgcttatcggctctggctatgatgcttactgcgtcaacggctacggctcgctggacctgtgccacatggac

SEQ ID NO: 123746 - DNA, 201 bp, Homo sapiens
gtggcgcaattatggctctacatcccgggctcaggtggtcctcccacctcatcctcccaggtaactgggaccactagcgcacaccaccatgcctggctaayttcttgtttttgtttttgttttttaacagatggggtttttccattttgcccaggctggtctcaaactcctgaattcatgcaatctgccctccttggcttc

SEQ ID NO: 123747 - DNA, 201 bp, Homo sapiens
atgggctcagtggttgggtgatgggaggggagatgggccgtcacactccggttgatggtgcagtctacatcagaactcagctctcctgctggttccccagycccagggagatgtctgggcccctgacactcctcttccagccatctgactcgtagtcacccacctttccttggcaggaagcggagaaggcaaagccggatg

SEQ ID NO: 123748 - DNA, 201 bp, Homo sapiens; identical to SEQ ID NO: 20931

SEQ ID NO: 123749 - DNA, 201 bp, Homo sapiens; identical to SEQ ID NO: 20919

SEQ ID NO: 123750 - DNA, 201 bp, Homo sapiens
gagtatacttacccttccccacagagacattccatctccagacacccagagacgctccagaatggaggtcctgagggagaaggtggaggaggaggaggagsccgagcgggaggaggcggccgagtgggctgaatgggcgaggatggagaaaatgatgaggccagttgaggtgcggaaggaggaaatcaccttaaagcagga

SEQ ID NO: 123751 - DNA, 201 bp, Homo sapiens
gcacttcctgggcatcgaaagcctgtggaaccacaagaactactggatcaacatgcaggattgctggaactgctgcaaggtgcctagggagggggagctgsgtgggtgtggcaggcacagtgcaggtgataggaatagagggaagcaatggcagccagaccttggggagagcgagacaccaggccacgagggctttgaacc

SEQ ID NO: 123752 - DNA, 201 bp, Homo sapiens
gcccctcttcctgcaccccctgaacgagtgtgaagtgcccgtaaggctggcatgttgagggcagggctggggagcctggggctggagagcagagggcacarggaagtggggcaggttctccaaggtcactgggccaaatcacggacctcctgtgggccagagcgcttctagtctgggggcaacataaagtcgaacgccagc

SEQ ID NO: 123753 - DNA, 201 bp, Homo sapiens
tggctgtgaggtctggctttgtgctggcacactgctgatgcagagctggtggagaggtctctgtagttcctgctgatccagctatctgcccctcacctttrcaggagcgcatgatgcacgaagagcacctgcggcaggtggagacccagctggactacctggccccattcctggcccagctcccgccaggagagaaactaa

SEQ ID NO: 123754 - DNA, 201 bp, Homo sapiens
tttacaggagcgcatgatgcacgaagagcacctgcggcaggtggagacccagctggactacctggccccattcctggcccagctcccgccaggagagaaaytaacatgctggcaggcggtgcgcctcaaggatgagtgcctcagcgacttcaagcagcggctcatcaacaaggccaacctcatccaggcccgctttgagaa

SEQ ID NO: 123755 - DNA, 201 bp, Homo sapiens
caggccggaacctcaccatggggtcacacggtggaggccacatttaaaggaggcagtgccggacacaggggctcacacctgtaatccaagcgctttgggasgccaacatgggcagttgagcccaggggttcaagaccagcctgggctatatggtgaaaccccatctctacaaaaaatataaaaattagccaggcatggtgg

SEQ ID NO: 123756 - DNA, 201 bp, Homo sapiens
tatgatgcttactgcgtcaacggctacggctcgctggacctgtgccacatggacctgacgcgggaggtgtgcccactcactgtgaagcccaaggaggtatrgtcgggcttgagctgcccgggtttcccaaaggatgaacattcccggtgctgtcgtgccatccttagagacgtccatcactgccgcctcatccccagccct

SEQ ID NO: 123757 - DNA, 201 bp, Homo sapiens
caagagatccccttgccttggcctcccaaagtgttggtattacaggcatgagccaccatgcccaaccaacaccagtcatattgggttagggcccactctartgaactcattttaccttaatcacctctctaaagaccctgtctctaaaaacaatcattcaaacagtaagtgatcaagacaacaacaacaacaaagaaaaaa

SEQ ID NO: 123758 - DNA, 201 bp, Homo sapiens
aaccaacaccagtcatattgggttagggcccactctaatgaactcattttaccttaatcacctctctaaagaccctgtctctaaaaacaatcattcaaacmgtaagtgatcaagacaacaacaacaacaaagaaaaaataagaaaaataaataaaacaaatacagtcactttcagggcttaaaacttcaacctatgaattt

SEQ ID NO: 123759 - DNA, 201 bp, Homo sapiens
aatacaaaaattagccaggtgtggtggcaggtgcctgtagtcccagttacttgggaggctgagacaggagagtcacttgaacccaggtggcggagactgcrgtgagctgagatcacaccactgcactccagcctgggtgacagagcgaggctgtgtctcaaaaaaaaaaaaaaaaaaaaagtacacttttggacccagcaa

SEQ ID NO: 123760 - DNA, 201 bp, Homo sapiens
gagactgcggtgagctgagatcacaccactgcactccagcctgggtgacagagcgaggctgtgtctcaaaaaaaaaaaaaaaaaaaaagtacacttttggrcccagcaattccactgctgagaatttattcttagcaaataatggacaagaacaaaaaatgcacgatgcagatgttcatcatggtgttggtaataatcaga

SEQ ID NO: 123761 - DNA, 201 bp, Homo sapiens
ggaaactgaggccaagtaaagtgagatcatttctcccacgccacacagagggggcagagccgacactgccctcccccagggcctgggctcataagcaccayggtggtcggtgtcctctgaaggataacagcccttcagaggatgctacagtccttcagcccctcttccagcctgaatgtcctcatctcatccatcaggctc

SEQ ID NO: 123762 - DNA, 201 bp, Homo sapiens
acctgtaatcccagcactttgggaggctgaggagggtggatcatttgaagtcaggaattcaagaccagcctggccaacatggtgaaaccccgtctctactaaaaatacaaaaaatagccaagtgtggtggtgggcacctgtaatcccagctacttgggaggctgaggcagaagaattgcttgaatctgggaggcggaggtt

SEQ ID NO: 123763 - DNA, 201 bp, Homo sapiens
tacagataattatgttatctgtgaataaaaacagttttacttcttttcccatctggatgcttttcttcccttatcacactggctggaatcatcagtaaatrttaaacagaagtgatgaaagcaaacctgtttattcctgatcttacggagagcatttagtctgataccattaagtatagtattagccacaggtttctctta

SEQ ID NO: 123764 - DNA, 201 bp, Homo sapiens
tgtaggagaccagagttttgttattactcaaatcagtctcccagagcattcgtgcattcagggagcagagtttttagggacaacttggtgggttgggggaygccagggaaccaggagtgctgattggtcagagatgaaatcacagaaagtcaaagctgtcttcttgcaccaagtcggttcctgggtggggctcacaagatc

SEQ ID NO: 123765 - DNA, 201 bp, Homo sapiens
ccactgtgctcaagtaccagaaggggaactgctttgacttcagtacgctgctctgctccatgcttatcggctctggctatgatgcttactgcgtcaacggytacggctcgctggacctgtgccacatggacctgacgcgggaggtgtgcccactcactgtgaagcccaaggaggtatggtcgggcttgagctgcccgggtt

SEQ ID NO: 123766 - DNA, 201 bp, Homo sapiens
gacaggcagacttgatgcatgattgctttgccggttgctctgtctttgtgaagaagtcagaagctctgagatgagaaacttctgccttcagcaaaggagaygcctctcatcactctgcctcccttaggcactgattccagggttgtgggaagtaacactcagtagatgcttagaatagtctctagctgttcaataaatgtt

SEQ ID NO: 123767 - DNA, 201 bp, Homo sapiens
cactcagtagatgcttagaatagtctctagctgttcaataaatgttaactattgttgctcccatcttacaggtaaggaaactgaggccaagtaaagtgagrtcatttctcccacgccacacagagggggcagagccgacactgccctcccccagggcctgggctcataagcaccatggtggtcggtgtcctctgaaggata

SEQ ID NO: 123768 - DNA, 201 bp, Homo sapiens
attctcctcggcctccctggatcaggcttggggctggaggagttcagtacacagagaacgggcagtggatggatgaatggctgggcggggctggccctccmttcccccaaactagcaagaagagaccacagctgactgtgtccacagcatttgagacccgctgcccgaacgggaagaaggtgattcagtacaagagggcaa

SEQ ID NO: 123769 - DNA, 201 bp, Homo sapiens
ggtggtcggtgtcctctgaaggataacagcccttcagaggatgctacagtccttcagcccctcttccagcctgaatgtcctcatctcatccatcaggctcygaggtgaaggtggaagtgaggccagaggggcagtgctgtgccaagtgagggcatgaggaagagatgatggcataggctgtcacttttaccagcacacgaa

SEQ ID NO: 123770 - DNA, 201 bp, Homo sapiens
gggtgtggtggcgggcacctgtaatcccagctactcaggaggctgaggcatgagaatcgcttgaacccaggaggcagaggttgcagtgagccgagatcatrccactgcactccagcctgggcaacagagcaagactccatctgaaaaaaaaaaaaaaagagtgaaaaaaggcaaatatctatacaattgggttcctatcca

SEQ ID NO: 123771 - DNA, 201 bp, Homo sapiens
gccgatgcggaaagacctgcacatccaggtctagcccaggccagagagcctccttgtctttcacagaggtcaacacgagatttcctcacagggaggctgartgatgggcagggagttctgctccccctcggggcctcagtttccctgttgggatgaggagtgtgggcatggactctcagagccacctgggactgacgttct

SEQ ID NO: 123772 - DNA, 201 bp, Homo sapiens
cttctctgaattcagtttcagcctttatgtgaaatggaggcagaaggatcatagttgtattcatagtaattctaataagtgcattcgtctggcatcacaargcaccacagatgcggttgcttaaatgacagaaattaattttcttacagttctggaggctggaagtctgagatcaaggtgtggacagggttggttccttct

SEQ ID NO: 123773 - DNA, 201 bp, Homo sapiens
cacctggtgaggtgggcactggtattaccacctgtgattaatattatcccattttaccgatgggaagactcacacacagagaggttaagtcacttacccaragcgatacagctggtaagtgacagagctgggatttgaacctacacagtctggctccacagtctgggttctcaatggtaactctgttctacctcctggggc

SEQ ID NO: 123774 - DNA, 201 bp, Homo sapiens
cctgcctcggctccggaatcaggctgtttccttctagacctcccatgggggattcaagccggcgtccgggtcaaagaacagggacaaagtcctcctgccaygggggaccatctgcaggcaaagtgaagaatgaggagcttcggcaaaatgccgactaaggcctccttaggttttgccccactccaagatggaaggcctgag

SEQ ID NO: 123775 - DNA, 201 bp, Homo sapiens
tgggaccaagaggccaacaaatggatctgatcactgagaagtgctgcttggctagaggttctcccctgaggatctggggtcctgaatggtgttgggctacytaggccttgggtggcttccagccagatgagcattcgtcccctcctgagtcccagagcacagaatgtcagaattggacagaaaatatctgccctcccttcc

SEQ ID NO: 123776 - DNA, 201 bp, Homo sapiens
gtctcacatctgtagtcccagcactttagaaggaaaaggtgggaggatcgcttgaggccaggagttcgagaccagcccgggcaacatagcaagaccccccyacccatgtctacaaaaaatacaaaaattagccaggtgtggtggtgcctatagtcccagctacttgggaggctgaggtgggagggtcacttaagcccagga

SEQ ID NO: 123777 - DNA, 201 bp, Homo sapiens
tatccttctaaagtgtggattgtttgaatgcattttttaaaaactctatattgaagtgtaacctacatgcagaaaagtacactcatcccatgcatacatasagttcagtgaaatcccacaaatttaacacaccttggtttcctacacccagaccaagaaatagaatattgcccaaaccccacaaagtccctttgcacaatt

SEQ ID NO: 123778 - DNA, 201 bp, Homo sapiens
caccacctatgaggacttgcagtgtaagggggattgctctggacatgggtccaggccagcccaggggcgggggcggcttctactctctctggggtcattgytggcctctgtgtgcctggaataaggggggttgaaggctaggggagctggcctggctgcggcaagtgtccatcggccccacaggtaccaatattttggaga

SEQ ID NO: 123779 - DNA, 201 bp, Homo sapiens
agcagagtcttgaaggagctgaggaggggcccagcaccatatgggagtggagtggcctggccctgagaacccacgaaatccattgtctggctaggaggggytattccacgtgaatcgccaaacgaccccagactccagtgtcctgaacgttcgttgctcctgcctgcgggcatgcacagaaatctcctctcacacgctcat

SEQ ID NO: 123780 - DNA, 201 bp, Homo sapiens
aagaagagaccacagctgactgtgtccacagcatttgagacccgctgcccgaacgggaagaaggtgattcagtacaagagggcaaagctggagaagtgggmcccgtacctcaatagcaatggccttgtgagccgcctcaccacctatgaggacttgcagtgtaagggggattgctctggacatgggtccaggccagcccag

SEQ ID NO: 123781 - DNA, 201 bp, Homo sapiens
ggactcaagcaattcttccacctcagcctcccgagtagctgggactacagactgcaggcatgtgccactatgcccagctaatttttgtattttttatagaracaaaaaatgggttttgcaatgttgcccaggttggtctcaagcaagccacccaccttggcctccaaaagtgctgggattacaggcttgaaccactgtccc

SEQ ID NO: 123782 - DNA, 201 bp, Homo sapiens
gacttgatgcatgattgctttgccggttgctctgtctttgtgaagaagtcagaagctctgagatgagaaacttctgccttcagcaaaggagatgcctctcrtcactctgcctcccttaggcactgattccagggttgtgggaagtaacactcagtagatgcttagaatagtctctagctgttcaataaatgttaactattg

SEQ ID NO: 123783 - DNA, 201 bp, Homo sapiens
tttttttttttttttggagagacagggtcttactctgtctcccaggctggagtacagtggtgtgttcacagctcgctgcagcctcaacttcctggaatcawgtgatcctcctgcctcagcctcccaagtagtcagaactacaggtgcataacaccatgcactggcttaaaaaaaaaaaaaaaggccaggcacggtgcctca

SEQ ID NO: 123784 - DNA, 201 bp, Homo sapiens
gggaactctctgccaacttgattggtggatctggggggggatccacccccaccccacgaggaaagcacagtttattttgtgggtggggcttcaggtgccasccagctgaaggatggccacccctgtggtcaccaagacagcctggaagttgcgtgagtggttttcatttttctttatcaccccatttattctgttagcggc

SEQ ID NO: 123785 - DNA, 201 bp, Homo sapiens
cacatactcagttttagtagatactgcccgatttctcaagtgattgcatccatttacactcccaccagcaatgtatgagggttctcagagctccatccacmtccttgccaatactggatactttcttttccattttagctattgtagtggacatgtaatggtattgcactgtggttttatttaatgcaattgatttttggc

SEQ ID NO: 123786 - DNA, 201 bp, Homo sapiens
ctgtctgcctggatgtgtgggaactctctgccaacttgattggtggatctggggggggatccacccccaccccacgaggaaagcacagtttattttgtggktggggcttcaggtgccagccagctgaaggatggccacccctgtggtcaccaagacagcctggaagttgcgtgagtggttttcatttttctttatcacccc

SEQ ID NO: 123787 - DNA, 201 bp, Homo sapiens
cccctctgcagattcccaaacctaatttgcagtgcagcttctgactctggtggctttggtgggtgtcagtctttatcaagtggtcttggtgatccagggarcaacagctcttaccaagcattttctaacatgacgtcacctcttgtttgtattgcagccctgtattgagctgagatggctcgagcctaacattccatgatc

SEQ ID NO: 123788 - DNA, 201 bp, Homo sapiens
acatgcaggattgctggaactgctgcaaggtgcctagggagggggagctgggtgggtgtggcaggcacagtgcaggtgataggaatagagggaagcaatgrcagccagaccttggggagagcgagacaccaggccacgagggctttgaaccttctccatagctgcgtctccatggcccactcccttgcccatgaataacca

SEQ ID NO: 123789 - DNA, 201 bp, Homo sapiens
caaattcgtcagcttctccttcagaatagagggagggaggaagaaagggcaaggtcaacagtggagaactgataaagggaggaggaggaaaggtgggtatmgaaggaagggggagcattggagcaaaacagtaaacttaccagtcagagggcattagatcagacactcctacagtccagaaggtttccccctatcaggaag

SEQ ID NO: 123790 - DNA, 201 bp, Homo sapiens
ctcctggggctgcttgatgtgatgtgcttggcacagcagtgtagaccgtctcaaaagggtgctaaatgttctcagcatcctcatctccagagactggggayatcttgtgtgcagtaaatccaggcataggtgccccctgctggccttggggcatggaccagccagggcctgagagcccagccctgcaggcagccggctgag

SEQ ID NO: 123791 - DNA, 201 bp, Homo sapiens
tgcactccagcctgggtgacagatagagatcctgtctcaagaaaaaaaaaaaaatcctgaccaagaaatttacaaaagaaaagcataggagtaatatacatttttttaaatgatcaacctcatttggaagttgataataaaaaaaaagaaactaataaggtccctaaccaataaaggaccatcttataacccccatgttgg

SEQ ID NO: 123792 - DNA, 201 bp, Homo sapiens
tgacagagtactatcaaggacgcccagacttcctctcctaccgccatgccagcttcggaccccgagtcaagaagctcactctgagcagtgcagagtcaaamccccggcccattgtggtaagagctcgcgggggctggggacaggtcgccctccttctctggcagctgatgtcacctctgaatggtgagagccctggctctg

SEQ ID NO: 123793 - DNA, 201 bp, Homo sapiens
acctacacagtctggctccacagtctgggttctcaatggtaactctgttctacctcctggggctgcttgatgtgatgtgcttggcacagcagtgtagaccrtctcaaaagggtgctaaatgttctcagcatcctcatctccagagactggggacatcttgtgtgcagtaaatccaggcataggtgccccctgctggccttg

SEQ ID NO: 123794 - DNA, 201 bp, Homo sapiens
ctcccacctcatcctcccaggtaactgggaccactagcgcacaccaccatgcctggctaatttcttgtttttgtttttgttttttaacagatggggttttyccattttgcccaggctggtctcaaactcctgaattcatgcaatctgccctccttggcttcccaaagtgctggggttacaggagtggaggaggggtgtctc

SEQ ID NO: 123795 - DNA, 201 bp, Homo sapiens
tctgctggtgcccacctagggagcacccagacctatggggagggcatgggccacttcaacagggtgggaagtgccagagaggctgtcatgggaacccagargggggcgcacccagcccagcactggggctagggcctggggatgggtgagcagaaaggggtaccagaagtaggctaggggtcacctgggtgaagttttgaa

SEQ ID NO: 123796 - DNA, 201 bp, Homo sapiens
agaggggggcgcacccagcccagcactggggctagggcctggggatgggtgagcagaaaggggtaccagaagtaggctaggggtcacctgggtgaagtttkgaaggatctgaaggagtcagtccaacaaggggaggaggggatgacggtgtttctggcagagacctgtacaagcaaaggcctggcaatgtgagagtgtggt

SEQ ID NO: 123797 - DNA, 201 bp, Homo sapiens
aagctgccctgcctccctcagcaaacccgatgtgtgggaggtcagggaaagctcagaaattctaaggaaatataacaaatgctcctccaggaaagctaaarggggcgccacatacccgttctgtggttggaatcaggccggaacctcaccatggggtcacacggtggaggccacatttaaaggaggcagtgccggacacag

SEQ ID NO: 123798 - DNA, 201 bp, Homo sapiens
tggatggatgaatggctgggcggggctggccctcccttcccccaaactagcaagaagagaccacagctgactgtgtccacagcatttgagacccgctgccygaacgggaagaaggtgattcagtacaagagggcaaagctggagaagtgggccccgtacctcaatagcaatggccttgtgagccgcctcaccacctatgag

SEQ ID NO: 123799 - DNA, 201 bp, Homo sapiens
gctacagcacccaggatgagcacttcctgggcatcgaaagcctgtggaaccacaagaactactggatcaacatgcaggattgctggaactgctgcaaggtscctagggagggggagctgggtgggtgtggcaggcacagtgcaggtgataggaatagagggaagcaatggcagccagaccttggggagagcgagacaccag

SEQ ID NO: 123800 - DNA, 201 bp, Homo sapiens
tagaccagtgatgggttcctcaaagcaggaaggcttgagcaattcccttattttacagatgggcacattgaggcccagaaaggccagaaacctacccaggmcctcccagtgggttacggaagggacaggacttgacgtcaggtcttctgccccccatatcgtccaccttgttcaggagttgccctgctcctttggaaagca

SEQ ID NO: 123801 - DNA, 201 bp, Homo sapiens
acctcatccataatgtgggtctgtcttctccctgggcctggggttgggcgaccaagccagcagccatacttcctagtgcttatgaagctgtctcctcccamctcccgctccccacccagtgcactcgtacaagtccatgcaacctgagatggaccgtgtcattgagttttatgaaacggcccgtgtggatggcctgatgaa

SEQ ID NO: 123802 - DNA, 201 bp, Homo sapiens
agcaggctaagacgactctgcagtcctggtcagggcaaacctcagatcctagggaggctctgtgggaggggaagagtctcactacctctgaggggctagcyttcctagtcaaacgctcactctcccggcacagtccccagcttttctgagtcttcagttcctcttttattattatctgtatttttataagtgagaaaatta

SEQ ID NO: 123803 - DNA, 201 bp, Homo sapiens
ataatgtcaaaagattcaagacacaaaagtacatactctattattccatttatggaaagaacaaaaataaggaaaattaattggtgatattagaagtcagsacaaccgtcactcttggagtgtgagggttagtgaatggatgtgagcatggagccctgggaggggaggttctggtttctagtcacgttctgctttttgacc

SEQ ID NO: 123804 - DNA, 201 bp, Homo sapiens
aagaaaaaaaaaaaaatcctgaccaagaaatttacaaaagaaaagcataggagtaatatacatttttttaaatgatcaacctcatttggaagttgataataaaaaaaaagaaactaataaggtccctaaccaataaaggaccatcttataacccccatgttggcaaagatgaaaaaaatggtcctactgggtatgaacaag

SEQ ID NO: 123805 - DNA, 201 bp, Homo sapiens
aggttgcaccctgggccagtggccccagtgagctacctctggctccaggcctgagctctcctgctctccagcacagggagggcattcaggttacaccttcmggttgcaaggccccgcctggttttcagggccggcttctgaatccctttcaccaaccaagttgagattttagtttgggggtcgtgaggcaggatgggcatc

SEQ ID NO: 123806 - DNA, 201 bp, Homo sapiens
ccatctgtgcccggaccgcgtgcccctcttcctgcaccccctgaacgagtgtgaagtgcccgtaaggctggcatgttgagggcagggctggggagcctggrgctggagagcagagggcacagggaagtggggcaggttctccaaggtcactgggccaaatcacggacctcctgtgggccagagcgcttctagtctgggggc

SEQ ID NO: 123807 - DNA, 201 bp, Homo sapiens
tgaaatcacagaaagtcaaagctgtcttcttgcaccaagtcggttcctgggtggggctcacaagatcagatgagccagtttatccatctggtggtgccatstgatccatcaagtgtagggcctgcaaaatatctcaagcactgatcttaggagcagtttagggagggtcagaatcttgtagcctccagctgcatgactcct

SEQ ID NO: 123808 - DNA, 201 bp, Homo sapiens
gggaggggggagtacaatgaccctccttttgtagacaagaaattgcaggttctgaaaatgccagtaacttgtccagagctacatggctctctcagtcttgccccgttctgatctcatggacatgacatccctataaacatgaccccactggctcccacccaagatattttgtggcccctgcctctgtggcaggtatggata

SEQ ID NO: 123809 - DNA, 201 bp, Homo sapiens
cacccctggtgattattctcctcggcctccctggatcaggcttggggctggaggagttcagtacacagagaacgggcagtggatggatgaatggctgggcrgggctggccctcccttcccccaaactagcaagaagagaccacagctgactgtgtccacagcatttgagacccgctgcccgaacgggaagaaggtgattca

SEQ ID NO: 123810 - DNA, 201 bp, Homo sapiens
gagggaggagaagctgtccagacatcaggtctgggagtcagagctggaggtagggtcctgtgggagagtgagcaggtgggcggtatctttgtttttgagayagggtctcgctctataacccaggctggaatgcagtggcgcaattatggctctacatcccgggctcaggtggtcctcccacctcatcctcccaggtaactg

SEQ ID NO: 123811 - DNA, 201 bp, Homo sapiens
gggagggggagctgggtgggtgtggcaggcacagtgcaggtgataggaatagagggaagcaatggcagccagaccttggggagagcgagacaccaggccaygagggctttgaaccttctccatagctgcgtctccatggcccactcccttgcccatgaataaccattctgatacgattattgtctctcctgatttgtgtat

SEQ ID NO: 123812 - DNA, 201 bp, Homo sapiens
ggagcgcatgatgcacgaagagcacctgcggcaggtggagacccagctggactacctggccccattcctggcccagctcccgccaggagagaaactaacaygctggcaggcggtgcgcctcaaggatgagtgcctcagcgacttcaagcagcggctcatcaacaaggccaacctcatccaggcccgctttgagaaggtgcc

SEQ ID NO: 123813 - DNA, 201 bp, Homo sapiens
gacttcctctcctaccgccatgccagcttcggaccccgagtcaagaagctcactctgagcagtgcagagtcaaacccccggcccattgtggtaagagctcrcgggggctggggacaggtcgccctccttctctggcagctgatgtcacctctgaatggtgagagccctggctctggggtggcattaaggcctgagacatat

SEQ ID NO: 123814 - DNA, 201 bp, Homo sapiens
tccccaagccctgggcccaggtcccttctctgccccggagtagccatctcccaactccccatggatcaggtggggacgtggtggctgtggggtacactcakttgactgccctcatccccaacaggacttgatctttgacctgggtgaccctgtgagatgggagtacatgctcctggggactgataagtctcagctgtcctt

SEQ ID NO: 123815 - DNA, 201 bp, Homo sapiens
tgccagcttcggaccccgagtcaagaagctcactctgagcagtgcagagtcaaacccccggcccattgtggtaagagctcgcgggggctggggacaggtcrccctccttctctggcagctgatgtcacctctgaatggtgagagccctggctctggggtggcattaaggcctgagacatatccaagggcaccaatgatgaa

SEQ ID NO: 123816 - DNA, 201 bp, Homo sapiens
cttctactctctctggggtcattgctggcctctgtgtgcctggaataaggggggttgaaggctaggggagctggcctggctgcggcaagtgtccatcggcmccacaggtaccaatattttggagataaaggagtggtaccagaaccgggaagacatgctggagctgaaacacataaacaagaccacagacctgaagacaga

SEQ ID NO: 123817 - DNA, 201 bp, Homo sapiens
taaggtggttgttgtcccaggtggagcccatggagcacaccaagaagctgctctaccagtacgaggccatgatgcacctgaagagggaggagaagctgtcyagacatcaggtctgggagtcagagctggaggtagggtcctgtgggagagtgagcaggtgggcggtatctttgtttttgagatagggtctcgctctataac

SEQ ID NO: 123818 - DNA, 201 bp, Homo sapiens
ttattagaggccaaggggcggctcttgaacgttccttcctcttgattagtcctatttaggaaaagagggcgggtactgaggaaaagcggcagaagcgcctkcttccattggtcagtcctggcaggaggcggagcacccgcggcagctgattggtgcgggaggcaaggtgggcggggctctgagccggaggttttgttgtga

SEQ ID NO: 123819 - DNA, 201 bp, Homo sapiens
aagtgagaaaattaaggctcagagaggtttagcaacttgctcgaggtcacacagctggaaagtggcaggggtagatttgaacccaggtggtcctatgcccygatcatggcagcctctctgtgttactaaggtggttgttgtcccaggtggagcccatggagcacaccaagaagctgctctaccagtacgaggccatgatgc

SEQ ID NO: 123820 - DNA, 201 bp, Homo sapiens
gacgcccgacatgtgcatcagcttcgaggtgggcctgggggccacggcgggcaggggtcggctgcaggaggaaccggggctctctgtcttattccagccasttgggagaaccaggatgggcgctggtgaatcccggcgaggaaattcatctttgctctttgggaaaaccaaaagttcccatctggggacccttctctttga

SEQ ID NO: 123821 - DNA, 201 bp, Homo sapiens
ccagccagatgagcattcgtcccctcctgagtcccagagcacagaatgtcagaattggacagaaaatatctgccctcccttcctactataaagagaaactraggcacagaaaggcgcagacagtgacccaagggtccagcaggagctactggcaaagccagggtttccccaaccaggctcagtcgtggctggtggccaggg

SEQ ID NO: 123822 - DNA, 201 bp, Homo sapiens
ataatgtgggtctgtcttctccctgggcctggggttgggcgaccaagccagcagccatacttcctagtgcttatgaagctgtctcctcccaactcccgctmcccacccagtgcactcgtacaagtccatgcaacctgagatggaccgtgtcattgagttttatgaaacggcccgtgtggatggcctgatgaagcgggagga

SEQ ID NO: 123823 - DNA, 201 bp, Homo sapiens
gtttgtttgtttttgaaagagggtcttgctctgtcacccaggctggggtacagtggcatgatcacggctcactgtagctcgacctccagggctcaaaggaytttcctgcctcagcctctggagtagctggggctgcaggcaaggcatacaccaccacgcccggctaattttttgcatttttttttttttgtagaggcaggg

SEQ ID NO: 123824 - DNA, 201 bp, Homo sapiens
cgcctctccctccacacctccccgcaagccaagggagctggctccagcctccaccagcccagagaggggctcccacagtgcactggcaggctgaagggctyaagtgtggccagagcagacgccaaggccaaggaggcactgagagtgagcgagggctgctaacacattgtcatctctcaataggattatttttggaagtga

SEQ ID NO: 123825 - DNA, 201 bp, Homo sapiens
agagaaacaaaatgtggaaagtatctgataatttaaaacaattttataaaagttaacatggatatattacagactagaataaaaattcacatatatttttkagataaaactagaggagcaacagatatgtcaaggacctgcttcaggtcaggttctccatctccttacaggagtgcatgccttcttctccccctgcggaag

SEQ ID NO: 123826 - DNA, 201 bp, Homo sapiens
cacaagagtatcaagatatggccgggcatggtggcttgcctctgtaatcctaacactttgggaggccgaggtgggcagatcacctgaggtcaggagtttgrgaccagcccggccaacatggtgaaaccccatctctactaaaaatacaaaattagccagatgtggtggcacatgcctgtaatcccagctactcgggaggct

SEQ ID NO: 123827 - DNA, 201 bp, Homo sapiens
ggatggaaataggaagtttttctgaactgggaggagctcgaagacaatcacaagagtatcaagatatggccgggcatggtggcttgcctctgtaatcctarcactttgggaggccgaggtgggcagatcacctgaggtcaggagtttgagaccagcccggccaacatggtgaaaccccatctctactaaaaatacaaaatt

SEQ ID NO: 123828 - DNA, 201 bp, Homo sapiens
tgtattgtattctactgtattgcactgtattgtatccctatggcactgtaagccaaagtctgcaagcctaggtctgccaagatccagcttggctctcaggyggagaaaatctatcagaaacaggaggaaaaatataagaccaacattcaaaaagacagacaagaagaacaaaaagatgtagagataaaatgccctgacaac

SEQ ID NO: 123829 - DNA, 201 bp, Homo sapiens
ctgccttgctacctggtagaaaaaagaaattacttcatttgtcacccattcctgacatagaagaatatcattttgtgtagggtttaaacttgactaaatakttcaaagaaacctcccactaatattttccaacatgatgatcacattgccttaaggggaaccttattaataaaaaccacaaatattgggaatgagaaagta

SEQ ID NO: 123830 - DNA, 201 bp, Homo sapiens
atcattgaaagaaaacacagttcatcttggtaagttttagaacatcgctatttataaagcatggagcaactctctctaaaaatatttaagtgtttggcaartaaagaaaacacactgaagccatcagcaaaatatgtgctaaaggctatgctgtccttgctatcactgctttaaagaaacatcaagaaaaaaataatattc

SEQ ID NO: 123831 - DNA, 201 bp, Homo sapiens
tctgcaaaccaggaggtataatcatcctacgcatccccccagcatgatgtgggacagcatccaaacgtttctctagcagcggtccctgccatcaaaagtcrtgcaggaatgcctgaggaagccagcagctgcgaaagctggggtcgagatcaaggggatacgaagtgcacaaatggggccctggaggcccacagatgtgag

SEQ ID NO: 123832 - DNA, 201 bp, Homo sapiens
atcagagtggactggataaggtttgagttgccactgggcctgacctaccctgtgtccaaggaagcatctacgtgaaagggaagtggaagattatggcaatrtaggcctgagggcagcctccctgagtcttgtaccctgagcaattgtagaatgtactgcgaaactgggacacttttgagcaggaagagggctattaatagt

SEQ ID NO: 123833 - DNA, 201 bp, Homo sapiens; identical to SEQ ID NO: 20938

SEQ ID NO: 123834 - DNA, 201 bp, Homo sapiens; identical to SEQ ID NO: 20939

SEQ ID NO: 123835 - DNA, 201 bp, Homo sapiens
cttctagtaggttcatggtcttgctgacttcaggagtgaagccacagaccttcgcggtaagtgttacagctcttaaaggctgcgcgtctggagttattcgytccttccggtgggttcgtggtcttgctggcttcaggagtgaacgtgcagaccttcgcggtaagtgttacagctcttaaaggtgggtgcagacccaaagag

SEQ ID NO: 123836 - DNA, 201 bp, Homo sapiens
agatggcgtgtccagagtttgttccttcaaatgttcagatgtgtccggagtttcttccttctagtaggttcatggtcttgctgacttcaggagtgaagccrcagaccttcgcggtaagtgttacagctcttaaaggctgcgcgtctggagttattcgttccttccggtgggttcgtggtcttgctggcttcaggagtgaac

SEQ ID NO: 123837 - DNA, 201 bp, Homo sapiens
acagtgtgggagttggagacccctcacacagacagttattttggataaacatagaaactgaccctctggtcttaaagcttacgtttgttttatctgagttscttcctcaagaaaggaccccccaggcttctcaaaaagtatcaaagaactgaaactcaccagatcactgcatccaatgagatgccagacccctcattttgt

SEQ ID NO: 123838 - DNA, 201 bp, Homo sapiens
aagatggcgtgtccagagtttgttccttcaaatgttcagatgtgtccggagtttcttccttctagtaggttcatggtcttgctgacttcaggagtgaagcyacagaccttcgcggtaagtgttacagctcttaaaggctgcgcgtctggagttattcgttccttccggtgggttcgtggtcttgctggcttcaggagtgaa

SEQ ID NO: 123839 - DNA, 201 bp, Homo sapiens
tgttatagggcagagggaatagagcccaggtttaggagtcagaaacagaatttaaaccccaattctgttgtttataagattggtaaagttgtgtaagttayttgagatacttaagtcttttgagactccattttctcatccaaaagtaggataattaataactacttttgtaagattagtgcaaatccccaaagatagtgt

SEQ ID NO: 123840 - DNA, 201 bp, Homo sapiens
aactccacctcaaaaaaaaatgagtggcgagatagaagcttacttaagtctgcaaacagcaaactctccaaggattcaggtttgcagtgcccagggccacytggggcagccacagtagagtagaaatggcagcactgtcagtttaagcatagcatcccccacaaatgctcctgatggggtgaaaaagagatttggttacct

SEQ ID NO: 123841 - DNA, 201 bp, Homo sapiens
gctaattttttctatttttcgtagagatggggtctcattatgttgcccaagctggtctcaaactccttggctcaagccaagtattttggcctcccaaaatmctaggattgcaaacgtgagccactgtacctggcctgaattttttcaaagatcctggcttcaatttgccttccagaaagaattatatcaatttgcacacat

SEQ ID NO: 123842 - DNA, 201 bp, Homo sapiens
aatgaatgttccatatttatgaactattatctcaccaactttttatttttaccttatatccatctttttttttaacttccaaattcctagaagtagaattmcaaaattaaagagtttgaattttttttttttttgagacagggtctcactctgtcacccaagctggagttgtgcagtggtgaaatcacagctcactacagc

SEQ ID NO: 123843 - DNA, 201 bp, Homo sapiens
gaagggctcaagtgtggccagagcagacgccaaggccaaggaggcactgagagtgagcgagggctgctaacacattgtcatctctcaataggattattttkggaagtgatgttaggtttttaaatttgtagctttctaatgtgtacccttttatttgaacatgtgcttcaaatgtgcaagtgtcagatgtctaaaggatgc

SEQ ID NO: 123844 - DNA, 201 bp, Homo sapiens
gtaatttgagataaataaattaaatgaatgttgttgatattctgttttgatagtgtcaaattttccttttcacaatgaaggattcctggaatgaaacccakagaaatatgtcaaggaatcagaagaaataatacagacagtaatttctttaatctgaagtatctaaagctgaaaaggcattaaacaatcacaaaaactgga

SEQ ID NO: 123845 - DNA, 201 bp, Homo sapiens
atgccactgttgacaggacaggaggtggagctcaggcagtaatactggcttgccttctgctcacctcctactgtgcagcctggttcctaacaggccaatgrctggtactggtccacagtgtgggagttggagacccctcacacagacagttattttggataaacatagaaactgaccctctggtcttaaagcttacgtttg

SEQ ID NO: 123846 - DNA, 201 bp, Homo sapiens
aatccaaaaattggtacaatgaaacttcattctgtataatcactaacctcaaaggacatgttattgattaaagtacgtaagtctagtttgtactccaaatwtttaaaagaatgagaggtgttcaaatagaagagtctgtccacttataaaaaaatagactatcagtctattttacactagactactcaagaagaaatctct

SEQ ID NO: 123847 - DNA, 201 bp, Homo sapiens
tgagaagcataatactttaattctctttgttgatattttaagatagttctttactaatttattctttgctcttttccaaagagatagcttgtttcatcacyttaatgtatttatagtcatttataattatttcagaaaagcttttttggtgaattccaaactggattttagtgagaaagcactgagtggaatgctgatgtg

SEQ ID NO: 123848 - DNA, 201 bp, Homo sapiens
ttggaaggccgaggcggtcggattgcttgaggtcaggagtgcaagaccagcccggacaacatggtgaaaccctgtctctactaaaaatacaaaaatcagcwggcatggtggtgcatgcctgtaatcccagctctttgggaagctgaggcaggagaatcacttgaacctggaaggtggaggttgccaggagccaagatcgtg

SEQ ID NO: 123849 - DNA, 201 bp, Homo sapiens
agacagagttttgctcttgttgcccaggctggagtgcaatggcgccatcgtggctcagtgcaacctccgcctcccaggttcaagcaattctcctgcctcakcctcccaagtagctgggattgcaggcatgtgctccaccatgcccagctaattttttgtatttttattagagacgacggggtttcaccatgttggccaggt

SEQ ID NO: 123850 - DNA, 201 bp, Homo sapiens; identical to SEQ ID NO: 20935

SEQ ID NO: 123851 - DNA, 201 bp, Homo sapiens
gctttctactataccatgtggctctgggcccatcaaaagtcacagagacctgaacttgggaagattggattaggtgaaaatcaaataagagaatggaatcaaaaaaaggtctctggtagaaatccctaaaataaagagtatacaaccaaactatggctacaatgataggtctcctggaggagagggatcatttgacttcct

SEQ ID NO: 123852 - DNA, 201 bp, Homo sapiens; identical to SEQ ID NO: 20941

SEQ ID NO: 123853 - DNA, 201 bp, Homo sapiens
ttcctgtgatttttttctattgcttttaagttagaaaaccgtttcttatcctgggatcaaacattttaaatcacctctgtgatctttatgctttgcacagtttttttttttttttgacacctaaaattcatgttggcttactgcaccaagcaagaaaggatttcaaaacagataaatacaaacaaaatgataaaaaatatc

SEQ ID NO: 123854 - DNA, 201 bp, Homo sapiens
attattaatatttaaatatgatgggtatttggctggtttacaattctttaactatcataaataatgctacagtgacttttcttatatatatatatatatawaattttgtatatatatatcaacacattgctgatagtagcataaaatgcacaatatttatttagaagaatttggccatattttcaaaattaaagtgtacga

SEQ ID NO: 123855 - DNA, 201 bp, Homo sapiens
tcatggggttttggccttgctattctggttactctattggggagtggtgttctggtaggttcaacgactgtatgactgctgccatctttccaaaatcttcyacatatctccctatgtcttcaattgtcacatgtccttattttttatgtacattatttaaaactttctatgaataccgctgtctattttaggctatttgat

SEQ ID NO: 123856 - DNA, 201 bp, Homo sapiens
tgaaaaatcttgtaaaaatgtttctttttaacacttctgttttgttgccaggactctactgggttactggaaagctgtagagaagctacatggtgcagtgsagtgagctggggattccctacgaggaggctaagatttgaatcatgtttctacacctaagaggtgttttggtcctttgacaagttacttgacccctgagcc

SEQ ID NO: 123857 - DNA, 201 bp, Homo sapiens
aaggctgcagacccacagagatgttcaagctttgattatgaataccacccagtcccctttacgtgatccaagcagataaattcatcatctggattgaataragatattttttaaaagacagaactgcgcccacccaacatatgtcatcaaagtatcagtttccaaatgagatatcagagagaagagctgagaagaagatct

SEQ ID NO: 123858 - DNA, 201 bp, Homo sapiens
agataaataaattaaatgaatgttgttgatattctgttttgatagtgtcaaattttccttttcacaatgaaggattcctggaatgaaacccagagaaataygtcaaggaatcagaagaaataatacagacagtaatttctttaatctgaagtatctaaagctgaaaaggcattaaacaatcacaaaaactggagaaaaaaa

SEQ ID NO: 123859 - DNA, 201 bp, Homo sapiens
caaagcaactctgaatccacataaatgtttagtaatttgagataaataaattaaatgaatgttgttgatattctgttttgatagtgtcaaattttcctttycacaatgaaggattcctggaatgaaacccagagaaatatgtcaaggaatcagaagaaataatacagacagtaatttctttaatctgaagtatctaaagct

SEQ ID NO: 123860 - DNA, 201 bp, Homo sapiens
agtgaaggaatctgggtatttacaagtccatctcccctgctaaaccatgagctcctcgggagaaaccgtcctattcatcacctaacacaaagccatctacrccgaagaggcttaataaatgttttttcattacataggacagaataaaattaacagccaatcagtggaagattacctgaatgatagaccaaatatctcttt

SEQ ID NO: 123861 - DNA, 201 bp, Homo sapiens
gggttggaggaaaattttactttgtggtctatttgtgaatattctgttaatgttatttgtttgctctacttagaaaatctgttgatttttttcatatctckggaatattctttgctgttcctagggcctagcctgttgtatctcatgtagcttttgctccctactcatatttttcctgttggtgcctcttttagaataact

SEQ ID NO: 123862 - DNA, 201 bp, Homo sapiens
ttcatccagactgctgtggttttaaaacaaatcatttgatactcttcccacagaagatggagtctaattctccctccttgatgtgggctggctttggcaamtcatttctaataacttgaatgtagcaaaagagacacttagtatcttctgaggtaggttagaaaagcaacacagctccctcctagctttttctctctcttg

SEQ ID NO: 123863 - DNA, 201 bp, Homo sapiens
acagcagacttgagatcaggaggttactaaccaggtccttctgactctgaacaccactgctttctactataccatgtggctctgggcccatcaaaagtcayagagacctgaacttgggaagattggattaggtgaaaatcaaataagagaatggaatcaaaaaaaggtctctggtagaaatccctaaaataaagagtatac

SEQ ID NO: 123864 - DNA, 201 bp, Homo sapiens
cttggggcacagattttaaatcatgaaccagaaagcagagaagcaccagagagatctcataaggatggaaataggaagtttttctgaactgggaggagctygaagacaatcacaagagtatcaagatatggccgggcatggtggcttgcctctgtaatcctaacactttgggaggccgaggtgggcagatcacctgaggtc

SEQ ID NO: 123865 - DNA, 201 bp, Homo sapiens; identical to SEQ ID NO: 20934

SEQ ID NO: 123866 - DNA, 201 bp, Homo sapiens
gagtgaaactccacctcaaaaaaaaatgagtggcgagatagaagcttacttaagtctgcaaacagcaaactctccaaggattcaggtttgcagtgcccagrgccacctggggcagccacagtagagtagaaatggcagcactgtcagtttaagcatagcatcccccacaaatgctcctgatggggtgaaaaagagatttgg

SEQ ID NO: 123867 - DNA, 201 bp, Homo sapiens
tagaagcttacttaagtctgcaaacagcaaactctccaaggattcaggtttgcagtgcccagggccacctggggcagccacagtagagtagaaatggcagyactgtcagtttaagcatagcatcccccacaaatgctcctgatggggtgaaaaagagatttggttaccttccattggcttctgagggatgtgctgaaaaga

SEQ ID NO: 123868 - DNA, 201 bp, Homo sapiens
tagggtgaataaagggagatctcacaatgtcaggcaaacaagttgggtcattattgtgtaagcaatatggaactttgaaactttttgttcacaggaatggkctctaatatagttgttatttagacagatatttgatggtaacactgggcttggtgactaattgggttggtagaaagacaggaaagcgaaggcatgtttact

SEQ ID NO: 123869 - DNA, 201 bp, Homo sapiens
aagccttcttccttggcaatacttgtctcagtcattggcttgctgtgcagccagcagcaggacctagaccaaaccactgatattcagtaacattaacaacaggggtacattgtaagaaatgtgtcattaggcaattttgttattgtgtgaatctcacagagtatacttacacaaacctagatggtattgcctactgtacac

SEQ ID NO: 123870 - DNA, 201 bp, Homo sapiens
agccttcttccttggcaatacttgtctcagtcattggcttgctgtgcagccagcagcaggacctagaccaaaccactgatattcagtaacattaacaacaggggtacattgtaagaaatgtgtcattaggcaattttgttattgtgtgaatctcacagagtatacttacacaaacctagatggtattgcctactgtacact

SEQ ID NO: 123871 - DNA, 201 bp, Homo sapiens
gctcctgaaggaaccactaaatatggaaaggaaaaaccagtaccagacactgcaagaacaaaccaaaatgtaaagaccatcgatactatgaagaaactgcrtcaactaaagggcaaaataactagctaacatcataatgacaggatcaaattcacaaataacaatattaaccttaaatgtaaatgggctgaatgttccaat

SEQ ID NO: 123872 - DNA, 201 bp, Homo sapiens
tctgataaaacagactttaagccaacaaagatcaaaaaagaccaagaagggcattacataatggtaaagggatcaatgcaacaagaagagctaactatcckaaatatatatgcaccaaatacaggagcacccagattcataaagcaagttcttagagaccaacagtgtgacttagactcccacacaataatagtgagagac

SEQ ID NO: 123873 - DNA, 201 bp, Homo sapiens
ctacaaggaacttaaacaaatttacaagaaaaaaaacaaacaaccccatctaaaagcaggcgaaggatatgaacagatactttatttatttattattattwtttttttgagacggagtcttgctctgtcgcccaggctggagtacagtgacacgatctcggcttggctcactgcaagctccacctcccaggttcacgccat

SEQ ID NO: 123874 - DNA, 201 bp, Homo sapiens
gatctagaactagaaataccatttgacacagccatcccattactggtatatacccccaaaggattataaatcattctactataaagacacatgaacacatrtgcttattgtggcactattcacaatagcaaagacttggaaccaaccaaaatgcccatcaatgttagactggataaagaaaacgtggcacatacataccat

SEQ ID NO: 123875 - DNA, 201 bp, Homo sapiens
acaaaaacaaaaacgactatacatgaatgtttatagtagctttatctataattgccaaaaactaaaaacaacccaaatgtccatcagctggtaaatggatmaacaaattgttgtatgttcataaaatatactacttggtgatagattgaactactgatacacaatgtggatatatctcaaaagcattgtgctaagtgaaag

SEQ ID NO: 123876 - DNA, 201 bp, Homo sapiens
tggggtacaggaaccaagccctgccccgtggggaggcagctgaggcccagtgagaattcaagcacagtgccggcgggctggcagtgctgggggacccggcrcaccctctgcagctgctggcccaggtgctaagcccctcactgcccaggggccggccgctctgactgtggggcccactgagcctgcgcccacccggaactc

SEQ ID NO: 123877 - DNA, 201 bp, Homo sapiens
tgcactggcaggctgaagggctcaagtgtggccagagcagacgccaaggccaaggaggcactgagagtgagcgagggctgctaacacattgtcatctctcrataggattatttttggaagtgatgttaggtttttaaatttgtagctttctaatgtgtacccttttatttgaacatgtgcttcaaatgtgcaagtgtcaga

SEQ ID NO: 123878 - DNA, 201 bp, Homo sapiens
ttcactttatttatacagacaaggtctcattatattggccaggctgctctcagacttctggcttcaagcaattctctcgccttggcctcccaaagtgctgmgattacaggcatgagccactgtgcccagcctaatcagaactttctggcaaaaaataaacatgatgacagatgtattgtgtcagtgctcattttcagaaaa

SEQ ID NO: 123879 - DNA, 201 bp, Homo sapiens
acacatctcccttctctgatttctgtggtgcctggttgacaccctttttagatccctccctgctcatcaatgcttcttagtggcttatgggagatgtaggraaagggatactataatgtgagtccctgggggcctattcgttctgcaaaacccacatcttggggtggacttgtcactcaccggttatgcagtaaatgttga

SEQ ID NO: 123880 - DNA, 201 bp, Homo sapiens
gcgcttaccatgttctataatattttttcctacacacatctcccttctctgatttctgtggtgcctggttgacaccctttttagatccctccctgctcatyaatgcttcttagtggcttatgggagatgtaggaaaagggatactataatgtgagtccctgggggcctattcgttctgcaaaacccacatcttggggtgga

SEQ ID NO: 123881 - DNA, 201 bp, Homo sapiens
gtgtaagagttaactaagaactcagagaaattcagtaactagactttagctagtagatgattgagtgatgatttgacacagatcacctgttcctaatatamctttctatatacaacatatgtgtgtagattatttgtatcctggctctgtgatactagctgcataattttgggcaagtctctgcgctttagtttccccatt

SEQ ID NO: 123882 - DNA, 201 bp, Homo sapiens
aaagagtaggcacattgtccctctgactccaagaaccctagattcttgaatgttcatttctgttattattaatgatagctaacatttattgagcactaggyatgtgctatgcattattctatgtacttaatgtgcatcatctcatttaaatgccacaacaggccaggcaccatggctcatgcctgtaatccccgtactttg

SEQ ID NO: 123883 - DNA, 201 bp, Homo sapiens
tcaaagagtaggcacattgtccctctgactccaagaaccctagattcttgaatgttcatttctgttattattaatgatagctaacatttattgagcactargtatgtgctatgcattattctatgtacttaatgtgcatcatctcatttaaatgccacaacaggccaggcaccatggctcatgcctgtaatccccgtactt

SEQ ID NO: 123884 - DNA, 201 bp, Homo sapiens
aaattcggttttatttgaaagaaaatcctgccatctccttggcaagagctgtatgccctgcacaggagataaaacagggtgatccaaacagcccaatttcmccctggggcctccagacttcctcccgggcatgggccttccccaactcagctttaaagggctgccagttgcaaggcacagaatcaaagagtaggcacattg

SEQ ID NO: 123885 - DNA, 201 bp, Homo sapiens
atgatcacggctcactgtagctcgacctccagggctcaaaggactttcctgcctcagcctctggagtagctggggctgcaggcaaggcatacaccaccacrcccggctaattttttgcatttttttttttttgtagaggcagggttttgccatgttgcccaggctggtgtcagactcctgggctcaagcaattcacccatc

SEQ ID NO: 123886 - DNA, 201 bp, Homo sapiens
tggggtacagtggcatgatcacggctcactgtagctcgacctccagggctcaaaggactttcctgcctcagcctctggagtagctggggctgcaggcaagscatacaccaccacgcccggctaattttttgcatttttttttttttgtagaggcagggttttgccatgttgcccaggctggtgtcagactcctgggctcaa

SEQ ID NO: 123887 - DNA, 201 bp, Homo sapiens
cacccaggctggggtacagtggcatgatcacggctcactgtagctcgacctccagggctcaaaggactttcctgcctcagcctctggagtagctggggctrcaggcaaggcatacaccaccacgcccggctaattttttgcatttttttttttttgtagaggcagggttttgccatgttgcccaggctggtgtcagactcc

SEQ ID NO: 123888 - DNA, 201 bp, Homo sapiens
ttcactacccctgtactttctttgggagccgtgggtaagtaaacctgtaagctggcacagttttacatcacagatcctaagactttctgaaaggtcagctrtcctcatcacttctctctgtatcttggttacactgacccaaaacaccagcctccagttcagcagaacatttgatactgtatagtgatagggaccatgaca

SEQ ID NO: 123889 - DNA, 201 bp, Homo sapiens
gggtgggcagctgggcaccaaagccctgattctgtccgggcctctgcagcctacaagtccccagcttatgaggccctgaccttcgagctgctgctggagcrcctggtgtgcattgggtacccgcatgagatcctgcgctacacctacgaccccaccttccccaccaggtgtgtggctcaggacaggtgggaggccacccgg

SEQ ID NO: 123890 - DNA, 201 bp, Homo sapiens
tgtaaaagtgttcctatttctccacatcctctccagcacctgttgttacctgactttttaatgatcgccattctaactggtgtgagatggcatctcattgyggttttgatttgcatttctctgatggccagtgatgatgagcattttttcatgtgttttttggctgcataaatgtcttcttttgagaagtgtctgttcata

SEQ ID NO: 123891 - DNA, 201 bp, Homo sapiens
agagagatgcatttccatttgggactagtgacagcagctgaactgacatcctcattctggcatcgtcttgagcagtcaggaaatgaagagaacagaagcarcatctctgtggtagtgaactagtggtaaaaatgtgatcatttatttgtagaataaatgacagtactttggctgtcacagtgattcctgcttggtaaactg

SEQ ID NO: 123892 - DNA, 201 bp, Homo sapiens
ggctggggtgggctcccagaaggctgaaacctgaggagaggatcccagggcagctctgggagtcccacccctgcaagtccctctatctctgccccagccaygcctccccatcctgctggggaagatgaaggaggttgggaaagtgtttctggccaccaacagcagctacaactacaccaatgtgagtatgtgtatggaggg

SEQ ID NO: 123893 - DNA, 201 bp, Homo sapiens
tgggttaaaaacagggtggtagaggtggctacgatggcactgggcaagggttagtaggagtcatgggactggccagctcagggcttccctggaacctgcaygtgtcagtcctcccaagttggcatcatcatttccatttgataagacgtagagcttgcagtttaggatctgaacttgaagctagacctctgaggctccctg

SEQ ID NO: 123894 - DNA, 201 bp, Homo sapiens
tccacccatctctccatccatcctccattcctccatccgatgaggaaacacatatcctacagcctccatatccttgcctcaccatcttaatacagtcatgyggggcttgaccacagggatctgttctgaaaaacgtgtcattagtcgatttcaccattgtgtgatgtcatagagtgcacttacacaaacctagatggtaca

SEQ ID NO: 123895 - DNA, 201 bp, Homo sapiens
gacaggcccagcgggggcggagccgggttcacttccccactgcttgcctgtcggctttgtcctcggtgccaaaggcccagttaccccattctcctcagcckcgcctgggctccacctgccttgtcagccagcgccctctgctggccgacattccaaagggcagcggtaccctcttgaagggctgagttgagcctgatttgc

SEQ ID NO: 123896 - DNA, 201 bp, Homo sapiens
cctgcgaccctccctagctagagaccaaagatgtggttctcctggctccagggcacccctctgcccctccaggactcaggaaagctccacgtgggcacctmcacagggccccaccagcactgtgctgtctactctggaggtaccagctcccaccatgccccatcactccttgggcaccctccttccctcgactaggagccc

SEQ ID NO: 123897 - DNA, 201 bp, Homo sapiens
tcccagctctgtcctggtggagaactgtctggctccctgggctgacaactgaccatcctgtctgcccccagaaacctacctctatgcctgcttggtggacwtcttctctggctgctcccgttacactaagtgcgtcttgtgccctgcccagccctgggacgaccagtaggacactgctcagggaccaaaccccaaagaggg

SEQ ID NO: 123898 - DNA, 201 bp, Homo sapiens
cacagcagcacacaggggctcctttaaatacacagctatggggactcccaaaatgcagacgtacacttgcactcacaagggacgcacttccatagctgtarcaacccatcagggaactgaccacacacactccggcgggaggtcctcttcacttccttccctccacgaagatctctccccttcaccacggacacagtgaca

SEQ ID NO: 123899 - DNA, 201 bp, Homo sapiens
caagcaacagggaggggtggggcggggagccaagaccctcctacccccaccactgggctggtctcctggactccatttcttggcctttcaaggcctcagargaatgagcaactttctcaccatcttgctcctgtggccaccagtgtgctggggggatggtgggtgagggcagaggcaggtggtggcccaagcttggtgccc

SEQ ID NO: 123900 - DNA, 201 bp, Homo sapiens
cagcaccatgggcagcttgttccgctgcggtttccgccagacactcttctccagccagctgatgcgctatgccgacctctacactgccgcctgcctcgacytcctgtacttccgagtgagctcagctctctcgggcggccccggagttggtgggtccctgcggaatctccacggctgtttgtgaacatttatcctagaagg

SEQ ID NO: 123901 - DNA, 201 bp, Homo sapiens
tccctgggctgacaactgaccatcctgtctgcccccagaaacctacctctatgcctgcttggtggacttcttctctggctgctcccgttacactaagtgcrtcttgtgccctgcccagccctgggacgaccagtaggacactgctcagggaccaaaccccaaagaggggccccccaagggctccccaagaggctggaaggg

SEQ ID NO: 123902 - DNA, 201 bp, Homo sapiens; identical to SEQ ID NO: 20945

SEQ ID NO: 123903 - DNA, 201 bp, Homo sapiens; identical to SEQ ID NO: 20951

SEQ ID NO: 123904 - DNA, 201 bp, Homo sapiens
tgcctcccctgggtcacctagctatttttgtaccaggcacatggatgggagcagttgtgagctgcaagtcatcaacttcaccaagagagagatccaggtgrgagctgggtggcgagggaagggacaggcccagcgggggcggagccgggttcacttccccactgcttgcctgtcggctttgtcctcggtgccaaaggccca

SEQ ID NO: 123905 - DNA, 201 bp, Homo sapiens
aggcacatggatgggagcagttgtgagctgcaagtcatcaacttcaccaagagagagatccaggtgagagctgggtggcgagggaagggacaggcccagcrggggcggagccgggttcacttccccactgcttgcctgtcggctttgtcctcggtgccaaaggcccagttaccccattctcctcagcctcgcctgggctcc

SEQ ID NO: 123906 - DNA, 201 bp, Homo sapiens; identical to SEQ ID NO: 20953

SEQ ID NO: 123907 - DNA, 201 bp, Homo sapiens
attataggtgtgagccaccatgcctggcctgtagtatttttgtactattactttctttctccccctttttttttttttttttttggagatgggatctcacyatgttgcccaggctggtctcaaattcctgggctcaagtgatcctcaggcctcagccttttgagtagctgggttatatgcatgcgccactgcgcctggctt

SEQ ID NO: 123908 - DNA, 201 bp, Homo sapiens
tgtattattattattattatttttgagactcagtcttgctttgtcgcccaggctggagtgcagtggcacaggcttggctcactgcaacctttgcctcagcytcccaagtagctgggattacaggcgtgtgccaccatggcccagcaaatttttgtatttttagtagagacagggtttcaccacgttggccaggctgatctt

SEQ ID NO: 123909 - DNA, 201 bp, Homo sapiens
aatccttatgacaatcccttgaggtaaggactatcatcttcattttacaggtgaagaaactaaggcagagagattaagtaacttgcccaaggtctcacagstagtaagtgtatcgtaatagtatcaaaaggaaacacagattccgctaagttgagagggatgaaggaggttgagaaggtgtgtggttagtgtgtgaatgca

SEQ ID NO: 123910 - DNA, 201 bp, Homo sapiens
tgggaggccaaggtgggtgggtcacgaggtcaggagatcgagaccatcctggctaacacggtgaaactccgtctctactaaaaatacaaaaaattagctgsgcgtggtggtgggcgcctatagtcctagctactcaggaggctgaagcaggagaatggcatgaacctgggaggcggagcttgcagtgagccaagatcgcgc

SEQ ID NO: 123911 - DNA, 201 bp, Homo sapiens
ctagcagtgtgtgtgtgtgtggagtgaataagttatcaacatgacccttaaagttttacatgtttatgtatgtcttttaaaatttcctttacattcttatyaaatagctcagtaactggggaataagctcccttaccgtatgaccctaacctattttgtcttcctgtgcgtgtttatgcaattcagtatcctgctatacag

SEQ ID NO: 123912 - DNA, 201 bp, Homo sapiens
gctgtttgtttttgtttttttgttttgtttttgttttttcgagactctcgctctgtcgcccaggctggagtgcagtggtgcgatctcggctcactgcaagytccgcctcctgggttcacgctattctccttcttcagcctcccgattagctgggactacaggcggccgccaccacgcccggctaattttttgttttttttt

SEQ ID NO: 123913 - DNA, 201 bp, Homo sapiens
tttttttttttagtagagacggggtttcaccgtgttagctaggatggtcttgatctcctgacttcatgattcgcccgccttggccttccaaagtgctgggwttacagatgtgagccaccgcgcctggcggtactggctgtttttgtgtaagatatataaacattagaataaagaccttcaatggcatgcttaattggatgt

SEQ ID NO: 123914 - DNA, 201 bp, Homo sapiens
ccgcgactctactaaaaatacaaaaattagccaggtgtggtggcgggtgcctgtaatcccaactactcaagaggctgaggcaggagaatcgtttgaacccrggaggcagaggttgcagtgagctgagatcacaccactgcactccagcctgggtgacagagtgagactctgtctcaaaaaaaagaaaaattagactgctta

SEQ ID NO: 123915 - DNA, 201 bp, Homo sapiens
acagctggaaagagtaataaggagtctgtctagcttgggtcccccagatagtctttggcttcagatttcttctgaaaagaataattatatgtaatagcacagagacaataaataatttttctcaaatactgcaccctatttaagagtcagcagtggcttccatgtgtttgatatccaaattcctcagcaaagatttcaagt

SEQ ID NO: 123916 - DNA, 201 bp, Homo sapiens
aataatatcttgagcagcataagttatcaaggaagaggggcttatagtcatgttctgcttcctattcatataccacttgaaatgctccttttgccctagaycacatgtttgtgttgatttaacaacaaattggattgtctgaagcaggggttgtcaaactgaagcccccagtctgcctgttttagtgaatacagttttatt

SEQ ID NO: 123917 - DNA, 201 bp, Homo sapiens
ttgctttgttgctgatatgctttggctgtgcccccacccaaatctcaccttgaattgtagctcccataattcccacgaattgtgggagggacccgttcggrgaaattgaaccatgggggcggtttcctccatactgtttttgtggtagtaaataagtctcatgagatctgatggttttataagaggaaaccccttttgctt

SEQ ID NO: 123918 - DNA, 201 bp, Homo sapiens
gtgaggcctcctcagccacatggaactgtgagtccattaaacctgtttttctttataaattacccagtctcagtggggcgcagtggctcacgcctgcaatyccagcactttgagagcccaagacgggaggatctcttgaggtcaggagttcaagacaagcctggccaacatggtgaaaccccatctctactaaaaatacaa

SEQ ID NO: 123919 - DNA, 201 bp, Homo sapiens
cagtctctatagtctaataatgactgggtcacgcctaagttagtttgtaaggtggtttcttcctcagaagcattttcccatagaaagagtgttaacatatkgtattaattttccagacgaatcccataaaaacctgttagaccatacttagtacgtctagattatagtatagaaactataactcccattacatgacattgc

SEQ ID NO: 123920 - DNA, 201 bp, Homo sapiens; identical to SEQ ID NO: 20954

SEQ ID NO: 123921 - DNA, 201 bp, Homo sapiens; identical to SEQ ID NO: 20961

SEQ ID NO: 123922 - DNA, 201 bp, Homo sapiens
ttaaagtgctccaaatgatggccagttgcttgcattgtctacaagttagttattttatagcattgttggctaaaagattgtatttttttttttttttttttgagacagaatttcgctattgttgcccaggctggagtgcaatggtgtgatctcggctcaccgcaacctctgcctcctgggttcaggcgattcttccgcctc

SEQ ID NO: 123923 - DNA, 201 bp, Homo sapiens
tcagttcagaactctttcattctgcacaggctccaatggagtgatatctattatggaaaggctttgtaaactgtagaccatcctggccggcacggtggctyacgcctgtaatcccagcactttgggaggccaaggtgggtgggtcacgaggtcaggagatcgagaccatcctggctaacacggtgaaactccgtctctact

SEQ ID NO: 123924 - DNA, 201 bp, Homo sapiens
cagagggggatttggcagggtcataggacaatagtggagggaaggtcagcagataaacaagtgaacaaaggtctctggttttcctaggcagaggaccctgyggccttccgcagcgtttgtgtccctgggtacttgagattagggagtggtgatgactcttaatgagcatgctgccttcaagcatctgtttaacaaagcaca

SEQ ID NO: 123925 - DNA, 201 bp, Homo sapiens; identical to SEQ ID NO: 20963

SEQ ID NO: 123926 - DNA, 201 bp, Homo sapiens
tcaggcagtcctgtcagttcagaactctttcattctgcacaggctccaatggagtgatatctattatggaaaggctttgtaaactgtagaccatcctggcyggcacggtggctcacgcctgtaatcccagcactttgggaggccaaggtgggtgggtcacgaggtcaggagatcgagaccatcctggctaacacggtgaaa

SEQ ID NO: 123927 - DNA, 201 bp, Homo sapiens
ccatctgttcccaaaatatttggaaaatacaagatgggagagattaaatgatacattcaaggttacactgctggttgattacaaagccaggactagacccyagactttctgattctcagttgttttgtcttaggggaaaaagtgagctctagatatttcagaatgattctgatgcccaaatcattcagttgaggtgatcta

SEQ ID NO: 123928 - DNA, 201 bp, Homo sapiens
cttcccgaagtgctaggattataggtgtgagccaccatgcctggcctgtagtatttttgtactattactttctttctccccctttttttttttttttttttggagatgggatctcactatgttgcccaggctggtctcaaattcctgggctcaagtgatcctcaggcctcagccttttgagtagctgggttatatgcatgc

SEQ ID NO: 123929 - DNA, 201 bp, Homo sapiens
tacttgatctagatgctacaggtcaactaatcctatagtttttcagatttggatgtgaatttgagtgctctggagggttctcaagactagattttagttcyaagtcctaactttcccatgttagttctagtacttccatttagctgtctagttctatagctatcctaatccagaaaaaccttttcagtatttctcatgatt

SEQ ID NO: 123930 - DNA, 201 bp, Homo sapiens
atggtggacttgaaaggagtgatttttcattttatttgccccgctggctatatttcgtggttctgggtgcagacttttgtgaagtaaaggagtgtagggcyctcctatcttgtcattggcagcctgtaggggttcatattggttcctggtcctcaggtctgaagacttaaattcaggcagtcctgtcagttcagaactctt

SEQ ID NO: 123931 - DNA, 201 bp, Homo sapiens
gttaacccagatacctcctgttttgccttaagctctactccccttttgttgtctgttctgcagggtaaatattgacatataaaacattttcttccttactrgggtctgactttctaagtgccaataaaatagctatttcaatgggagcagtgtttataataggaaatctcctttttcttataaagaatcttccctagattt

SEQ ID NO: 123932 - DNA, 201 bp, Homo sapiens
caaactactgttaggacttcttttgccataaatcaattctgtttttgaacttcatataagtggaatctatgaaagcacattgtctttagccttccactcaytactgtgtctcatacattctttacctgactgccttctcatctaggactcagcttaaatgtcgccttctagaagctgcctctgaccactctgactaggcac

SEQ ID NO: 123933 - DNA, 201 bp, Homo sapiens
aggccaaggtgggtgggtcacgaggtcaggagatcgagaccatcctggctaacacggtgaaactccgtctctactaaaaatacaaaaaattagctgggcgyggtggtgggcgcctatagtcctagctactcaggaggctgaagcaggagaatggcatgaacctgggaggcggagcttgcagtgagccaagatcgcgccact

SEQ ID NO: 123934 - DNA, 201 bp, Homo sapiens
tctagtgcctcagaaggtccccatcagtccctctcaccaaactactgttaggacttcttttgccataaatcaattctgtttttgaacttcatataagtggratctatgaaagcacattgtctttagccttccactcactactgtgtctcatacattctttacctgactgccttctcatctaggactcagcttaaatgtcgc

SEQ ID NO: 123935 - DNA, 201 bp, Homo sapiens
cctcttaaggaccattttttgttcttagaataaaatccaactccctgtggtcctgccaggtgatgtctgcccacctttccagtctcattttatatcacccytctttatgatgctggagctccattggccttccttcagcatttctgatacttctgttggtggtctttgtacatgttattgttctcctgccttgaaggtgtt

SEQ ID NO: 123936 - DNA, 201 bp, Homo sapiens
tgtatagaaaaattgttttaactttgaattgggttgcttctggaagtaatgagttggtgagtttttttgtttgttttggttttttggtgatctgaggcctktaaaatgaggcccgatgactgttttacgtcttctcctaaatgagggtcagatatacaatggtgtataaggttaggcatctctgagctctgaggtttttca

SEQ ID NO: 123937 - DNA, 201 bp, Homo sapiens
atctacgtagcttttccctattttttctttgaagtttatgtattgaagaaagtaggtcatttggccaatagaattcttagattctgcgttttcctggttgyggtctcatggcattaacatgttcctctgcccctcacttttcctataaacaatagttagatctgtgagcttattttgatacaggtttaattttgggggttg

SEQ ID NO: 123938 - DNA, 201 bp, Homo sapiens
atgccaccacacccgactaatttgtttttgtatttttagtagacacggagtttcaccgtgtcagccaggctggtctcgaactcatgacctcaaatgatccrcccgcctcggcctcccaaagtgctggaattataggcgtgagccacgcacctagccagcccatcatcatttcttactactgtctcagatcttttgtccaat

SEQ ID NO: 123939 - DNA, 201 bp, Homo sapiens
ggagcagtgtcttgctttgttgctgatatgctttggctgtgcccccacccaaatctcaccttgaattgtagctcccataattcccacgaattgtgggagggacccgttcggagaaattgaaccatgggggcggtttcctccatactgtttttgtggtagtaaataagtctcatgagatctgatggttttataagaggaaac

SEQ ID NO: 123940 - DNA, 201 bp, Homo sapiens
aacctccccaggctcaggtgatcctcccacttcaacctctcaagtagctggactacagtcatacgccaccacacctggctcatttttgtattattttgtaraaatggggtttctctgtgtttcccaggctggtcttgaagctctgggttcaagctatctgcctatctcagcctcccaaagtgctggcattattggcgtgag

SEQ ID NO: 123941 - DNA, 201 bp, Homo sapiens
cttgttagatgtaaacgacggtattcactgaaattagatctccttgctcaatgagtcatgttctctgtgggcgtagttcttcaagtctctctctctctctccctttttttttttttgagagagtgtctcgctctgttgcttaggctggagtgcagtggcactatcacggctcactgtagcctcaacctccccaggctcagg

SEQ ID NO: 123942 - DNA, 201 bp, Homo sapiens
acttgttagatgtaaacgacggtattcactgaaattagatctccttgctcaatgagtcatgttctctgtgggcgtagttcttcaagtctctctctctctctccctttttttttttttgagagagtgtctcgctctgttgcttaggctggagtgcagtggcactatcacggctcactgtagcctcaacctccccaggctcag

SEQ ID NO: 123943 - DNA, 201 bp, Homo sapiens
cgcctcctgggttcacgctattctccttcttcagcctcccgattagctgggactacaggcggccgccaccacgcccggctaattttttgttttttttttttagtagagacggggtttcaccgtgttagctaggatggtcttgatctcctgacttcatgattcgcccgccttggccttccaaagtgctgggattacagatgt

SEQ ID NO: 123944 - DNA, 201 bp, Homo sapiens; identical to SEQ ID NO: 20962

SEQ ID NO: 123945 - DNA, 201 bp, Homo sapiens
ggagacagagcgagacttcatctcaataataataaaaaaaattagtgtctttctcataaaagtccagatttctggattctcttgaaaaaaaaaaaaaaaaaccagaatattggactatactggccctgaacttcctcttgacaagaatcagctgatgctgaatagtgcttgccctctttttatttgctctctaatttgcca

SEQ ID NO: 123946 - DNA, 201 bp, Homo sapiens; identical to SEQ ID NO: 20964

SEQ ID NO: 123947 - DNA, 201 bp, Homo sapiens; identical to SEQ ID NO: 20965

SEQ ID NO: 123948 - DNA, 201 bp, Homo sapiens; identical to SEQ ID NO: 20966

SEQ ID NO: 123949 - DNA, 201 bp, Homo sapiens
ttagggtgtcgatggtggctaatgtagtcatttcaaacacagcacaaaactactagttcttttgttacggttttggactcatcaaatagtcttctaatgargccaggcgcggtggctcacacctgtaatcccaacactttgggaggccgaggtgggcggatcacgaggtcaggttcgagaccagcctgaccaacatggtga

SEQ ID NO: 123950 - DNA, 201 bp, Homo sapiens
gactaaacccataattgtcacttgcctgataaactataatagtttctaactggtctctagtttgtactttacccccttcaagtccattttctacatcatgwtcagaatggtcctcttaaggaccattttttgttcttagaataaaatccaactccctgtggtcctgccaggtgatgtctgcccacctttccagtctcattt

SEQ ID NO: 123951 - DNA, 201 bp, Homo sapiens
taaacttgaacctgaaatttttggggtctaaaaaaatttgttttgcatgattcagtggtaatgtaataattgctcttgaataagcataataattgaataaytattccctttaggttgtgcattatgtgtgactcttccaatgagtttattaaactttttcaggtaagtattttattttttaaatgggcaagaaatatgaaa

SEQ ID NO: 123952 - DNA, 201 bp, Homo sapiens
catgcttgctgttcattttgtctacagcgtggatcctttggtcaccttcagatattttagagctacatcctagagtattctactttatggttggaacagcytttgccaacagtacagtaagatttttttcttttaaaaatcataatatatattaggattgtatgacagaatttgataatttgaaaaatctttaatattaga

SEQ ID NO: 123953 - DNA, 201 bp, Homo sapiens; identical to SEQ ID NO: 20957

SEQ ID NO: 123954 - DNA, 201 bp, Homo sapiens; identical to SEQ ID NO: 20958

SEQ ID NO: 123955 - DNA, 201 bp, Homo sapiens
ggggtttccccatctgaatcttcggctgctcttccagcaattgtgttctgcccccaaccctcaagccagtaagggctctgccttcttcagcccagtctgartgtgggttgggaacacacttagtaagagatacagcagactcacatctcaccaagaacacctctgtctttcaagcacagcatctcctctactttctgcctt

SEQ ID NO: 123956 - DNA, 201 bp, Homo sapiens
ttaaggagaaaaaagctgtgatgaattgtgatataagacataattatttttgtttttatttgtacaaatgtaaccttatataccttatatcaatactcttsggcctttatcctgatatttcatcaatatatgcatggcatagaatatccatttgccagtgtcttttttaattgttttcatttactatagccttttagaagc

SEQ ID NO: 123957 - DNA, 201 bp, Homo sapiens
aagggctctgccttcttcagcccagtctgagtgtgggttgggaacacacttagtaagagatacagcagactcacatctcaccaagaacacctctgtctttyaagcacagcatctcctctactttctgccttctctttcactatgttctgtggggtctccgatttgcttgcttagtttagcatccacccaggaatctgggca

SEQ ID NO: 123958 - DNA, 201 bp, Homo sapiens
tttactctggcccacatccattatggagtacgagtggtgagtaatctacagcaaaatgggttcaatttggggcttataaatggcaccaataaatgcctccragtagaaaggaggcaatggaaaattttaaaaagaaagttgcttattatagtagctgtaagggttttgggatattctctaaattttggataatatccagat

SEQ ID NO: 123959 - DNA, 201 bp, Homo sapiens
gtcctgaaagccagaaggtctgtgttctagctcaggctgggtccttagaagtttttattttgtaacttagctactcatcttatgtttccatgtttgtaacrtgtgtaatatctcaagtcttgctgattttatagggtttaaatatctaaaaacactaatgcattgtataaaaagtgtctctgaaagaattaaattatattc

SEQ ID NO: 123960 - DNA, 201 bp, Homo sapiens
ttggagactacagtagtattttggaactatggcacacttaaattttttattttggttgcccgctgaagaattcatggaaaaaatttatagattccctttasactctaaatatattaccagtatggctaaaatagctgcagacttaaatgattattctaggaagcttggaagagatttttgagaaagagaaaacacacactt

SEQ ID NO: 123961 - DNA, 201 bp, Homo sapiens
atatgaaaagttttagcagttgttagctgaacttagggatctattttccttttggagtcaggacattttgaaaaggtcacaaaacctatattttaaatctwtaatggggtaggatagtttagggtgtcgatggtggctaatgtagtcatttcaaacacagcacaaaactactagttcttttgttacggttttggactcatc

SEQ ID NO: 123962 - DNA, 201 bp, Homo sapiens
ttatgtattgaagaaagtaggtcatttggccaatagaattcttagattctgcgttttcctggttgcggtctcatggcattaacatgttcctctgcccctcwcttttcctataaacaatagttagatctgtgagcttattttgatacaggtttaattttgggggttggggggcatgctggggaacagtgttattaggtactg

SEQ ID NO: 123963 - DNA, 201 bp, Homo sapiens
cccaccctgctttctagttcctctgctgctctgaatctattatctgcttccataagctggtaaggaagactgtggctttccatcatctggtctgggacagrgggtaggcaagccacgaactcagagttgttccccagtgtttcaagtgtaaatgcttctcgaatttctgtctgtccttcagtattttctagtaccttcaag

SEQ ID NO: 123964 - DNA, 201 bp, Homo sapiens
tttaaattcattgctttttttttcttctgccatctccaatatgctgttgagcccatctaggaagtctttcatttaagttattgtacttttccctgggtgcrgtggctcacacctgtagtcccagcactttgagaggctgaggtgggaggattgcttgaggccaggaagtcaagaccagcctgggtaacatagtgggatcac

SEQ ID NO: 123965 - DNA, 201 bp, Homo sapiens
ttattgagggtctactcagtgtcaggcatagcatttgggctgcaaaattaagctaagttgaaattcttgtcttcaaataactcagtttggtggcatgtgarcatgtaaatgaacagttataaaaagttaataagtccagttaggcaagtgctggctgctatggaagaggagaggaggcagcttccagggagtgggagctag

SEQ ID NO: 123966 - DNA, 201 bp, Homo sapiens; identical to SEQ ID NO: 20968

SEQ ID NO: 123967 - DNA, 201 bp, Homo sapiens; identical to SEQ ID NO: 20971

SEQ ID NO: 123968 - DNA, 201 bp, Homo sapiens; identical to SEQ ID NO: 20972
  misc_feature (1)...(201): n = A,T,C or G

SEQ ID NO: 123969 - DNA, 201 bp, Homo sapiens
tctgagtcagctcatatatcattgtcactctgtaatgtattatttttctcttgttgctttcaaggttctctttttatctttggctttcggaagtttgactrtgatgtacctaggtgtggttttctttgtgtttgtctttcttggtatttgttgagctgttgactctgttggacctgtaagtatttttgactgaatgtgtga

SEQ ID NO: 123970 - DNA, 201 bp, Homo sapiens
gctgggattataggcaggggccaccgtgcctggccatcatacagtttgattttgtttattcaacaagcatttattgagggtctactcagtgtcaggcatarcatttgggctgcaaaattaagctaagttgaaattcttgtcttcaaataactcagtttggtggcatgtgaacatgtaaatgaacagttataaaaagttaat

SEQ ID NO: 123971 - DNA, 201 bp, Homo sapiens
acctctgcctcctgggttcaggcgattcttccgcctcagcctcccaagtagctgggattacaggcatgcgccaccacgcctggctaattttgtatttttartagagatggggtttctccatgttggtcaggctggtctggaactcctgacacctcaggtgatctgcccgtcttggcctcccagagtgctgggattacaggc

SEQ ID NO: 123972 - DNA, 201 bp, Homo sapiens
agacagggtcttgctttgtcgcccaggctggagtgcagtggtgcgatcatagcttactgcagccttgaattcctcaggtgatcttcctcccttggcctcamaaagtgctgggattataggcaggggccaccgtgcctggccatcatacagtttgattttgtttattcaacaagcatttattgagggtctactcagtgtcag

SEQ ID NO: 123973 - DNA, 201 bp, Homo sapiens
aaagaaccagaatctggcctttaaccttactagttcctgaaaatttcataaaaaattattttcattcttatctttttttagagacagggtcttgctttgtygcccaggctggagtgcagtggtgcgatcatagcttactgcagccttgaattcctcaggtgatcttcctcccttggcctcacaaagtgctgggattatagg

SEQ ID NO: 123974 - DNA, 201 bp, Homo sapiens
tgcaatggtgtgatctcagctcactgcaacctccgcctcctgggttcaagcgattctcctgcctcagcctcccgagtagctgggattacaggtgtgcaccrtccccggctaagtttttgtatttttagtagagacagggtttggccatgttggccaggctggtcttggactcctaacctcaggggatcctcctgccttggc

SEQ ID NO: 123975 - DNA, 201 bp, Homo sapiens
cattcctactgcatttcatctcaggcctactaattagtgtccctctctccagcctgtcattcataccgtcaggtgcctcttcctgaagcattgctttcatkcttgtgatttctctattcagatacctttagtaactccccatattccctacaacttttaaactggctcaaacctcctttttgacctttttatatacttcac

SEQ ID NO: 123976 - DNA, 201 bp, Homo sapiens
gaacatccaaatgaagtgcccagcagcttgccagatatattgatttggagtttgagagagaaaataattaggaacttatatcactatagatcataggatcmaagaattttaaagatgtaagggacactagaaaatagttcaacccatccccattgtacaactggaatctgaagttcagattattagagtttgtccaagagt

SEQ ID NO: 123977 - DNA, 201 bp, Homo sapiens
gatctcactatgttgcccaggctggtctcaaattcctgggctcaagtgatcctcaggcctcagccttttgagtagctgggttatatgcatgcgccactgcrcctggctttactattattttcacctaagaaatgttattctgtctactagtaggcaaggatttactctgaatattttctttcatttcttaacagtacagtg

SEQ ID NO: 123978 - DNA, 201 bp, Homo sapiens
gatatacagaataactgctgaaaggggtgcacacggggagtggaaattaggtttctgaagcaggaaactataagacaattgatttttggtatggaagagcrtgggatggattctgtgttatgtattgacacttgcattcgctattgtgttacttaacgcaattgtattaaacagttagttgactattagttgaatgtctac

SEQ ID NO: 123979 - DNA, 201 bp, Homo sapiens
tccctgtgatccttgatttgaagatacaagattggcagaacatggtgactgactagctggaggtggtgtagagggccacataaaagacggggaggagtctrggatgactcaggttctggtaggatgactgggtggatagaagtggtagtcactgaggcagggttttatgaaacagcatactgttttatatatataattttt

SEQ ID NO: 123980 - DNA, 201 bp, Homo sapiens
ttgtaaagaaatctcatttgtgaatgagttgtcctctattagaggacatttctgtaaaaatttcaaagatacgaacacttttccttttagagcctcaatakaacatgagaaattcttgatattttgattttcatttattatgactacaagctgactacaatacaatatgttaattatggcattgcctggatccattacagt

SEQ ID NO: 123981 - DNA, 201 bp, Homo sapiens
agtacattaataaggcttgaaatgtattctagttgtcttagatagtgatttatatatgtctggcagaaagaattatttctgcagttggcagagacaagaargatgggtggaaaactgcagaaggggagagatttagtggtaagaagatggctactacatttttaggtgctatttggaggaaacatcttgaattggatcttt

SEQ ID NO: 123982 - DNA, 201 bp, Homo sapiens; identical to SEQ ID NO: 20960

SEQ ID NO: 123983 - DNA, 201 bp, Homo sapiens
tttaaaaaacaataaggtacatatttgtcactgtctcatgttctgatttttcataggtaaagcagctgagcagccattttcagatttaccccttctcattraggaaaccaaactcagattgactaggaatggaagaaaagaatattggcctgtaataatctttctttgggcacaaagaagtactgtaaataaatgcttgta

SEQ ID NO: 123984 - DNA, 201 bp, Homo sapiens; identical to SEQ ID NO: 20955

SEQ ID NO: 123985 - DNA, 201 bp, Homo sapiens
ccattattagcagaaaaaccagtaaatttgtagagaagtactgttgaaatgggaaacttacagcattaagagttgtcaaatggaggcaattgctggtcgayttagatcacttaatattctatgcccttttggcgggggtgggggtttggggcggggggacatgagcttgtgagggagcctttcaccgaaaaataagtttgt

SEQ ID NO: 123986 - DNA, 201 bp, Homo sapiens
ttgaggacctagaagaggtgttccatctatacataaaatctcggttacctttcagtgagatggaataagagggtcggaaggcactgctagataaaagcatgaatgtgcaaggtgcactgaaagtccttggtattgtccccaccaaacaaccaagacatcgattctgccctcctagcaagctccagatacctggaaagtttc

SEQ ID NO: 123987 - DNA, 201 bp, Homo sapiens
attttggtaactttctaccccttaggtacaaaagggaaccttttctcctctttttttccttcctgcacgtacatactccactcatctccaaaaagaagttygttgggcgcagtaaatatggcaggtatggggacaatgtagaagaaatggattggatggtgggtaagtattcagtaacagaactgtaaatatctgaagtac

SEQ ID NO: 123988 - DNA, 201 bp, Homo sapiens
tgttgggcgcagtaaatatggcaggtatggggacaatgtagaagaaatggattggatggtgggtaagtattcagtaacagaactgtaaatatctgaagtaygggctacagaaaaacaaatctgtactaactgtctcaaattatgtccagccccttgcatagcatagatacctgaaaagtatctgtttcatcccttaattgg

SEQ ID NO: 123989 - DNA, 201 bp, Homo sapiens
tggtgggtcaggtggtcttcccaccaatgaaacgacttttgccaagctgctgcagcaccgtggctaccgcacgggactcataggtatggcgccggaactckgcccgtggaaacgtgatcctgcagcctctctgtcatcgtgtctaaggtgtttccggggatgttggctttgtgcgcgccagtttgaccgacttctctttga

SEQ ID NO: 123990 - DNA, 201 bp, Homo sapiens
ttttgggacaggatctcactctgccacccaggctagagtgcagtggtgcaatcatggctcacagcagcctcgacttcccaagctcaagtgatcctcccacmtcagcctccagagtagctgagactacaggcacctacaggatgcctggctaaattttgcattttttttttagaaatggggttttgtcatattgcccaggct

SEQ ID NO: 123991 - DNA, 201 bp, Homo sapiens
tacgcctggccacttacccctttttaaaaatgaaaactagagttgccatattttaatctatattgcttcagtgtggattgttatgtaaattgattaaaccyggggggtaaaattttttttctctgtctcagacacagccggaagagctctctgtccataaactattggatagtggctctgtatttacagatacctagtttt

SEQ ID NO: 123992 - DNA, 201 bp, Homo sapiens; identical to SEQ ID NO: 20974

SEQ ID NO: 123993 - DNA, 201 bp, Homo sapiens
gtctcgaactcctgggttcaagcgatcctcctgccttgacctcccaaaatgctgggattacaggtgtgagccattgtgcccagcctgggttacaaatgagrggcacattaaagttgttggtgtggattctcattgacactgtttgtcaccttccttagtggggttggcagggagtggagaggggaggatatattgttactc

SEQ ID NO: 123994 - DNA, 201 bp, Homo sapiens; identical to SEQ ID NO: 20975

SEQ ID NO: 123995 - DNA, 201 bp, Homo sapiens; identical to SEQ ID NO: 20977

SEQ ID NO: 123996 - DNA, 201 bp, Homo sapiens
tgaggcaggagaatcacttggatccaggatgcagaggttgcagtcagccaagatgagaccactgcactccagcctgagtgacacagcgagattctgtttcaaaaaaaaaaaaaaaaaaaagaatattgtaatttcaattcccaattattttgatggatataaaagggaacgttattctgattagtcagttctacaggaaat

SEQ ID NO: 123997 - DNA, 201 bp, Homo sapiens
gaggcaggagaatcacttggatccaggatgcagaggttgcagtcagccaagatgagaccactgcactccagcctgagtgacacagcgagattctgtttcaaaaaaaaaaaaaaaaaaaagaatattgtaatttcaattcccaattattttgatggatataaaagggaacgttattctgattagtcagttctacaggaaata

SEQ ID NO: 123998 - DNA, 201 bp, Homo sapiens
tgaatgctgccatgctgccatggtacgattttattttacttttaggcaaatggcacctgggtttgagctgcgcctctcggaatgatcactgttaccacccrctcaaccatggttttcactacttttacggggtgccttttggacttttaagcgactgccaggcatccaagacaccagaactgcaccgctggctcaggatca

SEQ ID NO: 123999 - DNA, 201 bp, Homo sapiens
gaaacttacagcattaagagttgtcaaatggaggcaattgctggtcgacttagatcacttaatattctatgcccttttggcgggggtgggggtttggggcsgggggacatgagcttgtgagggagcctttcaccgaaaaataagtttgtagaattccagtcctagaagatagtcctctaagaataacttgtgtgatcaaat

SEQ ID NO: 124000 - DNA, 201 bp, Homo sapiens
tgtagaatcgagggcatagtattggaaaaacaatgagaacagaaagcaaacaagtgtatccaaagttgccactaaaatggaatgttgtgttggagggatasgatgtttgtgacaccattattagcagaaaaaccagtaaatttgtagagaagtactgttgaaatgggaaacttacagcattaagagttgtcaaatggaggc

SEQ ID NO: 124001 - DNA, 201 bp, Homo sapiens
tgccactaaaatggaatgttgtgttggagggatacgatgtttgtgacaccattattagcagaaaaaccagtaaatttgtagagaagtactgttgaaatggraaacttacagcattaagagttgtcaaatggaggcaattgctggtcgacttagatcacttaatattctatgcccttttggcgggggtgggggtttggggcg

SEQ ID NO: 124002 - DNA, 201 bp, Homo sapiens
ctctcgaccatggccaaattcgtcatcgcgggtgagtgatccccgcgtccgcccgcagattgctcaaaacgccgacaacagctcacctcccatggccgctyggcttggcagcctctatacggaccgctccatgctttgctatagatttattcaaagttttttactggaccgtgacggtgcgccaagcattgtgggacactg

SEQ ID NO: 124003 - DNA, 201 bp, Homo sapiens
gggaattagaattggtacatagaggagcagcaaagtcgagcagaaatggagctgacaacatagctgcatacataatttggaatgaaaagcaaggtgacagragagagcacataaaaatagcttgtggccagggaagaggccacaattagttttgctatatgaaaatacctaactatgatctcatggctttatttccccata

SEQ ID NO: 124004 - DNA, 201 bp, Homo sapiens
ggccagagcaagggattggtagtgagaagtttttgttctacttttgacttctagccttagaatgtcagggcagctatgtgtgtgcttatttaaatattaarccaccctattgatgcacatgcagaaatatctattaagaataaaggcttaaaagggacaaaggatataactattcacaatgcggctttgcatttttatcag

SEQ ID NO: 124005 - DNA, 201 bp, Homo sapiens
tggctcaccacctggggagattgtatctttaggaatattgagtgaaggtaaatctgggtttttcatatcttgtaaaatcttaaaacctctatctataactsgtgctcctaattctgtgtccccacccatctagctcttaacatggtccattagctgcctggacttttacaatttcatactcattcattcattcaattactc

SEQ ID NO: 124006 - DNA, 201 bp, Homo sapiens
gtcattggaaggcctagcctatataaatcagataatgataatttaaattttttctgataaatattgtcggaaatctccaaataacttttagcttattaatwtagtctgaactacataaaccacactcacagattttaaaaaaagtatcaagttttatatgcccctaagactggaaatattgcatgtgtaaaagaataaggg

SEQ ID NO: 124007 - DNA, 201 bp, Homo sapiens
aacatcatgaaagagaaaaaccaccaaggaaatgattcagggattattctagatgccaagagggtggcaaaccttttcagaaaagcaagattcatgataayccctaagttcagttcataaatcactatttatcagaccatgtgtattggctcgtcaggactccttctgttgcaaaaaagtcaactcacggtgactgaagtc

SEQ ID NO: 124008 - DNA, 201 bp, Homo sapiens
gattcatgataatccctaagttcagttcataaatcactatttatcagaccatgtgtattggctcgtcaggactccttctgttgcaaaaaagtcaactcacrgtgactgaagtcaccaggtaccatggctcacacctgtaattccagctacttgggaggctgaggcgggaggatcacttaagcacaggagtttgaggctgca

SEQ ID NO: 124009 - DNA, 201 bp, Homo sapiens
agaactagctattcctactgcaggaatcattccgatgggggcgggaatctcacaggacaaaggtagacagtgatggtgggctaccgaaaatctgtttcctsctctcttctgctagcctctctctactatagaggctcaaacaatcatcccttttcttagcttcattgcaactaggagtggttgagtgatatagtctatttg

SEQ ID NO: 124010 - DNA, 201 bp, Homo sapiens
cccaccacccctagaatgttgtaaggatttgggctgatttgttttcttctaaacctggtacctagaggtgtctcacacatagaatagaattcataactatytgttgactaagatgttgcccagggtcctcttacaatatcctcattttgccagagatgaaacccatcagagagttaaatgatttgccctaatttctattct

SEQ ID NO: 124011 - DNA, 201 bp, Homo sapiens
agaggcagtagaaatttgagagatatttaggatgtggaaatatcaagaattgctgatgaatctgattggctttggtgaatcccagggttcttctggctgarcaactgggcagatttactattgataaggggaaaatggtaaaagaatgagagagagagagaaaatatgagaatgtgggaggggtgtgtgtgtgcatgcacg

SEQ ID NO: 124012 - DNA, 201 bp, Homo sapiens
ttgactttttatggggatcaaagacacttgaggaaagacactagaaataaagctgtatttctattttgactgtggattaggtttctgatacttagttccaytgagccagggaacatcctttttctctttaattcctctctccattgtaaaattgtttctttctctccttacagtgagtgggtaaaaagagaatttgtggca

SEQ ID NO: 124013 - DNA, 201 bp, Homo sapiens
atcggctgggcgtggtggctcacacctgtaatcccagcactttgggaggccgaggtgggcagatcacaaagtcaggagatcgagaccatcctggctaacayagtgaaaccccgtctctactaaaaatacaaaaacaaaattagccaggcatggtggcaggcacctgtagtcccagctacttgggaggctgaggcaggagaa

SEQ ID NO: 124014 - DNA, 201 bp, Homo sapiens
cttgagatggagtcttgctgtgacgctcaggctggggtgcaatggcaccatctcagctcactgcaaccccctccttctgggttcaagtgattctcctgccycagcctcccgagtagctgggaccacaggcgcatgccactatgcccagctaatttttgtatttttagtagagatggggtttcaccatgttggccagaatgg

SEQ ID NO: 124015 - DNA, 201 bp, Homo sapiens
gtggtggctcacacctgtaatcccagcactttgggaggccgaggtgggcagatcacaaagtcaggagatcgagaccatcctggctaacacagtgaaacccygtctctactaaaaatacaaaaacaaaattagccaggcatggtggcaggcacctgtagtcccagctacttgggaggctgaggcaggagaatgacgtgaacc

SEQ ID NO: 124016 - DNA, 201 bp, Homo sapiens
tgtcctcaatgttttgttgttgttgttgttgttgtttgttttttttgccctggtgatatttttgttgtctagtatggcagaaataattttcttatgtgatygaggcaccagaaacggggacaattttgtctgaatggtgctcagttagtaataaatatggtcaatctttttatttagagcacatccaaatataagtatttc

SEQ ID NO: 124017 - DNA, 201 bp, Homo sapiens
ggtcaacaagaaaaggatcggaaagtatctgctggatttagtggcatggaagtcttcagtgaccttcaagagaattgtggggtctgctacattgcagtggrtgagaaataaatggaagtgaagaactgaggatggcaaatatagggaactctttcaagatattttgatcaaaaaggacatacgaaaggcaatagctagagg

SEQ ID NO: 124018 - DNA, 201 bp, Homo sapiens
gtaggcatctagataaggagatctgagctggaaatatagattgctacttgaagccaagggaatgaagcagattggccaaaaagaatatgtaagttataaaracaagatgcttctcagaatgataccttttaatgggttgataaaggaatggaaacctacaaaggatagaaaggagtgaccatagaataggagaactgggag

SEQ ID NO: 124019 - DNA, 201 bp, Homo sapiens
ttgtattttttaaaaaagagctatggctaactgaaacttacatctttatctttttaggaggaaatataaacacataattacagtaatataatagttttttwattttgatttctgcatagggggaattctgttttctttgaaaaacctaataaacaggtatatttcttatttggggactgatttcagatggccagagcaagg

SEQ ID NO: 124020 - DNA, 201 bp, Homo sapiens
attgtcttttgactttaaacaaaaactttccattatagccaatttcaactagttatctattctctgatattgactttttctctcccaatatttagctttaytatgatgtcacctctagcatgacgactgaactgatgatggtaattgctcaagagaacctgggggcacatatagaaaaagagcaggaggaagaagccctga

SEQ ID NO: 124021 - DNA, 201 bp, Homo sapiens
ttttcggatacataaaatcacacaacgtcctgaggtttgggaggtaagaagcctttatagtttgttgaactcactcatgcacaaaatgtgttttaatttgrttaaatattaactggtgtattagactggcttctaggaatgactgttcatgtgctagtgatatttgaatactagtaaaacaagtccctacttaccagtctc

SEQ ID NO: 124022 - DNA, 201 bp, Homo sapiens
gaaagactgtaactaccaacaaagcctccccaacccctcctcccctcaagaaaggagtttagttttcatctcaatttttttattccagatatatgaggaayaaagaaaaccacatgaagaaagcataagagagttctcacctgaatcccgttcgtagaacatgaacattcttgcatggttccattgcctctaaaacagttg

SEQ ID NO: 124023 - DNA, 201 bp, Homo sapiens
ggagaacctttgtaaacctgaagacagttttactcatgagatatgccccacgcattgcacacaacattattgctgtggcgctgggggtggaaggtgaagcraaagccatactggccagaaaactgaagacagctccttcatgtgagtgaatgtctctttatgtttttgtttttattttgaaacaacatgatttcaaagcag

SEQ ID NO: 124024 - DNA, 201 bp, Homo sapiens
gtatatttcttatttggggactgatttcagatggccagagcaagggattggtagtgagaagtttttgttctacttttgacttctagccttagaatgtcagkgcagctatgtgtgtgcttatttaaatattaaaccaccctattgatgcacatgcagaaatatctattaagaataaaggcttaaaagggacaaaggatataa

SEQ ID NO: 124025 - DNA, 201 bp, Homo sapiens
caatttgcacaattttaggaatcataaacctagattcattttataccaaaaagaccaatcctaaaacaaacatgcacgcaaacaaaaaataggcttcaggyaattttttatattaacatacattattattatttttctaaactttctattcttcacagacattaaagacgtgatcatttggggtaatatcagtggaaataa

SEQ ID NO: 124026 - DNA, 201 bp, Homo sapiens; identical to SEQ ID NO: 20980

SEQ ID NO: 124027 - DNA, 201 bp, Homo sapiens
tccagcaaacaaaaaagctaataataacatatgctactaacatattttggaaatagttatgtcttttcattcttttccttttacagaatttgaaggcaaarccgtggaatcctaacagatcaaattggatgaaatatataattacttgatagcacaataaacatagaaagaatttatatgaatgtctatatttaaggaaga

SEQ ID NO: 124028 - DNA, 201 bp, Homo sapiens
atgaatacaggaatccagcaaacaaaaaagctaataataacatatgctactaacatattttggaaatagttatgtcttttcattcttttccttttacagamtttgaaggcaaaaccgtggaatcctaacagatcaaattggatgaaatatataattacttgatagcacaataaacatagaaagaatttatatgaatgtcta

SEQ ID NO: 124029 - DNA, 201 bp, Homo sapiens
agactccatttcccataagatcacattcataggtaccaggcgttaggacttcaacatatatatatatattttatttatttatttatttatttatttagacrgagtcttgctctgttgcccagactgaagtgcagtggtgccatctcggctcaccacaagccccgcctcccaggtacgagcgattctcctgtctcagcctcc

SEQ ID NO: 124030 - DNA, 201 bp, Homo sapiens
tcttgctctgttgcccagactgaagtgcagtggtgccatctcggctcaccacaagccccgcctcccaggtacgagcgattctcctgtctcagcctcctgaktagctggaactacaggtgcacaccaccatgcctggctaatttttgtatttttagtagagacgaggtttcactatgttggccgggctggtctcaaactgct

SEQ ID NO: 124031 - DNA, 201 bp, Homo sapiens
aggctgtttgcagaaagactggtattgagggggagtgcatacagccaagaccagaggcagtagaaatttgagagatatttaggatgtggaaatatcaagamttgctgatgaatctgattggctttggtgaatcccagggttcttctggctgaacaactgggcagatttactattgataaggggaaaatggtaaaagaatga

SEQ ID NO: 124032 - DNA, 201 bp, Homo sapiens
tttaaatcatctcataaatctttgtacaaaaataacttgcattgttcacactcatatttgttcatgctgtctactgaagaaacagaaaattccacagaatrtcaactaggtaattgatttgattttgaaattatgaatttttatatttcagatccttcagtagttcatatattcaagtaaggttatctctaaagcaagcat

SEQ ID NO: 124033 - DNA, 201 bp, Homo sapiens
tggaaatatcaagaattgctgatgaatctgattggctttggtgaatcccagggttcttctggctgaacaactgggcagatttactattgataaggggaaawtggtaaaagaatgagagagagagagaaaatatgagaatgtgggaggggtgtgtgtgtgcatgcacgcctgtggatggaagaggaagaagcatggtgccag

SEQ ID NO: 124034 - DNA, 201 bp, Homo sapiens
tccattccaagttgcagcatcccattcttttccaattaatgccctcactttaacaggagacacctggcaaggctgtgcatacacttttcgttgcagttcarccactcacataataagagcttgtgtctgtttttccacaatttcagctctttctctacaggagataagactcactcagggcaatctttgcagatttgaggc

SEQ ID NO: 124035 - DNA, 201 bp, Homo sapiens
aattagagacatcggctgggcgtggtggctcacacctgtaatcccagcactttgggaggccgaggtgggcagatcacaaagtcaggagatcgagaccatcytggctaacacagtgaaaccccgtctctactaaaaatacaaaaacaaaattagccaggcatggtggcaggcacctgtagtcccagctacttgggaggctga

SEQ ID NO: 124036 - DNA, 201 bp, Homo sapiens
gaactaataggatacttatgtataaataaaggggaatttattgagtattaagttacacaatcacagggtcccacaatgggctgtctgcaagcttgaggagmaaggagagccagtctgagtctcaaaattgaaaaacttggagtccaatgtttgagggcaggaagcatccagcatgggagaaaaatgtaggctaggaggcta

SEQ ID NO: 124037 - DNA, 201 bp, Homo sapiens
tcggctgggcgtggtggctcacacctgtaatcccagcactttgggaggccgaggtgggcagatcacaaagtcaggagatcgagaccatcctggctaacacrgtgaaaccccgtctctactaaaaatacaaaaacaaaattagccaggcatggtggcaggcacctgtagtcccagctacttgggaggctgaggcaggagaat

SEQ ID NO: 124038 - DNA, 201 bp, Homo sapiens
tgaaaccccgtctctactaaaaatacaaaaacaaaattagccaggcatggtggcaggcacctgtagtcccagctacttgggaggctgaggcaggagaatgrcgtgaacccaggaggtggagcttgagctgagattgcaccactgcactccagcctggatgacagaatgagactctgtctcaaaaaaaaaaaaaaaaaaaaa

SEQ ID NO: 124039 - DNA, 201 bp, Homo sapiens
ggttccgtagagggacagaactaataggatacttatgtataaataaaggggaatttattgagtattaagttacacaatcacagggtcccacaatgggctgkctgcaagcttgaggagcaaggagagccagtctgagtctcaaaattgaaaaacttggagtccaatgtttgagggcaggaagcatccagcatgggagaaaaa

SEQ ID NO: 124040 - DNA, 201 bp, Homo sapiens
ttcattatgttcctttgttcaccacatatggtcaaaggtattatgtatagagtcactaaactccctgcctctcatgggcagtgaatcaggagtgtcaaatkcatttattttgcataactcattaaacagttcatgccaaggactatcagtgttctccatactattaaaagtagagtccttaggtccttagcatttggaggt

SEQ ID NO: 124041 - DNA, 201 bp, Homo sapiens
ctgccaggagacagaatctctgagttcatcattttctttcatcactttgtccactgaacttaggagcagctaaccagcttcattatgttcctttgttcaccacatatggtcaaaggtattatgtatagagtcactaaactccctgcctctcatgggcagtgaatcaggagtgtcaaattcatttattttgcataactcatt

SEQ ID NO: 124042 - DNA, 201 bp, Homo sapiens
gtttttccacaatttcagctctttctctacaggagataagactcactcagggcaatctttgcagatttgaggctcagtatctgccaggagacagaatctcygagttcatcattttctttcatcactttgtccactgaacttaggagcagctaaccagcttcattatgttcctttgttcaccacatatggtcaaaggtatta

SEQ ID NO: 124043 - DNA, 201 bp, Homo sapiens
tgggagggagaacctttgtaaacctgaagacagttttactcatgagatatgccccacgcattgcacacaacattattgctgtggcgctgggggtggaaggygaagcgaaagccatactggccagaaaactgaagacagctccttcatgtgagtgaatgtctctttatgtttttgtttttattttgaaacaacatgatttca

SEQ ID NO: 124044 - DNA, 201 bp, Homo sapiens
ctcgtgagactcttctcctcgaagtaaaaagtctaggatgtgatacgggctgccgctaagcccaagctcgtcctccactcaccttagagcacaagaccgtractacgtacaggagcagccatgacagcttccccgagaagctgcgcttctcacgagatcttacggattccctcaaaggtcaaaaagcatatgttcgcggct

SEQ ID NO: 124045 - DNA, 201 bp, Homo sapiens
tgagtgctgtagcaggtgagaagagtggaaggccagatggacaaatgacttaggctcatgggctgcataggggtccagggaaaagccatgcagacagacaraaagaatacagacagggttcaaaagagaaagactgcattagcctctggatgtcagataaatacagatggcagaattgttagaacttggatagtcgctcag

SEQ ID NO: 124046 - DNA, 201 bp, Homo sapiens
gccaggagacagaatctctgagttcatcattttctttcatcactttgtccactgaacttaggagcagctaaccagcttcattatgttcctttgttcaccacatatggtcaaaggtattatgtatagagtcactaaactccctgcctctcatgggcagtgaatcaggagtgtcaaattcatttattttgcataactcattaa

SEQ ID NO: 124047 - DNA, 201 bp, Homo sapiens
tagcttgtggccagggaagaggccacaattagttttgctatatgaaaatacctaactatgatctcatggctttatttccccatagaatcactctcacacaygcactttctcagctattgaatcatgaatacaggaatccagcaaacaaaaaagctaataataacatatgctactaacatattttggaaatagttatgtctt

SEQ ID NO: 124048 - DNA, 201 bp, Homo sapiens
tgccaggagacagaatctctgagttcatcattttctttcatcactttgtccactgaacttaggagcagctaaccagcttcattatgttcctttgttcaccacatatggtcaaaggtattatgtatagagtcactaaactccctgcctctcatgggcagtgaatcaggagtgtcaaattcatttattttgcataactcatta

SEQ ID NO: 124049 - DNA, 201 bp, Homo sapiens
agtcaatccttctagagggagtgtttcagtcctctttggagaagaattccgagaaatttaattccatcattatcattaaaaatcctatactatgtctgtcmttttctacaatgcttaacagaaaaggtgcatgtttctaagttctgctgcattgctttgctttgtgtttgctcactgcaggccagtttggtattccgaaag

SEQ ID NO: 124050 - DNA, 201 bp, Homo sapiens
agcttgagctgagattgcaccactgcactccagcctggatgacagaatgagactctgtctcaaaaaaaaaaaaaaaaaaaaaaatagagacatcaagcagctctttttgagtgtagcacacttcttcatgggtcatactctcaacctcacctctagaggcccaccaagactttagtctagttataggtctagaagcaaaca

SEQ ID NO: 124051 - DNA, 201 bp, Homo sapiens
gaattgttagaacttggatagtcgctcagtcaatccttctagagggagtgtttcagtcctctttggagaagaattccgagaaatttaattccatcattatmattaaaaatcctatactatgtctgtcattttctacaatgcttaacagaaaaggtgcatgtttctaagttctgctgcattgctttgctttgtgtttgctca

SEQ ID NO: 124052 - DNA, 201 bp, Homo sapiens
tgcagacagacaaaaagaatacagacagggttcaaaagagaaagactgcattagcctctggatgtcagataaatacagatggcagaattgttagaacttgratagtcgctcagtcaatccttctagagggagtgtttcagtcctctttggagaagaattccgagaaatttaattccatcattatcattaaaaatcctatac

SEQ ID NO: 124053 - DNA, 201 bp, Homo sapiens
gagcttgagctgagattgcaccactgcactccagcctggatgacagaatgagactctgtctcaaaaaaaaaaaaaaaaaaaaaaatagagacatcaagcagctctttttgagtgtagcacacttcttcatgggtcatactctcaacctcacctctagaggcccaccaagactttagtctagttataggtctagaagcaaac

SEQ ID NO: 124054 - DNA, 201 bp, Homo sapiens
taaagaacaaattatgtcaggagattatagtaacatatcctatgcatagtcaatgtcaaagggagttaagttttactctcactaatctatgacattagatmatttatatcaattttataaatcccttttcaagctgggtcaacgtcaaccctcacatagtccccgaataactattctgaattaaatatacatatcaattct

SEQ ID NO: 124055 - DNA, 201 bp, Homo sapiens
gttaaaataaatgtttaatggttgtaatcttttaaatcatctcataaatctttgtacaaaaataacttgcattgttcacactcatatttgttcatgctgtstactgaagaaacagaaaattccacagaatatcaactaggtaattgatttgattttgaaattatgaatttttatatttcagatccttcagtagttcatata

SEQ ID NO: 124056 - DNA, 201 bp, Homo sapiens
atgaacactatgatcttataaatgttgtaggtaacatatttattaatttcctaggactaccataacaaattaccacaaagtggatggcttaaaaacaacaraaatttacttgttcacagctcaggagactagaagacctgatgtgaggtatcagcagggccacactctctctgaaggcttgagaaagaattccttcttgct

SEQ ID NO: 124057 - DNA, 201 bp, Homo sapiens
acccatcttaaattgattatatccaccaagactccatttcccataagatcacattcataggtaccaggcgttaggacttcaacatatatatatatattttwtttatttatttatttatttatttagacagagtcttgctctgttgcccagactgaagtgcagtggtgccatctcggctcaccacaagccccgcctcccagg

SEQ ID NO: 124058 - DNA, 201 bp, Homo sapiens
tgaacccatcttaaattgattatatccaccaagactccatttcccataagatcacattcataggtaccaggcgttaggacttcaacatatatatatatatwttatttatttatttatttatttatttagacagagtcttgctctgttgcccagactgaagtgcagtggtgccatctcggctcaccacaagccccgcctccc

SEQ ID NO: 124059 - DNA, 201 bp, Homo sapiens
ttgaggacctgggaagccctctaaggaaaagtcttttagatcttggtttctcgaatgtcctcaatgttttgttgttgttgttgttgttgtttgttttttttgccctggtgatatttttgttgtctagtatggcagaaataattttcttatgtgatcgaggcaccagaaacggggacaattttgtctgaatggtgctcagtt

SEQ ID NO: 124060 - DNA, 201 bp, Homo sapiens
aggcgtgaggacagtcccacccgacagatagggactgacactggagaaggagtagttatttaaagaagaatcaggatgctcttaatgaaaaaaaaaaaaaaggaggaggggaaattcatgccaagagggaagaaagcagatgtccactatcattctctgtagcataatttgggatgtttagagctatcaagggcctcaaag

SEQ ID NO: 124061 - DNA, 201 bp, Homo sapiens
ccctttgcttttctccttctcatgtgtgctccactttgctcccagtctgggcacatgcagtctttgttgtcatactctctctctttctttctctgcactgkctctctgtctctcttgctctctctctccctccccttctcctttcctcacccctcagtttgtcttttgcacttttcctgctcttacgtgcatgtgtatcct

SEQ ID NO: 124062 - DNA, 201 bp, Homo sapiens
aaaaagaccaatcctaaaacaaacatgcacgcaaacaaaaaataggcttcaggcaattttttatattaacatacattattattatttttctaaactttctrttcttcacagacattaaagacgtgatcatttggggtaatatcagtggaaataattacgttgatctgagaaaaacaagggtgtacagatatgagagtgcca

SEQ ID NO: 124063 - DNA, 201 bp, Homo sapiens
gctaattcactcccagagctgcagacctggacctctctgccgagctctagcttctgaaacattgtcacctggatgtcatgtcatcacttccatccaacatrtaccagactgaatgtactgtcatccttcccaattggttccatctcttgtattctttatgttataagtagaaccaccatcttccctattgtttcagtgacg

SEQ ID NO: 124064 - DNA, 201 bp, Homo sapiens
caatccaatcaagttggcactcggtattaaccatcacaattagaaaaagataagtattatttcatgtatttttttgtttcattaatatgtacacaaatgtrcacattggactataatgtaaaatgtgtcttttattgtgggtcatagtcactgaagtttgaaaaacattgactcagaacatctcatgacctagttaggttg

SEQ ID NO: 124065 - DNA, 201 bp, Homo sapiens
aaatgtacacattggactataatgtaaaatgtgtcttttattgtgggtcatagtcactgaagtttgaaaaacattgactcagaacatctcatgacctagtyaggttgttggttatattctaaatccagcatgttttatttaattttgatttcaggacataaagatctggtccctgatgaagaaaaaaatctagctatgtca

SEQ ID NO: 124066 - DNA, 201 bp, Homo sapiens
ttcaggacataaagatctggtccctgatgaagaaaaaaatctagctatgtcagatggtaagtcagtggggttataaacaatgtctatattgctaatagtcrtgactcatattgtccagttgttagagaataatgttatggtctagcgaccaaagcaagttttaaataactgcttcttttcatatgcttcacaaacactttg

SEQ ID NO: 124067 - DNA, 201 bp, Homo sapiens
agagaataatgttatggtctagcgaccaaagcaagttttaaataactgcttcttttcatatgcttcacaaacactttgaaatgggcataaaaatgtcaacktttttttaaaaagcactaaaactgcttccttgtcatattcacctcaaactctcccaaaatactctaacttcagctccagtcccttgtatctcttgcttct

SEQ ID NO: 124068 - DNA, 201 bp, Homo sapiens
atacatataacatacaaaatatatgttaatcaactgttattggcaagacttctggtcaacagtgggctattagttaagttttgggggagtcaaaagttacrtgtagattactgatcacacagaggaatggtgtccgtaacctccacattgttcaggggtcaactgtatacatataatgtgagtgcttgcaaatatttatgt

SEQ ID NO: 124069 - DNA, 201 bp, Homo sapiens
tggggctcggggataccacagagcttataagggcgatgtttgatcgtgtatcgcaacgtaacccattcaggtcctaactttaaacacctaacctctgctgkgcgccagactttgtagtgcgcctgcgccttgcccttggctgcgtggttgccaggaaaccgcgaagccgcggtccctgcctctgagtctctctcgaccatg

SEQ ID NO: 124070 - DNA, 201 bp, Homo sapiens
gactctgtttccccagaaacagactttgagatgtagattttggtgaaggggctttactgggaagtggtcttgggaacagcatcctgaaacggaatgagggyggcaggattgggtaaagggagaagttgaagtttgacatagctgcaacagagggctcagcggatcccacagtgaactcttgatggcctttcagaattattc

SEQ ID NO: 124071 - DNA, 201 bp, Homo sapiens
tttctaaactttctattcttcacagacattaaagacgtgatcatttggggtaatatcagtggaaataattacgttgatctgagaaaaacaagggtgtacaratatgagagtgccatttggggacctcttcattattcacgccctgttttaaacttgatttttgacaggtacagtatattttgaagtgaagcatactgacaa

SEQ ID NO: 124072 - DNA, 201 bp, Homo sapiens
agtaaaaagtctaggatgtgatacgggctgccgctaagcccaagctcgtcctccactcaccttagagcacaagaccgtgactacgtacaggagcagccatracagcttccccgagaagctgcgcttctcacgagatcttacggattccctcaaaggtcaaaaagcatatgttcgcggctgtagctgaaggacttacttgaa

SEQ ID NO: 124073 - DNA, 201 bp, Homo sapiens
tgtgtgcttatttaaatattaaaccaccctattgatgcacatgcagaaatatctattaagaataaaggcttaaaagggacaaaggatataactattcacartgcggctttgcatttttatcagtgcctctgctcctgcctgctacaacctaattcccatattgacgagtggcgaagtgtttgggatgcatacagaaattag

SEQ ID NO: 124074 - DNA, 201 bp, Homo sapiens
tttgagatgtagattttggtgaaggggctttactgggaagtggtcttgggaacagcatcctgaaacggaatgagggcggcaggattgggtaaagggagaakttgaagtttgacatagctgcaacagagggctcagcggatcccacagtgaactcttgatggcctttcagaattattccaaactgaggcaaggtagctgagc

SEQ ID NO: 124075 - DNA, 201 bp, Homo sapiens
ctccctctcttctctaccatccattatagatttccctcactctctgctggtctggtcttcagctaagttatctcatctgctgggttggtagtgcttctgtyacaataaatgttgtctggttggcactgcccactggcctctattgtttcaggattttatcatctcaattgccagggagttcaggtgtgtggcagcatgtcc

SEQ ID NO: 124076 - DNA, 201 bp, Homo sapiens
tttcaggattttatcatctcaattgccagggagttcaggtgtgtggcagcatgtcctttaacagccttggctacaatcatatgaaaaaatgctcaacattrcaggttattagagaaatgcaaatcaaaaccacaataagattccatctcatacccgtcagaatgactattatttaaaagtcaaaaaataacagatgctggc

SEQ ID NO: 124077 - DNA, 201 bp, Homo sapiens
taaagagtcattaaaatcatgtggccagggaacaaatacagtcttcgaatgtgacgattcaagcttcctcattgctgaacatgtttaggcaggtacaggcwtccttaggtgtccacgtatttgggacatgtaagtggagaggcatgaacctgattcatttcctgatccagtgatgctcccagcccacccccaaacagacac

SEQ ID NO: 124078 - DNA, 201 bp, Homo sapiens
aaggctgcagcttccctgagaatagaaagggactttttataccttttgttcttcctcttccttcattccccagccacccatcaccgctcttcgctccccccacccaacaccactcacttctgccgcacaattacagaaactgaacagcacattatagaggaaagcattcaggacttaaatgatttaatgatgatgagcctt

SEQ ID NO: 124079 - DNA, 201 bp, Homo sapiens; identical to SEQ ID NO: 20986

SEQ ID NO: 124080 - DNA, 201 bp, Homo sapiens
gtcctccccctacccccaccccaccatgaatgggcaaaaagaagagcagttatagctcttatcaggatgcttacctgtgcaagactccaaaaccagtaagsttgggaacatccacggagccacagggacatgagaaagcccacattgctaatgagatcttgtaagaagtccacagttcataagaggaaaggtaaataaaaa

SEQ ID NO: 124081 - DNA, 201 bp, Homo sapiens; identical to SEQ ID NO: 20991

SEQ ID NO: 124082 - DNA, 201 bp, Homo sapiens; identical to SEQ ID NO: 20988

SEQ ID NO: 124083 - DNA, 201 bp, Homo sapiens
tccggaaggcagagaggcttggctctgaagggtaggcaccaatccaggcccggccctcctctctcccttcccccttcactccctcccagcacaggcgagargaagcagcagctgttgtcctgtggggaagacaggcagaggtccacctggcactgttgggattttcacaacacccgccccaacttaaacacacacacaaca

SEQ ID NO: 124084 - DNA, 201 bp, Homo sapiens; identical to SEQ ID NO: 20985

SEQ ID NO: 124085 - DNA, 201 bp, Homo sapiens
gcaacccttaacaccacagtgattgactcttcccaggatcaagggccagaagtgtatatgagaggatatgaatgacaactcttcctgaaattgatttcagwtgacacctgggtcaggtgctctattaaagagtcattaaaatcatgtggccagggaacaaatacagtcttcgaatgtgacgattcaagcttcctcattgct

SEQ ID NO: 124086 - DNA, 201 bp, Homo sapiens
tcatatgagcaggtataagaggactaatttctcaactgaacacctctgtcccagcgacccctgccctccatcctgactgctcctcctaagagagatggcaycggccagagcaggattctgcccccttctgctgcttctgctgctggggctgtgggtggcagagatcccagtcagtgccaagcccaagggcatgacctcatc

SEQ ID NO: 124087 - DNA, 201 bp, Homo sapiens
atatgtacgtatatattctatttttttgtattcacatatatgtttttttttcttatcatcaacaatcaccttccctagagcactttctgagtataaatctrtgagctttgttaagcacagcactgggagaatttctggagcccagtctctgcctgtgtttctttgtgctctctcacttgacatttctgaatgcaaatatgt

SEQ ID NO: 124088 - DNA, 201 bp, Homo sapiens
gtgttttatgagagttaaaaataacatgactatttacaaagatgtaggcagagttaggagaataaagaaggggtagtgaagcactctgttaccagcaagawtgtggacctgttattctatctggacctaaaggtatttactggaaatgtgacataatatcagagctgtaagacatgggagtccaacaggaactgtgacttc

SEQ ID NO: 124089 - DNA, 201 bp, Homo sapiens
ctgggatctacttagaattctatgctttacatatagggccaacgtggccaggtcactatgtctctcagagcctcagcttctctgtttgtgaaagatcatgycttccctgaccaaagtgcctgtcagaaccagatgctcatgatcgtgctgactttgtgggttgtttactccccctcttttctctttcccttatagttttat

SEQ ID NO: 124090 - DNA, 201 bp, Homo sapiens
atctttgtggttttgttttttccacttgcttatgactttgaacatatttgcaagtattttggccatttgtgctttctcttcagtaaaatgcctattcaggyttttgacaatttttcttttgaattgtttgtctaattctaatttatttgtaggaacgaattctattttctagatattaatcctatgtcagttatgtatgta

SEQ ID NO: 124091 - DNA, 201 bp, Homo sapiens
atccccagtagagacctgggggccagttggataaaattcacacttatgtccattttcctttatcaaaatgaaacagaatttccaacctaaattaacactcwtttaagttcttactatatgatatctatatgggtgtgtgcatgcacacatgtactcatgtataaataggtattaacatataacacatgtacatatagtatg

SEQ ID NO: 124092 - DNA, 201 bp, Homo sapiens
agtctttctacctatctgttcatctatccatccgtccattcatccatctatccatccatgtatccatctcctaacttttaccacagaaagtttgagtttcstcacacatctctatagtaaaatataaacagataaagttcaaaattagagaacatatagaaagcacagaagtctgaggccaagagcaaattaaaacacaga

SEQ ID NO: 124093 - DNA, 201 bp, Homo sapiens
ccttgggataaagaagttaaactgatttctaaactgactctggagtcagccagagtgaggaactttctttatcatatatctatccatacatctgtctctgwatccatcagtctaccttatctttaatcatgaatttcagagtaaattttaatagtcagcatgtttcacccccgtatattgtgcatatcattaattagaatt

SEQ ID NO: 124094 - DNA, 201 bp, Homo sapiens
tctaaactgactctggagtcagccagagtgaggaactttctttatcatatatctatccatacatctgtctctgaatccatcagtctaccttatctttaatyatgaatttcagagtaaattttaatagtcagcatgtttcacccccgtatattgtgcatatcattaattagaattcaaaatttgttgatgatttttatttgt

SEQ ID NO: 124095 - DNA, 201 bp, Homo sapiens
ctaaactgactctggagtcagccagagtgaggaactttctttatcatatatctatccatacatctgtctctgaatccatcagtctaccttatctttaatcmtgaatttcagagtaaattttaatagtcagcatgtttcacccccgtatattgtgcatatcattaattagaattcaaaatttgttgatgatttttatttgtt

SEQ ID NO: 124096 - DNA, 201 bp, Homo sapiens
cctttaaagtaactcttgaggtcagatagtctatgtccttgaacttagttcttctttgacatgattgttctggatcttttggtcctttgcatttctgtatmcatttataattaagttgtcaatttctacaaaaatgcttgatccgattataattgagattgatcagtttggtgagaattgtacttttaacaatttattgaa

SEQ ID NO: 124097 - DNA, 201 bp, Homo sapiens
gtggaccgaagcagcgtctgttgcacagtacttccaggtcaggagggtgatcctgggtggaataaactgatttgtttcaaggtgtgcctctgaacacatcraggcagggtgggtggagaggagataatttctattctattgcagtggttctcaaaatgtggtcaccaggccagcagcatcagccttacatagatttaaatc

SEQ ID NO: 124098 - DNA, 201 bp, Homo sapiens
ttccctgaccaaagtgcctgtcagaaccagatgctcatgatcgtgctgactttgtgggttgtttactccccctcttttctctttcccttatagttttatgrctgcatttctcaacagcagaacatgatgcaagattttgtgaggacagccacttaccacagagccgtcctccagaatcacattgactttagagacaaggta

SEQ ID NO: 124099 - DNA, 201 bp, Homo sapiens
acctaggtccaaatctattgaatctatgtagtcagaagtctgggatctacttagaattctatgctttacatatagggccaacgtggccaggtcactatgtstctcagagcctcagcttctctgtttgtgaaagatcatgccttccctgaccaaagtgcctgtcagaaccagatgctcatgatcgtgctgactttgtgggtt

SEQ ID NO: 124100 - DNA, 201 bp, Homo sapiens
taccattacagaccatatcgaaaagccaattttttttggatcaagatttgtgaagaatctgagattttatcctatttgcaaggtaacaagttacattgccwctgtttcatgggtgctgacaaaggacatagggatcctggttcagagataaaggctttattactcagagaaagagcattagccagagtgtcagcacattgt

SEQ ID NO: 124101 - DNA, 201 bp, Homo sapiens
ttctgcaaaatttccttaacacaggctaactcagagaaaaggtatgtcatttcttcattgcctcttcctgctgcttgctgccgggaatgtagacatgattkccagagctgcagcagtcactttgtgacttccaggcactctcagatggaaagtgtgctctaagcacatcagagaagtatgcctttgccttgtccttccttg

SEQ ID NO: 124102 - DNA, 201 bp, Homo sapiens
ccatatcgaaaagccaattttttttggatcaagatttgtgaagaatctgagattttatcctatttgcaaggtaacaagttacattgcctctgtttcatggktgctgacaaaggacatagggatcctggttcagagataaaggctttattactcagagaaagagcattagccagagtgtcagcacattgtcagttctgtgag

SEQ ID NO: 124103 - DNA, 201 bp, Homo sapiens
ttaactttgcatccataccttgggctgaacttgaaatctagggtgttgtacttttaattgaagaaagttctagaaagtttcttctgaatgtagtacatttttcttttctttgggaccatggattgcattctccaacttaacagcctccatttcttaaatggcagttgtgagcgttcttgtaacagaccatggccacatgaa

SEQ ID NO: 124104 - DNA, 201 bp, Homo sapiens
gctgcttgctgccgggaatgtagacatgattgccagagctgcagcagtcactttgtgacttccaggcactctcagatggaaagtgtgctctaagcacatcrgagaagtatgcctttgccttgtccttccttgtgtctgcctaactgtggaactgctgaactgtctaattctggacttctgttatgagagagaaaaataaat

SEQ ID NO: 124105 - DNA, 201 bp, Homo sapiens
cataaatttgggtatgttgtggtttccttgctatacagttcaatatattttctaatttttattgttattttctctttgacctatggatttattttttgatscatggattatttggggatgtttaatttccaatcatttggggattttccagatatctcttggttatgatttctagttgaattctttcttgatctgggaaaa

SEQ ID NO: 124106 - DNA, 201 bp, Homo sapiens
taactttgcatccataccttgggctgaacttgaaatctagggtgttgtacttttaattgaagaaagttctagaaagtttcttctgaatgtagtacatttttcttttctttgggaccatggattgcattctccaacttaacagcctccatttcttaaatggcagttgtgagcgttcttgtaacagaccatggccacatgaag

SEQ ID NO: 124107 - DNA, 201 bp, Homo sapiens
tgcagcagtcactttgtgacttccaggcactctcagatggaaagtgtgctctaagcacatcagagaagtatgcctttgccttgtccttccttgtgtctgcmtaactgtggaactgctgaactgtctaattctggacttctgttatgagagagaaaaataaattactaattcatttaatctactataattttggggagcttt

SEQ ID NO: 124108 - DNA, 201 bp, Homo sapiens
gtatgttgtggtttccttgctatacagttcaatatattttctaatttttattgttattttctctttgacctatggatttattttttgatccatggattatktggggatgtttaatttccaatcatttggggattttccagatatctcttggttatgatttctagttgaattctttcttgatctgggaaaatgctctgtacg

SEQ ID NO: 124109 - DNA, 201 bp, Homo sapiens
aactttgcatccataccttgggctgaacttgaaatctagggtgttgtacttttaattgaagaaagttctagaaagtttcttctgaatgtagtacatttttcttttctttgggaccatggattgcattctccaacttaacagcctccatttcttaaatggcagttgtgagcgttcttgtaacagaccatggccacatgaaga

SEQ ID NO: 124110 - DNA, 201 bp, Homo sapiens
agaaatggcctgagccaactgcctggtgctgcctgcctcactggtttcaggtgcggtcaggctgtagccatggcctttgggataggatgtaagtaagctgwcctggcactcatcactccaggatttctctagccttgcatgtcaatctgtcttcacttttggacagaggagcatgtctgcctcttagtgcgtctggaccta

SEQ ID NO: 124111 - DNA, 201 bp, Homo sapiens
tatgcatgtacatgtttttgcaggagtggtcacaaggttggcaaggtgtggctacgtgctctcactgtgggtcccatgtgacatttctgggtcagtaaaamgataccattcctgtttaaggaacagggcaggactaaaggtctcccgtgggtctccaagctgtgaaacttcccacctcaagctggaagctatctcttgctc

SEQ ID NO: 124112 - DNA, 201 bp, Homo sapiens
gttgcttgtcatagagtagatggttgatcactttgttagggaaggatgataaagcggtgggtggcataggcatcctctctgagtggaatcactcttcaatrtagatgccatactccaggatcccatggatcattagtaattatacaggaagggtggggaaatgaatggtttgagaaaaactcgttttcatagctgaaatca

SEQ ID NO: 124113 - DNA, 201 bp, Homo sapiens
catgtacatgtttttgcaggagtggtcacaaggttggcaaggtgtggctacgtgctctcactgtgggtcccatgtgacatttctgggtcagtaaaaagatrccattcctgtttaaggaacagggcaggactaaaggtctcccgtgggtctccaagctgtgaaacttcccacctcaagctggaagctatctcttgctccttt

SEQ ID NO: 124114 - DNA, 201 bp, Homo sapiens
agatggttgatcactttgttagggaaggatgataaagcggtgggtggcataggcatcctctctgagtggaatcactcttcaatatagatgccatactccakgatcccatggatcattagtaattatacaggaagggtggggaaatgaatggtttgagaaaaactcgttttcatagctgaaatcagtcaacagtaccatatt

SEQ ID NO: 124115 - DNA, 201 bp, Homo sapiens
atgtacatgtttttgcaggagtggtcacaaggttggcaaggtgtggctacgtgctctcactgtgggtcccatgtgacatttctgggtcagtaaaaagataycattcctgtttaaggaacagggcaggactaaaggtctcccgtgggtctccaagctgtgaaacttcccacctcaagctggaagctatctcttgctcctttt

SEQ ID NO: 124116 - DNA, 201 bp, Homo sapiens
aagtttaattaatggacttacagtaatatctgtgaagcattgactatgtacttacaagatatctgcaaggttaattcctgttcatctatccattcatccastcattcaacaaatacttattgagagtcagttatgtgccaagtacttctttatgtgctgaagatacagcactgaagaaatagaagttcttacaattacaaa

SEQ ID NO: 124117 - DNA, 201 bp, Homo sapiens
ccagtgctttgcaccaatcttttggttggacaaaaatagtgttaggttagtgttacacaacttatgaactgtaggcttggttgttaattgtaaggctttgrgtgaagaggaaacccaaataatatattcagtttcttagaacttataagtaactttgttttaagagagtttgattcgatggctgcttttgctgacaaattc

SEQ ID NO: 124118 - DNA, 201 bp, Homo sapiens
cttcttgccttttccagcctttagaggttgcccacattacttggattgtggctacatcactctgacttttgcttccattatcatatctccttctctgattmtgaccctcctgcctccctcttacaaggactcttgtgactgttttggacccttctagataatctaaggtaatctccccatttcaccatttttagtaacatc

SEQ ID NO: 124119 - DNA, 201 bp, Homo sapiens
cctgggcaatgctggaaggggaaatgtgtttttcttcaggggcaccctctgtgcaaatgaacttcaatcacaggtgaaaccaaagctgtcactacagggtrcaactctggagcaaaaacacgctgcatagtctcctcactaccccagcggacaggcagcctctgccagcacctaccacagttagaagtaaaaccaagaaaa

SEQ ID NO: 124120 - DNA, 201 bp, Homo sapiens
caaatgtggacatccattttgactttcttatactctaaatagctggcctttcttccctctcctctggtaaacattccagctctacagaattaacagcgttyttcaaacaaatggtacctgcagatcaaaagcctcctccacatcaaaaaaaaaaaagaaaaaaaaaaagcactccttgccaaaatcttctccaaaggcaaa

SEQ ID NO: 124121 - DNA, 201 bp, Homo sapiens
tcatccagtcattcaacaaatacttattgagagtcagttatgtgccaagtacttctttatgtgctgaagatacagcactgaagaaatagaagttcttacarttacaaagctgacattttcaggaagggacacagacaataagcaaataaacatatagtgggttacgtgcgataagtgtggaaaagacaaaccagaataaga

SEQ ID NO: 124122 - DNA, 201 bp, Homo sapiens
taatggaattattctttttattgtattctttttgatttgtggcatttttctaaattttttatacttttcatttgttggttttgtagttatttttaaaccaycatttgcatcctttcctttatagggatataactgcaaaagatagagttgagagaaattttataatgaagatacatttttaaccaaagaatccttctgttt

SEQ ID NO: 124123 - DNA, 201 bp, Homo sapiens
agggacacagacaataagcaaataaacatatagtgggttacgtgcgataagtgtggaaaagacaaaccagaataagaaacagagaatagctgggaattaartcaatgtactacatataggtaattttggagggggtagcctcataataagatgacatctgagtagaaaactacaatggggatggggaggagccgtgtgcat

SEQ ID NO: 124124 - DNA, 201 bp, Homo sapiens
ttccccttacctgagcccccaaaccctggccttcagggttcccttctgcttccactgggttctcttggctgagcagagagaaggttcaactgagcccttckcatcctgcaggtactggattgtgcaggcacctggcttgtacctctctctcccttcctgctatctgcctcctggctatggcattcctcaattaccatccct

SEQ ID NO: 124125 - DNA, 201 bp, Homo sapiens
ctccccatcatatatacatctatcctattagtcctgtccctaataggatagatgctattgctctccagactgggtgacagagtgagaccctgtcttaaaartaattctctcttcggctttgattttccacaccttgattataatgtgtctcagtgtgggtttctttgagttcatcttatttggagatgaaccctgactaat

SEQ ID NO: 124126 - DNA, 201 bp, Homo sapiens
ataataagatgacatctgagtagaaaactacaatggggatggggaggagccgtgtgcatctgtgctaagggtggtccagacagagggagcagaactacaargcccttgaagcaagatgtgttcaaaggatggaggagaaggcaggagacaggatcagattgctagaggcctggtcaggtgagacactagggaccataatga

SEQ ID NO: 124127 - DNA, 201 bp, Homo sapiens
ttcgctatctgtgcaccttcctactgcacaggtttgaaagttgcagggaaaagaggggaaagactacctacacgttggctgtcactgtgtggtgttcctcrtgtgggctgcaccactccatggccaccaaatctctgttctcttcctgactgccctactctcttcccaggctttctagtatgttccaactagcaaagagat

SEQ ID NO: 124128 - DNA, 201 bp, Homo sapiens
tgacactaattcttgtttctccaattttcaaggaaataaacacagatgttaatgttaattttagattttaggaaaaagtgaaaatgagatgcttttctgtstgtcatatcaactctaactaaactacgcaaagcctcttaagccaaatgaattgagctttggaggagtgagagagggtttgtgctttttgaaccttcttgg

SEQ ID NO: 124129 - DNA, 201 bp, Homo sapiens
cctcttaattatgaatcactctaaagttggcaaagaactctatatacatgtttgcaaagaactcttatatacatgtttttccatttaacatacagaagaaycttatgaggaaagtaggagagagattttgtcacccttcaacaaatgcagataccaagtttcagggaatttaagtgccttccaaggttccacagctaaaat

SEQ ID NO: 124130 - DNA, 201 bp, Homo sapiens
aaaatcgactttgattagctttatttattgctctgaactacctcctgaatcctagggaatattttgaaaattatgtctatgtgggttttccaccgatgtcrttcattcatttgtgcatcaattcagcaaatgtttattgagatcctactatgtgccaggtactgtggtggtgctagcacatgtgtggaaagtaatttttaa

SEQ ID NO: 124131 - DNA, 201 bp, Homo sapiens
tggatggaaaactgcaatccttccatatgctcagagcaagagaaatggcatttgcaaacgactttaataactatcaaagatccagacaaaatcgactttgrttagctttatttattgctctgaactacctcctgaatcctagggaatattttgaaaattatgtctatgtgggttttccaccgatgtcgttcattcatttgt

SEQ ID NO: 124132 - DNA, 201 bp, Homo sapiens
tcctgtccctaataggatagatgctattgctctccagactgggtgacagagtgagaccctgtcttaaaagtaattctctcttcggctttgattttccacascttgattataatgtgtctcagtgtgggtttctttgagttcatcttatttggagatgaaccctgactaatacagtcagtctagataacaatttgtcaattt

SEQ ID NO: 124133 - DNA, 201 bp, Homo sapiens
acaatttgtcaattttgtttatctttttaaagaatcaaattttttattttgttgattgtcctctattgttttcctattatctatttcatttatctctgctrtaatctttattgttttttattttatttttattttttgctagctttaaggctagtccttctttttctagttccttgtcattaaggtaggttgttgatttga

SEQ ID NO: 124134 - DNA, 201 bp, Homo sapiens
tctccataccaagaatcagcctgaagtgtaaactttcactgggcatatgcagtaacttactaatttcccctatgtatgcagatgcttttgaatgccctagsctttaatgtctgactcccaaaaggggaaaatagaaaaatgatggaaatcagggtgtcaacctttgaaatctcctggaagttttggagagagaagcttatg

SEQ ID NO: 124135 - DNA, 201 bp, Homo sapiens
tttgtttatctttttaaagaatcaaattttttattttgttgattgtcctctattgttttcctattatctatttcatttatctctgctataatctttattgktttttattttatttttattttttgctagctttaaggctagtccttctttttctagttccttgtcattaaggtaggttgttgatttgagattttgattgtt

SEQ ID NO: 124136 - DNA, 201 bp, Homo sapiens
agtttctacataagtggttatatcagctgtgattagagacagttttactttcttcctatcctgtctgtatgtctcgccttccttccttttttttctttttyttttttttgccttattgcatcagctaggtgctctagtacaatgtacaatgttgtatagaagagagtgagcatccttgcctctttcatgaactcgagagta

SEQ ID NO: 124137 - DNA, 201 bp, Homo sapiens
taattaacttgaccaagattactaggaagtgtgaaagtagagacttgaactcaggttctttcgtcttagaagcaagtgctctaccactgcactgtgctatmcacacacacacacacacacacaaaagggaaaaggaagaaaaaaagagttataaagaggtaacagaataaattaaatccctgaactaaaatgaaaaattgt

SEQ ID NO: 124138 - DNA, 201 bp, Homo sapiens
tcatttttattttagtctgttaatatatggatttttcaatgctaaaacaaccttgaatttctgagttaaacctcattgtcatgatgtatgacccttttaasatattgctagatgaagtttgctagaattttataaatgatttttgtgtctgtgtttatttggtattgctttgtagttttcttaatgcctttgtggggcttg

SEQ ID NO: 124139 - DNA, 201 bp, Homo sapiens
gcttgaaaccaggaggcagaggctgcagtaagccgatattgcgccactgcactccagcctgggtgacagagtgggactctctcaaaaaaaagaaaaaaaaygttctatatatcaaaaacagataaaacttttccctgtcagattgcgtcccttctttcccttcatagtctggttgccactgtttcttttatatttctcttt

SEQ ID NO: 124140 - DNA, 201 bp, Homo sapiens
agtctgttaatatatggatttttcaatgctaaaacaaccttgaatttctgagttaaacctcattgtcatgatgtatgacccttttaacatattgctagatkaagtttgctagaattttataaatgatttttgtgtctgtgtttatttggtattgctttgtagttttcttaatgcctttgtggggcttgggtatcagagtaa

SEQ ID NO: 124141 - DNA, 201 bp, Homo sapiens
ataagttaaaaataatattcataggatggatacagtatcatttatgcattcatttccctattaatgacttctagtttgtttcaacattttattattatcartattatatatattatatattatatagtacacatgttcaaattttttctagaatgtatgcttctggggggtggtatttccaaattataagtacatctttaa

SEQ ID NO: 124142 - DNA, 201 bp, Homo sapiens
aggaatggttgaatgggagaaggaaaccaaagtggaggagatttttgagaggtaatgtcaaggaggtaaagagttttttccatttggtttgtggccgctasaccttcttgcccatacagaactgaccctgggaagctgttctttctgggcctgaaaatgacttctctcattagtgattaatgttacctattcaggggtctt

SEQ ID NO: 124143 - DNA, 201 bp, Homo sapiens
ggatggatacagtatcatttatgcattcatttccctattaatgacttctagtttgtttcaacattttattattatcaatattatatatattatatattatmtagtacacatgttcaaattttttctagaatgtatgcttctggggggtggtatttccaaattataagtacatctttaacttgacaataatgccaagtgatt

SEQ ID NO: 124144 - DNA, 201 bp, Homo sapiens
taataagcatattttcatgtttgttagactttatgacttcaaaaatatataaataatagtccacatgagaattcctgtaatttgcttaaccaatcgcctawagtagaacatttaaatagtttctgcttttttctatcataaataatattttttctattataattagtagtagcaactttgaaaattataaataaatagacg

SEQ ID NO: 124145 - DNA, 201 bp, Homo sapiens
ctgaagaataggtactattatgattcccattttataggtaaagtaatggactccaaggaaattatgcatcttggccacaggccacagctagtaaatggagratctaaactagcaaccgaggccttcacctccaaaatgcttgcttcttttcatgctttgagacagactataattacgtgctatattgtgtagtacagcctc

SEQ ID NO: 124146 - DNA, 201 bp, Homo sapiens
taatattttttctattataattagtagtagcaactttgaaaattataaataaatagacgtctttgggaggggtagcttttggatggtttcattcagatcartcctaagaggttggacaactctgccaaaggatatgaactttttgttttttgctctgctacatgctgccaaattgcttcccaaaacacatgttctgttttg

SEQ ID NO: 124147 - DNA, 201 bp, Homo sapiens
ctgtaccccactgcagccggcgtcatggcagcggctgcttcgcacaggctgccgctgccatcgttaccatgctgaccatcaggtagtattaaacgggattsctggctctctcaggaccatcttcaaaagatcaaatgaactacatccaggacagtttatacggcagataaacgaatttatacactggcttttatctcctca

SEQ ID NO: 124148 - DNA, 201 bp, Homo sapiens
gggtcatatgccacacctgttactgagggtagactaagttcacatggaactttttggacagaatgtggagaagagatgaatccgcactgctaaacaaattytggatagtcagaaaacacacacacacacacacacacacacacacacaccccaaatgcctgctccagagattttttatagagtaaatgatatatcctagta

SEQ ID NO: 124149 - DNA, 201 bp, Homo sapiens
ctgattcttacgactgtaaattccacaggaaagcctgccttttcctaataacttaagcaaagagctccagatttagtttaggtagttcagtgaggttatcbtaccttggattatgtgctcatctacggatcaatcactgtcttcaggggaaaagtagtgctctgacttgccaatctggggtcatatgccacacctgttact

SEQ ID NO: 124150 - DNA, 201 bp, Homo sapiens
ctgggcccccaagagcgcagagatgcctgggtctgcagccaccctgcagcggctgcagctgcaccctagaagctcttgctccaaattggaaggggcggggytctcgcctgtctccaggtcccaccagctccgtggagcttgcagccctggtggcgcctccttgcagcctgaggcgggggcttcatgtcctcactgggcccg

SEQ ID NO: 124151 - DNA, 201 bp, Homo sapiens
gacccgtccccttctgcccaggagcctgtctgcctccagccactgtccatgccttcatgccaaggggcgcctgcaggccagtgctgggctgtcctcagccrcccctaagcctccctttcatgtttgtcagagcccaaagtctagaggaggtcgaggtggcagggggctggtgtgttaacactgccgcaatcgtgtgcacac

SEQ ID NO: 124152 - DNA, 201 bp, Homo sapiens
tttgttttttttttttactttgaatactttttcctcaatgttcacatggtcaattcttttaactccatgaagtctttgtcaaatgccaccttctcaatgaratctaccctgaccatcctattttaaattgtacccataccatgcccaacccttctttttcaattctgtgtttttcctcgaacacttacagcatcctaaaag

SEQ ID NO: 124153 - DNA, 201 bp, Homo sapiens
caaaccgtcaagtaattatattggttctattttcaaaatgtatccagaatcacaccaatttttattatattctctgtttcctcgttttctcaacaccatcrtctctcatctagattactgcaatagcttcttacctgtctcttctcaacagagccaaagcctcgcaggagcttcttcatagtctggctcctaggtactctc

SEQ ID NO: 124154 - DNA, 201 bp, Homo sapiens
ttatcctctccatcattcaagccaagaattttgaaggcctctctttctttatctcctgaatccaaaccgtcaagtaattatattggttctattttcaaaaygtatccagaatcacaccaatttttattatattctctgtttcctcgttttctcaacaccatcatctctcatctagattactgcaatagcttcttacctgtc

SEQ ID NO: 124155 - DNA, 201 bp, Homo sapiens
aacaatttttactcaatatttttaaagcttggtgttttggtttttgtgttttgtttctgtctgcaaatcttgctattgagaattccaatgccattctgacwcctgctcctttagagtaacaaagttttcccctctagatgcttttagtatcttctctttatttctagtgttctaatgagaatcttttttcagttcttgtgc

SEQ ID NO: 124156 - DNA, 201 bp, Homo sapiens
  misc_feature (1)...(201): n = A,T,C or G
tctcagaatttagcataaagaaatataggcctagatcattatttggttaaattaagaatcagcgtttccagtgttatgatgtaatgtaactattgttgaantctgagtcagttggtatagtagatgctctatgcttatgtatgttttctcatatagtcttttgtttttcctggagttaattgtcttggtttctttcattag

SEQ ID NO: 124157 - DNA, 201 bp, Homo sapiens
taaggaacatataagaaatcaaagattcaatttattcctagacacacacccttctcctgctagcaactaccaacagtactgttatgccacattctcaacaycctttgtggctatagcgacatttttgaatccttgcttttgtttcctcgttcctggagttacatatgtctcccatcaggttagtgtccccttggctgttaa

SEQ ID NO: 124158 - DNA, 201 bp, Homo sapiens
taattctggtagagcacagcacattaagacacaaaagttgcttaactgtcaaacagcacaacctggattccgcacccccaacaccatcccacttctctctstctctctctcatttatctttctaccttccttcttctcttttttcaaaggaagaaaacttcttaatggggatgagtagcattttttttgtcagaataggat

SEQ ID NO: 124159 - DNA, 201 bp, Homo sapiens
cttttttatggatgcatagtattccatggtgtatatgtgtcacattttctttatctagtctatcattgatgggcatttgggtcagttccaagtctttgctrttgtgaacagtgccacaataaacatgcatgtgcacgtgtctttagagtagaatggtttataatcttttgggtatatacccagtaatgggattgctgggtc

SEQ ID NO: 124160 - DNA, 201 bp, Homo sapiens
aaatggtatttgtagttctagatccttgaggaatcacaatactgtcttccacaatgtttgaaccaatttacactcccaccaatagtgtaaaagcatttctstttctccacatcctctccatcatctgttgtttcctgactttttaatgatcaccattctaactggcatgagatagtatctcattgtgttattgatttgcat

SEQ ID NO: 124161 - DNA, 201 bp, Homo sapiens
tgagatagtatctcattgtgttattgatttgcatttctctagtgaccagtgatgatgagctttttttcatatgtttgttggctgcataaatgtcttctttkgagaagtgtctgttcagatccttcacccactttttgatggggttgttttttttttcttgtaaatttatttaagttctttgtagattctgaatattagccc

SEQ ID NO: 124162 - DNA, 201 bp, Homo sapiens
tctttgacttatgtattcctttgcactttctcatttgatttgatccttgaaataacactgaagaataggtactattatgattcccattttataggtaaagwaatggactccaaggaaattatgcatcttggccacaggccacagctagtaaatggaggatctaaactagcaaccgaggccttcacctccaaaatgcttgct

SEQ ID NO: 124163 - DNA, 201 bp, Homo sapiens
ccatgctgttttggttactgtagccttgtagtatagtttgaagtcaggtaacatgatgtccccagctttgttctttttgcttatgattgtcttggctatgygggctcctttttggttccatatgaaatttaaagtagtttttttccagttctgtgaagaaagtcaatggtagtttgatggggatagcactgagtctataaa

SEQ ID NO: 124164 - DNA, 201 bp, Homo sapiens
tgtattcctttgcactttctcatttgatttgatccttgaaataacactgaagaataggtactattatgattcccattttataggtaaagtaatggactccmaggaaattatgcatcttggccacaggccacagctagtaaatggaggatctaaactagcaaccgaggccttcacctccaaaatgcttgcttcttttcatgc

SEQ ID NO: 124165 - DNA, 201 bp, Homo sapiens
agccagtggctagggaagaacagagaaggaaaatctattttctcaaacagcaggagggtcaagcggctttggagatctaaagtcgtgctcttggttgggawagtgggaggaccaaggaaactgcatttcagcacttggacagcacagaacagcacagagttggggggccatctgtcaggggagatcaagggtaggagctca

SEQ ID NO: 124166 - DNA, 201 bp, Homo sapiens
ttcagcttctaaactgaacaggaataagtaaacaaccatctatagtacatgtaagttattgaaaacccttctaaatgagacaagaacagcagcatatcagrtggaattactgccctgatctctcttggaacttacccctgtacctaaaaggatgaattctgctgctaccacctgaagtgtgtgtgtgtatgtgtacgtgta

SEQ ID NO: 124167 - DNA, 201 bp, Homo sapiens
ttttttctgtaaagggtcagacagtaaatactttaggctccatgggccatgggcttagttgcaaccactcagctctgtcattgtagcatgaaagcagccayagacaatatgcgtagaaatgaatgtggctgtgctaccgtaacactttatttatggacactgaaatttgaatttcatatgattttcatttgtcacaaaata

SEQ ID NO: 124168 - DNA, 201 bp, Homo sapiens
cagcaggagggtcaagcggctttggagatctaaagtcgtgctcttggttgggaaagtgggaggaccaaggaaactgcatttcagcacttggacagcacagmacagcacagagttggggggccatctgtcaggggagatcaagggtaggagctcaaaggccttcctgccagcaaatatcattcttgataatctccttgcaag

SEQ ID NO: 124169 - DNA, 201 bp, Homo sapiens
agaggctttaagtgacttccccaaggtcacatagctctttggtgataaaggtagaactaaaatttgtatcttcagattcctgatcttgtgtgaaactgatyaaaaatagattaagtcacaagatgcaatgacctgaaggcaggcctatttgctcccttccaggcatgtgatgtgtccttctttgccagtgagaataatgag

SEQ ID NO: 124170 - DNA, 201 bp, Homo sapiens
ccttaaagacgaagataacaaagtgacttcttgtaaattactggaacctccatatggttttaatagcatacagttctccaaattgttttctgttatattaygtataaatcataggacatacttctgagactaaaataataaaaagtgatattcagatgctaacagctaatctcacttccagaaagaattgataaatcctat

SEQ ID NO: 124171 - DNA, 201 bp, Homo sapiens
agcggctttggagatctaaagtcgtgctcttggttgggaaagtgggaggaccaaggaaactgcatttcagcacttggacagcacagaacagcacagagttggggggccatctgtcaggggagatcaagggtaggagctcaaaggccttcctgccagcaaatatcattcttgataatctccttgcaagtttatttatttatt

SEQ ID NO: 124172 - DNA, 201 bp, Homo sapiens
caaggtcacatagctctttggtgataaaggtagaactaaaatttgtatcttcagattcctgatcttgtgtgaaactgatcaaaaatagattaagtcacaasatgcaatgacctgaaggcaggcctatttgctcccttccaggcatgtgatgtgtccttctttgccagtgagaataatgagacctaaaattatttcctgtgg

SEQ ID NO: 124173 - DNA, 201 bp, Homo sapiens
gaacctccatatggttttaatagcatacagttctccaaattgttttctgttatattacgtataaatcataggacatacttctgagactaaaataataaaargtgatattcagatgctaacagctaatctcacttccagaaagaattgataaatcctataacaacagtactgataaattcagtttgtttgtctcctgaagtc

SEQ ID NO: 124174 - DNA, 201 bp, Homo sapiens
ctcaaaggccttcctgccagcaaatatcattcttgataatctccttgcaagtttatttatttatttacttatttagagacaaggtctcactctgtcacccrtgctggagtgcagtggcatgatcttggctcactacaacctctgcctcccaggttcaagcaattctcctgcctcagcctcccaagtagctgggactataag

SEQ ID NO: 124175 - DNA, 201 bp, Homo sapiens
ttgctcccttccaggcatgtgatgtgtccttctttgccagtgagaataatgagacctaaaattatttcctgtggacccaaaattgcacttctgacagctcmtgaaatcctctctctgaaaccttattacatctctgctctccctaaagattcaagagtctagggatgtcctctctaaattctgcatataaggcctacatca

SEQ ID NO: 124176 - DNA, 201 bp, Homo sapiens
ataaatcataggacatacttctgagactaaaataataaaaagtgatattcagatgctaacagctaatctcacttccagaaagaattgataaatcctataayaacagtactgataaattcagtttgtttgtctcctgaagtcttcctggatcaacattacccacgaattctttcatgtgctgtctgctcatgtcctgtgctg

SEQ ID NO: 124177 - DNA, 201 bp, Homo sapiens
aaccttattacatctctgctctccctaaagattcaagagtctagggatgtcctctctaaattctgcatataaggcctacatcacagatattcacctgaatrtcttattatgttgtgccctccagcaacacttagagagcaactccccttccagcgtcctgttccaagttgacaagtctgtggcaagaggcaatttcttatc

SEQ ID NO: 124178 - DNA, 201 bp, Homo sapiens
tggcaggaatgagcctaaagtcttctaagaaggcctgtgttcaggcaggaagacctggcagaaggctacctcagctcgtcagaagggtgatcgtgttccartgatagtcaaggaagaagagtagagatcatgaagatcaagagtgaaaagtgtcagatgcatggggtgacttggaggccaagaaataagaaagaggcccga

SEQ ID NO: 124179 - DNA, 201 bp, Homo sapiens
caatgtctgattgaaaacataccttgcctatatctggaatactagtaatttttatgtttttgtttatttgttaatttacatttctctttttaagtaaaaasgttttttttttcttgacagagtctcactctgtcacctaggctggagtgcagtggcaagatctcagctcactacaacctccctcccctgagttcaagggat

SEQ ID NO: 124180 - DNA, 201 bp, Homo sapiens
gattacattgctattctcgtcactctctgcttgagaatttagctttcctgaatagcagctccttccttcctgatgcacctaccccacccccattctctcartatatttagataggtcctcagttcctttatcccaacccttggtgccagatatgtttcagaattcagaagaaggactttggaaagttaatatcacctacca

SEQ ID NO: 124181 - DNA, 201 bp, Homo sapiens
ttttttttttcttgacagagtctcactctgtcacctaggctggagtgcagtggcaagatctcagctcactacaacctccctcccctgagttcaagggatcmtcccacctcagcctcctgagtagctgattacaggcgtactccaccacgtccgactaactttttttgtatatttagtagaatcgagtttcaccatgttagc

SEQ ID NO: 124182 - DNA, 201 bp, Homo sapiens
tctgtatgatgagatttgtaatgtagttaattcacgtgcatcacctgagcccctcttaaactgagtatttagataatatctaggtatcttttctccccggrtatttgaaatgaatatgacattttatactgggctatatatctttaggcaagtagaaatgaatactgattttattggctttctaggctatgtattcctcag

SEQ ID NO: 124183 - DNA, 201 bp, Homo sapiens
ggttttttttttcttgacagagtctcactctgtcacctaggctggagtgcagtggcaagatctcagctcactacaacctccctcccctgagttcaagggaycctcccacctcagcctcctgagtagctgattacaggcgtactccaccacgtccgactaactttttttgtatatttagtagaatcgagtttcaccatgtta

SEQ ID NO: 124184 - DNA, 201 bp, Homo sapiens
aatattactatatattaaaattcctatatatgaatacctctcctagattccatgctcctctgtttattccccaaagttactaacatcttaagttttatctwtagcataagagttttaaaaaattataccctaattaatacagtttacttttgaatacgtttgaccatttttataaaataaatcacactatatattcttcag

SEQ ID NO: 124185 - DNA, 201 bp, Homo sapiens
taaccattggtttttaaattatagcttctttattactaatttctttagattcatctcttatttatgtagattttgttgccactttggttcagcattttttmaaggaggtctcatgtgtgctacatgtcctgagttctttcatgttgacaatgtccatttattatctttataggtgaataacaccttctctggatttaatct

SEQ ID NO: 124186 - DNA, 201 bp, Homo sapiens
tttgaaatctagtacattttattttgtacttgacaccccatgtgaattttgactagccccatttcaagggctccgtcacctcctgtgactactggctatcrtagtgctcagtgcaggtcttgagggaaagataaaggcatagatggttatttcaaagtaatggggagagcgatgggacagaagtccagcgggcattgtgag

SEQ ID NO: 124187 - DNA, 201 bp, Homo sapiens
gctccgtcacctcctgtgactactggctatcatagtgctcagtgcaggtcttgagggaaagataaaggcatagatggttatttcaaagtaatggggagagygatgggacagaagtccagcgggcattgtgagaccacagcaaagggacacttagcccaacctggaactccagggaagcttccagaggaagacacctgggct

SEQ ID NO: 124188 - DNA, 201 bp, Homo sapiens
taaaagcagaatgaggctcagtcatgaagggccttgtaggaggagccaaggagtatgattttctgtgcatgaccctcttcagctttacagtgttcttccaygtacactaggacatttgggaagagcagcggccctcaaagtaggcatttgtggtgaccaagactgctagttgtctccccgttctattctctccttccacac

SEQ ID NO: 124189 - DNA, 201 bp, Homo sapiens
acatgattgccagagctgcagcagtcactttgtgacttccaggcactctcagatggaaagtgtgctctaagcacatcagagaagtatgcctttgccttgtycttccttgtgtctgcctaactgtggaactgctgaactgtctaattctggacttctgttatgagagagaaaaataaattactaattcatttaatctactat

SEQ ID NO: 124190 - DNA, 201 bp, Homo sapiens
gttcatctttcttgctaagtagtagtcacaatttgtttattctcattttgatggatattgaggctgtttccagattttgtctattatgaatatggctgctrtaaatattctcattccaatatatttctatacatatttttttcatttctcgagtcaaaaatctaagagtaaaattcctgggtcatacagtaagtgcatgat

SEQ ID NO: 124191 - DNA, 201 bp, Homo sapiens
ctagcacagggtgataatactcaaatctgtcaattctgcaacttgtcagctgctctacagagggcttggtgggaaaggaggttgctgactcaaagctaaaygtaattttatatcatctgcagaactcagtcaaccgcaagacacatattgcttgcaagttgaccacatcagtcaatggtttattgagcatcttcattgacc

SEQ ID NO: 124192 - DNA, 201 bp, Homo sapiens
tgcaagtttatttatttatttacttatttagagacaaggtctcactctgtcacccgtgctggagtgcagtggcatgatcttggctcactacaacctctgcytcccaggttcaagcaattctcctgcctcagcctcccaagtagctgggactataagtgcctgccaccacgcatggctaatttttgtaattttagtagagat

SEQ ID NO: 124193 - DNA, 201 bp, Homo sapiens
cgtgctggagtgcagtggcatgatcttggctcactacaacctctgcctcccaggttcaagcaattctcctgcctcagcctcccaagtagctgggactatargtgcctgccaccacgcatggctaatttttgtaattttagtagagatgaggtttcagcatgttgcctaggctgttctcgaactcctgagctcaagtgttcc

SEQ ID NO: 124194 - DNA, 201 bp, Homo sapiens
tttatctcttttcttgccctatagggtaactgtttggctgtcaacagccccagctgagcctctgactcattggtaccaggtgcagtgcctcctgcagactmctctctttgccaaggaagggaagacactgtcagggaaagtgctgtttgtagccaataaatggtaagcaggaaagtacagatgtgctttcacctctgtttc

SEQ ID NO: 124195 - DNA, 201 bp, Homo sapiens
ggcatgatcttggctcactacaacctctgcctcccaggttcaagcaattctcctgcctcagcctcccaagtagctgggactataagtgcctgccaccacgsatggctaatttttgtaattttagtagagatgaggtttcagcatgttgcctaggctgttctcgaactcctgagctcaagtgttcctcccgccacaacctcc

SEQ ID NO: 124196 - DNA, 201 bp, Homo sapiens
gtggaatcactcttcaatatagatgccatactccaggatcccatggatcattagtaattatacaggaagggtggggaaatgaatggtttgagaaaaactcrttttcatagctgaaatcagtcaacagtaccatattcatataaaaatatgttgtttgggaatgatagtgactgactcaccagaacttatctgatagctcta

SEQ ID NO: 124197 - DNA, 201 bp, Homo sapiens
ataagtgcctgccaccacgcatggctaatttttgtaattttagtagagatgaggtttcagcatgttgcctaggctgttctcgaactcctgagctcaagtgwtcctcccgccacaacctcccaaagtgctgggattacaggggtgagcccaatttatttcaactcaacttcatttccccttctttctctccccaccccaggt

SEQ ID NO: 124198 - DNA, 201 bp, Homo sapiens
aatgatgatagaatagcattccaagagtcgctggccatggatgaatactgacaatggatgacatgttcaaatagttttcttcgttattcctccatagatcmgagattacttgattttaaaaaacaaagtaagaaagacattttgtatgctcacaggggatttgttggtgagcagcaccctagaagataggattaatgtgaa

SEQ ID NO: 124199 - DNA, 201 bp, Homo sapiens
ttttatgattttgtggtgctcaaaaatagaagggaagtacttgatattttaagttgcagactttttgtccatgaagttttgtaatggggccttgagtataygggaagcacagactcaaatgcctatgcagcccaagcaagtcatggaaatgcatgaagagggctggttgcaaagaagagagaatggggcaactatggcaac

SEQ ID NO: 124200 - DNA, 201 bp, Homo sapiens
ttaatgtgaaaggtatcctagccatttgaagaagtgatcagaaattaagaaggtgccactgaattataacaagtgcatagtacattgcacttaggatgggyaaagggattaagctacaaaaatacaaaatggaaggactcagacaggctgtaaatacaatgagcaaagatctacaagtctcagagaggaacaactctctga

SEQ ID NO: 124201 - DNA, 201 bp, Homo sapiens
aatggggcaactatggcaactggaggtctcatgtccattcaaaaggttgcagtagctacttccctcatgtcggttgttgctacacagtaattcagaccccwgtgtgccctgtcatactatttaaggtagaaatccttgtttcctgtgacattcttctgacttttaaaacacatcatggccaaattaaatattcctacagac

SEQ ID NO: 124202 - DNA, 201 bp, Homo sapiens
agccatttgaagaagtgatcagaaattaagaaggtgccactgaattataacaagtgcatagtacattgcacttaggatgggtaaagggattaagctacaamaatacaaaatggaaggactcagacaggctgtaaatacaatgagcaaagatctacaagtctcagagaggaacaactctctgagttgtttatatatttatgc

SEQ ID NO: 124203 - DNA, 201 bp, Homo sapiens
aaatttgaaatctcaagtcttccaggtacaaaatactttctttcctctgtcttgtaccagctatagcatttctcaactgagtttgtaagtgtttttgtctsattcatttatggataatatataaagggaaagcccagagagattttgaagtctacgtattatgcaaagtttcctcttggcaaaataaagtgccccaagcat

SEQ ID NO: 124204 - DNA, 201 bp, Homo sapiens
cagctgttatattctatttttttctctgtgtacttatagatgtgaatgtttaacaaaatgatgcttaagtattgcttcatatattccttcttttatttgaygtaagcaagtgtctatcctatatcataattcttgaaaatgtagttttcaatggcattatatgaatatatagcactatttaataatttcccattgttgaat

SEQ ID NO: 124205 - DNA, 201 bp, Homo sapiens
ccatttgaagaagtgatcagaaattaagaaggtgccactgaattataacaagtgcatagtacattgcacttaggatgggtaaagggattaagctacaaaartacaaaatggaaggactcagacaggctgtaaatacaatgagcaaagatctacaagtctcagagaggaacaactctctgagttgtttatatatttatgctg

SEQ ID NO: 124206 - DNA, 201 bp, Homo sapiens
ctaattgaataatagctcatgctacaacataaataaattagtccctctgtgaatacatgttaaatgctccagaaggtgcattctggccttacgtagtgaaygaaggtaccatttatctttctataagtctggtgaccttcaaatgactaggaggttgtctgaaattccatcttcatcccaagtaatattaatatggggtgg

SEQ ID NO: 124207 - DNA, 201 bp, Homo sapiens
gaaattaagaaggtgccactgaattataacaagtgcatagtacattgcacttaggatgggtaaagggattaagctacaaaaatacaaaatggaaggactcwgacaggctgtaaatacaatgagcaaagatctacaagtctcagagaggaacaactctctgagttgtttatatatttatgctggcaaatataagatgtttac

SEQ ID NO: 124208 - DNA, 201 bp, Homo sapiens
agtcttccttttgggttagataaggctggctcaaggctagtccattggcattgatcccctggccacagaaatggattcagagatgggtctttaattgaacrtggttcaacaagactcaatatggggcttttgttggaacactttggagggactgaggttgctgagcttgtagcagtgttgttttagagttgctggtaatca

SEQ ID NO: 124209 - DNA, 201 bp, Homo sapiens
tatatttatgctggcaaatataagatgtttactagaaaatatgttttcaggcagtagaaagacataaatataataattcaatcaccctgtcatatttggcwttcagaagaaatacattagaaacataataaatgtatttctcttcagggtgcctcttttaaaagagtttaaatttattaaataaaatatcaaggacatcaa

SEQ ID NO: 124210 - DNA, 201 bp, Homo sapiens
gttttgaagatatgcatgaagatcatctctgatttgaaaaaacatgatctcaattgttttgccataagattcttgacagttaaagacttgactaatacacraaatactcccaacaatagtcctacccagtgctttgcaccaatcttttggttggacaaaaatagtgttaggttagtgttacacaacttatgaactgtaggc

SEQ ID NO: 124211 - DNA, 201 bp, Homo sapiens
ttatctttttcagatgctagtgaaaaacaatcacctttcagacaagatcattgttttgccaggaaaaactgaagacgtctcacttcctgaggctgtagatrtgatcatttccgaaccaatgggatacatgctgttcaatgaacggatgctagagagttatcttcattccaaaaaatggctaaaatcaaatggtaagttggc

SEQ ID NO: 124212 - DNA, 201 bp, Homo sapiens
attctttttaaagaggagaaaaaagcactaaaagggggaaattagcttgaagtttgatgaagctgtgcatttttctagttttttcatgtatcagtaggaamatacagtgtcttataataatgctatttatgttgggcactcagagaatctgctttatatctaaacgctttttgctactttactaagtaaacaaacccttgt

SEQ ID NO: 124213 - DNA, 201 bp, Homo sapiens
ttcaatgaacggatgctagagagttatcttcattccaaaaaatggctaaaatcaaatggtaagttggcccattcttggtttaaaaaacagtctaacttctstgtaaaattttgccactctctgtcccctacatctggttctgtacagaaagaaggagagagcatttctgttatactcaattatttgtttttctcatctcat

SEQ ID NO: 124214 - DNA, 201 bp, Homo sapiens
atgattagactttttaagtaaatagatggagcccaaatatttaagtttacacacctatgattagggaagaaataagtaaatgagaaaataaactccttatyctgaagtaattgctttagaagacgtgaaccagtcaagaggtagaagtcgaaatggatcaaaaaaggagaaagaggatgaggaggaaaaataaagagaaga

SEQ ID NO: 124215 - DNA, 201 bp, Homo sapiens
catctgacactgaagcctacactcataacttgggcacacacactagctttccactcttcaccagagaaagttggcacattccaacagcaggtgttttcaawtaaagcatggcagataacttgccaattttaagttgcatctcatgagaatttcagctccttccccagttgtatttacttaaattaccaatgttgtagctcc

SEQ ID NO: 124216 - DNA, 201 bp, Homo sapiens
ccttggcttgaagattgccttcttttctctgtgtcttcccataagctgtcctctgtagttgcctgtgtcctaatctcctcttcttataaggacaccagtcrtattgaattggggcccactctaatgactttattttaacttaatctctttaaagaccctgtctctaaattcagtcacattctgagccaccaggggttagaa

SEQ ID NO: 124217 - DNA, 201 bp, Homo sapiens
cacatggctttctattctttgtcatgtccattctgctattgagcccatcagtgaagtttttattttggttatcatatttttcagtgccaaaatttccattkggcactttgttatatcatctgtttcttggctgacactttctattttccattggttttagtggtattcatgattgccggttggaactttttaaataatagc

SEQ ID NO: 124218 - DNA, 201 bp, Homo sapiens
ccagctactctggaagctgaggcaggaggattgcttgagcacaggaggccaaggttgcaatgggccctgatggtgccactgcactccagcctggatgacaraatgagactcctgtctcaataaataaactaattaattaattaataggggatttttttcttattcatcatgggaatgattggttttctggagtacaccagt

SEQ ID NO: 124219 - DNA, 201 bp, Homo sapiens
aggttgcaatgggccctgatggtgccactgcactccagcctggatgacaaaatgagactcctgtctcaataaataaactaattaattaattaataggggatttttttcttattcatcatgggaatgattggttttctggagtacaccagttactgaccttggtaatggtgagcaagccagaaacaggcttccttccctcat

SEQ ID NO: 124220 - DNA, 201 bp, Homo sapiens
aagctttgcctcaagtccttgtcccccttcctcctttctgcctacccaaatgtctccttcttcctttggttcacagttcacctcctctaagcagccttccytgatggaacacacagagctccgtcccctggatctttgaatacaaattattctaaaaacattttgtgtgtaacaatgtattgctttgcagtagttctcgtg

SEQ ID NO: 124221 - DNA, 201 bp, Homo sapiens
ctcctctaagcagccttccctgatggaacacacagagctccgtcccctggatctttgaatacaaattattctaaaaacattttgtgtgtaacaatgtattsctttgcagtagttctcgtgtgtgtccgtttcttctgtctctctctctctctctcctctctctctcctcgtcacatattccttgatgggggaagtctcatt

SEQ ID NO: 124222 - DNA, 201 bp, Homo sapiens
tttccaacctaaattaacactcttttaagttcttactatatgatatctatatgggtgtgtgcatgcacacatgtactcatgtataaataggtattaacatwtaacacatgtacatatagtatgtatgcatgtggattttatctatctgtctacctagcaagagagaaagagagagagagtctgagctctctgcctctgcac

SEQ ID NO: 124223 - DNA, 201 bp, Homo sapiens
ctggaatgcagatattggtgctggaatgaacagtggcctggctggtttgtctcagagcaaactgtgtctgtagttctcttccatctgtatgatggagatcrtaatatctcttggcaatggggattggattaagtggcactatgaatgtgaaaatggtactaaatggagcacttcctgagtgcgtgtttgcttttgaccctg

SEQ ID NO: 124224 - DNA, 201 bp, Homo sapiens
tgttctggatcttttggtcctttgcatttctgtatccatttataattaagttgtcaatttctacaaaaatgcttgatccgattataattgagattgatcartttggtgagaattgtacttttaacaatttattgaatgtattgagcaatttattgaaaaggcaaaagagagcaactgtccctgacagtttccaaattatag

SEQ ID NO: 124225 - DNA, 201 bp, Homo sapiens
acaaactgtgttttctgatgtatgtctgaagtgttcaacaaggtcttctcacactgacttgttggaactataaactttctccatgttatattatctctggsaattgttcagcttagaaaaattagagctccttgaagttattcttttcccatagaggtttttgtccacttgcggaaacttaccatatatatgcgctgctta

SEQ ID NO: 124226 - DNA, 201 bp, Homo sapiens
tagctctatcctcgctgccaagaaatggcctgagccaactgcctggtgctgcctgcctcactggtttcaggtgcggtcaggctgtagccatggcctttggrataggatgtaagtaagctgacctggcactcatcactccaggatttctctagccttgcatgtcaatctgtcttcacttttggacagaggagcatgtctgcc

SEQ ID NO: 124227 - DNA, 201 bp, Homo sapiens
tagcatggagctgctatgtccttggtaaaatatctacatgacagagaaaattacatttgtgtatttgtgatcaaaaaaattacaagacacaatggtttacagcctgagagcttataatagtagttccaccaggtcattccttttagaaacagtgtgggtagatgtgtcctttgaaaggagttctcattttactcatgatgt

SEQ ID NO: 124228 - DNA, 201 bp, Homo sapiens
ccaaagtcgctgaggagaggggagaaatcaacaattaagtttcttttcctttttacagaggttttttttatttattaatttttttgactctttacacaccrtgtggaaacatagacacttttctttatttatacacatttatttaaccattaaaataaaagtgagggtaaattgtgaaaaaacaaaaacaaaaacaaaaac

SEQ ID NO: 124229 - DNA, 201 bp, Homo sapiens
cataaatcagagacaggtgaatcaaggagccgttcatgcaacatcaaacatccggaaagctatcctgctgctaaaacaatatcctcccctgcctgctgttkctctcttcccatttttcaccatccacttctttgactcagggcaatggcttctgttaggacttgaccttgtcagagaacatatcaatcagtacacctgata

SEQ ID NO: 124230 - DNA, 201 bp, Homo sapiens
aagctggtcttggtacttacttgataccatagctagagaaaaatcaatcttttcctagagtatgagaatgtttttattcttttattattattattattatwataatactttgagttttagggtacatgtgcacaacgtgcaggttagttacatatgtatacatgtgccatgctggtgtgctgcacccattaactcgtcatt

SEQ ID NO: 124231 - DNA, 201 bp, Homo sapiens
accctaaatgattacatttgaattatgacctcctgaggaaatgcagagatgaaagggttacgaattttaagtagcagaatagaccagaccaacaaactagwggtttgttgtccaggcagtccttgcgtgaccttccaaccataccatctgctgccatcttactaacttgaggatattaatgatcacagtggtttggctcag

SEQ ID NO: 124232 - DNA, 201 bp, Homo sapiens
aaacaagaggctgtgattttcggtttgttaaatgtggcccctgtattaagattataaatagctgtgactatagtgtctgccgtggactgaattgtgtcccrtccagattcacatgttgaaatcctaaccccagtgtggctgtatttggagtaaggaagcaattaagtttaaacgaggtcatgaggtggagccttggttctg

SEQ ID NO: 124233 - DNA, 201 bp, Homo sapiens
tgtgtctttatagcagcatgatttatagtcctttgggtatatacccagtaatgggatggctgggtcaaatggtatttctagttctagatccctgaggattygccacactgacttccacaatggttgaactagtttacagtcccaccaacagtgtaaaagtgttcctatttctccacatcctctccagcacctgttgtttcc

SEQ ID NO: 124234 - DNA, 201 bp, Homo sapiens
tgacctcctgaggaaatgcagagatgaaagggttacgaattttaagtagcagaatagaccagaccaacaaactagtggtttgttgtccaggcagtccttgygtgaccttccaaccataccatctgctgccatcttactaacttgaggatattaatgatcacagtggtttggctcagatttccaccacgtaccaacatgctg

SEQ ID NO: 124235 - DNA, 201 bp, Homo sapiens
tttggagtaaggaagcaattaagtttaaacgaggtcatgaggtggagccttggttctgcagaattcacgtccttataaaaagagacatcagagagctcaayagcttgctgtctctgccatgtgaggatgcagtggaaaaggcagaaaactgcaagccagaaagggaacccttgccaggaacctaaccatctggcaccttga

SEQ ID NO: 124236 - DNA, 201 bp, Homo sapiens
ccctgaggattcgccacactgacttccacaatggttgaactagtttacagtcccaccaacagtgtaaaagtgttcctatttctccacatcctctccagcamctgttgtttcctgactttttaatgatagccattctaactggtgtgagatggtatctcattgtggttttgatttgcatgtctccgatggccagtgatgatg

SEQ ID NO: 124237 - DNA, 201 bp, Homo sapiens
taatcttctctagatgtcgctttcccagtcagccatggccaattctctaagcccctttcagcaaaattcctcaaaagagttgtctatactcagtgtccaaytccccccttctgtttctcactggagccatttctccaaaaccactcttttcgaggtcaccagtgccctgacctccacattgctaattccagtgatcaactg

SEQ ID NO: 124238 - DNA, 201 bp, Homo sapiens
cttggacttcccagtctccaaaactttgagaaaataaatttctgttgtttaagccacccaatctgtggcattttattatggcagcctaagcagactaacaytgttaataatataataaaattggatttttaaaatatcaaacacaatagaactgacacatccagctcagtacttactttgtaggctatttatgtattgcat

SEQ ID NO: 124239 - DNA, 201 bp, Homo sapiens
aggttatttgtttttttcttgtaaatttgtttgagttcattgtagattctggatattagccctttgtcagatgagtaggttgcgaaaattttctcccattwtgtaggttgcctgttcactctgatggtagtttctgttgctgtgcagaagctctttagtttaattagatcccatttgtcaattttggcttttgttgccatt

SEQ ID NO: 124240 - DNA, 201 bp, Homo sapiens
tttctttataccacgtatcaccatataccatattatatgtttttacttatttattgtctatctcccccatgagactacaagttccctaagtgtggctgctycatttacttctgtagccccatcatccaacctggttaacagtagttgctgcagacatttttgatgattagaagacaaatgcattgatttgtaaaaattctg

SEQ ID NO: 124241 - DNA, 201 bp, Homo sapiens
gtgtaactttatagtcaaaatcttgttttttaaccaaaaatgatatttttcaacttgccatatatcctactaacttaattgggcagccattattttgggtkgtattaaggtctcaaatttcccccaaaggatagagacttgcaactgttgagaatattcaaaagattatttgttaaacaaattaatttaccgtaggctttg

SEQ ID NO: 124242 - DNA, 201 bp, Homo sapiens
gctgtgcagaagctctttagtttaattagatcccatttgtcaattttggcttttgttgccattgcttttggtgttttagacatgaagcccttgcccatgcstatgtcctgaatggtaatgcctaggttttcttctagggtttttatggttttaggtctaaggtttaagtcttcaatccatcttgaattaatttttgtataa

SEQ ID NO: 124243 - DNA, 201 bp, Homo sapiens
ccaacctggttaacagtagttgctgcagacatttttgatgattagaagacaaatgcattgatttgtaaaaattctgtctatattaaggacattaagactgycgtattttcttcagaatttccagcttgctttgtgattttatttgtgatagttttgaccacaaaacaacttaaactttttatgtagctggatctaccagta

SEQ ID NO: 124244 - DNA, 201 bp, Homo sapiens
taacttaattgggcagccattattttgggttgtattaaggtctcaaatttcccccaaaggatagagacttgcaactgttgagaatattcaaaagattattkgttaaacaaattaatttaccgtaggctttgaaagcccaaacaacagagactcaaagaactcacagatgggtgacaaaaaccactgctggcaatctctgag

SEQ ID NO: 124245 - DNA, 201 bp, Homo sapiens
ttctaaactgactctggagtcagccagagtgaggaactttctttatcatatatctatccatacatctgtctctgaatccatcagtctaccttatctttaatcatgaatttcagagtaaattttaatagtcagcatgtttcacccccgtatattgtgcatatcattaattagaattcaaaatttgttgatgatttttatttg

SEQ ID NO: 124246 - DNA, 201 bp, Homo sapiens
gtaaggcccatcataaagaatcatcattcccaaatgtaattcttcttaatatgttgggtacctctggcattactgaaaataattggctcaggggttttacmccaaagcctgtagatacaattttaaatggattctcatatgaagaaaaatatatacataggatcaattaagaggtgtgccaaatattgtcaagaagcttga

SEQ ID NO: 124247 - DNA, 201 bp, Homo sapiens
ctagaagtttctacataagtggttatatcagctgtgattagagacagttttactttcttcctatcctgtctgtatgtctcgccttccttccttttttttcttttttttttttttgccttattgcatcagctaggtgctctagtacaatgtacaatgttgtatagaagagagtgagcatccttgcctctttcatgaactcga

SEQ ID NO: 124248 - DNA, 201 bp, Homo sapiens
cgtagaaaaaagaaaatgtactgggtcatgtaaccaggcagtctagagagggagtggttagcaactcaaatgagtttttctccccagccctgcatctctcycccgaccttgttattgaggaagaggctcgctgcccaacacacataggagccactactgcagcaccgactttcaagaaaaagaaaggttggggggttgtgt

SEQ ID NO: 124249 - DNA, 201 bp, Homo sapiens
tttcagggatgggtcctctgcttgtacttttctaccataaaagccctttcttcatgggccaggttacccatggtgtagggttcttccagatgctgaatatrtctttcccaattacatattcagggaccaggaaaataatcatagggtttgcatgaaacaagtggatacactgtgagatggacttggtccaaaactccactt

SEQ ID NO: 124250 - DNA, 201 bp, Homo sapiens
tcttttgtgcagttcctcattcaacaacctaatagctatctgaaaagcgctttcttgaaaagaaaaaagtctcttcctctcaggcagaagcaataataccrcatgattctctgattaaactatcacactgcgcatattacagggcatctgacctgcttgaaactgacttactgctgaggtttcttggtatttgcactgttg

SEQ ID NO: 124251 - DNA, 201 bp, Homo sapiens
tgaggcagatcttgaagagaataaaatcatctttcaaggcacaggctcttggagaagttgttgcatagtctttaagcaaggctgttttcctctggcaaagsgggaaagaattctgcctctgctggcttgaaagattcaggggaattggaaagatttcaggcttctctgctttgcccaccctattatcccaaccccaggtct

SEQ ID NO: 124252 - DNA, 201 bp, Homo sapiens
aactaccgtgggtacattttgctctctaaaagaatgaatacaagatgaatttcttaaataggattaggtagcacaaccatgccgaattattgttaaatgcrtgttagaatgggaagagagctagatcttaaaaatcgcatggcaaaactaacaaagcagttacttgtcatccaaactggtctttttaaatttgaaatctca

SEQ ID NO: 124253 - DNA, 201 bp, Homo sapiens
tcctcaattaacagagggagcctagagaagttaagtggtttgtccaaacccacagttggttttcctttttctatagtatcagtgcccccaatattcactaytgaaacttaatctccattgtgatggtattaagaggtggggaagaccttttaggcagtgatcaagtcatgaggggtctgcctttatgaatgtatttgcacc

SEQ ID NO: 124254 - DNA, 201 bp, Homo sapiens
gcaaggctgttttcctctggcaaagggggaaagaattctgcctctgctggcttgaaagattcaggggaattggaaagatttcaggcttctctgctttgccmaccctattatcccaaccccaggtctcagggccataccctttccctgtcggggccacaattttaatacataagacctgtcaagagtgcatatccaatctcc

SEQ ID NO: 124255 - DNA, 201 bp, Homo sapiens
cagaaggagatcaagaaaaactttagaagctgagacccgatttcctcaattaacagagggagcctagagaagttaagtggtttgtccaaacccacagttgsttttcctttttctatagtatcagtgcccccaatattcactattgaaacttaatctccattgtgatggtattaagaggtggggaagaccttttaggcagtg

SEQ ID NO: 124256 - DNA, 201 bp, Homo sapiens
tgctgctgtaaaaaattaatgcaaacagtagcttaaaaaaatacagttgtattactttacaactctggaggtcagaagtcagaaatgggtctcatgtggckaaaatgaagatgttgcagaaatctgttctttctggacgctgtaggggagaatcagcttcttgccttttccagcctttagaggttgcccacattacttgga

SEQ ID NO: 124257 - DNA, 201 bp, Homo sapiens
gaaacagactcaacgtggaggtttgtaagcaggaagcatattgggaagagctctcaggagcctcacttctggggaagtgaaggaagcaggatagattggcygaggggggagttaagctgcaatatagtcatactaaagtactcagccaatcgcacagggagttcttgagctggggtggcccttcagagttgaaccaccttg

SEQ ID NO: 124258 - DNA, 201 bp, Homo sapiens
ctttctaatcttcagtgtcctcatttgtgagatggggacagttccaatacatagtacagagggctactggttgattaaatgagataatccagctactctgsaggatctcctgagcccaggagttcaaggctgcagtgagctgtgattctgccactgcactgcagcctcggtgacagagcaagaccctgtctcaaaaaaaaa

SEQ ID NO: 124259 - DNA, 201 bp, Homo sapiens
ttttccattggttttagtggtattcatgattgccggttggaactttttaaataatagctgctttaaaagtctttgtcagattgttctgacctctatgtcayggcagtgttagtttcagctgattatcttttcccataggaattgaggttttcccatttcttcttgattgggttcgggctgcaagttccttccccatagttg

SEQ ID NO: 124260 - DNA, 201 bp, Homo sapiens
gaacatgggaaaaccaacttttatcaacgtttcactaactgtcaaaaacaaatagagacaccggcagacttcattctggggacttatgagtcatggaaagstttcttcaggaatttgaaaaattttcaaacttacagaacagttacataaacataacagagaacttatgaataccctttaaatagattcattaatgtgtag

SEQ ID NO: 124261 - DNA, 201 bp, Homo sapiens
agttcctccactgcaaagttactcttctttccctgttagccataactcataagcaatctgtgcaaaagcactttgagatcccacaaatatcctgttcctcrtcatatagcctcctacctcaaatttagtatccgattgttatccattgctttggaaagacagttgatctttttgtgtgttagccttgtatcctgcaacctt

SEQ ID NO: 124262 - DNA, 201 bp, Homo sapiens
tgaaagcagccatagacaatatgcgtagaaatgaatgtggctgtgctaccgtaacactttatttatggacactgaaatttgaatttcatatgattttcatktgtcacaaaatattattcttactttgattttttaaaccatgtaaaaaacatgaaaactattcttgactaatatgctatacagaaagagacaaggggctgg

SEQ ID NO: 124263 - DNA, 201 bp, Homo sapiens
tgcgtctggacctagagcagggatgaaaattttttttctgtaaagggtcagacagtaaatactttaggctccatgggccatgggcttagttgcaaccactyagctctgtcattgtagcatgaaagcagccatagacaatatgcgtagaaatgaatgtggctgtgctaccgtaacactttatttatggacactgaaatttga

SEQ ID NO: 124264 - DNA, 201 bp, Homo sapiens
gctcaaagagacagcagacccacctgggactgccacacaagctcagtccttgcacttctgctaatctcctacagcccacaactgtgctgcagcattctcartccagcatcaccattacctttgccagcaccccttgccctttcatctgctcacagtcccttggcagccacaggggtagaacttccactttccatcgtttgt

SEQ ID NO: 124265 - DNA, 201 bp, Homo sapiens
gtgttgctcttgatgtttaaaatcttccctctacatctcccacccacaaaacttcattgcagacttttgctactcacacaggggagagattttagatattrgtcacatatgggaatgatgtgtcaatattagcttcatttattgctaaataaagataatgatgtctccttcctaggatattatccccattttatagatgac

SEQ ID NO: 124266 - DNA, 201 bp, Homo sapiens
ggtggatcatctgaggtcaggagttcaagaccagcctggccaacatggtgaaaacccatctctactaaaaacacaaaaattagctgggcatggtggcaggwgcttgtaatcccagctacttgggaggctgaggcaggagaattgcttgaaaccaggaggtggaggttgcagtgagctgagatggtgccattgcactctacc

SEQ ID NO: 124267 - DNA, 201 bp, Homo sapiens
agggagagaccgggtcacagtgcctgtggtggagtggaaagaggccacagacagtagagactgctgggcagtattcaggagacatctctgaggcagaagtyacaggaactggccactgtgaacactgtgttgtctatcagcaatatcacttctggaattttttgagctttcacttctatattctttcctcaaatgacagag

SEQ ID NO: 124268 - DNA, 201 bp, Homo sapiens
tggctcacgcctgtaatcccagcactttgggaggccaaggtgggtggctctcaggagtttgagaccaggctggccaacgtggtgaaaccctgtctctactracaaaaattagctgggtgtggtggcagccacctctagtaccagctacttgggaggctgaggcagagagaatcacttgaacctgggagacggaggttgaag

SEQ ID NO: 124269 - DNA, 201 bp, Homo sapiens
aggaaattgtagcttaacagacttgatatttttgactcccaatcaaattttataagcaaatagttgggtccagaatttaagggaacatagtcaaaaaacaytgttgaaattaagataaattaagttctacttagtctctgatgttgcctctgagaacaaattggagaaatgagcaaaatgacatgacaattaaagagcttt

SEQ ID NO: 124270 - DNA, 201 bp, Homo sapiens
gccactgtgaacactgtgttgtctatcagcaatatcacttctggaattttttgagctttcacttctatattctttcctcaaatgacagagcatttctttgygttcacatattcccagttattttaccttttctctataaatctagataatactaaatgagagagaaaaaactgtcatgacaatagaatgagattagatgaa

SEQ ID NO: 124271 - DNA, 201 bp, Homo sapiens
gggaggccaaggtgggtggctctcaggagtttgagaccaggctggccaacgtggtgaaaccctgtctctactgacaaaaattagctgggtgtggtggcagscacctctagtaccagctacttgggaggctgaggcagagagaatcacttgaacctgggagacggaggttgaagtgagccgagatggcaccactgcactcca

SEQ ID NO: 124272 - DNA, 201 bp, Homo sapiens
agctcagtttatcttggcagaaaggtaacatctttgatttttccccctaaggacacatttgatgttaggattttgatggctggaacagtcaaatacacagyaaactttatggatgcagaagaggaagatctacacaggtttgtgcaaatcagtgttgctcttgatgtttaaaatcttccctctacatctcccacccacaaa

SEQ ID NO: 124273 - DNA, 201 bp, Homo sapiens
gatggacaggcagaataactgagaagtaaatttgttctaggccactgagatttgaagattgtgtgttacaaagcacagccacctgtcctgactgatttggscaacatgaacagttcagttgcctgcattgccgtgccacagcactagggtgccaggccattgcaacactacagagcactgcagcagatcttggagtcaggt

SEQ ID NO: 124274 - DNA, 201 bp, Homo sapiens
gtcctggctattttctctcttgcctcttttcttttttttttttttgacagagtctcgctctcttgcctaggctggatcacacttgtgtgattatagctcamtgcagcctccaactcttgggctcaagtgatcctcctactttaacctcccgaagttctgggattgcaggtgtcaaccatcccaacttgtctattattctca

SEQ ID NO: 124275 - DNA, 201 bp, Homo sapiens
aggtggcagggggctggtgtgttaacactgccgcaatcgtgtgcacacctatccagactgcaacaccgcctggactcggccccaacttagctccaagatcraagtggacaccaacagcagggagaggccaggcagcagcagcaggaacttcccagcctgctgggggcaagcggatcctcctgggcccccaagagcgcagag

SEQ ID NO: 124276 - DNA, 201 bp, Homo sapiens
aaagcagtatagaaaattattaatgagacattttacattgtttttctttttactatgtttttgaaatctagtacattttattttgtacttgacaccccatrtgaattttgactagccccatttcaagggctccgtcacctcctgtgactactggctatcatagtgctcagtgcaggtcttgagggaaagataaaggcatag

SEQ ID NO: 124277 - DNA, 201 bp, Homo sapiens
gctgatacatgcatcaccatgggtgaacccccaaaaaaatgctaagtgaaagaagtcagtcacaaaaggtcatgtgattccatttatgcgaagcatcagartagataaatttatagagatggaaagtgcactagtggtgtggctgccagggttgagggaggaagggaagtaggaagtgactgcttaacggggacggagctt

SEQ ID NO: 124278 - DNA, 201 bp, Homo sapiens
tggactcggccccaacttagctccaagatcaaagtggacaccaacagcagggagaggccaggcagcagcagcaggaacttcccagcctgctgggggcaagsggatcctcctgggcccccaagagcgcagagatgcctgggtctgcagccaccctgcagcggctgcagctgcaccctagaagctcttgctccaaattggaag

SEQ ID NO: 124279 - DNA, 201 bp, Homo sapiens
gccacaataaacatgcatgtgcacgtgtctttagagtagaatggtttataatcttttgggtatatacccagtaatgggattgctgggtcaaatggtatttstagttctagatccttgaggaatcacaatactgtcttccacaatgtttgaaccaatttacactcccaccaatagtgtaaaagcatttctgtttctccacat

SEQ ID NO: 124280 - DNA, 201 bp, Homo sapiens
ttgaaatctagtacattttattttgtacttgacaccccatgtgaattttgactagccccatttcaagggctccgtcacctcctgtgactactggctatcayagtgctcagtgcaggtcttgagggaaagataaaggcatagatggttatttcaaagtaatggggagagcgatgggacagaagtccagcgggcattgtgaga

SEQ ID NO: 124281 - DNA, 201 bp, Homo sapiens
ccagataaaggtaatggtcgcccaatgtaatgaacgtctgaaatgacgccatactgtatactttaaaatagttaatggttaattggatgttatgtgaattyatctcactaaaattattaacctttgagtgccaggaactcgagagactgaatgcactgttttggtgcatcgaacagtttaggagctttattgctacataat

SEQ ID NO: 124282 - DNA, 201 bp, Homo sapiens
attttgcctactacacaagttacttgacctttcccaaccttgttttttttaacctataaaactgtagataacaatagtccctcataaagatattataaggwttgaataagaaaacccatataaaattagcacagtgcctgccattctctagctagtgctattattgtcatcacagttatcatcgacattattatggggcct

SEQ ID NO: 124283 - DNA, 201 bp, Homo sapiens
ggcgcctccttgcagcctgaggcgggggcttcatgtcctcactgggcccgggcctacgactggggcaggggtgacgttgtcacgagttctccctgcggccyggggctccccctcgtcctgcttactaaccgctgcccccttgaacagtgtgtctggttcacccactgggctgaaactctccaatgaccaggacgcgccccc

SEQ ID NO: 124284 - DNA, 201 bp, Homo sapiens
tacatagtacagagggctactggttgattaaatgagataatccagctactctggaggatctcctgagcccaggagttcaaggctgcagtgagctgtgattstgccactgcactgcagcctcggtgacagagcaagaccctgtctcaaaaaaaaaaaaaaaaagaaaagaaaaaagaaaaagatgtatatcactcaggacac

SEQ ID NO: 124285 - DNA, 201 bp, Homo sapiens
atctcactaaaattattaacctttgagtgccaggaactcgagagactgaatgcactgttttggtgcatcgaacagtttaggagctttattgctacataatraatagctcttcatgagacactctatttcaattttttcatagactccacaagtacatgcgtttatttccttaatgaaatggatatgaatgatgaatggttg

SEQ ID NO: 124286 - DNA, 201 bp, Homo sapiens
cctcaccatcaggattgtctggcttagcggtcaccttaatgtggggcaggtcctggggatacggcctcaggcggccccatacggagcctcttcctgaggcrcaggaacttggcgccatcggcgggttgggcgcagtggtcatgccactgggcaggtcctcgaagtgggtgccgctcccacttcttgccctgggcccctgaa

SEQ ID NO: 124287 - DNA, 201 bp, Homo sapiens
caaaccctttaggagagttcttttcttccaatacacttttaaaatgctgctgcagctaccagttaccttgggaattacttctctcatttttgcactgttayagtttctttctgctctgtccactctttgatctgccttctgctgtgatggcaggaagggtttttgaggttattctaggatgttgaagtatgaaaggagctt

SEQ ID NO: 124288 - DNA, 201 bp, Homo sapiens
aggcaacagtactagtccaaagactcggcagtatgggatctagtttcatattttctccttaactagctgtgtgatcttaggcaaaatgctgaagttctctmagcctcacagtctagtctactgacataacaattgtagatccatggtcctttagctttgcagcattacttcccagggaggttgttgtagaatattgaaata

SEQ ID NO: 124289 - DNA, 201 bp, Homo sapiens
gtctgtagaggatgtgtgtgttacagtaatctttcttttctatgtacaactggggcaggttggggacaggggtggctttccaaatgctgtcagggactgcygggagcccttgaaatcctcgctcgcaagtctgttttgctcccgaggcttcccctgcatgtggtcctgagaacaggctggttaaaaatgtattcggcacca

SEQ ID NO: 124290 - DNA, 201 bp, Homo sapiens
gggggtggctgggcccagccctattcccggggctcccaggggtgagttctcagggcagcaggttccgggggcgctcctaggtgcaggctccaggggctgcmcacctcagagtctgtacctgaggacccgcgacctactcctgtaccccactgcagccggcgtcatggcagcggctgcttcgcacaggctgccgctgccatc

SEQ ID NO: 124291 - DNA, 201 bp, Homo sapiens
ggaagaggaagaggaggaggaggaggatgcagataaagaggataaaagaatagcagtactttgatggagcttcttttgtgctaggcactccgccaagcgctttatatatatatatatgtgatggttaatattgagtgtcaacttgattggattgaaggatgcaaagtattgttcctgggtgtgtctgtgaggctgttgcca

SEQ ID NO: 124292 - DNA, 201 bp, Homo sapiens
tggccacgattacatggaccagttgttgacttttcccagttagtcctgccagggatttcatactattttcgggtgccactatgtataagccaaaaaagagycatatctaccatcactgcctgtgtatccaacagggagctgaggatgaattccctctctagaaggtaattgtccacaagacgtaactggatggtaatatag

SEQ ID NO: 124293 - DNA, 201 bp, Homo sapiens
agctgcattctgagagagcgtgaacatttggtatggggtaatggctcccactgccacagagaattgctcatgagggagcacagaatgaagtaaagggacaygattcctggcccagggtgtgtgtggaagaagggagagaagtacaaaagaagaggccagaaaggtcagtcattactggatggctcaggactaaggacaacg

SEQ ID NO: 124294 - DNA, 201 bp, Homo sapiens
ggctcccaggggtgagttctcagggcagcaggttccgggggcgctcctaggtgcaggctccaggggctgcacacctcagagtctgtacctgaggacccgcracctactcctgtaccccactgcagccggcgtcatggcagcggctgcttcgcacaggctgccgctgccatcgttaccatgctgaccatcaggtagtattaa

SEQ ID NO: 124295 - DNA, 201 bp, Homo sapiens
aatataaacagataaagttcaaaattagagaacatatagaaagcacagaagtctgaggccaagagcaaattaaaacacagatctgcatattagaggactcrtaagtattactgccaacccatgattttgactctgggcatcttgacattcaagcaaaaggggaaacactgtgaatttacatgatctccagagtccataaaa

SEQ ID NO: 124296 - DNA, 201 bp, Homo sapiens
gtctttggtaagctcacaggctaagcaggaaagacaaccatgtaaagaactacttgtcatatcctgtgataagtgctgttagagagtgacatgcaaaggtsccagagggcccagcctaccctgactggggaatcaggcatccctgagatatgagatttgagctaggtcttgaagggtgtttcccaggtagaaaaatgagag

SEQ ID NO: 124297 - DNA, 201 bp, Homo sapiens
cgttaccatgctgaccatcaggtagtattaaacgggattgctggctctctcaggaccatcttcaaaagatcaaatgaactacatccaggacagtttatacrgcagataaacgaatttatacactggcttttatctcctcatttatcaaatacccatcctgccaacattaactagcccttctgggtcttatggcgtctcata

SEQ ID NO: 124298 - DNA, 201 bp, Homo sapiens
catgtggaaacatagacacttttctttatttatacacatttatttaaccattaaaataaaagtgagggtaaattgtgaaaaaacaaaaacaaaaacaaaarccttttgacagaattccccacggggaggaattagctgatgatggttcctggacttgccaggatattcctgattttctaaatcccatcaatcccataaata

SEQ ID NO: 124299 - DNA, 201 bp, Homo sapiens
catgctgaccatcaggtagtattaaacgggattgctggctctctcaggaccatcttcaaaagatcaaatgaactacatccaggacagtttatacggcagayaaacgaatttatacactggcttttatctcctcatttatcaaatacccatcctgccaacattaactagcccttctgggtcttatggcgtctcatacccaaa

SEQ ID NO: 124300 - DNA, 201 bp, Homo sapiens
gggagaaaggtttccttcccttatagttttggttaatgcaggctgatgttgccaataccacaagattcttggggacgggagtgtggaagaaggaaggaaarggaagggaaatagagggaagagaggagggggagaagagagcaacacagagaattttcacaccctgactattagaaatttacttttctgctgctaaagcca

SEQ ID NO: 124301 - DNA, 201 bp, Homo sapiens
ctcagctcgtcagaagggtgatcgtgttccaatgatagtcaaggaagaagagtagagatcatgaagatcaagagtgaaaagtgtcagatgcatggggtgayttggaggccaagaaataagaaagaggcccgaatgcagaagacatggaaggttgagtgaaacatcataggctgtgaatcttgaataaggcaagggcatcct

SEQ ID NO: 124302 - DNA, 201 bp, Homo sapiens
atacaacaggaggacctagcatggtaggacagcaaagaccaggggagatgtttgtgacttagccaagacaacatctccccacctccttgcacctacatgcrtggccaatggaatgtaagaggaagtgatttgggaggccgaggcgggcggatcacgaggtcaggagatcgagaccatcccggctaaaacggtgaaaccccg

SEQ ID NO: 124303 - DNA, 201 bp, Homo sapiens
caccttcaccagaccactgactcaaatgttaatatcttttggcaacacccacacaaacacacccaggatgaatactttgtattcttcaagcaagttcacactcagtattaaccatcacacagggtgttttatgagagttaaaaataacatgactatttacaaagatgtaggcagagttaggagaataaagaaggggtagtg

SEQ ID NO: 124304 - DNA, 201 bp, Homo sapiens
ccatggccacatgaagatgatgtatttcctggggaggatgaggaaaagagaatactaaaatttctaaaagtgtagacagcctgatagccaattttggagtstggatgacattttaaattggtaatgctcctaattacccaaaccctaggaaactgtatggaatacagccacagctctagattaatataagtgagcactgtg

SEQ ID NO: 124305 - DNA, 201 bp, Homo sapiens
atataagtgagcactgtgaacccattactaacagcatgttatcttagaataatggcacagtatctgtgtcatcacagtgtgatattgcagttaaaatgcgmacacacacacacacacacacacaccccttaatatttcttgttttttggcaaatttttcctgctataatttttttaacttttctaaattttccaacagaac

SEQ ID NO: 124306 - DNA, 201 bp, Homo sapiens
actagaaacatcaaagctagtgttattataataagtctgacctcaacacccaaagctggctttgtgccagtaagccaagcccttgtttgtgttttcacactttttttttttttttttgtcttctttccttttaggtggttctagatgttggttgtggatcaggaatcctgtcattttttgctgtacaggctggagctagga

SEQ ID NO: 124307 - DNA, 201 bp, Homo sapiens
gggtcagttatatatatcatagccatagccctttatcattaagcatttcagtgtgtatttcctaaaaacgaggcttttctcttatataaccaaaagagaayttgatttaaagctgaaaaagaagctatatgatgacttgctcattgagtctttcagttttggtggtaaaaggtgtttggggtggtcccagcatgagcaggg

SEQ ID NO: 124308 - DNA, 201 bp, Homo sapiens
cagggtgtttgctcaaagagacagcagacccacctgggactgccacacaagctcagtccttgcacttctgctaatctcctacagcccacaactgtgctgcwgcattctcaatccagcatcaccattacctttgccagcaccccttgccctttcatctgctcacagtcccttggcagccacaggggtagaacttccactttc

SEQ ID NO: 124309 - DNA, 201 bp, Homo sapiens
tcacagctcggaatagtacccatttccgccttgccatctcttatcatgtatgtgttcagggatgaatgtgccattttcatcttctaatattttcacagttrgaattttttacagagtgcaatggtgagctctatggtttccaaggtgaagaaatggatctactttttatccttgcagaattcagtgcatttgcaaatactt

SEQ ID NO: 124310 - DNA, 201 bp, Homo sapiens
ttatcatgtatgtgttcagggatgaatgtgccattttcatcttctaatattttcacagttagaattttttacagagtgcaatggtgagctctatggtttcsaaggtgaagaaatggatctactttttatccttgcagaattcagtgcatttgcaaatactttgaaaatatgccaaaataaaaaaaaggaatactcagcgtt

SEQ ID NO: 124311 - DNA, 201 bp, Homo sapiens
ttttctagaaaaattcttcccccatgtagccacaaggctagcatttactctattcagttcccttcaaatgttcacttagaaggtcttctctaatcactctrtgtaaagaagaatctccctttggatcattctcttttcctttatcctgctttatttttattaatggcacttttatatcaaacacatttcaaatcaatactc

SEQ ID NO: 124312 - DNA, 201 bp, Homo sapiens
gtgttcagggatgaatgtgccattttcatcttctaatattttcacagttagaattttttacagagtgcaatggtgagctctatggtttccaaggtgaagaratggatctactttttatccttgcagaattcagtgcatttgcaaatactttgaaaatatgccaaaataaaaaaaaggaatactcagcgttcagccagtgga

SEQ ID NO: 124313 - DNA, 201 bp, Homo sapiens
aagtattatttaataagaataatataataataattttaatgcttacatagctcttaatatattttatttggtttgatcctcaaacctatgaagtagtcacrgccatcattgttttcattacataaatgtcattttttaagtccatatttgaagctagtaggaactggacaagttgatgctggcagaagaaggtagaaacaa

SEQ ID NO: 124314 - DNA, 201 bp, Homo sapiens
ctgggaattatttttcctttttgacttttctgcatttctaaattttatacggttaagtaagagacaaattttttcaattgcaaaagaaaatggttaaggcygggtgtggtggctcacacctgtaatcccagcactttgggaggctgagaaggatggatcatttgaggtcaggagttcaagaccagcctgtccaacatggtg

SEQ ID NO: 124315 - DNA, 201 bp, Homo sapiens
ttaacttacatgatcacaaggtcccacaacaggctctctgcaagctgaggggcaaggagagccagtctgagtcccaaaactgaagaacttggagtctgatrtccaagggcaggaagcatccagcacaggagaaagacgtaggctggggggctaggccagtctctccttttcaagtttttctggctactttatatttgctgg

SEQ ID NO: 124316 - DNA, 201 bp, Homo sapiens
atggcgtctcatacccaaagttaacagggatgccccagggcaggaggagagaggcacactgtgcaggcctggggtgagacattgtggcaccgtgcccatgygaggtcagaggagcccatcctttggcatagctggtgcagaacacgtggctgaggattccagagacaggtaagaaagatctgggatggcacttaaaaggtg

SEQ ID NO: 124317 - DNA, 201 bp, Homo sapiens
aataatacaatgtaattttataagtaagaggcatttttacatacacacaaacgtacccagaatgttaagcataattagtcacttgtataatggaattattmtttttattgtattctttttgatttgtggcatttttctaaattttttatacttttcatttgttggttttgtagttatttttaaaccatcatttgcatcctt

SEQ ID NO: 124318 - DNA, 201 bp, Homo sapiens
ggtcagaggagcccatcctttggcatagctggtgcagaacacgtggctgaggattccagagacaggtaagaaagatctgggatggcacttaaaaggtgatrtaccacctaaggcaccaaacgatattttccagttcccttgtcagagtattatgcatggatagtatgcatctatcatgcttgaccagagcagagccaattg

SEQ ID NO: 124319 - DNA, 201 bp, Homo sapiens
tctgacctcactgtcctcaccccctctgatctcctattgtcatttctcttgacgtatcccaactagaatccagtggcaaggaagcccattgtaacagtctrtatagatcaggctcctgccaaagaccaggatgagaagagtggaggatagatctggagaagcaaatagaaaatatccagcacaatagtcactgagtaggtg

SEQ ID NO: 124320 - DNA, 201 bp, Homo sapiens
agaatattgccataggcaatgagagctccctttttgctcctttctactctgagtccactaaataccttgttgcccatggtactactgagaaacattatttktaaagaaatccattctactgagtggacaagctgctgaattctactgtgaagttaatgaacgatttgttcctagcctaattatgcactaacctaaatttcc

SEQ ID NO: 124321 - DNA, 201 bp, Homo sapiens
agctgctttaaaagtctttgtcagattgttctgacctctatgtcatggcagtgttagtttcagctgattatcttttcccataggaattgaggttttcccawttcttcttgattgggttcgggctgcaagttccttccccatagttggtcttctgagggctatgtttcctatgtcagttcatttttcaaagccttggcggtg

SEQ ID NO: 124322 - DNA, 201 bp, Homo sapiens
tacttttaattgaagaaagttctagaaagtttcttctgaatgtagtacatttttcttttctttgggaccatggattgcattctccaacttaacagcctccrtttcttaaatggcagttgtgagcgttcttgtaacagaccatggccacatgaagatgatgtatttcctggggaggatgaggaaaagagaatactaaaattt

SEQ ID NO: 124323 - DNA, 201 bp, Homo sapiens
cgatctgtaccagctcgtggtttttgcttctcacaccaacactcatctgtacagtttgtgggtggcaaaatgcgactgtgaacagcacggaaaagaatttyactctaagaataggctgatctagcagcacagcacacagtgcatggtgctcctttcgaccttttcattatttggtaattgaaccagcagacatttaattct

SEQ ID NO: 124324 - DNA, 201 bp, Homo sapiens
gtccactaaataccttgttgcccatggtactactgagaaacattatttgtaaagaaatccattctactgagtggacaagctgctgaattctactgtgaagktaatgaacgatttgttcctagcctaattatgcactaacctaaatttcccactaaagtttcttttgcataattagagttttaggccttctggtcattccca

SEQ ID NO: 124325 - DNA, 201 bp, Homo sapiens
tttgctcggcacttctccttcctgtcatcatgtgaagaaggatgtgtttgcttccccttctgccatgattacaagtttcctgaggcctccccagccatgtkgaattgtgagtcaattaaacctctttcctttgtaaattacccagtctcaggtaggtctttagtagcagcgtgagaacggactaatgcatttcctaatctg

SEQ ID NO: 124326 - DNA, 201 bp, Homo sapiens
atggcagttgtgagcgttcttgtaacagaccatggccacatgaagatgatgtatttcctggggaggatgaggaaaagagaatactaaaatttctaaaagtrtagacagcctgatagccaattttggagtctggatgacattttaaattggtaatgctcctaattacccaaaccctaggaaactgtatggaatacagccaca

SEQ ID NO: 124327 - DNA, 201 bp, Homo sapiens
cagaagcaaggatttgtctggtatgccacagcatgtgcttcaagatccaggattctgactttgggctaccaaaaggaagctgatagaggataaagaaaaartgacagtaaatcaaaggaaaagagttagaatgagggagccagcaggatgataccaaaagcttaggaaaagccacaaggcgacaggttgtgagtcctttag

SEQ ID NO: 124328 - DNA, 201 bp, Homo sapiens
gcaatgtgttttctagagaatccagatttatagactcatagctccatccccacttctcctttgccacagtttaaacaaaagtcataggcttgactctcacygggtcacgtgcttaaccctaagtctgtcaccaaggctagggtgataagacgctgttattggctgagactgagccgcatgtcgaaagcatagtcaagacca

SEQ ID NO: 124329 - DNA, 201 bp, Homo sapiens
atttgttttgtgttctaggttgataaactgacatttcgctatgtgatttttggaatgtgaggggagcaggctgtgatggtaaaaaacagtatctgcttacwtatatatatatatatataatttttttctatagcttgggattttaagtctgattcagttttccagggctaccataacaaattaccacaaagtcagtagcta

SEQ ID NO: 124330 - DNA, 201 bp, Homo sapiens
acactagaaaaagcatatactttgaagtttttctgtatgaatttatcctgatttcaactctttgagctagggtttttctccaatttcttaagtgtctccarttgctaacttctccttcctcctcactctcccacagacaccaaatgcctgagtcacaagattccatccagcctgtcaacactttttatttttgcactgaca

SEQ ID NO: 124331 - DNA, 201 bp, Homo sapiens
gcaaaaaaaaaactattacaaatacgaaaaatatctaaccatagcgtaaggaaaatacaagccacgctactttgctggtgtttaaaccagtaaaatcagasacataacgagcatgcatctttgcacagataccactttccacagtggttgatatgcctgcattctgctggggtggaaaattgtatcaaatcaaaattacag

SEQ ID NO: 124332 - DNA, 201 bp, Homo sapiens
agaccatcccggctaaaacggtgaaaccccgtctctactaaaaatacaaaaaattagccgggcgtagtggcgggcgcctgtagtcccagctacttgggagrctgaggcaggagaatggcgtgaacccgggaggcggagcttgcagtgagccgagatcccgccactgcactccagcctgggcgacagagcgagactccgtct

SEQ ID NO: 124333 - DNA, 201 bp, Homo sapiens
gttttctttccttcatatagtttgtttttcatatattttaaagtggttggagatactttagttacttttaaaaccttaaacatctaatatccttggatatrgtactttaaggaaaaagaggaaggaattagctagagatattctcacctttctgagccataatcctgtctccagccatagcaggtgcaagtacactgtgac

SEQ ID NO: 124334 - DNA, 201 bp, Homo sapiens
agtttttgagttttgaaagcatttccacatctataaactcatagatcttcaggaagagtctgtgtggtgcttggagcaaacaataccatccccacattacrgttaagaaagaacctcagagaagatagccatgaaggtgggacatgacttgtgaaaacaattccttgctgcttccttctagaatgttcaggtaagcaggaa

SEQ ID NO: 124335 - DNA, 201 bp, Homo sapiens
gccctatagggtaactgtttggctgtcaacagccccagctgagcctctgactcattggtaccaggtgcagtgcctcctgcagactcctctctttgccaagraagggaagacactgtcagggaaagtgctgtttgtagccaataaatggtaagcaggaaagtacagatgtgctttcacctctgtttccagggcattgaggtc

SEQ ID NO: 124336 - DNA, 201 bp, Homo sapiens
gagaaagacgtaggctggggggctaggccagtctctccttttcaagtttttctggctactttatatttgctggaagctgattagattgtgcctaccagatkaggggtgaatccaccttcaccagaccactgactcaaatgttaatatcttttggcaacacccacacaaacacacccaggatgaatactttgtattcttcaa

SEQ ID NO: 124337 - DNA, 201 bp, Homo sapiens
tcaccccgtttgctttatcttttgttctagtttgtcttcccaccacatgcaaacatacattaatattaatgtgtatacagatatgtatatgatcacacacrtttatgaacatatacacacatttatatgaacatgaatgtatatatgaaaaatacacacatgtatatgaacacatgagcacacgtgtatgtatatgaacac

SEQ ID NO: 124338 - DNA, 201 bp, Homo sapiens
gatcttcaggaagagtctgtgtggtgcttggagcaaacaataccatccccacattacggttaagaaagaacctcagagaagatagccatgaaggtgggacrtgacttgtgaaaacaattccttgctgcttccttctagaatgttcaggtaagcaggaactggtgattcccttgaaagtgaagaagtgaatgtgtttgacta

SEQ ID NO: 124339 - DNA, 201 bp, Homo sapiens
tctctttgccaaggaagggaagacactgtcagggaaagtgctgtttgtagccaataaatggtaagcaggaaagtacagatgtgctttcacctctgtttccwgggcattgaggtctgggagcaggaggaagctggcaggcccctaagactccagcacctacaaatggacagcaggctttccagaggcctgcctgagcactgt

SEQ ID NO: 124340 - DNA, 201 bp, Homo sapiens
tcttaactttgcatccataccttgggctgaacttgaaatctagggtgttgtacttttaattgaagaaagttctagaaagtttcttctgaatgtagtacatttttcttttctttgggaccatggattgcattctccaacttaacagcctccatttcttaaatggcagttgtgagcgttcttgtaacagaccatggccacatg

SEQ ID NO: 124341 - DNA, 201 bp, Homo sapiens
actattgtgcattgctgtcatggggccctatttaaggacccatttcattctaggcattagaggagagaagcagcgtgtttagagaaaatacttgttgatckaaagcatttttctactgcagcagccacacattctagggggattgtgattaggccacatgttttcttggcaagaaaagaaggaacgttgggacggactata

SEQ ID NO: 124342 - DNA, 201 bp, Homo sapiens
gtactttctgctcaacatatggagactaggtaatttataaaggacaaatttatttctcataggcctggagtctggtaagtccaagataaaggtgccagtcwgtttggttgtctggtgaaggctacatcctctggaggggagaaacacttgtgttctcacatggtggaaggcaggtggaaggacaaatgagctgaatactgt

SEQ ID NO: 124343 - DNA, 201 bp, Homo sapiens
cttaactttgcatccataccttgggctgaacttgaaatctagggtgttgtacttttaattgaagaaagttctagaaagtttcttctgaatgtagtacatttttcttttctttgggaccatggattgcattctccaacttaacagcctccatttcttaaatggcagttgtgagcgttcttgtaacagaccatggccacatga

SEQ ID NO: 124344 - DNA, 201 bp, Homo sapiens
ctttctgctcaacatatggagactaggtaatttataaaggacaaatttatttctcataggcctggagtctggtaagtccaagataaaggtgccagtctgtytggttgtctggtgaaggctacatcctctggaggggagaaacacttgtgttctcacatggtggaaggcaggtggaaggacaaatgagctgaatactgtgtg

SEQ ID NO: 124345 - DNA, 201 bp, Homo sapiens
ctggatcatatggtaattctacatttaactttttgaggaactgccatattgccttcaacaacagctgtatcattcccaccaacagtgctcaagggttccarttttcccacatcttcaccaatacttgttattttcttttttatatatatccattttaattgtggttttgatttgaatttctctaatgactggtaatgttga

SEQ ID NO: 124346 - DNA, 201 bp, Homo sapiens
ttatgttgaaccacccttccattcaaggaataaatctcacttggttgtggtgtatagtacttttaatatgctggtgaattttgtttgctagtattttgtgktgttgtatcagaccaggatcaatgttcatgatactggtttatttttcttgttttattttcttgtggtttctttgtcaggctttggcattcagataatagt

SEQ ID NO: 124347 - DNA, 201 bp, Homo sapiens
gtaatgtctggaaacatttttgtctgtcacactgagggaaggagtagaggccagacatgcggttaagcaccctaaaatgctcagagaagttccctacagcaaaaaaaaaaaaaaaaaaaaattatctggtctaaaatatcaatattgagaaggccagctgtagggttcagcagcatgagagcaggaacctggtctatgttg

SEQ ID NO: 124348 - DNA, 201 bp, Homo sapiens
ctctgttcaaccttctttctccccatagttactgagtgagctcatcatccttccagattttactaacatgtcacttctggtgtaaaggtttcttgactccrtatattttagtagttcagagatccaactaaattttcatgagaatagagacatgtctttgcactttgagtccccacatttgtaaattatcaacaaatgttt

SEQ ID NO: 124349 - DNA, 201 bp, Homo sapiens
aactagcagggtcaaacataaaatttagcagtcatttatattatcaaaactccaacttcaactagtcctttggtaaaaattttatattcacattagctataaaaaaaacccagttgagtcaagagctttgtaaagtgactcattgctataaagaaactgagtaaccttaatagaattgatttgaatttcagttttcctatc

SEQ ID NO: 124350 - DNA, 201 bp, Homo sapiens
tgaatatggctgctataaatattctcattccaatatatttctatacatatttttttcatttctcgagtcaaaaatctaagagtaaaattcctgggtcatasagtaagtgcatgatgagttttacaggaaatagccagaattttttttccaaagtggttatagcattttacactcccagcaacaaataatgaatgagagttc

SEQ ID NO: 124351 - DNA, 201 bp, Homo sapiens
acagtaagtgcatgatgagttttacaggaaatagccagaattttttttccaaagtggttatagcattttacactcccagcaacaaataatgaatgagagtwctggttgttccacgttcttgctaaaatttgctcttgcatgagatatgagttatatctcattacagtttcaatttccattttcctgatgtctaatgatgtt

SEQ ID NO: 124352 - DNA, 201 bp, Homo sapiens
tggatgcttcctgccctcgaacattggactccaagttcttcagcttttggactcttggacttacaccagtggtttgccagggttctcaggcctttcgccamtgaaggctgtactgtcagcatccatatttttgaggtttggggactcagactggcttccttgacagcctattgtgggacttcaccttgtgattatgtgagt

SEQ ID NO: 124353 - DNA, 201 bp, Homo sapiens
actccttttcctctttctccatattcaacacatcaaatctaacaaactccacctttaaaacatacccagaattcagccacttctcaagccctctaccattmcccttcaggctaagtcatctcctacctaaaatactacaggagcctcctaactagtctacttgcttcattcctggctcctcttattctgctttccacaaaa

SEQ ID NO: 124354 - DNA, 201 bp, Homo sapiens
agcaaaacatcctaggcccctgttcacataaaggttgcctcttactggatgttaatattagttgttattaacagtgttatcactttaatttacatcagtcmtcctagctttacccaggatttgccatgagaccagggttttttgttttattttgctttgtgttttgataggattcttatttttcagagatgcactggaaga

SEQ ID NO: 124355 - DNA, 201 bp, Homo sapiens
ccattttttgctcacatacatgtccatgcctatggcttattttactgactaaagcaagtcatgtggctcaggctgatgtgaatggggcaagaacgtatgaytttacctgggggaagggaagagaatatttttagatgatgggaaaaccctctggttttttcatcttcaaaaatctgtctgattttctaaaatccattggct

SEQ ID NO: 124356 - DNA, 201 bp, Homo sapiens
cataggagccactactgcagcaccgactttcaagaaaaagaaaggttggggggttgtgttgcaagctgactagcaaggaaacaggaggcaacagtcaaatmtgtctccctaatctaagggtgggtcaagcttttatggcatttctaactagttctagataataccaatgtagccaatctgccaggctgatggtgttagcaa

SEQ ID NO: 124357 - DNA, 201 bp, Homo sapiens
cagaaggcacgtgcccaggcaattttggctctgtatcatctgtaacaacttaagcaatggttaattggtttgagctggtcctgtggttacaaccttagctytgtctccttctctctctgttggattcattcttttactatagacagtccatctacatgtggagtagatgactgacaatctctgaataacatcctttcagat

SEQ ID NO: 124358 - DNA, 201 bp, Homo sapiens
attggtttgagctggtcctgtggttacaaccttagctttgtctccttctctctctgttggattcattcttttactatagacagtccatctacatgtggagkagatgactgacaatctctgaataacatcctttcagatccatgactcagaaaacaagtcatcttctcctccacatctacaatgaaaaaaatctggggaagg

SEQ ID NO: 124359 - DNA, 201 bp, Homo sapiens
aaaatctttgaactcagtttatgtgctccttcctgtgtctcccgtccttatatgtagggaagtgcttgttataatacataggtcgatgccttcagcagtgygagcagtttaatgattgcgaaggcagattctggtgcctcattgcttgaacttgaatactgatttcactgtttcttggcttggtgaccgtttcagtttgct

SEQ ID NO: 124360 - DNA, 201 bp, Homo sapiens
gggcttgctttgctcttttgttacagcttcttatagtgaaaacctaggtcactaacttcattcttttactttttctaatacagtttcttaaaaccattagrtttccactaagcatggattatctatataaccaaattttggtatgttgcatcatcattattattcagttcaaaatatatactactttctattgtaattact

SEQ ID NO: 124361 - DNA, 201 bp, Homo sapiens
ctttttgacttcgatattcctataatgtatgcaaatgacatgtttctattatcttcaggaatcctcctgtgatcttaaagtgtgcctccaaaatactgacyactgatacatagggctaccattacagaccatatcgaaaagccaattttttttggatcaagatttgtgaagaatctgagattttatcctatttgcaaggta

SEQ ID NO: 124362 - DNA, 201 bp, Homo sapiens
tccactttccatcgtttgtaatgtagtccagttcagcttatggcagatagcaccttgtcactgatgaatttctattaaatagaaggtattctaataaaatrtatatagttttttgataagtcatttacaagcgaggtgagaaatatggtaatctatgtttttatgtgttagcattattttaacttctacttagaaatgaat

SEQ ID NO: 124363 - DNA, 201 bp, Homo sapiens
cgattctcctgcctcagtctcctggaggcttgatttttaaaacattaaaaccaaagttctaatgaaatccaaagcatcatagtttatctttggttttagcktctgtagaggatgtgtgtgttacagtaatctttcttttctatgtacaactggggcaggttggggacaggggtggctttccaaatgctgtcagggactgct

SEQ ID NO: 124364 - DNA, 201 bp, Homo sapiens
ctcagctcactacaacctccctcccctgagttcaagggatcctcccacctcagcctcctgagtagctgattacaggcgtactccaccacgtccgactaactttttttgtatatttagtagaatcgagtttcaccatgttagccaggctagtctcaaactcctgacctcaagtgatctgcccacctcagcttcccaaagtgc

SEQ ID NO: 124365 - DNA, 201 bp, Homo sapiens
acactgcctagtttcagttcccatattagtaaaatagaataataatatatcctaccttatgaggttgttgagcaattaagtgaattaatatatataaagcrcttaagacagtacaaggcacaagtaagccctacttggcattagctgttatttctggtgtgtatatgtctgtctattccactaacctatcacaggtagaga

SEQ ID NO: 124366 - DNA, 201 bp, Homo sapiens
aggtcactgataactgactgaaacagaagaagggactgtcagaaatacatcagctgctcacttttcaagtacagatcttgtttaaatgctttgaggtggtmacaagtcagttaagggactaactggctagggatgaaatgatctttggcacacttacccaagacaatgtgttttgattatcttggaagaaagatgctttgt

SEQ ID NO: 124367 - DNA, 201 bp, Homo sapiens
tggggtagacatgagataattaagggaacacattttgtgaaaggtaaaagtctaatattatcattgatttttaaccaaaagcaaatctaccaactataatkatgtaactaaactctaatattattgattttatccaaagcaaagccactaaaatatcatataactgtaaaatcacataacctaactataactctagttata

SEQ ID NO: 124368 - DNA, 201 bp, Homo sapiens
ccagagtttttaaaactattgctaattggggtcatatgcctcttgtttggtggggagaggggaggcggcggcagtgaggcacctatcccgtacactgtagwatgtttagcagtatccctggtctctacctactagatatcatcttccccccagagttatgacaaccacaaacgctctccagacattgccaaatgtcccctt

SEQ ID NO: 124369 - DNA, 201 bp, Homo sapiens
gttcagaattgcctattaaggagtgggatttgaaaggagagaataaaaggattggttaggtattctgttgtttggggagcttctgacttttttcttttaartgaaagtaaacacccgtacatggggaagagaatcaaacaacataggaaggtctaaaatttaaaaataaatcgtcccccacctaccccactcctgcctgtc

SEQ ID NO: 124370 - DNA, 201 bp, Homo sapiens
cgtacatggggaagagaatcaaacaacataggaaggtctaaaatttaaaaataaatcgtcccccacctaccccactcctgcctgtccacattctccagcgytaaccattctgagcttatgtctttttagttcttccattgattactatgactttatgtcataatgtatgtatttctgttttctgaattaccaactttggat

SEQ ID NO: 124371 - DNA, 201 bp, Homo sapiens
tttttagttcttccattgattactatgactttatgtcataatgtatgtatttctgttttctgaattaccaactttggatatattgttgactcccaaaagakaaacttccctcttctggtgtgactcccaattttgtttggttatattatttctaggttgtcaagatatggaatacatcactgtctttgatgctttgtctat

SEQ ID NO: 124372 - DNA, 201 bp, Homo sapiens
tcagttccaagtctttgctgttgtgaacagtgccacaataaacatgcatgtgcacgtgtctttagagtagaatggtttataatcttttgggtatatacccrgtaatgggattgctgggtcaaatggtatttgtagttctagatccttgaggaatcacaatactgtcttccacaatgtttgaaccaatttacactcccacca

SEQ ID NO: 124373 - DNA, 201 bp, Homo sapiens
tgttgtcatttgtcttatatgattttaaaatctttgaggtttttcatgtgtgaaaatgttttatattcccttatgatttacaagtttttgactgggtatasaattcaagcctcaaaatcgttttccttcagaagttgcttcattatctgctaatatcctgagatgctgatgagatttctgggattagtgtgattttagttc

SEQ ID NO: 124374 - DNA, 201 bp, Homo sapiens
tgggattagtgtgattttagttcacccaaagcttagtgtaacttttttttaaccatgtaagatttaaggacttttctctttatctctagggttgtccagtkttgccgtgatgtatttagatgtggactaaggaactttatcctctctgcttcatatttagtgggccctttccatctaaagacgagtatctttcttgatttc

SEQ ID NO: 124375 - DNA, 201 bp, Homo sapiens
caagatgtgtgctgatttcctggaataagaggatgtggagtttgaaatgcaaggcttttgttttatatttagaaatgagtgaacagctgccaagtatctgwaacttgggtaaaaaataaatccaccttcactggggggttgacctgtgttgataattaggaggcactactaggaaagaaatgatcaaatatacaaatatga

SEQ ID NO: 124376 - DNA, 201 bp, Homo sapiens
tcatctaccaaggacaactactctaaggctctcaaagatgccactgttacctaatcagttttttccctattaccttgtaaaaggaaagtttcctgtgctcygagaaaatagtcaggttgaatgttcttaggtattccatagtcaatccatctagaatttccatgtccctgagccttctgactccttcctcaatgcagcaga

SEQ ID NO: 124377 - DNA, 201 bp, Homo sapiens
ccacttgttaataaaagagttttcacagatataccttagaatcttggttctgttctggttcagtcaattattcctctatttaaggttgacctcctgttccrtctgtttattggagaccatgaagttcttacatcttgagccttctttgttgatgggtagagcatcagggcaagtctaccaggattctacagggattaggga

SEQ ID NO: 124378 - DNA, 201 bp, Homo sapiens
tggctcactgcaaactctgcctcccaggttcaagcgattctcctgcctcagtctcctggaggcttgatttttaaaacattaaaaccaaagttctaatgaawtccaaagcatcatagtttatctttggttttagcgtctgtagaggatgtgtgtgttacagtaatctttcttttctatgtacaactggggcaggttggggac

SEQ ID NO: 124379 - DNA, 201 bp, Homo sapiens
gtttgttccgattccatgttaaagtttatttttcattattatatttgagataaaaataaggctaatatatcactgttagcattttggtttaattattttcwgcatttttgttttgtatccatttttgaatagttgtgatcattatttaaatgttattttatattcaccatcttcatttaatgctctataataagcatattt

SEQ ID NO: 124380 - DNA, 201 bp, Homo sapiens
ataataagcatattttcatgtttgttagactttatgacttcaaaaatatataaataatagtccacatgagaattcctgtaatttgcttaaccaatcgcctrtagtagaacatttaaatagtttctgcttttttctatcataaataatattttttctattataattagtagtagcaactttgaaaattataaataaatagac

SEQ ID NO: 124381 - DNA, 201 bp, Homo sapiens
tcttttctctttcccttatagttttatggctgcatttctcaacagcagaacatgatgcaagattttgtgaggacagccacttaccacagagccgtcctccrgaatcacattgactttagagacaaggtaatgccggcagcaggttatgaatctcatgcatttcagaaacgttttcaagaccagaatcaaaatgaagcttta

SEQ ID NO: 124382 - DNA, 201 bp, Homo sapiens
gtccgattgctactctaccctagctttttacacagtaattatgccattattgcctaggccagataattactgctttcctgctctgacattctgaaatgtcmtccaaaatgtgttcattcagagcacaatttaatggctacatcacctaccaccatctttcatctaccaaggacaactactctaaggctctcaaagatgcca

SEQ ID NO: 124383 - DNA, 201 bp, Homo sapiens
cttggtgggaaaggaggttgctgactcaaagctaaacgtaattttatatcatctgcagaactcagtcaaccgcaagacacatattgcttgcaagttgaccrcatcagtcaatggtttattgagcatcttcattgaccttcagaactaccattagctctatcctcgctgccaagaaatggcctgagccaactgcctggtgct

SEQ ID NO: 124384 - DNA, 201 bp, Homo sapiens
agaacaaattggagaaatgagcaaaatgacatgacaattaaagagctttgaagctttatgtgtagttgagtgaatctctatgaaaagtgttgacacagaawaaagctgacagtatattgttaatagtgaaaaagcaggttgtaaaccaatggagtacaatactattgttgtatatattatagagatagatgtgaaaatgta

SEQ ID NO: 124385 - DNA, 201 bp, Homo sapiens
tcccttcccttacctagtatttctaggaaggcttgattttttgggtaggggcagtggggggacggagtcttgctctttcacccaggttggagtgcagtggygcgatcttggctcactgcaaactctgcctcccaggttcaagcgattctcctgcctcagtctcctggaggcttgatttttaaaacattaaaaccaaagttc

SEQ ID NO: 124386 - DNA, 201 bp, Homo sapiens
gagcataggcattaacccagctttacacaatttattcaaaatctgggcattcccgtctttgccttgctgtctctagcttgtgattctgtaacgttacacaytttgctttctctgttcaaccttctttctccccatagttactgagtgagctcatcatccttccagattttactaacatgtcacttctggtgtaaaggtttc

SEQ ID NO: 124387 - DNA, 201 bp, Homo sapiens
ggaccctgccttcgtcttcacatgatgcactcgctgtgtgtgcagctatctccaaatttccactttttgtaaagacaagaggtatattgtattaggggccmaccagaccccagtacaacttaactaattacatatacaacaaccgtatattcagataaggtcacattctacagtcctgggggttaggacttcaacatatga

SEQ ID NO: 124388 - DNA, 201 bp, Homo sapiens
gaaaatggccagtgttacttataactacattacgttggccaaagcaagtcatatggtcactcctaatttcaacaaagcagggaaatgcaaatctacatctrcccataagaagaaacagaaatatttggtaaatggcactatatattacctttgcaaactcattaaggtagggacaggttgataaggtgatattctcagtgc

SEQ ID NO: 124389 - DNA, 201 bp, Homo sapiens
gctgcaggagagactaccaaaggttgtccagatcttcaccactgttgtcaattctccttgaagatgaggttgtttgcagaaatgcgactttcagtttgagyggtggtcagaatgatttcatcctgtttttgtctttgaatcatttactgagcattttttgactctgggcaataaaaatcaagcaacagagaagtaaattaa

SEQ ID NO: 124390 - DNA, 201 bp, Homo sapiens
ttgtagcaggggcttgacatggtctgggaatgatatcatttttatatactttttaaaggtacgcatttataccctctctcactgtaattctcatagcagayccatgaggttggtatatttcattattcccatttttcagcaaagacactaaggctcacaactattaagaaaattgcctaggtgacaaaaataaaatacaag

SEQ ID NO: 124391 - DNA, 201 bp, Homo sapiens
acgcatttataccctctctcactgtaattctcatagcagatccatgaggttggtatatttcattattcccatttttcagcaaagacactaaggctcacaamtattaagaaaattgcctaggtgacaaaaataaaatacaaggccccttctctttctatgtcctccagacttccccttcacctttcattgcattggctgctg

SEQ ID NO: 124392 - DNA, 201 bp, Homo sapiens
actgaaatttgaatttcatatgattttcatttgtcacaaaatattattcttactttgattttttaaaccatgtaaaaaacatgaaaactattcttgactawtatgctatacagaaagagacaaggggctggatttggcctgtgggctgtaatttgccaatccctgatctagaagcagaggaatatggtggttaaaagggat

SEQ ID NO: 124393 - DNA, 201 bp, Homo sapiens
atccgtgaccttaaggccccattttacggggaaggtcttagaattaatattccctctaggttttaatttactttgagcatttcttttttctggctgtatayaatgccctgggccctctatagtttctcaaaattttgcttgaaacaaaatagtttcttcttcctgtactttttcacaggcagccaaagggagtaagttggc

SEQ ID NO: 124394 - DNA, 201 bp, Homo sapiens
gggagctaaacattgagtacactcggcacaaaggtgggaacagtagacactggggactccagcagaggtggagggacaagagttgaaaaactgcccatcakgtactacctgctgggtgataggatcattagaagcccaaacctcagcatcatgcaatatactcatataacaaacctgtacacgtacccccaaatctaacat

SEQ ID NO: 124395 - DNA, 201 bp, Homo sapiens
accagttggggcaggcggctcaggtcgcggccagccaggtagtaaacgagggtgacgccaaggtgcagagcgcagacggccacgagcaggcggcaggcccrctgtagggacgcgcctggcatcgcggcgctgccgctcaggagcggctcccgaagcctcatcttcccgccgccgctttaagaagggtgtgggctacaggag

SEQ ID NO: 124396 - DNA, 201 bp, Homo sapiens
tcttatctgccatcctgcaaactcaggaatttctgttagtcattgttttctttaactctttgggacacagtttcacaggtatattcctcaggttcagggaygggagatacggatagctgggtgcagtggctcacgcctttaatcccagtgctttggaaggttgaggtgggaggaccacttgagcccaagagtctgagacca

SEQ ID NO: 124397 - DNA, 201 bp, Homo sapiens
ccgggcgcggctgggaggaggcgcctagaggaggcggcggccgggcccctccggtccggagctccccggaggactgcccgatggcggcggcactgttcgasccgccctgcagcggtgtggagactccgaccagttggggcaggcggctcaggtcgcggccagccaggtagtaaacgagggtgacgccaaggtgcagagcgc

SEQ ID NO: 124398 - DNA, 201 bp, Homo sapiens
taagtgggagctaaacattgagtacactcggcacaaaggtgggaacagtagacactggggactccagcagaggtggagggacaagagttgaaaaactgccyatcaggtactacctgctgggtgataggatcattagaagcccaaacctcagcatcatgcaatatactcatataacaaacctgtacacgtacccccaaatct

SEQ ID NO: 124399 - DNA, 201 bp, Homo sapiens
ttgcagcaacatagatgcagctggaggccattatcctaagcaaattaatgcaggaacagaaaaccaagtaccacatgttctcaccgataagtgggagctaracattgagtacactcggcacaaaggtgggaacagtagacactggggactccagcagaggtggagggacaagagttgaaaaactgcccatcaggtactacc

SEQ ID NO: 124400 - DNA, 201 bp, Homo sapiens
tctgccaatgcacagagaagcaaagaaagctgagagaatgaaacagaccacagacagagaagtggacatagaaatgaaagagaaatacccatattcctgargcttctttgcccccattctggtctttcctgaagcctattagcatttctgcccatggtttctgtgccttagaactcaatccccttatattaaaaatcgtcc

SEQ ID NO: 124401 - DNA, 201 bp, Homo sapiens
acttggatctctccacaaaggactctccatgtggctgcttgggtttcctcacaaactagaggaagcattccaaaaaggagcatttcaaaaatacagaagawggagatccctgaaagcccagccttagcatcacttctaaagcattcttttgcttaaaacaagtttatagggcaggccagattcaaggggaataaaactggc

SEQ ID NO: 124402 - DNA, 201 bp, Homo sapiens; identical to SEQ ID NO: 21000

SEQ ID NO: 124403 - DNA, 201 bp, Homo sapiens
aagggcatgtttttcacatggcacaagatgggtgaacaaaaagccccaatatctcataaagcctgtggttggaatggtcacttccacccacattctatgarccaaaacaagttgattggccaacccaacattatcatattctgcctctagtgggagaaacttcaaagtcacatgacaaagggactggatatagggagtggt

SEQ ID NO: 124404 - DNA, 201 bp, Homo sapiens
acccctttatcccaacctgtacacaggtgccatggcactgggtccaggccctgctcagtgactttggtcatccatttccagcaacatctatacccaagacrggatatgtctacagtctgttgggataggttatttgcctcaagtgctgctttctcagatcctagaaaggccaacagaagcctggcaactgccttcaattgc

SEQ ID NO: 124405 - DNA, 201 bp, Homo sapiens
atctcctcaaagcataggtgggcaagagcggcctctgaggcttaagcagtctaacactcactcccctacccccctgaggggactgtaccaaccatcccagrccccagctgagcccccaggccagcctgcctctctcaccagttcagcttcaggtactgcccacctccccccatcaccctactcatcttcagactggcagtg

SEQ ID NO: 124406 - DNA, 201 bp, Homo sapiens
ttttttctggctgtatataatgccctgggccctctatagtttctcaaaattttgcttgaaacaaaatagtttcttcttcctgtactttttcacaggcagcyaaagggagtaagttggcattttgaacattttgcctagaaatctccataccaaggcggcaagttcaattattttctcttatccatgttactacatgttact

SEQ ID NO: 124407 - DNA, 201 bp, Homo sapiens
gaggcagaattctggctccgaaacccatgttttctacaggtttaccctttgttgatttgcaagtaagggctgaaggctgtgtgggtgagagacttaggcamtgaagccacttgacctcgatttgacccagaggcctcaggccctgagtgagcagagacacctcaccccagagaaagactcatggaggtgctgtcagtaatg

SEQ ID NO: 124408 - DNA, 201 bp, Homo sapiens
agccacatccgtgaccttaaggccccattttacggggaaggtcttagaattaatattccctctaggttttaatttactttgagcatttcttttttctggcygtatataatgccctgggccctctatagtttctcaaaattttgcttgaaacaaaatagtttcttcttcctgtactttttcacaggcagccaaagggagtaa

SEQ ID NO: 124409 - DNA, 201 bp, Homo sapiens
ctgctgggtgataggatcattagaagcccaaacctcagcatcatgcaatatactcatataacaaacctgtacacgtacccccaaatctaacatttttttttaaattgctacccatatattactatatgccaataatatactaatagagtacaaaaaataactaatataacatttgagaaacggcaacaaaaaagtcttaca

SEQ ID NO: 124410 - DNA, 201 bp, Homo sapiens
tatacacttatcattgtgttataattgcctacagtattcagtacagtaacatgttgtgcaggtttgtagcctaggagcaataggccataccatataacctwgatgtatagtgggctgtaccatctggatttagactcactctttgatgtttgcacaataacaaaattgactatcgacacatttctcagaaagaatccccat

SEQ ID NO: 124411 - DNA, 201 bp, Homo sapiens
aaatacaaaaattagctgggcatggtggcacatgcctgtaatcccagctactcaggaggctgaggcaggagaatcgcttaaacctgggaggtggaggttgyggtgagcggagatcgtgccactgccctccagcctgggtgacagagtgagactccgtctcaaaattatatgtatatcttattgggggccagaagcagtggc

SEQ ID NO: 124412 - DNA, 201 bp, Homo sapiens
tcagccggcgttacagtctacactgggctacccactgtcccatgaagtagcagttctccccatgtcgtagagtggggccccggcagattaagaaactttcytaagagcccacagctggcaagaggcagaattctggctccgaaacccatgttttctacaggtttaccctttgttgatttgcaagtaagggctgaaggctgt

SEQ ID NO: 124413 - DNA, 201 bp, Homo sapiens
gtggctgggaattgtactccagaacagctcacaatttgtaataaatctggtctcttttcctccagtttcctgttcttcccaacctgcgctatggacttcaycagatttcagcatcagagagaatatggaaggacatcgaccctaacttcatccagtgaggatttccacacaccatacactctctgagagttctcttggctt

SEQ ID NO: 124414 - DNA, 201 bp, Homo sapiens
cacacaatttgtcaagtcacatatgctgggagaagagaaacccacctgtagcagaataattttatttctgtttattttaaaataaggaggagaaagctatytgatttcaggctttcttgggaatcttatcctagtaatttggacaaatggctggtatctagatagcaacaaatctatttctgataattaaccgacagtgaa

SEQ ID NO: 124415 - DNA, 201 bp, Homo sapiens
gcatcaactgacatttggtagcagcagttatctcagttcttaaggcttcctgatgctggctacaaagcttatgtgctttatgtgagatccaatttttttttactttttacatgtttatttattacttattttttaaagagacagggtcttgctacgttgctcaggctggaatgcatgataaaaccccatctctaccaaaaa

SEQ ID NO: 124416 - DNA, 201 bp, Homo sapiens
ctgtagtcctagctactcaggaggctaaggcaggagaatcacttgaacccaggaggtagagtttgcagtgagctgagatcacgccactgcactccagcctrggcaacagagtgagacaccatctccagaaagaaaacaaaataaaaataaaactgatggcaataggtgaataacacggaagcagagcaacatgaaaaaaaa

SEQ ID NO: 124417 - DNA, 201 bp, Homo sapiens
gtctcacagttctggaatctgggaagtccaagatcaaggtgttggcaggactggttccttctgagagccgtgaggaagaatctgtccgggcctctctcctyttccgatggtgtgctggccgtctttggtgttccttggcttaaagaagcatcacctcaatctccgtcttcatccttacatggcattttccctgtacatgtg

SEQ ID NO: 124418 - DNA, 201 bp, Homo sapiens
gagacagggtcttgctacgttgctcaggctggaatgcatgataaaaccccatctctaccaaaaatacaaaaattagctggttgtggtggtgagcacctgtrgtcctagctactcaggaggctaaggcaggagaatcacttgaacccaggaggtagagtttgcagtgagctgagatcacgccactgcactccagcctgggca

SEQ ID NO: 124419 - DNA, 201 bp, Homo sapiens
atgtgctttatgtgagatccaatttttttttactttttacatgtttatttattacttattttttaaagagacagggtcttgctacgttgctcaggctggartgcatgataaaaccccatctctaccaaaaatacaaaaattagctggttgtggtggtgagcacctgtagtcctagctactcaggaggctaaggcaggagaa

SEQ ID NO: 124420 - DNA, 201 bp, Homo sapiens
cggcctctcgtcaagaatatcccagtgggcagctcaggctcctgggttgcctagcatgctgccctgtgacactgtgtggtcacttagcactccaaatcccsctctgccaaatacctctaatattgcttccagctccacaatgccaaaataaagctctatgaaatgtacactaaatataaatagaaataattacacatttgt

SEQ ID NO: 124421 - DNA, 201 bp, Homo sapiens; identical to SEQ ID NO: 21007

SEQ ID NO: 124422 - DNA, 201 bp, Homo sapiens
tatagatatacatttggttaatgtcagtcaagtgttgtgagaaacggcctctcgtcaagaatatcccagtgggcagctcaggctcctgggttgcctagcaygctgccctgtgacactgtgtggtcacttagcactccaaatcccgctctgccaaatacctctaatattgcttccagctccacaatgccaaaataaagctct

SEQ ID NO: 124423 - DNA, 201 bp, Homo sapiens
tattgtgttattctggaaaggatttttaaaacggtggatgtgtccttctcagcacagtgcctggcacatagtaagtgctcagcgtaaatattagatagcakcagggcagcacacaataacttctttgaaaattattataataggattttctatgacctctgaatgttaattttagaaatgttcttaattatggaggaatct

SEQ ID NO: 124424 - DNA, 201 bp, Homo sapiens
agttcgagaccagcctggccaacatggtgaaaccccatctctactaaaaatacaaaaattggccaggtgtggtggtgcaggcctgtaatcccagctactcwgaggctgaggcaggagaatcagttgaacccaggaggcagaaattacaaccagctgagatcgtgccactgcactctagcctgggtgacagacagagactct

SEQ ID NO: 124425 - DNA, 201 bp, Homo sapiens
agccagtggactggctcaacactctcaaccatttgacttaatctcattaatcctcaacttcctcacctgtaatatcagcataattctagtaacatccttaytgtgttattctggaaaggatttttaaaacggtggatgtgtccttctcagcacagtgcctggcacatagtaagtgctcagcgtaaatattagatagcagca

SEQ ID NO: 124426 - DNA, 201 bp, Homo sapiens
gcaatcacagccccacaaccagcactgaggcaacaacaaggatctctggttctaatttttcttcccaaaatcctctggaggcagcgctgaagacaccttasagcaggggggtgattaagtcaatttccgggaaacaagccaacaggttgcgttgtggtttagaacaaaaaccttgattaaataaattagagtcttgggagc

SEQ ID NO: 124427 - DNA, 201 bp, Homo sapiens
ggtcaggagttcgagactagcctggccaacatggtgtaaccccgtctctactaaaaataaaaaattagctgggtgtggtggcgtgctcttacagtcccagstactcaggaggctgaggcaggagaatcgcttgaacccaggatgaggaggttgcaatgagctgagattatgccactgcaccccagtctgggcaatagagtg

SEQ ID NO: 124428 - DNA, 201 bp, Homo sapiens
tccctgaaatttcattaaccagagaaaattaaaactcctatcacagaggaagactgaaaattgaataacactcctgcagcccagacaaacttcgtgctagrtcactgcgtgtcctctggtcccattcaattcccaaagagaattatttacttaccattgtctgagcattaggtccattctttcccctgaaaattatttacc

SEQ ID NO: 124429 - DNA, 201 bp, Homo sapiens
cattttttaataacttccatgtcttcatcttaaataacacgtatttcacagttcactcctgtcttccatcctactccctccttttgttctttctgtgtaamtttctttatccatggcctaagcgctgaggatacagaggtaaatgctgtcacctttcacagactctcagtccgtccctctcgtaatcccttccccatggtg

SEQ ID NO: 124430 - DNA, 201 bp, Homo sapiens
ctctctctctgatcctctgtctctcccaaagtacagaatgaagctgttttctgaagttccctgctccacctagaaactgaaccccaaagaggaacaaaatygcttttgatcccttccctgaaatttcattaaccagagaaaattaaaactcctatcacagaggaagactgaaaattgaataacactcctgcagcccagaca

SEQ ID NO: 124431 - DNA, 201 bp, Homo sapiens
acataaacacacccgcatacacacacacacacatgcatacatatgttgcaacttaatgaacccactgctgggtaaaagtcatgttcgaggctgctcacctyggtggtgagtgtagcagtgatttgaatgtaagtacagcatcacagttttttttttttttttttttttgagacagagtctcgctctgtcacccaggctgga

SEQ ID NO: 124432 - DNA, 201 bp, Homo sapiens
ttattcataaaaccaggcatcccagtgaatctgttgggccattttttaataacttccatgtcttcatcttaaataacacgtatttcacagttcactcctgycttccatcctactccctccttttgttctttctgtgtaactttctttatccatggcctaagcgctgaggatacagaggtaaatgctgtcacctttcacaga

SEQ ID NO: 124433 - DNA, 201 bp, Homo sapiens
tttctctgatctccccccactgcccccaaccctggtctctctctctctctgatcctctgtctctcccaaagtacagaatgaagctgttttctgaagttccytgctccacctagaaactgaaccccaaagaggaacaaaattgcttttgatcccttccctgaaatttcattaaccagagaaaattaaaactcctatcacaga

SEQ ID NO: 124434 - DNA, 201 bp, Homo sapiens
aaaaaagtgacacaaaaaggactttgtttatgttatgagagctggctatgttctgaatgtttgtgtccctccaaaattcatacattgaaaacctaaccccraaggagatggcattaggaaggggggggcctttgggaagtgtattagtccattcttgcattgctataaagaaatacctgagactgggtaatttataaagaa

SEQ ID NO: 124435 - DNA, 201 bp, Homo sapiens
ttctgaggattacaacaatgaaaaggctgcagaggcccagaccccttcaccttcatgggaagggcataggttctctctggctgcatttctgagagcacgtrctttgtacccacacccacaagatgttctcaaaggaataaactggttctagggcagcttagcttgagaaagactaaatattataacatgatcttgttgggg

SEQ ID NO: 124436 - DNA, 201 bp, Homo sapiens
agtgcctggtgtgggctgcctgccacaggggcaccactgccccaccctgaaccagaagcctgagcaacgacagacgccacgctgaggaccgtgctgccacygtccttttggggactcatgacattggcctccagcctgcattgagataaacagccggagccccggagagcacctggggaggctcgagcagagtctgctgtg

SEQ ID NO: 124437 - DNA, 201 bp, Homo sapiens
gaaccccattggattattggattatcattcttctgcaattcccttgtgccgcgcacattaaaatacatttgtatgcccttttctcctaataatctgccttytgttagttcattttcagcaaaccttcagaggttgaaggggggaagctttccctctctcccttatagtttttttgttggtttgtttgtttttgtttgtttt

SEQ ID NO: 124438 - DNA, 201 bp, Homo sapiens
attagatcatgagatcacagccctcctgaatgggattagtgcctttatagaagagactccagagagttctcttgtctcttccaccatgtgaggacacggtragaagacggccagcccttgaaccaagaagcaggctctccccagacactgtatatgttactggcttgttcttggacttccccgcctccaaaactgtgagaa

SEQ ID NO: 124439 - DNA, 201 bp, Homo sapiens
gaaataaggcctggtctcctgcagaaccctcaggcttactagggttgggaaaactcagccctggtaaatctgtggtcagaccagttctctgctctcgaacsctgttttctgttaagatgtttatcaagacaatacgtgcaccgctgaacatagacccttatcagtggttcttctttgccctttgccctgtgatatttgtga

SEQ ID NO: 124440 - DNA, 201 bp, Homo sapiens
atctgccttttgttagttcattttcagcaaaccttcagaggttgaaggggggaagctttccctctctcccttatagtttttttgttggtttgtttgtttttgtttgttttgaggcagagtctcactctgtcagccaggctgaagtgcagtggcatgatatcggctcactgccacctccttctctcgggttcaagtggtact

SEQ ID NO: 124441 - DNA, 201 bp, Homo sapiens
agccgagatcacgccactgcactccagcctgggcaacagagtgaggctccatttcaaaaataaaataaaataaaattttgaaaaaaaagtgagagtcatamtaggatgaaacagaccttcaggaagaatactggagtccaaaaaacgaattcactgtgcagctaagaaaaaaaatgttgatttctgtagctccactttacg

SEQ ID NO: 124442 - DNA, 201 bp, Homo sapiens
aatctgccttttgttagttcattttcagcaaaccttcagaggttgaaggggggaagctttccctctctcccttatagtttttttgttggtttgtttgtttttgtttgttttgaggcagagtctcactctgtcagccaggctgaagtgcagtggcatgatatcggctcactgccacctccttctctcgggttcaagtggtac

SEQ ID NO: 124443 - DNA, 201 bp, Homo sapiens
tagtgagaacatctgcacattccaagtttaattatagctccttacagttttttttaagagatgaggtctcgctctgttgcccaggctggagtgctgtggcragatctcagctcactacagcctccatctcccaggttcaagcagttctcccacctcagcctcccgagtagctgggattacagggtcctgccaccatgcctg

SEQ ID NO: 124444 - DNA, 201 bp, Homo sapiens
tgaagatctcggccaggcctgctctgtgacttccgccacgctcccacgggtggcggcgaggagcctgagccggcgatggtgctacaggaggcgctggagcyggccatgtgcctggatcgctacccgcatgtgcagcttgaggcctcggagctgctgctggaagatggcggctcagccctggccactgagctcaacaccgcc

SEQ ID NO: 124445 - DNA, 201 bp, Homo sapiens
cacacatacacaacatatacacacaagcacatatacaaacatgcatacacacatgcacacacaacacacacatgcacacaaacacatacacatttacacawgcatgcacacacaatacacactgtacacacatatacacatacatgtacacatacactaacatgtttcgagaagtcagggaccccaaatggagggatcagc

SEQ ID NO: 124446 - DNA, 201 bp, Homo sapiens
tctcctaataatctgccttttgttagttcattttcagcaaaccttcagaggttgaaggggggaagctttccctctctcccttatagtttttttgttggttkgtttgtttttgtttgttttgaggcagagtctcactctgtcagccaggctgaagtgcagtggcatgatatcggctcactgccacctccttctctcgggttc

SEQ ID NO: 124447 - DNA, 201 bp, Homo sapiens
taaatgcttgaggggacggataccccattttccatgatatgattattacagattgcatgtctatatcaaaacagctaatgtatcccatatatacctactaygtacccacaagaattaaaaataaaaataagtaaataaaggcaggcgataacagatctggcgaagatgtggagaaaggggaatcctcatacgctgttggtg

SEQ ID NO: 124448 - DNA, 201 bp, Homo sapiens
gcagattaaaaattcctgggctaatcagtagtggaatttcacctgttaacagccacggccctccagcctggacaatacagcaagataccatctctaaaagmaatataaaatttgtttttaaaaagaagcagcacctgttagagagaggaacttctggtttaataaatcatgactaaagtgactacatctttttttctctct

SEQ ID NO: 124449 - DNA, 201 bp, Homo sapiens
atatacatacacatgcacacatatacaaacatacatacacacatacacaacatatacacacaagcacatatacaaacatgcatacacacatgcacacacarcacacacatgcacacaaacacatacacatttacacatgcatgcacacacaatacacactgtacacacatatacacatacatgtacacatacactaacatg

SEQ ID NO: 124450 - DNA, 201 bp, Homo sapiens
aaagtgggcaaaagatttgaacagacatttctcaaaaacagacatacacatggctaacaggtataagaaaaaatgctcaatatcactaatcatcagagaartgcaaatcaaaaccacaatgagatatcattgcaccccagttaaaatggcttgtatcaaaaaggcaggcaatgggtacaaaaaatagaattaatgaataag

SEQ ID NO: 124451 - DNA, 201 bp, Homo sapiens
cgacaaagtgactcggaaacacgtggattgctgcattggccatctctagacacagtcacgaacagaagctctgagggacagggccctgtagaaaccaaccrgctgtcctccatgccaccaactctaaaaaggggtgaggttgacacctcaggtgtatcactggcactctttgggaccctatgctcttaagtctatcaccaa

SEQ ID NO: 124452 - DNA, 201 bp, Homo sapiens
tcacacatatacatacactcacacatatatacatacacatgcacacatatacaaacatacatacacacatacacaacatatacacacaagcacatatacamacatgcatacacacatgcacacacaacacacacatgcacacaaacacatacacatttacacatgcatgcacacacaatacacactgtacacacatataca

SEQ ID NO: 124453 - DNA, 201 bp, Homo sapiens
tagatgaacttctgtgactctcactgcggaaaactccagaggacttttgtctgtcctctgcccagatctgacacgggtaggagcacgatgcagctctcccyaggtgatcagctgtccccagaagacaatatggcaccagacggtctttctcgaatgcttggagaggcaaagcgatggccaagggtttccactgaagctgcc

SEQ ID NO: 124454 - DNA, 201 bp, Homo sapiens
atttaggatatatcttgtaggtaaaggcagcaggacctgctaatggatcgaatagaaggtgtgaaacaaggagaagaatctaagattcatactgcgttttragtatggtatcactgattgcagtgggaaactcaagttctgttggctttctgaaatgtgaggtgttattagtcatctcagagaatgtgtcccgtaggcaat

SEQ ID NO: 124455 - DNA, 201 bp, Homo sapiens
aaagcttatgtgctttatgtgagatccaatttttttttactttttacatgtttatttattacttattttttaaagagacagggtcttgctacgttgctcargctggaatgcatgataaaaccccatctctaccaaaaatacaaaaattagctggttgtggtggtgagcacctgtagtcctagctactcaggaggctaaggc

SEQ ID NO: 124456 - DNA, 201 bp, Homo sapiens
gacaaagattaagaccaattctgttttgtggttgtcatagtcattaggaaccgatctttcctagaactctccaagccttagtggtctgatttgagggtccstagggaagctttcccacctgagaatttcacacatttgccaataaaccagaaattctacttcttttgagtctcagtgggttttcattttccagcttctcct

SEQ ID NO: 124457 - DNA, 201 bp, Homo sapiens
ggtacgcatatttgtttcatattgccaaagagtcttcacaaatattttcccagtttacatttctcatacccttgacaattctgtgcattagcatttttccrtttctgccaaattaagaggtggaaaatgctatctgaatattagttgaacttgctttaatttgcacttcattgattactaatgggagtggacagctttttc

SEQ ID NO: 124458 - DNA, 201 bp, Homo sapiens
attgcattttgtattattaaacattttccatcatttaaatggcatatatccaatatatggctatcctcaaacttactttactattattaatttacctgccytactacattactttattattggacctttagatagtacccgaattttccctatggaaatattgctgaaaataacaattataagtagatgtatttgtttgtc

SEQ ID NO: 124459 - DNA, 201 bp, Homo sapiens
aaccactccagccctgttctgtggctgggattgcgaggaggcatttggaagggtcacgagagccttaggttatactatacctcttactaacatcacaggakcttctgggtgtcattttgccagccagaaacctctgtggctggtggtgcctttgtccgagttttgcttgggctggctaggctcattccacccactcagccc

SEQ ID NO: 124460 - DNA, 201 bp, Homo sapiens
gtaatcttggagatattcccaaagcataattataaataaagttttgtgactagtgtttcttcacttaacaatagagcataattgcattttgtattattaarcattttccatcatttaaatggcatatatccaatatatggctatcctcaaacttactttactattattaatttacctgccctactacattactttattatt

SEQ ID NO: 124461 - DNA, 201 bp, Homo sapiens
tgagaaacagaagagacccttgacaactgggagccggcctggcacacagctgggagcggtgtcttcctgttaaacaggcgattccacagaacaccagcacrcaatcactctgtgactaagtggaacaagacaggagcaagaccactccttaatcatgtctaaacactgaaaaaaatagaatcatttgtccaaatcacatag

SEQ ID NO: 124462 - DNA, 201 bp, Homo sapiens
aggaatggtataaaaccgtcatgagaattctgcccccatgatccagtcaccttccaacaggccccacctccaacattgggaattacaattcaacatgagaygtgggcaaggacacagatccaaaccatatcagaagatgattagatcatgagatcacagccctcctgaatgggattagtgcctttatagaagagactccag

SEQ ID NO: 124463 - DNA, 201 bp, Homo sapiens
gaacctgaaggtaatcttggagatattcccaaagcataattataaataaagttttgtgactagtgtttcttcacttaacaatagagcataattgcattttrtattattaaacattttccatcatttaaatggcatatatccaatatatggctatcctcaaacttactttactattattaatttacctgccctactacatta

SEQ ID NO: 124464 - DNA, 201 bp, Homo sapiens
tttagagattatttaatttgtaatcggttagagtagtaaggctctctctaaaacttgtagtcagcagaaaggaatatcttaaattcagattaggatgctaygtagcaaaatcaatggcctgcaggcgtgatttaacccttgccttgcatggtctcaggtcttgtttataatttggtatctcatctcgacagaagtctgttt

SEQ ID NO: 124465 - DNA, 201 bp, Homo sapiens
ggtagaacttgcagagcccagtccaaaataaacaagtgactgacaagaacggggaagtcgatctccccttcccagggcctgcctcccaaacccacacagayagagaaccaaagggactgcaacctctgcacccatgcacttggcacttagatgaggggatgagcaagaaccctcaccaggttcctgcaagcacaccaggaa

SEQ ID NO: 124466 - DNA, 201 bp, Homo sapiens
ctgggtagaacttgcagagcccagtccaaaataaacaagtgactgacaagaacggggaagtcgatctccccttcccagggcctgcctcccaaacccacacrgatagagaaccaaagggactgcaacctctgcacccatgcacttggcacttagatgaggggatgagcaagaaccctcaccaggttcctgcaagcacaccag

SEQ ID NO: 124467 - DNA, 201 bp, Homo sapiens
gagccccagctaccagtcttccttgatgctaaccaggcctgggtagaacttgcagagcccagtccaaaataaacaagtgactgacaagaacggggaagtcratctccccttcccagggcctgcctcccaaacccacacagatagagaaccaaagggactgcaacctctgcacccatgcacttggcacttagatgaggggat

SEQ ID NO: 124468 - DNA, 201 bp, Homo sapiens
tcatcagctaatattctgatcattggcccatatctaagtggtgatcagacaacagctcggctttgcctgagtgcaggtgagtcgggcaaggacaaaagaaygtgcacactaggacttcacctgtgttgctgcttcctggcagcagactctgaagggagagtaacagatgcccacaactggaatcaaaatttaatctggagg

SEQ ID NO: 124469 - DNA, 201 bp, Homo sapiens
ccttgtctttactaaaaatacaaaaaattagccgggtgtggtggcagtcgcctgtagtcccagctactccggaggctgaggcaggagaatggcgtgaaccyggggagcagagcttgcagtgagccgagatggcgccactgcactccagcctgggcgacagagcgagactctgtctcaaaaaaaaaaaaaaagtgcattttt

SEQ ID NO: 124470 - DNA, 201 bp, Homo sapiens
gcaaggacaaaagaacgtgcacactaggacttcacctgtgttgctgcttcctggcagcagactctgaagggagagtaacagatgcccacaactggaatcaraatttaatctggaggccaggcacagtggctactgccttaatcccagcactagaggccaagacaggtagatcacttgaggccagaagttggagaccagcct

SEQ ID NO: 124471 - DNA, 201 bp, Homo sapiens
ctgtgtcgggacatctcaaaaccactccagccctgttctgtggctgggattgcgaggaggcatttggaagggtcacgagagccttaggttatactataccwcttactaacatcacaggagcttctgggtgtcattttgccagccagaaacctctgtggctggtggtgcctttgtccgagttttgcttgggctggctaggct

SEQ ID NO: 124472 - DNA, 201 bp, Homo sapiens; identical to SEQ ID NO: 21011

SEQ ID NO: 124473 - DNA, 201 bp, Homo sapiens
tctgctcaccgcaacttccgctccccaggttcaagggattctctcttctcaacctcccgagtagctgggactacaggtgcccaccaccatgcccagctatkttttgtatttttagtagagacagggtttcaccatgttggccaagctggtcttgaactgctgaccttgtgatccacccgcctcagcctcccaaagtactgg

SEQ ID NO: 124474 - DNA, 201 bp, Homo sapiens
aataacaggttttttatttatttatttatttatttatttattgagatggagtctcgctctgttgcccaggctagagtgtagtggcgtgatctctgctcacygcaacttccgctccccaggttcaagggattctctcttctcaacctcccgagtagctgggactacaggtgcccaccaccatgcccagctattttttgtatt

SEQ ID NO: 124475 - DNA, 201 bp, Homo sapiens
taatgcacccatatgtcagacattattacagacaggcatccttatggttggatcagctggatcctggaagaattgagctcacctgggagctcttactcccstggcaagcaaaagggaactctgaatgctgaacaatgtgccaggaaatggttatttatatgaaagctattggtgggaagaggaatgggttctcaaacctgg

SEQ ID NO: 124476 - DNA, 201 bp, Homo sapiens
aggcttactacctggttaatgaaataatctgtacaacaatccccatgacacagtttacctgtgtaacaaacctgcacatgtaccccagaacttaaaataamaggttttttatttatttatttatttatttatttattgagatggagtctcgctctgttgcccaggctagagtgtagtggcgtgatctctgctcaccgcaac

SEQ ID NO: 124477 - DNA, 201 bp, Homo sapiens
taagtgaagagaataaaagcagttttgatattgatgtgcttattgaatttaaaatgcaaagatacattttatgagaaatgcatattgaaggtagaagttasagaaaagagcaaaagaccctgtggttttaaatctaatagaatctgtgacaggcaggaggaaatctaacgtcttgaattgatatggacgaaaatgagaagt

SEQ ID NO: 124478 - DNA, 201 bp, Homo sapiens
acaccagggcctatcagagagtggagggtgggaggagggagaggaccatgaaaaataactaataggtactaggcttactacctggttaatgaaataatctrtacaacaatccccatgacacagtttacctgtgtaacaaacctgcacatgtaccccagaacttaaaataacaggttttttatttatttatttatttattta

SEQ ID NO: 124479 - DNA, 201 bp, Homo sapiens
gcgccatcctgaccagaggagggcagggacaagaagacttctgagttcttcacacagccaggaaagcttgggtaaaaagaaccaagggatcatggtagccrctcacacaaagctttagaggggaagatgccttcttttagggttcaaagcacatttctcattcttgaaaatggatagcagatttatcaggaggcgttggga

SEQ ID NO: 124480 - DNA, 201 bp, Homo sapiens
gatggagaaaagaaagagtaatgtcctgaataggaaggggtgataagtgaagagaataaaagcagttttgatattgatgtgcttattgaatttaaaatgcraagatacattttatgagaaatgcatattgaaggtagaagttagagaaaagagcaaaagaccctgtggttttaaatctaatagaatctgtgacaggcagga

SEQ ID NO: 124481 - DNA, 201 bp, Homo sapiens
aaacctcctcttcaacatcacccagaggtcctggcccctgtggagcccaccaatctagcaggaatccccccatctgtcctggagctgaggataagcacttsaggaacaagttcattggcttagggaactctctccctctcttgtccttcagccacaggctctgccgggccccagtcctgggccgacaaggagcctcagcat

SEQ ID NO: 124482 - DNA, 201 bp, Homo sapiens
gtccaggaattccatttttaaggttttcttgggtccctctggccaagaggggatcctgttcaatcagaggggggcttaggattttattttattttattttwgaaacgtttgtagaataaatgaattcatgtggtcatggtatcccttatgccaaggtcagtaagggacctaaccatgtgtgaggtgataaactttccgatg

SEQ ID NO: 124483 - DNA, 201 bp, Homo sapiens
ggttagagtagtaaggctctctctaaaacttgtagtcagcagaaaggaatatcttaaattcagattaggatgctatgtagcaaaatcaatggcctgcaggygtgatttaacccttgccttgcatggtctcaggtcttgtttataatttggtatctcatctcgacagaagtctgttttgtcagtccgatggtctctatttta

SEQ ID NO: 124484 - DNA, 201 bp, Homo sapiens
caatccccatgacacagtttacctgtgtaacaaacctgcacatgtaccccagaacttaaaataacaggttttttatttatttatttatttatttatttatwgagatggagtctcgctctgttgcccaggctagagtgtagtggcgtgatctctgctcaccgcaacttccgctccccaggttcaagggattctctcttctca

SEQ ID NO: 124485 - DNA, 201 bp, Homo sapiens
ctgtatcccataaagatcgtttgcctttagccatggtactcagggtgagcttggctatggcagggcctctataaccttcatcagcacctttccttggccawcctcaataaacagtcattaaaacagtgggcagctatacgaacaaaaaaccacagggatgttccctgatcccagctactttccagacacaccttggttcca

SEQ ID NO: 124486 - DNA, 201 bp, Homo sapiens
gccccacagacttgcatttcccaagtccccaccttctgtatcccataaagatcgtttgcctttagccatggtactcagggtgagcttggctatggcagggsctctataaccttcatcagcacctttccttggccaacctcaataaacagtcattaaaacagtgggcagctatacgaacaaaaaaccacagggatgttccct

SEQ ID NO: 124487 - DNA, 201 bp, Homo sapiens
aagagtgcagggatgccggagcctggagctgcagctgggcagctatagctatgcctggggagcctggggctcccaccccgccagcgcggccaactcagtargaggcagggctctgacctgttcctggcccccaagaacacaggaataccagggcctggagcctgttcccagctcctgctggcttcctggagggcgcagtcc

SEQ ID NO: 124488 - DNA, 201 bp, Homo sapiens
atgggttctcaaacctggctgattatcagaatccctggggctatttttaaatagccaggttgttgttgttgttgttgttgttgttgttgttgttgttgttktttgagagggggttttgctcttgttgcccaggctagaatgcaatggcacgatctcggctcactgcaacctccacctcccgggtgcaaatgattctcctgt

SEQ ID NO: 124489 - DNA, 201 bp, Homo sapiens
gaggaatgggttctcaaacctggctgattatcagaatccctggggctatttttaaatagccaggttgttgttgttgttgttgttgttgttgttgttgttgttgttgtttgagagggggttttgctcttgttgcccaggctagaatgcaatggcacgatctcggctcactgcaacctccacctcccgggtgcaaatgattct

SEQ ID NO: 124490 - DNA, 201 bp, Homo sapiens
aagaggaatgggttctcaaacctggctgattatcagaatccctggggctatttttaaatagccaggttgttgttgttgttgttgttgttgttgttgttgttgttgttgtttgagagggggttttgctcttgttgcccaggctagaatgcaatggcacgatctcggctcactgcaacctccacctcccgggtgcaaatgatt

SEQ ID NO: 124491 - DNA, 201 bp, Homo sapiens
ggaagaggaatgggttctcaaacctggctgattatcagaatccctggggctatttttaaatagccaggttgttgttgttgttgttgttgttgttgttgttgttgttgttgtttgagagggggttttgctcttgttgcccaggctagaatgcaatggcacgatctcggctcactgcaacctccacctcccgggtgcaaatga

SEQ ID NO: 124492 - DNA, 201 bp, Homo sapiens
gctggctatgttctgaatgtttgtgtccctccaaaattcatacattgaaaacctaaccccgaaggagatggcattaggaaggggggggcctttgggaagtktattagtccattcttgcattgctataaagaaatacctgagactgggtaatttataaagaaaagaggtttaattcgctcacaattctgcaggttctaaagg

SEQ ID NO: 124493 - DNA, 201 bp, Homo sapiens
ttggtgggaagaggaatgggttctcaaacctggctgattatcagaatccctggggctatttttaaatagccaggttgttgttgttgttgttgttgttgttrttgttgttgttgttgtttgagagggggttttgctcttgttgcccaggctagaatgcaatggcacgatctcggctcactgcaacctccacctcccgggtgc

SEQ ID NO: 124494 - DNA, 201 bp, Homo sapiens
ggggctaccaggagctggaagaggaaggaaggattctctctagagtctttgcagagagagcaaagccctgctgacacctgctggcttccagaactgtaagrtaatgcatttgtattgtttgaagatgtccatgtttgtggtcatttgtgataacagccctaggaaactaatgcacccatatgtcagacattattacagaca

SEQ ID NO: 124495 - DNA, 201 bp, Homo sapiens
acccaagactgggtaatttataaagaaaaagaggtttaatggactcacagttccacatggctggggaggcctcacaatcatggtggaaggcaaaaggcacmtcttacatgggggcagacaagagaaaatgagagccaaacaagaggggaaacctttgtaagaccatcagattgtgtccaaaattggtgggttcttggtctc

SEQ ID NO: 124496 - DNA, 201 bp, Homo sapiens
tgaactcctcttgacgttcagacgctccttctcttctctttcttcgccttactgctctgccacccagcagctattctgctcatggagcctggggtttagcrtttatatgggtacaggattgggtgggtacggcaggccaaaagtcaacatttgggtgtgaaaacaggaatgcctgttcccatttagggtcacaggtttcca

SEQ ID NO: 124497 - DNA, 201 bp, Homo sapiens
ttttgcttgggctggctaggctcattccacccactcagcccagcaggctgtactcagcccacactaccggcccagatcccacgcctgccaagggcaagccrggcacagagtggtgagggatgtgtaagtgagcgagcatggggtctggacactgcacacaaccaggcatgccagctgctgcagcgggatgggcagctccag

SEQ ID NO: 124498 - DNA, 201 bp, Homo sapiens
gtgaaccacatacgcaattttaaattttctagtagcaagattaaaaagtaaaaacagacaggtaagatcaattttaacaacgtttcatttctcagtatgtygaaaatatctttgtaacatgtaaacaacatgtaaaaattacttaatgagctatttgacattcttcgttttcatgctaagtctttaaaatgcagtgtgtat

SEQ ID NO: 124499 - DNA, 201 bp, Homo sapiens
agggcttctctgcagctaatgagtgggccaccacccagaaacattcaactgcaggcgtgcaaacctagagcacaagggagttaacactctggagcagcttyaatcaatgagggcgagtcagtaagaaaatatgactatcttctgcttctcaagagaatcattccaagatgcagtctacacagctcttcaaagggtccctgt

SEQ ID NO: 124500 - DNA, 201 bp, Homo sapiens
tctcttgtctcttccaccatgtgaggacacggtaagaagacggccagcccttgaaccaagaagcaggctctccccagacactgtatatgttactggcttgwtcttggacttccccgcctccaaaactgtgagaaataaaacataaagcaactgtcagattctaataaagcattctgaggattacaacaatgaaaaggctgc

SEQ ID NO: 124501 - DNA, 201 bp, Homo sapiens
aggcatggtggcacacacctgtaatcccagctattcgggaggctaaggcaggagaatcacttgaacctgggagcgagaggttgcagtgagccgagattgcrccactgcatcccagcctgggcaacggagcaaaactccatcttaaaaaaaaaaaaaaaaaaaaagaaacaaacaaacaaacaaattaggagatgcttaatt

SEQ ID NO: 124502 - DNA, 201 bp, Homo sapiens
ccctgaaatttcattaaccagagaaaattaaaactcctatcacagaggaagactgaaaattgaataacactcctgcagcccagacaaacttcgtgctagaycactgcgtgtcctctggtcccattcaattcccaaagagaattatttacttaccattgtctgagcattaggtccattctttcccctgaaaattatttaccc

SEQ ID NO: 124503 - DNA, 201 bp, Homo sapiens
aggtgataatatcttattaagttctttcattaattgagtttaaaaatatttgacacccattgattttatatttgtatgagagtcatgattttacttttttwaaaaattgctctttaaataacagatgctactgaggttgcagagaaaagggaatgcttatacactgttggtgggaatgtaaattagttcaaccattgtgga

SEQ ID NO: 124504 - DNA, 201 bp, Homo sapiens
tcaaaaaaaaaaaaaaagtaatttatgtgttcattaaaattagtcattggcttttaaataggatttttgtatcttataaaaaattatttaaaattattacstgtacatgtgtgtggttgttagacatctttgaataggtgataatatcttattaagttctttcattaattgagtttaaaaatatttgacacccattgattt

SEQ ID NO: 124505 - DNA, 201 bp, Homo sapiens
gggctaccaggagctggaagaggaaggaaggattctctctagagtctttgcagagagagcaaagccctgctgacacctgctggcttccagaactgtaagakaatgcatttgtattgtttgaagatgtccatgtttgtggtcatttgtgataacagccctaggaaactaatgcacccatatgtcagacattattacagacag

SEQ ID NO: 124506 - DNA, 201 bp, Homo sapiens
gaggcggaggttgcagtgagccgagatcacaccaccacactctagcccgggtgacagagcaagactctgtctcacataataataataataataataataatctggaaaatagctgcagaagtagctccagcatgcatattggtccctgagtttcaattctcaatacatcatattaaatgcctccatcctctttacactaac

SEQ ID NO: 124507 - DNA, 201 bp, Homo sapiens
aatccctccactccaggttatttgagtccaaatccctggaaggtattgtacaactctagataacagcaagcacaacaaactgtggtctatagacaatttcktcctgctcctggaggttcaactgacttccctttacccactttgcttccctttacacactaactttaatattcctaatctatgactgtatctgccttccca

SEQ ID NO: 124508 - DNA, 201 bp, Homo sapiens
atagtttgcatagcctaagaagctgcctgtgatcatttcttcaatcagttgaattatcaatttatttattaaaatatagcttcaagttctcacctcaaaacactcacatttgtaaagccaatttactgccaaaactggctctgatctcctcctttcagggataggaagatgtgaggattttgattagggactctaagatag

SEQ ID NO: 124509 - DNA, 201 bp, Homo sapiens
ggaggcggaggttgcagtgagccgagatcacaccaccacactctagcccgggtgacagagcaagactctgtctcacataataataataataataataataatctggaaaatagctgcagaagtagctccagcatgcatattggtccctgagtttcaattctcaatacatcatattaaatgcctccatcctctttacactaa

SEQ ID NO: 124510 - DNA, 201 bp, Homo sapiens
aggaggcggaggttgcagtgagccgagatcacaccaccacactctagcccgggtgacagagcaagactctgtctcacataataataataataataataataatctggaaaatagctgcagaagtagctccagcatgcatattggtccctgagtttcaattctcaatacatcatattaaatgcctccatcctctttacacta

SEQ ID NO: 124511 - DNA, 201 bp, Homo sapiens
ttaagaggtaggaattggaacccagagccagtggactggctcaacactctcaaccatttgacttaatctcattaatcctcaacttcctcacctgtaatatsagcataattctagtaacatccttattgtgttattctggaaaggatttttaaaacggtggatgtgtccttctcagcacagtgcctggcacatagtaagtgc

SEQ ID NO: 124512 - DNA, 201 bp, Homo sapiens
aacttcgtgctagatcactgcgtgtcctctggtcccattcaattcccaaagagaattatttacttaccattgtctgagcattaggtccattctttcccctraaaattatttaccccagcagcccccatttcctcttgctgtgtgaagtaacaaatgtaagtatctgaaccccattggattattggattatcattcttctgc

SEQ ID NO: 124513 - DNA, 201 bp, Homo sapiens
agcacgaagtaaacctacaaagggcttcctgtatttaaccccttctgtttcctgcctcgtgtgttctcagcccatctttttttttttttttttttttttttctgagacggagtctcgctctgtcactaggctggagtgcagtggtgcgatctcagctcactgcaacctccgcctcccgggttcaagcgattctcctgcctc

SEQ ID NO: 124514 - DNA, 201 bp, Homo sapiens
gaaaacctaaccccgaaggagatggcattaggaaggggggggcctttgggaagtgtattagtccattcttgcattgctataaagaaatacctgagactggrtaatttataaagaaaagaggtttaattcgctcacaattctgcaggttctaaaggaaacatagcaacttctgcttctagggaggcctcaggaaacttacaa

SEQ ID NO: 124515 - DNA, 201 bp, Homo sapiens
tacccaagactgggtaatttataaagaaaaagaggtttaatggactcacagttccacatggctggggaggcctcacaatcatggtggaaggcaaaaggcamatcttacatgggggcagacaagagaaaatgagagccaaacaagaggggaaacctttgtaagaccatcagattgtgtccaaaattggtgggttcttggtct

SEQ ID NO: 124516 - DNA, 201 bp, Homo sapiens
catagagggaaacaacacacaccagggcctatcagagagtggagggtgggaggagggagaggaccatgaaaaataactaataggtactaggcttactacctggttaatgaaataatctgtacaacaatccccatgacacagtttacctgtgtaacaaacctgcacatgtaccccagaacttaaaataacaggttttttatt

SEQ ID NO: 124517 - DNA, 201 bp, Homo sapiens
tttatgttatgagagctggctatgttctgaatgtttgtgtccctccaaaattcatacattgaaaacctaaccccgaaggagatggcattaggaaggggggggcctttgggaagtgtattagtccattcttgcattgctataaagaaatacctgagactgggtaatttataaagaaaagaggtttaattcgctcacaattct

SEQ ID NO: 124518 - DNA, 201 bp, Homo sapiens; identical to SEQ ID NO: 21003

SEQ ID NO: 124519 - DNA, 201 bp, Homo sapiens
tggtcacattggacctcctggtgaagattttggattttgtgcaaatgtttgtagaaagccataggaggattttgaacaagggagtgacaaaaacatatttmggttttaagtaaaacagaagtagatgaaatgacactagttagagggctagtccagcagttgcagggagagatggcagtggcttgaaatgaagctgtagca

SEQ ID NO: 124520 - DNA, 201 bp, Homo sapiens
cattgtcgggcaaggtacaaggctgtttccttatcggtgagacctagaataatattgccaacatttagtgtgcagtaaggagcagctgatattcaagacawctaaaattcctggcacacaatacatttccagtaaatgacagcttttttttattatttctcagaagaaacagcaccagcatagctctggacaactccaagt

SEQ ID NO: 124521 - DNA, 201 bp, Homo sapiens
atatgcccttcccactctagattaggtgagagggcaaggttgagtgagtgggcattggaatggctaaagatgggcaggggagggttgtaggaagaggacaygttcatgtcttccacagacctggctcaaggttaattataatacctttgcaaagttgaacctgaccttcctgtacccacctagagctcccactccaagtaa

SEQ ID NO: 124522 - DNA, 201 bp, Homo sapiens
gtatcactgattgcagtgggaaactcaagttctgttggctttctgaaatgtgaggtgttattagtcatctcagagaatgtgtcccgtaggcaatcggggtkcccgttaacaaagccttgtaaaatgactcacaaaagaaacaaattgggccggtcgtggtggctcacgcctataatctcagcactttaggaggccgaggca

SEQ ID NO: 124523 - DNA, 201 bp, Homo sapiens
ccactacactccagcctgggcgacagagcaagactctgtctcaaaaaaaaaaaaaaaattcctgaaatgaatttagatctgaaattccaaattctcccatsagaagagtggggatttgagatttctaaggtatagattttacaagttactccttcccaaagaacccatgcccaccaagaccatgatgaggtgaagagaatc

SEQ ID NO: 124524 - DNA, 201 bp, Homo sapiens
gaaaccaaggtcatctccctccaccattcggtcttagcagctaagccctaatcctcacaattattagaggaattgttcttaggtcactattctgtttctahtttttggaaaatgcaagatgtagtgtattggggaggggcaaccacaaaattcctgaaatgggcctggcgcggtggctcacgcctgtaatcccagcacttt

SEQ ID NO: 124525 - DNA, 201 bp, Homo sapiens
gggtacgtacagaaagtgaagaatttctgtgaaagttgcttgccatggttcctggctattttagtgttgccagctctaagaagtagtagcgtagtagttaytagctacaagttttcagtgtaagtcatcattattaataacaagtgctattgttattgtcttattagaataacaaaagacccaaatctagctaactgaaca

SEQ ID NO: 124526 - DNA, 201 bp, Homo sapiens
taaagcaccaaataaattctggcacattaatactctcagttcagctccatcatcaaacatgtctcccattcctggtggcctcacagacaccaaggtttgcrgttttcatgggttataaaaacaacttgatgaaaagcaagtcttattcttttttttttttttcaattgagatggggtctcccagtgttgcctgggctggtc

SEQ ID NO: 124527 - DNA, 201 bp, Homo sapiens
ttatggctaatatgttacactaacaatggtaatctgaagggttgcaataatactgttcagtcaggctggggctcgtagtgaaattttacggtttattagcyataatcatcttgcaatttttttcctttaggttttggcttgtggttaacgggcatgttgataaacatccattcagatcatatcctaaggaatctcagaaaa

SEQ ID NO: 124528 - DNA, 201 bp, Homo sapiens
tctgtacctgtaacggctatttgcaaagcagatacttgagccattgtgcagtgtatgctgatgactgggtaacagatccccgttttctaataggtgagtgyccacagcagtgaactccgccttgttcacatcattgcttttatattgatgtcccagtggtttctaatgagaaagtccaagcttcctgtgagaacaaagaca

SEQ ID NO: 124529 - DNA, 201 bp, Homo sapiens
cgtgtaatcctattaatgggctcctgtggggagcctagcccagcttcacttttaaatgtgcggtgggtaatgttaaaacacagcagggaactttgagggtraagtgtgttaaaagataaactcaggtgcattaaaattgtagtttttttaggctgggcgcagtggctcatgcctgtaatcccagcacgctgggaggccgag

SEQ ID NO: 124530 - DNA, 201 bp, Homo sapiens
aaaacattgcacctactttgattccttgtatctctcgtgtaatcctattaatgggctcctgtggggagcctagcccagcttcacttttaaatgtgcggtgrgtaatgttaaaacacagcagggaactttgagggtgaagtgtgttaaaagataaactcaggtgcattaaaattgtagtttttttaggctgggcgcagtggc

SEQ ID NO: 124531 - DNA, 201 bp, Homo sapiens
gcactttgggaggctgaggtgggcagatgacttgaatccaggagttcaagaccagcctgggcaacatggcgaaactccagctctacaaaaaatacaaaaaygtagctgggcatggtgacacgcaccatggtcccagcttactcagaggcactgaggtgggaggatcacctgaggccaggagatcaaggctgcagtgagcca

SEQ ID NO: 124532 - DNA, 201 bp, Homo sapiens
gggcgggggggagggggttggcctagagtctaatgctgatggtcggtcttgagggccactggtttctactcctttctgccggttccccttttggtatcttyggtgatggtggagctgttttctcccagccaagtgatcagctgcaactggaaacctggtgtcctaaaactgcctagcagtttctccttataggcttgatca

SEQ ID NO: 124533 - DNA, 201 bp, Homo sapiens
agcgaccttactggagaacgttatcagttgagatgagaaggggaaacgtggatagacgtacaccaggtgatcacacagagtgggaaggccatgcgaagatkgacacagaggcgggggcgatgcagccatgaacccaggaacacgtggtgccaccagagctgggggaaatgggactggaaccttccctgaaccttcagaggg

SEQ ID NO: 124534 - DNA, 201 bp, Homo sapiens
gtctgccagaaggtcatatgagagtcctaagccctggcacctgtgaaagcgaccttactggagaacgttatcagttgagatgagaaggggaaacgtggatwgacgtacaccaggtgatcacacagagtgggaaggccatgcgaagatggacacagaggcgggggcgatgcagccatgaacccaggaacacgtggtgccacc

SEQ ID NO: 124535 - DNA, 201 bp, Homo sapiens
tccaggtaagtattcactagcatctctgaagtccgtatttcattttgtagtaaatgcactactttggtctgtgttttcttctaggaggcttatttgaataygtaactgcagccaactattttggagaaatcatggagtggtgtggctatgccctggccagctggtctgtccaaggcgcggcttttgctttcttcacgtttt

SEQ ID NO: 124536 - DNA, 201 bp, Homo sapiens
gtaatcccagctacttgggaggctgaggcaggagaatcgcttgaacccagaggtggaggtgcagtccagcctgggcaacaagcactaaactccatcttaaraagaagtcatagcgttttttggagcagaccaattcatgaatcagcaccaaaccacaagcagtatgagctccacctagaaggtgtgtgggaaagccatttt

SEQ ID NO: 124537 - DNA, 201 bp, Homo sapiens
catatgtagttgatgatcagaagttgtgatatgaattagtaaaccatgtaacgctggatatgtcttactgattaacattctgtaaggataatatttttccrttcttgaatttatgttctccaggtaagtattcactagcatctctgaagtccgtatttcattttgtagtaaatgcactactttggtctgtgttttcttcta

SEQ ID NO: 124538 - DNA, 201 bp, Homo sapiens
ctttgcttctgtctttatctctgacgatggtgcctcaaaacattgcacctactttgattccttgtatctctcgtgtaatcctattaatgggctcctgtggrgagcctagcccagcttcacttttaaatgtgcggtgggtaatgttaaaacacagcagggaactttgagggtgaagtgtgttaaaagataaactcaggtgca

SEQ ID NO: 124539 - DNA, 201 bp, Homo sapiens
ggtccattttacatggtttactctgtattctctgcttgcatgatccatcagcaggtgcactggtttattggtgtcttccactgtaactgtatgtgtgtgtrttcacatagacaggtattgatatacatatgtagttgatgatcagaagttgtgatatgaattagtaaaccatgtaacgctggatatgtcttactgattaac

SEQ ID NO: 124540 - DNA, 201 bp, Homo sapiens
ttttccttccccactatcagcagtgaattagtcaggggattgtctctgcattgcacattcatttaacaaataactccgaggagcctgagcaggaggtgccrcttgccacgggagtcctcagtgactgcctttgttaggactggtggccaaatggtgcccagagtgcacagtcagatgcccagaggcctcctctttctgaca

SEQ ID NO: 124541 - DNA, 201 bp, Homo sapiens
tgaagatgtgacgaatgaatgaatctgtgcttgaaaatgaatatctttgtccctcattgctctagggttctatctaggtccattttacatggtttactctstattctctgcttgcatgatccatcagcaggtgcactggtttattggtgtcttccactgtaactgtatgtgtgtgtattcacatagacaggtattgatata

SEQ ID NO: 124542 - DNA, 201 bp, Homo sapiens
ctgctttgctagacacagcaaaagtctcccggagtcaagggcattagctctgaactgtgtcggagtcgctggggggctttgcagactgtgcctgacctcakgctctttctctccacccacgcagctttgttcagtattccctgaacccaggctgctttgctcatggattttccttccccactatcagcagtgaattagtca

SEQ ID NO: 124543 - DNA, 201 bp, Homo sapiens
acctgccaggctggccctcacctgcaagccttgaatcgaccctcaccttccctgtggcctgttgccagccactctgtgatagtgacctcctccaccccatyccagctccggggccccctcactctgccctgcccctcgctactcctccccctccatgagctgtgtgctctccttgttcatgacactggagttcatggttct

SEQ ID NO: 124544 - DNA, 201 bp, Homo sapiens
agcccctggaggcaggtgccttccccagcctcctggcaggcctccctagggccttccgaagcctgtgcctactcctatcacctttgccctctgctctgtgrttacagtgacgccccgctgcatttaccctgttccctggccctctattttgtctccctgggctggtgctgtaacccaggtcctcatcatctgtgttggttc

SEQ ID NO: 124545 - DNA, 201 bp, Homo sapiens
ttacgtgccagtgaggatttctggacctggcgttgtgctggggatatagtgacaagacattccctttgagttgaggagtaaaagacaggttatggagaatstatggggtcttttggacacaaacaccagggagggaaggacaggctgcctggaaggggacagggctggggtggggggatagccatgacgcaggacgagctg

SEQ ID NO: 124546 - DNA, 201 bp, Homo sapiens
ggagtggcaaggaccagagccaggtccagggactttccacagtccatgaggcctgaaggcagcagcagagctacagctcttcccagagcaactgactgttytgggaacaatgagtacaggacagtcaggtcaaggagggaggaaaggtgaaggaagggatagagggaatggtgcgctttcatgtatttattcagcaaacac

SEQ ID NO: 124547 - DNA, 201 bp, Homo sapiens
tttgggagtggcaaggaccagagccaggtccagggactttccacagtccatgaggcctgaaggcagcagcagagctacagctcttcccagagcaactgacwgttctgggaacaatgagtacaggacagtcaggtcaaggagggaggaaaggtgaaggaagggatagagggaatggtgcgctttcatgtatttattcagcaa

SEQ ID NO: 124548 - DNA, 201 bp, Homo sapiens
cagagccagtagcaccttacacaacctgacaggtgtgcacacaggccctgtgctgacctgtgaggtttcgctggagtgaggttgggccctgccttggggarctagagcctcttttgggagtggcaaggaccagagccaggtccagggactttccacagtccatgaggcctgaaggcagcagcagagctacagctcttccca

SEQ ID NO: 124549 - DNA, 201 bp, Homo sapiens
caccacacccggtgagaggaggctgtgggtacaaggatgactcttatgaaaggcaggagaaaagtgagcctgaggaggcgctggccaggcagagccagtascaccttacacaacctgacaggtgtgcacacaggccctgtgctgacctgtgaggtttcgctggagtgaggttgggccctgccttggggaactagagcctct

SEQ ID NO: 124550 - DNA, 201 bp, Homo sapiens
gaattatttcaagcttacagaaaagtagtagagagttcattattgcaaacgtctacataccccaccttccttaagaaaaagaaaagcactgtgctgtctcrggctcagcaaaaccattttctttctttttaaaaaaatagaccatctcaggctgggtgtcatggctcacacctgtaatcccagcactttgggaggccaaga

SEQ ID NO: 124551 - DNA, 201 bp, Homo sapiens
tcaaaccattacatgtcatgagaattcactatcacaagaaaccgcctgcatgatccagtcacctcccactgggtcccttccttgtcctgtggggatcacasttcaagatgagattgggtggggacacagaatcaaaccatatcagtattattttacaattctgaattatttcaagcttacagaaaagtagtagagagttca

SEQ ID NO: 124552 - DNA, 201 bp, Homo sapiens
attggcatctgcaggttttccagtctaattccatgcttaccagtccacccatacggttccaccacaccgtgtgtcccacaccagacacttaagagagaagsttcactgagcaggcggcatgcaggaaggcatcgtggccccagccctgcccacaggctgtctgccctttgggtgactggcatctgcagggtatggtacaaa

SEQ ID NO: 124553 - DNA, 201 bp, Homo sapiens
tgtaatgtggcatctgtaagcagcctgtgtctcaagaggacattttttagcagattggcatctgcaggttttccagtctaattccatgcttaccagtccamccatacggttccaccacaccgtgtgtcccacaccagacacttaagagagaaggttcactgagcaggcggcatgcaggaaggcatcgtggccccagccctg

SEQ ID NO: 124554 - DNA, 201 bp, Homo sapiens
agcatttagcactgaacacaaaccatcccagcagcccctggaagcgtcctggagccctttatttgcacagggccctgcagagaacggagaacaccacaccyggtgagaggaggctgtgggtacaaggatgactcttatgaaaggcaggagaaaagtgagcctgaggaggcgctggccaggcagagccagtagcaccttaca

SEQ ID NO: 124555 - DNA, 201 bp, Homo sapiens
aaccagagtggaaacagcatttagcactgaacacaaaccatcccagcagcccctggaagcgtcctggagccctttatttgcacagggccctgcagagaacrgagaacaccacacccggtgagaggaggctgtgggtacaaggatgactcttatgaaaggcaggagaaaagtgagcctgaggaggcgctggccaggcagagc

SEQ ID NO: 124556 - DNA, 201 bp, Homo sapiens
agggcacagtcctggggaaggcagaatgaaaaggtgcagaagataccagaagccacagactggcagatttgagaaacaccacttccaaaagaaagggcatycccagagacggcaggatcccatgggagggccctcctgggccaggctggttacggaaaggcctgcggtgccttatacagagggtcctgtccactgttccac

SEQ ID NO: 124557 - DNA, 201 bp, Homo sapiens
aagctgattacagtggcaaaatcagaaggaagaaatcttgaaacccttgctatagaccagaaggttttccatgtcctttttctaactgtgaaaaagtattsaatgtcactggtgatgactcagataataatgatgccccacgtgtacattgatttaatattgaactgaatgccagcactaagcagcatctgtctttcccat

SEQ ID NO: 124558 - DNA, 201 bp, Homo sapiens
tctatatatttgtttagtctatcctagcatttagatattaaaccatactgaggtgttgcttacaatggtagcatgctaaaagtctgaagtcagtctgtcaratttgcaaactaccctgcagtgcttcaccttaagctacataaagtgaccttacattgcattgtgctttttctccatgtgtattaatttataatcatagaa

SEQ ID NO: 124559 - DNA, 201 bp, Homo sapiens
gtctcccagtgttgcctgggctggtctcggaactcctgggctcaaacagtcctccttccttggcctcccaaagtggtgggattaccaccacaccaggccamagccttgttctttgcctggaaagaaataagataaaataggaaaattataacatgacagagaacaaagtgtcagatttaatcttacatttactctgattaa

SEQ ID NO: 124560 - DNA, 201 bp, Homo sapiens
cccatttcaggctctcctgctgtcatgtactctgcccttgccttttcgggccagggtgcccatcttcccacgggcagtttctgggagagaggcgctcaccygctatgtcactgtgcggcggccagtgccgctggcccatggggaagctcttcagcacttgcaagtgctggatggcctggatcccagcaggcctgtgaacac

SEQ ID NO: 124561 - DNA, 201 bp, Homo sapiens
tcccatctcccacctgccctctcgtgtttgcccatttcaggctctcctgctgtcatgtactctgcccttgccttttcgggccagggtgcccatcttcccaygggcagtttctgggagagaggcgctcacctgctatgtcactgtgcggcggccagtgccgctggcccatggggaagctcttcagcacttgcaagtgctgga

SEQ ID NO: 124562 - DNA, 201 bp, Homo sapiens
gatgattttgttcttttcaataatccatttttcttcctgggtgcttatagggcactttctttttccttagatggataatctgtgtttgcttgtttattaakttcgcctgattttctccaagcctttttaggaaattgaatttagcccaggaaattgaatttctccgtgtctctcattctgtctgttctgaatgttaggtgc

SEQ ID NO: 124563 - DNA, 201 bp, Homo sapiens
aggcaactccctaaaatgcttgcatggtgctggcgcatctgcgtgctcagtacacaatacctagcactattttgcattgctgtgaatgcacatccagacakgtactctgtgtgtcattcatgtgcactgctgccagcctcatgtgccagcaaaactgtggtgttggaaatcaagggaacactttacaaagttttgcctgac

SEQ ID NO: 124564 - DNA, 201 bp, Homo sapiens
gcgtgctcagtacacaatacctagcactattttgcattgctgtgaatgcacatccagacatgtactctgtgtgtcattcatgtgcactgctgccagcctcrtgtgccagcaaaactgtggtgttggaaatcaagggaacactttacaaagttttgcctgacatcccaagtggaagctttttaacttgagacatcatgtttc

SEQ ID NO: 124565 - DNA, 201 bp, Homo sapiens
tgtgccagcaaaactgtggtgttggaaatcaagggaacactttacaaagttttgcctgacatcccaagtggaagctttttaacttgagacatcatgtttcrttgtacctacattcactcaagcagaaaaatgaatgcagcctcccaaagggccagagtcaccttgaatgatagaacttgaacagctcattcatacagagta

SEQ ID NO: 124566 - DNA, 201 bp, Homo sapiens
aactaatttattaaacagtcacttgatctaagtcatgagcacttggaagagaaccagagtggaaacagcatttagcactgaacacaaaccatcccagcagyccctggaagcgtcctggagccctttatttgcacagggccctgcagagaacggagaacaccacacccggtgagaggaggctgtgggtacaaggatgactct

SEQ ID NO: 124567 - DNA, 201 bp, Homo sapiens
gagaaacaagtgtgtattctctggacacgcctctttggttgctgctgttgattaactcaccattgatgcacagctttccttgcttcactaaccaatgagcygcccgataacctactttggttgcagcctcattttcctttgttttgtgaagaaatcctgctgccttggcctctgtgccttaaatgttctagtttttctgac

SEQ ID NO: 124568 - DNA, 201 bp, Homo sapiens
ggattacaggcatgagccactgcatctggtcctgccttgcttaaatagactgttgagggtgctcccagtgtccttaactcctctagcaagtgttctccccmaaaggctaattgtgagaaacaagtgtgtattctctggacacgcctctttggttgctgctgttgattaactcaccattgatgcacagctttccttgcttca

SEQ ID NO: 124569 - DNA, 201 bp, Homo sapiens
gcacagactatctaaagagcctaacccttcattcacttcagccttgatgtgaactcctcaaataaacaactgagccatatcagtaacatccatagactcamccagagccgacaaagactgctcatcatctgccttgctttttcttttttaattattattttgagacaggatctcactctgtcacccaagctggagtgcagt

SEQ ID NO: 124570 - DNA, 201 bp, Homo sapiens
ctacttaagcccttcagaactcaataatggtggtgagggcagttcttgctcagaaaagtttcagtctcagctctgagctcaaaataatgtgatgaaacttkattaagccatcaaactggtgtgtttatgtgggacaaatcggcatagtcagcttatttgtgacaaaaagttagagaactgatgatagttgagtccatgaga

SEQ ID NO: 124571 - DNA, 201 bp, Homo sapiens
ctcttagtgttgatctgtcatgagattttatgtattttatctctataaatggaagcgttgacatcagtccacatgtatatgattttaattgagcatgatcrtcacttggaaggcactcatggaatcctgttagattcttctcttgatctttgcctttccatatggtattacattacagattcatatcttcctatggaagat

SEQ ID NO: 124572 - DNA, 201 bp, Homo sapiens
gagcagaagtcattcaaaaatgcagctacgcagaagcacgtcctcactcccagagcacagccaaacctagaccgcagcagctgcagccatgtagcaccagkgccctgagcaagttgatgtcaagttgatgtctccaaaatataacacacttgtgctaattcagactaattgtcagcaggcttttctggaaagagccaggta

SEQ ID NO: 124573 - DNA, 201 bp, Homo sapiens
ataatccatttttcttcctgggtgcttatagggcactttctttttccttagatggataatctgtgtttgcttgtttattaatttcgcctgattttctccargcctttttaggaaattgaatttagcccaggaaattgaatttctccgtgtctctcattctgtctgttctgaatgttaggtgccaggacttaagatacttgt

SEQ ID NO: 124574 - DNA, 201 bp, Homo sapiens; identical to SEQ ID NO: 21022

SEQ ID NO: 124575 - DNA, 201 bp, Homo sapiens
tgcacctggcctgggcctcacttcccggtgaagatgccatccttttatattcctaatatttgatgtgaagaagtgagtaatggctcatttctcattaaaaraaacaaatgagataacactgacgtttaaaaaaacacggatcagagtaagattgaacatgggcacaccaagtcagtggcaaagatgttttctcaaatgaaa

SEQ ID NO: 124576 - DNA, 201 bp, Homo sapiens
ctccagcctgcatgctttccccgggggctgaaaagacagctccgcaatgtgctgatcagtattttcatcaaatgtcagtaattttccttccagatagaaargtgaattctatgggctacttcttctgaatcacactttatgattagatatatttaattcttcatgataataggcaaaattaaactataagtatgaaatgcc

SEQ ID NO: 124577 - DNA, 201 bp, Homo sapiens
attagatatatttaattcttcatgataataggcaaaattaaactataagtatgaaatgccaaagtttttgttactacatttaaaaaactgagtactctttkgtaatgaaaaatattgtcacttttgttagcattggttaaatgtctaagcgacagaattatttccttttttaatttttttttcttaggtggtacctccgga

SEQ ID NO: 124578 - DNA, 201 bp, Homo sapiens
tgaggatgacatttgtacaagaaagtaagatttaaaacccaaatcatttaagataggattacagaaatgattatctttaattttttaaaaaattgtgcctrtttcttgtttcctaaggtgcttaatttacccatttctgatgcgaggaggaaagcctatgccactgttggcgtgtacaatggcgattatgttctgtacctg

SEQ ID NO: 124579 - DNA, 201 bp, Homo sapiens
gctgtcatgtactctgcccttgccttttcgggccagggtgcccatcttcccacgggcagtttctgggagagaggcgctcacctgctatgtcactgtgcggyggccagtgccgctggcccatggggaagctcttcagcacttgcaagtgctggatggcctggatcccagcaggcctgtgaacaccttcagcctctaaccagc

SEQ ID NO: 124580 - DNA, 201 bp, Homo sapiens
gactttgttgtcaccggtttggttgaaatacaacgttatctctctaaatatacattctacaatctgacttcctcccctctgcgcccgctgctcccagcackgcacctggcctgggcctcacttcccggtgaagatgccatccttttatattcctaatatttgatgtgaagaagtgagtaatggctcatttctcattaaaaa

SEQ ID NO: 124581 - DNA, 201 bp, Homo sapiens
tggacacagaggcgggggcgatgcagccatgaacccaggaacacgtggtgccaccagagctgggggaaatgggactggaaccttccctgaaccttcagagrgagcgtagccctgctgccaccttgatttccaactcctggcatccagaactgggagagaatcagtggccgttattataagccacccagtgtgtggttaact

SEQ ID NO: 124582 - DNA, 201 bp, Homo sapiens
tgtggtctcactatattgcccaagctggtcttaaactcctggactcaagtaatcctcacacctcagcctcctgaagtgctaggattcgaggcgtgagccawcgtggctggcctctttgtctaatacttgaagaagtgatagcataaatgtgagctctaagagcagcgccccgcattcttcgagacactccatcgtgccagt

SEQ ID NO: 124583 - DNA, 201 bp, Homo sapiens
aaacgctttaaagaatagtcattccaagtagttgcttgcattttcatcctctggaatgcatactgtgctatattttgagtctttcccctttggagcaggtsccatcgagcatatgagtatgaacagttatttaccagttacttgggtttatactgtatgggtaattctgcccgtttgaatagctggagaaatcactcaagt

SEQ ID NO: 124584 - DNA, 201 bp, Homo sapiens
caactcctgacctcacatgatccacctgcctcagcctcccaaagttctgggattagaggcgtgagccactgcgcccagcctaatttttttttaaaaaaagytctgtccttacatgccttcagaattttctcagctctgcagacatagtgtccagttggaacctggggcagatcacaccaggcctctctaaacacacttgag

SEQ ID NO: 124585 - DNA, 201 bp, Homo sapiens
ttgggggtacaacattataggttgtcctgaaagatgacgtccagacgctttgagagtcaaatcatttgctgaataaatgccttgttgttataagtaaaccmagggattattattccagtttgttgggaaaatatttcaagacatacttctttagttccctgtgtgaattaaacaggcatagaacttgcttgcaagacgaca

SEQ ID NO: 124586 - DNA, 201 bp, Homo sapiens
agtatagacaaggtttcaccatgttggccaggctggtctccaactcctgacctcacatgatccacctgcctcagcctcccaaagttctgggattagaggcrtgagccactgcgcccagcctaatttttttttaaaaaaagctctgtccttacatgccttcagaattttctcagctctgcagacatagtgtccagttggaac

SEQ ID NO: 124587 - DNA, 201 bp, Homo sapiens
accatgacctaaattactcccatataaccaaattctctatttcattgttcccaaacttgggggtacaacattataggttgtcctgaaagatgacgtccagwcgctttgagagtcaaatcatttgctgaataaatgccttgttgttataagtaaaccaagggattattattccagtttgttgggaaaatatttcaagacata

SEQ ID NO: 124588 - DNA, 201 bp, Homo sapiens
acaagcaagacaaaggaagcatttgattggtcagagtggaaagttccggaggttagtgggtggtttctccttggaacaatctctcattagaagtcaattgkcagtttctgattgctttaagtttccttccactgttgggtttccatgtgcttatgtaagacacaagacaccatctcagcctgatggccttctaattaattt

SEQ ID NO: 124589 - DNA, 201 bp, Homo sapiens; identical to SEQ ID NO: 21018

SEQ ID NO: 124590 - DNA, 201 bp, Homo sapiens
aaggctaattgtgagaaacaagtgtgtattctctggacacgcctctttggttgctgctgttgattaactcaccattgatgcacagctttccttgcttcacyaaccaatgagccgcccgataacctactttggttgcagcctcattttcctttgttttgtgaagaaatcctgctgccttggcctctgtgccttaaatgttct

SEQ ID NO: 124591 - DNA, 201 bp, Homo sapiens
ttaaaaagaagtcatagcgttttttggagcagaccaattcatgaatcagcaccaaaccacaagcagtatgagctccacctagaaggtgtgtgggaaagccrttttgtaagacgtgtttgcacaagcaagacaaaggaagcatttgattggtcagagtggaaagttccggaggttagtgggtggtttctccttggaacaatc

SEQ ID NO: 124592 - DNA, 201 bp, Homo sapiens
ctggtggccaaatggtgcccagagtgcacagtcagatgcccagaggcctcctctttctgacacctgtcccaggtttgtactcagccaggtccatgaccttrtgggactttgcttctgtctttatctctgacgatggtgcctcaaaacattgcacctactttgattccttgtatctctcgtgtaatcctattaatgggctcc

SEQ ID NO: 124593 - DNA, 201 bp, Homo sapiens
ggagggcaaaggacattttcaggaacatctttagggctcacggtagcgacaaggattgcctgcctcctatctgtgctgaagcctccttctgatcccagggygcttgggttcttgggtgcaggggcggcagcgtctcactggggccctagtcatgtagagcatggagtggcgtctggcatggtggcagcccctggaggcagg

SEQ ID NO: 124594 - DNA, 201 bp, Homo sapiens
caagggaccccaggattgtgggggtggaaagccagcaaccttaaaccttaaacaaacgaagtcttaaagatgacttctaaatctttcaaggtttttgtttwtttgaatatttgaaaactggctgtgtctgaaatcttcaagccttctaataagttggggttctctccaggtcgtatcttttggcttttacacagccaaagc

SEQ ID NO: 124595 - DNA, 201 bp, Homo sapiens
tccaaagcattggaacagaatatattttaaaaactaattcaagaaagcttttgtgaagtaaaacaagacacaagagcgtctgccgtttgcaggtacgcacmctataccggaggaagtggacaggaaacagtgacgatcatctgcacgtgccatgagtggcttgtaagggaaagttcgttagattcttcagggcagcgttcc

SEQ ID NO: 124596 - DNA, 201 bp, Homo sapiens
actggtttctactcctttctgccggttccccttttggtatctttggtgatggtggagctgttttctcccagccaagtgatcagctgcaactggaaacctgstgtcctaaaactgcctagcagtttctccttataggcttgatcactttcagagactttcatgtccaccttatgcaagggaccccaggattgtgggggtgga

SEQ ID NO: 124597 - DNA, 201 bp, Homo sapiens
ctaggcacattgaagtccatgaagaagaaatccaaagcattggaacagaatatattttaaaaactaattcaagaaagcttttgtgaagtaaaacaagacamaagagcgtctgccgtttgcaggtacgcaccctataccggaggaagtggacaggaaacagtgacgatcatctgcacgtgccatgagtggcttgtaagggaa

SEQ ID NO: 124598 - DNA, 201 bp, Homo sapiens; identical to SEQ ID NO: 21023

SEQ ID NO: 124599 - DNA, 201 bp, Homo sapiens
ggccaaaaaagatcattcttattgtgaatgatgttttggtgatagctggagaaggtagggaaaatatatccatcctaggcacattgaagtccatgaagaagaaatccaaagcattggaacagaatatattttaaaaactaattcaagaaagcttttgtgaagtaaaacaagacacaagagcgtctgccgtttgcaggtacg

SEQ ID NO: 124600 - DNA, 201 bp, Homo sapiens; identical to SEQ ID NO: 21017

SEQ ID NO: 124601 - DNA, 201 bp, Homo sapiens; identical to SEQ ID NO: 21019

SEQ ID NO: 124602 - DNA, 201 bp, Homo sapiens; identical to SEQ ID NO: 21020

SEQ ID NO: 124603 - DNA, 201 bp, Homo sapiens; identical to SEQ ID NO: 21021

SEQ ID NO: 124604 - DNA, 201 bp, Homo sapiens
ccatcaaataaaagtattccaaaagaaaacatgccaaggatctattccttgcactccatttataatgttctttttttttttgagacagtctcgctctgtcrcccaggctggagtgcagtggcgcgatctcggctcactgcaagctctgcctcccaggttcacgccattctcctgcctcagcctcctgagtagctgggacta

SEQ ID NO: 124605 - DNA, 201 bp, Homo sapiens
cgtctcactctgtcacccaggctggagtgcagtggcacaatctcagctcactgccacctctgcctcccaggctcaggtgatcttcccacctcagccttccragtagctgggattacaggcatgcaccaccaggcctggctaattttttatattttttgtagagttgtggtctcactatattgcccaagctggtcttaaact

SEQ ID NO: 124606 - DNA, 201 bp, Homo sapiens
tcaccacgagtttgcagatgcaaaggatgattattggagataagaagaagaaaggtcatatctgaagtatctctttgtctaattttttttttaagacagcrtctcactctgtcacccaggctggagtgcagtggcacaatctcagctcactgccacctctgcctcccaggctcaggtgatcttcccacctcagccttccga

SEQ ID NO: 124607 - DNA, 201 bp, Homo sapiens
cgatctcggggtagcctccttcccagccctgaggaaggaaagagacgtctaccccgaggcccaaggaaccgccccctcgccgccgcctcgcaggcctcggkgtccgggaagcccaggaggagcccctggcccgcccgccgggtcccggctcctaccgcctcgccgcgctttccaccaccctcggcgccatcctccgcgtcc

SEQ ID NO: 124608 - DNA, 201 bp, Homo sapiens
ggtagtagtgctcgaacagcttgttctccttgacgatctcggggtagcctccttcccagccctgaggaaggaaagagacgtctaccccgaggcccaaggarccgccccctcgccgccgcctcgcaggcctcggtgtccgggaagcccaggaggagcccctggcccgcccgccgggtcccggctcctaccgcctcgccgcgc

SEQ ID NO: 124609 - DNA, 201 bp, Homo sapiens
gttcacatcattgcttttatattgatgtcccagtggtttctaatgagaaagtccaagcttcctgtgagaacaaagacaacagagaaagcagcagcaccccrgagtcccatgggagagcccagctgtctcagcacagctgggggcagagaggtgacgcaggtgctgggcaccttcccccgcacgggcaggcactgaagcaca

SEQ ID NO: 124610 - DNA, 201 bp, Homo sapiens
cttcaacccgggaggcggaggttgcggtgagccgagatcacgccactgcactccagcctggaccacaagagcgaaactccatctcaaaaaaaaaaaaaaaagtctgtagcttgatgaattttggtgattgcatatagttgtgtaatcatcaccgcaaatcaagaggtagaacagctgtattcctctaaaaaactccctttg

SEQ ID NO: 124611 - DNA, 201 bp, Homo sapiens
tctccgcgcgaagcgcccaggtttcccacgcgggctcaaggagctccgcggacagcctgaagccgcgcgtgcgcagagcggcgcggggttactgcggcccyggcgtgggtggggcgcttgcaggtccctccccgcgcaagtgctcgccccgcccccggggccgcacccacagccccggctaccccggagaagcctgacttg

SEQ ID NO: 124612 - DNA, 201 bp, Homo sapiens
taaaccaagggattattattccagtttgttgggaaaatatttcaagacatacttctttagttccctgtgtgaattaaacaggcatagaacttgcttgcaasacgacaaaacccaaacatcttactttaaacgctttaaagaatagtcattccaagtagttgcttgcattttcatcctctggaatgcatactgtgctatatt

SEQ ID NO: 124613 - DNA, 201 bp, Homo sapiens
ttccacagtagttgagatgccacaaaaacttttcagcccctgtccctccatttcctgctctcagtgtctgatccttgttctaatccaacatattcaaaccygaacaacaaaaaaggtacaatccccaaatctgtgcagtcataacattaggacagcaaaaaagcagcaaaacttacctgagcagaaacgtgtttcacaaag

SEQ ID NO: 124614 - DNA, 201 bp, Homo sapiens
ccctcggcgccatcctccgcgtcctccggccgctgctgttgctggagccgccgaccccgcgaccgccgccccatagcccacgcggccgcgcacgcagcackcagaaaccggcccgccacggccagaactctagccctacacctcccgggacttccggccggaaaccaaggccccacgtgtccgggcctggtcctttcgggg

SEQ ID NO: 124615 - DNA, 201 bp, Homo sapiens
aaacatgacagagtcctagacaggctgctgatcacctattcagcccctgggtggattggggaagaatcctctctttggtgttgggcttatgagcaaactgyaccctcatggggtcatcccaaggagccgcttcctctggcaggtacagtggctgggagagcacagtgtaagctggatggtggccccctcgcttcctgccca

SEQ ID NO: 124616 - DNA, 201 bp, Homo sapiens
atactgttcagtcaggctggggctcgtagtgaaattttacggtttattagccataatcatcttgcaatttttttcctttaggttttggcttgtggttaacrggcatgttgataaacatccattcagatcatatcctaaggaatctcagaaaaccaggagatactggatacaaaataccaaggggtacgtacagaaagtgaa

SEQ ID NO: 124617 - DNA, 201 bp, Homo sapiens
aagtcagatttctgtccatacttgtcatcctgaagatgtagattgtgatgaacaggtcaaagtattttgagtacattagatgatgtatttgtattattagraaaacaaagccctgcttggcatacctgacaacagtccttaatggtttttactaccagttatggctaatatgttacactaacaatggtaatctgaagggtt

SEQ ID NO: 124618 - DNA, 201 bp, Homo sapiens
gtctctaccctatgctgcagtatttgctgaaattggtcttatgacttagggcgtaataggtttgtcttttttttttttttttttttgagacagagtctagstctgtcacccaggctggagtgcaatggcacgatctcggctcattgcaacctctgcctcctgggttcaagcgattctcatgcgtcagcctcccgagtagct

SEQ ID NO: 124619 - DNA, 201 bp, Homo sapiens
cacacaacagattttctgcaaaagacctgctgatacaaggaatagcatgaaacaccttacatttttacaagtttgtaagtttgtaatttgtttttttttttgtcccatacatttttatcaccatcatttgcaacagcttagcagattccactttggattctactaaattcgtgttttctcaacatctttgaaaatattctc

SEQ ID NO: 124620 - DNA, 201 bp, Homo sapiens
gaggtgggtcacctgaggtcaggaattccacaccagcctagccagcatagtgaaaccccatccctactaaaaatacaaaactccaaaaaaaaaaaaaaaaaggtagccaaaagccctcatgcatgcatgtaagttgcagtgtgctcagagatgtagtctctaccctatgctgcagtatttgctgaaattggtcttatgact

SEQ ID NO: 124621 - DNA, 201 bp, Homo sapiens
caaaaaagatcattcttattgtgaatgatgttttggtgatagctggagaaggtagggaaaatatatccatcctaggcacattgaagtccatgaagaagaaatccaaagcattggaacagaatatattttaaaaactaattcaagaaagcttttgtgaagtaaaacaagacacaagagcgtctgccgtttgcaggtacgcac

SEQ ID NO: 124622 - DNA, 201 bp, Homo sapiens
ccaaaaaagatcattcttattgtgaatgatgttttggtgatagctggagaaggtagggaaaatatatccatcctaggcacattgaagtccatgaagaagaaatccaaagcattggaacagaatatattttaaaaactaattcaagaaagcttttgtgaagtaaaacaagacacaagagcgtctgccgtttgcaggtacgca

SEQ ID NO: 124623 - DNA, 201 bp, Homo sapiens
ggggtttcaccgtgttagccaggatggtctcgatctcctgacctcgtgatccgcccaccttggcctcccaaagtgctgggattacaggcgtgagccaccgygcccggccaaaaaagatcattcttattgtgaatgatgttttggtgatagctggagaaggtagggaaaatatatccatcctaggcacattgaagtccatga

SEQ ID NO: 124624 - DNA, 201 bp, Homo sapiens
gccattctcttgcctcagccccccgagtagctgggactacaggcgcccgccaccacgcctggctaattttttgtatttttactagagatggggtttcaccrtgttagccaggatggtctcgatctcctgacctcgtgatccgcccaccttggcctcccaaagtgctgggattacaggcgtgagccaccgcgcccggccaaa

SEQ ID NO: 124625 - DNA, 201 bp, Homo sapiens
gaacccaggagtttgtggctgcagtgagcctcgatcataccactgcactccagagggagaccctgtctcaaaaaaaaaaatcttttttttttttttgagayggggtctcgctctgtcacccaggctggagtgcagtggcgcgatctcggctcactgcaagctctgcctctcgggttcacgccattctcttgcctcagcccc

SEQ ID NO: 124626 - DNA, 201 bp, Homo sapiens
gaggccaggagatcaaggctgcagtgagccatgattgtgccactgcgttccagcctgggtgacagagtgagactctgtctcaaaaaaaaaaaaaaaaaaaactcagggatcttatatataagaaaggttcttctatatatttgtttagtctatcctagcatttagatattaaaccatactgaggtgttgcttacaatggta

SEQ ID NO: 124627 - DNA, 201 bp, Homo sapiens
aaaaacgtagctgggcatggtgacacgcaccatggtcccagcttactcagaggcactgaggtgggaggatcacctgaggccaggagatcaaggctgcagtragccatgattgtgccactgcgttccagcctgggtgacagagtgagactctgtctcaaaaaaaaaaaaaaaaaaaactcagggatcttatatataagaaag

SEQ ID NO: 124628 - DNA, 201 bp, Homo sapiens
actttgtctatttcatcaagttgttaaatttattggtataaggttgttcataatagttccttattatctgagtggatcacgtgagcccaggagttcaagaycagactagagatcagacatagagagaccctgtctctacaaaaaaaagtttttaaattaaccaggtgtggtggtgtgtgcctgaggtcccagctactcagg

SEQ ID NO: 124629 - DNA, 201 bp, Homo sapiens
attagtcagactttgctgtttgtatatacttttccataaatataccagaagctgtatgtctgtttctttatggctaaaagcaatctcaggtcagagtattyggtgctatcctagtcccatcactcatgaccccggatgagttactaagctgccccgcagcaaggtttccccacctgtagaatgggcatggtgatggaaccc

SEQ ID NO: 124630 - DNA, 201 bp, Homo sapiens
tatatacttttccataaatataccagaagctgtatgtctgtttctttatggctaaaagcaatctcaggtcagagtattcggtgctatcctagtcccatcastcatgaccccggatgagttactaagctgccccgcagcaaggtttccccacctgtagaatgggcatggtgatggaacccccctgtgggatcacatgaattt

SEQ ID NO: 124631 - DNA, 201 bp, Homo sapiens
tccataaatataccagaagctgtatgtctgtttctttatggctaaaagcaatctcaggtcagagtattcggtgctatcctagtcccatcactcatgacccyggatgagttactaagctgccccgcagcaaggtttccccacctgtagaatgggcatggtgatggaacccccctgtgggatcacatgaatttagagcaaagg

SEQ ID NO: 124632 - DNA, 201 bp, Homo sapiens
ctccctaaaatgcttgcatggtgctggcgcatctgcgtgctcagtacacaatacctagcactattttgcattgctgtgaatgcacatccagacatgtactstgtgtgtcattcatgtgcactgctgccagcctcatgtgccagcaaaactgtggtgttggaaatcaagggaacactttacaaagttttgcctgacatccca

SEQ ID NO: 124633 - DNA, 201 bp, Homo sapiens
ccactatgcccaactaattttttttattttttttagtaaagacagggtttcatcatgttggccagactggtcttggactcctgacctcaggtgattcaccygcctcagcctcccaaagtggtgggattacaggtgtgagccaccatgcccagcaaatttctaacaaaaggtttttcaaaacagcaaaagtggttaatctaa

SEQ ID NO: 124634 - DNA, 201 bp, Homo sapiens
gaagaatagaattcttttcttggtgagggataacatttcacttattgggattcaaagttagtgtttcctattatcaacatctattgtaaatgttcctctcttagtgttgatctgtcatgagattttatgtattttatctctataaatggaagcgttgacatcagtccacatgtatatgattttaattgagcatgatcatca

SEQ ID NO: 124635 - DNA, 201 bp, Homo sapiens
tatctttaattttttaaaaaattgtgcctgtttcttgtttcctaaggtgcttaatttacccatttctgatgcgaggaggaaagcctatgccactgttggcrtgtacaatggcgattatgttctgtacctgtaacggctatttgcaaagcagatacttgagccattgtgcagtgtatgctgatgactgggtaacagatcccc

SEQ ID NO: 124636 - DNA, 201 bp, Homo sapiens
taaaacccaaatcatttaagataggattacagaaatgattatctttaattttttaaaaaattgtgcctgtttcttgtttcctaaggtgcttaatttacccrtttctgatgcgaggaggaaagcctatgccactgttggcgtgtacaatggcgattatgttctgtacctgtaacggctatttgcaaagcagatacttgagcc

SEQ ID NO: 124637 - DNA, 201 bp, Homo sapiens
cttggcaacactgcagcttccaggagaatacccacctcactgatgacacaacatctgaatgcacacttactggccaacacgtgctttgctgtaaatcagtrtgaagtcttcctaggggtcctggcctgaatgagatgagaaccttggaggctgcttttgactcatgtgaatgtcttccccaggagttaagtgggagtgctg

SEQ ID NO: 124638 - DNA, 201 bp, Homo sapiens
gcagtgtgcctacatcccaaatgccagcccatggtacccattgtctgcccggatctgaatcatgattccaaggcgcagagagaaattgctgggattcgttrttcttattcattgcttggcaacactgcagcttccaggagaatacccacctcactgatgacacaacatctgaatgcacacttactggccaacacgtgcttt

SEQ ID NO: 124639 - DNA, 201 bp, Homo sapiens
gaatgcacatccagacatgtactctgtgtgtcattcatgtgcactgctgccagcctcatgtgccagcaaaactgtggtgttggaaatcaagggaacacttkacaaagttttgcctgacatcccaagtggaagctttttaacttgagacatcatgtttcattgtacctacattcactcaagcagaaaaatgaatgcagcctc

SEQ ID NO: 124640 - DNA, 201 bp, Homo sapiens
ttgccagtctgtgtcttttaattggggcatttagcctgtttacatttaaggttagtattgttatctgtgaatctgatcctttcattatgatgctagctggwtattttgcctgttagtttatgcagtttcttcatagtgtcaatgatctttacaatttggtatatttttgcagtggctggtaccggttgttcctttccatgt

SEQ ID NO: 124641 - DNA, 201 bp, Homo sapiens
tttttctagtttatttgcatagaggtgtttatagtattctctgatggtagtttgtatttctgtgggaccggtggtgatatcctctttatcattttttattrcatctatttgattcttctctcttttcttctttattagtctggctagcagtctatctattttgttgatcttttcaaaaaaccagctcctagattcattgat

SEQ ID NO: 124642 - DNA, 201 bp, Homo sapiens
aggaatttggttggtaggctattaattactgcctcaatttcagaatttgttattggtgtattcagggattcgacttcttcctggtttaatcttgggagggygtatgtgtccaggaatttatttatttattctagatttttctagtttatttgcatagaggtgtttatagtattctctgatggtagtttgtatttctgtggg

SEQ ID NO: 124643 - DNA, 201 bp, Homo sapiens
tcctgaagtgctgggattacaggcatgagccactgcatctggtcctgccttgcttaaatagactgttgagggtgctcccagtgtccttaactcctctagcmagtgttctccccaaaaggctaattgtgagaaacaagtgtgtattctctggacacgcctctttggttgctgctgttgattaactcaccattgatgcacagc

SEQ ID NO: 124644 - DNA, 201 bp, Homo sapiens
catgtaccaccacacccagctaattttcatattttttgtagagagggggtttcgccatgttgcccaggctagtcacagccatctacctgccttggcctccygaagtgctgggattacaggcatgagccactgcatctggtcctgccttgcttaaatagactgttgagggtgctcccagtgtccttaactcctctagcaagt

SEQ ID NO: 124645 - DNA, 201 bp, Homo sapiens
ctgctcatcatctgccttgctttttcttttttaattattattttgagacaggatctcactctgtcacccaagctggagtgcagtggcatgatcctcagctyattgcagcctccacctcccaggctctgatgatcctcccacctcagtctcccaagtagctgggactacaggcatgtaccaccacacccagctaattttcat

SEQ ID NO: 124646 - DNA, 201 bp, Homo sapiens
tcaaggaaagaaagaaaagttgcctataatttcatcttagagataaaactgacgatattgtggtattatctttttcccatatctttcattgcttttaatargtttttttctaagcagtagagatacacacatacacatacaacatcttgtaacctacttttagcagttggtaagtatttcttctgacttaatagaaacact

SEQ ID NO: 124647 - DNA, 201 bp, Homo sapiens
cacaggaaatgttggtatgcaagcacttgcagtgtgcctacatcccaaatgccagcccatggtacccattgtctgcccggatctgaatcatgattccaagrcgcagagagaaattgctgggattcgttgttcttattcattgcttggcaacactgcagcttccaggagaatacccacctcactgatgacacaacatctgaa

SEQ ID NO: 124648 - DNA, 201 bp, Homo sapiens
aactcctctagcaagtgttctccccaaaaggctaattgtgagaaacaagtgtgtattctctggacacgcctctttggttgctgctgttgattaactcaccrttgatgcacagctttccttgcttcactaaccaatgagccgcccgataacctactttggttgcagcctcattttcctttgttttgtgaagaaatcctgctg

SEQ ID NO: 124649 - DNA, 201 bp, Homo sapiens
aataatggtggtgagggcagttcttgctcagaaaagtttcagtctcagctctgagctcaaaataatgtgatgaaactttattaagccatcaaactggtgtrtttatgtgggacaaatcggcatagtcagcttatttgtgacaaaaagttagagaactgatgatagttgagtccatgagagggattgtcattcactgttgac

SEQ ID NO: 124650 - DNA, 201 bp, Homo sapiens
ggataacatttcacttattgggattcaaagttagtgtttcctattatcaacatctattgtaaatgttcctctcttagtgttgatctgtcatgagattttaygtattttatctctataaatggaagcgttgacatcagtccacatgtatatgattttaattgagcatgatcatcacttggaaggcactcatggaatcctgtt

SEQ ID NO: 124651 - DNA, 201 bp, Homo sapiens
tgaaataatgatagccaagcacttattttaagcatgctttgttggcagctgtgcaatttggccatcatttcaaaagtcttttacagaaggaaaggctaggygaaaggaacagacccaaatctaggaagtgccatagatttcaatggtctcacgttgttaggggaaaaaagcaataaagtcgatcattaaaattaaccactc

SEQ ID NO: 124652 - DNA, 201 bp, Homo sapiens
atgagctccacctagaaggtgtgtgggaaagccattttgtaagacgtgtttgcacaagcaagacaaaggaagcatttgattggtcagagtggaaagttccrgaggttagtgggtggtttctccttggaacaatctctcattagaagtcaattggcagtttctgattgctttaagtttccttccactgttgggtttccatgt

SEQ ID NO: 124653 - DNA, 201 bp, Homo sapiens
tttttgttactacatttaaaaaactgagtactcttttgtaatgaaaaatattgtcacttttgttagcattggttaaatgtctaagcgacagaattatttcmttttttaatttttttttcttaggtggtacctccggaaatttgaagagtatccaaagttcagaaaaattataattccatttttgttttaagtgcgtttttc

SEQ ID NO: 124654 - DNA, 201 bp, Homo sapiens
gaaaagaagatggggctctgtatttggttatcctctttgccagtaggataacgtctatctcacagaagtggtacaaactgactccacagccaggagggccmggcaaactcccaagattaaacaaacaacaacaaaaaaagcatattagtattagccacagagatgcagagagaaaactctcttgccctgccacagcagtca

SEQ ID NO: 124655 - DNA, 201 bp, Homo sapiens
taacttgtttatactgcacatacctgggcagcagaggagagcagagcaaagatggcttcaaaaaaggagccaaagaaagagctgggtcttcacagaggaaktcttcacttttatcctggttcagaccagccagatggtcggcattgccatagacatgaatatatattagcaccaggtgctcctgccacgtcttcctctgtg

SEQ ID NO: 124656 - DNA, 201 bp, Homo sapiens
gccaggtgtggtggctcatgcctgtaatcccagaactttgggaggccgaggcaggcagatcacttgagttcagagttcgagaccagcctggccaacatagygaaactccatctctatcaaaaatacaaaacttagccaggcgtggtagcacctgcctataatcccagctacttgggaggcagaggtgggaggatcacttga

SEQ ID NO: 124657 - DNA, 201 bp, Homo sapiens
ttattggtggcttaaaaccaccactattttatttgcttacacatttatgggtcaagaatttgagtaggactcagcgtagcagtggctccattaggactggyggactcaagactgcctaactcatacgtgtggcactttggggctggttgtgctccacacagcttctccctccagaagagcctggccctctttacataacgg

SEQ ID NO: 124658 - DNA, 201 bp, Homo sapiens
ttcaagaagggggaagtggtcagctacagggaaagcacttgaaaagtcgaggaatgtgaggacatagaaataaccactggggtggaaatcactgaggttgytggtgacattagaatttcagtggagtggagaggacagaagatggacaaccgtgttaagagaatgagaagtaaggaagtagaaacagctggcatcagcaac

SEQ ID NO: 124659 - DNA, 201 bp, Homo sapiens
atgtgtaacaggatacaatgaatcaattttaaaaaatcatattgcttagccatggaagtacagagccaaaagcttcagaaaagcacatggtaatagtgccractcaaatgcttcccgggcaatagggtccctggctcaagcaacaggccaactaagccacctgacgtgtagacagaaagcaaagttctcagcttgccagga

SEQ ID NO: 124660 - DNA, 201 bp, Homo sapiens
cccccaaaaaagcagtccaatattccccaaatgatcatttttttcataaagaacaaattgtggaagtttttactgaaaaatttttattattttttgagtgrctcagaataaagagttataatgaaattttcttggagctttaacgttgtaatttatgatgactctaaaaatatacctatgtatattaagtctgtattttac

SEQ ID NO: 124661 - DNA, 201 bp, Homo sapiens
ctcacagacaaatggagagcagagctaagatggctgctctcccatcctcattcctgccctctgagcgatgacagaagtgatacctgcaaactgtccccttygcaacttcccaaaggttcattagctgctcaccatgtcaacagaggtggccaggcctttcactcgggatctggaatgggaagacgagtggtgggtcaggat

SEQ ID NO: 124662 - DNA, 201 bp, Homo sapiens
acaaccgtgttaagagaatgagaagtaaggaagtagaaacagctggcatcagcaacttttacgatttaaatttgctggtgaggccaggcaccatggctcaygcctataatctcagcactttgacaggttgaggtaggaggatcacatgagcccaggagtttgagaccacccctagcaacatagacaaaccccatctctaaa

SEQ ID NO: 124663 - DNA, 201 bp, Homo sapiens
ttccatgcttcaatataataaattgaatcagcattttaattgtgcccatgctttgtggttcctggcaggacaaaaagattctctgtgagtgcatgactccycccaagaaaaccccactgagtgattaattactagtctggaagatataaatatgtctctcaataaagacagtatggactgctggaagctctggccttatac

SEQ ID NO: 124664 - DNA, 201 bp, Homo sapiens
aaaaattccactcatgtcagcttccaaattcaaaaagcagtagttgatgctactcctaacaaattattaagtgcctcttgttaatctaggctctatttacrtaaaccaccttggagtggtgccccctggagttgtgcaatgtggcagccctgagtatcggcgctagattttatacccgagttcatctgcctcaaaagcctg

SEQ ID NO: 124665 - DNA, 201 bp, Homo sapiens
gttcaagaccagcctggacaacatagtgagatcccatccctacaaaaaaaattttttttaattagctgggtgtgatggcatatgcctgtagtcccagctamtagggaggctgagatgggaggatggcttcagcctgagggattgaggctgcagtgagctgtgagcacaccactgcaatccagcctggaccacagagagaga

SEQ ID NO: 124666 - DNA, 201 bp, Homo sapiens
taaataaataaataaataaataaataaaacttcacttacattatcttaactatgaggcgtttccgccatttttgttgactcttttctactccattatagtyactgaaaggaattataggaactaaatgccaatcagtagttttattatacaatagtacaaattattacatctctaacaccatttataaatatcaatatcta

SEQ ID NO: 124667 - DNA, 201 bp, Homo sapiens
taaacaaatctataaaggacatttccaagtttaggaaatttgaatatagactataaattaaatgatatgattgaatccatgtggattttcttggttgtgasaatgataatgtggtcatgtaagaaaatgttcttttcttagacggggatgtaagaatcccttatacccctgataagggatgaagtgacttgccatctgcaa

SEQ ID NO: 124668 - DNA, 201 bp, Homo sapiens
tgtatcttcctcctgtctcttaactcttcctctgcagcttatacaatagatatgtggctgtcattacaatacgaagcatcaacaatcataagaactaccasaaaaccatcccttgacatgtttatttttttgagaagggtaccttgctatgttgcccaggctggtcatgaactcctgggttcaagtgactctcctacctca

SEQ ID NO: 124669 - DNA, 201 bp, Homo sapiens
ggactgagtagataaagcaatgaacatggggaagactccagggcagaagccaggtaggggagggagatcaaaaatggtttaggacatgttaggtttgagaygcctcttatacatcaaagtggaggtaccatgtgggcagtcagttatatgagactgaaactcagaggagaaggcagggctagataatcctttaggagtctg

SEQ ID NO: 124670 - DNA, 201 bp, Homo sapiens
aaaaataaaataaaaataaattaaataggcagatgccactgccaccaggagccccatactatcagccatggtcaaccccaccgtgttcttcgagatggccrtcgacagcaagcccttaagccacatttccttctagctgtttgcagacaagcttccaaagacagcagaaaactttcatgctctgagcactggagagaaagg

SEQ ID NO: 124671 - DNA, 201 bp, Homo sapiens
caaatttcccactacttagcacatacagaaactgagtttgtcccactgctgaattcctagagagacagggccaaagggattctcagaacttttttttttttgagagagagtcttgctttgttatccaggctggagtgtagtgccgtgatcttggctcactgcaacctccgcctcctgggttcaaacaattcccctgcctca

SEQ ID NO: 124672 - DNA, 201 bp, Homo sapiens
gtagtgagctacaatcatgccactgaactgcagcccaggtgactgagcatgacccgtctctttaaaagtaaataaataaataaataaataaataaataaaacttcacttacattatcttaactatgaggcgtttccgccatttttgttgactcttttctactccattatagtcactgaaaggaattataggaactaaatgc

SEQ ID NO: 124673 - DNA, 201 bp, Homo sapiens
gatcacttgaccctgggaggtcaaggctgtagtgagctgagattgtgccactgccctccagtctgggcaacagagcaagactctgtctcaaaaaaaaaaaraataaaagaaaaaaaaacaggaagatgggatccctgactccagggggattataataggaggaggcgaacacagcaaagggtttgtgcaataaagcttcag

SEQ ID NO: 124674 - DNA, 201 bp, Homo sapiens
tttgttcatagttttcctaaattgctttagatatgtgaaacatatttaaaagacaacaaaagatacaaagggaataaaaaaagatttcctaaaacttgtayatagcatggggttctttgcactaagtcgtctttatttttgtatctctatgagaagaatatgggaatggctaggcttttatttttatgtataaaattatct

SEQ ID NO: 124675 - DNA, 201 bp, Homo sapiens
tgtagtgagctacaatcatgccactgaactgcagcccaggtgactgagcatgacccgtctctttaaaagtaaataaataaataaataaataaataaataaaacttcacttacattatcttaactatgaggcgtttccgccatttttgttgactcttttctactccattatagtcactgaaaggaattataggaactaaatg

SEQ ID NO: 124676 - DNA, 201 bp, Homo sapiens
ggcgaaggttgcagtgagccgagatcacgccactgcactccagcgtgggcaatggagcaagactccatctaaaaaaaaaaaaaaaaaaaaaaaaaaaaaaacacagaaaagaagatggggctctgtatttggttatcctctttgccagtaggataacgtctatctcacagaagtggtacaaactgactccacagccaggag

SEQ ID NO: 124677 - DNA, 201 bp, Homo sapiens
ctgtagtgagctacaatcatgccactgaactgcagcccaggtgactgagcatgacccgtctctttaaaagtaaataaataaataaataaataaataaataaaacttcacttacattatcttaactatgaggcgtttccgccatttttgttgactcttttctactccattatagtcactgaaaggaattataggaactaaat

SEQ ID NO: 124678 - DNA, 201 bp, Homo sapiens
agggaggttaaagtgagtcatccaaaatgaaagcaaacagcagagcaggcccaggcatttcattttgatgatttatcaaaattacagaaaaaggccaggcrcagtggctcacgcctgtaatcccagcacttcaggagactgaggcgggtggatcatttgaggtcaggagttcaagaccagctcgccaacatggtgaaaccc

SEQ ID NO: 124679 - DNA, 201 bp, Homo sapiens
ggctgtagtgagctacaatcatgccactgaactgcagcccaggtgactgagcatgacccgtctctttaaaagtaaataaataaataaataaataaataaataaaacttcacttacattatcttaactatgaggcgtttccgccatttttgttgactcttttctactccattatagtcactgaaaggaattataggaactaa

SEQ ID NO: 124680 - DNA, 201 bp, Homo sapiens
ggaaaaaggccagtggttagactgtggattcactgaggtaatgtcatcccaagaagcctcttaagaaacaaacagctcatccatgagccccacgtgagttmttttcctatttggaatatctatggtccaactgggatattcccactgtctcatgttaccttaggcctgtttcgaattcatacagtctacatgattgacaca

SEQ ID NO: 124681 - DNA, 201 bp, Homo sapiens
ggcgtgagccactgcacctggccaagtaatctgttttttataaaagttcctaaatttttttagcagctagactctgattagcagctagaattgtgactgtrttcattatctattgccacatgcaaaccacactaaagcttattggtggcttaaaaccaccactattttatttgcttacacatttatgggtcaagaatttga

SEQ ID NO: 124682 - DNA, 201 bp, Homo sapiens
tgatctgcacacctcagcctctcaaagtgctgggattacaggcgtgagccactgcacctggccaagtaatctgttttttataaaagttcctaaatttttttagcagctagactctgattagcagctagaattgtgactgtattcattatctattgccacatgcaaaccacactaaagcttattggtggcttaaaaccacca

SEQ ID NO: 124683 - DNA, 201 bp, Homo sapiens
gattgaatccatgtggattttcttggttgtgacaatgataatgtggtcatgtaagaaaatgttcttttcttagacggggatgtaagaatcccttatacccytgataagggatgaagtgacttgccatctgcaacttcctgtcaaatgattttacaaaaagacaaacacattgattgattgatacaaatatggcaaaatgtt

SEQ ID NO: 124684 - DNA, 201 bp, Homo sapiens
acacacctgtagtcccagctacttgggaggctgaagtgggaagactgcttgagcctgggaggcagaggttgcagtgagcttagactgaaaaaaaaaaaaaacaaacaaacaaggaaatccagacatcatgttcctaaccatcctatttgaaagaggatgaaagaaaggtgttctaaaaagccaatatgcattctgccatgg

SEQ ID NO: 124685 - DNA, 201 bp, Homo sapiens
agatcactctgaaatgtatttcccctaacaaagactgcacattaacgacaaatgatacatcttcagattttaattaatgtcaagagctttattttgcttccaagcaacttataagagacatgttattaatataatttaatttaaggggacaggcatttgttttctatttttaaaaaggtggtttgaaattctggccctgtc

SEQ ID NO: 124686 - DNA, 201 bp, Homo sapiens
tctacagtgctaatgattgagtggaaacaggtggagatggcatcattgggtaccttgaatccctattgctttttcaatagataatggctgagaaacagtcrcaaaggaccagggtgtttggcagtgagagaatgatgtggttttcccccgtgaccctgaaggaactgctggaatttaaattcaagtatccccaggctcctg

SEQ ID NO: 124687 - DNA, 201 bp, Homo sapiens
cctaactcacaggaaacagttaagaaacaatattgaaaattatgcaaccaggtgctaaatcagcaaaggcaaaatttacgtgggtggagaaattaggaaagagtttgctgagggctagaatcatccaggaagtcccacaaagaagtcttaagtttggattcagaatgagagtgaggtttgtctagatggtaagacaagaga

SEQ ID NO: 124688 - DNA, 201 bp, Homo sapiens
gcctaactcacaggaaacagttaagaaacaatattgaaaattatgcaaccaggtgctaaatcagcaaaggcaaaatttacgtgggtggagaaattaggaaagagtttgctgagggctagaatcatccaggaagtcccacaaagaagtcttaagtttggattcagaatgagagtgaggtttgtctagatggtaagacaagag

SEQ ID NO: 124689 - DNA, 201 bp, Homo sapiens
tgcctaactcacaggaaacagttaagaaacaatattgaaaattatgcaaccaggtgctaaatcagcaaaggcaaaatttacgtgggtggagaaattaggaaagagtttgctgagggctagaatcatccaggaagtcccacaaagaagtcttaagtttggattcagaatgagagtgaggtttgtctagatggtaagacaaga

SEQ ID NO: 124690 - DNA, 201 bp, Homo sapiens
tgagttgacaggtattttcacactagaaaaattttaccacttcttctggcctccatggttcctgaagagaaatctactgtctttaaaagtgctttttttttctttctttctttcttttttttttttcagatggaatctcactctgtcgcccaggctggagtgcagtggtgtgatatcagctcactgcaacctctgactccc

SEQ ID NO: 124691 - DNA, 201 bp, Homo sapiens; identical to SEQ ID NO: 21041

SEQ ID NO: 124692 - DNA, 201 bp, Homo sapiens
ttcttgccatgctgcttgatgcttaggaacatggagtttgtctctgggaatttttcttacattttaaaataaaaataaaatcatgtcaaatagacaaaaaygtagaagtctaattggagtcgaagtgtgattaggcctcccaaattttcctggccagtttcaaattcaaacactctgttcccttctcaggcccttttcatt

SEQ ID NO: 124693 - DNA, 201 bp, Homo sapiens
aaccatgtgggaatctttaaaagatgtatgcccgtgccccattcccagagactctgtcagttggtttgtggtgctgtgtggggcttgaaatcttaacactstccgggtgattctcaagagtggtaaccactgccttaagtgaagctcaaaagcagataaggcccaacctcacaacaacccagccctggggagggaggtgcc

SEQ ID NO: 124694 - DNA, 201 bp, Homo sapiens
atgatgaacaagacagacatggtcctaggaatatgaatgttttgggaaaaaaatgtagcatcaatgaggataacatacggtcaaagaattccccatcaaakccaggcacagtggcacacatttctagctacttgggaggctgtcaggaggattgcttgagtttgagtccagcctgggcaacacagcaagaccttgtctcta

SEQ ID NO: 124695 - DNA, 201 bp, Homo sapiens
caggaactaagtatggctgtggaggaggaggctgtggtgcttgtacagtgatgatatcacgatacaaccccatcaccaagaggataaggtaccgtgcagcraagtccagatatggttgaatttttataattttgaactttgttatattccttcatttggtaaatatatattgagtacctaccatgtgaaaagaactggcca

SEQ ID NO: 124696 - DNA, 201 bp, Homo sapiens
atctacaatttaatattttgctttgtgtcatcaaagacagagataaggatgagaataaatgtgcaatgtgttcataccttcaaatactcaagtgcttacayatatagactcttcttttttcagttcagccctatttttggcaacctgacgtccagttgttttcaaagggagaatgcaagatataacacacaaaaggaaatc

SEQ ID NO: 124697 - DNA, 201 bp, Homo sapiens
ggcctcacctcctctttctgacactatcaccagaaagtcaaagaaaaagaaagtgtgttcaggacttggggtccagactagctataggatttttagaaacragaaacttttcatggctggaggaatttgtggttctgctcccttgtccctgtcatgggtatgagggtatcacacatgtgttaccacgtgggcatgtgcaca

SEQ ID NO: 124698 - DNA, 201 bp, Homo sapiens
tattctttcctctacattatcctgcttctcatttatctcattaaaattctgttagctgggatgtgctttatactggagagcacagagaacaatctgtataraaggatttgcaagagacccagggagccctgaaactgagatgattttccccacaacctatcctgctgggcatggtacagatagacacattcacatcttagc

SEQ ID NO: 124699 - DNA, 201 bp, Homo sapiens
tgatttatgggaatgaagagaaaaagagggtacatttctatcatagagcgttcccggcatgagcatgttggaaatatcaatatttaggggggttccttgtytcatgtttgtttcctgacataatgagtatttgtgcaagaattccattgttgtatttttccttgacatcttctttaattatctaattcaattaggtgattg

SEQ ID NO: 124700 - DNA, 201 bp, Homo sapiens
ctcacacaacatggtttcaaaagactttttttcaatgtgatgaagtgttttgtttgttacagtgaaatgtgttatgtcagttaactcccagacccattachgatacctatgaatgtctttccttaatgtctgagcttatgaattatctggaattttgcttttcaggatgaaaaaacttcttagggttttaaaaagaagatg

SEQ ID NO: 124701 - DNA, 201 bp, Homo sapiens
tggttctaggtcagtttcacacattaacttactaaatgctcaccacaatcctatgaggcaaaaactatttttatccccattctgatggggaaactaaaagrcagggttacccaaggttacatagctagtcagtaacaaaaacaatcaacaaacactctgtcaaagaacctgggccccaccggtgctataaacaaaccaacc

SEQ ID NO: 124702 - DNA, 201 bp, Homo sapiens
agaagaaccaattttcttctagtctctgtataaaatggggaaactagtaatggaaacttaatagacgttaaaaggacctaactaagcatcctttagaattagagtcacaatatttatactctgtccttaaggactaattattatgcccattaggaaaagagagcacagaagtcacctgaaatgaaagtaaaaggaaaacgg

SEQ ID NO: 124703 - DNA, 201 bp, Homo sapiens
agaatctattcatttttctgtgctctttttttaaactcagattttcgataagataggaagtccagattgcaatttaaaacatctcattttttatgcaaatwgagggaatcctcaatttgcaaatcactattgctgagtaaatttttaatttttaaaagttctgccttccattaacatgatcgtcagtaataattgtattct

SEQ ID NO: 124704 - DNA, 201 bp, Homo sapiens
catctgcatgaaaaggaaatgtgttaatcggggggatccagacagcttgtcttcagttccatagagcaagagccttggagcactttcactggaccagggcrgactttgaaacaggaaaccctgcagtgaagagtgagatgaaataccattttagatggattcaagtatctaacttattgttcatatgtgctgaataggctt

SEQ ID NO: 124705 - DNA, 201 bp, Homo sapiens
acaggcttgagccactgtgcccagcctagcataaactttttcgttccagagagtaagggattgttgagaagagtgtgagagaaaatccaccctagaagagrgcttttgaagtcaaacacaatctctggaattaaaaactcacctttgaaaaagaagcttagaagtgaagccacttaggagaaaataggtgacatgattggc

SEQ ID NO: 124706 - DNA, 201 bp, Homo sapiens
caaagcctatggtgcctaactcacaggaaacagttaagaaacaatattgaaaattatgcaaccaggtgctaaatcagcaaaggcaaaatttacgtgggtgragaaattaggaaagagtttgctgagggctagaatcatccaggaagtcccacaaagaagtcttaagtttggattcagaatgagagtgaggtttgtctagat

SEQ ID NO: 124707 - DNA, 201 bp, Homo sapiens
ggcctcacaaaccccatgctataaccagctgaccaaaacagactggaagccaagaacagtcttcctgtggtatagaagttagtatggtcactttaaatagsagacacaaagtcctctcttatccttgcttttgagggtatcttctcagtgtaggtgggagcaactaggaaccagaagggtagtatcacattattaagaatg

SEQ ID NO: 124708 - DNA, 201 bp, Homo sapiens
acctaatctctgaaactatggtcacttttattgaacctgccttttcaagtatctaacctgtctggttctaattcagactggatctctatagggtaacctcrcactagggcaaaacagtgatcactttgagcatggtttttgtgttagactagcagccctacactactagggagcgggttcttgcatagaactgatttctgt

SEQ ID NO: 124709 - DNA, 201 bp, Homo sapiens
tgaatacatataaggtgctaaaagcagatcttggcatgcaataaatgtcctagtgaggacatttgttagtgagtaaatgagggtcagttactcctggactrtggattttatatgagttgtcacttatttctctagatcattctgtgagttgggttctaatattccccttttacaggtgaggacatggcgagacccaggcta

SEQ ID NO: 124710 - DNA, 201 bp, Homo sapiens
ccttgttgcatcatgctatgctcttccttcacaggcacagactgcttttgatgaaagcattaacctttcagctgttggatacttcaggtaaatactccctstgatcacatgctatggagaagaacagtggtatcttgaggaagagtttcagttcccttgcaattttggcaaacgttgactttctaccttctatttacccat

SEQ ID NO: 124711 - DNA, 201 bp, Homo sapiens
atccccaggctcctgttatcatgggaaacacctctgtgggtatgtagaaccccagggattttttatagggaaattgagaaaaagggcttgggatggggccrgggtgggctggggaaacttcatatacatgtgttctcaggaaaagcagtctgaaatagcatttttaatcatttgagctagacttcctgagcattgctcaag

SEQ ID NO: 124712 - DNA, 201 bp, Homo sapiens
tttaaataagacttcagatttaggggtggaggaggaacaccggatcgcactgtgagagaaacgctggcctgatgatttattataaataaataatgtgccckactgctttcacagtttaataactacctttgctgctgtataataactttgatctttctgtcagctgaagcttagagtgcttttttttttttttttttgtca

SEQ ID NO: 124713 - DNA, 201 bp, Homo sapiens
tcacattgcagggtgaatgagtagaggtatagtgataacattgttgccttgtgaaaattacaaatgattaaaactttggctacagcaagaacagcagtcarcaggttttctgcataattcggactgctcagttcagtgtttacccaaaagggcttcataatttgaaacagtcccttcctctggctctccttggaagatact

SEQ ID NO: 124714 - DNA, 201 bp, Homo sapiens
tcaactacaagttcaagtggtatctgcaccatgaagccttttttctcattcttcaatccagaagttcattcattctctctctctctctctctctctctctcaatttattctgatttatttatatttccatgtgttaaatgcgctttttattttttattttattttattttattttgaaatggagtttctgtttgtcaccca

SEQ ID NO: 124715 - DNA, 201 bp, Homo sapiens
ttcaactacaagttcaagtggtatctgcaccatgaagccttttttctcattcttcaatccagaagttcattcattctctctctctctctctctctctctctcaatttattctgatttatttatatttccatgtgttaaatgcgctttttattttttattttattttattttattttgaaatggagtttctgtttgtcaccc

SEQ ID NO: 124716 - DNA, 201 bp, Homo sapiens
gttcaactacaagttcaagtggtatctgcaccatgaagccttttttctcattcttcaatccagaagttcattcattctctctctctctctctctctctctctcaatttattctgatttatttatatttccatgtgttaaatgcgctttttattttttattttattttattttattttgaaatggagtttctgtttgtcacc

SEQ ID NO: 124717 - DNA, 201 bp, Homo sapiens
agttcaactacaagttcaagtggtatctgcaccatgaagccttttttctcattcttcaatccagaagttcattcattctctctctctctctctctctctctctcaatttattctgatttatttatatttccatgtgttaaatgcgctttttattttttattttattttattttattttgaaatggagtttctgtttgtcac

SEQ ID NO: 124718 - DNA, 201 bp, Homo sapiens
ctttagccaaatactaagcagaagcaggtaattgaggacagcttctttcaccagtagatttatcacaactaactgcaaaaaaaaaaaaaaaaaaaaaaaaatgtatgatatctttgacggtaggacaaagacattttttggaatttttcctcagttttttggcaggcctcacacaacatggtttcaaaagactttttttca

SEQ ID NO: 124719 - DNA, 201 bp, Homo sapiens
gatttccattttcatttttctgggacatgcctacaactatgagaatatgtgtgcacacaattattcaccctctccctctacctgtctatactttactttgyattttaaaatagagtccccgccctggtttcccccaccccaaaaagaaacctaaaatgttgctccaccctggggggtgcgggattcttggagggaaatatt

SEQ ID NO: 124720 - DNA, 201 bp, Homo sapiens
acagcattcttccttccatagtatctttagccaaatactaagcagaagcaggtaattgaggacagcttctttcaccagtagatttatcacaactaactgcmaaaaaaaaaaaaaaaaaaaaaaaatgtatgatatctttgacggtaggacaaagacattttttggaatttttcctcagttttttggcaggcctcacacaac

SEQ ID NO: 124721 - DNA, 201 bp, Homo sapiens
actttactttgtattttaaaatagagtccccgccctggtttcccccaccccaaaaagaaacctaaaatgttgctccaccctggggggtgcgggattcttgragggaaatatttccaaggaaaatgttttaattgacacgatatgtgataatatcaaaaagatcacagaaacagttttcgtcttttctgctcaggctgctgc

SEQ ID NO: 124722 - DNA, 201 bp, Homo sapiens
attttgttattatttccatatgtcttgatgttagtgaattctgaagtgggaattatatactctgtgtgcgtgtgtgtgtgtgtgtgtgtgtgtgtgtgtgwgagagagagagagagagacagacagacagagaagccctccctcaacagtgcaaatttgtattctttattttgggagaataatttgccatgatgaaaaacc

SEQ ID NO: 124723 - DNA, 201 bp, Homo sapiens
ttttttcgttaaaaaatatggactagttttctatcatctgcattgttaaatacttactcttcataccatttaaaccataaaactatcttttttttttttttgaaatggagtctcgctctgtcacccagtctggagtgcagtggcacaatctcagctcactgcaacctctacctcctgggttcaagcgattctcctgccttg

SEQ ID NO: 124724 - DNA, 201 bp, Homo sapiens
gactgtctccaatctgtgctcatgcctgaaccccaataagtaaacttttctctcattttccctagtcccctacattcgtggcctaatatctacctttattkaatggagccctgggccaaggtctaaattatttttctcgatagtctcctgctttctagctgataaagtcaggatgactcaacaataactgaaaatgaaaaa

SEQ ID NO: 124725 - DNA, 201 bp, Homo sapiens; identical to SEQ ID NO: 21051

SEQ ID NO: 124726 - DNA, 201 bp, Homo sapiens
atttcaatggccaaaccaaaattagaaccctagtcctttgtctttgaccttctttttttcatgatttttatttattattattattattttttttttttgaractaagttttgctcttgttgcccgggctggagtgcaatggtgcaatctcagctcaccgcaacctccgcctcccaggttcaagcgattctcctgcctcagc

SEQ ID NO: 124727 - DNA, 201 bp, Homo sapiens
catcaccaccatcaccaataagcagggcagcatgtatccagtataaagattctatgtctgtagctttggtctaatggacattttcagatcagcagtgatcrcactgtgttatttacaaatgacttcatttcaggactcacccttggtgctggtctcagcctagcccaggtgaaggacattttggctgatgtagtccagaag

SEQ ID NO: 124728 - DNA, 201 bp, Homo sapiens
gactgaagtgtttggaagactgatctaaaatcagagtccagagatgtgaggctagccactttgtgggcaaggaggtgggatgagacaatgggattgtagcwttcactagcaccctggggtctctggacacatcagtcaggggggtttgtctgcctcatgggcaaaaaacaaaagaagagggtgcttgggctccagactctg

SEQ ID NO: 124729 - DNA, 201 bp, Homo sapiens
agaattcatcctgttcaggtgaggatgtgcctcttccttataggctttctgtgctttagaaacctcatgacattgagtccctgagattaagagagcggagsagcctggggcctgctggctcggccactccaacagatacaacctagctgggaacaagagtgaagcctggcatattgggatatgtgagtgtttctgactaac

SEQ ID NO: 124730 - DNA, 201 bp, Homo sapiens
ggatcctcatttccatgagtgaagtcggtgggctgtacctttagagtcccacactctccaatgacacaggacccacctggaatcttcatatactgggtttrcgtgtctcgaacctggaggcaattcagctcattacctctgatttagggcaccatcttgtgtcccctcccccccaccccccgcccccaccatcatgacatt

SEQ ID NO: 124731 - DNA, 201 bp, Homo sapiens
ctccaaacttctgggacataagtagagttagtgcccagtgctgagccttagccacacgatgggcttcagcttcgaggagtttgaagtcgtgttgggataayaagcctcaagtcatcagagcagtagctgttggtaggcagcctgtagtgctggattccacccacagacattttcaaatttaaatttgaaatagttgaaaag

SEQ ID NO: 124732 - DNA, 201 bp, Homo sapiens
ggtagtttttgaagaaacataaaatctgtgactagggagcttgaatgaggcaagaccaagcctacaggtgactgatgagctccaaacttctgggacataartagagttagtgcccagtgctgagccttagccacacgatgggcttcagcttcgaggagtttgaagtcgtgttgggataataagcctcaagtcatcagagca

SEQ ID NO: 124733 - DNA, 201 bp, Homo sapiens
aatatttttttctcctattatttccaagaaaaaaagacagtgcttcagctggctaagagtatttgtataattttgaaagttttacataataaactttgtcmtataataaaatctttgttgcttctttcgaaatgacatggctgaaagaaaggctttataccaaagtcagcctggcaggaagtgttcctcagcttcttctcc

SEQ ID NO: 124734 - DNA, 201 bp, Homo sapiens
cgtttggtgtaaaatgaaggttgagttccccaaatctgatgatccaatattagccaaaagcagtaagatggacattcaggaagtaagaagctaacctccargagtaaggaggcaccagtcaggagtagttagatgtttttatcagacaaagcaagttttaaaagaaaaaactaaatacttatttattcaacacatttatcg

SEQ ID NO: 124735 - DNA, 201 bp, Homo sapiens
ttctaaaagtgtatccaaagtttcctgaatttttttattgtttttttctttaagctatccatttccttgaatatttctccctaacttcttgtaactttttwaaaatttctttgaattgggctttgcctttctcttgttcctccctgattagtttaataactaacctcctgaattctttttcaggtaaatcagagatttctt

SEQ ID NO: 124736 - DNA, 201 bp, Homo sapiens
ggtaaaattcttactcaatgggcataaatgattgtcttttcatctaagtcacactagtgaaaagtaatggtgtgaagaaataggctatttgttggtgatakccaatgcagaccagaggtgaaacaggatcgaaatgtaggatttactacaacttcgttgtcccaagaattttttcccaattgtctggcagagactgttgga

SEQ ID NO: 124737 - DNA, 201 bp, Homo sapiens
agagctttttgtgctctcgtaatgaaggctattagaaaacaggattcctaactctcaaatggaattttctgccacatcataaaaatatgcctgaagtcacmctgttggtaaagtggatacagtttggtgggtttttccttgaaattattatcaggaaacttgacctcgagagttttagtaagtcaagaacatgaaaaggct

SEQ ID NO: 124738 - DNA, 201 bp, Homo sapiens
agtgcttcagacatcctgggatagaatcttttaatttgttcttcatcctagatattggttatatttaaacgaactttcatgcttgcctgttttggaggtgrgtagtcttatcttgcaacatagcatgggagtaatccaaatcatgtggcctagatgatctttcagcagatacccaaatgcaactagaattaagagtctaca

SEQ ID NO: 124739 - DNA, 201 bp, Homo sapiens
ttaaaattgaagtcttgagtgattctttctttgggcatccttgttgcatcatgctatgctcttccttcacaggcacagactgcttttgatgaaagcattarcctttcagctgttggatacttcaggtaaatactccctctgatcacatgctatggagaagaacagtggtatcttgaggaagagtttcagttcccttgcaat

SEQ ID NO: 124740 - DNA, 201 bp, Homo sapiens
catataagacagcaaacttaataaatgttttgtgtgttctgactgctccacaaatagaggagcattcttcccccatttctctccctctcctcaggcctccmtattccctgagacacaatgatattgaaattaggtcatttaataaccctgcagtggcctctaagtgttcaagtgaaaaaaagagtcacaagtctcacttga

SEQ ID NO: 124741 - DNA, 201 bp, Homo sapiens
gacagcaaacttaataaatgttttgtgtgttctgactgctccacaaatagaggagcattcttcccccatttctctccctctcctcaggcctccctattccmtgagacacaatgatattgaaattaggtcatttaataaccctgcagtggcctctaagtgttcaagtgaaaaaaagagtcacaagtctcacttgaaatcaaa

SEQ ID NO: 124742 - DNA, 201 bp, Homo sapiens
cagaattcatcctgttcaggtgaggatgtgcctcttccttataggctttctgtgctttagaaacctcatgacattgagtccctgagattaagagagcggascagcctggggcctgctggctcggccactccaacagatacaacctagctgggaacaagagtgaagcctggcatattgggatatgtgagtgtttctgactaa

SEQ ID NO: 124743 - DNA, 201 bp, Homo sapiens
tgcagagttttggtgtaaatggtacaatttagcaaaattattcccctcacctgaaacaaatgtgtccagaaaggattgacagttcccataaatatgaattrtaaaatgaacccttactctatagactagcagaaacctgatattaaaattaagcagccaaccaagcattgttttctaaaatgtcccatcttaattgaaaat

SEQ ID NO: 124744 - DNA, 201 bp, Homo sapiens
aacaagacagacatggtcctaggaatatgaatgttttgggaaaaaaatgtagcatcaatgaggataacatacggtcaaagaattccccatcaaagccaggyacagtggcacacatttctagctacttgggaggctgtcaggaggattgcttgagtttgagtccagcctgggcaacacagcaagaccttgtctctaagaaaa

SEQ ID NO: 124745 - DNA, 201 bp, Homo sapiens
attgggtccctttgttgaagacattctccaggtggtacaggagtgttgtggcacccacatcgtgctttgagctcacacttaatttatcattgatggaaacrtacaggtctttttcaggtgaaaaatgattgggcctcattctatatttatttacttgatttttgttattaaaactaagtccacaacatctaatttatcgct

SEQ ID NO: 124746 - DNA, 201 bp, Homo sapiens
acagcaacagggtcccttggtcagttaccctctgtgttgaagggaggtctgtgaggcatgtttgcatggctatcacactcacataaaggaagcccacaggyaggtggatcagagctggtaaagcagtgtcacaatgttgttgaggaaccaagcagcaccttcctcagcacacagctttctccccaccatcagagatgacta

SEQ ID NO: 124747 - DNA, 201 bp, Homo sapiens
atacaatatttttagatatttaaagatattagtttaataataatttcaaatttaaaaggcagttagttcctttattctagtcttattgattttttttttttgatcctttagggcctgaagtgaaatttaaaggcgtctttcacccagttataatttctcctgatagaattgaagaactgagtgttgtaaaccatgcatata

SEQ ID NO: 124748 - DNA, 201 bp, Homo sapiens
ttcatgggtgtaagacttatctccaaattcaccaagttgtacagctttttgcatgtcaataacagctcaataaaatggattttactttttaaaaaaaaaawtagtttggctgaacacagtggctcacgcctgtaatcccaacatttagggaggcctaggtgggtggatcacctgaggtcaggaattttgagaccagactgg

SEQ ID NO: 124749 - DNA, 201 bp, Homo sapiens
aggtgttggtgaagtctggctgctctggttgctaatggagacctggcctgccataggtgcatggttacctgtgactagagaatgtcaacccctcattcaaragcaaaaaccatcaaagttgtgacagtttttgataagtggacaccattctggaattagaattaggaggcgtaattttaatcctgcctctgacactctggc

SEQ ID NO: 124750 - DNA, 201 bp, Homo sapiens
tttcatgggtgtaagacttatctccaaattcaccaagttgtacagctttttgcatgtcaataacagctcaataaaatggattttactttttaaaaaaaaaattagtttggctgaacacagtggctcacgcctgtaatcccaacatttagggaggcctaggtgggtggatcacctgaggtcaggaattttgagaccagactg

SEQ ID NO: 124751 - DNA, 201 bp, Homo sapiens
tctgttctccctattctgttgctgagcccatcccttgaactttttaaatttttgctgtatttcttaattctaaaatttctatttcttttttctttttataytttctatttctttgctgaggtttctattttttcatttgtttcaagtgtttgtgtaattgcttattaaagcatttttattacagctgctttaaaatccttg

SEQ ID NO: 124752 - DNA, 201 bp, Homo sapiens
gcccgactgctttcacagtttaataactacctttgctgctgtataataactttgatctttctgtcagctgaagcttagagtgcttttttttttttttttttgtcacagtaagtgttaagaatgaggggttttttccttagaaaaagaagtatagcttgctatttgcaacaacgtaaatgaacctggaggacattatgctga

SEQ ID NO: 124753 - DNA, 201 bp, Homo sapiens
atgcctgtgggaaaggaagtagggagtgaatcagaggagacttagggagccatttgatcaccgtgtaagtctgaccctggagataaggttgagtggaaggsccctagactgctggtcagtctaaggcatgttcttcagaaccactggggatggttgacaaggactccatgtctctccatagcactaagccattggtggaga

SEQ ID NO: 124754 - DNA, 201 bp, Homo sapiens
tgtacacccagctcccagacagggcttgtctgaaatcttacttccagagctggaggtcccaggtgctctactgccctgtgcaaatgaaatgctcatccccrcaaagaaggaatatggggctggcaggcagagccaccatgatcccaatcactagagtcttttcaactagcaattattgagtgtttactatatgcaatataa

SEQ ID NO: 124755 - DNA, 201 bp, Homo sapiens
gagcttctgttttctcttttgcaaaatggagctaataacagaaccttttcccttgaaattggggctgattaagttgcatagagagaggttagcagggtgggtgtacacagtaaacagattgtaaattgatatgtggaaacaattgttgctatctggactataaaataatctgtttcattagcagagccagaacctgcttag

SEQ ID NO: 124756 - DNA, 201 bp, Homo sapiens
tcataaaaatatgcctgaagtcacactgttggtaaagtggatacagtttggtgggtttttccttgaaattattatcaggaaacttgacctcgagagttttrgtaagtcaagaacatgaaaaggctttttaaagcatttgttcactgaaactattgttggatttggttgtgaaagcttatagtatgtcgtaatgaacattga

SEQ ID NO: 124757 - DNA, 201 bp, Homo sapiens
agaacatcagaacagacattgtcatggatgttggctgcagtataaatccagccattgacataggccaggtacgtgtaactgatgtgtctcactttctattygtaaaagccaaaagtgcggtggggtctgcaggagagcattccatcagtcttattcatcatcttatttttctaaccctttagtcaactctattcagaccaa

SEQ ID NO: 124758 - DNA, 201 bp, Homo sapiens
aatatggggctggcaggcagagccaccatgatcccaatcactagagtcttttcaactagcaattattgagtgtttactatatgcaatataagctcttcacrtcttatttcattttatcttcaccaaccacgatcctattggagctatatgcacacctgttacttccattttacagacaatgataagagaggtgaagtgata

SEQ ID NO: 124759 - DNA, 201 bp, Homo sapiens
tgagcttctgttttctcttttgcaaaatggagctaataacagaaccttttcccttgaaattggggctgattaagttgcatagagagaggttagcagggtgggtgtacacagtaaacagattgtaaattgatatgtggaaacaattgttgctatctggactataaaataatctgtttcattagcagagccagaacctgctta

SEQ ID NO: 124760 - DNA, 201 bp, Homo sapiens
cataaaatctgtgactagggagcttgaatgaggcaagaccaagcctacaggtgactgatgagctccaaacttctgggacataagtagagttagtgcccagygctgagccttagccacacgatgggcttcagcttcgaggagtttgaagtcgtgttgggataataagcctcaagtcatcagagcagtagctgttggtaggca

SEQ ID NO: 124761 - DNA, 201 bp, Homo sapiens
cattgtgttcagagattaagctctcaaagtctaaagatcatcaactggatcagagcaaatttaatcaaagtttagagcagggaaatatgcccctctccctrtacattacagttcttttatcactttcctgactaagaaaaattcagaaaattggctcaaagttattcaaagagcaagcagccagtgaagttgaaaaagatg

SEQ ID NO: 124762 - DNA, 201 bp, Homo sapiens
tgggagaccgaggcaggaggattgcttgagcccaggagttcgagtttagcctgggcaacatggcgaaaccttgtctctacaaaaaaaaaaccaaacaaaamaaaacaacaacaacaaaaaaaaaccggtgtggtggtgcgtgcctgcagcccagctactggggagggtgaaggaggattgcttgagtctaggagttcaagg

SEQ ID NO: 124763 - DNA, 201 bp, Homo sapiens
tataaaggctataagactcatctccatgaaatgataggatgttctcttgtgtgcattccattggttcttataatttcctggatgatgaaagaatgaacackggggaggcagtgtaaatagatgagactcagtccatacaggccgcatgtgctctgggacacaatattagcttcacagcataatgaacatgttgttctctgg

SEQ ID NO: 124764 - DNA, 201 bp, Homo sapiens
ttggcaacttaaactggagaattgcattttctatcctgatttttagaaaggagttgaaaatttataaaggctataagactcatctccatgaaatgataggrtgttctcttgtgtgcattccattggttcttataatttcctggatgatgaaagaatgaacactggggaggcagtgtaaatagatgagactcagtccataca

SEQ ID NO: 124765 - DNA, 201 bp, Homo sapiens
taagaacaatctgttagtcatggcagagaccattatatcacattaaaaaaaatgtacagacttgctggaaagcaaaggtgttactaacactctggctgggsctgctgtacttctcctcatttgtaggttatcagtagcaagttgtagtgtcaactttattctcttctctgctacaaaaatgaaaagtctagaacagcagat

SEQ ID NO: 124766 - DNA, 201 bp, Homo sapiens
ggtcacatatccatctccaaattaatgactggcagaggaatggaggagctgttggttacttctaggggtaggagttggggtcaggtttctctgaagtaagygggctatgtaggggagtgtaggaaactgaaacaaatctgagccctgtttggaaagggaaaggggaggggatgctagatgggaaacagtgatgtccaggaa

SEQ ID NO: 124767 - DNA, 201 bp, Homo sapiens
aaacattccagatcattatctaattttcaaatgttacatgaaagtcccagatcaaataaggaaactcttggatttcttttgttcaattagtaattataagwacaatctgttagtcatggcagagaccattatatcacattaaaaaaaatgtacagacttgctggaaagcaaaggtgttactaacactctggctgggcctgc

SEQ ID NO: 124768 - DNA, 201 bp, Homo sapiens
gtcttggctaggacatcttttcatgaaaagacagtttgtgaggagagatgtgctcaccatcagggttctgttatcacaggggactccccttcccaggtcaycccctttttctctctggttgagatgatctgtgacttcctggtcctccctgtccgtgcaggcagaggctgcctctctcagaacagctctgattgtcgtgtg

SEQ ID NO: 124769 - DNA, 201 bp, Homo sapiens
tcatgtggatacctctttgtaggctgcctgagtgtcctcaggacaagacaactggcttcctccagagagaccagcccaagagaaaaagagagagcatgtgyaagcgagagagtacccgagacagaagcccagctttataacctaatctcagagtgactactgtcacctctgccatagcctactggtcaaacaggctggcct

SEQ ID NO: 124770 - DNA, 201 bp, Homo sapiens
gctcaggttagtgtcactgctaggcaaagggccagaatgtgacattctaccaggggccctccccaaaggcctgtttctcagccattctcctgttgatagamttgcccttattccggcaaaattttcctcactttgaacctacatctaaatatcagttacctgttctgtacaacaaattacccccaaacttagtgctgaaaa

SEQ ID NO: 124771 - DNA, 201 bp, Homo sapiens
cagatgccttcataaaagctaaatctcagctcaggttagtgtcactgctaggcaaagggccagaatgtgacattctaccaggggccctccccaaaggcctrtttctcagccattctcctgttgatagacttgcccttattccggcaaaattttcctcactttgaacctacatctaaatatcagttacctgttctgtacaac

SEQ ID NO: 124772 - DNA, 201 bp, Homo sapiens
atagttatcaaaatcagaatattaacacatattctattaatctacacagtttattcaaatttcgctagttgtctcaataatgtcctttatagcagaaaaaagaggttcatcataagtcttaaataacccatgctttccccgccacactctgctgtcattgctgctgtgaaagctgtcctaatgcctgcctcacaagatctc

SEQ ID NO: 124773 - DNA, 201 bp, Homo sapiens
tcatcagatgccttcataaaagctaaatctcagctcaggttagtgtcactgctaggcaaagggccagaatgtgacattctaccaggggccctccccaaagkcctgtttctcagccattctcctgttgatagacttgcccttattccggcaaaattttcctcactttgaacctacatctaaatatcagttacctgttctgta

SEQ ID NO: 124774 - DNA, 201 bp, Homo sapiens
acaggctgcgccaccacacccagctaatttttgtatttttagtacagacatggcttcaccatgttgcccaggctggtctcaaactcctggccttcaagtgrtccacccaccttggccttccaaagtgctgggattataggcctgagccactgtgccctgcccatataactgatttctaagtcccttctccctcaaagcaaa

SEQ ID NO: 124775 - DNA, 201 bp, Homo sapiens
caaagaatgggagccatgggacctgatccttcacacagaggggcaaattctggagccagaaagatagacaaagcaggcaagcatgcacctttgaaatagcrtttggtgtaaaatgaaggttgagttccccaaatctgatgatccaatattagccaaaagcagtaagatggacattcaggaagtaagaagctaacctccagg

SEQ ID NO: 124776 - DNA, 201 bp, Homo sapiens
ggtgtaaatggtacaatttagcaaaattattcccctcacctgaaacaaatgtgtccagaaaggattgacagttcccataaatatgaattataaaatgaacscttactctatagactagcagaaacctgatattaaaattaagcagccaaccaagcattgttttctaaaatgtcccatcttaattgaaaattttctgcagat

SEQ ID NO: 124777 - DNA, 201 bp, Homo sapiens
ttgtgcatagtagtcagctctgtgtactgcagagttttggtgtaaatggtacaatttagcaaaattattcccctcacctgaaacaaatgtgtccagaaagrattgacagttcccataaatatgaattataaaatgaacccttactctatagactagcagaaacctgatattaaaattaagcagccaaccaagcattgtttt

SEQ ID NO: 124778 - DNA, 201 bp, Homo sapiens
catggaatttagcatgcctgttcatggctgctaatcaggccagggcagatgactatggggaaggcctgtgtgggaggggtgggccatgaggagggagtcaragagcagaagagggctggggactgccaggggtgggtggagggcttttagagacaagacttcacttagtggggatggactgaagtgtttggaagactgatc

SEQ ID NO: 124779 - DNA, 201 bp, Homo sapiens
caggaagtaagaagctaacctccaggagtaaggaggcaccagtcaggagtagttagatgtttttatcagacaaagcaagttttaaaagaaaaaactaaatrcttatttattcaacacatttatcgcacatacattaggtgctggcacatacattaggtacaggtatattcctgtggcttgcataaatcctcatgggtctgt

SEQ ID NO: 124780 - DNA, 201 bp, Homo sapiens
gtgttctcaggaaaagcagtctgaaatagcatttttaatcatttgagctagacttcctgagcattgctcaagagactttctaactgttattaagtagattyctcttgcctcttattggagcagtgtcaagagttgtaccgaaggggcttgctccatagcaaaccagcagcaggagcttcagtgacagctgtcctgtctttc

SEQ ID NO: 124781 - DNA, 201 bp, Homo sapiens
cataggcttggcctggagcctgagcctgctgtcctcaagacagcatcactcctgctcctctgatacagcacaaggatctaaacttcccccagtgcctcggrtcaggaggccagctgtggttatagtcatggacagatgtggaggggtcacacctgtgtgtatctagccctagccctactgtaatcgagtactaggagggag

SEQ ID NO: 124782 - DNA, 201 bp, Homo sapiens
acgtacaggtctttttcaggtgaaaaatgattgggcctcattctatatttatttacttgatttttgttattaaaactaagtccacaacatctaatttatcrcttcttccaacttgcttgaaaattattaggaagttctaattggtcctctgtaaatttgtggggttttttttcgttaaaaaatatggactagttttctatc

SEQ ID NO: 124783 - DNA, 201 bp, Homo sapiens
tgatggaaacgtacaggtctttttcaggtgaaaaatgattgggcctcattctatatttatttacttgatttttgttattaaaactaagtccacaacatctratttatcgcttcttccaacttgcttgaaaattattaggaagttctaattggtcctctgtaaatttgtggggttttttttcgttaaaaaatatggactagt

SEQ ID NO: 124784 - DNA, 201 bp, Homo sapiens
gcaatgactccctaccaaatagctgtagaataaaaaagacaatccacattagaaacacacgtacttgctgaacatccctcagcctgtctgtgggtgggtawgagtttagggaagaattgaaagtagagccaagagttgatcaggcttttatttaacaccactcaattatttggtttctgactgttagtttttccagatcat

SEQ ID NO: 124785 - DNA, 201 bp, Homo sapiens
ggtgacttcttccagtccagactgtttttacctttctcaagtcttaaggtttcttttccccatctaaatttctgctgtggtccctgtgtgaactcctgagyctagctgccccacctgcaggcgaataatcctagctgtcaacccccccaggaaggggatgctgtctgcttggtcacgtcttggctaggacatcttttcatg

SEQ ID NO: 124786 - DNA, 201 bp, Homo sapiens
ttctgtgctttagaaacctcatgacattgagtccctgagattaagagagcggagcagcctggggcctgctggctcggccactccaacagatacaacctagytgggaacaagagtgaagcctggcatattgggatatgtgagtgtttctgactaacttgttggaaaaatgcttttggaaggctagaaaaccttttcttctct

SEQ ID NO: 124787 - DNA, 201 bp, Homo sapiens
aatgggaaagtattatacaatgaaccccatagatccatcacccagcttcaacagttatcaacacgttaccattcttgtttcatttttctctccttcactgsccctaccccaaacaaacacactttttttgtgttcatgctagattttatgtttttaatgcctttttttcgatgataaaactactttatgttcattgtggaa

SEQ ID NO: 124788 - DNA, 201 bp, Homo sapiens
acaaatcaccatgctcggctaatttttgtgtttttagtagacagcatttttgccatgttggccaggctggtctcgaactccttacctcaggtgatctgccygcctgggcctcccaaagtgctgggattgcaggcatgagccaccacgcccggcttaaatgggatttttaaaagtgagcatctatgatgtctggtcaccata

SEQ ID NO: 124789 - DNA, 201 bp, Homo sapiens
ttatttcatccactcctcccccaagtctgaatgttctactaatgtctttactctcacctgctttaaactttctagaaaaaactggacaggaggtagtgttyctgttagcagaaacaacaattgccttagagaacagcgataattcaggaccaaggacaggagcacaattgtggtggggctcaagattacacataagagtgg

SEQ ID NO: 124790 - DNA, 201 bp, Homo sapiens
aagcatctccatgattcaggaattcccagaatggcagtttggcagccaggagccacgttaaatttaggcatatacatgagacgatcaggcttgggttttasagcagtcactctggtcgtggtgcagaggacgatattgcgggtaccaagagtggaggcagggagaactctcaggcaggtcttataatcattcagacaatag

SEQ ID NO: 124791 - DNA, 201 bp, Homo sapiens
ttccctctaccagaaatcctgattccatagcggtttcattttaacaagcatctccatgattcaggaattcccagaatggcagtttggcagccaggagccaygttaaatttaggcatatacatgagacgatcaggcttgggttttacagcagtcactctggtcgtggtgcagaggacgatattgcgggtaccaagagtggag

SEQ ID NO: 124792 - DNA, 201 bp, Homo sapiens
aaatacaggtctgggggaaataacatttgaggatcccacttagaaatggtttctgctattccatggagtaaggactcattttataattcatatttatgggrtctgtctatacttcctgggcatatttgtttctgtcctctgtcccatgctgcctgagcccagaaagcctgagtcagtgtggctggagaaagctggagagag

SEQ ID NO: 124793 - DNA, 201 bp, Homo sapiens
tggcacaccacatttgccagtggacacatggattactgcaagataaattctcagggatagctaaaaaccaacctatgttattgtaactacatctctggttwtgtgcaccactgtacccttttactgggcacccagggagagccaataggagctagtgtataaatggatttgtacacccagctcccagacagggcttgtctg

SEQ ID NO: 124794 - DNA, 201 bp, Homo sapiens
ttgtattctgtttttccacccactttatatagcgtgaacactttctcctgtcattaagcagtctttacaatcatgaattgtatgtggctgcatgtggatayatatatgatttatttaaccatcccccagttgtttgaatacttcagtgaatatttttgtacactaacctgtgatcaaatcattgattgtttcttaaaatag

SEQ ID NO: 124795 - DNA, 201 bp, Homo sapiens
acagttagataagattacttccaagttcttgtctaactccaaagctctgtagttctgtgccaagatgatttagggtgagcttagtcattttgcagcaaaamaattttagtgtctatctatctcatcttatatgggattataagaaaatggatttccattttcatttttctgggacatgcctacaactatgagaatatgtgt

SEQ ID NO: 124796 - DNA, 201 bp, Homo sapiens
tccccaggcagcttggaaggcccttctgatgggcagagaattgatctggaaatgcagtctttttcttgggtttatctggtgattaacatgcagttccatcraccttcacttaatgaccagggttgcttacaaataatctaagtgagcaactaaggcttaggaaaatttttggtttattaagttgacattggcttattacca

SEQ ID NO: 124797 - DNA, 201 bp, Homo sapiens
tatggtcacttttattgaacctgccttttcaagtatctaacctgtctggttctaattcagactggatctctatagggtaacctcgcactagggcaaaacartgatcactttgagcatggtttttgtgttagactagcagccctacactactagggagcgggttcttgcatagaactgatttctgtttgtttgtttgtttgt

SEQ ID NO: 124798 - DNA, 201 bp, Homo sapiens
ccattttcctcatcagaattttctcaaaaagtagatttgaaaaatatggtgaggtgcagtggctcacgcctgtaatcccaacactttgggaggccaagacrggagaattgcttgaggccagaagtttgaaaccagcctgagcaacatagtgaggccccatctctacaaaaaagaaaaaataataatagtgacaattactga

SEQ ID NO: 124799 - DNA, 201 bp, Homo sapiens
cttgtgccagttttcaaagggaatccttccagcttttgcccattcagtatgatattggctataggtttgtcacaaatagctcttattattttgagatatgrtccatcaatacctagtttattgaaagtttttaacatgaggagatgttgaattttatcaaaggccttttctgcatctatagagataatcatgtggttttcg

SEQ ID NO: 124800 - DNA, 201 bp, Homo sapiens
agagaagtgttataacaaatgatgatcttattgcagtcttctcattccttgcctgtttgtgatggcaaaaaataacacagagccatgtagtcatctgcatrcagtttactcaaatgtgggagacagtcaagatactgtggttgagaaataaaagcaaaaacgaggttattacaaaagaagagagaaagaaactaccactgg

SEQ ID NO: 124801 - DNA, 201 bp, Homo sapiens
ttttcttctctttgtagcaattgtgaatgggagttcattcatgatttggctctctgcttgtctattgttggtgtattggaatgcttgtgatttttgcacaytgattttgtatcctgagactttgctgaatttgcatatcagcttaaggagtttttgggctgagacgatggggttttctaagtacacaatcatgtcatctgc

SEQ ID NO: 124802 - DNA, 201 bp, Homo sapiens
gaggaccctcacaattgtcactcctctttgcagaattcactccttggttggagtcatgaagaaggcatggcagctgtgctgagcgatcacaaaataggaayaaatggcagggtaggggagcttcgagaggggcgttagtgtggatgttgtgtgttaagggatcagaagaggccaggaaaagtgggtaggaaggtcctttcc

SEQ ID NO: 124803 - DNA, 201 bp, Homo sapiens
aacaagtagagacaggagaggttcagggagccgttcttgttccagctgtgtctgcggctgctgcctcctcttctactgtccccagactccaaagagaaggyacagggagttgaggcctccagaggcccattggcatcagcactgagttgctgatgacaaggtttgtgttagagcccttggtttggagcgcggggattgtgg

SEQ ID NO: 124804 - DNA, 201 bp, Homo sapiens
caatgtagtgaaaccctgtctctactaaaactacaaaaattagctgggcatggtggtgcatacctgtagtcccaagctactcgggaggctgaagcaggaakaatcacttgaacctgggaggtggaggttgcagtgagccaagatcatgccactgcactccagcctggcaacagagcaagactctgtctcaaaaaaaaaaaa

SEQ ID NO: 124805 - DNA, 201 bp, Homo sapiens
ccaatgtagtgaaaccctgtctctactaaaactacaaaaattagctgggcatggtggtgcatacctgtagtcccaagctactcgggaggctgaagcaggaataatcacttgaacctgggaggtggaggttgcagtgagccaagatcatgccactgcactccagcctggcaacagagcaagactctgtctcaaaaaaaaaaa

SEQ ID NO: 124806 - DNA, 201 bp, Homo sapiens
aaaggtaagtgacagcccctacttggagattattaagctgtttctctacccctttttctctctggggaggcaggaaatccagtcttgaaaatgacttttcyctataatatcaatacatttctctgcttttctggatactggaaattttgtgagtcttgtcttaatagcacaggctttcttcccctgtgtctttctggtttt

SEQ ID NO: 124807 - DNA, 201 bp, Homo sapiens
ctcagcaagtgccctaatgcagatcttaagcctcaagaaatcttggtctcagtgaacatcccctactcaaggaaggtgagaacatcccactgtcaatttcycagttgcacctgtgatgctatggcttgtttattccagtatatggtggaataagaaaaagggtgaagtgtttatgtgggagataaaggctcaacttcagga

SEQ ID NO: 124808 - DNA, 201 bp, Homo sapiens
gccaagaagagaggaaggattttcaggacagagggaaccttgcatgcaaatgcagtgaaggtgaaagtccaacgcaccccctggactgtccagttcatccrtgtggcctgagttcgaatttcttcttgtattccggaaatagttggttattaattcacctaagatccactcagtgtactcatttaaaaagcacattttctg

SEQ ID NO: 124809 - DNA, 201 bp, Homo sapiens
cttacccctaacggctggtgaaggactgcaacattctagctcattgtatggcagccgggaacccctattatctattttattacatacacacatccatgtayatacagataagctgggaggaccctcacaattgtcactcctctttgcagaattcactccttggttggagtcatgaagaaggcatggcagctgtgctgagcg

SEQ ID NO: 124810 - DNA, 201 bp, Homo sapiens
atgcagagaattattggaagaagaaaggactggccatggtccccctgaagtttcctgttggccttggctcacgtgctgctggtcaggtgagttctccaaaygcacatgaggatgctgcctggaagcagccctgacaaagcaagaggtgttgaggaaacttctccttaagtcatattagccatatggttgcaatgcccaatt

SEQ ID NO: 124811 - DNA, 201 bp, Homo sapiens
tcccagggaagttagagcagggaacagcctcttaaaaacaccactttcccccaaatgagatggcttactaatttccagtgtttctcttacaatgatctgawaatttgcttcggagggtggggagagtgtgtctgtgatggctctgtcagcttagggagggggctggccacaagtgctatgagttttctcagctgagaatgt

SEQ ID NO: 124812 - DNA, 201 bp, Homo sapiens
tttctgtctctgttgcttcaaagactcatagaatttctcctcttgtaccagagccttcgggagtaaaagaagccacttactggtcactgtcaatactaatraatgatcactgatacattaaatgggactgtgataccctaacaactgtcatgtgaccaagctaccagtttagtgataatctcttccaaaatgtacctagaa

SEQ ID NO: 124813 - DNA, 201 bp, Homo sapiens
acccagctcccatacaagcagaagggttggtctcactcccaatgtgtaccccccaacagccctgagtttgtttgcaggcagacagtgtgatgggcttgaamacttgccctgtgctgcacccctagctgagagagaaaagggcttggtttctccccctgcctgtggagtctgcacaccagatttgtgccctcccactgagct

SEQ ID NO: 124814 - DNA, 201 bp, Homo sapiens
ccagcagtcacaggcctcacccagctcccatacaagcagaagggttggtctcactcccaatgtgtaccccccaacagccctgagtttgtttgcaggcagasagtgtgatgggcttgaaaacttgccctgtgctgcacccctagctgagagagaaaagggcttggtttctccccctgcctgtggagtctgcacaccagattt

SEQ ID NO: 124815 - DNA, 201 bp, Homo sapiens
catcaaaggaatgtatttttagcttgctatgcatgaactccagtgggctacccgacggtgaaagacactactgaattatatgcaaaattatgtttcaaagrgggtgtgtacatttttccccctggagagagtaaaattaccaaaagagtacataactccaaagcatcaataattatttttcagacacatgaatatgtttct

SEQ ID NO: 124816 - DNA, 201 bp, Homo sapiens
aagtggaccaaatgagatggccatgtgacattagccaactctgtcatccatcaccccagtcagtgctcacccaatggtgtcagggatggaggccttgcacrggcccgacagcatgggcttccacttgccatgtagctgatgctgatgctgaacatccaatctgcttccaacacagaccaaaactggtcctcaatttgacac

SEQ ID NO: 124817 - DNA, 201 bp, Homo sapiens
tgcatgtctataatcccagctacttggaggctgaggcaggagaatggctcaaacctgggaggcggaggttgcagtgagctgagattgtgtcactacactcyagtgtcatgcttgggcaacagagccagactctgtctcaaaaaaaaaaaaatgtacatatgtagtacgtaatatttttatatatgcacatatgctataaat

SEQ ID NO: 124818 - DNA, 201 bp, Homo sapiens
tgtctcgaacctggaggcaattcagctcattacctctgatttagggcaccatcttgtgtcccctcccccccaccccccgcccccaccatcatgacattgcrttattggcgaatgggaagaatctgtggtgtggagaagtcaaaggaggcttagggaggaagtgggtgtgaaccaggttgtcaaggaaagaatgagaaacga

SEQ ID NO: 124819 - DNA, 201 bp, Homo sapiens
gattcttgctctgttgcccaggctggagtgcagtggcatgatctcagttcactgcagcctctgcctcctgggttcaagtgattctcgtgcctcagcctccygagtagctgggactacaggcacgtgccatcacccctggctaatttttgtatttttagtagagacggcatttcaccatgttggccaagctggtctcaaact

SEQ ID NO: 124820 - DNA, 201 bp, Homo sapiens
acctacctcacagggcagttgagaggattaaatgagtgaatacatataaggtgctaaaagcagatcttggcatgcaataaatgtcctagtgaggacatttrttagtgagtaaatgagggtcagttactcctggactatggattttatatgagttgtcacttatttctctagatcattctgtgagttgggttctaatattcc

SEQ ID NO: 124821 - DNA, 201 bp, Homo sapiens
agcagatcttggcatgcaataaatgtcctagtgaggacatttgttagtgagtaaatgagggtcagttactcctggactatggattttatatgagttgtcayttatttctctagatcattctgtgagttgggttctaatattccccttttacaggtgaggacatggcgagacccaggctagccaccttgagaatggtgggcc

SEQ ID NO: 124822 - DNA, 201 bp, Homo sapiens
gttttccaagaggttttttattaagtcttgactttttagcatggcttacaaggccagttctctacacacacacacacacacacacacacacacacacacamgtgcacacactcatatgaaacctttcatatcaccttcatacagggttggtgtcttatttttccatgttccctcttagataagcctatggaatggtacata

SEQ ID NO: 124823 - DNA, 201 bp, Homo sapiens
tccacattagaaacacacgtacttgctgaacatccctcagcctgtctgtgggtgggtatgagtttagggaagaattgaaagtagagccaagagttgatcargcttttatttaacaccactcaattatttggtttctgactgttagtttttccagatcatgttcagaaaacttgctaatgatttgggtatgttttccctctg

SEQ ID NO: 124824 - DNA, 201 bp, Homo sapiens
gtaattgttttggagcaccatgaaccacatccatataagacagcaaacttaataaatgttttgtgtgttctgactgctccacaaatagaggagcattcttyccccatttctctccctctcctcaggcctccctattccctgagacacaatgatattgaaattaggtcatttaataaccctgcagtggcctctaagtgttca

SEQ ID NO: 124825 - DNA, 201 bp, Homo sapiens
gtctggcagagactgttggacagttcttacctctctcatatcttattatccaattaaccatgttcttggcctctatggccactctaaggagctctgctgtrtatatcatctaggtctattgatctgtcagaagctctcagcatgcccggtgtggtggacatcatgacagcagaacatcttagtgacgtcaactccttctgc

SEQ ID NO: 124826 - DNA, 201 bp, Homo sapiens
ctgtctgtgggtgggtatgagtttagggaagaattgaaagtagagccaagagttgatcaggcttttatttaacaccactcaattatttggtttctgactgktagtttttccagatcatgttcagaaaacttgctaatgatttgggtatgttttccctctgtatgtcatttctttctcttgagctattaccttcacgttgag

SEQ ID NO: 124827 - DNA, 201 bp, Homo sapiens
tgcagtttccacctcttcattcttgacttcattcattcttaagaatgaataaaacttacccctaacggctggtgaaggactgcaacattctagctcattgkatggcagccgggaacccctattatctattttattacatacacacatccatgtatatacagataagctgggaggaccctcacaattgtcactcctctttgc

SEQ ID NO: 124828 - DNA, 201 bp, Homo sapiens
tctgtatgtcatttctttctcttgagctattaccttcacgttgaggttgacttcatgtgtttggtgttcttttccagattcagcttcatttccctagcccrtaaggtggccatgatggcagccactgcacaagatgactgtgaaatgcgtcattgtaggaaaagggcttcatatggtccctagtgcttcagaggaaatctg

SEQ ID NO: 124829 - DNA, 201 bp, Homo sapiens
tatccaatgcagaccagaggtgaaacaggatcgaaatgtaggatttactacaacttcgttgtcccaagaattttttcccaattgtctggcagagactgttkgacagttcttacctctctcatatcttattatccaattaaccatgttcttggcctctatggccactctaaggagctctgctgtgtatatcatctaggtcta

SEQ ID NO: 124830 - DNA, 201 bp, Homo sapiens
catgagccatgacacctagctggttttattttctattaaaattatgtaaattagaaaaaataaccaccatgtgtattgttgaaagcctttccccccatccrgctctaggctgtgcaatgttcagtcttgtgtaaagaaccaaatgactcacttccctcagtcctgaggaatgttcttgctggggaccagaatccttcccct

SEQ ID NO: 124831 - DNA, 201 bp, Homo sapiens; identical to SEQ ID NO: 21045

SEQ ID NO: 124832 - DNA, 201 bp, Homo sapiens
aatgcttattataaaagtatattctaatattgaatgaattcaaatatattcattttctgtacaagtaaagacattaactagttatataaaagattatttgrtgttttacattttctaatagtgagatggcatactgctaatggtataaatgagtaaatgaagatggaataatggtaaattttatatggaaatcccttccct

SEQ ID NO: 124833 - DNA, 201 bp, Homo sapiens
gacatgcctctggtggaccaggaacttttcttgacttttgtgactagttcaagagctcatgctaagattgtgtaagtggtaaaattcttactcaatgggcrtaaatgattgtcttttcatctaagtcacactagtgaaaagtaatggtgtgaagaaataggctatttgttggtgatatccaatgcagaccagaggtgaaac

SEQ ID NO: 124834 - DNA, 201 bp, Homo sapiens
attatgtaaattagaaaaaataaccaccatgtgtattgttgaaagcctttccccccatccggctctaggctgtgcaatgttcagtcttgtgtaaagaaccraatgactcacttccctcagtcctgaggaatgttcttgctggggaccagaatccttcccctgtagggcagcgacagggatgcagcctgtgtccccctttct

SEQ ID NO: 124835 - DNA, 201 bp, Homo sapiens; identical to SEQ ID NO: 21046

SEQ ID NO: 124836 - DNA, 201 bp, Homo sapiens
tcctgggcatatttgtttctgtcctctgtcccatgctgcctgagcccagaaagcctgagtcagtgtggctggagaaagctggagagaggtgcagcatggasagtagtactccaccaccatgagatgcagccattcagcccactttcttcgctaatgattgatgtgcttctgaccttcattcctagacttagggacttggac

SEQ ID NO: 124837 - DNA, 201 bp, Homo sapiens; identical to SEQ ID NO: 21047

SEQ ID NO: 124838 - DNA, 201 bp, Homo sapiens
gtgaacggccgcaaggtgagcgcccgcgggcttcctctgcccccagacctgcggccagggccggggcagagaggagcccctgccgttcgtcccatcctttsgtgcccgccgtttaaggcactcaggcacggactggctttctcctgtaacagcggctttgccttcgcattcccacccctgcctccggggcagctaaaggct

SEQ ID NO: 124839 - DNA, 201 bp, Homo sapiens
tgttctctttctaggaaagtatacaacacaactcctccttcaagccagaaaggaaactggaatatggaaatgttgacgaagcatttaaagtggttgatcarattcttgaaggtaaaaagtaatggaagagtaaacaaccctggaagtcttctaagcatgtcagtttaaggcttcctttgtcttctggaaatcatcgggcag

SEQ ID NO: 124840 - DNA, 201 bp, Homo sapiens
atcatgtgcaacattaaagaatcaaaacatctagtgactgtcacagtccatttcaggggacaggttttttgttgttgttgttaaaatcatagatgtgacartgacagtcacaattaagtccttgctgaagatggatcagattaatcagaactattattgttcacaggacattgttgcctcaaccttgaagctcccagctaa

SEQ ID NO: 124841 - DNA, 201 bp, Homo sapiens
gcacccaagagcctctgtcccacaagttgcaaatgcctggcattattccctgacctaacgggaggaaagcccacggtgtatgcctgagatcagcagaggayaggcatgcgaaatagttgtgttgttctgtgaggcgtgtaggctccactcaggctcttgccaggagttatataaaccccagagaatgcctgctaagtaaaa

SEQ ID NO: 124842 - DNA, 201 bp, Homo sapiens
gggcctttgggggccattcaggttgaggaatttgagacccagaggggcaaatgatttgtgccaagtcccccagctaactggttaatgcggagcccagactscaaagttcagcaatactcaccttactcagactcctgctccaaaatcctgaagcagaagatcctgaggactgagcactgcattctcccctggctggtgaga

SEQ ID NO: 124843 - DNA, 201 bp, Homo sapiens
gtggaatgtcagagacggtagggcctttgggggccattcaggttgaggaatttgagacccagaggggcaaatgatttgtgccaagtcccccagctaactgrttaatgcggagcccagactccaaagttcagcaatactcaccttactcagactcctgctccaaaatcctgaagcagaagatcctgaggactgagcactgca

SEQ ID NO: 124844 - DNA, 201 bp, Homo sapiens
aaggtaatactaaatcagcttcacagacaaaacatgtggaatgtcagagacggtagggcctttgggggccattcaggttgaggaatttgagacccagaggrgcaaatgatttgtgccaagtcccccagctaactggttaatgcggagcccagactccaaagttcagcaatactcaccttactcagactcctgctccaaaat

SEQ ID NO: 124845 - DNA, 201 bp, Homo sapiens
gagttctccaaacgcacatgaggatgctgcctggaagcagccctgacaaagcaagaggtgttgaggaaacttctccttaagtcatattagccatatggttkcaatgcccaattgttaaatttcacaaaagccaccaaagtcaaagtaattaagctagctttactccagaggagaccagagctcctctgctcacatgcccat

SEQ ID NO: 124846 - DNA, 201 bp, Homo sapiens
cctgttggccttggctcacgtgctgctggtcaggtgagttctccaaacgcacatgaggatgctgcctggaagcagccctgacaaagcaagaggtgttgagraaacttctccttaagtcatattagccatatggttgcaatgcccaattgttaaatttcacaaaagccaccaaagtcaaagtaattaagctagctttactcc

SEQ ID NO: 124847 - DNA, 201 bp, Homo sapiens
ctagctataggatttttagaaacaagaaacttttcatggctggaggaatttgtggttctgctcccttgtccctgtcatgggtatgagggtatcacacatgkgttaccacgtgggcatgtgcacaggtctgtgactaatcaaagtgtttaaaaggaaactctctcttaaaattcaggtggtcagccgtgaattaagaatgcc

SEQ ID NO: 124848 - DNA, 201 bp, Homo sapiens
ctttccttcatatgtgatgcttagtttcactggatacaaaattcttggctgataattgttttgtttgaggagcctgaagatagggaacaatcctttctagsttgtagggtttctgctgagaaatctgctgttaatcatgtaagttttcctttataagttacctggtgcttctgtctcacagctcttaagattctttccttc

SEQ ID NO: 124849 - DNA, 201 bp, Homo sapiens
caggagtagtccacttccttcagagggtttgtgggtcctctcaggattattgctttgttcttgcagtcgatctagagctaaaattcggcgaacttccacargctgctctgtccagagctgcaatctagtcctgcctcccgtccgccatgatgatccaatttctccttttggttctttcagtctcagccccaactttgttta

SEQ ID NO: 124850 - DNA, 201 bp, Homo sapiens
agatatgacagtaagttgtagaagagatgggtccaagagccattatagtgtaaaataaaagagaattggtgaaaatcttggcaaaatgctatgaagaatamaaccgcaaacatgacttggagggttttagaagaaagcgacaagttggaaggaggaaccgatctggaagaacgatgaagagcttgtttgtgtaaatgctgg

SEQ ID NO: 124851 - DNA, 201 bp, Homo sapiens
tctttcttctacttgtttaattctactactgagactttccagagcattttgcatttctaaaagtgtatccaaagtttcctgaatttttttattgtttttttctttaagctatccatttccttgaatatttctccctaacttcttgtaacttttttaaaatttctttgaattgggctttgcctttctcttgttcctccctga

SEQ ID NO: 124852 - DNA, 201 bp, Homo sapiens
agaggataggcatgcgaaatagttgtgttgttctgtgaggcgtgtaggctccactcaggctcttgccaggagttatataaaccccagagaatgcctgctargtaaaagaggttacctcacttactttttttctgttttagacatggccgtgcagttcgctgtgttctggaacgaggagaagacatgttaataactggaggc

SEQ ID NO: 124853 - DNA, 201 bp, Homo sapiens
aatttagaccatttatattcaatgttagtattgaaatgtgaggtaccattgcatttgccatgctttttgttgcctgtgtactttgttttttattttttgtttgtttttgctttttaacatgtatttatgttttataggtcctatgtgacttatgctttaaagaagttctgttttgatgtgtttccaggatttgtttcaaga

SEQ ID NO: 124854 - DNA, 201 bp, Homo sapiens
catatacatacacatatatacatatacgtgtatgtatatatgtgtatatatgtatatgtgtgtatatgtatattttcttgatttaaatatagactttgctyttgttatgcttacattcatttgtatcgccattttcctttgaggatctcaaaaaattctcatgtaaaattgtctctggagcaggcacacctagaaggctta

SEQ ID NO: 124855 - DNA, 201 bp, Homo sapiens
gaatttagaccatttatattcaatgttagtattgaaatgtgaggtaccattgcatttgccatgctttttgttgcctgtgtactttgttttttattttttgtttgtttttgctttttaacatgtatttatgttttataggtcctatgtgacttatgctttaaagaagttctgttttgatgtgtttccaggatttgtttcaag

SEQ ID NO: 124856 - DNA, 201 bp, Homo sapiens
agaatttagaccatttatattcaatgttagtattgaaatgtgaggtaccattgcatttgccatgctttttgttgcctgtgtactttgttttttattttttgtttgtttttgctttttaacatgtatttatgttttataggtcctatgtgacttatgctttaaagaagttctgttttgatgtgtttccaggatttgtttcaa

SEQ ID NO: 124857 - DNA, 201 bp, Homo sapiens
gagaatttagaccatttatattcaatgttagtattgaaatgtgaggtaccattgcatttgccatgctttttgttgcctgtgtactttgttttttattttttgtttgtttttgctttttaacatgtatttatgttttataggtcctatgtgacttatgctttaaagaagttctgttttgatgtgtttccaggatttgtttca

SEQ ID NO: 124858 - DNA, 201 bp, Homo sapiens
taagtggagaatttagaccatttatattcaatgttagtattgaaatgtgaggtaccattgcatttgccatgctttttgttgcctgtgtactttgttttttrttttttgtttgtttttgctttttaacatgtatttatgttttataggtcctatgtgacttatgctttaaagaagttctgttttgatgtgtttccaggattt

SEQ ID NO: 124859 - DNA, 201 bp, Homo sapiens
ggtaagtgacagcccctacttggagattattaagctgtttctctacccctttttctctctggggaggcaggaaatccagtcttgaaaatgacttttccctrtaatatcaatacatttctctgcttttctggatactggaaattttgtgagtcttgtcttaatagcacaggctttcttcccctgtgtctttctggttttttg

SEQ ID NO: 124860 - DNA, 201 bp, Homo sapiens
tgtgaatgatcttttgtatttcagtgttgtcagttgtaatatctcctgtttcgtttcttagtgaggttatttggatttttactcttcttttcttaatcttyctaacggtctatcaattttatttatcttttcaaagaaccagctttttgtttcatttatcttttgtactttttttccagtttcatttagttctgctctgat

SEQ ID NO: 124861 - DNA, 201 bp, Homo sapiens
ttcagatctgaatcccatcctggctgtgggtaactgtaccctcaacttgctatcaaaaggtaagtgacagcccctacttggagattattaagctgtttctytacccctttttctctctggggaggcaggaaatccagtcttgaaaatgacttttccctataatatcaatacatttctctgcttttctggatactggaaatt

SEQ ID NO: 124862 - DNA, 201 bp, Homo sapiens
cttaaggttccttctttctctatcttgtggaatagtatcaaaaggattggtaccaattcttctttgaatgtctggtggaattctgctgtgaatccttctgrtcctggactttttattgttggtaatttttaaattaccatttcaatctcgctcttgttattggtctgttaagggtatctaattcttcctgatttaatctgg

SEQ ID NO: 124863 - DNA, 201 bp, Homo sapiens
tttagttctttaaggaatctccacactgtcttccatagtggctgtactagtttacattcccaccagcagtgtagatgtgttccctgttcaccacatccacrccaacatgtactgttttttgattgtttgattatggccattcttgcaagagtaaggtggtgtagcattgtggtttcagtttgcatttccctgatcattagt

SEQ ID NO: 124864 - DNA, 201 bp, Homo sapiens
ggaagaaagtcatactgttcacagttaccaccctgactttgactgaagggaaagcccctcccatcctccactcacactggctctttgtggtatccttcatrgttttccctaagcccctgacacgttgctttttctactctggagaaacagagacccactccacttttcactgggtggtcttcaagcgtgagatgataaccc

SEQ ID NO: 124865 - DNA, 201 bp, Homo sapiens
agtgaagattgtctatcaagacttggagccgctgatactaacaattgaggtaatgagttctgtggaatggtggtgccagttgggagccagaacaaatatcrgttaaaatgcttttggctactgtaacaggaaaatgtggctcaaagtggcctccaaagcacacggactttattaacctctaaccagtctcagtattaacaa

SEQ ID NO: 124866 - DNA, 201 bp, Homo sapiens
ctatcagtgcgcagggcagtctttggctactctctagtggggagtaacaatgagcaaatcaaaaacagagcatctatttaactttctattggttgcactgrcttttaattactagctggttcaatggaggcttttctgcttagctcaaagatgtcagtttcagaaataaaacactaagtgctagctggtattggctgtaca

SEQ ID NO: 124867 - DNA, 201 bp, Homo sapiens
agcctgctgtcctcaagacagcatcactcctgctcctctgatacagcacaaggatctaaacttcccccagtgcctcgggtcaggaggccagctgtggttayagtcatggacagatgtggaggggtcacacctgtgtgtatctagccctagccctactgtaatcgagtactaggagggaggaagaaaatgaataaaagagag

SEQ ID NO: 124868 - DNA, 201 bp, Homo sapiens
agacctgcggccagggccggggcagagaggagcccctgccgttcgtcccatcctttcgtgcccgccgtttaaggcactcaggcacggactggctttctccygtaacagcggctttgccttcgcattcccacccctgcctccggggcagctaaaggctgcgttttcagggactgtcctggatctttgggcccccaccttcct

SEQ ID NO: 124869 - DNA, 201 bp, Homo sapiens
ggaagccgggcatggtggctcatgcctgtaatcccagcactttgtgaggctgaagcaggcagattgcttgaggccaggagtttgagaccagcccggtcaaygtagcaagactccttctatttaaaaaaaaaaaaaaaaaaaaaaaaaggaagctgggcacggtggctcttgcctgtaatcccagaattttgtgaggctgaa

SEQ ID NO: 124870 - DNA, 201 bp, Homo sapiens
tttctgacactatcaccagaaagtcaaagaaaaagaaagtgtgttcaggacttggggtccagactagctataggatttttagaaacaagaaacttttcatrgctggaggaatttgtggttctgctcccttgtccctgtcatgggtatgagggtatcacacatgtgttaccacgtgggcatgtgcacaggtctgtgactaat

SEQ ID NO: 124871 - DNA, 201 bp, Homo sapiens
aaacattttaacttttttttaatactagaacatcagaacagacattgtcatggatgttggctgcagtataaatccagccattgacataggccaggtacgtstaactgatgtgtctcactttctatttgtaaaagccaaaagtgcggtggggtctgcaggagagcattccatcagtcttattcatcatcttatttttctaac

SEQ ID NO: 124872 - DNA, 201 bp, Homo sapiens
tactcggcagtggttgactttttgttgaaaacacgatctatctcttaagaaacaaaggtaggggaaagcaaattaaacccataagatgggtaccattttayaccttcaggattggcaaaaaagaaattggaccataaccatgttacattaagatgtgaaacaacaggaactcagtgaatctggaaaacagtttattaaatt

SEQ ID NO: 124873 - DNA, 201 bp, Homo sapiens
cagcatccaggcagtgggaatggcaggtgcaaaggtcctgaggtaggaggatttctgtgtgcttaaggaggtaggttggtgggcctggcaacatgggcagkggcctgattactagggctttataggtgatggtaagggtttgggttaaatgaagaaacagggattgtgagtctaacatctcctcgcttctccttcccccac

SEQ ID NO: 124874 - DNA, 201 bp, Homo sapiens
tgcagaagaaaaattcttattaaacattttaattctaatctaacattatgataaaaatttttagtattccaaatcttagaacttaacatcaactactattrccatcaggttctatctaatttttcaccttgcaataatcatcttcatgcctaataatcatcttctgtatgtaggtcatttcctgaggctagaattctaaga

SEQ ID NO: 124875 - DNA, 201 bp, Homo sapiens
cctttcaagggtctgggagagtcgggggtgttcctggggtgttccgtgtttttcgctatccatgacgcagtgagtgcagcacgacaggagagaggcctgcrtggacccttgacccttaatagtccactgaccccggagaagattaggatggcctgtgaagacaagttcacaaaaatggtacgtttgcatggtagaaaaaaa

SEQ ID NO: 124876 - DNA, 201 bp, Homo sapiens
cattgattggtgggcatttgggttggttccaagattttgttattgtgaattgtgctactataaacatgcaggtgcaagtatctttttcgaataacaacttkttttcctctgggtagacacccagtagtgggattgctgggtcaaatggtacttctacttttagttctttaaggaatctccacactgtcttccatagtggct

SEQ ID NO: 124877 - DNA, 201 bp, Homo sapiens
tgcacccatcacccgatgggtgtatgtatatacatatacacacgcacacatatatatgtgtatatatatatacacacacacacacatatatatatatatayatacatacatacacacaccacagtttctttatccactcattgattggtgggcatttgggttggttccaagattttgttattgtgaattgtgctactataa

SEQ ID NO: 124878 - DNA, 201 bp, Homo sapiens
gtgcacccatcacccgatgggtgtatgtatatacatatacacacgcacacatatatatgtgtatatatatatacacacacacacacatatatatatatatwcatacatacatacacacaccacagtttctttatccactcattgattggtgggcatttgggttggttccaagattttgttattgtgaattgtgctactata

SEQ ID NO: 124879 - DNA, 201 bp, Homo sapiens
attgtgagattttggtgcacccatcacccgatgggtgtatgtatatacatatacacacgcacacatatatatgtgtatatatatatacacacacacacacatatatatatatatacatacatacatacacacaccacagtttctttatccactcattgattggtgggcatttgggttggttccaagattttgttattgtga

SEQ ID NO: 124880 - DNA, 201 bp, Homo sapiens
aattgtgagattttggtgcacccatcacccgatgggtgtatgtatatacatatacacacgcacacatatatatgtgtatatatatatacacacacacacacatatatatatatatacatacatacatacacacaccacagtttctttatccactcattgattggtgggcatttgggttggttccaagattttgttattgtg

SEQ ID NO: 124881 - DNA, 201 bp, Homo sapiens
ttctttagtggtgaattgtgagattttggtgcacccatcacccgatgggtgtatgtatatacatatacacacgcacacatatatatgtgtatatatatatacacacacacacacatatatatatatatacatacatacatacacacaccacagtttctttatccactcattgattggtgggcatttgggttggttccaaga

SEQ ID NO: 124882 - DNA, 201 bp, Homo sapiens
gttctttagtggtgaattgtgagattttggtgcacccatcacccgatgggtgtatgtatatacatatacacacgcacacatatatatgtgtatatatatatacacacacacacacatatatatatatatacatacatacatacacacaccacagtttctttatccactcattgattggtgggcatttgggttggttccaag

SEQ ID NO: 124883 - DNA, 201 bp, Homo sapiens
aggccctcattccccgcttcctgaacatctcagccagctgtcaaaaagttggtcatttcagttgctaaactgatctccttttggttcttttttttttttttgtaacattaataggttggtttttatttttatttatttatttccataagttattggggtacaggtagtatttggttacatgagtaagttctttagtggtga

SEQ ID NO: 124884 - DNA, 201 bp, Homo sapiens
tattctattaatctacacagtttattcaaatttcgctagttgtctcaataatgtcctttatagcagaaaaaagaggttcatcataagtcttaaataacccrtgctttccccgccacactctgctgtcattgctgctgtgaaagctgtcctaatgcctgcctcacaagatctctgatttacagacatgctattgggtgggta

SEQ ID NO: 124885 - DNA, 201 bp, Homo sapiens
cctggacatggagcattacagcaatgcaggcgcctccttggatgaatcattattcgtaagtgttttaaggagcaagttcacattcctgaaaagagtgttayataaaataatttaacttagaaaatgcccaatagttaagtaatatttgattataaaggtataatgaccatccttgcagggatagccatgtgttacttcctg

SEQ ID NO: 124886 - DNA, 201 bp, Homo sapiens
aaaaccaataatgttatttcttcagggactgaagaaatattgagtattaatagccatattgatttcagtattaatagccatataagttcagtgcttttaaragagtgttattaaagtgggagccttttgtttgtggattgtagctttaaaaccagttatggaatcagcagatctcttgctcagctcttggcaccactgtta

SEQ ID NO: 124887 - DNA, 201 bp, Homo sapiens
atcatttgagctagacttcctgagcattgctcaagagactttctaactgttattaagtagattcctcttgcctcttattggagcagtgtcaagagttgtascgaaggggcttgctccatagcaaaccagcagcaggagcttcagtgacagctgtcctgtctttccttttggggactaatctgggcctcaaatttcaaattg

SEQ ID NO: 124888 - DNA, 201 bp, Homo sapiens
taaaatcgtgaaatcacagtgtttgtaggtatagacatgtgtcctactttcacttttgctgaagtttattcctccatagaatgatttaacaagattcagcrtgttactatatttgctaacattaaaatgatgttctttgagacaagagcaccaaagggagacagaccaagcagttcccaggagtaaagaaccatcgtgctt

SEQ ID NO: 124889 - DNA, 201 bp, Homo sapiens
ggggtggggtccccatgggggacagctgagttgactgtaagaagcagcagatagcttctataaaatcgtgaaatcacagtgtttgtaggtatagacatgtktcctactttcacttttgctgaagtttattcctccatagaatgatttaacaagattcagcatgttactatatttgctaacattaaaatgatgttctttgag

SEQ ID NO: 124890 - DNA, 201 bp, Homo sapiens
gctcaaggtctaaagagtatggactaaggaagaggaggaggaatgggggtggggtccccatgggggacagctgagttgactgtaagaagcagcagatagcwtctataaaatcgtgaaatcacagtgtttgtaggtatagacatgtgtcctactttcacttttgctgaagtttattcctccatagaatgatttaacaagatt

SEQ ID NO: 124891 - DNA, 201 bp, Homo sapiens
tttgtcggtttgctgtatctgactgtgtatctatatcttttgaccttattccacaaaggattttaaagttgctcgataacagtaatttctgatatgttctstttttagacaagtccaaaactcttcgcagaagaggagtttctgccattggatccaacccaggaactgatatttcctcctgagctaatggtgagtaaagca

SEQ ID NO: 124892 - DNA, 201 bp, Homo sapiens
gtcagtgattaggggggcagccatcttactaatacatggctacttcttatctccaggtttctagctgctgtttgttatttgatcttgagcagggcacttarcctcattcattgagcttgccttggtggtcgcataatgaacacctgagcattttgacactggctgtgtgtcattgcttccaagaggtctttcctgacctct

SEQ ID NO: 124893 - DNA, 201 bp, Homo sapiens
gctgttgaaaagatctgactttgtagattaggtggactaaaatgtcaaacagatctttcctctatgatagggtcctcatttccatcacactcttggtagastgtgcctctatctgggtcacttggctaacagagctgggtttttctccttcaggtaacctgtgccgttgcactggatacaggcccataattgatgcatgca

SEQ ID NO: 124894 - DNA, 201 bp, Homo sapiens
gtagagaatagaatggtgattaccagggcctggggaacgggaaaacaaagatgtattcgtcaaaggtaaaaagtttcagttatgcaaaaggagtaagtccyagagatactgtatagcataatgcttatagttaacactgtattgtatactcaaacatttgctgaaagggcagatgttatagtaatcacaaaataaatgaat

SEQ ID NO: 124895 - DNA, 201 bp, Homo sapiens
tgtataataactttgatctttctgtcagctgaagcttagagtgcttttttttttttttttttgtcacagtaagtgttaagaatgaggggttttttccttaraaaaagaagtatagcttgctatttgcaacaacgtaaatgaacctggaggacattatgctgagtaaaataagccaggcacagaagaacaaatactacatga

SEQ ID NO: 124896 - DNA, 201 bp, Homo sapiens
attctggtcataaggagccagtgctcttagcagaggagtaggaatgtgagactatggagaatgaggcctcgtaaaaggcaggatcctaaagagggtcagaygaactccattccaggcctgcttttctcttcactctccgtgggatgttgggtccataacctcatccgtctcaggcttcccatctgtaagaatcaattgtta

SEQ ID NO: 124897 - DNA, 201 bp, Homo sapiens
ctgctctccaaagcctatggtgcctaactcacaggaaacagttaagaaacaatattgaaaattatgcaaccaggtgctaaatcagcaaaggcaaaatttaygtgggtggagaaattaggaaagagtttgctgagggctagaatcatccaggaagtcccacaaagaagtcttaagtttggattcagaatgagagtgaggttt

SEQ ID NO: 124898 - DNA, 201 bp, Homo sapiens
gggggcactacgggtgggggctgtcagggtaggcagtgcaatataacaggtttctaaaactttcccttctttacagatttaaacaggaacagctctgtctmatttttttagctctgaatattttaaataaagtgactacttaacaaaataaattctgagtggataggcagaatcaataatactgcaagcttgaatgtaagc

SEQ ID NO: 124899 - DNA, 201 bp, Homo sapiens
gaacatatcaaaggcctttgtatatatttgaaatcttaaaaaatgcattaactccaaaatacaaaaataaaaaataatgctctcaaaggaaaaattattcwaatacttaaaaattattttacagcaaaaaatgtgtttaattgggggcatgggaatattttagcatgttagatgagatgaaaagagagctgccattttcgg

SEQ ID NO: 124900 - DNA, 201 bp, Homo sapiens
gttaccaccctgactttgactgaagggaaagcccctcccatcctccactcacactggctctttgtggtatccttcatggttttccctaagcccctgacacrttgctttttctactctggagaaacagagacccactccacttttcactgggtggtcttcaagcgtgagatgataaccccaggacctctccagtcctcccct

SEQ ID NO: 124901 - DNA, 201 bp, Homo sapiens
ttttctactctggagaaacagagacccactccacttttcactgggtggtcttcaagcgtgagatgataaccccaggacctctccagtcctcccctggcttyctctatacttcacaggctgttgttccctgacctgtcatggccctggttgccctctgctggtgtttaacctactttatgttcttctatttttcacctaagt

SEQ ID NO: 124902 - DNA, 201 bp, Homo sapiens
gcataactttacaggagaaagtacaaatacctgagcttttaaaatctgcctcaagattcttaatgaaatatcccaagttgctgttgaaaagatctgacttkgtagattaggtggactaaaatgtcaaacagatctttcctctatgatagggtcctcatttccatcacactcttggtagactgtgcctctatctgggtcact

SEQ ID NO: 124903 - DNA, 201 bp, Homo sapiens
ttctggaaacttctcaaggcattatctcttcaaatatttactctgtgccacacactcttccctctgttcttctgggaatccaattatgctaatgttagacsattttacatcatttcacagatcgcacttgaaggctaaggatctgagcactggtgaggtttcagatatctgcctgtgttccacaccaaactacctgctgtc

SEQ ID NO: 124904 - DNA, 201 bp, Homo sapiens
aagatttgttacagtaaacttcatcctgaaggagattttttttaataagacatatatgaagtcattatgaaaatataacaatctcaggttaaaagatggaragatgaatatgaattggaatatatataggcactttgttaaagaaggtaaaagataggtcttcaagaatggaggccaggcacggtggctcaggcctgtaat

SEQ ID NO: 124905 - DNA, 201 bp, Homo sapiens
gctagctggtattggctgtacagagcaaataactagaaaacgtgagtgtgtacgccattaaagtagatctgattaccatacttcttcccacatataaaagrggtaaaagtagaataattctcataacagtagtgttatgtgaaattgcaattatttgtaaatgggttcctcattcttcaatatatcaaggatatttttgta

SEQ ID NO: 124906 - DNA, 201 bp, Homo sapiens
agctcaaagatgtcagtttcagaaataaaacactaagtgctagctggtattggctgtacagagcaaataactagaaaacgtgagtgtgtacgccattaaastagatctgattaccatacttcttcccacatataaaagaggtaaaagtagaataattctcataacagtagtgttatgtgaaattgcaattatttgtaaatg

SEQ ID NO: 124907 - DNA, 201 bp, Homo sapiens
ctaactcacaggaaacagttaagaaacaatattgaaaattatgcaaccaggtgctaaatcagcaaaggcaaaatttacgtgggtggagaaattaggaaagagtttgctgagggctagaatcatccaggaagtcccacaaagaagtcttaagtttggattcagaatgagagtgaggtttgtctagatggtaagacaagagag

SEQ ID NO: 124908 - DNA, 201 bp, Homo sapiens
tagaggtgttgtatctatggctaataatggcccgaacaccaatggatctcagttcttcatcacctatggcaaacagccacatttggacatgaaatacaccrtatttggaaagtgagtattctggttatggttttcttttagcatttcaatgcaagtggtgcatatgcttagctgtgacagtagcataactaatattgaaaa

SEQ ID NO: 124909 - DNA, 201 bp, Homo sapiens
gttttttctctactgttgggatcaattttgagaaaaaagtacaacttaacctctaagagctgctttgtggatgggtcatctctgaagcagtatttctgtcygtttttattcagattatcatcttgaatatccacacagggaaataaacaatgcataaagtcacctaaataaatttcatttgttctcacattttctctcctt

SEQ ID NO: 124910 - DNA, 201 bp, Homo sapiens
taatctgaaactaatccattttctagaatagcatttctctaactctactgggcatcagaatcacctggaggattattaaaacacagagtgctgggccccayccctggagtttctgattcattatatctaggtgggggtctgagaggttacctttctaacaagttccaggtgatgctgatgttgctggtccaaggacctcac

SEQ ID NO: 124911 - DNA, 201 bp, Homo sapiens
ctcacacctgtaatcccagcactttgggaggccgaggcgggcggatcacgagggcaggagatcaagaccatgctggctaacacagtgaaaccccgtctctrccaaaaaatacaaaaaattagccaggtgtggtggtgggtgcctgtagtcccagctacttgggaggctgaggcaggagaatggcctgaacccgggaggcag

SEQ ID NO: 124912 - DNA, 201 bp, Homo sapiens
tcctaggaaggtatttcacagtttctgccagggtatctattaagagtactatgtctgggagttgcttttataaatcagtgggaagtcaatttgtctgttcrttcaacaaataattatcatgcttaataaaccaaggcacaattctagagtttgttctatttaatagtttggatgccaaattaggttaattaaaaatagagg

SEQ ID NO: 124913 - DNA, 201 bp, Homo sapiens
gctgagatcacacttctgtactccagcctgggcaacaatgataccctatctctaaaaaaaaaaagatagaaaaaaagaaaagccgggtgcggtggctcacrcctgtaatcccagcactttgggaggccaaggagggcagatcatgaggtcaggagatcaagaccatccaggccaacatggtgaaaccccatctctactaaa

SEQ ID NO: 124914 - DNA, 201 bp, Homo sapiens
tggggcgcagcatcataggctgtatgaggagagtagataccgactctgttctccagagcccggatcaccaggcgctccttccatgtgttccaggttatgcrcttcatgggtcggaagataggcggatggtaggagagaatgaggtctgccttcttttgcagcacctcctccatcacttcctcagtcaggtcattggtcagg

SEQ ID NO: 124915 - DNA, 201 bp, Homo sapiens; identical to SEQ ID NO: 21055

SEQ ID NO: 124916 - DNA, 201 bp, Homo sapiens
agtttttttatgtttgtaaataacccagtttccctcttattttctcccttaaccaacatcattcaaaattattgttcagttattaccaggactcattttaytggatttgcgacaaaactgtagagtttagaacaaagattaaccttaggttcattaattccttgtttgttgtatacagatgcacacacatttttctgggaa

SEQ ID NO: 124917 - DNA, 201 bp, Homo sapiens
atatcaaatatgaaagaggcttctcaccaagccctttagccaaccagttgttgacgccctggggcgcagcatcataggctgtatgaggagagtagataccractctgttctccagagcccggatcaccaggcgctccttccatgtgttccaggttatgcgcttcatgggtcggaagataggcggatggtaggagagaatga

SEQ ID NO: 124918 - DNA, 201 bp, Homo sapiens
gcttgaacctgaaggaagaggctacaatgagtcgagatagtgctactgcactccaacctgggcaatggaagtgagactccatctcaaaaaaaaaaaaaaasaaagaaatactataattaaacaattaactgctgggcttggtggctcatgcctgaatcccaacactttgggaggccaaggcgggcggatcacctgaggtca

SEQ ID NO: 124919 - DNA, 201 bp, Homo sapiens
ttttctttttgtttttggttgtttttttttttttttgagacggagtctctgtcgcccgggctggagtgcagtggtgcgatctcggctcactgcaacctccrcctcccaagttcacgccattctcctccctcagcctccagagtagttggaggcgcctgccaccacacccagctaattttttgtatttttagtagagatggg

SEQ ID NO: 124920 - DNA, 201 bp, Homo sapiens
ctggagtgcagtggcgcgatctcagctcactgcagcctccgcctcctgggttcaagtgattctcctgccgcagcctgctgagtagctaggactacaggcgyctgccaccacacccggctaatttttgtgtttttagtagagacggggtttcgccatgttggccaggctggtctcgaactcctgacctcaagtgatccaccc

SEQ ID NO: 124921 - DNA, 201 bp, Homo sapiens
tctcaagtggctggaccacaggagtgcaccaccgtgcccagctaatttctgattttttgtagagacgaggtcttgctctgttgcccagtctggtctgaaaytcctggactaagatgatcctcctgtcttggcctcccaaagtgttgggattataggagtgagccactgcacttggctggaagttttaaaactataacagat

SEQ ID NO: 124922 - DNA, 201 bp, Homo sapiens
acttcatctctctctaatgtttacattctgcccaattgtcagtttatctgcttgacccttgtgagcatctgagttataaatagacccttgaactagtccarcctcccttgttttacagataaagaaactagcaagagtccattgtatgtgagaagagattgtgggcattttggttttgttgcctgcctgatcatttcattc

SEQ ID NO: 124923 - DNA, 201 bp, Homo sapiens
acacctgtaatcccagcactttgggaggccgaggcgggcggatcacgagggcaggagatcaagaccatgctggctaacacagtgaaaccccgtctctgccwaaaaatacaaaaaattagccaggtgtggtggtgggtgcctgtagtcccagctacttgggaggctgaggcaggagaatggcctgaacccgggaggcagtgc

SEQ ID NO: 124924 - DNA, 201 bp, Homo sapiens
tgttatgttgtttctctttcagggtaatagatggtctggaaactctagatgagttggagaagttgccagtaaatgagaagacataccgacctcttaatgakgtacacattaaggacataactattcatgccaacccatttgctcagtagctatgatagacctggacaaataacttgacaaattgctggaacacacttattg

SEQ ID NO: 124925 - DNA, 201 bp, Homo sapiens
caacattttgttgtacattcaactagagaactcagagatctgtaagacttgattattttttaaggagactgtaattgtcatagatatggatatcatgtttyaatttaaggaaattttcatatgttatgttgtttctctttcagggtaatagatggtctggaaactctagatgagttggagaagttgccagtaaatgagaag

SEQ ID NO: 124926 - DNA, 201 bp, Homo sapiens
gaggtgttgtatctatggctaataatggcccgaacaccaatggatctcagttcttcatcacctatggcaaacagccacatttggacatgaaatacaccgtrtttggaaagtgagtattctggttatggttttcttttagcatttcaatgcaagtggtgcatatgcttagctgtgacagtagcataactaatattgaaaaga

SEQ ID NO: 124927 - DNA, 201 bp, Homo sapiens
gctggagtgcagtggcgcgatctcagctcactgcagcctccgcctcctgggttcaagtgattctcctgccgcagcctgctgagtagctaggactacaggckcctgccaccacacccggctaatttttgtgtttttagtagagacggggtttcgccatgttggccaggctggtctcgaactcctgacctcaagtgatccacc

SEQ ID NO: 124928 - DNA, 201 bp, Homo sapiens
ccctgaaacctcagtacttggaacagctacctgaacaactgaaacaattctccatgttcctgggagaaattctcatggtttgcaggggaaagctcaccttygtggattttcccatctatgacgtcctggatcaaaagtgcatgtttgagcccaagtgcctggatgagttcccacatcttaaggctttcatgtgccgttgag

SEQ ID NO: 124929 - DNA, 201 bp, Homo sapiens
ctctaatcccagcactttgggaggcttctcttttctcgtggatcacaagttcaggggatcaagaccatcctggctaatacggcgaaaccccgtctctactraaaatacaaaaagttagctgggcgtggtggcgggcgcctgtagtctcagctactcaggaggctgaggcaggagaatagcttgaacccgggaggcggaggt

SEQ ID NO: 124930 - DNA, 201 bp, Homo sapiens
ctcctggaccagcaagtggcagaaattgggttacaacctaattttccaattaaggaatgagtgttgggttagcaattgcaggttttcattcgacatacatytgtacgttgctaccctgtgccaaacaacaagggacacaaaggcaagtacaactgacagaggaggaagacaacatgtggacaaacatgagcaggaagctaa

SEQ ID NO: 124931 - DNA, 201 bp, Homo sapiens
ttttaagtagacagtcttattacaaagaaaactaattatattgaaacacagatagcaaaatgttcaaaaagcaaacctgatacactaaagtatgcttaacrcataaataagacacagcagcaggttttataactactgcagtttttaaagcagcgatgggcataaatgtattttaaactatttccacaatatgatacaaaa

SEQ ID NO: 124932 - DNA, 201 bp, Homo sapiens
tcttgaagatgcctatcaacaacaagatggcccagtggggcaacaagcttttatgctgagctagaggcagacttgcactgctagttttgtttcatccgtcmctagggggcctccacacttttttgttcttttaaataaacagcacttgggctaaaataaataaataaataaataaataagctatgctgtgcaattcccttc

SEQ ID NO: 124933 - DNA, 201 bp, Homo sapiens
caacaacaagatggcccagtggggcaacaagcttttatgctgagctagaggcagacttgcactgctagttttgtttcatccgtccctagggggcctccacwcttttttgttcttttaaataaacagcacttgggctaaaataaataaataaataaataaataagctatgctgtgcaattcccttctctgactctcagcccc

SEQ ID NO: 124934 - DNA, 201 bp, Homo sapiens
agtctcagctactcaggaggctgaggcaggagaatagcttgaacccgggaggcggaggttgcagtgagccgagatcgcaccattgcactccagcctgggcracagagcaagactccatctcaaaaaaaaaaataaataaataaaataaataaaaaccaaccctgaaacctcagtacttggaacagctacctgaacaactga

SEQ ID NO: 124935 - DNA, 201 bp, Homo sapiens; identical to SEQ ID NO: 21070

SEQ ID NO: 124936 - DNA, 201 bp, Homo sapiens; identical to SEQ ID NO: 21071

SEQ ID NO: 124937 - DNA, 201 bp, Homo sapiens
tctggctccggaagaccccatattccccatcatcgggagcctcttcctgcgagagctgatcaaagagtttggcacagaccacatctatggggccgacactytcaatgagatgcagccaccttcctcagagccctcctaccttgccgcagccaccactgccgtctatgaggccatgactgcaggtacagtgcctgggtgggg

SEQ ID NO: 124938 - DNA, 201 bp, Homo sapiens; identical to SEQ ID NO: 21073

SEQ ID NO: 124939 - DNA, 201 bp, Homo sapiens; identical to SEQ ID NO: 21074

SEQ ID NO: 124940 - DNA, 201 bp, Homo sapiens; identical to SEQ ID NO: 21075

SEQ ID NO: 124941 - DNA, 201 bp, Homo sapiens
tgggagagccccccagaccctcaaaaagaagggagtagcagatgtcagtaggggtaggcagagggactggaataatgcctcgccataacacacagtacttyatagtttaccaagcacgtgtacacatgcgttgtctcagtgaatcccactgtggttgagaggtgagctctggaagccaacaacctgggtcacacctcgcgc

SEQ ID NO: 124942 - DNA, 201 bp, Homo sapiens; identical to SEQ ID NO: 21155

SEQ ID NO: 124943 - DNA, 201 bp, Homo sapiens; identical to SEQ ID NO: 21077

SEQ ID NO: 124944 - DNA, 201 bp, Homo sapiens; identical to SEQ ID NO: 21078

SEQ ID NO: 124945 - DNA, 201 bp, Homo sapiens; identical to SEQ ID NO: 21079

SEQ ID NO: 124946 - DNA, 201 bp, Homo sapiens; identical to SEQ ID NO: 21080

SEQ ID NO: 124947 - DNA, 201 bp, Homo sapiens
ctctgtttcatcactcctcttctctgttccccctacctcctgtccacagtggatactgaggctgtgtggctgctccaaggctggctcttccagcaccagcygcagttctgggggcccgcccagatcagggctgtgctgggagctgtgccccgtggccgcctcctggttctggacctgtttgctgagagccagcctgtgtat

SEQ ID NO: 124948 - DNA, 201 bp, Homo sapiens; identical to SEQ ID NO: 21082

SEQ ID NO: 124949 - DNA, 201 bp, Homo sapiens; identical to SEQ ID NO: 21083

SEQ ID NO: 124950 - DNA, 201 bp, Homo sapiens; identical to SEQ ID NO: 21084

SEQ ID NO: 124951 - DNA, 201 bp, Homo sapiens; identical to SEQ ID NO: 21085

SEQ ID NO: 124952 - DNA, 201 bp, Homo sapiens
atatctgagcttttgctccccactagggtgttccctcaggtcaatgtcacgaagatgggcagttggggccactttaactgttcctactcctgctccttccytctggctccggaagaccccatattccccatcatcgggagcctcttcctgcgagagctgatcaaagagtttggcacagaccacatctatggggccgacact

SEQ ID NO: 124953 - DNA, 201 bp, Homo sapiens
ttccatgaaatatctgagcttttgctccccactagggtgttccctcaggtcaatgtcacgaagatgggcagttggggccactttaactgttcctactcctkctccttccttctggctccggaagaccccatattccccatcatcgggagcctcttcctgcgagagctgatcaaagagtttggcacagaccacatctatggg

SEQ ID NO: 124954 - DNA, 201 bp, Homo sapiens; identical to SEQ ID NO: 25703

SEQ ID NO: 124955 - DNA, 201 bp, Homo sapiens; identical to SEQ ID NO: 21088

SEQ ID NO: 124956 - DNA, 201 bp, Homo sapiens; identical to SEQ ID NO: 21089

SEQ ID NO: 124957 - DNA, 201 bp, Homo sapiens
aaaaaaaaaaaaaagctgggtgcggtggcccacacctgtaatcccagcactttgggaggccgagacgggcggatcacaaggtcagcagatcgagaccatcstggctaacacagtgaaactcagtctctactaaaaatacaaaaaattagccgggtgtggtggcgggcacctgtagtcccagctactagggaggctgaggca

SEQ ID NO: 124958 - DNA, 201 bp, Homo sapiens
ctcagtctctactaaaaatacaaaaaattagccgggtgtggtggcgggcacctgtagtcccagctactagggaggctgaggcaggagaatggcatgaaccygggaggcagagcttgcagtgagctgagaatgcgccactgcactccagcctgggggacagagtgagactctgcctcaaaaaaaaaaaaaaaaagaaagaaa

SEQ ID NO: 124959 - DNA, 201 bp, Homo sapiens
acctgaaggagaagctacattttttttttttttgagacagatttcactctgttgctgaggctggagcacagtggcacaatctcatctcactgcaaccttcrtctcctaggttcaagcgattctcctgcctcagcctcccgagtagctgggactataggcacccgccaccacgcccggcaatttttgtttgttttgagatag

SEQ ID NO: 124960 - DNA, 201 bp, Homo sapiens; identical to SEQ ID NO: 21090

SEQ ID NO: 124961 - DNA, 201 bp, Homo sapiens
ctatgtgtgggcccttcttcctcaggtgtacctggccttgggcctgacccaggcagagatcaatgagttctttactggtcctgccttcctggcctgggggygaatgggcaacctgcacacctgggatggccccctgcccccctcctggcacatcaagcagctttacctgcaggtaaaaggatggaaaagggaaggggcaga

SEQ ID NO: 124962 - DNA, 201 bp, Homo sapiens
cgcccctgctcatgacactgcccgcaggtaccgctattaccagaatgtgtgcacgcaaagctactccttcgtgtggtgggactgggcccgctgggagcgaragatagactggatggcgctgaatggcatcaacctggcactggcctggagcggccaggaggccatctggcagcgggtgcgtgcccactgtcccttccccac

SEQ ID NO: 124963 - DNA, 201 bp, Homo sapiens
gggcgtggcggccgccgcggggctgcaccgctacctgcgcgacttctgtggctgccacgtggcctggtccggctctcagctgcgcctgccgcggccactgycagccgtgccgggggagctgaccgaggccacgcccaacaggtaccgccccgaagcttccccgcgtccgcccgaggcgcttaccccctcccggagccgctg

SEQ ID NO: 124964 - DNA, 201 bp, Homo sapiens
ctgggcggcggcggcgcggcgcgcgtgcgggtgcgcggctccacgggcgtggcggccgccgcggggctgcaccgctacctgcgcgacttctgtggctgccrcgtggcctggtccggctctcagctgcgcctgccgcggccactgccagccgtgccgggggagctgaccgaggccacgcccaacaggtaccgccccgaagct

SEQ ID NO: 124965 - DNA, 201 bp, Homo sapiens; identical to SEQ ID NO: 21095

SEQ ID NO: 124966 - DNA, 201 bp, Homo sapiens; identical to SEQ ID NO: 21096

SEQ ID NO: 124967 - DNA, 201 bp, Homo sapiens; identical to SEQ ID NO: 21098

SEQ ID NO: 124968 - DNA, 201 bp, Homo sapiens; identical to SEQ ID NO: 21097

SEQ ID NO: 124969 - DNA, 201 bp, Homo sapiens; identical to SEQ ID NO: 21099

SEQ ID NO: 124970 - DNA, 201 bp, Homo sapiens; identical to SEQ ID NO: 21100

SEQ ID NO: 124971 - DNA, 201 bp, Homo sapiens; identical to SEQ ID NO: 21101

SEQ ID NO: 124972 - DNA, 201 bp, Homo sapiens; identical to SEQ ID NO: 21102

SEQ ID NO: 124973 - DNA, 201 bp, Homo sapiens
tgttggccaggctggtctttaactcctgaactcaagtgatccacctgcctcggccttccaaagtgctgggattacaggagtgagccaccgtgcccggccaygtctctctttttaacactaatgttaccctgacctttgaacgtagaatgcccttctgttgcaggaaaacctcttttcaaaccatgtttgtcctttgctggc

SEQ ID NO: 124974 - DNA, 201 bp, Homo sapiens; identical to SEQ ID NO: 21103

SEQ ID NO: 124975 - DNA, 201 bp, Homo sapiens
gggattataggtgtgggccaccacgcccattcagaaacctccatgttttaaggagccctctgggtaactctcatgttcacccaagctgctgaaccctgtcytggagttttcagagggacgcgtatgtgccacagagcgtcccgctggtgggggtcatgggaagccatgacctgggatagacagtcgtctgtagagtggggt

SEQ ID NO: 124976 - DNA, 201 bp, Homo sapiens; identical to SEQ ID NO: 21104

SEQ ID NO: 124977 - DNA, 201 bp, Homo sapiens
ggcatcaacctggcactggcctggagcggccaggaggccatctggcagcgggtgcgtgcccactgtcccttccccaccctcctctatggcgggagccaccstaggtgttttcacccgccccccagcatgggcgcagtgtctctctctagaagtgctttcagcgtgcacagtggcttgggcctcctaaaaactgaggcttcc

SEQ ID NO: 124978 - DNA, 201 bp, Homo sapiens; identical to SEQ ID NO: 21144

SEQ ID NO: 124979 - DNA, 201 bp, Homo sapiens
tcttaactgaggcggggggctgcgtgtatcctgggagatgagggccttctcataggacagcagtggccatgctcaccacccttccttctgttcctccagcmccgggtcctggaccagatgcgctccttcggcatgaccccagtgctgcctgcattcgcggggcatgttcccgaggctgtcaccaggtgaggttccgctcac

SEQ ID NO: 124980 - DNA, 201 bp, Homo sapiens; identical to SEQ ID NO: 21107

SEQ ID NO: 124981 - DNA, 201 bp, Homo sapiens
ctcataggacagcagtggccatgctcaccacccttccttctgttcctccagcaccgggtcctggaccagatgcgctccttcggcatgaccccagtgctgcytgcattcgcggggcatgttcccgaggctgtcaccaggtgaggttccgctcaccccctccacttagctcagagagggaattttattcccttctagaacatg

SEQ ID NO: 124982 - DNA, 201 bp, Homo sapiens
acaaaggcaacacagtgaactcacctactcacaggtctctttcctctgggctgtgggctccttgatggcagcgttcggattttgtctcagtagccctagcrcccagcacaaagaagcaatgagtgaatggttgttgaatgaatgaatgaatgaatgaagatgaatatatttctatgtgtgggcccttcttcctcaggtgta

SEQ ID NO: 124983 - DNA, 201 bp, Homo sapiens
tggccatgctcaccacccttccttctgttcctccagcaccgggtcctggaccagatgcgctccttcggcatgaccccagtgctgcctgcattcgcggggcrtgttcccgaggctgtcaccaggtgaggttccgctcaccccctccacttagctcagagagggaattttattcccttctagaacatgacttaaaaacttaag

SEQ ID NO: 124984 - DNA, 201 bp, Homo sapiens
ttacttgtaaaatgggatctctacccacttcgctgtagggtttgtaattatctctcgatctatctgtgactttgcacagagtgctagcaaatggcagcccytgggagtggcagcaggggtgctccagtgtcccttgtccctcctgttcctctgtgcttcccagccatcctctcacatgtggttgggaaaagtcttcaaggc

SEQ ID NO: 124985 - DNA, 201 bp, Homo sapiens; identical to SEQ ID NO: 21110

SEQ ID NO: 124986 - DNA, 201 bp, Homo sapiens; identical to SEQ ID NO: 21111

SEQ ID NO: 124987 - DNA, 201 bp, Homo sapiens; identical to SEQ ID NO: 21112

SEQ ID NO: 124988 - DNA, 201 bp, Homo sapiens; identical to SEQ ID NO: 21113

SEQ ID NO: 124989 - DNA, 201 bp, Homo sapiens
atgggatctctacccacttcgctgtagggtttgtaattatctctcgatctatctgtgactttgcacagagtgctagcaaatggcagcccttgggagtggcmgcaggggtgctccagtgtcccttgtccctcctgttcctctgtgcttcccagccatcctctcacatgtggttgggaaaagtcttcaaggctcacctgagac

SEQ ID NO: 124990 - DNA, 201 bp, Homo sapiens; identical to SEQ ID NO: 21114

SEQ ID NO: 124991 - DNA, 201 bp, Homo sapiens; identical to SEQ ID NO: 21115

SEQ ID NO: 124992 - DNA, 201 bp, Homo sapiens; identical to SEQ ID NO: 21116

SEQ ID NO: 124993 - DNA, 201 bp, Homo sapiens; identical to SEQ ID NO: 21117

SEQ ID NO: 124994 - DNA, 201 bp, Homo sapiens; identical to SEQ ID NO: 21118

SEQ ID NO: 124995 - DNA, 201 bp, Homo sapiens; identical to SEQ ID NO: 21119

SEQ ID NO: 124996 - DNA, 201 bp, Homo sapiens; identical to SEQ ID NO: 21120

SEQ ID NO: 124997 - DNA, 201 bp, Homo sapiens; identical to SEQ ID NO: 21121

SEQ ID NO: 124998 - DNA, 201 bp, Homo sapiens; identical to SEQ ID NO: 21173

SEQ ID NO: 124999 - DNA, 201 bp, Homo sapiens
caaagagtttggcacagaccacatctatggggccgacactttcaatgagatgcagccaccttcctcagagccctcctaccttgccgcagccaccactgccktctatgaggccatgactgcaggtacagtgcctgggtggggtgggagagccccccagaccctcaaaaagaagggagtagcagatgtcagtaggggtaggca

SEQ ID NO: 125000 - DNA, 201 bp, Homo sapiens
tgctgcaatggctgctccaggctctgcttaagctcttcacacagttgccctgcccttccatctggcactcttgctccatgaagccttctaaggccttcctsttgggggaaagcccctttgtgccccatctcctcacccatgcgacaaaggcaacacagtgaactcacctactcacaggtctctttcctctgggctgtgggc

SEQ ID NO: 125001 - DNA, 201 bp, Homo sapiens
gtttggcacagaccacatctatggggccgacactttcaatgagatgcagccaccttcctcagagccctcctaccttgccgcagccaccactgccgtctatkaggccatgactgcaggtacagtgcctgggtggggtgggagagccccccagaccctcaaaaagaagggagtagcagatgtcagtaggggtaggcagaggga

SEQ ID NO: 125002 - DNA, 201 bp, Homo sapiens
cactgtcccttccccaccctcctctatggcgggagccaccgtaggtgttttcacccgccccccagcatgggcgcagtgtctctctctagaagtgctttcarcgtgcacagtggcttgggcctcctaaaaactgaggcttccggccgggcgcggtggctcacgcctgtcatcccagcacttcgggaggcctaggcgggcgga

SEQ ID NO: 125003 - DNA, 201 bp, Homo sapiens; identical to SEQ ID NO: 21125

SEQ ID NO: 125004 - DNA, 201 bp, Homo sapiens
aggttcaagcgattctcctgcctcagcctcccgagtagctgggactataggcacccgccaccacgcccggcaatttttgtttgttttgagatagagtctckctctgtcacccaggctggagtgcagtggcacgatctcagttcactgcaacctctgcttcctgagttcaagcgattctcctgcctcagcctcctgagtagc

SEQ ID NO: 125005 - DNA, 201 bp, Homo sapiens; identical to SEQ ID NO: 21126

SEQ ID NO: 125006 - DNA, 201 bp, Homo sapiens
tttgtggtgcacaattggtgatgagtgaattttcttgccttcctcccccaccttctctttgaacctgcggactgaggaaggacgcctccatcccccacccyacaggcctgtgttccagcgcctgccacactatggagtgatgtgttcacacagctgtcctcccctgcccatctgttagactgtgggggcagggattccccg

SEQ ID NO: 125007 - DNA, 201 bp, Homo sapiens; identical to SEQ ID NO: 21127

SEQ ID NO: 125008 - DNA, 201 bp, Homo sapiens
cctgctcatgacactgcccgcaggtaccgctattaccagaatgtgtgcacgcaaagctactccttcgtgtggtgggactgggcccgctgggagcgagagakagactggatggcgctgaatggcatcaacctggcactggcctggagcggccaggaggccatctggcagcgggtgcgtgcccactgtcccttccccaccctc

SEQ ID NO: 125009 - DNA, 201 bp, Homo sapiens; identical to SEQ ID NO: 21128

SEQ ID NO: 125010 - DNA, 201 bp, Homo sapiens; identical to SEQ ID NO: 21130

SEQ ID NO: 125011 - DNA, 201 bp, Homo sapiens; identical to SEQ ID NO: 21131

SEQ ID NO: 125012 - DNA, 201 bp, Homo sapiens; identical to SEQ ID NO: 21132

SEQ ID NO: 125013 - DNA, 201 bp, Homo sapiens; identical to SEQ ID NO: 21133

SEQ ID NO: 125014 - DNA, 201 bp, Homo sapiens; identical to SEQ ID NO: 21134

SEQ ID NO: 125015 - DNA, 201 bp, Homo sapiens; identical to SEQ ID NO: 21135

SEQ ID NO: 125016 - DNA, 201 bp, Homo sapiens; identical to SEQ ID NO: 21138

SEQ ID NO: 125017 - DNA, 201 bp, Homo sapiens; identical to SEQ ID NO: 21137

SEQ ID NO: 125018 - DNA, 201 bp, Homo sapiens; identical to SEQ ID NO: 21136

SEQ ID NO: 125019 - DNA, 201 bp, Homo sapiens; identical to SEQ ID NO: 21139

SEQ ID NO: 125020 - DNA, 201 bp, Homo sapiens
tcctgctccttccttctggctccggaagaccccatattccccatcatcgggagcctcttcctgcgagagctgatcaaagagtttggcacagaccacatctrtggggccgacactttcaatgagatgcagccaccttcctcagagccctcctaccttgccgcagccaccactgccgtctatgaggccatgactgcaggtaca

SEQ ID NO: 125021 - DNA, 201 bp, Homo sapiens; identical to SEQ ID NO: 21141

SEQ ID NO: 125022 - DNA, 201 bp, Homo sapiens
atgacactgcccgcaggtaccgctattaccagaatgtgtgcacgcaaagctactccttcgtgtggtgggactgggcccgctgggagcgagagatagactgkatggcgctgaatggcatcaacctggcactggcctggagcggccaggaggccatctggcagcgggtgcgtgcccactgtcccttccccaccctcctctatg

SEQ ID NO: 125023 - DNA, 201 bp, Homo sapiens
gctgagaaagtatcagggaatgatggttaaaaatagcattagccatcctcaaacgagacaggaatgtaaagcatctagaatcgttgttgcctagcatattyaattcctctccacctcatgggtctgagattttttttttttttgagacagagtctcactctgtcacccaggctggaatgccatggcgctgtctcagctcac

SEQ ID NO: 125024 - DNA, 201 bp, Homo sapiens
agataagttaagaaacttcgatgttcttatattccaggttccgagcctcactctatccctgtcctgagacaccacaggagaggaaggaaatggcttctggrgtgaataccaggattgatgatctccaaatggtatgcagaaggctggagggaatttgtttttgtgaaatactggaatacgagaccattatccttccttgaa

SEQ ID NO: 125025 - DNA, 201 bp, Homo sapiens
tgagcagtgtgaaactcactgcctcaatattgtgtcctgggtatttaaagagttgtttgaggttcccagttcctgtctttaatctggatacattcttatcwgttgagttgcccaaaataattgtcatttgatcctgatgttgactggaatggaagtgacttttcatctgacactctgtgggacagaattcaggaactgcct

SEQ ID NO: 125026 - DNA, 201 bp, Homo sapiens
atagcacttactttacactgcctgggaaaacccaaacgatcttgttgcatgactcttaaacggctgttagatgatgactcccgtggagagcagctgagttacaagaccctccttctcccttttctgaccatcttcatccttccatgtaccctccatttgtctccccacttcactccctccctcttttgttttctttcccct

SEQ ID NO: 125027 - DNA, 201 bp, Homo sapiens
tgcagaggtctggtgccctgtcaccgaccttgactccatccagtttgcactcagaaggggcacggtgagtccccaaagctaacaatgcagctcgtggcccrgaagagaggttcccatcaatagtaacattaatgtcatttttggccgggcgcggtggctcatgcctgtaatcccagaactttgggaggccgaggcgggcag

SEQ ID NO: 125028 - DNA, 201 bp, Homo sapiens
tagggaactcagggaactaggattaccctagttttcagggtaagtaaggaagcttgaagagcctgttccggaagaaaagcccagaaataggctaggtgtcsacagaggtgagggagaagcagacgttcgcccagagatggcatggtggagccagccccctccacgctggctgcacccctgtggcctgggctgttgtggctt

SEQ ID NO: 125029 - DNA, 201 bp, Homo sapiens
aggcaggaaagaatctcttaaacccaggaggcaggggttgcagtgagctgagattgtgccactgcactccagcctgggcaacagagcgagactctgtctcaaaaaaaaaaaaaaaaaaataggggaggggttgggggccaggcacggtggttcactcctgtaatcccagcactttgggaggccgaggcgggtggatcacct

SEQ ID NO: 125030 - DNA, 201 bp, Homo sapiens
atattgatcttaagattatggaagcctgggcacggtggctcacgcctgtaatgccagcactttgggaggccgaggcaggtggatcacttgaggtcagagtyggagaccagcctgggcaacatggtgaaaccctgtctctactaaaaatacaaaacttagctaggcatggtggtgggcacctgtaatcccagctactcaaga

SEQ ID NO: 125031 - DNA, 201 bp, Homo sapiens
ctcccaaagtgctgggattacaggtgtgagccactgtgcctggactaatttttggatttttaggagagacggggtttcaccatgttggccgggctggtctygaactcctgaccttgtgatctgcccgctgtggcctcccaaagtgctgggattacaggtgtgagccactgtgcccagctgactatcactcttttttatggt

SEQ ID NO: 125032 - DNA, 201 bp, Homo sapiens
aattcggttgcgctcttcttcaagggggtgctcctcagcctgcaccccagtgaaggggcctctgaggaactcccagtgccactggcaaacagtctgtaacytttgggccccagccacctcccagcccctgttctcttaattcctgccttcttggcttggagggaggaatctccatttgtaaaagctgagttagggaactag

SEQ ID NO: 125033 - DNA, 201 bp, Homo sapiens
ttacgttttttaaaagttagtgtatcttgaagattgtttcatagtgataatcacttttttttttttttttctgagatgaagtcttgatctgtcacccagckgtagtgcagtggcacgatctcagctcactacaacctccacctcccaggttcaagcaattctcctgcctcagcctcatgagtagctaggattatgggcatg

SEQ ID NO: 125034 - DNA, 201 bp, Homo sapiens
atccatataccttgccaaagttttgcaagcctagatgttccagcagtgggattgctgaatctcaaagggttcatgcatttaaaattttgataaacccttcmcaatgattatacaatttgtacttgggaatatatttttaaaatacagatttattgggccccaccccagaactactaaatttacaatttctgggagtagtat

SEQ ID NO: 125035 - DNA, 201 bp, Homo sapiens
atactacctattgtcaatgtccttaacacatactcttttttctgctagtcttagcatatataagatgtgcttctgacaagatcttaatgcatttaagtctkgcgacttcttctgtgataaattctaagttaaaagttccccgtttggaaacctgcacattcatagggtcttcttaccccactggttctttagccaaacatc

SEQ ID NO: 125036 - DNA, 201 bp, Homo sapiens
ctgacccgaccttgtgcagcccccctgccctggtgtcctgggttttcgtgatgatctttgctctgtttccagtggggtttgaagcagagttcagggaaccmtgcccaaggtcctcctgttcagacattcctatgttgaataaagtatgtttgacttccccggagaagctgcctgtcactgtgcccacagcccctgcgtcgc

SEQ ID NO: 125037 - DNA, 201 bp, Homo sapiens
aaaaatacaaaaatcagccaggtgtagtggcacgcgcctatattcccagctattcgggaggctgaggcaggagaattgcttgaacctgggaggcagaggtygcagtgagacaagatggcaccactgcactccagcctgagcgacagagtgagactctgcctcaaaaaaaataaataaataaataaatttcatggtctggcc

SEQ ID NO: 125038 - DNA, 201 bp, Homo sapiens
gtggtggcaggcacctgtagtcccagctacttgggaggctgaggcaggagaatggcgtgaacccggaaggcagagcttgcagtgagctgagatcacgccaytgcactccagcctgggtgacagagcgagactcgtctctaaataaataaataaataaaaattgttttttaaacagaggaatatttttccctttgagaattc

SEQ ID NO: 125039 - DNA, 201 bp, Homo sapiens
gtgagccaagatcacgtaactgcactccggcctgggtgacagagtgaagaccctgtctcaaaaaaaaaaaaaaaaaaaaatggtttggacacagatcagakaaatttgaatattgactatatattttatgatattaaagaatcattgttagctgggcacggtggctcacacctgtaatcccagcactttgggaggccgagg

SEQ ID NO: 125040 - DNA, 201 bp, Homo sapiens
gcccaggctggagtgtagtggtgcgatcttggctcactgcaacctccgtctcctgggttcaagcaatcctccctcagcctcctgagtagctgggactacasgcgcacattttagtagagatggagtttcaccatgttgcccaggctggtctcgaactcctgacctcaggtgatccatcccccctcagcctcccaaagtgct

SEQ ID NO: 125041 - DNA, 201 bp, Homo sapiens
ccaggctggagtgtagtggtgcgatcttggctcactgcaacctccgtctcctgggttcaagcaatcctccctcagcctcctgagtagctgggactacaggcgcacattttagtagagatggagtttcaccatgttgcccaggctggtctcgaactcctgacctcaggtgatccatcccccctcagcctcccaaagtgctag

SEQ ID NO: 125042 - DNA, 201 bp, Homo sapiens
gacctcaaagccagctggcagcctcagcatttcagatcaaagtggcctgcctcttcaacgtctcagcctacccaaggcatgtcctaggtgtaggctgctcyctggtggccagatagggaaggactcattcatcctttggcaaggtgggctgcgatctgagctgggctgtgtgataggcaggcaactggattagacgggcag

SEQ ID NO: 125043 - DNA, 201 bp, Homo sapiens
ttgggaggccgaggcgggcagatcatgaggtcaagagatcgagaccatcctggctaacacggtgaaaccccgtctctactaaaaaatacaaaaaattagcygggcgtgttggcaggcgcctgtagtcccagctactctggagactgaggcagaagaatcaagtgaacctgggaggcggagcttgcagtgagctgagattgc

SEQ ID NO: 125044 - DNA, 201 bp, Homo sapiens
aggccgaggcgggcagatcatgaggtcaagagatcgagaccatcctggctaacacggtgaaaccccgtctctactaaaaaatacaaaaaattagctgggcrtgttggcaggcgcctgtagtcccagctactctggagactgaggcagaagaatcaagtgaacctgggaggcggagcttgcagtgagctgagattgcgccac

SEQ ID NO: 125045 - DNA, 201 bp, Homo sapiens
agaacttggaaaggttcagtttcgtgacgtaagtagttgtggggctgcgacttgattactgctgaactctattgctatcgtggtcagatgccttatgatgratgttttgttttttatttgcaaaaataacattatagcactgacttcctattggcagaatgcacattttgagttgtctttctaaaggtgagaatgttttgt

SEQ ID NO: 125046 - DNA, 201 bp, Homo sapiens; identical to SEQ ID NO: 21205

SEQ ID NO: 125047 - DNA, 201 bp, Homo sapiens
ttttttatttttagcagacattttagcaaagcagaaatatatttttcctgtggattttagacttgcattcttatatttacgaacttacaaaaacttatccsagaattaatttttttttcaaatgcttaggcaaattaagtatgatcaagtcttctttattgtgtgctgtaaaaatggagtggcggcaagaatgtaatacag

SEQ ID NO: 125048 - DNA, 201 bp, Homo sapiens
ggtcaggagttcgagaccagcctgaccaacatggagaaaccccgtctctactaaaaatacaaaatcagccaggcatggtggctcttgcctgtaatctcagygactcgggaggctgaggcaggagaatcacttgaaccggggagacggaggttgccgtgagccgatattgcattattgcactccagcctgggcaaaaagagt

SEQ ID NO: 125049 - DNA, 201 bp, Homo sapiens
tttattagttttattgagatataatttacatgaaagaaaatacatacattttatgtgtaccatttgatgagtttcaagaaatgtacacctgtgtaaccacyaccacaattaggaggataacctaagtttgataaatgtgctaatgtttttcaggaacacagtggttccactgtaccttccattttgaacaggatgcagaca

SEQ ID NO: 125050 - DNA, 201 bp, Homo sapiens
cgggttcaagcgattctcctgcctcagcctcccgagcagctgtgactataggtgtgtaccaccatgcccagctaatttttgtagttttagtagagacgggygtttcaccatattggccaggctggtctcgaactctgacctcgtgatctagctgcctcagcctcccaaagtgctggaattacaggtgtgagccaccgcacc

SEQ ID NO: 125051 - DNA, 201 bp, Homo sapiens
caggctggagtgtagtggtgcgatcttggctcactgcaacctccgtctcctgggttcaagcaatcctccctcagcctcctgagtagctgggactacaggcgcacattttagtagagatggagtttcaccatgttgcccaggctggtctcgaactcctgacctcaggtgatccatcccccctcagcctcccaaagtgctagg

SEQ ID NO: 125052 - DNA, 201 bp, Homo sapiens
acatggtgaaaccccgtctctactaaaaatacaaaaattagccaggcatggtggcgggcgcctataatcccagctattcatgaggctgaggcaggagaatygcttgaaccggggaggcggaggttgtagtgagctgagatcgcaccactgcactctagcctgggcgaaagagcgagactccatctcaaaaaaaaaaattgt

SEQ ID NO: 125053 - DNA, 201 bp, Homo sapiens
ggctggagtgtagtggtgcgatcttggctcactgcaacctccgtctcctgggttcaagcaatcctccctcagcctcctgagtagctgggactacaggcgcwcattttagtagagatggagtttcaccatgttgcccaggctggtctcgaactcctgacctcaggtgatccatcccccctcagcctcccaaagtgctaggat

SEQ ID NO: 125054 - DNA, 201 bp, Homo sapiens
aagggtggtgccggtaacagctgatttggatgattcagatgtacagaatcttaaagtcagcctgcatattctcttgagaagtccttgcttatgtctgagcktgtgttactgtcttgaacatcacatgcacaaaggtttgttcgttcagatttctcaaaatgtctcccagccttccagaagagtaaatcttcctttgatgtc

SEQ ID NO: 125055 - DNA, 201 bp, Homo sapiens
gtggtgggaaggaagctcactgagacttttgcctaggaagaacatttttgtaccgttgtgttttacctaatttgcctccattccagtaatgttgcagcaaygagggaggaagtttttatccttagctggtgtgactggccataaagcagtttttttggatcagtagacagttttgattagtgttgcatcatgcattgacag

SEQ ID NO: 125056 - DNA, 201 bp, Homo sapiens
ctgatctcgaactcctaatctcaagcaatctgcccgcctcagctctcaaagtactggtattacaggtgtaagccactgtgcctggccttttttttgttttrtttttgttttgaggcagggtctcactctgttgcccaggctaaagtgcagtggcatgatcacagctcactgcagccttgacttcctgagctcagttgattc

SEQ ID NO: 125057 - DNA, 201 bp, Homo sapiens
tttgttttgtttgttcgtttgtttgtttttgagacggagtctctgtcacccaggctggagtgcagtggcgcgatctcggctcactgcaagctccacctccygggttcacgccattctcctgcctcagcctctcgagtagctgggactacaggggcccgccacacgcccggctaattttttgtattttttagtagagacagg

SEQ ID NO: 125058 - DNA, 201 bp, Homo sapiens
ctgaccgagtctccctccacgcccaggctggagtacgatggtgcgatcttggagcactgcaacttctgcctcccaggttcaagtgattctccagccaccckagtagttgggattacaggtacctgccaccacacctggctaatttttttttttgtatttttagtagagatggggtttcgccatgttggccaggctggtctt

SEQ ID NO: 125059 - DNA, 201 bp, Homo sapiens
cacctcatgggtctgagattttttttttttttgagacagagtctcactctgtcacccaggctggaatgccatggcgctgtctcagctcactgcaacctccrcctcctaggcgcaagtgatgctcctgcctcagcctcctgagtagctgggattacaggcatgtgccaccatgcccgactaatttttgtatttttatttatt

SEQ ID NO: 125060 - DNA, 201 bp, Homo sapiens; identical to SEQ ID NO: 21206

SEQ ID NO: 125061 - DNA, 201 bp, Homo sapiens
tttcacattaaggatgtatttcagaggatctaatagaaatcttccattataaatgttataccttttcccagttttcccaaaagctgggaaagataatctasttttatttttaggtttattagttttattgagatataatttacatgaaagaaaatacatacattttatgtgtaccatttgatgagtttcaagaaatgtaca

SEQ ID NO: 125062 - DNA, 201 bp, Homo sapiens
ggccccccttcctcttagaaagtctaatcgttagggccagaaaagcttaggcccttgcagcctttacagatagagctgtacttgttgtgagaatctgttcrtattaaggttttcattcaagcaggattctcaattagtgttgacccaggtgaggctggtgcctcttggcacagcagacagaactgcatatttcctctgaag

SEQ ID NO: 125063 - DNA, 201 bp, Homo sapiens
gaggtaagatcccgtggtgtgggctttctctccttccacctcgggtcagccctagtcttgtgtacctaagaggcctcactccagtcttctccttgaaaaakaaaaatactaattaatattcagcctgccttctggacctcttagggcaccacagctttttccagtgggccctgccctaagctccagctgttgcccccagag

SEQ ID NO: 125064 - DNA, 201 bp, Homo sapiens
aatccagatgtgaatgttttccaacggaaatttgtgaatgaagttagaagatgtgaagaaatggatcgaaagcttcgtatgtgcactttggtcttgtgtartgttcctttaatgaatcatttgtcttagattagtgacattagtcctcttaatagaggaagaaaatgttataagagaaaagggaaaaatcttgcagttaag

SEQ ID NO: 125065 - DNA, 201 bp, Homo sapiens
tcgcgtatggaggagaggtgtggccttgaaggccagtgttaagacctgaagaaggaaagaaggcagttgtgggatgaccaccctttggagtaactttagaraatgtgaggaaggagaaagagggatggggagaaaaaaggtgcttctttcatattaaaagatattatatcttttatatatatatataaagtatcttttttg

SEQ ID NO: 125066 - DNA, 201 bp, Homo sapiens
cagagggaaaaatgttagtaaagttcttgggttaaatatgtaggtgaggccaggcatggtggctcatgcgtgtagtccctgcactttgggaggccgaggcrggtggatcacctgaggtcaggagttcgagatcagcctggccaacatggtgaaacccggtctctactaaaaatacaaaaactagccgggtgaggtggtggt

SEQ ID NO: 125067 - DNA, 201 bp, Homo sapiens
aaatttattttctgtgttttcatcccctattcttcttgtctttttatggatatatcttgtcttttcgtggtttgttttctttttcatccttattttctgarcctgtctcctggttcctcgttgcctgcatgccactaactattttcattagatattaattgatttgtgaattcaggctgaattgcatcatcagcagatggc

SEQ ID NO: 125068 - DNA, 201 bp, Homo sapiens
caattttgactcctccaaaacttaactattgatagcctgcttttgaccagaagccctaccaatttcataaacagtcgattaatacatattttgtatgttayatgtattgtacactgtattcttacaataaagtaagctagagaaaagaaaatactgttaagaaaatcataaggaagataaactgtatttactgaaagtgga

SEQ ID NO: 125069 - DNA, 201 bp, Homo sapiens
aggattacaggcgtgagccacctcggctgacctgatttctgttgttttaaatgctacccaggttgtggttatttgtatggcagccttagggaaacgaataytggaagcctgtggagaagacactggagcagatacgtatttcaaaacaccgggcttaacgttaaaactctcctctaggccccatctaggaatctaagtggg

SEQ ID NO: 125070 - DNA, 201 bp, Homo sapiens
gttagagggtgtgggacagtgtgattaactctaagtgtttaaggtcttttgcaataggcatcgccacttaagctgtatgtttttaatgaacctggaattcsagcatgctcactgcccagacgttattgtatttttgttcactaattcactgagcatataatgagcacctacttattgtgagacacaagatgagtaagacat

SEQ ID NO: 125071 - DNA, 201 bp, Homo sapiens
ccctgctttaaggggtaggcggaggaaccggaggttattggataggcagaagaatttagggggcttcttaaagggtttctcagtttgggggttttcctctycttttttcccatctcaaggtagatgagcctgagtccagagaattcctgctcattgggtagacaggaaatgaagcaggtgaataccgtgggaggaggcgag

SEQ ID NO: 125072 - DNA, 201 bp, Homo sapiens
taacaggagtgagccaccgtgcatggccgatttctgttgttttttgtttttttgagacacagttttgctttttcatccaagctggagtgaggtggcgcaawcttggctcactgtagcctctgccccctgggttcaagtgattctcctgcctcagcctcccaagtagctgagactacaggcgcccaccaccatgtcttgcta

SEQ ID NO: 125073 - DNA, 201 bp, Homo sapiens; identical to SEQ ID NO: 21204

SEQ ID NO: 125074 - DNA, 201 bp, Homo sapiens
cggtgaaaccctgtctctactaaaaatacaaaaaaatagctgggcgtggtggcaggcacctgtagtcccagctacttgggaggctgaggcaggagaatggygtgaacccggaaggcagagcttgcagtgagctgagatcacgccactgcactccagcctgggtgacagagcgagactcgtctctaaataaataaataaata

SEQ ID NO: 125075 - DNA, 201 bp, Homo sapiens
gcaagattgggaactgagggcaaatcccttcctccgtgcgtcgaactcttgatcccaggccttaaaagtgggatctctgcactctgggctttctctagctyccccagggaagggaggctcggggtgaggtgggcacggggcatctttcctgcccaactgtgaagtcctaaaaagcttcacaaagtttctattgaatgacag

SEQ ID NO: 125076 - DNA, 201 bp, Homo sapiens
tagtcccagctacttgggaggctgaggcaggagaatggcgtgaacccggaaggcagagcttgcagtgagctgagatcacgccactgcactccagcctgggygacagagcgagactcgtctctaaataaataaataaataaaaattgttttttaaacagaggaatatttttccctttgagaattctttataatacctatttg

SEQ ID NO: 125077 - DNA, 201 bp, Homo sapiens
gtaccttggatgctgctgtttaaaccattggtccttcgccgtcagtatttgaggagaaagcatttggtaggtgtatttctattgctaaaagttactagacttttgttttgttcaagatcaaggcaattccccagtggatataattaattgtgcacaaatctatatattctttttctttttctttttctttttttgagacgg

SEQ ID NO: 125078 - DNA, 201 bp, Homo sapiens
taccttggatgctgctgtttaaaccattggtccttcgccgtcagtatttgaggagaaagcatttggtaggtgtatttctattgctaaaagttactagacttttgttttgttcaagatcaaggcaattccccagtggatataattaattgtgcacaaatctatatattctttttctttttctttttctttttttgagacgga

SEQ ID NO: 125079 - DNA, 201 bp, Homo sapiens
ctgagattgtgccactgcactccagcctgggcaacagagcgagactctgtctcaaaaaaaaaaaaaaaaaaataggggaggggttgggggccaggcacggkggttcactcctgtaatcccagcactttgggaggccgaggcgggtggatcacctgaggtggggagttcgagaccagcctgaccaacatggagaaacgctgt

SEQ ID NO: 125080 - DNA, 201 bp, Homo sapiens
accttggatgctgctgtttaaaccattggtccttcgccgtcagtatttgaggagaaagcatttggtaggtgtatttctattgctaaaagttactagacttttgttttgttcaagatcaaggcaattccccagtggatataattaattgtgcacaaatctatatattctttttctttttctttttctttttttgagacggag

SEQ ID NO: 125081 - DNA, 201 bp, Homo sapiens
aagtggtgacagtgtctcctcattcatgctccacactgtgagttgctttgtgatttgttcagcaagtatccaggaactaagattagaaatgattttttttytttttggaaactaaaaccagattccccagttccctacttgattgtgtgtttgtgtgtttaatttttctttttgtcattttggatccctcagtctcagctg

SEQ ID NO: 125082 - DNA, 201 bp, Homo sapiens
ccatatgaagtgattctgggggctgctgtttaaattccttttcacgctgtggcaggttagcactaattgggatctgtgagacttaactcatttctgcctgkttttttttcccaaagagtcttttttgctttgggtttggaaaaactcaagttttttcaaatcaagttgactttaaaatctacttttggagaccctacaaaa

SEQ ID NO: 125083 - DNA, 201 bp, Homo sapiens
ggtgggcattaaactgtgatgagagctgtggcaaaaaatggcacaccaggaggtggagctgaggatgaggagcgcagggcagctgcgcaggcctcctgcaygctactcatgctgctgcccgaaggccaggttgcaggagagctgcccttgagctcttgccttgtttggccccctggacagaaaccatatgaagtgattctg

SEQ ID NO: 125084 - DNA, 201 bp, Homo sapiens
gcatgagacagggatttgattgtagttatcactgtaaacatcaaactgatttttatgcagaactattgccccagggcataccttccaaggaacctggtctstccttacctagcgaattccacatacacatagatgtacacctacctgtacactcacagattgggtggtgattaaagggacagaatcggggaccagcttctt

SEQ ID NO: 125085 - DNA, 201 bp, Homo sapiens
ccttggatgctgctgtttaaaccattggtccttcgccgtcagtatttgaggagaaagcatttggtaggtgtatttctattgctaaaagttactagacttttgttttgttcaagatcaaggcaattccccagtggatataattaattgtgcacaaatctatatattctttttctttttctttttctttttttgagacggagt

SEQ ID NO: 125086 - DNA, 201 bp, Homo sapiens
tggttttgcattttttcacattttcttcaatttttcatctcaatatgaggaaaagaaccctgaagtagttgtataaacatagttagtataaatttttacaytatatttatacttataaggtaagtatatgcttaaggttaaagctgaggaagcaaacatttggttatagacaaaattataacaaaggtttaatcaccaaac

SEQ ID NO: 125087 - DNA, 201 bp, Homo sapiens
cttggatgctgctgtttaaaccattggtccttcgccgtcagtatttgaggagaaagcatttggtaggtgtatttctattgctaaaagttactagacttttgttttgttcaagatcaaggcaattccccagtggatataattaattgtgcacaaatctatatattctttttctttttctttttctttttttgagacggagtc

SEQ ID NO: 125088 - DNA, 201 bp, Homo sapiens
aaaaggtttggtttaaagcacgttgattttttttctttttaaaaagcagcatatgtatatacgtttacttaatgtctgtgtgtatatgaattctgcgcgcrcacacacacacacacacacagagttaaatttgcgagatgttcagtatcatgcataatttctgggtatccaatagcacttactttacactgcctgggaaaa

SEQ ID NO: 125089 - DNA, 201 bp, Homo sapiens
gtttaaagcacgttgattttttttctttttaaaaagcagcatatgtatatacgtttacttaatgtctgtgtgtatatgaattctgcgcgcgcacacacacrcacacacacagagttaaatttgcgagatgttcagtatcatgcataatttctgggtatccaatagcacttactttacactgcctgggaaaacccaaacgat

SEQ ID NO: 125090 - DNA, 201 bp, Homo sapiens
ggacatgccaaagtcattatctctttgatggatgtgttggttgttcccaattctttgctatcacaaacagcaattcagggaacatcctttttcatatgtctttttttttttttttcttgagacagagtctcgctgtgttgcccaagatggagtgcagtggtatgatctcagctcactgcaaccatcacctcccgggtttca

SEQ ID NO: 125091 - DNA, 201 bp, Homo sapiens
aggagatggaggttgcagtgagccaagatcgcgccactgcactgcaacctgggcgacagaccgagactccgtctcaaaacaacaacaacaacaacaacaamaaaaaaacctgggatgccctagagagagggtgtctgcctggggtcccccataaaaagactgcttttagcctgtctagagtgagagaagaccccagaggag

SEQ ID NO: 125092 - DNA, 201 bp, Homo sapiens
agtgtgcttggcttcttacctaccataattagacatcttttcttcctcagagaaggcatgagacagggatttgattgtagttatcactgtaaacatcaaaytgatttttatgcagaactattgccccagggcataccttccaaggaacctggtctgtccttacctagcgaattccacatacacatagatgtacacctacct

SEQ ID NO: 125093 - DNA, 201 bp, Homo sapiens
aattagagggtcactgatggtcgagaggaaaaggagaaagacagttggcaaactatttatttttgactctaacatgagactttataagtttcccatgtcaraactctttacaaggtcatcactttggtcaatttcaaattgatttgttattaaacatgtgctgcctatactgttccaacatgtaattctttctccttctgc

SEQ ID NO: 125094 - DNA, 201 bp, Homo sapiens; identical to SEQ ID NO: 21209

SEQ ID NO: 125095 - DNA, 201 bp, Homo sapiens
ggccacatgcacagcagggaacagaagataagggctgagcgcacactgggaccatccattagctgtgggtggcctgtcacctcagcaatagttagagcagkggcctccctcagctctgtggctgccttcatctcagcctccgctcggtccttgttgaaccgactgaagtcatcccactgctggagtgtggtggagctgcag

SEQ ID NO: 125096 - DNA, 201 bp, Homo sapiens
tggctcactgcaacctctccttcccgggttcaagtgattctcctgcctcagcctcccgaataactgggactacaggcatgcgccaccacacctggctaatytttatatttttagtagagacggggtttcaccatgttggccaggctggtctcaaactcaaactcaggtgatctgcccagcttggcctcccaaagtactggg

SEQ ID NO: 125097 - DNA, 201 bp, Homo sapiens
agagacagagccagatagagagggtgtcaaggggttgggggctatccctttgcccacccagctgagttcccatccccaacctggttgttggtctcgttgcrgagcacccgggcctcctggcggatctgatgggaagcatctcgctgcagctgggcattggtggatagcaggtagctgttagtgtgccagtcgggcagctgg

SEQ ID NO: 125098 - DNA, 201 bp, Homo sapiens
ctggagtgtggtggagctgcaggtggcagggaaaatgggggtcatgagggtgtggcctgggaggggaggagaagagactggctgaaacactcttcttaccyatcaggtacacgtgtggggtcaaccttcagcgagatgtttggggatctgaggttgagagagagacagcctctgtcgatctctagtgtctccattttgccc

SEQ ID NO: 125099 - DNA, 201 bp, Homo sapiens
ggtggcctcgatgacctccacctctttatgcagctcatcctccacagggtccttcaccacatcaatgtctcgccggctttcccgcagggtcaggcactcartggccacatccagaggcaggttcttggcctgcaggttttgctctgctgactccttcatctagaaaagagggcgcggccgggcacggtggctcacatctgt

SEQ ID NO: 125100 - DNA, 201 bp, Homo sapiens
ggcgatccacccatcacaacctcccaaaatgctgggattacagatgtgagtcactgccccggcctaaacaattttattttgataaaggtatgcatagacaygatagaaaatacgaaaccaagtgcagtggctcacgcttgtaatcccagctactccagagacccaggcgggaggagcgcttgaggctaggatttcgaggtc

SEQ ID NO: 125101 - DNA, 201 bp, Homo sapiens; identical to SEQ ID NO: 21211

SEQ ID NO: 125102 - DNA, 201 bp, Homo sapiens
gctggcagcttttgagtggactcagggtgctatttgtggtacgtgtgaaggtgtccacctcaggcacgaacctctcagcaggcacggtcagcttgcgccgygtgtccatgcacttggtgtccagcagcatggagttggccttgcaggcaatgtcagcctgcagccgggccaggtgcttgcacagggcgtccagtgcgtccc

SEQ ID NO: 125103 - DNA, 201 bp, Homo sapiens
atggcgccgctgcactccagcttgggccagagtgcgacgctgcgtctcaaaaaaaaaaaaaaaaaaaaaaaaatagtggcaacagtagaggaagggatgtyctaatgaccatgtagcattcattggcagttattcacatatgtaaatgagagagaaaatattctttgttctgtgacttataaaactgtcataactggtgga

SEQ ID NO: 125104 - DNA, 201 bp, Homo sapiens
taatttcccaccctaaaatgcagtgtagtaaaatctaaagatgcataatcctttcagatttttaaggagggttcattcattcattcaacaaatatatattkcactctgcacttactgtgggctaggcatggaagatatgacttgtaagtaagacagtgtttctgctctgacaaaatgtacactctagtaggcaatggaggc

SEQ ID NO: 125105 - DNA, 201 bp, Homo sapiens
tcacgaaaacggcacgggggaaaccacccccatgaatcaattacctcgacctggtctctcctttgagacgtgcagattatggggattatggggattacaawtcaagataagatttggtcggggacacaaagtctaaccatatcaacctactagtataatttcttattatggaatcaagtgttgagacacgtcggtttcctt

SEQ ID NO: 125106 - DNA, 201 bp, Homo sapiens
cctgatcttcactcttaggactcatcaggctcattgatccttttatccttttatataagtggccatgcacttgaattctgtggagcacggtcagtaaaacrgaaggtgataaagacagtgtttaggtgaagctgggtcctactgccaatgaagagaaaattggaaaactaagtacttccctaaataatgttcttcacacct

SEQ ID NO: 125107 - DNA, 201 bp, Homo sapiens
aatgtatatggaagcacaaaggaccctgaatagccaaaacaatctcgagaaagaagaactaagctggaatcatcacagttcctgatttcaaaatttattaygaaagtacagcaattaaagcagtgtggcactggcataaagacagaatagagatctcagaaggaaactcatgtatgtatggtcaactgatcttccacaagg

SEQ ID NO: 125108 - DNA, 201 bp, Homo sapiens
cattgatgaccacatcatgtccaaactccttgacatggctcagctgacatctggctcctgctagcaatactaccttcatcttccaccgaatcctagaactmtacacaccagccttagcaaactagttacagtttcccaaacacgatgctttcatctggaggccgtgtacttctctgtcctcccctgggttgctggccacct

SEQ ID NO: 125109 - DNA, 201 bp, Homo sapiens
caggtaagctaacttgcagccttcacacatggattattctaaaatataagatttgcctatagatacagaagacatagatacagtaacctattctgacataygctattgacttaaatgcaaacatttcttttcagtattatgagtcagattttttctatgttatctgttctatattatctgttctgatatatctgatttaaa

SEQ ID NO: 125110 - DNA, 201 bp, Homo sapiens
ttaaagcagtgtggcactggcataaagacagaatagagatctcagaaggaaactcatgtatgtatggtcaactgatcttccacaagggtgccaagaatacmcaatgaagaaaggataggctcttcctacaactggcattgggaaagctggatatccacataaaaatgaattaaatttgacccttgtcttacactatataca

SEQ ID NO: 125111 - DNA, 201 bp, Homo sapiens
gctcagccttcaggacactgctccctgcatcccagctgctcaggctccaccctcagcaactagggccccagatacagcttagaacacagctctggagggtscaagccatgagccttggcagttttcaagtggtgttaaatctgcagatgctcagagtgcaagtgtgaaggaagcttggcagcttccacctagatttcagag

SEQ ID NO: 125112 - DNA, 201 bp, Homo sapiens
aggatccaggaagtcatacttcccatgtgtttttaaccctttctctccctttccttcttgtttccttatatctaggttggaggcacaaattgtctgttaarctcagtggaagcgaagtcactcaaggaactgtctttcttcgtgtaggcggggcaattgggaaaactggggagtttgccattgtcaggtaggcagagtgag

SEQ ID NO: 125113 - DNA, 201 bp, Homo sapiens
gagaagaatgttaatgcataatagccaatcaccaaaaaaggtcaaaatacttccgcctttataaactgtcttgtgactgctgtaagcgggggcttcttacmattttcagtttgaagtctcccagctcaaggactgttcttttgtgtgcagagcaaatttttaaaaattaaaaaatttgatctgattatatttttgacattt

SEQ ID NO: 125114 - DNA, 201 bp, Homo sapiens
catgtgtttttaaccctttctctccctttccttcttgtttccttatatctaggttggaggcacaaattgtctgttaaactcagtggaagcgaagtcactcraggaactgtctttcttcgtgtaggcggggcaattgggaaaactggggagtttgccattgtcaggtaggcagagtgagaaactgacgctttgcacagtgct

SEQ ID NO: 125115 - DNA, 201 bp, Homo sapiens
atctttgtatgtctctttatgtacttgagtggaattccttcatggcatacaacagaagtgaaattatcaaagcatacatgcatttccttctttattagacwttaccaaatcactgtttaaaatgtctatcgattgctaaagaaaaataaaaatgaaggccacaatttagatataacccaaggccacccatgaccacatagc

SEQ ID NO: 125116 - DNA, 201 bp, Homo sapiens
tttccttcttgtttccttatatctaggttggaggcacaaattgtctgttaaactcagtggaagcgaagtcactcaaggaactgtctttcttcgtgtaggcrgggcaattgggaaaactggggagtttgccattgtcaggtaggcagagtgagaaactgacgctttgcacagtgctgggggctcagtaacactaagtgagac

SEQ ID NO: 125117 - DNA, 201 bp, Homo sapiens
ctgctctattgccgtgatcaacaaaatgtcttttgatcactagtttagttacccaattccttttatgtggttaaagaaggtaccagaaaaagggcacgggrgcactctggttaatcgaagggaggtatttccacactgtgaattggtgaacaggctcctggtttgtagataagtcttgtgtacatttagtccactattgag

SEQ ID NO: 125118 - DNA, 201 bp, Homo sapiens
ctctctgctctattgccgtgatcaacaaaatgtcttttgatcactagtttagttacccaattccttttatgtggttaaagaaggtaccagaaaaagggcasgggagcactctggttaatcgaagggaggtatttccacactgtgaattggtgaacaggctcctggtttgtagataagtcttgtgtacatttagtccactat

SEQ ID NO: 125119 - DNA, 201 bp, Homo sapiens
ttgagacgtgcagattatggggattatggggattacaaatcaagataagatttggtcggggacacaaagtctaaccatatcaacctactagtataatttcytattatggaatcaagtgttgagacacgtcggtttccttgaacacttatttatttaatatttatataaatctttgtgccaggtgttgctacagctggaaga

SEQ ID NO: 125120 - DNA, 201 bp, Homo sapiens
ttctattgtaaagacacatgcatgcatatgttcatgcagcactattcacaacagcaaagacatggaatcaacccatgtgcccatcaatgacagactggatraagaaaatgtggtacttatataccatggaatactatgcagccataaaaaagaatgagatcatgtcctttgcaggaacatggatggagctggaggccatta

SEQ ID NO: 125121 - DNA, 201 bp, Homo sapiens
ggacacaggcacaggcaaagatttcatgatgaagatgccaaaagcaattgcaacgaaagcaaaaattaacaaatgggatctaattaaactaaagagcttcracacagcaaaacaaactatcaacagagtgaacagacaacctacagaatgggagaaaactttggcaacctatccatctgataaacgtctaatatcccacat

SEQ ID NO: 125122 - DNA, 201 bp, Homo sapiens
ctacagggctacagtaaccaaaacagcatggtactgctacaaaaacagacacatagacccaacggaatagagaatagagaatccagaaataaggccgcatrcctatagctatctgatctctgacaaacctgtcaaaaacaagcaatggggaaagaatcccctactcaataaatggtgctgggatacctggctagccatatg

SEQ ID NO: 125123 - DNA, 201 bp, Homo sapiens
atatgtattttctctacagttccaactagaaacagaaaatgttaggaagtgataacatgaaaatacagatctagataatagagcaagtggaaaaaactgayggtattcaagatatatttttaatcccattcacttaatattatacaaatataagcatatatttttatttgtgtcagtaacaaataagacatttatataaat

SEQ ID NO: 125124 - DNA, 201 bp, Homo sapiens
attcaatgctatctatattaaactaccattgagtttcttcacagaaatagatgaaactattttaaaattcatatggaaccaaaaaaaaaaaaaaaaaaaaagatcccaaatagccaaggcaatcctaagcaaaaagaacaaagctggaggcatcatgctacccaacttcaaactacactacagggctacagtaaccaaaac

SEQ ID NO: 125125 - DNA, 201 bp, Homo sapiens
gaagcgaagtcactcaaggaactgtctttcttcgtgtaggcggggcaattgggaaaactggggagtttgccattgtcaggtaggcagagtgagaaactgaygctttgcacagtgctgggggctcagtaacactaagtgagactggctcagtaagctgtttagtcttctcttttcctacaattccacaggctaccatggtat

SEQ ID NO: 125126 - DNA, 201 bp, Homo sapiens
ctcagtggaagcgaagtcactcaaggaactgtctttcttcgtgtaggcggggcaattgggaaaactggggagtttgccattgtcaggtaggcagagtgagmaactgacgctttgcacagtgctgggggctcagtaacactaagtgagactggctcagtaagctgtttagtcttctcttttcctacaattccacaggctacc

SEQ ID NO: 125127 - DNA, 201 bp, Homo sapiens
cttcagttggataaggatgtaggcagaggtgtcactttgtgactttaccagtccctgtcttatgtgcaaaagggagaaccatgttgatcctttttttttttctatttttaaagcatatttaagctattccaccgctgtttttaaaatacttattctgttaaacaattctttcagaaaaaatttgaatattccccttctaaa

SEQ ID NO: 125128 - DNA, 201 bp, Homo sapiens
aggtgggtggatcacgaggtcagatcaagaccatcctggctaacatggtgaaaccccgtctctactaaaaacacaaaaaattagccggcgtggtggtgggygcctgtagtcccagctactcgggaggctgaggcaggagaatggcgtgaaccccggaggtggagcttgcagtgagccgagattgcaccactgcactccagc

SEQ ID NO: 125129 - DNA, 201 bp, Homo sapiens
ctacaatcagatatgggagcaaataaatgacttaaagttggaacttatatttcaaagggaagcaaaacattgaagtttggaaaatttgcagcctagcctakccatgtggcagacaaaaaaagctttttcaagagcagaatgtaagtgggctgtggagcaaccacttgctagagagattagcatgactaaaagggagctggg

SEQ ID NO: 125130 - DNA, 201 bp, Homo sapiens
ggttcttgtcccacgtccaggaagaaagaggttacacagacaactgaagagtgagcatggtggagaagagttttatcgagtgaccaaacagctcttggatragaggggaacccaaagtgggtagcccctatctgaaggcaggtagttcccacccaaaggcaggtagtccccagagtgtggcttagtctgggctttttatag

SEQ ID NO: 125131 - DNA, 201 bp, Homo sapiens
acaatctacaatcagatatgggagcaaataaatgacttaaagttggaacttatatttcaaagggaagcaaaacattgaagtttggaaaatttgcagcctakcctagccatgtggcagacaaaaaaagctttttcaagagcagaatgtaagtgggctgtggagcaaccacttgctagagagattagcatgactaaaagggag

SEQ ID NO: 125132 - DNA, 201 bp, Homo sapiens
tggagagacagcagggggagccaggttccagtagaatgggcggagaagagaaagaaaattctttggcaatgattaactcatgaattaaaattcctctctgrtaggtttctttcccctttcaattattttcaaataatcatatgaagaattgcattttttcagtttgttattaagcgtacagtaatttcagaattcagaata

SEQ ID NO: 125133 - DNA, 201 bp, Homo sapiens
tggtaggtttctttcccctttcaattattttcaaataatcatatgaagaattgcattttttcagtttgttattaagcgtacagtaatttcagaattcagartaaaagatctgtttagctctagatgtaaaaagtcacatttggccatttgcaagggaatgatctactgacagatactatattgatctgtatctacgtgtac

SEQ ID NO: 125134 - DNA, 201 bp, Homo sapiens
tgtttccttatatctaggttggaggcacaaattgtctgttaaactcagtggaagcgaagtcactcaaggaactgtctttcttcgtgtaggcggggcaattrggaaaactggggagtttgccattgtcaggtaggcagagtgagaaactgacgctttgcacagtgctgggggctcagtaacactaagtgagactggctcagt

SEQ ID NO: 125135 - DNA, 201 bp, Homo sapiens
catcctgtcagtttcctgccattcttggaaagcttgacagccaaacagtagcattttccacatatcctccttgtccccgacctctctcttcttcctgcctyggctgctactctgagcacccacgggatcctggcatttacttctaggagaagcaggcccttggagtctttgtatatttggagataagagttaatctgccaa

SEQ ID NO: 125136 - DNA, 201 bp, Homo sapiens
tgttattgcccagcgttctgagggtcagaattcaggcagagttctcctgagattctgcttcgtgtggtgttggctggagcaactcaggtgactgcatccarttgggggctgagctgggctaagctggatgaggaggtctgagatgaccctccgtgtcaggaaccctgggacttgttctcctctgtcaggtggtctgtcatc

SEQ ID NO: 125137 - DNA, 201 bp, Homo sapiens
agaattactcattaaatcgggggatctaccgtgtctttttcttccctggcatcaggttaaaattccttttttttttccttaaaaactttcagatctacctwctgtagccaagacattatgggacctaatattctccagaacctgaaaccatgctaatctcagatacagtcttgatggatttctttagtaggagcaatgaag

SEQ ID NO: 125138 - DNA, 201 bp, Homo sapiens
tgctgttaaagtgtttttcaacaaccaagatataggataaatcaaggtatgtacttaaaacaaggatttccacaggcctgacccatatgttatatgagttygaccaattctgtagatgtggctgtctctagaacaaggaaaaaagttcttactatgggtatagagacacttataaagaaacattcctcaaaagcttgagtt

SEQ ID NO: 125139 - DNA, 201 bp, Homo sapiens
ttcacacatggattattctaaaatataagatttgcctatagatacagaagacatagatacagtaacctattctgacatatgctattgacttaaatgcaaasatttcttttcagtattatgagtcagattttttctatgttatctgttctatattatctgttctgatatatctgatttaaatatgaagattgctcttatgtt

SEQ ID NO: 125140 - DNA, 201 bp, Homo sapiens
aaagcatatttaagctattccaccgctgtttttaaaatacttattctgttaaacaattctttcagaaaaaatttgaatattccccttctaaagtgcacttrattggccacagcttgggagcacacctggctggggaagctgggtcaaggataccaggccttggaagaataactggtaagcatgccctgcagttgggccttg

SEQ ID NO: 125141 - DNA, 201 bp, Homo sapiens
ccttcttgtttccttatatctaggttggaggcacaaattgtctgttaaactcagtggaagcgaagtcactcaaggaactgtctttcttcgtgtaggcgggrcaattgggaaaactggggagtttgccattgtcaggtaggcagagtgagaaactgacgctttgcacagtgctgggggctcagtaacactaagtgagactgg

SEQ ID NO: 125142 - DNA, 201 bp, Homo sapiens
tcacgggaatacatccatgctgtaaacaatctccgtgttgttggtgctgaggtggcttattttattgatgttctcatggtaagaagagttgatttttttttaattatattgaattggttttggatattaacactcagaagttgggacaatttaatgtctttttttattagcttagacaggtactgaacatgtgaaataata

SEQ ID NO: 125143 - DNA, 201 bp, Homo sapiens
tcttgtttccttatatctaggttggaggcacaaattgtctgttaaactcagtggaagcgaagtcactcaaggaactgtctttcttcgtgtaggcggggcarttgggaaaactggggagtttgccattgtcaggtaggcagagtgagaaactgacgctttgcacagtgctgggggctcagtaacactaagtgagactggctc

SEQ ID NO: 125144 - DNA, 201 bp, Homo sapiens
ctgtgaatacccagtgcaaacttacgagtcttatttttgtttacagtggaaaacttgagccaggcatgacttacacaaaattaatcgatgcagatgttaaygttggaaacattacaagtgttcagttcatctggaaaaaacatttgtttgaagattctcagaataagttgggagcagaaatggtgataaatacatctggga

SEQ ID NO: 125145 - DNA, 201 bp, Homo sapiens
aatgggagtcaggaagctcttatgggtaagagatgttggtttgggtgccacgaccaatctgggtcacagtggagaatttttgcatgatggggaaaaaacawgtcattggtttcactttgccttggatggaacataccttatgccttgagatatggcacctctctctgctctattgccgtgatcaacaaaatgtcttttgat

SEQ ID NO: 125146 - DNA, 201 bp, Homo sapiens
acccagcactggttcacaatgctgactgttttgtgattgaataggagggagttcagttattcttgcagaaacagagaggcagagtcttaactggtctacartggagatactatatgcacagggatattgtgtcagaggtcctagtgatacaggatttttttccatgctgcttcaccagccagagacctccacagcctgcag

SEQ ID NO: 125147 - DNA, 201 bp, Homo sapiens
ctaaggggacaaaataaagcattgaaggggaatatgatgtgttggttacagtgaaggtaaagtagaagaagaaaattgttgacaggatggtaagggagtcyttactgaaaagatgacctaaaggagttagccttatagacaccaaggggagaggcattccaggccaacagggggaagcaagtgtaagggctgaaaacagga

SEQ ID NO: 125148 - DNA, 201 bp, Homo sapiens
agttattccacatctcacccagcttttttgccacgtctccaatagagaagccagggtttgtggatttgatctaggcgcagaattctgaacagaacaggaasaatccagacggtggccttttaggggcattaggatccttcttcttgcctcccttagctggttcataatccttcatttcccgatcatagcgcactttaatca

SEQ ID NO: 125149 - DNA, 201 bp, Homo sapiens
ccctgatggagttcattttctaacttgttaggaaaccaataaatagtgtaagagctaaggggacaaaataaagcattgaaggggaatatgatgtgttggtkacagtgaaggtaaagtagaagaagaaaattgttgacaggatggtaagggagtctttactgaaaagatgacctaaaggagttagccttatagacaccaagg

SEQ ID NO: 125150 - DNA, 201 bp, Homo sapiens
tcatgtctcctccccacattctgttttccaaaccaattgtgtgagatggatgaaggtcaaagcaacagctcctttaccaacaggcggggctggcctctccytctgcatccccccaccaacagccagtaagcaagccccacgtctccttcatctgccttttccctgtccatcctctggtcattgtcctggctcagtccctca

SEQ ID NO: 125151 - DNA, 201 bp, Homo sapiens
gagaagggaagtattccaggcagaagtgaccacgtctgtaaatgcctggaagtaagagagagcagaaactgaaagaaggccctgccaggattgtagagacygggaggacagtgatagcagatgaagtgggagagacaaatcaggtcagatcatgaggcaagggccttgtgtcccaagtggagaggttgggctttgtctgtg

SEQ ID NO: 125152 - DNA, 201 bp, Homo sapiens
aggggaggctaaagagaagttggttaacaggtacaaaaatccatagctagaaggagtacattctagtacatgatacagaaattacagttaacaataatttrttacatgtttcaaaatagctagaagagaaggactgtaatgttcccaacacgaagaaaagatgaatgattatggcgatggatgtcccaattaccctgattt

SEQ ID NO: 125153 - DNA, 201 bp, Homo sapiens
aactagtctgagatttcacacgtaaatgattgggaaaatgataaccctcttatcagaaaaattgaggataaaagagaaggagttagattctggataggtgrggcttgagcaggctgttggagatgttagtctaacagcgaagcaggcagcccagagctggagaaaaagattcaaaagtcttctggctggggttgcaaattg

SEQ ID NO: 125154 - DNA, 201 bp, Homo sapiens
caaagtaagagaaactatgtgttccctcacccgcaattgaatggttgaagcaattataacacattccatcctttgggatttcataccagtaatgcaaagartgaggtttacctagacgtaggagtagaatggtggttatgagaggctgggaagggaagaagagaggggaggctaaagagaagttggttaacaggtacaaaa

SEQ ID NO: 125155 - DNA, 201 bp, Homo sapiens
tccttctttattagacattaccaaatcactgtttaaaatgtctatcgattgctaaagaaaaataaaaatgaaggccacaatttagatataacccaaggccrcccatgaccacatagccaaaaccaagtcatcctgattttccagaaacactagctctaatcataaatgaaacacaaaaacataagctttacctccttgtcc

SEQ ID NO: 125156 - DNA, 201 bp, Homo sapiens
ctccaaatctttgacagctcttgtttaatttataagagacattctaacagatgtgaggtgatatctcattgtgatgttgatttgcatttctctaatgattraggatgttcaacattttttcataaatctgttggccatttgtatgtcttcttttgataactattcaaatcctttgcccattttcaattggatcatttgctt

SEQ ID NO: 125157 - DNA, 201 bp, Homo sapiens
gtctgtgtgcccaggcagaagtctgctgcaggggcagagcccccacagagaaactctactaaggcaatgccaagaagaaatgtggggttggaacccccacrcagagtccccactggggaactgcctagtggatctgtgggaaggggctcctgccctccagatcccagaatgttagatccactggaagatccatgattataa

SEQ ID NO: 125158 - DNA, 201 bp, Homo sapiens
cttctttcacttagcatgtcttccatgttgtcacaaatgacagaatttcctttttcattgtgcaggtataacacattttctttatccattaattcattgayggacacaggttgattccatatttcggctattgagaataatgctgcaatgaaatggaagtgcaaatatctcttcttcagcataatgattttgatacctttg

SEQ ID NO: 125159 - DNA, 201 bp, Homo sapiens
aacaaatgaacaagaaaatgtcagttggtgacaagtactgggtgaagaaaatgcaaggcagtagaatggagaatggcagaagcagaaacaaattgtatgarcaaccaggttaggtgatatttgaacattgaccactgtcagtaaacatcctgaagaaggaattagggatccaaagactcatttatgccccgacacttctct

SEQ ID NO: 125160 - DNA, 201 bp, Homo sapiens
aactgcctagtggatctgtgggaaggggctcctgccctccagatcccagaatgttagatccactggaagatccatgattataaaaactggcaggcactcawctccaaccccagagagcagcatgtgggttgcacccagagaagccacaggggcagggctgcccaaggccttgggatcccactcctcacaccagaatatgga

SEQ ID NO: 125161 - DNA, 201 bp, Homo sapiens
agtaggcaatggaggcacacacagaaacaaatgaacaagaaaatgtcagttggtgacaagtactgggtgaagaaaatgcaaggcagtagaatggagaatgrcagaagcagaaacaaattgtatgagcaaccaggttaggtgatatttgaacattgaccactgtcagtaaacatcctgaagaaggaattagggatccaaaga

SEQ ID NO: 125162 - DNA, 201 bp, Homo sapiens
tttttttttttctatttttaaagcatatttaagctattccaccgctgtttttaaaatacttattctgttaaacaattctttcagaaaaaatttgaatattycccttctaaagtgcacttgattggccacagcttgggagcacacctggctggggaagctgggtcaaggataccaggccttggaagaataactggtaagcat

SEQ ID NO: 125163 - DNA, 201 bp, Homo sapiens
acgaatatagttgttagggctgttctcctgtttccaaggaccacaggccagccccttagcacaaggaggagagctcctatagaaggcattcttccaagctyatctgttctccttcagttggataaggatgtaggcagaggtgtcactttgtgactttaccagtccctgtcttatgtgcaaaagggagaaccatgttgatcc

SEQ ID NO: 125164 - DNA, 201 bp, Homo sapiens
ttgacttttacccaaatggagggaagcacatgccaggatgtgaagacttaattacacctttactgaaatttaacttcaatgcttacaaaaaaggtaaataytttctaaactatgaatgctactgatgcatattcacttagctctctccttagatgggatccacctacttttgtgtataatatacatataaaatgtattttc

SEQ ID NO: 125165 - DNA, 201 bp, Homo sapiens
ttttatgctgaaagcattcttaatcctgatgcatttattgcttatccttgtagatcctacacatcttttaaagcagtaagtaaatcatcttacttggaatktaattataaagtaattttttgaaacacaatcatccagctaaacattagggctttgtgtaggtagcaaaaaaaatgcacctgccattttgggaaataatgg

SEQ ID NO: 125166 - DNA, 201 bp, Homo sapiens
tgctattctgagatgctgatcaatacacatggaaagaataaatctcctacaagcaaatgctagcaaatacaagtttctcttccatagtgcatacacagatrtgttttctttcattcagtgctgtgaatacccagtgcaaacttacgagtcttatttttgtttacagtggaaaacttgagccaggcatgacttacacaaaat

SEQ ID NO: 125167 - DNA, 201 bp, Homo sapiens
aatagactttacgtcagaaagtatcacaagtgacaaaggtcattatataatgataaaagaatcaattcaccaggaagatataataattataaatatatatrcacccaacaccagagtacctaaatatataaagcaaacattgacagattggaagggagaaatacacagcagtgaaataatagtaggagccttcattatctg

SEQ ID NO: 125168 - DNA, 201 bp, Homo sapiens
aggaaattgtctgcctcctgccactgtcactaggaagtgactcagtatatttgtgtcaaagcacaaagtcattcacatttgcttttgcttatttccacttmttgaatgtcccttttgagtcacataattctttggtacaaataaaattatatgtaactttgataaatgtacaatatccaagcctagacaaaaggtctggcc

SEQ ID NO: 125169 - DNA, 201 bp, Homo sapiens
ttaattctcactccgtgagataggtactaatgcataggtgctaattactaatgtgtgtgtgtgtgtgtgtatgtgtgtgtgtgtgtgtgtgtatgtatgtrtgtgtgcatatatatatatatatatatatatatatatatatatatatatgggttaggacatacgtatatatatgggttaggacagagcttagcctgtggt

SEQ ID NO: 125170 - DNA, 201 bp, Homo sapiens
tatatatatatatatatatatatatatatgggttaggacatacgtatatatatgggttaggacagagcttagcctgtggtaggttctctattaacacctamgtattactccattttcatactgctataaagaactgccctagactgggtaatttataaaggaaagaggtttaattgactcacagttcagcatagctgggga

SEQ ID NO: 125171 - DNA, 201 bp, Homo sapiens
ccctgggacttgttctcctctgtcaggtggtctgtcatccttcaggacctctctccccagacaggtagcctggatttcataatattgcaactgggtttcargacagtaagagtggatgctggaaggtcttttaaggccttagaacttaaccaatgtcagtttctccacagaactgatcttggttctttgctactgggcaaa

SEQ ID NO: 125172 - DNA, 201 bp, Homo sapiens
ataagcaaaattcatacaaaagaggcatattataaaattgattttccccattattttctatattacgactatgaatcctttctattaggacaaaatatagmtcagaagacttcattacataattaattgttatacacagatcatatgaaattttatgaaagattaattcaactaaaatatacatttatcataagctatcat

SEQ ID NO: 125173 - DNA, 201 bp, Homo sapiens
aaaaacacatcctatgacaagctaagtgtgctgagcacacaccccagactgtgacacagacattccttccttgctgatgccacattcccagaggtgtcaayggcaatgctactctgcatccttcccactccgggatccagcctctatatcacagcaaagggattttgctaaaatataaatctgatcataaatctcccctgc

SEQ ID NO: 125174 - DNA, 201 bp, Homo sapiens
cttactctcttgctcctgctcttgccatgtgataccccagtcccacctttgccttccaccgtgattgtaagcttctggacataagcagatgctggcactaygctttatgtatagcctacagaaccatgagccaattaaacctcttttctttatgaattacccagccttagatatttcttcatagcaacacaagaatgaact

SEQ ID NO: 125175 - DNA, 201 bp, Homo sapiens
tttaaaagagcatggtacctccccacttactctcttgctcctgctcttgccatgtgataccccagtcccacctttgccttccaccgtgattgtaagcttcyggacataagcagatgctggcactatgctttatgtatagcctacagaaccatgagccaattaaacctcttttctttatgaattacccagccttagatattt

SEQ ID NO: 125176 - DNA, 201 bp, Homo sapiens
tttgcgccatcaaactttactttcgacttatagtcagcaacatccttctcatactttttcagctttgccaccttagtgatgtaaggctgctttttcgctgycatttaagttattccacatctcacccagcttttttgccacgtctccaatagagaagccagggtttgtggatttgatctaggcgcagaattctgaacagaa

SEQ ID NO: 125177 - DNA, 201 bp, Homo sapiens
tcatgggggtggatcccccatgaatggcttagtgccatcctcttgatgatgagtgagttcttgctcagttagttcacacaatatctgtttgtttaaaagarcatggtacctccccacttactctcttgctcctgctcttgccatgtgataccccagtcccacctttgccttccaccgtgattgtaagcttctggacataag

SEQ ID NO: 125178 - DNA, 201 bp, Homo sapiens
attgtttgctgttaaagtgtttttcaacaaccaagatataggataaatcaaggtatgtacttaaaacaaggatttccacaggcctgacccatatgttataygagtttgaccaattctgtagatgtggctgtctctagaacaaggaaaaaagttcttactatgggtatagagacacttataaagaaacattcctcaaaagct

SEQ ID NO: 125179 - DNA, 201 bp, Homo sapiens
gaaggagtcttcaaaagtaaggttagttagaaaagtagttgaggaacaaattgtatagttccttcctgtggagtttgtacttcatcctgtaagccatgggrccccattgagagcttttcagagatgctttagggcatttactctggctgctgttgctctcttgtctgaagctggaagagactagaggtgactatgaggcca

SEQ ID NO: 125180 - DNA, 201 bp, Homo sapiens
agtcaatgtaccaactgagaaccttccatctgtaagactgaataagcaacaatgcctattgtctattgaattgaataaacagaacagtcttgactttattrcagtgggagaaatgacatgtacaaacaaatacctttcttgcaacacaaattatgatctgtgatgtaagatgcaactgaaagactctgggaacaaagtgaa

SEQ ID NO: 125181 - DNA, 201 bp, Homo sapiens
acctatgggattcagcaaaagcaaactaagaaggaagtttatagtgataaacacctaaatttaaaaagaaaaaagctctccattcaacaacctaactttayacctaaaagaactagatcaagcttgcccaacccacagcccagaacagctttgaatgtggccccacacaaatttgtaaactttcttaaaacatcatgagat

SEQ ID NO: 125182 - DNA, 201 bp, Homo sapiens
gattgcttgaggccaggagttcgagaccaacctgggcaacgtggtgaaacccgccccccatctctgtaaaaaaaaaatacaaaaattagcagggtgtgatkgtgcatacctgtaggccctgctacttgggacgctgaggtgtaagtatcacctgagctgggggaggtcgaggctgcagtgagctgcgatcacaccactgca

SEQ ID NO: 125183 - DNA, 201 bp, Homo sapiens; identical to SEQ ID NO: 21223

SEQ ID NO: 125184 - DNA, 201 bp, Homo sapiens
cgtagtaccccgtgaagatggccctgacctccatgttcttggccagggtcagcatccagcgcccattgcccaaggaatagagcttgccccggcttagctcrcccacctcctcgcctcggctgccccccttctcctgccgcagaatctctaagaggtcaaggcccgtctgcacggcctctacgtcagctgcacagccgaggg

SEQ ID NO: 125185 - DNA, 201 bp, Homo sapiens
aaagttacaggtaggttaactttgagtaaaaaaaaaaaaaaaaaaaatgtcacaaaacaaggatcaaacagagggcacgtttccctctccccttcccttcyaggggcataagtggtggtgagaacactcatatgatggtgcaggactgcaaggcgccccccttccggctaccttgcgtgggcacaggtttgcctttcccgt

SEQ ID NO: 125186 - DNA, 201 bp, Homo sapiens
gcataagtggtggtgagaacactcatatgatggtgcaggactgcaaggcgccccccttccggctaccttgcgtgggcacaggtttgcctttcccgtagtaycccgtgaagatggccctgacctccatgttcttggccagggtcagcatccagcgcccattgcccaaggaatagagcttgccccggcttagctcgcccacct

SEQ ID NO: 125187 - DNA, 201 bp, Homo sapiens
aacatgcacatttcattttaatgtctcattatacaaaacagttcattaagattaataagctgcctctctcctcaaaagataatcactacacttcaaagccrtaccttgttttgttttaaaactgattgtatccttgctgctgtccatttgcacaagcagtcagaaatttggatgcagcctatttatttattgttgagacag

SEQ ID NO: 125188 - DNA, 201 bp, Homo sapiens
attacatgtggggtgtactgtgtgtcttagtttaaacaaatttatatgtattgtccatgtcttacatatattgtccatgtcttactcctcgtagtacagaytaattttcaaaatagttagcagtaagcggaggcaagcattagagagaaagcttggcatagtagaaagtgcacaagctttgtattctgacaaacatgggta

SEQ ID NO: 125189 - DNA, 201 bp, Homo sapiens
tagagacagagtctccctgtgttttccaggctgttctcaaactaactcctgcactcaagcagtcttcttgtctctgtctcctaaagtgctgggattacagscgtgagacattgcgcccagcaaggttatttctgaaaaacaaagaaatacattttaaaatagcaaaggagaccatgaatgggatgtcttctctgaaggcca

SEQ ID NO: 125190 - DNA, 201 bp, Homo sapiens
agagaacccagccatgttaatgacatttttaaaactaccacacaattaattctgcattagtgtaggctgactaaagtttctgattgatgctttaattgctraaagttagactagttgacccaacgcagagatcttaagtgttcaacttggaagtatttagagagaaaatggaaatttttatagggcatctaatttggggca

SEQ ID NO: 125191 - DNA, 201 bp, Homo sapiens
tcggggttctggctgtggccccatccctggcttggcccagcctcgtcagctttggtccaggttcctgaatggtgcctccctgcccaccttgtgttgggagygtgagcattagaggggaagagggcggacaggaagggagggtcagttattttacaagtttttaaaaagttacaggtaggttaactttgagtaaaaaaaaaa

SEQ ID NO: 125192 - DNA, 201 bp, Homo sapiens
agatggtgaaaccccgtctctactaaaaatacaaagaaattagccaggcgtggtggcgggcgcctgtaatcccagctacttgggaggctgaggtagagaaytgcttgaacccaggaggcagaggatacagcgagccgagatagtgccactgcactccagcctaggcaacagagcaagactccgtctccaaaaaaaaaaaaa

SEQ ID NO: 125193 - DNA, 201 bp, Homo sapiens
aaagggtcagcgtcattagggtgatgaaccagttggtgtttggagatccggagtggatgaaaggcgcagggtgaagacgccctgcgttcccctggcttgaytgggcagggcttccagagaacgatgaaagctgggggaactgagctcaaagtgtctcttgactttcccgggaagaagctgtggacacactccaaggtcgga

SEQ ID NO: 125194 - DNA, 201 bp, Homo sapiens
gatggctagagtggaaggttttagaatcacaaggaatgtgatagcttttcctcctgctttgcaaggatgcttggtctttattagaaatggtttcaggactrcttgtatttacctaaaggtagatgtgatcatatagggtcggatgcctttaatatctaagagggtttttttgttttgtttttcccctcagtgaagatagat

SEQ ID NO: 125195 - DNA, 201 bp, Homo sapiens
gattttgatccaaacaatatcttcaaggcattctttggcggtcctggcggcttcagctttgaaggtaggtgggcctgctgttcttgggagttcccagatcmcaagccaacacactcattgcctcttaggcagctctttgggagtcagaggggcccatgagcgggggcagctgaattctcatctagcagggcatctatccac

SEQ ID NO: 125196 - DNA, 201 bp, Homo sapiens
ccagtctgggtgcagtagtgccatcttggctcactgcaacctctgcctccagggttcaagcaattctcctgcctcagcctcctgagcagctgggattacargcacccacccccatgcctagctaatttttatatttttagtagagacagggtttcaccatgttggccgggctggtcttgaactcctgaccgcaagtgatct

SEQ ID NO: 125197 - DNA, 201 bp, Homo sapiens
tttgttttgttttttgagacggagtcttgctgtgtcacccaggctggagtgcagtggcaccatctcgactcactgcaacctccgcctccagggttcaagtrattcttctgcctcagcctcccgagtagctgggactacaggtgtgcgccaccacgcccagctaatttttgtattttaagtagagacggcgttttaccatat

SEQ ID NO: 125198 - DNA, 201 bp, Homo sapiens
tgccaccatccccagctgtgataacttcttctaactggggtgggtagtttttcttttgataaattaaaggcaattccagaaatactgaatgttatggcaawacccacctaaatacatttcagtcattgtcaattcatttactaccttagaaaatggcctttgtacataaaagaagtcttagttatctccatgcttaatttg

SEQ ID NO: 125199 - DNA, 201 bp, Homo sapiens
gaataggtgctattcatggttcaaaaactagaaagtgttgccagatgcagtggcttatgcttgtaatcccagcactttgggaggccaaggcaggaggatcrcttgaggcgaggagttcgagaccaacctgggcaacttattgagaccctgtctctacagataatttaaaattttagctgagtgtggtgacgtgtgcctgca

SEQ ID NO: 125200 - DNA, 201 bp, Homo sapiens
aaacaaggatcaaacagagggcacgtttccctctccccttcccttctaggggcataagtggtggtgagaacactcatatgatggtgcaggactgcaaggcrccccccttccggctaccttgcgtgggcacaggtttgcctttcccgtagtaccccgtgaagatggccctgacctccatgttcttggccagggtcagcatcc

SEQ ID NO: 125201 - DNA, 201 bp, Homo sapiens
ccccttctcctgccgcagaatctctaagaggtcaaggcccgtctgcacggcctctacgtcagctgcacagccgagggtgatgtgggcgcggctcccccgcrgcaggttgtcagtgggtgacagcttgtccacatcactcggccacaactgcagttgctgctcgcttaactccacccgggccccagtcgtcttgggtgtcac

SEQ ID NO: 125202 - DNA, 201 bp, Homo sapiens
cggcgttttaccatattggccaggctgatctggaactcctgacttcgtgatccacccacctcggcctcccaaagggctggaattacaggcgtgagccaccrcgcccggccttttttttttttttttttttttttttaagactgagcccagtctgggtgcagtagtgccatcttggctcactgcaacctctgcctccagggt

SEQ ID NO: 125203 - DNA, 201 bp, Homo sapiens
ttacatatagacctaaagaaagttcatcagggttaatcatttgtcacatcattctatacccagggctatcagctatcaattttccttttttttttttttttaattcaggatccagctctgtcacccaggctggagtgcagtatcaaagtatcatttctcttacttcaaattattacattttattctgtacattgattctga

SEQ ID NO: 125204 - DNA, 201 bp, Homo sapiens
aggttgttttctgcatggaccgtgccctagaatttgcccctgcctgccatcgcttcaaaatcctcaaggcagaatgtttagcaatgctgggtcgttatccrgaagcacagtctgtggctaggtatgcagtcaggctagctggacattaaaatgccagataccattggactgatggtgtccggcagcttcaccacaggatat

SEQ ID NO: 125205 - DNA, 201 bp, Homo sapiens
gaacgaaactccatctcaaaaaaaacaaaaaacaaaaaaacagaaaactttcaggacagtaaacctgtgccactgaaggagaggcattcctgtcactgctrtgtgacactgcagaaagtcttctcagtgaaacagctggtaatgtggtagtgtttactgacttgctcatattttaaatttcagttttggaataggtgctat

SEQ ID NO: 125206 - DNA, 201 bp, Homo sapiens
gcagcttcaccacaggatatggtccccagagtaggccagctagggctgatcagaccctcttgggacttaaagtcaaagattagaccagctttgaaaacccrtagggtatacaggagtatagtagtatagcaggtacttgagctatatatgaaagaacagattgtgtttttgtggttttgtttgtttgtttaaggtagtcct

SEQ ID NO: 125207 - DNA, 201 bp, Homo sapiens
gccatgccaggcttcccaaaccagccctccgcccaaactctctgaccactgaggctcccaccagaagcctatgccacacacctccttcttgtccttggatktgtcaatctccttcttgagcagctccacacgctgaaaagactctctgctatctgtgctatagaccaggacgtagccatcagtgcaagagaagcagtgtcg

SEQ ID NO: 125208 - DNA, 201 bp, Homo sapiens
tgtggtatatttactgaattcaaattcatcaaggccttgttaatttttttgtggttgtttaatctacagcttcattaaaactttcctatgtctgattttcyggtgcagttcaagaatgctaatgcagtcatggaatatgagaaaatagcagaaacagattttgagaagcgagattttcggaaggtacagtacaaccatgag

SEQ ID NO: 125209 - DNA, 201 bp, Homo sapiens
gtaatcccagcactttgggaagccaaggcgggcagatcacctgagctcaggagttcaagaccaccctgggcaacatacaaaataccaaaaaaattgtactytctactaaaatacaaaaaaattagctgagcatggtggtgcatgcctgtggtccaagctactcaggagactgaggcaccaaaaactcttgagcccaggagg

SEQ ID NO: 125210 - DNA, 201 bp, Homo sapiens
aatcccagctactcgggaggccgaggcatgagaatcgcttgcacccaggaggcggaggttgcagtgagccgagattgtcccactgtactccatcctgggckacagagcaagactttgtctcaattaaaaaaaataataagaagaaagaaaaaagaaaaattagccaggtgtggtggtgcacacctgtaatcccagctactt

SEQ ID NO: 125211 - DNA, 201 bp, Homo sapiens
caatgaagcaagctgaagcagagaaagcttcctttggggcagcagttggaaggagaagggaacatgtcctaggagtgggatcaggtagcatgttttgcacrggatggggcaggtttgctcacttgcagtctgaagtgttgggaaaggaggggagtgagactctccaggaaagctttggagatctgttctcagtgtcatcag

SEQ ID NO: 125212 - DNA, 201 bp, Homo sapiens
gagtggctctgcctctgagatcactacaggggagacagcatgccctgttcagctggctgaatatttggcaacaatctcctgaagcagctggaattgacaaraagtactggagattagctcgggccaaacccttacatctggcctgactactgctgcagtctgcctcaacttacccctaaagctggggagatgccacccacc

SEQ ID NO: 125213 - DNA, 201 bp, Homo sapiens
ggaataacaacaaagacagttaaactgtgcccttgtcccctatgaattctcaatccagaccgcattcggcaaggcaagcgtgatgagtagagagtttatakaagaggtgggagtactggggacacaagagcaaggacctcaccccgcgagcttccttataaactccagggcagggtctggggcgccatgtgtcagctttcc

SEQ ID NO: 125214 - DNA, 201 bp, Homo sapiens
cggcgcggagaccaccgtggacatccgggggcgggaggccgctctggccccaagcggagcctctctctggtagacgagcccgagggagcccttctgggcgmggcgccgcggagctgctctatgctccaaccggaagtgctcttcaccgccggcctcccacccagctctctggtcccggcggtaagatggcggctgccgcgg

SEQ ID NO: 125215 - DNA, 201 bp, Homo sapiens
caaggcaggaggatcgcttgaggcgaggagttcgagaccaacctgggcaacttattgagaccctgtctctacagataatttaaaattttagctgagtgtgrtgacgtgtgcctgcagtcccaactactcatgaggctgaggcaggagaatcactggagtctgggaagtcgaggctgcagtgagccatgattgtgccactga

SEQ ID NO: 125216 - DNA, 201 bp, Homo sapiens
ctcctcttcccctgtccttcctgggtgatctttatccttcccagcactgttctttcttaagttaagcaccaaggaagagggcaactgcttgggcgctgttrgcactccgaagcagccgcagtggttcgagattgccagtcggactagccaagggagctgctgagtgagtggttttcgagaacgctctagattctggcaaca

SEQ ID NO: 125217 - DNA, 201 bp, Homo sapiens
ataattgatatttgttatatcaggagatgaaagatgaccaggatcattataccaacacttaccacatcttcaccaaagctcctgacaaattagaggaagtyctgtcatactccaatgtaatcagctgggagcaaactttgcagatccaaggtaactagtctgagttaaaagaaaaagatccatggtttattcctagccgat

SEQ ID NO: 125218 - DNA, 201 bp, Homo sapiens
gtttaattccaaagcccatgttgttaaccactgtgcttccttttgtattgattatggctatacacttacatatatacatgcatacatagatgtcatatttrctgagttttctaggattgcaaaaaatattaatggcttccttgcaaaccatcaaaatagtgtagaaaattttctatttgttggttcttggaaaatatggcc

SEQ ID NO: 125219 - DNA, 201 bp, Homo sapiens
ctttatgcttaacagtgacaacgtgagtcagttgaattttattgtgtttcagtccgtagagtattagctacagaaacctttccattgccatactgagaaastgcagcaggcagtgtgcctacaggtctacaaagaaacttcaggtaagcagaattatttagaacagcctttttatcttggcagttcaattaatttggattc

SEQ ID NO: 125220 - DNA, 201 bp, Homo sapiens
gtacatatacacagataaccattcacctatgcatctttatattattatttttttaatttttattttattttattttattttattttattttattttatttwattttattttttgagatagagtctcacactgtcacccaggctggaatgcagtggtgcgatatcagatcactgcaacctcctcttccttggttcaagcaat

SEQ ID NO: 125221 - DNA, 201 bp, Homo sapiens
gctcagagcacaaggcaggaacccaccccagactggacacctttccatcacagggcgcacacacacacacacacacacacacacacacacacacacacacagagtctcactcatcctgggacaatttagacagagaaaatccatgcagacatgaggagaacaggcaaactgcacatagacagtagtccagccaggaattga

SEQ ID NO: 125222 - DNA, 201 bp, Homo sapiens
ataaatgtttgcaaagcaaaagttgtaaggagcacctcttgcctctatgaagttaaaattcaatcacaaatatggtggcctcactgagtcctttggcacarcattgtttattgtcattcatttgtatgattatcatagacttcatgaatttttgttttattatgaatgtttcattcattcattcattcattcattcatttt

SEQ ID NO: 125223 - DNA, 201 bp, Homo sapiens
tgcttggtgttctacaactttcctgtactcagatactgatatctttctctggtatggggaagttctctgttattatttctttaaataaactttctacccctatctccatctctaccttctctttaaggccaataattcttagatttgccctttcaaggctattttctataacctgtagatgtgttttgttgttttttaatt

SEQ ID NO: 125224 - DNA, 201 bp, Homo sapiens
cttatgtttacatccttaaacatatctattattatttccttgggatgagtttcaggatgtggaattactgaataaaagagtttggtctatttttaaggttrctaacatataattccaattcctagatcttgccaatttctacttggtggtatcatcactaatcaacaattttttcttcctatggttttgttccttaggaga

SEQ ID NO: 125225 - DNA, 201 bp, Homo sapiens
cccttggaaagagcactccccagggtctcaatgttgagaatgaattcttcaaaaccttttaggtacctgaaactggaaatacttcagaaaaagccagtgcrtatccttttgaatttgtaaaatgtccaaatgctttccttgaattataagttatcaatatgcttgtacctttctctgacaccctctagatctccatagtaa

SEQ ID NO: 125226 - DNA, 201 bp, Homo sapiens
cccgtagaaaacttagcgttctgttacccacccactggcaaacatgaagtgactctgaaactgacaaacttctcaaaactctttctccctggagaggggcwaaacttcctggagatcttctctcttccaccatccccatatttacagatgatattactgtaatttcacaagcaagaaaaccaagtaaacaagagaacataa

SEQ ID NO: 125227 - DNA, 201 bp, Homo sapiens
tgtgggatcattctaatgtccacaatcctacctaaagctaagcctagaagatgattcaaactttgctcctctaggcaacacaaggtaagtgaagtgtgaamgttgctttgtgctgcacttggccagcctctggactctagctttattaagagaagatgacagttgccaaaaaagtaacttgttgctaaaaatttaccaaag

SEQ ID NO: 125228 - DNA, 201 bp, Homo sapiens
agaataactggaaagttgtaaaaaatatgttggcattagtggttgcttctagacaaagtaactgggtaatatgagatcagagaaagaagagagatttgctytcctctagtaatccatttatgctttatatttgtattactaattgaaaaaataaatagaatttaaacacacactcacagatacatttgatttagccagaaa

SEQ ID NO: 125229 - DNA, 201 bp, Homo sapiens
tttattttattttttgagatagagtctcacactgtcacccaggctggaatgcagtggtgcgatatcagatcactgcaacctcctcttccttggttcaagcrattctcctgcctcagcctcctgagtagctgggactactgacactcaccaccacacccaggtagttttttgtatttttagaagagacggggtttcactatg

SEQ ID NO: 125230 - DNA, 201 bp, Homo sapiens
acttggtggtatcatcactaatcaacaattttttcttcctatggttttgttccttaggagaaaagggactacacacaatatagtctgcaagatttttttttcagaagattatattctttcttgatagctgaaaatagtacccatgctatgggaacattagagcaagtgtttcaatgcttgggggtggtgggctctccagag

SEQ ID NO: 125231 - DNA, 201 bp, Homo sapiens
tttttgttttattatgaatgtttcattcattcattcattcattcattcatttttcaactggctttttccagttcaggggagcaagtgactgaagcctgtcytggtagctcagagcacaaggcaggaacccaccccagactggacacctttccatcacagggcgcacacacacacacacacacacacacacacacacacaca

SEQ ID NO: 125232 - DNA, 201 bp, Homo sapiens
tacccactggttgccagactaccaaccagtgttctcttaaggcctaagggctcttaaatcagcttgtagtaaagtctacctggcctgggactcacctttcmgggcagtgggcttccttctggcccagggaaggtccagaaatgctgttcaagagctaagtcctgcaattggggatgtcaagagcccacttgctgctctacc

SEQ ID NO: 125233 - DNA, 201 bp, Homo sapiens
gggtgctgctgtaggttattcagggctcagggtatcttctaccaggtgatgaatgctgtgaggactggatcctttttttcaatgcagagagttcccttccrgcccagcaaatgtctagaaatgttgtctgggagctggggcctggaacgggggcctcacaactctatttggtgccttatcctgttgtggctgagctgatat

SEQ ID NO: 125234 - DNA, 201 bp, Homo sapiens
aacctaaacatccagtaatggggaaatggataaatttattatgggacattgaaacattagaatactatgcagccattaaaaagaatgaagtagctctacaygacagattataaaatatttccaaaatagattgctacatgaaaaaaaataaggtggatagaacaatgtatataatatgctaccatttgtgtaaataaacaa

SEQ ID NO: 125235 - DNA, 201 bp, Homo sapiens; identical to SEQ ID NO: 21227

SEQ ID NO: 125236 - DNA, 201 bp, Homo sapiens
tagggtccttaaggaaaggaatggtgttatatttattttttgaaattccagtgtttggtaatattggctgaataaatgtaaaattctttttcttcacaggraaggaaacttttcaaacatgttcttagatgcttcacatgcaggtcttgtgaatgaacactgggcctttgggaaaaatgagaggagcttgaaatatattga

SEQ ID NO: 125237 - DNA, 201 bp, Homo sapiens
caagatttttttttcagaagattatattctttcttgatagctgaaaatagtacccatgctatgggaacattagagcaagtgtttcaatgcttgggggtggkgggctctccagagggacaatccctgaagagatgcattattttttatttgtgcctggacagctgaaggcattcactctccatattcttttactggtttgaa

SEQ ID NO: 125238 - DNA, 201 bp, Homo sapiens; identical to SEQ ID NO: 21226

SEQ ID NO: 125239 - DNA, 201 bp, Homo sapiens
ccgtctagcagcataactctcaatgagtagcccaatgagccatcctggaagcactggcccatcctaagtcctcctatacttcttgtccttatttctcatgycatgtcttatttctccacatataagactctatattggagaagaacttcatcctctcctgctttgttctgttgcatcgtaggtatatggcgccattttcaa

SEQ ID NO: 125240 - DNA, 201 bp, Homo sapiens
cactgctaatagtgtatgatgtccctggtgacttctccttcctcttctttctggacacctatcatatctctctaggtatttttgtttttgtgtttatttcyttagatcatcttcttgagggaaagaagctgaagtgctacataagatgcttgtgcttcataactctcagaagctgcagattctgtataaatccttagaaaa

SEQ ID NO: 125241 - DNA, 201 bp, Homo sapiens
ctgagttaaaagaaaaagatccatggtttattcctagccgatatggaaggcataaagtggtacttgtctttctcctttctccaggttgccaagagggcttrgatgaagcaataagaaaggttgcaacttcaaaatcagtgcaggtagattacatgaaaaccatcctctttataccggaattaccaaagaaacacaagacct

SEQ ID NO: 125242 - DNA, 201 bp, Homo sapiens
ttcttcacagggaaggaaacttttcaaacatgttcttagatgcttcacatgcaggtcttgtgaatgaacactgggcctttgggaaaaatgagaggagcttkaaatatattgaacgctgcctccaggattttctaggatttggtgtgctgggtccagagggccagcttgtctcttggattgtgatggaacagtcctgtgagt

SEQ ID NO: 125243 - DNA, 201 bp, Homo sapiens
ctcaacacaggtattctgaattctctctctgaagggtcacatatctccatttctccaggattggtcccaggtgtcttattaagttgatttggtgaggtccmattcttctcaatgctgtagatgctagtagatgttcttcagtgtctgagcactgaagagttaggtgtttgctctagtcttcactgtctgggcttatttgta

SEQ ID NO: 125244 - DNA, 201 bp, Homo sapiens
ctgacaaattagaggaagtcctgtcatactccaatgtaatcagctgggagcaaactttgcagatccaaggtaactagtctgagttaaaagaaaaagatccrtggtttattcctagccgatatggaaggcataaagtggtacttgtctttctcctttctccaggttgccaagagggcttggatgaagcaataagaaaggttg

SEQ ID NO: 125245 - DNA, 201 bp, Homo sapiens
gtaccccttggtggtttgtattatactcaccaagcgatcttctccagaaatcaaggtaaggggtgtctttaagaatttttaaattattctcttaacctaayttttacgaaggtcatggtggtagctataagggaggagtgtaacttatttttcatagttggaagaaatcgggaatttggtgagtcatactacataaggagc

SEQ ID NO: 125246 - DNA, 201 bp, Homo sapiens
gtgatttgaatattgaggacaagcaggtgggggaagcatgttacagaacattatttttatcatacttttataagatattgttctcagttacagatgcaacycaaagactcagaaaggtaaagtgacttgactaaaggggctaaaagtgagattgccaaggcttgtggattctaagcctaatgttctggtattgcttcacag

SEQ ID NO: 125247 - DNA, 201 bp, Homo sapiens
attgtttattgcaacttataaaatgcctcttttcagcagggcaaggtggctcacacgcctgtaatcctagcactttggaaggccacggcaggcggatcacsaggtcaggagaccaagaccaatcctggctaacacggtgaagccccgtctctacttaaaaatacaaaaaattagccgggcgtggtggcacacacctgtagt

SEQ ID NO: 125248 - DNA, 201 bp, Homo sapiens
taagatgtagtgaggtaaatctccattgcttgcgctgcttacgcaaattttagttctgagtgccaaaaaagatggaaataatatttgagagtaggtgttayataaaagtttctgtggaatggatccgttttggtggatatcattatacaaccttcatactgtttataactggtaagtaagtatttcaactttcaggatgat

SEQ ID NO: 125249 - DNA, 201 bp, Homo sapiens
atttagttgaattgagggagtaaagtaagatttttgtctccttttccttgcagggatataactggtgccatgaccggaatgtagtaacgattttcagtgcyccaaactattgttatcgttgtggtaaccaagctgcaatcatggaacttgacgatactctaaaatactctttgtaagtaattctacctgaacattttcttg

SEQ ID NO: 125250 - DNA, 201 bp, Homo sapiens
ctacccacctaaatgcctgatttgaaggggaaatatttaaatagtaaaaatagatgtataccataagaggtcattgttactaaaaaatcctgaggccattwttttgttatcccatcaacaattaacagtgttacatgttcagaactgagagaatctaagtatgcatttataaaagacaagagtgaacatggtttttatgtt

SEQ ID NO: 125251 - DNA, 201 bp, Homo sapiens
tataattattatatcttccctccattttgtgatggtggtgagccaagtaatctgcatcaagagaaaataaataacacctacattaatgctaccaacaaggrgctcacagtactttggaaaaactcataattttagcacacagtgggtgttcaatacttcatcatctatcaaactaacatcaccacaccctttccaggtaag

SEQ ID NO: 125252 - DNA, 201 bp, Homo sapiens
gttgtgggatttctgaatccaaaccagaatgctgagaggacattggtaataagatagtgtcctcagtggtgcatgcctgcagtcccagctactcgggagamtaaggtgggaggattacttgagcttgggagatcaaggctgcagtgagccgtgatggtgccgcactgcagcctggacaacagagcaagaccttgtctcaaa

SEQ ID NO: 125253 - DNA, 201 bp, Homo sapiens
tcaactgaaagtcaccagctacattagcctctaacaagagtcagcctgtccgttgagggtttgagggcaggcattgacttctctagctagtaaagtcctargtggcatcttcttccactagaaggctatttcgtctacattgaaaacctgttgtttagtgcaaccaccttcatcacttatcttaggtagatcgtctgggaa

SEQ ID NO: 125254 - DNA, 201 bp, Homo sapiens
agtgctgggattacaggcttgagccagcgcgcctggccaaaacattatttttattttcattgcttgaaagcttcctattcatgttacatactgttgttcckctttgtcttggaaagagtaattattattcagttttggatgtagctgacaacatttgcccctcaaatgagattggtgagatgaaaaccctagataatttcc

SEQ ID NO: 125255 - DNA, 201 bp, Homo sapiens; identical to SEQ ID NO: 21231

SEQ ID NO: 125256 - DNA, 201 bp, Homo sapiens
aatggcatctctgggtgaaagctacatatgtgctttttggtgtgattgccttctaaagagtaattttgaaaatttgagggctaatttttttcattagtgtrtaataatagtattttttgagaaaaaagatacttgttaatagttgataatttcttcaatcataagaaggaatgataatgtaaaagccttccttctacccac

SEQ ID NO: 125257 - DNA, 201 bp, Homo sapiens
acttttaagtcagtagttggccagttgactagtcttttgaagaaaacgtggaaaggagggaggtgatgacgtaactggaagactggactgcgagttagatwtggacatgagtccttctgctcttccttgagtaattgtgacagactttgggacagccacttcacttgtccttgttttcctgtctataaactaaaatgtgtt

SEQ ID NO: 125258 - DNA, 201 bp, Homo sapiens
tagagtgttggggttacaagtataagatacagtgcccagcctgaatacatagtttaaatgtgaggtttaagagtttaagggggccaggcgcggtggctcaygcctgtaatcccagtactttggaaggctcgggtggatcacctgagatcaggagttcgagacaagcctgaccaacatggtgaaaccccttctctactaaaa

SEQ ID NO: 125259 - DNA, 201 bp, Homo sapiens
cgagttagtatgaaactttaggacacaaaatgagatgccagtcaattataagtaagaggtctgtgtgggtaaaaactgaaaggtaatagaaatgagaagarttctggttggtaagaataagatagttatatatcttaaagctttcagtgaaatcttaaccttttaattttttttttagcctttttttgttagttttgagag

SEQ ID NO: 125260 - DNA, 201 bp, Homo sapiens
tggtagaccaggctgaagaagggagaggtgtctattgtcagtaaatggctgagaggtggggtttgaaagaatggtaaagaacaacctgagattaactgctttttttttttttttttttttgatacggagcctcgctctgttgcccaggccagagtacagttgcatgatctcggctcactgcaacctttgtctcccacgttc

SEQ ID NO: 125261 - DNA, 201 bp, Homo sapiens
caataattctcatgccacagcctcccaagtagctgggattacaggcctgtgccatcttacctggctgatttttgtatttttagtagagatggggttttacygtgttggccaggctggtcccaaactcttgacctaaagtcatccacctgctttggctcccaaagtgatagaattacaggcgtgagccactgtgcctgggct

SEQ ID NO: 125262 - DNA, 201 bp, Homo sapiens
gtactaattacattcttttttttcttttttgggatggagtctcgctttgtcacctaggctgtagtgcagtgacatgatcttggcccattgggttcaagtgrtgcccctgcctcagcctcctgagtagctaggattacaagtgtgtgccaccattcctggctttttagtagagctggggtttcactatgttggtcaggctgg

SEQ ID NO: 125263 - DNA, 201 bp, Homo sapiens
aaaactttatcttaatttttttcccagatgttgaccatattagctaagaaatttgaggtcctggaaaaatgttttaggggaagcaaaaggtttggtatgcrtgttttgcttttgcttgtctttcagttcttaattcaggtgatatgagactttacagaagtcaaaatgccagagtaaaaaggtggttattaaaaataaaaa

SEQ ID NO: 125264 - DNA, 201 bp, Homo sapiens; identical to SEQ ID NO: 21236

SEQ ID NO: 125265 - DNA, 201 bp, Homo sapiens
caagaagttccccatgaggtatgacttttatttgataaaattctttcagaaaacttattagggagtggagaagtttaattgtaagttcattagatgtattstctcatataattctcaaaaacaacttgaggtgtgagcactcttgtctgccctgttgttcaaaagaagctgacattaagaaacctgccaagatcacaacag

SEQ ID NO: 125266 - DNA, 201 bp, Homo sapiens
aaaatgttagttttaacatttgttacgtgagtatggaaaaaacaaactgcttccttctaattagatgagctgaaaaatatttgaccaagatgacattcttrtatgaattgggtaatatgttgctgtgagtatgtgtgtacgtttcattttaaagggtgtttggctcatttctctagaagtgatttgaatattgaggacaag

SEQ ID NO: 125267 - DNA, 201 bp, Homo sapiens
ttgactagtcttttgaagaaaacgtggaaaggagggaggtgatgacgtaactggaagactggactgcgagttagatttggacatgagtccttctgctcttmcttgagtaattgtgacagactttgggacagccacttcacttgtccttgttttcctgtctataaactaaaatgtgttctgagattatacagtcaattccgt

SEQ ID NO: 125268 - DNA, 201 bp, Homo sapiens
aaatgaatgtatattgccaggtcttaatttctaggtactgtacatgatgatcttaccgatttttggaattcagtgcattatatgaaagacttttaagtcartagttggccagttgactagtcttttgaagaaaacgtggaaaggagggaggtgatgacgtaactggaagactggactgcgagttagatttggacatgagtc

SEQ ID NO: 125269 - DNA, 201 bp, Homo sapiens; identical to SEQ ID NO: 21232

SEQ ID NO: 125270 - DNA, 201 bp, Homo sapiens
atgaggatgtgtgctgttttttcaacaaaattgtaactgcatttttttctatagaaagtttcttgaattttcattggtttttgaaagagctagttgtttaygttttgcattttattgttttaggttcgttaccgtgaacgcatcaccattcttcgagggaatcatgagagcagacagatcacacaagtttatggtttctat

SEQ ID NO: 125271 - DNA, 201 bp, Homo sapiens
tttttgactatcttcctctcactgccttggtggatgggcaggtatgtggatctaaaactcattgctgattatttcagagaatctgctttctttagtgttcmggtgcttatgactctttccactcttaacacccctttggggttattttttaatagatattgatagcattcattcaaacttaaaaaaaatttaatttgacaa

SEQ ID NO: 125272 - DNA, 201 bp, Homo sapiens
aggctggtctcgaactcctgacctcgtgatctgcccacctcggcctcccaaagtgctgggattacaggtgtgaaccatgatgcctgtccctccccccggctttttttttttttttttgagatggagtcttgctgcgtcacccaggctggagtgcggtggcatgatttcggctcactgcaacctccgcctcctgggttcaag

SEQ ID NO: 125273 - DNA, 201 bp, Homo sapiens
gtatgtggatctaaaactcattgctgattatttcagagaatctgctttctttagtgttccggtgcttatgactctttccactcttaacacccctttggggwtattttttaatagatattgatagcattcattcaaacttaaaaaaaatttaatttgacaaatgtgtccaacttttttaagtgcattattctttatatcagg

SEQ ID NO: 125274 - DNA, 201 bp, Homo sapiens
gaggtgggcagagttgcttgagcccaggaggtcgtggctgcaatgagacttgatcttgccaccctacactctaacttggggaacagtgagaccctgtctcaaaaaaaaaaaaaaaatatcgaggaagaagttcaagaaaaaaaagaatttttctgagaaattcaagaaaacatttgctgtaaatatttaacagagaatatt

SEQ ID NO: 125275 - DNA, 201 bp, Homo sapiens
gggcttctggggcataaaaggccttggtacaaagagcatgttatccttttcaactatggcacccttttcagatgtaagattctgagctgacaggagcatgrgaccgattgtattaattcttggatttagtcctaagtaactttttctctatataacaagtctaaatggatggcaaggcaagagaggagttgttctgtttat

SEQ ID NO: 125276 - DNA, 201 bp, Homo sapiens
taaatgcctgatttgaaggggaaatatttaaatagtaaaaatagatgtataccataagaggtcattgttactaaaaaatcctgaggccatttttttgttawcccatcaacaattaacagtgttacatgttcagaactgagagaatctaagtatgcatttataaaagacaagagtgaacatggtttttatgttactgactag

SEQ ID NO: 125277 - DNA, 201 bp, Homo sapiens; identical to SEQ ID NO: 21238

SEQ ID NO: 125278 - DNA, 201 bp, Homo sapiens
gagattgtattccagacattgtgcttagtgtttaaataatgtctcacatacactgaaaatagaatgttgtagtccacttagtaacactaaactttatattrgctaattcccttttgttttcccctgggggttggggaaacaggtagttaatttagctattagctttgtgttgtatttttaaattcttgtaactcagttttc

SEQ ID NO: 125279 - DNA, 201 bp, Homo sapiens
gaactcctaggctgaagtgatcctttcaccttggcctcctagagtgttggggttacaagtataagatacagtgcccagcctgaatacatagtttaaatgtkaggtttaagagtttaagggggccaggcgcggtggctcacgcctgtaatcccagtactttggaaggctcgggtggatcacctgagatcaggagttcgagac

SEQ ID NO: 125280 - DNA, 201 bp, Homo sapiens
gtggatcacgaggtcaggagatggagcccatcctggctagcacggtgaaaccccgtctctactaaaaatacaaaaaatttagccaggcatggtggtgggcrcctgtagtcccagctgctcgggaggctgaggcaggagaattgcttgaacccagcaggcagaggttgcagtgagccgagatcgtgcccctgcactccagcc

SEQ ID NO: 125281 - DNA, 201 bp, Homo sapiens
ttaccgatttttggaattcagtgcattatatgaaagacttttaagtcagtagttggccagttgactagtcttttgaagaaaacgtggaaaggagggaggtratgacgtaactggaagactggactgcgagttagatttggacatgagtccttctgctcttccttgagtaattgtgacagactttgggacagccacttcact

SEQ ID NO: 125282 - DNA, 201 bp, Homo sapiens
ttgaacccagtccttgtcatctgtggttgtcatggctcattagcaacaattctctggtaatttgttttggtatcttatgtaaagtggtctctcccagtttycctctctctttcctttgtgacacttaacacagtgtacttttggcttggttacttgtttgtggtccttctcccctctacggtagtgggaatgagccatctt

SEQ ID NO: 125283 - DNA, 201 bp, Homo sapiens
tacggctgcggacagccgccgcggggccgagcccgccgaggaaaaggcggccgtgaggagggtgcaacatggcggaggccgccggtccgggccccccgagyctccgagaccggcgcccatcctggccggcggcggcttcctaacgacccggcgccccctgcctcccgcgcagggattggttgccgccgccgcctaaaatgg

SEQ ID NO: 125284 - DNA, 201 bp, Homo sapiens
cagtccttgtcatctgtggttgtcatggctcattagcaacaattctctggtaatttgttttggtatcttatgtaaagtggtctctcccagttttcctctcyctttcctttgtgacacttaacacagtgtacttttggcttggttacttgtttgtggtccttctcccctctacggtagtgggaatgagccatcttgttcacc

SEQ ID NO: 125285 - DNA, 201 bp, Homo sapiens
tgtgggtcatcgtcagggacggttttgagggtgagctggcttggattctgcggcttgggaatggagcctgggcctctccggtgggctgagtaagagtcttkccgctggtacccaggcctagttaggtccagagctgcccagaggatcccccaaaggcagtcttgttaggccgtatcccagaacatacctaaaggtcacaca

SEQ ID NO: 125286 - DNA, 201 bp, Homo sapiens
ttggaaatcaagtgtcggttgaatatgatttatatgctgactcaaagccttctctaagcttaacacacttggcattttgccgtttatttttaaaatgaacmacataaaatggaagagcggtaaattttgtatctttgttgcaaaaattacttgatagtattttgtggctgcaagtagtagtagtgataataactgtcgact

SEQ ID NO: 125287 - DNA, 201 bp, Homo sapiens; identical to SEQ ID NO: 21233

SEQ ID NO: 125288 - DNA, 201 bp, Homo sapiens
gagctgcccagaggatcccccaaaggcagtcttgttaggccgtatcccagaacatacctaaaggtcacacagctttagtaccccttggtggtttgtattawactcaccaagcgatcttctccagaaatcaaggtaaggggtgtctttaagaatttttaaattattctcttaacctaatttttacgaaggtcatggtggtag

SEQ ID NO: 125289 - DNA, 201 bp, Homo sapiens
cagtctattagcattgtccacaaacatcactcaaaaagggtggcttagggtgctgcttctgatgaattactcaaataatgtgttaaccatgtttgtaaaargcattttataacttgaagttattttttagggtccaatgtgtgacttgctgtggtcagatccagatgaccgtggtggttggggtatatctcctcgaggagc

SEQ ID NO: 125290 - DNA, 201 bp, Homo sapiens; identical to SEQ ID NO: 21234

SEQ ID NO: 125291 - DNA, 201 bp, Homo sapiens
agatccccttctgttttcagaggtagtgttagtagtgaaagatgtaggtaaattggggccaagctaaattgggaagtcaacactttcataaaataaaacttttttttttttttttttttgagataaggtcttactcttttgcccagtctggagtgcagtggcgcaatctcggctcactgcaacctccacctcccaggttca

SEQ ID NO: 125292 - DNA, 201 bp, Homo sapiens
ctggttgtgacagcgatggtctattaggaagaacaggagtgtactcaatagttcagagtgggctggagcaaagatgaaccctgcaaagtcaagtctcattmaggcagagcacagaaacaccagaggggccaagtgatgggggtgcccagctcattttttaaaatttttgtagagacacagggtcttgctgtgttgctcagg

SEQ ID NO: 125293 - DNA, 201 bp, Homo sapiens
agaaattccatctattccttctgatgagtttatcattatagcctgagccttttcagtagatgcacactactagaattaaaagctcaagcttttgattacartgaatccattaacatgttttcagagaaatctgaatgactaggaagtacttgagatttaagagtgggaaagtaagatatagggagttggtgtgcatgtatg

SEQ ID NO: 125294 - DNA, 201 bp, Homo sapiens
gttggccaggctagtctcgaactcctgaccttcagtgatccacccacctcagcctcccaaagtgctgggattacaggcttgagccagcgcgcctggccaaracattatttttattttcattgcttgaaagcttcctattcatgttacatactgttgttccgctttgtcttggaaagagtaattattattcagttttggatg

SEQ ID NO: 125295 - DNA, 201 bp, Homo sapiens
ttaaattagtagtgtgtttaatattgaacatctattgaatatctaagattgcatactcttttgagggaaatgaaaagcaatgaagaataagtatgcttatmgtcgaggagctatgaatctagtttgaaagaaaagcatggtatgaaaaggtgtgggagatggagcatggaagtagagggtttgtgttggaaactgttgtag

SEQ ID NO: 125296 - DNA, 201 bp, Homo sapiens
gtggtagaccaggctgaagaagggagaggtgtctattgtcagtaaatggctgagaggtggggtttgaaagaatggtaaagaacaacctgagattaactgctttttttttttttttttttttgatacggagcctcgctctgttgcccaggccagagtacagttgcatgatctcggctcactgcaacctttgtctcccacgtt

SEQ ID NO: 125297 - DNA, 201 bp, Homo sapiens; identical to SEQ ID NO: 21237

SEQ ID NO: 125298 - DNA, 201 bp, Homo sapiens
tgagaccctgtctcaaaaaaagaaaaaaaaagaatctttgagtgctgcattgtagttagaactctgaaggtaaggaagtagatacctgaatgtcctgttcsattttcattggttttatgtgacagctaacaattagtatttaattagatggctatttgataggtttttaaaaaactcctggtattgatgataggaatgcat

SEQ ID NO: 125299 - DNA, 201 bp, Homo sapiens
tcagttgaaacagttacactgcttgtagctcttaaggtaatttcaattttatgttggggcatgttgaaatgggtaagacagtcctcttgaaagtttttttycccccagttattttctctatctgaatgttaaaacaaaattccacatttaggaatgcatatgttcaggttttggacttaaaaatcataggcgtctgcgttc

SEQ ID NO: 125300 - DNA, 201 bp, Homo sapiens
gaccaaaacaacaacaacaaaacaaccaaaatcatgcttaaaactggttctttccaaggttgcatttttgttaagatctacttaatagttgattggatgatttttttttcccccctccggtctgagggatggttgcttctactgtataccactgttatcgccagtatttaattatatttgttctggtctgtgaagtttggt

SEQ ID NO: 125301 - DNA, 201 bp, Homo sapiens; identical to SEQ ID NO: 21251

SEQ ID NO: 125302 - DNA, 201 bp, Homo sapiens
tgcttttgtgacaaggacagaggccaagcctgttgttaaatgattatttccaacaacagcctgcttaaattattgtttagttatatggcccatatccaaartaacagtattacatagttgctgttgcctttgaatcactcaccaattttcagcccatttgtaaaacaagataagcaccactggattataaaaaataattat

SEQ ID NO: 125303 - DNA, 201 bp, Homo sapiens; identical to SEQ ID NO: 21253

SEQ ID NO: 125304 - DNA, 201 bp, Homo sapiens
gaacaaaaagaaagttatctacctccctcagcacagagaactagaaaggatacaacaaaagtttcccagaacattactcaaacaactgagaccaaccatascaaatatccttacttgaataaacaacagatagcagcaaaagacaaacagctaaaagctattgtagggctcaacacacaaccaatagctctcagcttatgt

SEQ ID NO: 125305 - DNA, 201 bp, Homo sapiens; identical to SEQ ID NO: 21252

SEQ ID NO: 125306 - DNA, 201 bp, Homo sapiens
tctccagccaggagagaaagctaccaccgaggcgcccagccgccccctccactcaagcgcgatgcattaatttattgtccgcgccgtggcgagggtgagasgagcagctcccggcggggtccggggaccggccgccgaaccgcccggcggggcgggagcgagaaaggcggaaaagcccgggagagtcagcgcccgggagcc

SEQ ID NO: 125307 - DNA, 201 bp, Homo sapiens
acattaattttttttctaacatcgatgaaaaactttatctaagttgaagaaaaatcacttcaaaactaacttttctatttgtaatttggtgcttaaataartccaaagaatgtttttcaaaatgatacacagaaaaaatgtttaccaagattctctcatatttcttccaccttaacttgctataattaatcttttctaatt

SEQ ID NO: 125308 - DNA, 201 bp, Homo sapiens
aaaagaaagttatctacctccctcagcacagagaactagaaaggatacaacaaaagtttcccagaacattactcaaacaactgagaccaaccataccaaawatccttacttgaataaacaacagatagcagcaaaagacaaacagctaaaagctattgtagggctcaacacacaaccaatagctctcagcttatgtaaact

SEQ ID NO: 125309 - DNA, 201 bp, Homo sapiens
gaatgagaatcgaactgaattttgctcagtataattactggggaaacaatattcaaaacaacctcctaaaggaaagggttaacaatcttgtagctttaacygattatttttgctcctttctcccgcaaaagaattacacctatgaaactggaattctgtacactaagaatggcaacattaacgctgaaacttttagccagg

SEQ ID NO: 125310 - DNA, 201 bp, Homo sapiens
cgccggggaagcgccggcggaactgggcgcggagggcggtggcgcgtccccgcgcatcctgcggctcgagctcctccgaaggcgggggcgcggggcccctyccgcagtcctggggacgacaaaagtctcctggcactgggggcaagagaccagaaaaaggagtgatgggaattcgaggctctccccggccttggaaaaccc

SEQ ID NO: 125311 - DNA, 201 bp, Homo sapiens; identical to SEQ ID NO: 21249

SEQ ID NO: 125312 - DNA, 201 bp, Homo sapiens; identical to SEQ ID NO: 21248

SEQ ID NO: 125313 - DNA, 201 bp, Homo sapiens
ccttgatgccctgctgctgggtggtaagggttaacttggattcatccaggagcaaaacttcgcagtaaaattcttccggaacagcgcagaaacagcccatrtcggttgtggtcgtctccagccaggagagaaagctaccaccgaggcgcccagccgccccctccactcaagcgcgatgcattaatttattgtccgcgccgt

SEQ ID NO: 125314 - DNA, 201 bp, Homo sapiens; identical to SEQ ID NO: 21250

SEQ ID NO: 125315 - DNA, 201 bp, Homo sapiens
acacaccatttataaatatgcaaatatatttaatttagtacacgccaagggtgggtaggtgtttaacacatacacttttaaggtagcatagaagataatgkgattagctttagcagacaacatctgtgttacacacatggccatcaaaataattgtggcatgcttttgtgacaaggacagaggccaagcctgttgttaaat

SEQ ID NO: 125316 - DNA, 201 bp, Homo sapiens
cacattccagatgactttagactccagataatttagactttgcacttcaaaaagatttctttactgtcttagtatctgatcatcagttacctttttctaaytgtttctatctcgacacaagaatctatatattatctacaatttaggatgtttttgtgatttttgcctattttattcatacagtacaccaaagaatgttac

SEQ ID NO: 125317 - DNA, 201 bp, Homo sapiens
tatctacctccctcagcacagagaactagaaaggatacaacaaaagtttcccagaacattactcaaacaactgagaccaaccataccaaatatccttactygaataaacaacagatagcagcaaaagacaaacagctaaaagctattgtagggctcaacacacaaccaatagctctcagcttatgtaaacttgagttttta

SEQ ID NO: 125318 - DNA, 201 bp, Homo sapiens
aagatagttaatatcaaataataaccttaaatcctaaattatgacaagtctgtttacaagcatttatttcatttcatttatctgattaatagtttacgtakattatttacaaaaaccatgatagtcaaatattcaaagttatttttctattaatcatttttatacctgtgaatttcaggtatttacctaagtaataaaatg

SEQ ID NO: 125319 - DNA, 201 bp, Homo sapiens
tacagtgagctgagatagtgccattgcactccagcctgggcaacagagcaagactccgtctcaaaaaaaaaaaaaaaaaaaaatcaatctgaagaatgttraagagatagattagagaagttaaaaatttaaaaatgtcttgcattaaaagtaagtcaatatttgtaataaaatcttgttttaaccaattatttagttctg

SEQ ID NO: 125320 - DNA, 201 bp, Homo sapiens
aacctgagaggcagaggttacagtgagctgagatagtgccattgcactccagcctgggcaacagagcaagactccgtctcaaaaaaaaaaaaaaaaaaaaatcaatctgaagaatgttaaagagatagattagagaagttaaaaatttaaaaatgtcttgcattaaaagtaagtcaatatttgtaataaaatcttgtttta

SEQ ID NO: 125321 - DNA, 201 bp, Homo sapiens
cggccagatcacctgaggtcaggagtttgagacctgcctggccaactggtgaaaccccatctctactaaaaatacaaaaaattagtcagccatgatggtgsgtgcctgtaatcccagctacttgggagtctgaggcagaaggattgcttgaacctgagaggcagaggttacagtgagctgagatagtgccattgcactcca

SEQ ID NO: 125322 - DNA, 201 bp, Homo sapiens
gactatactacaaggctacagtaaccaaaacagcatgatactggtaccaaaacagagatatagactaatggaacagaacagagccctcagaaataatgccrcatatctacaactatctgatctttgacaaacctgacaaaaacaagcaatggggaaaggattccctatttaataaatggtgctgggaaaactggctagcca

SEQ ID NO: 125323 - DNA, 201 bp, Homo sapiens
acttacaagggatgtgaaggacctcttcaaggagaactacaaaccactgctcaaggaaataaaagaggacacaaacaaatggaagaacattccatgctcaygggtaggaagaatcaatatcgtgaaaatggccatactgcccaaggtaatttatagatttaatgccatccccatcaagctaccaatgactttcttcacaga

SEQ ID NO: 125324 - DNA, 201 bp, Homo sapiens
ctaggaatccaacttacaagggatgtgaaggacctcttcaaggagaactacaaaccactgctcaaggaaataaaagaggacacaaacaaatggaagaacaktccatgctcacgggtaggaagaatcaatatcgtgaaaatggccatactgcccaaggtaatttatagatttaatgccatccccatcaagctaccaatgact

SEQ ID NO: 125325 - DNA, 201 bp, Homo sapiens
tatttgctatttatatattattatatatgttaaggctaacagaccaggagatgactgctattgagaaaagtttgttgttcacagatccaaataggaatggrcatgccatgttactggaggatagagtgtggtacatggaaagcaccaaggtcttcggatcttcgtatgaggcagggcaaacaagttttggattggttagtc

SEQ ID NO: 125326 - DNA, 201 bp, Homo sapiens
aattaggaaaagaggaagtcaaattgtccctgtttgcagatgacatgattgtatatttagaaaaccccatcatctcagcccaaaatctccttaagctgatwagcaacttcagcaaagtctcaggatacaaaatcgatgtacaaaaatcacaagcattcttatacatcaataacagacaaacagagagccaaatcatgagtg

SEQ ID NO: 125327 - DNA, 201 bp, Homo sapiens
gactatggtatgtgaatgttttaataagttttattatttgtatttgctatttatatattattatatatgttaaggctaacagaccaggagatgactgctaytgagaaaagtttgttgttcacagatccaaataggaatgggcatgccatgttactggaggatagagtgtggtacatggaaagcaccaaggtcttcggatct

SEQ ID NO: 125328 - DNA, 201 bp, Homo sapiens
aataaagggcattcaattaggaaaagaggaagtcaaattgtccctgtttgcagatgacatgattgtatatttagaaaaccccatcatctcagcccaaaatstccttaagctgattagcaacttcagcaaagtctcaggatacaaaatcgatgtacaaaaatcacaagcattcttatacatcaataacagacaaacagagag

SEQ ID NO: 125329 - DNA, 201 bp, Homo sapiens
tcagaataaatcaaagaccttcaaccaaaacaggaggtccagggctcaggagaacttaccattttcactggaggagaatctcgaactcagtcaggcttcartggaccccagctggtaccatagctctggtttcaggcaactccttctgggtcctgagtcttctctgaagccctacgtttttggggcaccaaattattgtca

SEQ ID NO: 125330 - DNA, 201 bp, Homo sapiens
ttcaacatagtgttggaagttctggccagggcaatcaggcaggagaaggaaataaagggcattcaattaggaaaagaggaagtcaaattgtccctgtttgyagatgacatgattgtatatttagaaaaccccatcatctcagcccaaaatctccttaagctgattagcaacttcagcaaagtctcaggatacaaaatcgat

SEQ ID NO: 125331 - DNA, 201 bp, Homo sapiens
gacattgctagtactattttaccaataattttaaaaccaccttatttattaaaaattatacttaagtgatgggaacctgaaaaagcatttagtcttttaawtatctgatttaagtgttcttatatattttcaatccaattaactagagctctttatatatttttagtagtaaaactttgcatacacaacacataaatacac

SEQ ID NO: 125332 - DNA, 201 bp, Homo sapiens
tgggttttcatcattttttcattgattctttctcatcttcgtgagtttgtttagttttggtctttgagtatgatgacccttggatggggtttttgtggggrctttttcattgttgttgttgtttgtgctgttgttgctttcctcttgtttttctttcaataatttggtccctcttctgtagggctgctgcagtttgctggg

SEQ ID NO: 125333 - DNA, 201 bp, Homo sapiens
agggtaaaagtcaggattagcttagcctaatttaatccctagaattactcagtacctttaaaaagcaacaaatatcagttgatcacttccagtgatggaastatcatttacaaagtgattttgaagccaagtaaacaaaagtttacttgtcaagaacattctcacggattcattattattaccaatcatttaaaaatcttg

SEQ ID NO: 125334 - DNA, 201 bp, Homo sapiens
tatctatctgcccttttgtaattctgcatacaataaatgtattctgtctaggtagcaaattcctgaagggtaaaagtcaggattagcttagcctaatttartccctagaattactcagtacctttaaaaagcaacaaatatcagttgatcacttccagtgatggaactatcatttacaaagtgattttgaagccaagtaaa

SEQ ID NO: 125335 - DNA, 201 bp, Homo sapiens
caccagaagctttactataatgcatctgataaatacaagataattacttttcaaatatacatttcagaattcttgaattacatcaaaagtgtttaattggrttgaaacagatatagaagtaaactatttttatgtaatcttttggagagattgttgatttgttacatgaggaagtatgtactttacagatgcagtaccctt

SEQ ID NO: 125336 - DNA, 201 bp, Homo sapiens
cccgagtggatgtgtggtggtattgtggtggacctttactggacactctgctgaataactggagtggcacttatactttagtccaattggctatctctttyaccctggcatttcatcaaccagagggaggaaaaataagacatcataaagcgagagaagccccttatggatcttttgactctcacgtccacttagacacaa

SEQ ID NO: 125337 - DNA, 201 bp, Homo sapiens
aagccaattaatgacagttctgtgggaatgagtctttgaaggacctccaaccctgttctgcctcctctgatgtctgtcaggtccctggtcatcccggtgaktgcaggatgttggttttcaaggctactgtggaagttcatagggggataatggaaatagggcatattaaattgcaacaaagctcactgttctctccaatat

SEQ ID NO: 125338 - DNA, 201 bp, Homo sapiens
ccaacagccctgataaaagctccacataaagggctatgcagtggaggatttgtcccaactagcactccagctcttaccctatattctgtgcacttaggcamcttactagtttccatttagcatgtgcaattaaacatttcttaaaagaacagatttatatgcctttagtttacactgctagatggggaaacatctaaccgt

SEQ ID NO: 125339 - DNA, 201 bp, Homo sapiens
tgattcttttgagaatctgggtcctaaaagcctccatcattagacaatactgtatagcaagagtgggaaaggatttcacccttcctgtgggaagactcacmtgccttgggcaaaaaactgtataataatattacaaaaacagccacctagtggagttcaaaccatactaaaaaaaatccatttagtaaattcccaaagttg

SEQ ID NO: 125340 - DNA, 201 bp, Homo sapiens
gcccgcctgcaccttgcttgaattctcgccgggcctcagccgcctccccacggggcagggatcaagacctgtagcctgccatgcccaagccccccccccccaccaccgtggcctcccacttggcccgagcctccctgataggtgccaccccctgctccgctaaagagtgcaggcccgtggagtgggactggcgggcagctc

SEQ ID NO: 125341 - DNA, 201 bp, Homo sapiens
  misc_feature (1)...(201): n = A,T,C or G
acaatgtttaagacattgctagtactattttaccaataattttaaaaccaccttatttattaaaaattatacttaagtgatgggaacctgaaaaagcattnagtcttttaaatatctgatttaagtgttcttatatattttcaatccaattaactagagctctttatatatttttagtagtaaaactttgcatacacaaca

SEQ ID NO: 125342 - DNA, 201 bp, Homo sapiens
catactgaatgggcaaaaactggaagcattccctttgaaaactggcacaagacagggatgccctctctcactactcctattcaacatagtgttggaagttytggccagggcaatcaggcaggagaaggaaataaagggcattcaattaggaaaagaggaagtcaaattgtccctgtttgcagatgacatgattgtatattt

SEQ ID NO: 125343 - DNA, 201 bp, Homo sapiens
ttgggtagtaagaatgaaagtgagagctcccacaattgagtgagattctcaaaggtggggaataagggaggtgaccacccctcatactgtcttatgcccartttctgcctccaaagaaagaagaaataaaaactaaaaggcagaaatgaaatccactatgacaaacccacagccaatatcatactgaatgggcaaaaactg

SEQ ID NO: 125344 - DNA, 201 bp, Homo sapiens
ggtcttgtgtcatttaggctacttggataaaaaatgaaaagaatcctgtccaccttcagaaagggaaaagtggcccttcctgtaccagtgctcagtgtaamcccttagaactagtaataaccaacccccttgatcctctctggaaaaaaggggagcatgtaaccctaggaatcgatggggctggactggatcctcgagtaa

SEQ ID NO: 125345 - DNA, 201 bp, Homo sapiens
tcacgcagtgagcttaagaattttctagagcttatcaatcagtcagcccctgttcatccccgagtggatgtgtggtggtattgtggtggacctttactggrcactctgctgaataactggagtggcacttatactttagtccaattggctatctctttcaccctggcatttcatcaaccagagggaggaaaaataagacat

SEQ ID NO: 125346 - DNA, 201 bp, Homo sapiens
gaagtccagcatcctgtgggtcagcccccaagggccatccagcttccgtctcccaacactaagttcacttcatgtctctcatgacagggaggaaacttagmgttccttggagacctgaggtcacgcagtgagcttaagaattttctagagcttatcaatcagtcagcccctgttcatccccgagtggatgtgtggtggtat

SEQ ID NO: 125347 - DNA, 201 bp, Homo sapiens
cagggctcaggagaacttaccattttcactggaggagaatctcgaactcagtcaggcttcaatggaccccagctggtaccatagctctggtttcaggcaaytccttctgggtcctgagtcttctctgaagccctacgtttttggggcaccaaattattgtcaagaaaaagagtcaaactctgtaaatatttgaagagattt

SEQ ID NO: 125348 - DNA, 201 bp, Homo sapiens
cctggttggaatggatcaaatattccatccacacattaaacaaaaggagctgttatgcttgtgcgcacagcaggctagaggcctagattgtcccctttccrctagggtggtcctccagttgaccaggcgtgggctgcgtggtagctcttttccaggattctacagcctggagtaacaagtcatgccaagctctctctctgc

SEQ ID NO: 125349 - DNA, 201 bp, Homo sapiens
tatttataccgataacttaggatttagctgttttcactaggccaaaaatatttcataagcatacacaagcaaagattatcctgtcttgggctgggtcttayagttataacccttatggcaaattttatagtattctgcaggaataaacgtgaaacaatttgattgaaaaaaatgctaacaaaatgcttacaatgtttaaga

SEQ ID NO: 125350 - DNA, 201 bp, Homo sapiens
gcatgcagcccccagtcacgtacccctgcttgctcaatcaatcacaaccctctcacgtggacccagttagaattgtgagcccttaaaagggacaggaattkcttactcagggagctcggttgttggagacatgagtcttgccgaagttcccggccaaataaagcccttccttctttaactctgtgtctgaggggttttatc

SEQ ID NO: 125351 - DNA, 201 bp, Homo sapiens
acaggtcccttgtttcaaaggtatggcacaaggtaacccataagccagggtacccagaccagttcccatacatagacacttggttacagctagttttagamcccccacacacacagtggttgagagaacagcagcatcagcggctggcagaggcaaagaaagaccagcagagagacagagagaggaaagagacagagagaa

SEQ ID NO: 125352 - DNA, 201 bp, Homo sapiens
gagtctcgcactgtcgcccaggctggagtgcagtggtgccatatcggctgactgcaacctccatctcccgggttcaagagattctcctgcctcagcctccygaatagctgggattacaggcgcatgccaccacgccctgctaattttttgtatttttagtagagacagggtttcactgtgttagccaggatggtctcgatc

SEQ ID NO: 125353 - DNA, 201 bp, Homo sapiens
tctgtaaatatgcttaaaaatactgaagtacacattttaaaaggatgactatggtatgtgaatgttttaataagttttattatttgtatttgctatttatrtattattatatatgttaaggctaacagaccaggagatgactgctattgagaaaagtttgttgttcacagatccaaataggaatgggcatgccatgttact

SEQ ID NO: 125354 - DNA, 201 bp, Homo sapiens
tgtagcccaggaaatgaccaacctgatgtgtgttatggcctatctgagcctcccatgaccacagtttttaaaataagattaaggactgaggactgctgggrgctcataaatgatacgtgtaaagtgttagccaaaacagaagaaaaaggggtgcccaaaccagtcatcttgaaatttgatgcctgtgctgttattaatagt

SEQ ID NO: 125355 - DNA, 201 bp, Homo sapiens
acctctgcaaagtgactctgaagaagacaacaagccctgctccagtcacacccagaagctgattggtccacgcatggccaaagcatgagaaaactcatcaygggactcattttccttaaaatttgaactttttcagtaaggacttcaactgaccttcttcagactgaggactattcccagtgtatacatcaagtcactgag

SEQ ID NO: 125356 - DNA, 201 bp, Homo sapiens
tccttaaaatttgaactttttcagtaaggacttcaactgaccttcttcagactgaggactattcccagtgtatacatcaagtcactgaggtgggacaaaasgttgctatagtcctattattttatggttattataagtgtactggaactctaaaaaaaacttgtttgtataattttattctatacaaggtatgtagcccag

SEQ ID NO: 125357 - DNA, 201 bp, Homo sapiens
tcactctcagtgcctccttggcctcggcgtccactctggccacgcttcaagagcacttcagcccgtggctgcactgtgggagcccctctctgggctggccraggccagagccagctccctctgcttgccgggaggtgtggagggagaggcgaggcgggaaccggggctgcacgtggtgcttgcgggccagggcaagttcca

SEQ ID NO: 125358 - DNA, 201 bp, Homo sapiens
aagcctaatatttggtgattacagtattgagaggtgacaatgtgctagcagcccttgctcactctcagtgcctccttggcctcggcgtccactctggccaygcttcaagagcacttcagcccgtggctgcactgtgggagcccctctctgggctggccgaggccagagccagctccctctgcttgccgggaggtgtggagg

SEQ ID NO: 125359 - DNA, 201 bp, Homo sapiens
tgtcaaactctgtaaatatgcttaaaaatactgaagtacacattttaaaaggatgactatggtatgtgaatgttttaataagttttattatttgtatttgytatttatatattattatatatgttaaggctaacagaccaggagatgactgctattgagaaaagtttgttgttcacagatccaaataggaatgggcatgcc

SEQ ID NO: 125360 - DNA, 201 bp, Homo sapiens
gccttgtagtcaattttgatgagagaacctggataccttggttgcccatgaaggattcacacgcttattatgggtttttttttggtgggagcctccaaacrcagctgcttctagttggccaccttggcccccttccatcaggaaataattttcatggatccttactgtgctatttttgctggtgtccttggacttcttttt

SEQ ID NO: 125361 - DNA, 201 bp, Homo sapiens
cgctcctgtgcctggagatgttattcaaggaggctggagagcagcaaagctgggcgcctgctcctttttctgggacccctgacctcaaggggcaccaaccygttgccagcaggattgtttctttatacggtgtctgacaacccctgtcagagggtctcacccagttgggtggcatggggagcaagacccgtttaatgaagc

SEQ ID NO: 125362 - DNA, 201 bp, Homo sapiens
tgtttagttttggtctttgagtatgatgacccttggatggggtttttgtggggactttttcattgttgttgttgtttgtgctgttgttgctttcctcttgwttttctttcaataatttggtccctcttctgtagggctgctgcagtttgctgggggttcacttcaggccctattcatctgattcgctcctgtgcctggaga

SEQ ID NO: 125363 - DNA, 201 bp, Homo sapiens
attctttctcatcttcgtgagtttgtttagttttggtctttgagtatgatgacccttggatggggtttttgtggggactttttcattgttgttgttgtttrtgctgttgttgctttcctcttgtttttctttcaataatttggtccctcttctgtagggctgctgcagtttgctgggggttcacttcaggccctattcatc

SEQ ID NO: 125364 - DNA, 201 bp, Homo sapiens
atgttgtcacactgactttgtgaaatagaactattacatttctgatcttcaaagggaaccaccttatgggtgcaaaaacagtaaaataagatggaaactgrgaaatggctcactaagaactaacatttactacaaagcaagtgaaaaaaaagacaaacaaaattgtgctcaaccatatataatactgacatataattgaaa

SEQ ID NO: 125365 - DNA, 201 bp, Homo sapiens
ggatttctggatactctgattttggttttggtttttgtttgatgtaaactgtaaaagtgtgtgtgtgcccttctcacccgttctttgttttgtggcatgcrtgtggttgtgagcctggtgttttgtctcgaagaagcatgggtcaggcacaaagtaagcccactccactaggaactatgttgaaaaatttcaagaaaggat

SEQ ID NO: 125366 - DNA, 201 bp, Homo sapiens
tattagctatttggatcacgggggaggacatggtctgaaccaatataatagccatttgtttaaggggtgagatggagtcaggcctagggtttagtaaaaayaaacaaaaaaaattcccgggccagatgtattttgcgagctatcatgatccgggtccttaattgtaccttttccttttgctgtatctggcataacatttac

SEQ ID NO: 125367 - DNA, 201 bp, Homo sapiens
gatcaagacctgtagcctgccatgcccaagccccccccccccaccaccgtggcctcccacttggcccgagcctccctgataggtgccaccccctgctccgytaaagagtgcaggcccgtggagtgggactggcgggcagctccacctgtggcctcagcgagggatccataaggcaaagccagctgggctcctgagtagggt

SEQ ID NO: 125368 - DNA, 201 bp, Homo sapiens
agtattgagaggtgacaatgtgctagcagcccttgctcactctcagtgcctccttggcctcggcgtccactctggccacgcttcaagagcacttcagcccrtggctgcactgtgggagcccctctctgggctggccgaggccagagccagctccctctgcttgccgggaggtgtggagggagaggcgaggcgggaaccggg

SEQ ID NO: 125369 - DNA, 201 bp, Homo sapiens
tgccctattgatgtggaagttcaggataagtccagaagacaaaaacaacagaaaccaagtatggccccctgacaacacactgaagaatgtatccattagarggccttggggattatcagtccagtggtaatggttaccacctccccactaactaaggagttagaaggaatagcccttataaaaccaaaaacattttagggt

SEQ ID NO: 125370 - DNA, 201 bp, Homo sapiens
taatacgttttgtaatttaatcaattatctaatcttagtaggctaaaaaagttttaattttctgaaggtaagtttaatccttaacacttcaaataaaagakaacaaaaactactcagcaggaaaaatatatgcttagtgttttactttcatgcacgtttaaaataatttatttggatgctaacaatgttattgacattaca

SEQ ID NO: 125371 - DNA, 201 bp, Homo sapiens; identical to SEQ ID NO: 21254

SEQ ID NO: 125372 - DNA, 201 bp, Homo sapiens
agatgttgtgatcatttggaggacaagaggcactctggccttttgggttttcatcattttttcattgattctttctcatcttcgtgagtttgtttagtttyggtctttgagtatgatgacccttggatggggtttttgtggggactttttcattgttgttgttgtttgtgctgttgttgctttcctcttgtttttctttca

SEQ ID NO: 125373 - DNA, 201 bp, Homo sapiens
agcacaccaatggttcttgactccttatccaatttgctagtctctgtcttttaattggggcatttaacccatttacatttaatgttagtattgttatgtgkgaatttgatcctgttatcatgacactatttggttatcttgcacacttgtttatgcagtttctttgtagtgtcattggtctttatattttggtgtgttttt

SEQ ID NO: 125374 - DNA, 201 bp, Homo sapiens
tctccatccctttattttgagtctgtgtgtgtctttgcaggtaagatgggtctcctgaatacagcacaccaatggttcttgactccttatccaatttgctmgtctctgtcttttaattggggcatttaacccatttacatttaatgttagtattgttatgtgtgaatttgatcctgttatcatgacactatttggttatct

SEQ ID NO: 125375 - DNA, 201 bp, Homo sapiens
ttgtttgcatagaggtgtttatagtattctctgatggtaatttgtatttcttcggggtcggtggtgatatctcctttatcactttttattgcatctatttkatttttctttctcttcttctttattagtctagctagtggtctatctattttgttaagtttttccaaaaaaaacagctcttggatttgttgattttttgga

SEQ ID NO: 125376 - DNA, 201 bp, Homo sapiens
ttgccagtattttattgaggatttttgcatcaatgttcatcagggatattggcctgaagttttctttttctgttgtatctgtgccaggttttggtgtcagsatgacgctagcttcataaaatgagttagggaggagtccctccttttcaattatttggaatagtttcagaggaaatggtaccagcttttctttgtatttct

SEQ ID NO: 125377 - DNA, 201 bp, Homo sapiens
aggaaggggtccagtttcagttgtctgcaaatggctagccagtttttccaacaccatttactgagtaggagatcctttccccattccttgttttcgttagrtttgtcaaagatcagatggttgtagatgtgtcatcctatttctgaggtctctgctctgctccattggtctatatgtctgttttagtagcagcatcatgat

SEQ ID NO: 125378 - DNA, 201 bp, Homo sapiens
ggtgtaaggaaggggtccagtttcagttgtctgcaaatggctagccagtttttccaacaccatttactgagtaggagatcctttccccattccttgttttygttagatttgtcaaagatcagatggttgtagatgtgtcatcctatttctgaggtctctgctctgctccattggtctatatgtctgttttagtagcagcat

SEQ ID NO: 125379 - DNA, 201 bp, Homo sapiens
taataatcacctttctgactggcatgagatggtatctcattgtggttttgatttgtgtttctctgatgatcagtgatgttgagctttttttcatatgtttsttggccacataaatgtcttcttttgagaagtgtctggtcatatcctttgcccacttttaaatggggttgtttgtctttttcttgtaaatgtgtttaagtt

SEQ ID NO: 125380 - DNA, 201 bp, Homo sapiens
atataccacatattctcacttacacatgggagctaagcattggaaacacatggacacaagaagggcaacaaaagacactaggacctacttgagggtggagratgggaggagggagaggattaaaaaactgctattgagcactatgcttattacctgggtaaggaaataatttgtacacctaacccctatgacacacagttt

SEQ ID NO: 125381 - DNA, 201 bp, Homo sapiens
agactaagatcctaggaaatacactttgagaaacactagactagaatattctgtcccttgaagaaagaaagtaattcttttggggattctttacatttatyaatgatttggaggaatctgaatatgtctatagtgtctattatagtgctatcctagacctacagatctaagatagaatgtgtcaaacagaaggcaagggaa

SEQ ID NO: 125382 - DNA, 201 bp, Homo sapiens
ctgaccttagagacaatagatgacaaatgttttctattcagatctttaaaaggtggtaggctcttagttaatctcttaaaaagaaaaagatctagctatgktaatagagattttttacagatgcaaattttctcccacaaaggacagctttgtggggccatttcaagatatggcaaagaaacatgttttgaggtaaaatat

SEQ ID NO: 125383 - DNA, 201 bp, Homo sapiens
actatgaagctctaagtaataattatatgttattttctcaattattggccatggaatcatgtgtgtgaggagcgggtggagcctttcatgagactaagatyctaggaaatacactttgagaaacactagactagaatattctgtcccttgaagaaagaaagtaattcttttggggattctttacatttatcaatgatttgg

SEQ ID NO: 125384 - DNA, 201 bp, Homo sapiens
catggatccttactgtgctatttttgctggtgtccttggacttctttttggggtgatgaaaatcttctggagttagatagtagtgatggttgtcaaactckgtaaatatgcttaaaaatactgaagtacacattttaaaaggatgactatggtatgtgaatgttttaataagttttattatttgtatttgctatttatata

SEQ ID NO: 125385 - DNA, 201 bp, Homo sapiens
tttgctattaaaaagtaatatttaagagtttatttttaaagctgacttacctccagtagatttgattatcttatgcgactagtatttacctacaaactacrttttctattcttatactagagtaaaataagagatcatcttcaaaataaaactttagaaatgcagtgacattcaaaattataggtaatataatattaaatt

SEQ ID NO: 125386 - DNA, 201 bp, Homo sapiens
gaaagaaactaggtaatgtattgtacaattttatttacatgaagtgtccagaacaggcaaatccattgagacagaaattagattagtgtttgccagataasccaattaatgacagttctgtgggaatgagtctttgaaggacctccaaccctgttctgcctcctctgatgtctgtcaggtccctggtcatcccggtgagtg

SEQ ID NO: 125387 - DNA, 201 bp, Homo sapiens
tcctcttccttatgtgaatgtatttttacctttctcagcattccacaagttacttccaccttactttgttctcctcttccttttcctcttttaaaaagttytaagttgctagccagttgggacaaatacaaaatgtgaggtcctgttccatccaatggaaatcagacacagcagtagggtggattcctaaggttataaatg

SEQ ID NO: 125388 - DNA, 201 bp, Homo sapiens
tggccaactggtgaaaccccatctctactaaaaatacaaaaaattagtcagccatgatggtgcgtgcctgtaatcccagctacttgggagtctgaggcagraggattgcttgaacctgagaggcagaggttacagtgagctgagatagtgccattgcactccagcctgggcaacagagcaagactccgtctcaaaaaaaaa

SEQ ID NO: 125389 - DNA, 201 bp, Homo sapiens
tctctgaacttaaattttctttcagattgtttctgtgactccaaactttcaatacaaacatgctcaagatgtttctgaggatttcatctatttctgccctrttgatgtggaagttcaggataagtccagaagacaaaaacaacagaaaccaagtatggccccctgacaacacactgaagaatgtatccattagagggcctt

SEQ ID NO: 125390 - DNA, 201 bp, Homo sapiens
gcattattatttatgtaaggtttcttttagcatatgccttttgagattgatccatgttgttgcatgtatcagtagttcttccccttttattgctgaataayattctattatatgactatgccacagtttagtcatttctgttggacactggggatgggggctgcttccagtattttggttgctttagccacatcccgcaga

SEQ ID NO: 125391 - DNA, 201 bp, Homo sapiens
aatcgaagagatgaaacaagggaaaaagtggagtttagaggacgatgatggtatattttttagcctaatagcctgtataacacctcatgtagaatattatrtgaataatatttcataaggggtttttaatcttttttattgttgaaaactatgcataatatgctgtttaccattttcatcattttcaggtttcaattcagt

SEQ ID NO: 125392 - DNA, 201 bp, Homo sapiens
gtacaagttggaggcaggagtgtggtttgctcagatgtggagcaacaagtggtgggtaccatctttaggaaattcccagtttccttgatacttaggtggtrtgtatgattcttctatgatcactgtttgtgaggtaggcaaggtaatttctaaaatcaagtcgtataccactactctagccttcagtattttaccagataa

SEQ ID NO: 125393 - DNA, 201 bp, Homo sapiens
accagggattccagacaacctagttttgttaaaggctgtattgtagaaagcctatgacaggcagtatgtcaaatgcttgaccattctgagtgcctctagayaacacccctgaaagaagaactgtatttttttttttttttgagatggagtcttgctctgtcgcccaggctggagtgcggtggcacgatctctgctcactac

SEQ ID NO: 125394 - DNA, 201 bp, Homo sapiens
agattctgcatttccttttttttttttttccccgagacagagtcatgctctgtcgcctgggctggagtgcagtggcgcaatctcggctcacggcaaccttkgcctcccaggttcaggcatgtgccaccacgcctggcttttttttttttttttttgtatttttagtagagacggggtttcaccatgttggtcaggctggtc

SEQ ID NO: 125395 - DNA, 201 bp, Homo sapiens
tgattctctgaattgattgtcttcctctgttgctctcctaattgttagatcccttacactacagccagagtgacacttctgaagtagagataagatgatgrcatgcccctgacttagtctccattggtttctactgcttccaagatgaaatttaaactctatgacagccttcaaggcccttcacaagaaggtccattctag

SEQ ID NO: 125396 - DNA, 201 bp, Homo sapiens
caatgtgcccagcctattttgttttttctgatgtgttactctactgcatagtaggacaccctgtcacactttatttatgtttttgatttttgttttgtttygttttgcttttttccccgagatggagtcttgctctgttgcccagagctggagtgcaatagcgcgatcttgactcactgcaacctccacctcccgggttca

SEQ ID NO: 125397 - DNA, 201 bp, Homo sapiens
caaagtgttgggattacaggcatgagccactgtgccccaccgtgttaaagcaatattttcttgtgtgccattttgatttgctcttgtttctgggttttttktttttttttttttttgagagggagtctagctctgtcaccaggctggaatgcagcggcgcaatttcggctcactgcaacggcgcaattttggctcactgca

SEQ ID NO: 125398 - DNA, 201 bp, Homo sapiens
aacctttgaagattttgagtaaaaagtgtgtaatagaatcagaattctccttagcagcaatgagtaagatttaatggaaaagtaatagaaacaggaagacyacagtctttaagaatctcctaggtagatatgtctgatatagaatagtgacggttggaactctgtggaggtgatataatgtgaagggaattacagaggtga

SEQ ID NO: 125399 - DNA, 201 bp, Homo sapiens
tcatctcctagtgatcttatttaggtttatagctttaaatagcctttgtacactaatagctgtccagtttatatttctagagaaacctcttccttgaactmcaggctaatatttcaactatatactatatatctccacttggatacctaatattctgatccaccttctccctggatttctccctcagccttcccatcttgg

SEQ ID NO: 125400 - DNA, 201 bp, Homo sapiens
accaactcataccaagcaacgtgttttcctcctaaatttcatttttgttgtaattttcagtttgacttcggtcttgattcttctttttctcttcccttccrgcactcaccttccccacgtagttttatagtgttgtgattggtggctagtggaggtataggatttaaattagatatgttgctatgacttcatagccatacc

SEQ ID NO: 125401 - DNA, 201 bp, Homo sapiens
ttcttttttttttttggagactgagtcttgcattgtcacccaggctggagtgcagtggcacgatctcggctcactgcaacctccgcctcctgcgttcaagygattctcctgcctcagcctcctgagtagctgggattacaggcgcacaccaccgcatctggctaatttttgtatttttagtagagatggtgtttcactgtg

SEQ ID NO: 125402 - DNA, 201 bp, Homo sapiens
aggattatgtacacagagcagggcggactggaagagcaggaaacaaggtaaaaataagttttttatagttgatcttcattatattaaaatacaggtgtttstttagtatttcaaggagtagataataggagttatggagacattttgaaaatctttaatccacataatgtgaagagtggttgatgttaataatttatatac

SEQ ID NO: 125403 - DNA, 201 bp, Homo sapiens
tttttgtgtttacagtatgtcccttctcccttctaaaatgtaagcactctaagggcagtgacttttacctgtgttatttgttgatttattcaggctcccgstacaagcccctggcttgcctagtgattggaaaataccatttagtagtattttgtttcattttatttatttatttattttttttctgagacagagtctcgc

SEQ ID NO: 125404 - DNA, 201 bp, Homo sapiens
agtgtttagcgctggtctttgccgggcgttgagggcagctcagcctccttgtttgtccggttcgcctgtgcgtggtactcaagggcaccagtattcccgcsgtcggcagcatgggtcgggagtcacggtgaggcagagcgccgagcgggctagcgggcgagcggcttcttggggtcgtgagaagaggcgggagttgaggtg

SEQ ID NO: 125405 - DNA, 201 bp, Homo sapiens
tcaccatgttggtcaggctggcgttgaactcctgacctcaggtgatctgcccacctcggcctcccaaagtgctgggattacgggcatgagccaccatgccyggcctttttaattttttatttatttttttcttttttgagacagagcctcccgcccctgtccgtcaggcgtgcattggcagaatcttggctcactgcaacc

SEQ ID NO: 125406 - DNA, 201 bp, Homo sapiens
atcatagattagtttttcctgtttttgaactccacataagtgtaatcatgcgtttgcaccttttgcatctagtttccttcactcaacattttgaggagatyggtccatgttattgcatgtagcaataattcattttcatggccatataatatttatatgattatacaacaattaatttatatttatatattggatttgggg

SEQ ID NO: 125407 - DNA, 201 bp, Homo sapiens
agagcggcagcttccggtcggcttttctcttccttcggctgccggcgccagcacgtcctgttttcgttggccgcgctgggatggccgccacagctgtaggkgctgctagtgtttagcgctggtctttgccgggcgttgagggcagctcagcctccttgtttgtccggttcgcctgtgcgtggtactcaagggcaccagtat

SEQ ID NO: 125408 - DNA, 201 bp, Homo sapiens
tagtagagacagggtttcatcatgttggtcaggctggtctcgaattcctgatatcaggtgatccacccacctcggcctcccaaagtgctgaggttacaggygtgagccaccgtgtttggccctgataatttcttttaccctgttgtcaacattatcgttttttttttttttgtcatcgcctatcaaattctgttaagccca

SEQ ID NO: 125409 - DNA, 201 bp, Homo sapiens
agtaaggaagttgtttcccgtaatacttgtctttaatactccttttatctttttggccagaattgtatcatatcctatgcgtaagcctcatttcataggcmaagagaatgacaagtgatgatgattcttcttttttttttttttttttttttttgagacaatttcttattgtcttgctctgtctcccaagctggagtgcag

SEQ ID NO: 125410 - DNA, 201 bp, Homo sapiens
ttaatactccttttatctttttggccagaattgtatcatatcctatgcgtaagcctcatttcataggcaaagagaatgacaagtgatgatgattcttcttytttttttttttttttttttttgagacaatttcttattgtcttgctctgtctcccaagctggagtgcaggggtgtgatcacagcttactgcatcctcgacc

SEQ ID NO: 125411 - DNA, 201 bp, Homo sapiens
atgagcatttgaactgatggatggctggagtaattggaaaaggggtgtttgggcagtggcagaaaaggttagagaggtggggtgtggtctgattgtgaaayactgcatttttaaacagatgtttaaagaatgtgtattctggtattttagatgacgaagatgatcctgcagaagctgaaaaggagggaaatgaaatggagg

SEQ ID NO: 125412 - DNA, 201 bp, Homo sapiens
acatatctattttatttcttggttactaggatatgaaattaagagccagagagaacagatgatcatttgccctcatttgcaagcctgttaaaccctgaaartttacaatttttatcatttacaattaaaatcaacatcttcctagcccttggtaaagatatagcaagatattgtcattcattcactacaaataaaatgaat

SEQ ID NO: 125413 - DNA, 201 bp, Homo sapiens
gaatgcatatcacttttgcaccatggtaaagttgaaaaattataaattgaatcattgtaagtcggggaccatctgtatacacatacacataaatgtttatrcttcaggatctttttttaaaaaaaaacatgggatcataaaatatacccatctccacacctaccaatttctcctactcccctctttacctccctatcattc

SEQ ID NO: 125414 - DNA, 201 bp, Homo sapiens
tttctccctaccatagacaactgattttttaaatgaaatgtgacttttaacaaataggtggtatattttcccatggatctgtgtagtaggatttgtgtaamtataactatctgattccagccttttggtggaaacattccttatttatttctgtagaataacttaatttggtatttctaattcagttttttactagtcctt

SEQ ID NO: 125415 - DNA, 201 bp, Homo sapiens
ataaaatgaattgtgactgatttttagttttctttttgtctttatttttcttttcatcttaggtcgggtcacaaatcttcgaagagtgacatatgttgttytagatgaagcagacagaatgtttgacatgggttttgaaccccaggtaatcattaaatttcttaagtgttttgaaatgtaaatataactttgtagttgcca

SEQ ID NO: 125416 - DNA, 201 bp, Homo sapiens
tcccgatcctccagtcctggaaataaaagcaagaaaactgagaataggtaatgttatcattgggctgcatctatagtgcagactggggactgcttcccttytctgcgccttttttttttttccctgtaagtttgtatttatagagaattaactgcatttggctcctaccatgaactgttggcagtgttttattttaattgg

SEQ ID NO: 125417 - DNA, 201 bp, Homo sapiens
ccactaggaggtacattaaactacattataaatatatattgctaaatcacacatatcaatgagactatgcattagaaaggtttatttattaaacttgcatrcaaagttagtagcttttcagagaataatttgtggtgtggtccctactcttgtctctgccctcatttgagatttaactaagtcttctttaactacaggatg

SEQ ID NO: 125418 - DNA, 201 bp, Homo sapiens
aaaatctgtagcagtcttttgctatttaggacttacattgaggtaaaattcatgtaacaaaagtttgtccattttaaccattaaaaatgtacagttcagtsctcagtaccttcgtgaaacttaaacaggattcagtgaaagcagtgcttagagagaaatttctagctgtaaatgcctgcattataaaagatctccgttaac

SEQ ID NO: 125419 - DNA, 201 bp, Homo sapiens
ccaccatgcctggataatttttgtatttttagtacaaaaatatgttggccaggccggtcttgaactcctgacctcaggtgatcctcccactttggcctccsatagtgctgggattacaggcgtgagccaccatgcccagctaattttgtcattttttgaagagccagggtctcgatatgttacccagctagtcttgagctc

SEQ ID NO: 125420 - DNA, 201 bp, Homo sapiens
tcaccacgttggccaggctggtctcgaactcctgacctcaggtgatccacccgccttggcctcccaaagtgttgggattacaggcgtgagccactgtgccyggcccattgtctttttaaataaattcttttaattcatgcttttagatacctcattatctagtctagatagcacgtcatttacgtttaccaaagtcattca

SEQ ID NO: 125421 - DNA, 201 bp, Homo sapiens
tgggattacaggcatgagccactgtgccccaccgtgttaaagcaatattttcttgtgtgccattttgatttgctcttgtttctgggttttttgtttttttytttttttgagagggagtctagctctgtcaccaggctggaatgcagcggcgcaatttcggctcactgcaacggcgcaattttggctcactgcaacctctgc

SEQ ID NO: 125422 - DNA, 201 bp, Homo sapiens
ataatcaggttgcagaacagttccatcacttcctaaaaaactccctcatcgtgtccctataaaggtaattaattataaaggtacctttccctatccataaycgctggcaaccactcgtgtgtgtttttgtttgtttgtttgtttgtttttgaggcagagttttgctcttgttgcccaggctgtagtgcaatgatgccatct

SEQ ID NO: 125423 - DNA, 201 bp, Homo sapiens
cgatggggccggcgctgtgcgtcctccagtcgaggtggggcgctgtggaagagcggcagcttccggtcggcttttctcttccttcggctgccggcgccagsacgtcctgttttcgttggccgcgctgggatggccgccacagctgtaggtgctgctagtgtttagcgctggtctttgccgggcgttgagggcagctcagcc

SEQ ID NO: 125424 - DNA, 201 bp, Homo sapiens
aaagttttggtttgaatgctgattaaataatccctttttttttttctcaatgctgcattgattaagtctcctcctgaaattcatcttgattaattttacckttttctcttatctgtcattgtggtctatttttaaataactattttatacgtgtttttgccaggtgattgattcaacagttgatagcaatgcttctgttaa

SEQ ID NO: 125425 - DNA, 201 bp, Homo sapiens
tgtcaatgtgcatatcattaacactagttcaaaacttgtttcactttttttttttttctgagacagagtctccctatgctgcccagcttgtcttgaacttytgggctcaagcaatcatccctcctcagcctcctaagtagctgggactatagcaaaatttgtgaatatttaaaaaaaaaaaaaagctgggtgccgtggctc

SEQ ID NO: 125426 - DNA, 201 bp, Homo sapiens
agggatgcataacaaaacaaaaattaggtgaaacaatctgaactttattgtaaaggttaaattgaacactataaagcacagccttaagaattttggtggtkaggctactgatgtatttatctttccagctgtcatcatgactccaactcgagaactggctttacagattactaaagagtgtaagaagttttccaagacttt

SEQ ID NO: 125427 - DNA, 201 bp, Homo sapiens
agataggaggagagagaggtctcgtagcagggataaaagaagatctcggtcaagggacaggaagcgtctgaggtaagacattaattaatttccaaaagacragtgataaattgggccttctcggctatagcaggcttcttgaaaagtatgttttcaactggagtttggtggcccaattgcaggcccttttctttatcccct

SEQ ID NO: 125428 - DNA, 201 bp, Homo sapiens
tgctaagagattggctcttagaatcaatgcccagaagaatttgggcatcgagtctcaggtattaagtaatttgttccaagtctcagtcaatacttttaagragttctttgattttacttttcaggaattatgttgaacacaagtaaacaagttgtcctagacattgagtttgtgagaatttaacattctcaatacagaatt

SEQ ID NO: 125429 - DNA, 201 bp, Homo sapiens
gttctttcatactccttttccaaccacgctacgcttctcttattcttcaataattaagcatgcttgtcttaactctgtaccattacgcatgtaattaattycctttgcaaaatactcttatggtatctttcctccctccaattggctagtcctcctttcattttaaagattttgttcagacgagacccttctgaaacattt

SEQ ID NO: 125430 - DNA, 201 bp, Homo sapiens
agaagttgcacatctatacgcaatatctgtttttacatacaaagtgcagtcttaccatataaacattatcaattgccttccaaaaaatttgtataaatttygacttaaggctgggcacagtggctcgtgcctgtaatctcaccactttgggaggccaaggcaggtggatcatctgaggtcaggagttcgagaccagcctga

SEQ ID NO: 125431 - DNA, 201 bp, Homo sapiens
gcattacctgcttactgttcaccaataacatgaacagttgaataacacatactttgtatgctttatgtattgaatactgtattattttaatatggtaagckggagaaaagaatgttattaagagaattagaggctgggcgcgctggtgcatgcctgtaatcccagcgctttgggaggctgaggcaggtggttcacaaggtc

SEQ ID NO: 125432 - DNA, 201 bp, Homo sapiens
agttgtcactgttgtgacaaccaaaaaagcagttgtggattctgataagaagaaaggtgagctgatggagaatgaccaggatgccatggaggtgatttttsttaattttgactttgtttatgatactatcctggaagcatttattagaaagcattcatggagatgtgcgtttcatttgtgtgagctaggagaaattcccag

SEQ ID NO: 125433 - DNA, 201 bp, Homo sapiens
cctgtttttgaactccacataagtgtaatcatgcgtttgcaccttttgcatctagtttccttcactcaacattttgaggagatcggtccatgttattgcaygtagcaataattcattttcatggccatataatatttatatgattatacaacaattaatttatatttatatattggatttgggggctattcttatttttgg

SEQ ID NO: 125434 - DNA, 201 bp, Homo sapiens
gtaacttgagttctccattgcattgtcctactgattggcatgactttgtaaagctaacagttttctttctcctcatctgagagatggcagtactttttctragtaccagagatactggtaaattttagctataagtgttctttcaaaagtcactcttttaacaccatcaacttagtttgatatctttgcttacatattaac

SEQ ID NO: 125435 - DNA, 201 bp, Homo sapiens
agagggaaaaagtaaaacagctgttaaatcatgtgcttaatactatttcaccaaggagtggtcgaaaagaatcttgtgcccatagatgctaccaccattargttgattcaaaacatagttgttaaggaatagttgagtgaacagagaattcattagttattgaatagtttttcctttctcaatgcagtaatagtaacattt

SEQ ID NO: 125436 - DNA, 201 bp, Homo sapiens
cacacctgcaatcccagaactttggtaggctgaggctggtggatcactggagccaagtagttcaagaccagcctgggcaacatagcatgactctttctacyaaaaaacaaaaaaaattaactgggtttggtgacatgtgcttgtagtcctagcaactcaggaggactgatgggacgaatccttgagcccagaaatttgagg

SEQ ID NO: 125437 - DNA, 201 bp, Homo sapiens
gtcttgctcttgctcaggctggagtgcaaggatgtgatcatagctcactccaaccttgaactcctgggctcaagagattatcactttttttttttaaactkctttcttaagttcatttcttggttttgagggatagtggcaaatcaaatttgcagaattctctagttcttatttgtttcaaatttatggcactatgtggtc

SEQ ID NO: 125438 - DNA, 201 bp, Homo sapiens
ggttggtggttgtttatgttttccgtgtcttgctgctcaaaatagtccttccacaccagtgtctccctgagttacatttttactctaaaaaaacccttacrttttaaaaaactttcattgagataatttatatatcaaaatttaccctttaaattatacaactggtttttttttgttttgttttgttttgttttttgagac

SEQ ID NO: 125439 - DNA, 201 bp, Homo sapiens
tgtaacaagttgattattacaagcattaatgatatttttgcaatttaaaattttttttcagaagtaactccatctgatcataacttggattcttaatccakttttggcctggctttgcttagtaaaagagtggggtagtagctttttctttattacaaaatttagactttttctccacatgagctagtattttcttagata

SEQ ID NO: 125440 - DNA, 201 bp, Homo sapiens
cgaactcccgacctcaggtgatcctcccgccttggcctcccaaagtactgggattacaggcgtgaaccaccgtgcccagcctcattttattttattttatrttaatttaatttatttttttgagatggagtgtcgcctttgttgcctaggctagaatgcagtggtgtaatctcggctcactgcaacttccacctcctggct

SEQ ID NO: 125441 - DNA, 201 bp, Homo sapiens
ttctaattcaaggtgtcatacgtcatttgaggtgattttaaaattatgaggtttaagtgtgctggagcactataaaaatcttgtgggtcaaacagtgtgtygtagaaagtaaaatattagagtagtttctaggagaggaagatttgaaaagctaggagtattgcttcccacaaggggaaaatagtaatgaacttagcgctt

SEQ ID NO: 125442 - DNA, 201 bp, Homo sapiens
acagggtttcaccatgttggtcaggctggcgttgaactcctgacctcaggtgatctgcccacctcggcctcccaaagtgctgggattacgggcatgagccwccatgcctggcctttttaattttttatttatttttttcttttttgagacagagcctcccgcccctgtccgtcaggcgtgcattggcagaatcttggctca

SEQ ID NO: 125443 - DNA, 201 bp, Homo sapiens
gtggtagatgaggtcaggagatcgagaccatcctggctttcacggtgaaacctcatatctactaaaaatacaaaaaaattagccgggcttggtggcaggcrcctgtagtcccagctactcaggaggctgaggcaggagaatggcgtgaacccgggcggcggagcttgcagtgagctgagatcacgctgttgcactccagcc

SEQ ID NO: 125444 - DNA, 201 bp, Homo sapiens
caagtcgtataccactactctagccttcagtattttaccagataaacttaactgtgctgttccacggagctatttaaaatgcttgtttttttttttttttkttttttttttgctgggtgcagtggtgcatgcctgaagtcgcagctttgcagtccccggagttctgggctgtagtgcactatgcctatctttgtccatgct

SEQ ID NO: 125445 - DNA, 201 bp, Homo sapiens
ttgactttgtttatgatactatcctggaagcatttattagaaagcattcatggagatgtgcgtttcatttgtgtgagctaggagaaattcccagaattgaragacattcttgctattcttagtagtataatagtatctagttaaatatctgtttagtggaacattctgatgtcttcattcctaactgtatgatctttctgc

SEQ ID NO: 125446 - DNA, 201 bp, Homo sapiens
aaaaatttaaaaactataaaaaattagcctcccagctactcaggaggctgaggtgggagggaggattgtttaagcctgggaggcggaggtttcagtgagcygagattatgccactgtactcccaccttggcgacagagtgagaccctgtctcaaatgaaaaaaaaagtttgtaatggaatcctacagtatgtaactttttg

SEQ ID NO: 125447 - DNA, 201 bp, Homo sapiens
ctcctgagtagctgggattacaggcgtatgctaccacatccagctaactgtatttttagtagagacagggtttcatcatgttggtcaggctggtctcgaaytcctgatatcaggtgatccacccacctcggcctcccaaagtgctgaggttacaggcgtgagccaccgtgtttggccctgataatttcttttaccctgttg

SEQ ID NO: 125448 - DNA, 201 bp, Homo sapiens
gcctgcccaggacgcctctttggctctggcgcgaaacaccctcacgggccggcgaggctgacgcgctgcgctccatcgcactaatcagccgggcgtggtgygggcgccgggaagactgggcggggcgaaggcatcacctttcgatggggccggcgctgtgcgtcctccagtcgaggtggggcgctgtggaagagcggcagc

SEQ ID NO: 125449 - DNA, 201 bp, Homo sapiens
tgacctcaaatgatccacccccccttggcctcccaaagtgctgggattacaggcgtgagccactgcgtccagccaattgcatatatttctacctctgtgtmaagaaattagaaattttctagtttgcttgtgttattttaaaatattaaacttgggccgggcacagtggctcgtgcctgtaatcccagcactttgggaggc

SEQ ID NO: 125450 - DNA, 201 bp, Homo sapiens
gtcgtaatctcagctcaactgcaacctctgcctcctgggttcaagcgattttcctgtttcagcctccctagtagctgggattacaggcacccaccaccacrcccggctgatttttgtatttttagtagagatggggtttcaccatattggccaggttggtctcaaactcctgacctcaggtgatccacctgccttggcctc

SEQ ID NO: 125451 - DNA, 201 bp, Homo sapiens
atctgattcttgtagtaaattatagctgccccaaccattatgaggattatgtacacagagcagggcggactggaagagcaggaaacaaggtaaaaataagytttttatagttgatcttcattatattaaaatacaggtgtttctttagtatttcaaggagtagataataggagttatggagacattttgaaaatctttaat

SEQ ID NO: 125452 - DNA, 201 bp, Homo sapiens
tcgaaaggagaaaaattaaggcagagggaaggggcatcagattttaaatcccctgctagtcacttcagcttgagaggtccgggcttgtagtggttggcggsgtgtgaatgcaacaataacaggcaggtgtctctttgtcttcacctctgtgatcagagtagcaatcagagcagagatcctccgtatttggaggacagagtc

SEQ ID NO: 125453 - DNA, 201 bp, Homo sapiens
aaaacttagcaggttaaagcaataaacacttattatcacatagttccttatggtcaggaaatcaggagcagtttagtcaggtagttctggcttaggcgctygtgagattgcagtcatctgcaggcttgactgttgctggatgatctgcttccaacatcagtcactttgatgtagataggatgcctcagttcttcacctctt

SEQ ID NO: 125454 - DNA, 201 bp, Homo sapiens
cagtaaaaaagcaactttgttgaagcaaatcttaagaataatctagaaatataatgataatggccgggcgcggtggctcacgcctgtaatcccagcacttygggaggccgaagcgggcggatcacaaggtcaagagtttgagaccagcctggccaacatagtgaaaccccgtctctactaaatacaaaaattagctgggca

SEQ ID NO: 125455 - DNA, 201 bp, Homo sapiens
tgctactgtgctaccagctgaaaatggcagaaaatagccacaatttatcttccaggcttttctcaggaagttgcaaaccttctgtaggctccagagttccraagtggttacatcagacagattctatcagcacaattgttgtctaggtgtggatacagattcctggtgattcctgttctgccaacttcccagaatcctcct

SEQ ID NO: 125456 - DNA, 201 bp, Homo sapiens
agaatggtgtgaacccgggaggtggagcttgcagtgagctgagattgtgccactgcactccagcctaggcaacagagccagactctttctcaaaaaaaaawaataataataataattagctaagtgtggtgacgcatgcctgaagttccggcttcttgggaggctgaagtgggaggattgcttgagcctcagagagttgaa

SEQ ID NO: 125457 - DNA, 201 bp, Homo sapiens
ccttttttcacttgccagccagctcttaatatcttaatttgtttctctttttcactgttcatatcccatcagaaaaaatatcttgtccattctacctcaaragtgtgctcttgtgatggtataaatacaatattgtgagagcactaaggaaaaaaacacttaactgtgcctttcagagtcaggaaaacttcctaaaagtgg

SEQ ID NO: 125458 - DNA, 201 bp, Homo sapiens
tatgattcttctatgatcactgtttgtgaggtaggcaaggtaatttctaaaatcaagtcgtataccactactctagccttcagtattttaccagataaacytaactgtgctgttccacggagctatttaaaatgcttgtttttttttttttttgttttttttttgctgggtgcagtggtgcatgcctgaagtcgcagcttt

SEQ ID NO: 125459 - DNA, 201 bp, Homo sapiens
cttgcctcttcatcttcagattagtgatcttttagtagacccattatgcccatccttatacttaggtttaggctatctgaaactagatattctatcttagmccatcgattttcaatcgatgttaattacagacttattatggttttttcacaaacatctttatgaaattagtattctctggcctggcatggtggctcacgc

SEQ ID NO: 125460 - DNA, 201 bp, Homo sapiens
atttaaaagtgaagtttgtgaactacttccttttcatcctgttttgatatctttacaagtttgtttttctagtctgtaagcttttaaagagcatgaatttrttatttatatgttaaatgtctcacagtatgtgagaggtgagtgcttaatgtttatgaaattgataactgtgaatgaatgtctgcagcctacctcatctag

SEQ ID NO: 125461 - DNA, 201 bp, Homo sapiens
aaggtaatttctaaaatcaagtcgtataccactactctagccttcagtattttaccagataaacttaactgtgctgttccacggagctatttaaaatgctrgtttttttttttttttgttttttttttgctgggtgcagtggtgcatgcctgaagtcgcagctttgcagtccccggagttctgggctgtagtgcactatgc

SEQ ID NO: 125462 - DNA, 201 bp, Homo sapiens
tgggttgggtcatagagatgaaggagctcagtgatggtagtagtacaaacattcaaattcggaggagactcctaggaattagagtatgcaaatgattttcraaatatttactgtgtctgacatcaagagttagctaattatcaactacatctctatgatctagtagaatatttaatagagttgaatgttctccagttttct

SEQ ID NO: 125463 - DNA, 201 bp, Homo sapiens
caggagaatcgcttgaacccgggaggtggaggttgcagtgagctgagatcgcaccatttcactccactccagtctgggcgacagagtgagacactgtctcaaaaaaaaaaaaaaaagtatttaaaaatgaatgtttctaagtacaaatgaatgacatttctcttgtctcttttatttttttggtagatctaggtccaaaga

SEQ ID NO: 125464 - DNA, 201 bp, Homo sapiens
ttaaaatcttgtgataaaatacggtgattgtttcttcgggtgttaaagtaatatataattttatgaaaaatgtaaacagtacttaacacgaataaaatcamaagtaaggttagctctaccagctagcattgtatacttccccctttcctgattttatgaatttgttcagattgtaataccatgaatgctatttaatttaaa

SEQ ID NO: 125465 - DNA, 201 bp, Homo sapiens
ggtggtttccaactcctgacctcaagggatcctccagcctcagcttcccacagtgctgggattacaggtgtaagccaccatgcctggccataaacttgtatttttttaataacacagagtctccctttgttgctgaggctgatctcaacctcctgtgctcaagggatcctctagcctcagcttcccaggtagctgggacca

SEQ ID NO: 125466 - DNA, 201 bp, Homo sapiens
ctctgaaattacacactgtcacttccactttattctttatggggttttttttgtcttgttttgttttgttttggaaacagagtctgactctgttgcccagrctggagtgtagtggtgcgaactcaactcactgctgcctcagcgatcttcccacctcagcctcttgagtagctggtactatgggtgcaccaccatgccctg

SEQ ID NO: 125467 - DNA, 201 bp, Homo sapiens
agaccatggtaggaggatcacttgaggccaggagctggagactagcttgggcaatatagtgagacccctgtctctacaaaggaaaaagaaatgttacatayctattttatttcttggttactaggatatgaaattaagagccagagagaacagatgatcatttgccctcatttgcaagcctgttaaaccctgaaagtttac

SEQ ID NO: 125468 - DNA, 201 bp, Homo sapiens
tctctgaaattacacactgtcacttccactttattctttatggggttttttttgtcttgttttgttttgttttggaaacagagtctgactctgttgcccargctggagtgtagtggtgcgaactcaactcactgctgcctcagcgatcttcccacctcagcctcttgagtagctggtactatgggtgcaccaccatgccct

SEQ ID NO: 125469 - DNA, 201 bp, Homo sapiens
gctgaaggaagatttgcagctgtgactggcctagattctggcagtgccaggcttgtgatctgttggagctgttgctgcctgtgctgcctcttctagcattyttgaattggaaaaaagatggaacagggaaagctggagatcagaaaaaggaggcttggctcacataatagctattcccttaatctatgcagatttgatatc

SEQ ID NO: 125470 - DNA, 201 bp, Homo sapiens
cttctggctgtgtcatcactactcccagacaaagattctctcccttctcagaatagcactgctagctacatggctaaccaagagcctacactatggatgtrgagtggtggcaggtgacctgtagacagtggtactataaatctgctaccttccagattattcaataatgtaattaagtggtgcttattatttccaatatgt

SEQ ID NO: 125471 - DNA, 201 bp, Homo sapiens
gagaatgtggccaggaaactcctgccatgtttcagaccccttgctctatgtctttgtaatgtccccattccacatgagatactcattatatcttctggctrtgtcatcactactcccagacaaagattctctcccttctcagaatagcactgctagctacatggctaaccaagagcctacactatggatgtggagtggtgg

SEQ ID NO: 125472 - DNA, 201 bp, Homo sapiens
cttcatagtttaaagaggactaaggaataatttaaatgcctaaaacagggaggctaattcacctcttccaagttcatccaagaataaaatgtctgtctctrtacatgaattcatacaagcccagaggtcccacggagaatgcaagcagagtgggaagtactcacatgtgcccaagtttccctggcagggtggcaatttatt

SEQ ID NO: 125473 - DNA, 201 bp, Homo sapiens
ttgtatataaaaataaatcctataaaagtcaaggcatgatttttttcaggaaaaaaaaaatagaagtatgtttagacaaaatctacaggacaaggagattrcagtgagttagtctcagagaacaccaatttaaattttcattcaatcattcactatttttacaataatttattgattattgactattgctcagctatagaa

SEQ ID NO: 125474 - DNA, 201 bp, Homo sapiens
gaaacttttctagatcaaataagacaaaagatatataccaacgaaatactacaagtaactactgattggatcctgaatccaaaaacactttaaaagaaatkattgggcaatggaggaatatttaaataggaacaagtatattagataatagtttcatttcaatattaaatattctgaatatggctgtgaaggaaaatgtcc

SEQ ID NO: 125475 - DNA, 201 bp, Homo sapiens
cccaaaaggctatgaaacttttctagatcaaataagacaaaagatatataccaacgaaatactacaagtaactactgattggatcctgaatccaaaaacactttaaaagaaattattgggcaatggaggaatatttaaataggaacaagtatattagataatagtttcatttcaatattaaatattctgaatatggctgtg

SEQ ID NO: 125476 - DNA, 201 bp, Homo sapiens
agaattatgggatgaaaacttgttgagagcagcatatggaaaaattgagttgagggacactctattattaaattaccaaatttaacatcaacagtaatggraaaaaactgacattatgtacctttgatgtgatgtgataaagagtatacaatatcatcatctatgtatattcttgccaaaaatgtttaacctaaattaatc

SEQ ID NO: 125477 - DNA, 201 bp, Homo sapiens
cttaaaaaaacttttgcacaatgcagcaggtggcatgcacgagaatgttcacagcccaatgttaagagtagtgaaagaaaaaatacttgaaacaacccaamtatacatcaacaggagaacagataaatatgttgtggtgtgtccatgcaatggaatactccacatcagagaaaagttaataaaactatggctaccatgtga

SEQ ID NO: 125478 - DNA, 201 bp, Homo sapiens
ctcaccaaatcaaaatcagagtatcccaaagtagatatgttagaagaagaaaaccaaaagattgaataactcaatcaatttgggaaatgttgagctaactrgtgttaaatagtcatctttcttgcaggatttctgagagcctcattatgctaatgtacattgtatatttcccacaaaataacagtcttcccaactttatat

SEQ ID NO: 125479 - DNA, 201 bp, Homo sapiens
agatgaagaaacagcagagagaatgtttcaaaagtcacctttaaatacatgaacagaatagttcctttatcaaaactctttctttcacaggtttgctaaarcccacgtgcagatacctaaaagttcagtataatgagtttctagctgctatgtatgtaatcaacttactaacttgttatatctttaacaaaattgcaggta

SEQ ID NO: 125480 - DNA, 201 bp, Homo sapiens
ctaacctgtcttgtaattttttgtttttctcaaaagggtactttactagccacagttcttcatcctgcacgcgcacacacacacacacacacacacacacmgcatcttattgtttattctgctattgaagcagttacataacaggttacctgcaaaatgggagctggaaaaacatacatagttttaataaagatcaagcga

SEQ ID NO: 125481 - DNA, 201 bp, Homo sapiens
acagtggtactataaatctgctaccttccagattattcaataatgtaattaagtggtgcttattatttccaatatgtagaagagagattcccccaccccccactgggaccatatctactgaagtaatttttaaaattcccagggagaaatgctttgtctttcatatgactcatagacaaagaataatcttaataagaagta

SEQ ID NO: 125482 - DNA, 201 bp, Homo sapiens
cacagcaaagagcaagacagatcattaaataaagatattacttgtatataaaaataaatcctataaaagtcaaggcatgatttttttcaggaaaaaaaaaatagaagtatgtttagacaaaatctacaggacaaggagattacagtgagttagtctcagagaacaccaatttaaattttcattcaatcattcactattttt

SEQ ID NO: 125483 - DNA, 201 bp, Homo sapiens
taaaggagctgatggagctgaaaaccaaggctcgagaactacgtgaagaatgcagaagcctcaggagccgatgcgatcaactggaagaaagggtatcagcratggaagatgaaatgaatgaaatgaagcgagatgggaagtttagagaaaaaagaataaaaagaaatgaggaaagcctccaagaaatatgggactatgtga

SEQ ID NO: 125484 - DNA, 201 bp, Homo sapiens
gagaatgggcagactgcctcctcaagtgggtccctgacccctgacccccgagcagcctaactgggaggcaccccacagcaggggcacactggcatctcacrcggcagggtattccaacagaccagcagctgagggtcccgtctgttagaaggaaaactaacaaacagaaaggacatccacaccaaaaacccatctgtacat

SEQ ID NO: 125485 - DNA, 201 bp, Homo sapiens
gcctgaaagagagcctcttgcctcttccccctgtgtgaattgtgctgttgattagctgttccacgagcctagaaaagctgccagttaatgccagggaccccaaagctgaaggaagatttgcagctgtgactggcctagattctggcagtgccaggcttgtgatctgttggagctgttgctgcctgtgctgcctcttctagc

SEQ ID NO: 125486 - DNA, 201 bp, Homo sapiens
atgaatgagtcaatgaattttaaatttaattacatatgcagtgtttgaaagaaagaaagcaagtttcctttaatgaaggtatcattatgtgcatattatakttctttcggccttactcccaaataattttttaatcggtagctccaagattgctacattgattgaaattctaattatttggctgtgagcacaaatgtgctc

SEQ ID NO: 125487 - DNA, 201 bp, Homo sapiens
ctcccatctctgcttcccaagtaaaagggaccataggtgcacactgggaccataggtgtgtgccaccatgcctggctgattttctttctttttttttttttgtagggacagggtctcatgttgactaggctggtctcaaactcctggcctcaagcaatcctcccaccttggcctctgaaagtgatgggatttcaggtgtga

SEQ ID NO: 125488 - DNA, 201 bp, Homo sapiens
tttcatgttatcatcttttttcttttctttttggaatgtagaaaatgttagccctggaagtggttaatgtgacgaaaagcacattagaataaaaaaaaaaatccacctcaatccaaagggatggcattaagtggaatccagtgtatcatggagcacctaatgcacacaagatgtggagcatgtcccctggtcagaactttt

SEQ ID NO: 125489 - DNA, 201 bp, Homo sapiens
ttactatactttttaaatttactttgttccatgtaggaacaaagtaggaagtatttatgtcactcggtatgggacttcagagtagatggtcctaaccaacyctaaaatttaataatcttcttgtgaccagcttgccaatagaaaaagcatcttatagtttgccctgtaagtgaacttgggcaaagaaacaaatatagggac

SEQ ID NO: 125490 - DNA, 201 bp, Homo sapiens
gattggatgggtaggacttggaacagaaacttaactttaaatgcaaacagctgctacaactgacctaaccccaaacaactccagaacgcctactctcagamcttgctttgatcttggaccattaacaataagactgagaaatttgtgacagggagacaaatcgaaattttcccacatatgtaataaaaacagagttctttt

SEQ ID NO: 125491 - DNA, 201 bp, Homo sapiens
gatttctctcttggcaagccctgcaggacaaattaccaaaactccagacagctcttattttccctttcttctgagtagattcgatcatgaagatcactcayccattaccaactctccatctcttagaagcttcaggaacatgcagtgtggctttcctggccaccacctcttcagcagtgttttctttatgctgtgacatag

SEQ ID NO: 125492 - DNA, 201 bp, Homo sapiens
agaattagatagtgtctatatgccacgtttatactattgtttaaaaatacattgtgtgacttgaaggtctacagaggtggcctgaaagagagcctcttgcytcttccccctgtgtgaattgtgctgttgattagctgttccacgagcctagaaaagctgccagttaatgccagggaccccaaagctgaaggaagatttgca

SEQ ID NO: 125493 - DNA, 201 bp, Homo sapiens
taagccaatatcatctatcttgtctaaactattgcaataatcttttaactggtgttcctgtttctgttcttactttcatccctttcagtatcttcgtagcrgcaatattttttttaaaaaaaaaagtcatgtcacagcactcctctgcacaaagtctttcaatggtttttttatttcacatggaataaactctaaagttat

SEQ ID NO: 125494 - DNA, 201 bp, Homo sapiens
tgggaaagagagagaaagaaacaaagagagagagaaggaaggaaggaagattcatttaataacagaggaatggtagtgtatttatccaatggaatattatyctgtcatttaaatctagccatagaggagctgttctgcctcctgaagccagttccttcacttgtggtttagatttggccctttatcctctctcagaagcca

SEQ ID NO: 125495 - DNA, 201 bp, Homo sapiens
taacctgtcttgtaattttttgtttttctcaaaagggtactttactagccacagttcttcatcctgcacgcgcacacacacacacacacacacacacacarcatcttattgtttattctgctattgaagcagttacataacaggttacctgcaaaatgggagctggaaaaacatacatagttttaataaagatcaagcgac

SEQ ID NO: 125496 - DNA, 201 bp, Homo sapiens
attatcttcttagcttacttgttaagtcctttagctgaactctgagagcagggaccatccattctggtgtgcccagcactgagaacaacgtgtaactcagwatagactctataacatttaaatgaattaaaaatcattttttaaaaattaagaatgaacaaataaggcttttgaaggaaatctacagctttgcattctagt

SEQ ID NO: 125497 - DNA, 201 bp, Homo sapiens
ttatatttctcctatcatcattccacttactcttacagactgttaaattggatgatacattgctgaagcaacaaagagtccctaaatagaaaatgcctttraaataaggcataagttaatagataccagtttaattcagtactagtcaaattttgctgtcttccctgcaagatcattggattagagaagtcagaaaacatg

SEQ ID NO: 125498 - DNA, 201 bp, Homo sapiens
  misc_feature (1)...(201): n = A,T,C or G
ctgttactcaatctcctactctccctctctttctatccttgccatcttccccatcacttctccatcataaattaatgacagcattgactaattttatcatnttttgaatcaattttcatagatccatctattcatttaaataaatgtctctgatatacatcatcttacaaacaccccaaaatgtaaaaccttaagcacaag

SEQ ID NO: 125499 - DNA, 201 bp, Homo sapiens
ttcctgtactttatgcttctgtaggcacagaaagtattttaaaacgtagaatggggcttttcacacaaaggagtaacacaaaggaatagatctgaaaggaytgtcatctgcgatcacttcctaccatcagttttaagtcaaatggaaaaagagttctcataaaaatgtcactaggtactctcaatggcactgaattagcta

SEQ ID NO: 125500 - DNA, 201 bp, Homo sapiens
acaagctgaggcagagaggtggggcagggggagaagtggagcgtgcccatcctgtatgatagtaatgacagatcctcagctagttgtttttctgtggtaargtagaccaagaatttccaactctgattttaagaagaaactgaaaatctacagatttctggaaattttctcaattattaaaagtcttctttttaaatttat

SEQ ID NO: 125501 - DNA, 201 bp, Homo sapiens
  misc_feature (1)...(201): n = A,T,C or G
gtgtgtgtgtgtgtatatatatatatatatatatatatatatatatatatatatattttttttttttttgcagttcactgggtattaatgcattgtagtgntatgtaaatttaaagatgcataagcagcattcgttaccttggtatatcaaaaaatggtaagaaaggagattttttaactgttttcaccacaaaaaataat

SEQ ID NO: 125502 - DNA, 201 bp, Homo sapiens
aatgaagtgtgtgtgagaatttaggaaatactgtgcactgttttgtttcacaatgggcattccagagctgtaaggcatttgagaatttgagaggacaggtrttaagtgcttatctgggttaatattgccttaattagaacacttgcacattcccacaattgtagtttcccctctccattttggtgactaataataccactg

SEQ ID NO: 125503 - DNA, 201 bp, Homo sapiens
ctccagcaaagcaagatgaaaaagtgatcatggctgtcgtgagctattactgaatgaagaacttcgttttagctcttctaacttgaaaaatggaaaaaaakaaagaaagaaatgaaaagaaaaagaaagaatgctggaggcaaatagcttttttttccttgagtctctcaaactcattgtcagtaaaacaaactgctatgt

SEQ ID NO: 125504 - DNA, 201 bp, Homo sapiens
ctctgtgtgggatcattagttttttcatcacactatttctagaattgaaaaatcacaaatccttctccagcttagttcttttttgcaacaaaagcattacycagaccagctaaaatgtattctttaggattctgacatctccggaatgtcaaacaggttcagtggacaccaagtacagattctctctttcatgtggaaagg

SEQ ID NO: 125505 - DNA, 201 bp, Homo sapiens
ttcaatgtgttattctttccagggttgtttacatttaaaaagaagctgctgagaggcaataatgaaatccccgtacattctcagacttaacagttatgatytgaagtattcaaactctggtctcaaacactgactattctcagggctcaaatttgacatcagtacactggggggctggtgtcagagagctactggagaact

SEQ ID NO: 125506 - DNA, 201 bp, Homo sapiens
atcactcagctgatacacatgaggacacctggcaatcaaactaaatattcccatttccagatgcaagacataactaactggttaattgcctttaaattttkggccttatggtttattttttaaaaatcattagaaaatagatagatgatgaaaaaaatgtggttccaaaagtttttcatttttctgaaaaatacttccatt

SEQ ID NO: 125507 - DNA, 201 bp, Homo sapiens
aaaaaaaaagttgaatgttttcaacatttattttatcaattaaatctgtgcctagactaaaataatgttatgttttaaggcttctctgcaattaaaaaaamagttgaattgtttcaacatttatgttatcaattaaatctgggcctagactaaaatgtggaatgctttcaaaatctagtatcatctctaaattctgtctga

SEQ ID NO: 125508 - DNA, 201 bp, Homo sapiens
caagtcattagatgtaaaaaaaacttttaaacgatacctggaactctgtaagcactccggaaacactgtctattctggccattactctctgcctaaaaatkatctgaaatttcttcaactccttgtgttactcacctcaggacctcctcgaggtccagcagggttttaaatattctgatagtttatttcagaaacttcatt

SEQ ID NO: 125509 - DNA, 201 bp, Homo sapiens
agcaagtttcctttaatgaaggtatcattatgtgcatattatagttctttcggccttactcccaaataattttttaatcggtagctccaagattgctacaytgattgaaattctaattatttggctgtgagcacaaatgtgctcataactttatcatgttgacataaatatcagttatttggtaagacaatgctccagtca

SEQ ID NO: 125510 - DNA, 201 bp, Homo sapiens
ttatatgtcttactgttttccttataagttcagaggtttctatcattttgctcactgtcgttcaatgaatgactaaatgaatgagtcaatgaattttaaayttaattacatatgcagtgtttgaaagaaagaaagcaagtttcctttaatgaaggtatcattatgtgcatattatagttctttcggccttactcccaaata

SEQ ID NO: 125511 - DNA, 201 bp, Homo sapiens
gatgagaagtatcacattaaatcttcagtatcaactgtcattaaatttaacatggaaataggtaaaatgagacagtttagaaataaaattgactttttttwaaaaaaagaaactatggactggaaagtgtatatactttagatgatgttcagagtgtaatagattctaatgatctatgtttgtcaagtcacttaacgattt

SEQ ID NO: 125512 - DNA, 201 bp, Homo sapiens
tattatatgtcttactgttttccttataagttcagaggtttctatcattttgctcactgtcgttcaatgaatgactaaatgaatgagtcaatgaattttamatttaattacatatgcagtgtttgaaagaaagaaagcaagtttcctttaatgaaggtatcattatgtgcatattatagttctttcggccttactcccaaa

SEQ ID NO: 125513 - DNA, 201 bp, Homo sapiens
agcttccagctgcactgagctctgcctctatcccagtgattccccacactgccagtcaagtccctaaggaacttgtctcctccagacgcaagtgcattctrtcctgaagaagtctggttgtgataggagccccgttcttgtagggacagaaaagaaaaggagtggaacatggtccagctgccagaagaaaaattggattga

SEQ ID NO: 125514 - DNA, 201 bp, Homo sapiens
aaatttatactaataatgatcacacactaaatctttttttttaattatactttaaattttagggtacatgtgcacaatgtgcaggtttgttacatagttayacatgtgccatgttggtgtgctctacccattaactcgtcatttagcattagatatatctcctaatgctatccctcctccctcatactaaatcttaatggt

SEQ ID NO: 125515 - DNA, 201 bp, Homo sapiens
  misc_feature (1)...(201): n = A,T,C or G
aattccctatgatggattcaggcagtcttttcccacactcagtggagtaccaagggtgaaaggcaaaacagcatttaacacaggcaggaagaggctgcaangtagagaattttttaaaaaataataaaactggccaaaaattagttcactttttattttcaccatgagtgcacaattcttacccatgtcagtgataaaacg

SEQ ID NO: 125516 - DNA, 201 bp, Homo sapiens
atggcaactaaggcaaagaaagcttgagaatgctgttcaaggtggcaaaaattaactcttatctatggctgaaagctatggtggttcaagcatggtgcttygtagatcccagtcatgggtcaggtctacaaaggttaactttgctgaactcccagccagctttgggaattgcttgtaatggttataaagagcatgtttgag

SEQ ID NO: 125517 - DNA, 201 bp, Homo sapiens
aaaaatgttatgtcttaaagcttttctacaatttaaaaaaaaagttgaatgttttcaacatttattttatcaattaaatctgtgcctagactaaaataatsttatgttttaaggcttctctgcaattaaaaaaaaagttgaattgtttcaacatttatgttatcaattaaatctgggcctagactaaaatgtggaatgctt

SEQ ID NO: 125518 - DNA, 201 bp, Homo sapiens
attatcttactattatcttcttagcttacttgttaagtcctttagctgaactctgagagcagggaccatccattctggtgtgcccagcactgagaacaacrtgtaactcagtatagactctataacatttaaatgaattaaaaatcattttttaaaaattaagaatgaacaaataaggcttttgaaggaaatctacagctt

SEQ ID NO: 125519 - DNA, 201 bp, Homo sapiens
accctcatggcatgataatcaaaaatcagtgaattatcacataatttaggataaagcatatttcacaagcaaaggctttatgagagaatatcagggctgarggctcaatagagatcaactagccccttagcactcaatgtgcagtcttagatgagcacctgggaacaaatgtggactctctttgcagacctttgaatccaa

SEQ ID NO: 125520 - DNA, 201 bp, Homo sapiens
ggaagacagtgatatttgaagatcctgatcctgtgtaggcctaggctaatgtatgtgtttgtgtcttagtttctaacaaaaaagtatgaaaagtaaaaaawaaaataaaatttaaaaatagaaaagtttatagaaaaaggatataaagaaagaaaacatttttgtacagctgtacaatgtatttgttttcagctaagtgtt

SEQ ID NO: 125521 - DNA, 201 bp, Homo sapiens
tgttttttaaatacttgcttgtactacatttaatctcttaaagaaaaatgtgaaataaatatttttgttaaaatcttgcatattattgcttagcaattggygcaatgaaaccaagtgatgaagaggtatgctgttcaagatttataaaaccctagagatgtgaaatagtcaagctgattgtgaaattgagtgcagatgcta

SEQ ID NO: 125522 - DNA, 201 bp, Homo sapiens
attgacgggcatctgggttggttccaagtctttgctattgtaaatagtgctgcaatatgcatacgtgtacatgtgtctttatagtagaataattcataatmctttgagtatatacccagtaatgggattgctgggtcaaatggtatttctggttctagatccttaaggaatcaccacactgtcttccacaatggttgaact

SEQ ID NO: 125523 - DNA, 201 bp, Homo sapiens
catatcagtgaataaatgtctgaattcaaaatctgtgacatcactttcaagtaaaggggaccagtctgtagacaaaatagaatgtacacctgtcactgccrttcttttgagtcattacagtttataaatttatacaccatgaaaagctttatttatgttcatatggtgtgaaaattgcaagaaaaactttaaattaattac

SEQ ID NO: 125524 - DNA, 201 bp, Homo sapiens
actcccacttatgagtgagaacatgtggtgtttgattttccgttccagtgttagtttgctgagaatgatggctttcagcttcatccatgtccctgcaaagracaagaactcattcttttttatggctgcatagtattccacggtgtatatgtgccacattttctttatccagtctatcattgacgggcatctgggttggtt

SEQ ID NO: 125525 - DNA, 201 bp, Homo sapiens
aacatggaaaggagcaacgggtaccagccgctgcaaaatcatgccaaaatgtaaagaccatcgagactaggaagaaactgcatcaactaacgagcaaaatmaccagctaacatcataatgacaggatcaaattcacacataacaatattaactttaaatgtaaatggactaaatgctccaattaaaagacacagactggca

SEQ ID NO: 125526 - DNA, 201 bp, Homo sapiens
gaataatactgctaggaacatctgatcaagcccctgctttcaatttttttgggtatatacccagaagtgaaattgctggatcgtgtgctaattctactttwaaaatcttgaggatcttccacactgttttccacagtagctgcaccattttacactcccaccagcagtgtagaaggttcccaatttctttaaatcctctcc

SEQ ID NO: 125527 - DNA, 201 bp, Homo sapiens
acaaagctggatggagaatgactttgacgagctgagagaagaaggctttagacgatcaaattactctgagctacaggaggacattcaaaccaaaggcaaakaagttgaaaactttgaaaaaaatttagaagaatgtataactagaataaccaatacagagaagtgcttaaaggagctgatggagctgaaaaccaaggctcg

SEQ ID NO: 125528 - DNA, 201 bp, Homo sapiens
agaggaataattgcagaatctacctcatgaggtttttataagaatcagacaagtcattagatgtaaaaaaaacttttaaacgatacctggaactctgtaarcactccggaaacactgtctattctggccattactctctgcctaaaaatgatctgaaatttcttcaactccttgtgttactcacctcaggacctcctcgag

SEQ ID NO: 125529 - DNA, 201 bp, Homo sapiens
cgggctgacactctgcctccgggcccggggagacctttccatctgcaaataacactggagaattcagactaatcggttcagcttccctgaggcaaaggggraaaaaaaatgtttcttcaaaggaaaaggattaagagggaaagtgagcaaaggcttgcctggtctccacttagggaatctgaaagagcacaatcaattgaa

SEQ ID NO: 125530 - DNA, 201 bp, Homo sapiens
gaagtaagctctgtgactgtatattgctagcttcctgtactttatgcttctgtaggcacagaaagtattttaaaacgtagaatggggcttttcacacaaargagtaacacaaaggaatagatctgaaaggactgtcatctgcgatcacttcctaccatcagttttaagtcaaatggaaaaagagttctcataaaaatgtca

SEQ ID NO: 125531 - DNA, 201 bp, Homo sapiens
gcctggtgattcaaagcaggaaagtgagtaggatagctttcctggaaattactgacagctacacagttaatttcccggagcaatatatggtaatgactctyaatgatgggatgttccaagttccaaaacacaacaccaggctggtggagtgtaaccaagtctctgttggcaaagaaaagtgtagaactgaagcatgatcta

SEQ ID NO: 125532 - DNA, 201 bp, Homo sapiens
cattctactttctatctctaagaatttgactactctagatatctcatataagtagaatcatacaatatttgccctttggtgactggcttattatacctggmgtaaggtcctcaaggttcatccatgttgtagcatgtgtcagaatttccttcctttttaaggctgaattccttcgtgtgagtatatgacattttgtttatt

SEQ ID NO: 125533 - DNA, 201 bp, Homo sapiens
aaaaaaaaatccacctcaatccaaagggatggcattaagtggaatccagtgtatcatggagcacctaatgcacacaagatgtggagcatgtcccctggtcrgaacttttaaatactaagtagcagtgaatgggagaaataaatcaaatgggaggatagctggaataataaacagtgaagatgcttcatactcacactccag

SEQ ID NO: 125534 - DNA, 201 bp, Homo sapiens
ggtggatatatgggatgcagaagaagtaagaaggatgcttcaacaatattgataccgttctattccttaagttgcatggtcagttcacagatgttcatctyattattatgttttataatttacatatatgttgcatatatccttttgaaggtaccaaaaactttagacttttaaaatgaggataaaaatcaattaacttca

SEQ ID NO: 125535 - DNA, 201 bp, Homo sapiens
atgtatttcgtgtcttctaggtcatgcttgttgtgttgaatgttttgcacccacagttagcacagcacctagcccagagtgggtacttaataaatataaawtgattaaataaatggaaaacctaattgaaataccaatgctttaaatgcttggctggaatatttgcggattgcattaaatatacttgcatgtttctaaatt

SEQ ID NO: 125536 - DNA, 201 bp, Homo sapiens
taacgctttaatagatcatgtgaaacatcaagggaggaatgtggtactgcatttctaaagcctccttctctgtctctgaatgataataggcatgggagtcrtcattagtcttgttagacgatggttcctttaggaatctctacgtgttaccttttagagggaaggtcaaagaagccacccctggggactcccctgcaggat

SEQ ID NO: 125537 - DNA, 201 bp, Homo sapiens
acccttagcttctattaagtctattgtaagatcagggtccatagtagcaaaactcatgctgccatagcttgaccagaaaccaggggacagttcagggtackcagctgcccctctgaaaagatgttagccatgaggcatctatagagcatctttagctgcctagtgagtttggctgactctccaatcaccacagaggtcccg

SEQ ID NO: 125538 - DNA, 201 bp, Homo sapiens
gatcatgtgaaacatcaagggaggaatgtggtactgcatttctaaagcctccttctctgtctctgaatgataataggcatgggagtcatcattagtcttgwtagacgatggttcctttaggaatctctacgtgttaccttttagagggaaggtcaaagaagccacccctggggactcccctgcaggatacaactaacacaa

SEQ ID NO: 125539 - DNA, 201 bp, Homo sapiens
aaagaaaaaattatgaataaatggtactccaagcctcaagcagaaaagaatctggtgaatttaacattgtatatcctagagatgagttacacatgactagyatgtttaagacaaacagcttgttaaatttcactacactcagtgctacaggaaaaagtttagaatgttttttaaacagtgaacttctcaaaggaaaagaat

SEQ ID NO: 125540 - DNA, 201 bp, Homo sapiens
attttaagataaagaaacccagagagattgaataacttgcccaaggtcacagagaactgagacttgaacctgggcagttggactccagagtccatgctttyaaccacttctcaacctggaaaaagagcccaagtttttggttccacacttagtgtctagggtctctgcttgattttaaaaattaaaaaataaataaatctg

SEQ ID NO: 125541 - DNA, 201 bp, Homo sapiens
tcaaaagtcacctttaaatacatgaacagaatagttcctttatcaaaactctttctttcacaggtttgctaaaacccacgtgcagatacctaaaagttcartataatgagtttctagctgctatgtatgtaatcaacttactaacttgttatatctttaacaaaattgcaggtatccaataaatccacaatagactggatt

SEQ ID NO: 125542 - DNA, 201 bp, Homo sapiens
tggattcagtgtcactctctttcagtccttcctcaaaagaccctgtatccaggatccaattgtaactgctatcatgcacatggagaaggtaatatgaatcygacaagccaaaacaaagcaaaccgggaccccatggctgccatgtgggagggggcagatttatccaccctcacgtctcagcttcctgagtgtggagcctgt

SEQ ID NO: 125543 - DNA, 201 bp, Homo sapiens
agagagattccacagtactgaagaagaaaaggagaatggatacatacatattcagacaatccatcaccgtggatcattttgcatttcatttacgcaatccrtttttgtaggctctaaagtaacttttacattgctttcagctgctgcatgatttgctatatgccagcccagcccagcccaggtaggttagagccaaacact

SEQ ID NO: 125544 - DNA, 201 bp, Homo sapiens
attagtcttgttagacgatggttcctttaggaatctctacgtgttaccttttagagggaaggtcaaagaagccacccctggggactcccctgcaggatacwactaacacaagcataaactgtatggaaatggctaaattgtctttactgagaccttagtctttcgcatcaatcaagtccttctgaactagtaaaacagata

SEQ ID NO: 125545 - DNA, 201 bp, Homo sapiens
aaatgttacttttgctttctttgtgtttaattttagggcaataatttaatgtttaagccaaaaacctggaggtttccctaattctttcctcatcttcatcwtcctcccacaagattgatcaccaagacctgctgcttccagcctctaaaactctctcaaaatgtccaactttctttttcccctcatcccctgttctagtcc

SEQ ID NO: 125546 - DNA, 201 bp, Homo sapiens
actgtgtagtaaacttgtgagtaatttgaatctcattgcagcaaactctctggagcctttctagggaaatataatgggaaacattatttgaaacaagcacrccattgtctggagctcaaaaatctactttgaaataatagatgttgctgcaagacaatttgatgccctaatatgtttaaagtcatagttaaatacacttaa

SEQ ID NO: 125547 - DNA, 201 bp, Homo sapiens
gtcttgtaattttttgtttttctcaaaagggtactttactagccacagttcttcatcctgcacgcgcacacacacacacacacacacacacacagcatcttattgtttattctgctattgaagcagttacataacaggttacctgcaaaatgggagctggaaaaacatacatagttttaataaagatcaagcgacattaga

SEQ ID NO: 125548 - DNA, 201 bp, Homo sapiens
tttcttatctggatagtattcatttcttccggccacgttgcctccgcacagccgtttaccatgagatccttattggatatttagagtatgtgaagaaattrgggtgagtttggattaaattatttggaactagtaagaaccctttattttttactgtatgtttattccgtgaaataatgggtattttaagttttatgcgtt

SEQ ID NO: 125549 - DNA, 201 bp, Homo sapiens
aaatgtctgaatctttcccatatcgaaccaaagctctgtttgcttttgaggaaattgacggcgtggatgtctgcttttttggaatgcacgtccaagaatayggctctgattgcccccctccaaacacgaggtagttttccagctccttccagggcgtgtcattcagtgagccgtgttaggatagaccagggctcttaagtg

SEQ ID NO: 125550 - DNA, 201 bp, Homo sapiens; identical to SEQ ID NO: 21356

SEQ ID NO: 125551 - DNA, 201 bp, Homo sapiens
ctttcccatatcgaaccaaagctctgtttgcttttgaggaaattgacggcgtggatgtctgcttttttggaatgcacgtccaagaatacggctctgattgyccccctccaaacacgaggtagttttccagctccttccagggcgtgtcattcagtgagccgtgttaggatagaccagggctcttaagtgtcccagaggagc

SEQ ID NO: 125552 - DNA, 201 bp, Homo sapiens
ctgcttttttggaatgcacgtccaagaatacggctctgattgcccccctccaaacacgaggtagttttccagctccttccagggcgtgtcattcagtgagycgtgttaggatagaccagggctcttaagtgtcccagaggagcctgtgagccttcataggggattaaagtaaatgaaaccacaattaactaaccaaagtag

SEQ ID NO: 125553 - DNA, 201 bp, Homo sapiens
gtattggggattgagggaatgtcttttttgtgtattgttttggttgccactgaattggtttatagtttctgtactttaattccttcttgccagtgatgacmataccctcctgcacacggaagttcttcttcataccggattttaggatatttacaaaatagtgaatggccagaatattgctatagttcattcagggaaaaa

SEQ ID NO: 125554 - DNA, 201 bp, Homo sapiens
aaaatcaaaaaattagccagtcctggtggtgcatgcctatagtcccagctacccaggaggatcacttgagcctaggaggttaaggctgcagtgagccatgrtcacgccactgcactccagcctgggcaacagagcaagaccttgtctctgaaaaaacagaaggaaaagaaatgatagtggaatatgtagaaaaagacattg

SEQ ID NO: 125555 - DNA, 201 bp, Homo sapiens
ttttccacggtgttaggattccatgtggaggattaaaagctaaagtagaaacataattctatctgcccttttacctttcttgcctgccattccccagactktcccctgcagaaacactcaggctgagcaggacccctgccctgtgcctgtggggctcatggcaggagtgagagatgagctgctgctccgagggcacccagg

SEQ ID NO: 125556 - DNA, 201 bp, Homo sapiens
gacatgccctgtaaccatgaggaggtaccccaaattgaaggaccttctacaataacaactggcctctattcttcaaaaatgtcagttatggccgggtgcartggctcacgcctgtaatcctagcactttgggaggcttaggcgggcggatcacctgaggtcagaagttcgaaaccagcctggccaacgtggcgaaaccccg

SEQ ID NO: 125557 - DNA, 201 bp, Homo sapiens
tttcttttaattaattaagtcttcttttttaacggtaaaatgttttggtgctgcatttagataaataacacaaaacaattttaatgttttctctatgttayataaataggaataattgaagttttcttgttttttgtttgagacggagtcttgctctgtcacttaagctgaagtgcagtggtgagattatagctcactcta

SEQ ID NO: 125558 - DNA, 201 bp, Homo sapiens
ccacgagggcttcatgtgcagtcaggaatctgggcaagaaggaactaaaagtggcttttctcagtttgccttaactgtggctctctgtgccgagtggtgcyattcatccttttgttcagtgacgaaaactgaattccatttaactgattggcagcagggttggtgactggttggtttttgggttttggtttgtttgtttgt

SEQ ID NO: 125559 - DNA, 201 bp, Homo sapiens
agtcccagctcccagctcggcagcgctgtgacttgggctggtgacatcacatttgagttttgcagggtggggtgtgtgtgtgtgtgtgtgtgtgtgtgtgwgtgagagagagagagagagagagagatctctaaaaggggctttttaccctgcagtattccatttgtttcttttctttctcttctctcttctttctttctt

SEQ ID NO: 125560 - DNA, 201 bp, Homo sapiens
aaggtcgtcagggatgaaggtaggcaaggacaagtcatgtgcagggcgccttagagggccttcagaagatggaaagtcgctcctggctgaacattcagatytgattctgtaaacagaattgaacataacttacaaagagactgagtcctgcagttggaagttgatgcttagattagtcgcctgtgttttcacagcttctaa

SEQ ID NO: 125561 - DNA, 201 bp, Homo sapiens
cgctccctaggaatgcattgactgcgtatcgcaactttacccaggtgtcctcgggcgaggcttggagcctgccatgggtatccctgactttagttaaaatwttctgtttgaatgtgggttcggggtttggtgtataggaaattgattgaaaacagcttggtttttcatttttaaatatgaggggtgggtttattttgcccg

SEQ ID NO: 125562 - DNA, 201 bp, Homo sapiens
gctctccaattagccacagtccccactgctccttcctgtctcataccacacctgcctctgagaaggacttttggtccctgccccaactttcaaggagattyttattccaaattagaaatatctgtagtgaaaaatctgagtatgtgcaatttttaaagcagttttacatttaaaaacttttaaattaggctgggagctgtg

SEQ ID NO: 125563 - DNA, 201 bp, Homo sapiens
gtagggggcatctggtgttgtcctgtaaaggaaggccaagaagatagcctcacgtgccatgagaaggtgtttgaacttcttccatagacatgatgggtctsttagggttagggtgaggttaaactccagctaaaatggcttaagtgatagtaagtgtattttctcacataacatgaagtttgaaggtggggaagtactagg

SEQ ID NO: 125564 - DNA, 201 bp, Homo sapiens
agctcccagctcggcagcgctgtgacttgggctggtgacatcacatttgagttttgcagggtggggtgtgtgtgtgtgtgtgtgtgtgtgtgtgtgtgagwgagagagagagagagagagatctctaaaaggggctttttaccctgcagtattccatttgtttcttttctttctcttctctcttctttctttcttttttct

SEQ ID NO: 125565 - DNA, 201 bp, Homo sapiens
gtgtgcccggtgcatgtgatcaaatttgagggaggggacctctgtctaggagctgaggggttgaaaggaggaggagcccttggcagcctgagaaacaggakctacttggactgcagtgcatgtctgtagagactggcctgtggggccaccagtgtcacttagatgtgtctgtgaagggtggcagtgagctgagagaaaaat

SEQ ID NO: 125566 - DNA, 201 bp, Homo sapiens
gtccgtagctctatatatttattttctaagtctctatctgtaaacaatgcatttacttgaatcgacccaggaacctgccaagcttagtgagtttcagtagsggccttcccgcacatgaatgagatcactaagggggaggtttgtaaccacctgtggtgggggcagccaggagtgtattcttcctcctgggttagggcgtcc

SEQ ID NO: 125567 - DNA, 201 bp, Homo sapiens
tcatgtttttctaccaagtaatgaagaatgaactggaaaacaagccacctgaaactcttcctagaacaaagcaagagatagataatactgagaaatgccarctttagacattgtcttgcagttattgactttaaattattgtagtaaggatgcatgcctgttttaagtactgtagaaagtctgttcattttatagaatcct

SEQ ID NO: 125568 - DNA, 201 bp, Homo sapiens
agattctaacaatgaatgtaaacccagcaaggagctgggaatcctcggatgatgggcgtcagctgctccagaggcattaggtatgggtgtgcacagaagcytgccctggtctctggaaacatctcttctgtagcttgtgagggtgctgtcctttcagggcacctcctcaccctctttgttgctatgacactttggtactgt

SEQ ID NO: 125569 - DNA, 201 bp, Homo sapiens; identical to SEQ ID NO: 21285

SEQ ID NO: 125570 - DNA, 201 bp, Homo sapiens
cgttcttgacgtccctttttatgagtgagtggagtgtagatccgtggaaaaaggtgcttctctgccttgcatgagcgctctatgtggaaggtctggggaawacatcgggtggctttgtcaggtgacttattgaggccctctgtcccgctgggccatagttggattgcagtgtaaattaatttcgtctttacaaagattcac

SEQ ID NO: 125571 - DNA, 201 bp, Homo sapiens
taacatctatcactcatagactgccagggttgctttagctgattttactagttgggggtgactgttcccttttctgtgtgctgtcttcctctctcagaacrgtaataaagtgaagccacgggcccctcttcctccccttcttaaacacgaacaggctaaattgtccatttctccagcagttttgaggcagacaaggagtct

SEQ ID NO: 125572 - DNA, 201 bp, Homo sapiens; identical to SEQ ID NO: 21267

SEQ ID NO: 125573 - DNA, 201 bp, Homo sapiens
aacaaaggcatgaaagaacacaggttgctcaataaaactacaaggcccctagagtgggtggttggtaggcagaggttaacttcatgaagggccattacacygtctcttgacgtttagactttatcctataatgtgctgaggaggttttgaagaatagcactggttctagtgtaagagggtcatctttggtctatgaggtga

SEQ ID NO: 125574 - DNA, 201 bp, Homo sapiens
cagacaaaatgctcaatgtattgaattaagattagatttgggacttgtgggggacctgtcctagtggtagtgaactggccacacggtggcccacgcctcaktcttctgtagccgtgtgagtgcgcaagtgagtgagactgcagctgccgcgtcccattctgcacttggtggttcagcctggcgctcgagtcctgtcgcact

SEQ ID NO: 125575 - DNA, 201 bp, Homo sapiens
cgtgtgcgtggggagtgctgcgtcggggtttttacctggttgcccggacctcaggctgctgtcagaggtctgaagcagccacgtgccctggagaggaggcrgtgtctgcggaggttggtcaagagtctgtatcctgggctttgatggaaatgagccctgaggcatgttcttggtgcgcctgttttcatctctaaagtgagc

SEQ ID NO: 125576 - DNA, 201 bp, Homo sapiens
ctcaaagtaacccagagaacaaggtgtggacgcacacacagacttctacaagtgactctggtcttgtggttccgtgtgctttaacagtgcgccttctttgyctcctagtttcgttgattgcaaggagtgtggccggaagatgcatcagatttgcgttctgcactatgacatcatttggccttcagggtgagttgtttcccc

SEQ ID NO: 125577 - DNA, 201 bp, Homo sapiens; identical to SEQ ID NO: 21358

SEQ ID NO: 125578 - DNA, 201 bp, Homo sapiens
tgagatgcatgttgtaaacaatatgtagagctcattaaactgtgcatttgtcctccatccagaggtagacaaataacagaacaaattttaaatttgccatrtagtttccaaccatcctgttttgacatatggtcaggtgtagtgcaaaagacactattaaaaatacatgccaggctgggcgtggtggctcatgcctgtaat

SEQ ID NO: 125579 - DNA, 201 bp, Homo sapiens
cagtttcatatggtccagctggtatagtacacagcttttcctgtagttgtgtatattgtagagtgagttggattttggttgctacagtgaagagccagccrttgtcttgcttggatgataattgtatacaagtgaacttgaatcagccttgctgctgagttgggttgatttctgtgctgctggatcttcttaaagtcatca

SEQ ID NO: 125580 - DNA, 201 bp, Homo sapiens
acaggctgtggcaagggctgatgtgactcccaggtcagaggaagtcggaaggaagggggctggtgtctactgtccgtgagcttacaggccaggggttcttsgggcatgggtcaggttatctttgagccttcagggctgttgccaggagtgaaggtccttgggagcaacacataggcagtccatgcccccgtcctgtccatg

SEQ ID NO: 125581 - DNA, 201 bp, Homo sapiens
cactcactgcctctccctctccctgccccctgcatacatgcacttgaagcagcatggaacagcagagtcactttgttcactgagccaacacgaagacatgrtatttcctgacagttactccatacgtgagaatttaaattccatgtcgctataatggcagtgacgtcttagggagggggatagaggggatacttcttttgg

SEQ ID NO: 125582 - DNA, 201 bp, Homo sapiens
ggggatacttcttttggaattggaaagcccttatcctgaagtaaattttgaaggctctgtcagtcagtctgggtcagtataaaatcccacacagacatttrtgaaggtttccctctacgtggagctatggtccccagaactctttgtataactaaacgttcactctgcttcacagtgagagcctctgccctagggctgctg

SEQ ID NO: 125583 - DNA, 201 bp, Homo sapiens
ctcaagaccccgcagctgcctggagaacatgtgctgcttttctttctggttgtttctgagtggcccagggaaagatggaaaaagtgctttgttcctaagastactgtggagtggcgtgccagtgacagcccccgtggttttccttttactgagtccagcccacctccctctggcggcgagggagtaggcagcgagctgacg

SEQ ID NO: 125584 - DNA, 201 bp, Homo sapiens
cgaaactccgtctcaaaaaaaaaaaaaaaaaaaaaaaagccagtttcctaaaagtcagttaaattattctttgattgactaaaatttgaattaataaacartttccctggacatttcttatataaagtgacattctggaatcctgggtcttctagaaccagatatttgggacagtagttctaatggaatacagtctgtttt

SEQ ID NO: 125585 - DNA, 201 bp, Homo sapiens; identical to SEQ ID NO: 21361

SEQ ID NO: 125586 - DNA, 201 bp, Homo sapiens
atgtcgaaggatgtgaccgagagcatggtctgtggatgctaaccctaagtttgtcgtaaggaaatttctgtaagaaacctggaaagccccaacgctgtgtytcatgctgtatacttaagaggagaagaaaaagtcctatatttgtgatcaaaaagaggaaacttgaaatgtgatggtgtttataataaaagatggtaaaac

SEQ ID NO: 125587 - DNA, 201 bp, Homo sapiens
ggggtccataattgctgacttgtgtttttacttgatgtatttgaaaacagttaggaaaatgattttgccaaagtgtgtcttaccttagttaagatgaaatrtaccttattgtgagtttctgaagattgcaaaagcttgtcagtttagtttttggggtcccattagtgagggcacccctctttaccttactcaaaccagctc

SEQ ID NO: 125588 - DNA, 201 bp, Homo sapiens
tacttagaaccatcttgagaagatgaaacctcgaggcaaaacttaaggaaagggtacagaaatgcagtcaagtgcaaaaactctggaaccagaaagggtgmtctgaataaggcttcatttactccctcccctgtttcctgagtgtccccgtgtgcagaagtccagggccgcatgccccagtgggaggcaggccctgggatg

SEQ ID NO: 125589 - DNA, 201 bp, Homo sapiens
atggggctactagggtgcctggcatatagcaggttgaggcagctgtttttattgtttaattgtatgggaaaatattagccatcacctacttcttgggccastgaggactaagatgatgtagcctgacccggaatcaggaggcttctcactgaatacatgggaagcttctgcccctgcctgtttggctttcagtgccagctc

SEQ ID NO: 125590 - DNA, 201 bp, Homo sapiens
acctttttattattattttgagtcagggtctcactctgtcacccaggatggagtgcagtgacgtgatcttgactcactgtagcctccatctcctgggctcragcagtcctcccacctcagcctcctgagcagctaggactatgggcatgtgccaccatgcctggctaatttttgtacttttttttgtagagaccgggtttc

SEQ ID NO: 125591 - DNA, 201 bp, Homo sapiens
ttactagagacggggtttcaccgtgttagccaggatggtctcgctctcctgacctcgtgatccgcctgcctcagcctcccaaagtgctgggattacaggcktgagccaccatgcccggccacacatacattcttaaaagcattttaaaattataattcagtgaatttggagtcttcccattgttttcttttaatttgtata

SEQ ID NO: 125592 - DNA, 201 bp, Homo sapiens
tcgtgctgaatgccccattaggttaagatcatagaaacgtggcagttggagagctgtaaaggttgcttagtttctcatttccatttctgtttaatttctarattttggatcattgtttgacttggaaaatgatcttcctgatgagctgatacccaatggaggagaattaggccttttaaacagtgggaaccttgttccaga

SEQ ID NO: 125593 - DNA, 201 bp, Homo sapiens
ggctgcttctgcaaaggctagctcctagctcagcccccacattcttcttcctccaggactgttcttggctggagaatcctctccctgtaagcagggtggayaggcagctgactgtagcacctctccggggtctggtgcccctctcagctgtggtggtggtaaacaacccgtttttgctcccctgtcccagatgattgggct

SEQ ID NO: 125594 - DNA, 201 bp, Homo sapiens
tcggcgtggggcctgggctttaagaagcctccagatgggtgctggacacagtgactcacgcctgtgatcccagcactttgggaggccaaggtgggtggatrgctcaactctaggagtttgagaccagcctgggcaatgtggcgaaaccctgtctcttggaaaaaaaaaaaaaaaaaaaaaaaagcagcagcctccaggtgg

SEQ ID NO: 125595 - DNA, 201 bp, Homo sapiens
aaaaaaaaaaaaaaaaaaaagcagcagcctccaggtggctccaaggtcacgcacatcacacacacacacacacacacacacacacacacacacacacacaccacacacacacacacacacacacacacacacacacacacacacacacacacacacacacacacacggccaagagctctgctagggaaaggcctggactgg

SEQ ID NO: 125596 - DNA, 201 bp, Homo sapiens
aaaaaaaaaaaagcagcagcctccaggtggctccaaggtcacgcacatcacacacacacacacacacacacacacacacacacacacacacaccacacacacacacacacacacacacacacacacacacacacacacacacacacacacacacacacggccaagagctctgctagggaaaggcctggactgggatttgca

SEQ ID NO: 125597 - DNA, 201 bp, Homo sapiens
gctccctcactcccctctaggaattttgacccccctgtgaaatgacgtgggtgtcccttgcatgggccgagtcaggctgtgcagggcaggcaggtgacagytcccaccatccccctcccaggacagtcaccatcacctgccaacccggagcctcctcacttgctgtggtgtctgtagcggggcagagcgggtcctcagcag

SEQ ID NO: 125598 - DNA, 201 bp, Homo sapiens
ttcagagagggattgggaataccaccatggagcacttggagcaccttgaggttgcagtacagttgatggtggcttatacatagtgactcccctttcagtcagccatcaccctgcagtgaatgcctgagcacccttacccttcagtatttgtgtcatttcatgtaatagcatcatttggacttcaaattcagccatgcttaa

SEQ ID NO: 125599 - DNA, 201 bp, Homo sapiens
gtcataaagtgcaccttgggagttgcttttcatttatgttaatgagtgcttggtgtatgtagttgtgtctgatgagtgttaatgagttgatctgaatatcrttattagaaaagttaatagtatggaaagtataattaccaggaattttttttcacacattttagtttaattaagttgctctggtaggtattgggtttatta

SEQ ID NO: 125600 - DNA, 201 bp, Homo sapiens
gctgatggttgaatgtgagaatattactgttacacatagtggttgggatttgaaagaaaggctttgtggtcgtgttttatgtatcaaaaatggtgtgttayagcaacaacactataagatgctatttttaacatgactctaaaatttgtggaagttagaaaggaactcaaaaataggaataaatggtatcatatagaactt

SEQ ID NO: 125601 - DNA, 201 bp, Homo sapiens
atctctgctccttctcttaagccctctgtacctgtgcaggtgagcagtgaaggacagggttggggtcaacaggagggggctcctctgttcatctcagaggygtctgctggtccccagagaatcagacgtttcccttgtcatacatttgccactccctggaactgacttcttgaggagtctctaggttttaagacataataa

SEQ ID NO: 125602 - DNA, 201 bp, Homo sapiens
ttcctcacttactgctaggcagaataaatgagtccttcagcacagttcctttctccctaggcttgtttactgctttatgatattcatgtgtagtattttgrtgaaatgtatttgcttctcaatagtttttaaatcattcgtgggcttctcccttttacttacctctcgtttttgtctgtctgtctgtttgtcgttatagcc

SEQ ID NO: 125603 - DNA, 201 bp, Homo sapiens
tactgctttatgatattcatgtgtagtattttgatgaaatgtatttgcttctcaatagtttttaaatcattcgtgggcttctcccttttacttacctctcktttttgtctgtctgtctgtttgtcgttatagccatcctggggtctccagctagtggaattcaaaacacaattggttctgttggcacagggcaacagaatg

SEQ ID NO: 125604 - DNA, 201 bp, Homo sapiens
ggtggagacacagaggtgtgtgtcagtgcagctgagtcactcaggagcgatactaatgaagcagaatgaaagtaagaggctgcatgtgggtcatttataaytttttcacttagatagcagctaacctccataaacacaccttactttggttacaaagtagagtggggagggtgtctactgattatttgtgcacgttgatta

SEQ ID NO: 125605 - DNA, 201 bp, Homo sapiens
acgttgattaccattattgaaaatatgacactcagagttcctgccgcagtgcttactataactggccagaatcacttatttaaataaccaccaattgtttwtatggtggcatgttggttatctgtcatcaaaactttgaagtatatattaaaatttaactgttgattgatttcttttctgtctttaaaggaaataatccaa

SEQ ID NO: 125606 - DNA, 201 bp, Homo sapiens
ccagcaggaggaataacaacagatcagcagcccccaaacttgatttcagaatcagctcttccgacttccctgggggccacaaagtaagaccctgtttcagwtctgagtgacagtccaacaggagcatggactgagaaccacacaaaactgattctttctaaatgtgtggcagagaaaatagtttaaatggggtggtgaggg

SEQ ID NO: 125607 - DNA, 201 bp, Homo sapiens
ctgtggagtggacttactttgttggtcttcatgtccactttagtacttcagaaggcttcactaatcttcccccactccccaaccttgtttgtcatattttsataattttctgtcccctgtctagattgtgatcattgagggagcaagacttaaactggctgcatagggttaagcttcgtgaacgccaggatctctctctgt

SEQ ID NO: 125608 - DNA, 201 bp, Homo sapiens
agaggggcctcatcttcaggttctcccacgtggtctcctgcaagagttatttctaatgtggagttcgtaggtgtgatttttttttttttttaagaactgcrttatggagacttcaccattaaagttgagatgcaggagattcatcagtagtgctgcttatttaaaattgctcatgagtgatgttacgatttgttgtgactg

SEQ ID NO: 125609 - DNA, 201 bp, Homo sapiens
gctggagtcggctccccagaaggcaactgggagtgacacagagctcactccacttttgtgaaatggaaggtgtagtggccacggaaaacaaatcgttacamactgctccaagaggtctgcgtagcactcagcggttcagattgtcatagggacctctttagatggagccatcagagaaggccacattgaggaaggagattt

SEQ ID NO: 125610 - DNA, 201 bp, Homo sapiens
aatcacctggtgccctctgcagctctttcctggagtgatttagccacgtggtcttgggccagggagctcttgttcctctcccctcctagtttctataggartccaacactgggtagcattgaggaagggaaggatatgatcattcaattaatttgtcacatgtgttgaaagccttttgtgggctcaggtgctggagtcggc

SEQ ID NO: 125611 - DNA, 201 bp, Homo sapiens; identical to SEQ ID NO: 21348

SEQ ID NO: 125612 - DNA, 201 bp, Homo sapiens
acaacctgtgagacctccaagtaaggattttatttcctactgccatcccttagcctgtttccttggttttccttcgtgtttggggtgtatttctaagaacrgagaattagaatatctgatgcatgccctgcagaagctgttgatgtggcagtggccctgaccacctgcctcaggctgtgttgggacactgagtttctctct

SEQ ID NO: 125613 - DNA, 201 bp, Homo sapiens
tcatctaatctttaaaatttgttaacttaaagctgtgcaaaaatgtgtgcagttctttgtcatttttgatgtttgtgattatttctcttctcattcctaatttttttttttttttttttttttttgagatgggagtttcgctctttttgcctaggctggaatgcagtggcatgatctcagctcactgcaacccctgcctcc

SEQ ID NO: 125614 - DNA, 201 bp, Homo sapiens
gaagttcattagttagaacctacaacacagatcattcagttgctttttacagttttaactgtttcatattgaatattattgctttttaggatgaatattaycacttattagcagagaaaatctacaagatacaaaaagaactagaagaaaaacggaggtcgcgtttacataaacaaggcatcttggggaaccagccagcct

SEQ ID NO: 125615 - DNA, 201 bp, Homo sapiens
caacgtgtcaccaattttgttccatcccaaggcatcagggccatcaggctcagccacctgcctattctgcaggctgggtggctgcgcctgccctgagctcwccactggaggtgccatgtcccttgtgtgggactaaagcccctcctctcctgcaggtcttcttcgtgatccacctgcacgctgggcctgtcatcaacaccc

SEQ ID NO: 125616 - DNA, 201 bp, Homo sapiens
ttcaaacagttctcccacgtcagcctcccaagtagctgtgcttacaggcgcacaccaccatgcctggctaagtttcgtatttttagtagaggaggggtttygccatgttggccaggctggtgtcgaactcctgacctcaagtgatccgcctgcctcagcctcccaaagtgctgggattataggtgtgagccaccatgcccg

SEQ ID NO: 125617 - DNA, 201 bp, Homo sapiens
ctgtcccgaaggctgcagcacctacagccacctgtagccgttcacgtatggggtctgcctggtggtgacctactttggcctgagcttcctgatgcccacgrcctgggagctgggcgtccgtgccaagtgtggaggggcacttgcctggtctcacagccttgcgtgttgttgcagggcagtcagggcgacagcaagaatgcc

SEQ ID NO: 125618 - DNA, 201 bp, Homo sapiens
gaggtgatcctcccacctcagcctcctgagtagctgggaccacaggcacacactaccacgtctggctatttttttgtatttttagtagagacagggtctcrccatgtttcccaggctggtctcaaactcctgagctcaagcgatctgcccacctcgacctcccaaagtgctgggattacaggcatgagtcaccacacccag

SEQ ID NO: 125619 - DNA, 201 bp, Homo sapiens
ggtgccattcatccttttgttcagtgacgaaaactgaattccatttaactgattggcagcagggttggtgactggttggtttttgggttttggtttgtttrtttgtttatcacatcctgtttggtggccagtgtaaataccatcaaaagaaaaactggccaatcacagcactgtgggaggccgaggtgggaggataactgg

SEQ ID NO: 125620 - DNA, 201 bp, Homo sapiens
ctttgcctgtggtctgattgggttatggctcttaatctgaaatactaattcagccaagcaatttttgtaagacccataaagaagtcagctttcgacgggcrtggtggctcacgcttgtaatcccagtactttgggaggccgaggcgggtggatcacctgacgtcgtgagttcgagaccagcctgaccaacatggagaaacc

SEQ ID NO: 125621 - DNA, 201 bp, Homo sapiens
aaaaattccattgagtaagaatttgcaaattaggaattcttttagtggttccttcgtgtaatgttcatttactccaccagcacccgtgttcctaccgttcwcacaggctgggtaacactgtctttgggtaggcacttgatttccctcccttcagatgtgcttaggcattcataattcagccttttaccatacacattaacc

SEQ ID NO: 125622 - DNA, 201 bp, Homo sapiens
ttagtattagaaatgcaggctttgttctatttttttaaatttatttttatttattttgagacagggtctcactctgtccgccaggctggtgtgcatttatktgatcacagctcactgcaatgtccaccttctgggctcaagcaatcccacctcagcctcccaagtagctaggatgacaggtgcatgccactatgcctggct

SEQ ID NO: 125623 - DNA, 201 bp, Homo sapiens
ccccatctctatttgaaaagaaaaaaaaagagaaaaagtggctcggtttcagtgtcttgttagtcacttaggcccatggcctcttagttagttataaagcrtacttttacagtgtaaaaactgtaacctcagagccaagtcttgccgtactacttggattaggtacgttatttcttcagccctgcccgttctaaaacgcag

SEQ ID NO: 125624 - DNA, 201 bp, Homo sapiens
gttctctttcgctgtgctgcagatagccctccctctcacatggaacattatctaagcagcagaattcatgtcacttgagaatcctgtggttcttgttcctytgaatttgggttatgctttatttctttcatctctcattttaaaaaaattattactacacagaattatttgactgttagttattttattggaataacaaat

SEQ ID NO: 125625 - DNA, 201 bp, Homo sapiens
ccaaggctggagaaggcagcctcagatatgtggccagcagggaattgtcagcatctgttgactgagagctcgctgttccgaggctgctttctaaacacttyagagaactcataggcatgtcttaaactttaaattatagcctgctattgatttctattcagaggacattttgaagctggctcatttgagagattgcctgag

SEQ ID NO: 125626 - DNA, 201 bp, Homo sapiens
agagtagaaaatgtggattttactattctacctgcaaatatttgcctggtaatttggcctgatcagtctcatggaaagacttgcatgagtgctgcttcctwtaaggcagaggaaaagggtccatgatctttatttttaaattttacactagcagcacgatacaaaatgagatctggtgttttaattgagttcaagaatgtg

SEQ ID NO: 125627 - DNA, 201 bp, Homo sapiens; identical to SEQ ID NO: 21284

SEQ ID NO: 125628 - DNA, 201 bp, Homo sapiens
attttagtctcagatgcaaacatcagtgggaattgtacccacacaagcaattgcaacaggccccactgcagatcctgaaaaacgcaaactgatacagcagyagctggttctactgcttcatgctcataagtgtcagagacgagagcaagcaaacggagaggttcgggcctgctcgctcccgcattgtcgaaccatgaaaaa

SEQ ID NO: 125629 - DNA, 201 bp, Homo sapiens
tgcccggacctcaggctgctgtcagaggtctgaagcagccacgtgccctggagaggaggcggtgtctgcggaggttggtcaagagtctgtatcctgggctytgatggaaatgagccctgaggcatgttcttggtgcgcctgttttcatctctaaagtgagcctgttaaacacatgggtttttccttccaacttttaacttt

SEQ ID NO: 125630 - DNA, 201 bp, Homo sapiens
gctttctgctctgtgttgtcttggtgtctgcgtcttacctctgtgtctgtgctatttgttcccttccctgttctctaatcctgcctttccccacctgcccsctgttcctttcattgtcctcactgacccatcaatcaaccaacaacgcccccccttcgtcgtggtgctctgccctgctctgattggtggcttcgttgcttg

SEQ ID NO: 125631 - DNA, 201 bp, Homo sapiens
tcataaaaatagattataactttgctggtgtgacttctgagtgtccattgttttatctcttgaaattagataaaataatccccctgccttgaagattgttytcctaatataaaaaactgttgtctgttaacagttatcagtgaaagtgtttattttgtttgatttcacctgttcatgaagccctggtccttggaggagggg

SEQ ID NO: 125632 - DNA, 201 bp, Homo sapiens
aaacagcatctgaactcttacatgcttatttcttacactactgttgctcatcctacattatgccatttaatctgtgtatcaattctagggttggggttcaytgatgctgagtttgtagccaaagagtgaaatatacttgggtggtcccctaaaaggtaaagagggcaataggaaaaagtcttaaagagaaagatgacccag

SEQ ID NO: 125633 - DNA, 201 bp, Homo sapiens
atttgcatactacttttgccagtgtactcaatgaggaagttcattagttagaacctacaacacagatcattcagttgctttttacagttttaactgtttcrtattgaatattattgctttttaggatgaatattatcacttattagcagagaaaatctacaagatacaaaaagaactagaagaaaaacggaggtcgcgttt

SEQ ID NO: 125634 - DNA, 201 bp, Homo sapiens
aaatttggaaacagtagtttaaatgccgttgtactgcaaaacagatctccgttgcttcattaatcttgctgtgtttgagtagtcttcagttctgtgagacrtaggtcatacgtggcgagttcagctttgaagcttgtcttctgaaactggtaacctggatggctttgtagctttgctgttgttgaatgaatttgttgtaga

SEQ ID NO: 125635 - DNA, 201 bp, Homo sapiens
tctcttacctttggcttgggagaacgtggccctgtgtgtgtcaccactgcacagtacctccctcctgaaagactttaacacacttcatgttcctagatgagtgtgtgtgtgtgtgtgtgtgtgtgtgtgtgtgttgccacagccttttcaacttccagtgtcctaaagataagagcatcactgctgaagagagctaggggc

SEQ ID NO: 125636 - DNA, 201 bp, Homo sapiens
ctcttacctttggcttgggagaacgtggccctgtgtgtgtcaccactgcacagtacctccctcctgaaagactttaacacacttcatgttcctagatgagtgtgtgtgtgtgtgtgtgtgtgtgtgtgtgtgttgccacagccttttcaacttccagtgtcctaaagataagagcatcactgctgaagagagctaggggcg

SEQ ID NO: 125637 - DNA, 201 bp, Homo sapiens
tgtattaagtgcattttgataaatcagtatttcccttctgattcacattacagtttctaaggttctgtaatttttattgcagttagtttaacctgataccrtagcttgatttatttccccttaattcaaactttgaagttcatcatgtttccatgttaaatgaacttactaagcacatttccgtgtaaaagagtccccctg

SEQ ID NO: 125638 - DNA, 201 bp, Homo sapiens
tcttacctttggcttgggagaacgtggccctgtgtgtgtcaccactgcacagtacctccctcctgaaagactttaacacacttcatgttcctagatgagtktgtgtgtgtgtgtgtgtgtgtgtgtgtgtgttgccacagccttttcaacttccagtgtcctaaagataagagcatcactgctgaagagagctaggggcgg

SEQ ID NO: 125639 - DNA, 201 bp, Homo sapiens
accagggaggcagaggttgcagtgagctgggacggtgccactacactccagcctgggcaacaagagtgagactccatctcaaaaaaaaaaaaaaaaaaaargaaaagaaaacctaaacatcaaactcggcacttgttgcactgagagtttctgatggcctggccgactctaggtcaagttctgcgtcgcagtgccatttct

SEQ ID NO: 125640 - DNA, 201 bp, Homo sapiens
actttttaaaagattatatagaggttctctagcagcattaaaccaaatcctgatgaacctccattgaaaataaagccagctttacaaaaaaaaaaaaaaawtttttttttttttttttttgagatggagtctcccctctgtcatccaggctggagtgcagtggcaagatctcagctcactgcattttctgcctcccgggtt

SEQ ID NO: 125641 - DNA, 201 bp, Homo sapiens
tgtagatccctatgagctggacgttccttacataccgttcatgatctttgacttgccatcttttttaccttgtgagaatcaaggtaaaaacttgttgagastgtttccttcactctcttatctgatggccaagaagaaaaggtacaaacacgtttttgatgaaatctgtcagagcgcttccaaacactgggttaccctttg

SEQ ID NO: 125642 - DNA, 201 bp, Homo sapiens
gcaacagaacgagactctgtctcaaacacacacacacacacacacacacacacacacacacacacacacacacacacacagaacgagactctgtctcaaamacacacacacacacacacacacacacacactaaacaacattgaccagttagaaaagggccccaggccaggcaagtattacccatctgatcacacactcat

SEQ ID NO: 125643 - DNA, 201 bp, Homo sapiens
acaggcctgaaaattttggagttttatggttatgtgttttaattcttctatgttttttttaaaaatccatattcaagataagtaataactcccatcaaaaycctatttttaaaaaaaatccttttgacacaaaaatgtctcaaaaaaggttcctaagccttttctattaggaataagcctggcctgcttattcctaatact

SEQ ID NO: 125644 - DNA, 201 bp, Homo sapiens
accgagtgaacaaatttttgcggcgccagaatcaccctgaagccggggaggtttttgtccgagtggtggccagctcagacaagacggtggaggtcaagccygggatgaagtcacggtcagtgtgcctgctctctacagtgctctgcgagcagtccccacgcccgcttgccagagcctgctctctgcaaagctcttgagttt

SEQ ID NO: 125645 - DNA, 201 bp, Homo sapiens
ggccctatgtgggctgccgtgggtctgtcccgtgggtgctggcttctgctacagtggggtatgagccatggcctctgggaaccagccaccaccccaggagmggtaggagcctggcctgcatgtggacttggctggacatgttactgcagctggtggtgcctgtgcagaaatagaaggaacaacctgttactgctagaagta

SEQ ID NO: 125646 - DNA, 201 bp, Homo sapiens
tcctgagaaagcagtggcctgattctgtaacaaatactttaactgcttatgtttttattttcaactttgactatttatgaacactgcagtgttcttatgawtaattgtcttggcacttgtagtcctaaactgggcacttagaacaataaaaaatcctacagatcatttaaacaagtgaaaccctaatatataagtgagcgt

SEQ ID NO: 125647 - DNA, 201 bp, Homo sapiens
ccctcacccctcgtgcgtgcatgtgtggtgtaatgttggccagcactctctaaccctgggccctatgtgggctgccgtgggtctgtcccgtgggtgctggsttctgctacagtggggtatgagccatggcctctgggaaccagccaccaccccaggagcggtaggagcctggcctgcatgtggacttggctggacatgtta

SEQ ID NO: 125648 - DNA, 201 bp, Homo sapiens
ctgtgattacggtgggagtttcatttcagaatgtcttgaacggtcccttctagttggccatagttctgcgtgtttgattgtatcatgaatggggcactcarttaggagttttacttataaaagggaagtattggggattgagggaatgtcttttttgtgtattgttttggttgccactgaattggtttatagtttctgtac

SEQ ID NO: 125649 - DNA, 201 bp, Homo sapiens
ttggccatagttctgcgtgtttgattgtatcatgaatggggcactcaattaggagttttacttataaaagggaagtattggggattgagggaatgtctttyttgtgtattgttttggttgccactgaattggtttatagtttctgtactttaattccttcttgccagtgatgaccataccctcctgcacacggaagttctt

SEQ ID NO: 125650 - DNA, 201 bp, Homo sapiens
ccttcttgccagtgatgaccataccctcctgcacacggaagttcttcttcataccggattttaggatatttacaaaatagtgaatggccagaatattgctrtagttcattcagggaaaaaaaaaatacatatttaaagaaaaacattaatctgcctcttgcctgtcagagtgttaaatcctgacataatttattaattgag

SEQ ID NO: 125651 - DNA, 201 bp, Homo sapiens
gacgacccttcacagccccagacgtaagtaccgtcctgtcattttctctggggtgagggagggtgaccttaaattgttttttcctcttaccaatgactatraggaaggtaccggtgccattttgacttccttgcaatgttttttggttttttgtttttgagacaggttctcattctgtcacctgggtggtgtgcagtggca

SEQ ID NO: 125652 - DNA, 201 bp, Homo sapiens
tgcactccagcctgggcaacagagcaagaccttgtctctgaaaaaacagaaggaaaagaaatgatagtggaatatgtagaaaaagacattgtagtgttctrcgaaattaaattttctgttcattccgttattacatgtacttgagattttaaggggccatcatgtctttttgtttgaagaactagttacaaaataacattc

SEQ ID NO: 125653 - DNA, 201 bp, Homo sapiens
aaagacattgtagtgttctacgaaattaaattttctgttcattccgttattacatgtacttgagattttaaggggccatcatgtctttttgtttgaagaaytagttacaaaataacattccagagaccctatagtttatactcaacagataaattttagttaataaaacatgttttcttattttaaaacaaggacaatttc

SEQ ID NO: 125654 - DNA, 201 bp, Homo sapiens
tttttgttgcttgctgtgccacttctgtctggacggttttcataaagaatgtgccatgtgcctcagaatgcagatctcacaagtcaggatgctgactggaygcctcatgctgactgttgtcatttatttgttggagtacttgtgtttgccagtttctcacacatcttggttagggtctacccctcagttggaagtgaccag

SEQ ID NO: 125655 - DNA, 201 bp, Homo sapiens
tattcatatgttatctgtaatgtttttctcaagatgatggaggaggatttgcaaggagcttcccaagttaaagaagaaacagacatagcagagcagaaatyagaaccaatggaagtggatgaaaagaaacctgaagtgaaagtagaagttaaagaggaagaagagagtagcagtaacggcacagcctctcagtcaacatct

SEQ ID NO: 125656 - DNA, 201 bp, Homo sapiens
agtttgtgttgctttcacagtgtagatgtacaaagaattatgttaaggaatgtaggaattccaatttttcaaaaaaatggagcaggatactgaataaatcwtctttttgtttgtttcctttcattaaacggcttccctggaaactttcttaagttatcatagctgcttaagagaagtatttagttttctattaattcagta

SEQ ID NO: 125657 - DNA, 201 bp, Homo sapiens
acccaagcagaggacactgagcccgatcctggtgaatccaaaggggagcccaggtctgaggtgggtgccgctccctaggaatgcattgactgcgtatcgcwactttacccaggtgtcctcgggcgaggcttggagcctgccatgggtatccctgactttagttaaaatattctgtttgaatgtgggttcggggtttggtgt

SEQ ID NO: 125658 - DNA, 201 bp, Homo sapiens
tccatttttcaaaacccaaacttcgttagcaagatgtcatgaaagttgctgtggtgtgtttcatttccatgtataacttcaaaagaaagttaaacagcagrtttaagttcatttgggctgcaatctccatttgagtttgtgttgctttcacagtgtagatgtacaaagaattatgttaaggaatgtaggaattccaatttt

SEQ ID NO: 125659 - DNA, 201 bp, Homo sapiens
gacgaagtctcactctgtcgcccaggctagagtgcagtggcgcgatcttagttcaccgcaacctccgtctccctagttcaagtgattcctgcctcagcctcccgagtagctgggattacaggcacatgccaccatgcctggctactttatgtatttttagcagagatggggtttcaccatgttgtccaggctggtcttgaa

SEQ ID NO: 125660 - DNA, 201 bp, Homo sapiens
agaatcactggaacccgggagatggaggttgcagtgagccaagatcatgccattgcactccagactgggtgacagagcgagactctgtctttttttttttaaaaaaaaaaaaaaaaagttttaaattgagtgccattccaagttgcatgatgaattctgtcaccatcccactctgtgcccccagggatgtgaatcatttat

SEQ ID NO: 125661 - DNA, 201 bp, Homo sapiens
ctgagacaggagaattgcttgaacccaggaggcggaggctgcagtgagccgagatcgcaccattgcattgcagcctgggcgacaagagtgaaactgtctcaaaaaaaaaaatttttttttcatacatttaatttttcaaatgtttcatcacattttcaaacgggggaaataattttaccatactctgtccatttctggtag

SEQ ID NO: 125662 - DNA, 201 bp, Homo sapiens
ttcagcaccttgggaggccaaggtgggagaatcacttgagcccatgagttcaagaccatcctgggcaacatagtgagacctcgtctccagcaaaaaaaaattttttttaaccagacaagcatggtggtgtgtgcctgtagtcctgtagtcccagccactcagaaggcttaggtgggaagatcacttgagcctaggaggtac

SEQ ID NO: 125663 - DNA, 201 bp, Homo sapiens
ggcctagggcagtgctataacttgagcacctaaaatgtgaccagggtggccgggcgtggtggctcacccctataatcacagcactttgggaggccgaggcrggcggatcacgaggtcgggagatcgagaccatcctggctaatacagtgaaaccctgtctctactaaaagtacaaaaaattagccggccatggtgacaggc

SEQ ID NO: 125664 - DNA, 201 bp, Homo sapiens
tgatatgtactgatatggtacttaaaacaatctgcatttgaaaacttagtccatatattaaattacccttacagataaactatgcagttccatggtactaactttagcaaccctgaaatgcatcatcactggattatgtgaagtatttctcctttgcaattccatattcatcaagctgcttccttcacaccaggcaaaatg

SEQ ID NO: 125665 - DNA, 201 bp, Homo sapiens
gatatgtactgatatggtacttaaaacaatctgcatttgaaaacttagtccatatattaaattacccttacagataaactatgcagttccatggtactaactttagcaaccctgaaatgcatcatcactggattatgtgaagtatttctcctttgcaattccatattcatcaagctgcttccttcacaccaggcaaaatgt

SEQ ID NO: 125666 - DNA, 201 bp, Homo sapiens
atatgtactgatatggtacttaaaacaatctgcatttgaaaacttagtccatatattaaattacccttacagataaactatgcagttccatggtactaactttagcaaccctgaaatgcatcatcactggattatgtgaagtatttctcctttgcaattccatattcatcaagctgcttccttcacaccaggcaaaatgtc

SEQ ID NO: 125667 - DNA, 201 bp, Homo sapiens
tacgttgcccaacacagttttggtctagaaggaaggtagattgtttaccactgtctctaaagtgttgtggggcctgttcctgggtccgttggtaccctgcstttgctgatttgcacagattttggtcttttacattgagagcaattaaagttaaatggaattggtaggaccaaagagtcattgatggcatatgaagtcatt

SEQ ID NO: 125668 - DNA, 201 bp, Homo sapiens
gaaagtctttgaccctgactgcatttatgttaaatgtttgtctagaatatggatttggtttcatttgtattgtaacacaattaactgaatgattaacatgaaaaaaaaaaaaacaggaaaaaattaaaatcagttctgggtgctcagcattttcatacatttaaagatctggcttaataccggaaataaaatctctgaatt

SEQ ID NO: 125669 - DNA, 201 bp, Homo sapiens
ggggtagtactagtagtatcgtttaaagggaaataccagaaagaaaacctcttggaaactgctttctcaaataatgtaaagcttggcacattttcttgccrttgttaagcactttttttgttgttgtttttgttttgttttgttttttgagacagtctcgctctgtccccgaggctggagtgcagtggcacgatctcggct

SEQ ID NO: 125670 - DNA, 201 bp, Homo sapiens
ggcaagcacagatttctacccaggccacctctggaaacctagcttgacttttggcaggttacttcatctctaccagcacatggtacacagacaggacgatratgtgaaatcctagagctgtagtcttggcgagatgccagggcagagcgcccacccctctcatgaccatcggattgtttttcctgactttccacctttctt

SEQ ID NO: 125671 - DNA, 201 bp, Homo sapiens
agagcagctgccacgtggaagggagaggtagccagacagagccgggctgtcagagagtgccataggaccatgaacgggtgccgccatttgtgtgtgtgtgttttttttttcacagatctgtgtgtgtgtcttttctttccctccagcagactgggcagagaagccagatgagggtagacccatggctgagggcttgcatag

SEQ ID NO: 125672 - DNA, 201 bp, Homo sapiens
cacacagggaatcacattactcaccagtcccttcagcctatcctcggaggtatgcattgtggtggcagcaagggagggagctgacaaaaacccaaggtctwgacctcaaaatgtcatcttggcatttaagattcctgggttgaggcggttcctggaggtgacggagccctggtgggccgtggttgtgggctgccgtagaac

SEQ ID NO: 125673 - DNA, 201 bp, Homo sapiens
ctgaactggccgtgtttcccattagtatcctcaacaattttagacttaagagcacatgtttagaactcaaagtattgttctctattttttaagtcagtttwggcatgtgaaatcacctagagaaggcattgttcttgcaaatgtgtagcagtgtcagaaataccggcctgtgaaatatgtatttgtcgcagcaatttttaa

SEQ ID NO: 125674 - DNA, 201 bp, Homo sapiens
ctgagaaaatttatcaacagattattctcaagtggtttagacctaagacccctcacccctcgtgcgtgcatgtgtggtgtaatgttggccagcactctctwaccctgggccctatgtgggctgccgtgggtctgtcccgtgggtgctggcttctgctacagtggggtatgagccatggcctctgggaaccagccaccaccc

SEQ ID NO: 125675 - DNA, 201 bp, Homo sapiens
ccgtgtgctttaacagtgcgccttctttgcctcctagtttcgttgattgcaaggagtgtggccggaagatgcatcagatttgcgttctgcactatgacathatttggccttcagggtgagttgtttcccctggcctggagggcagttctgcacagagccagtggcggggcagttgcagtggctactgcatctcattcattg

SEQ ID NO: 125676 - DNA, 201 bp, Homo sapiens
tgaggcggttcctggaggtgacggagccctggtgggccgtggttgtgggctgccgtagaacagtgtggaggattcgtggggaatgggtggtccattctctygcttcaccagtgtttacttgaataaacccttgtcaacttgccagtaggcctgacacattccaccttttgtaactgactcagaactggtgtttttgtgcct

SEQ ID NO: 125677 - DNA, 201 bp, Homo sapiens
agtttcgggaagctttctgtttcctggactgcacattttagaaacttgtagaaattgtccccattgttctttggttcctctcaacacatggttctgaggtycggttgtcaaagattttcgttagttttttccccagtactttgtatttttcttgtctcatccttaaggagagccaggccagtcatgagggtaagaatgcaa

SEQ ID NO: 125678 - DNA, 201 bp, Homo sapiens
catggttctgaggttcggttgtcaaagattttcgttagttttttccccagtactttgtatttttcttgtctcatccttaaggagagccaggccagtcatgmgggtaagaatgcaagaatgttcttcaggggcttcactgagaataggcagcacagctgtgagtccctgaagtctgtgcttctcagaatggtcatctcagcc

SEQ ID NO: 125679 - DNA, 201 bp, Homo sapiens
taaattttttttagagagatagatcttgctattatgttgcccaagcagtggccgttcacaggctcaattatagtgtactacagccttgaattcctgggttyaagcgatcctcaagcctcaactttctcagtagatgaaactacaggcggtgcaactgactgagtagactctatgttgagaacagttttagatttacagaaa

SEQ ID NO: 125680 - DNA, 201 bp, Homo sapiens
ctgctacagtggggtatgagccatggcctctgggaaccagccaccaccccaggagcggtaggagcctggcctgcatgtggacttggctggacatgttactrcagctggtggtgcctgtgcagaaatagaaggaacaacctgttactgctagaagtaactttgcatgagtagactttcttttttttttaatttgagacattc

SEQ ID NO: 125681 - DNA, 201 bp, Homo sapiens
gtgacattttcttgccagcaagtataaatgcttatcaactaattgcaattccaaggccatacttccatagatatacatctgtgtaattattacatattttkggataagaatgtggcactgtggtttgtggctttcaaaaaatggcgcatggtctgaagtagtgtgattgcagggattgcatttttatttactaagtaaaaa

SEQ ID NO: 125682 - DNA, 201 bp, Homo sapiens
cccctgtcatgcgccatggatgaagatacaagttgaatgccagaaagcgaggggcacaatttaaagtgttcatttttagatttagcaagtctactttcacmcatgtatcctataaaaatatttgcacatatgcataacggcacatacaaggacataactgcagcaatggcaaggagtgatgaaaaagtaggaacagtggcc

SEQ ID NO: 125683 - DNA, 201 bp, Homo sapiens
ttgataacagagtccctaccccctcctcggtggccagcgcagaaaccaattcccagcagccaggacctgacgtacctgtgctggaaatgaagacggagacscaagcagaggacactgagcccgatcctggtgaatccaaaggggagcccaggtctgaggtgggtgccgctccctaggaatgcattgactgcgtatcgcaac

SEQ ID NO: 125684 - DNA, 201 bp, Homo sapiens
tatttacatcacttggctctcctgacttaaacttttaaaagtcacatgtggtggcagaagaaccttactagacaaagtgtgtttgagtcacttcagtagayggatgaagtgtctttatttcctccttagcccactgatgaacgatggctccaactctggtaacattggaaccctcagcactataccaacagcagctcctcc

SEQ ID NO: 125685 - DNA, 201 bp, Homo sapiens
tcacagatctgtgtgtgtgtcttttctttccctccagcagactgggcagagaagccagatgagggtagacccatggctgagggcttgcatagcacgtgcartggacagattaaggggacgagggcaggggcacactttagaggagctgtagctcaaagctcaggagcacacagggaatcacattactcaccagtcccttca

SEQ ID NO: 125686 - DNA, 201 bp, Homo sapiens
gacagtgcgagactccgtttcagaacaaacaaaaccccatctccgcccccaagggagtggctgtgtcctggtaggatgtgaaacaaaaagaacccagaccyaagcatggtgtgctctgagcgtggcagagctctgaaggggaaggagccttggggaggtggcgtgtgggccagacccgcccaccacaggaaggtgctggaa

SEQ ID NO: 125687 - DNA, 201 bp, Homo sapiens
aaggccatacttccatagatatacatctgtgtaattattacatatttttggataagaatgtggcactgtggtttgtggctttcaaaaaatggcgcatggtmtgaagtagtgtgattgcagggattgcatttttatttactaagtaaaaacttaatgcccttagcagtgagtcatattattcatttcatgtttttctaccaa

SEQ ID NO: 125688 - DNA, 201 bp, Homo sapiens
aagtcacggtcagtgtgcctgctctctacagtgctctgcgagcagtccccacgcccgcttgccagagcctgctctctgcaaagctcttgagtttgaggtcrtccttccaagactttgcagcagcgaatgcgtgcagtagccccctcagctgcggttgtcctgtctggggttttagttaccctatacagtgcagtaagctat

SEQ ID NO: 125689 - DNA, 201 bp, Homo sapiens
ggattctggggaaatgtctgaatctttcccatatcgaaccaaagctctgtttgcttttgaggaaattgacggcgtggatgtctgcttttttggaatgcacrtccaagaatacggctctgattgcccccctccaaacacgaggtagttttccagctccttccagggcgtgtcattcagtgagccgtgttaggatagaccagg

SEQ ID NO: 125690 - DNA, 201 bp, Homo sapiens; identical to SEQ ID NO: 21301

SEQ ID NO: 125691 - DNA, 201 bp, Homo sapiens
ttaattagcgttagacatcttgattttagtatttcattttgggcattggtcctaagaagtatatgttagcctagggtgggggaccacagtgctcagtttgrttaatggagaatagatatatactaggaattcagaaatctagaatctctagaagcaaatggtttttattcataactgcaggctaggaccagtgcatggctc

SEQ ID NO: 125692 - DNA, 201 bp, Homo sapiens
tgcttttttggaatgcacgtccaagaatacggctctgattgcccccctccaaacacgaggtagttttccagctccttccagggcgtgtcattcagtgagcygtgttaggatagaccagggctcttaagtgtcccagaggagcctgtgagccttcataggggattaaagtaaatgaaaccacaattaactaaccaaagtagt

SEQ ID NO: 125693 - DNA, 201 bp, Homo sapiens
ggtgggggaccacagtgctcagtttgattaatggagaatagatatatactaggaattcagaaatctagaatctctagaagcaaatggtttttattcataastgcaggctaggaccagtgcatggctcttgagttctgccaggaggtggtttggcaccaggaggtagccttgcctgggcaatgagcagtgataccctgtgag

SEQ ID NO: 125694 - DNA, 201 bp, Homo sapiens
aatacggctctgattgcccccctccaaacacgaggtagttttccagctccttccagggcgtgtcattcagtgagccgtgttaggatagaccagggctcttwagtgtcccagaggagcctgtgagccttcataggggattaaagtaaatgaaaccacaattaactaaccaaagtagttagttttgttttccattaaactagc

SEQ ID NO: 125695 - DNA, 201 bp, Homo sapiens
tttgacttgccatcttttttaccttgtgagaatcaaggtaaaaacttgttgagactgtttccttcactctcttatctgatggccaagaagaaaaggtacamacacgtttttgatgaaatctgtcagagcgcttccaaacactgggttaccctttgaaattgaccagttatggccaggcgtggtggcttatacctgtaatcc

SEQ ID NO: 125696 - DNA, 201 bp, Homo sapiens
gttttggaaataaactttctgaagcaagtcaggtgaactttgaggtccacagagcacactggcctcttggtacttaggtcccctcttctctggagccaggktgcctgggcatttggtgtggaaggaagatggttacctgttcccttccccaccccttcagctgtcacccactttggtttgtcaatgctgggcctaattaat

SEQ ID NO: 125697 - DNA, 201 bp, Homo sapiens
gggaaatgcatctacgcagcctcagaactgggcttggctcataccaggcacttggtgaataccagttgacttcgaggatgaattgatcgagggaaaatgastgtgggtgttctgtcatattttgtccgaagtcagaaatttaggaactgggggaaaaaaaactatattttttgttgttgttcgtgttgttgtattcaaatt

SEQ ID NO: 125698 - DNA, 201 bp, Homo sapiens
atcttggcatttaagattcctgggttgaggcggttcctggaggtgacggagccctggtgggccgtggttgtgggctgccgtagaacagtgtggaggattcrtggggaatgggtggtccattctctcgcttcaccagtgtttacttgaataaacccttgtcaacttgccagtaggcctgacacattccaccttttgtaactg

SEQ ID NO: 125699 - DNA, 201 bp, Homo sapiens
aaatgcatctacgcagcctcagaactgggcttggctcataccaggcacttggtgaataccagttgacttcgaggatgaattgatcgagggaaaatgagtgygggtgttctgtcatattttgtccgaagtcagaaatttaggaactgggggaaaaaaaactatattttttgttgttgttcgtgttgttgtattcaaattcta

SEQ ID NO: 125700 - DNA, 201 bp, Homo sapiens
atattttgtccgaagtcagaaatttaggaactgggggaaaaaaaactatattttttgttgttgttcgtgttgttgtattcaaattctaggcttctaagaamaatgtttcagcggtttggttatatgtaataagacaaattctgagagtagtaagtgttccatggaattaatttagtatagtggtttctgaaaatataaatt

SEQ ID NO: 125701 - DNA, 201 bp, Homo sapiens
gattccaggcgtgagccaccgcgcccggccctgttaagcacttttctacagtgatgagtgagagtgctgcatttgctaaccttgcttcataacagcccctraagagacttcagatttttttcagtgtggtagcctcttcccaggtccccaatgtaaagttctgagggcgctccaaattggcatggcgatactggctatttt

SEQ ID NO: 125702 - DNA, 201 bp, Homo sapiens
tattttttgttgttgttcgtgttgttgtattcaaattctaggcttctaagaacaatgtttcagcggtttggttatatgtaataagacaaattctgagagtmgtaagtgttccatggaattaatttagtatagtggtttctgaaaatataaattcctgcttcaattaagtttcagatgacagttgaaggaagcttcttgcaa

SEQ ID NO: 125703 - DNA, 201 bp, Homo sapiens
ctcaagcagtcctcctgccttggccttccaaagtgctggggccaccatgcccgaccatgtaaattttcagttatacctgagaaaccaggtatccccatttrcagaactggcagtagcaaaaaatgagtttggtgtacatgccctgccctttacatttagtttatctccacttaaacctccatcctttcagttactgaagtc

SEQ ID NO: 125704 - DNA, 201 bp, Homo sapiens
ttcacagctttcccaggcagcagccagcattgataacagagtccctaccccctcctcggtggccagcgcagaaaccaattcccagcagccaggacctgacrtacctgtgctggaaatgaagacggagacccaagcagaggacactgagcccgatcctggtgaatccaaaggggagcccaggtctgaggtgggtgccgctcc

SEQ ID NO: 125705 - DNA, 201 bp, Homo sapiens; identical to SEQ ID NO: 21269

SEQ ID NO: 125706 - DNA, 201 bp, Homo sapiens; identical to SEQ ID NO: 21270

SEQ ID NO: 125707 - DNA, 201 bp, Homo sapiens; identical to SEQ ID NO: 21272

SEQ ID NO: 125708 - DNA, 201 bp, Homo sapiens
gttaagtagatggcacttggggaggtgtggataaaagagaaatgtagtaggaagaagtcaataaagggtttacgggaaatggaaggctccatactttgttkcttttaagttcttctccacagtccatcaccatgtgtgttaaatatagtgtagccctgttcttccttacagcgcaaggttgtagaaaaataaactatccta

SEQ ID NO: 125709 - DNA, 201 bp, Homo sapiens
aaaaaaattttttttaaccagacaagcatggtggtgtgtgcctgtagtcctgtagtcccagccactcagaaggcttaggtgggaagatcacttgagcctakgaggtacaggttacagtgagccaagatcacgccactgtactccagcctgggcaacagagcgagacattgtcatcttttgtttgtttacttaaaactccat

SEQ ID NO: 125710 - DNA, 201 bp, Homo sapiens
gaagacaggcctgataggggctcctgctggggcagccttccctgtgcaccggggacatgcatgtgttaggaggcgggatgctgaggtgtcggcatgtagayctgctgtcccttgtgtgtttggttcatggacaacaatgggcagggacatgccttcgtcagcaacaccccaggagctcgctctgggggtcagccttagtga

SEQ ID NO: 125711 - DNA, 201 bp, Homo sapiens
tttggaaggccaaagtgggaggatcacttgaagccaggagttcaagactagcctgggcaacatagtaagaccctgtctctacaaaaaattaaaaatcagcsaagtgtggtggtgcatgcctgtagtcctggctactcaggaggctgaggcagcaggatcacttgagctcaggggtccaaggctgcagcaagctgtgatgcc

SEQ ID NO: 125712 - DNA, 201 bp, Homo sapiens
tttgtggaagttagaaaggaactcaaaaataggaataaatggtatcatatagaacttctgccatatgataaattttcacacaacagcatttgggttgttgygacagatgagggggcaggcaaacaggtaacaggtgggtaggtaggtgggtagatgaattgaccttgaaatgtccaagttgatgcaagtttggagttgtct

SEQ ID NO: 125713 - DNA, 201 bp, Homo sapiens
acaagcaactgaagacaggctcaccagtgccaaggaactgccctattttgaaggtgatttctggcccaatgtgttagaagagagcattaaggaactagaayaagaagaagaggagaggaaaaaggaagagagcactgcagccagtgaaaccactgaggtacagacccttctctgagctccattgcccacgtgtcccgctgg

SEQ ID NO: 125714 - DNA, 201 bp, Homo sapiens
tcagccttggcgacatagagaaacccccatctctatttgaaaagaaaaaaaaagagaaaaagtggctcggtttcagtgtcttgttagtcacttaggcccayggcctcttagttagttataaagcgtacttttacagtgtaaaaactgtaacctcagagccaagtcttgccgtactacttggattaggtacgttatttcttc

SEQ ID NO: 125715 - DNA, 201 bp, Homo sapiens
tcacccctgggaggttttccctatgcggggaccttcccagtccatcaaactgaccactactccagaaatacagaacacacaatagacagaaggtggaataytagagctttgcaaaaaagcaaagacaggcagcccaagcatccagtttcttaattagtcgttgtttctccacagggagaaagataagcactgggatattgc

SEQ ID NO: 125716 - DNA, 201 bp, Homo sapiens
tgaaaagtgaatttctaaatctttatgtgtttccagggagaataaagtgtggactaggtaagaaggtaggggcagtctggcaataacatctatcactcatwgactgccagggttgctttagctgattttactagttgggggtgactgttcccttttctgtgtgctgtcttcctctctcagaacagtaataaagtgaagcca

SEQ ID NO: 125717 - DNA, 201 bp, Homo sapiens
ataagcactgggatattgccatggcaattcctgaattgacctgtggaggctggagctgggggtcatcagggaacttggcccacatctgttgatggaaggarttccagttggttgcaggccctcacggaagcatagctgagggttcctctttcccattcctgcctttatctagtatatatttgatttcagtgcactttaatt

SEQ ID NO: 125718 - DNA, 201 bp, Homo sapiens
tctactaaaaatacaaaagttagccgggcatagtagcatgagcctgtaatcccagctactcaagaggctgaggcaggagaattccttgaatccaggaggcrgggggttgcagtgagctgagattgtgccactgcactccagcctgggcgacagagcaagactccatctcaaaaaaagaaaaaagaaagaaaagaaaaaaag

SEQ ID NO: 125719 - DNA, 201 bp, Homo sapiens
ccatgttggtcatgggtcaggtgtattttaaaggagatcccaggtgttgtatcatttcattgcaatatttccactgtgtgttttgaactaatggaaacttrgttcaaatctgatggggaacctaacagaaactagatacctatagagtaattaaggattaaactgaaagaattccccttgggtagcagctttggaaggttt

SEQ ID NO: 125720 - DNA, 201 bp, Homo sapiens
actaatctactttgtctctctgaatttgtcttttgtgaatcctttgtgtaaacggaaccctgcagcgtatgctgtcttgggtctggcttccttctctagcmcttggtttctgtactctagacctgccccattcccttctgaaacttgaaaaggataggggcatttgatcaaagtgtcttgaacagaatgaatgaggtttat

SEQ ID NO: 125721 - DNA, 201 bp, Homo sapiens
atcaagaatacttcagtcaccaacgtgccaaatatggtaagttacccttggccctcagtgttatggctctccggtgggtgctgtggtctgtggatttttaycattctcacagtgaaagtctataactaaaagtgtgtcagtaggtgataggaagagaacccagatttctcatgagtagctctctaaatgagtttaacattt

SEQ ID NO: 125722 - DNA, 201 bp, Homo sapiens
tactctgttgatgagatgcatattacgtccaacacaatagatgattccacgtgtcttcatcctccctgaggtttgaagggattttatagatgggaaatctrtaaaatgggaattatccttatcacttctcaacctgatgaatcaagatattaatgggaaaatatctccttttgcaccaccaaataatagaatctcttttat

SEQ ID NO: 125723 - DNA, 201 bp, Homo sapiens
catggtcaggaaagaaatcatatgtagtgtagaatgattgctcccaaagctgtctctcacctcctcacccctagtactcactgtcgcagctgctcatcttrgtgcttcgcatataggaacttgtttagttctcacgcaacccttagaggaggtgctgtgatctccattttacagatgataaaaccaaggtgcagagaggtt

SEQ ID NO: 125724 - DNA, 201 bp, Homo sapiens
tgattccacgtgtcttcatcctccctgaggtttgaagggattttatagatgggaaatctataaaatgggaattatccttatcacttctcaacctgatgaaycaagatattaatgggaaaatatctccttttgcaccaccaaataatagaatctcttttatttcaaaacactgaggggtagtgcgttcttttgtccagcctc

SEQ ID NO: 125725 - DNA, 201 bp, Homo sapiens
atgaatcaagatattaatgggaaaatatctccttttgcaccaccaaataatagaatctcttttatttcaaaacactgaggggtagtgcgttcttttgtccrgcctctcttgttcacccccagtgctgcatgtctggtgtgctcttggtggtgggtgaggaccacaagcagccatctctccccactgtgcttgttgctgaga

SEQ ID NO: 125726 - DNA, 201 bp, Homo sapiens
tgcccaggctagtctcaaactcctagactgaagcacaatccacctgcctgggccttccaaagtgctgggattacagtctgttgtgttgtggggtttgtttyatattaactatgatcacatttaatttgaatatgtgtatacgtatacatttacactgaaaaatgtgttttggctgaaccacagcgccacctctgcctttat

SEQ ID NO: 125727 - DNA, 201 bp, Homo sapiens
cccagctttgtgggcattcattctctctctctggttacttctgtcctggctttagtccttgctcctctgctataactccttaaaggcagggccgatttcastggcacgttcatctgacgtgtgtgcgtgggtcctgcaggtatgtgacagggcacatctgggcctgtcctccaagtgaaggagatgattacatcttccatt

SEQ ID NO: 125728 - DNA, 201 bp, Homo sapiens
ggaggcgcgctgtgtgcgggtttgtgcggctgtctggggaagagatgatggtggcgtgggtgtgggctgtagctgtaggtgcagggagagcgatgacgaaygttgaaggctgcagccccagaacttgggacaggcgattgtgaccagtgaggaaaagcggtgaatggaggtggctcttgcgtgggctgctgccatgggtga

SEQ ID NO: 125729 - DNA, 201 bp, Homo sapiens
ggtgaggtgatcctcccacctcagcctcctgagtagctgggaccacaggcacacactaccacgtctggctatttttttgtatttttagtagagacagggtytcgccatgtttcccaggctggtctcaaactcctgagctcaagcgatctgcccacctcgacctcccaaagtgctgggattacaggcatgagtcaccacacc

SEQ ID NO: 125730 - DNA, 201 bp, Homo sapiens
tctgtcccgaaggctgcagcacctacagccacctgtagccgttcacgtatggggtctgcctggtggtgacctactttggcctgagcttcctgatgcccacrgcctgggagctgggcgtccgtgccaagtgtggaggggcacttgcctggtctcacagccttgcgtgttgttgcagggcagtcagggcgacagcaagaatgc

SEQ ID NO: 125731 - DNA, 201 bp, Homo sapiens
gactgttcccttttctgtgtgctgtcttcctctctcagaacagtaataaagtgaagccacgggcccctcttcctccccttcttaaacacgaacaggctaarttgtccatttctccagcagttttgaggcagacaaggagtctgttgataatgctttgcctccccggttctgatcctgggattttccagggtgggagtcagt

SEQ ID NO: 125732 - DNA, 201 bp, Homo sapiens
atagcactggttctagtgtaagagggtcatctttggtctatgaggtgaactgaacagaagaggagaagacattgttctgtagtagagaagttagttaagaracacaaagcaggagaaggcaagaaactgaaacaccaattaaagcaagagcttttggagccaggcaggggggcttgctgggggactgagggaaggggagac

SEQ ID NO: 125733 - DNA, 201 bp, Homo sapiens
tgggaggattgctttaggccaggaatttgacaccagcccgggcaacagatcaaaatcctatatcaacttttaaaaagttgatgtttgttatacaaaattascacagaaatgtctagaaaagaaaatcttgcctgtaagcctatcatccagtcatacttagcgctaaagaaaacatactcctgatgttttctctaccagtct

SEQ ID NO: 125734 - DNA, 201 bp, Homo sapiens
acagattaaggggacgagggcaggggcacactttagaggagctgtagctcaaagctcaggagcacacagggaatcacattactcaccagtcccttcagccbatcctcggaggtatgcattgtggtggcagcaagggagggagctgacaaaaacccaaggtcttgacctcaaaatgtcatcttggcatttaagattcctggg

SEQ ID NO: 125735 - DNA, 201 bp, Homo sapiens
gcacagggttaaacttgtatttccagtgtttattatccggcagagttaccttcgagtgttagaatggccactgtgtggcaagaaaaagcaaatgcacaaawtgtgttatcaactcatttctatacttaagtaactaaaaacctgccagccacccaccacatctgcccaggtctgccgttccctcttttcgtcagactgagt

SEQ ID NO: 125736 - DNA, 201 bp, Homo sapiens
cagattaaggggacgagggcaggggcacactttagaggagctgtagctcaaagctcaggagcacacagggaatcacattactcaccagtcccttcagcctrtcctcggaggtatgcattgtggtggcagcaagggagggagctgacaaaaacccaaggtcttgacctcaaaatgtcatcttggcatttaagattcctgggt

SEQ ID NO: 125737 - DNA, 201 bp, Homo sapiens
ggtacaacttatccaaaaatcagcaccactggtttgtttattgcagaaaaatgaaatttagaagtttggtctaaattttctagctcgctaaggaatcttckaaaattcccaattttcctatttctcactaatgtaggaaatatttaaaagccagcaaagaagaaaacatcttttaaaatctcattgtctatacgtaatcac

SEQ ID NO: 125738 - DNA, 201 bp, Homo sapiens
cagtaccaaaaatgtcaaatcaaagcttagaattgaattttcaaagattgttcatggatttacatatattgtatttcttatacaatatatcacatttcttwctctgtatattcatattgataaatgggtggaaagtctttgaccctgactgcatttatgttaaatgtttgtctagaatatggatttggtttcatttgtatt

SEQ ID NO: 125739 - DNA, 201 bp, Homo sapiens
attatgttatgctaggaacatcatagagtagttatgcaaacctagatggcatagcctgttacacacctaggctatatagtgtaccctgttgctcctggacwataaatctgtacatcatgttactgtaatgcatacttgggcagttgtaacacggtgccacaatgctaagtgtttataaacctaaacatttctatacataga

SEQ ID NO: 125740 - DNA, 201 bp, Homo sapiens
gtaggaaatatttaaaagccagcaaagaagaaaacatcttttaaaatctcattgtctatacgtaatcactaagaaccttttgcaactttcccttatagttytttaacctgtatatgaggcgttctctgtcctgaagtaatgtcctgcctctggctagctcctgtgacggtagccctcccggggctggccctgggtgaggag

SEQ ID NO: 125741 - DNA, 201 bp, Homo sapiens
tggccatccactctgggccccacagggaggattgccatggtgagggcctcccagtccaggggttgacagttaagtctgcagactcagaaccctcagttgtyactcactgcgagtagcaacatctcccaggagtgtagcctttatgtgaatcaagcactgatggtttgaaataaaaaatgtcatcagatttttagaatcaga

SEQ ID NO: 125742 - DNA, 201 bp, Homo sapiens
agcgaatgcgtgcagtagccccctcagctgcggttgtcctgtctggggttttagttaccctatacagtgcagtaagctattttgagagagagaccacatamcatattatagtatactgtttataattttcttattttattattacttattcttgttaatctcttgctgtgcctaatttataaattaaaattttgtgaccag

SEQ ID NO: 125743 - DNA, 201 bp, Homo sapiens
tatgtactgatatggtacttaaaacaatctgcatttgaaaacttagtccatatattaaattacccttacagataaactatgcagttccatggtactaactwtagcaaccctgaaatgcatcatcactggattatgtgaagtatttctcctttgcaattccatattcatcaagctgcttccttcacaccaggcaaaatgtca

SEQ ID NO: 125744 - DNA, 201 bp, Homo sapiens
atcatagaattccccttttttggatatatgattcagtggtttttagtaactttacccattagtgcaactatcacaagtcagtttcagaacattgttattgrcctataagatccctcctgctgcggtggatcacctgaagtcaggagttcaagaccagcctgaccaacatggtgaaaccccatctctactaaaaattaaaaa

SEQ ID NO: 125745 - DNA, 201 bp, Homo sapiens
gagtagaaaatgtggattttactattctacctgcaaatatttgcctggtaatttggcctgatcagtctcatggaaagacttgcatgagtgctgcttcctawaaggcagaggaaaagggtccatgatctttatttttaaattttacactagcagcacgatacaaaatgagatctggtgttttaattgagttcaagaatgtga

SEQ ID NO: 125746 - DNA, 201 bp, Homo sapiens
gcctgggctgtccagtgcctgtgctcctcctcattgtcattgagaaacgatccctccctcccttgtgttgcctcagcaccaaggtgtagaacatttttgtrtttgtcgtttctttgtgttttgtgaggtgtctgcattttctttgcccaattttttagtgggatagtatcctttctttcctgagagcatttgcataaaaga

SEQ ID NO: 125747 - DNA, 201 bp, Homo sapiens
ttagtagtggactcctggataatgggattttaattgttgttaattatttctgtagtagttctctagctttccaaatttcctgcagtgtatatatatacttytataatcaggaaaaaataaacataagaggctattttctcttaggagttgagccctgcattcatggtgttctgcttctcagctaggatgctgattttgctt

SEQ ID NO: 125748 - DNA, 201 bp, Homo sapiens
ttgcactgggtggttgtattaaggctaactgtcattattcttttaggagaggtaatggttgctgtgaaatcaagctgcacgcattgtccttctagtcatgygataatgaaatccaaaaggtggctctgattctttttgctacatcaaatgtttgtagtacattgcaattggtcaggccttggcaaatcttttttttttttt

SEQ ID NO: 125749 - DNA, 201 bp, Homo sapiens
ggtggtgacctactttggcctgagcttcctgatgcccacggcctgggagctgggcgtccgtgccaagtgtggaggggcacttgcctggtctcacagccttvcgtgttgttgcagggcagtcagggcgacagcaagaatgccaagaagaagaacaacaagaaaaccaacaagaacaaaagcagcatcagccgcgccaacaag

SEQ ID NO: 125750 - DNA, 201 bp, Homo sapiens; identical to SEQ ID NO: 21268

SEQ ID NO: 125751 - DNA, 201 bp, Homo sapiens
ggaggctctgctgggaagtctggcctgtctgtgcccagttctagtcttgctaaatggctggaaacacccgctgtcctgttggcagcttgggcccctctggycacttgttcctgaaggaccccccggtcatgctccctcactcccctctaggaattttgacccccctgtgaaatgacgtgggtgtcccttgcatgggccgag

SEQ ID NO: 125752 - DNA, 201 bp, Homo sapiens
tcccactggtgcactgcggatagctcaggccttcccagaggcacttcacggcagctgtcggcgctttgggagggaccggcctccctcagcctttcactgtstggcttcatagtttgagtacaggagttggacaggctgtggcaagggctgatgtgactcccaggtcagaggaagtcggaaggaagggggctggtgtctact

SEQ ID NO: 125753 - DNA, 201 bp, Homo sapiens; identical to SEQ ID NO: 21271

SEQ ID NO: 125754 - DNA, 201 bp, Homo sapiens
cgagcagtcctcccacctcagcctccgaaatagctgggactacaagcacacgccgtcacacctggctaattattttttgtagagaagggggttttgctacrttgcccaggttggtctcaaactcctggcctcaagcaatcctcgtgcctgggaggatcttaacccaagaagacaaggaatgcttcttgaaagacattatcc

SEQ ID NO: 125755 - DNA, 201 bp, Homo sapiens
attattttttcttttaaatcaaatcaggatgtacactgaaaattattgataattttgaagcatatttcatggactgtttaagcagcagacaagtatgtgawtctgtttgtttactgtgtataatttatcttgaggtacctgttaagcattagcagtgtacacaggattctgatagatgcctgtgagtacttagaaccatct

SEQ ID NO: 125756 - DNA, 201 bp, Homo sapiens
gggcatggtggcgggcacctgtaattccagctactcaggaggctgaggcaagagaatcgcttgaacctgggaggtggaggttgcagtgagcggagatcgcrccactgcactctagcctgggtggcagagcaagactctgtctcaaaaaaaaaaaaggtggttgggtatgtacaagtaacaaaacttgctctcaaaactgtg

SEQ ID NO: 125757 - DNA, 201 bp, Homo sapiens
gatttcacctgttcatgaagccctggtccttggaggaggggtgcactgaagcaagggaagcacatgcccctgagacttcactttatatttggggccttgtrtcacttttgtctgaaagaatttgtgaacatgaactgtaaaaaaatatttgggcttctctcttttatattcctggatagccttgcaaaggccatggggacc

SEQ ID NO: 125758 - DNA, 201 bp, Homo sapiens
aattatgcttatcgtgtgtgaactcttgagttaggaacccagagaggaaaatgtgaatctgaccctacgttggcttaaggttgggttttgaagacaatatrtatgttaaaaataacgtaagggtgacctccctcaaaggaccgaggtagagacaagtcagtgcaatcagcattcttttcgaggagaattggagcgcacctg

SEQ ID NO: 125759 - DNA, 201 bp, Homo sapiens
aaaaaaaaaaaaaaaaaaaaaaaaaacacttttaaatttaggaccataattgcactgactctgtgctgaagcgacttaatgaacaccaagtactttatttmttcttccggaagagaagaggaatcataaatgcaactctgactagaggaaggttttaacaaacctgttttaggcttgtaagagtcttcccgtgaggttgcg

SEQ ID NO: 125760 - DNA, 201 bp, Homo sapiens
gcctcccaagtagctgagatgacaggcacgcaccaccacactcagctaatttttgtatttttaatagagatggggtttcaccatgttattagccaggctgrtctcgaactcctgacctcaagtgatccacctgcctcggcctcccaaagtgctgggattacaggcatgagccactgcacccagttacacttggccgtaccc

SEQ ID NO: 125761 - DNA, 201 bp, Homo sapiens
ccgggcagactcccaccccgactcctggctcagtgcccagtgctacccaaacccagagcacccctacagtccaggcagcagcccaggcccaggtgaccccrcagcctcaaaccccagttcagcccccgtctgtggctacccctcagtcatcgcagcaacagccgacgcctgtgcacgcccagcctcctggcacaccggtaa

SEQ ID NO: 125762 - DNA, 201 bp, Homo sapiens
tgaaataaaaaatctcccaggaaaaagctgaagtatctgatgcaaggaaaatgttacatgcttataaaaagagcagcatttgcaaatgaagcaatgttttygttgcttgctgtgccacttctgtctggacggttttcataaagaatgtgccatgtgcctcagaatgcagatctcacaagtcaggatgctgactggacgcct

SEQ ID NO: 125763 - DNA, 201 bp, Homo sapiens
tgttgtaatattgttagcatcagtgaatattcaagaagttcatttgaatgaaatggaacatgtattaagtacctactatttgatatgtcctataaagtcaytgggaattcagcaagaatgtgggcttctggtgtatcaggtatttgcatactacttttgccagtgtactcaatgaggaagttcattagttagaacctacaa

SEQ ID NO: 125764 - DNA, 201 bp, Homo sapiens
gggatgtgaatcatttatttgtccagcatttccacactgtagacactacccacctcttagtcactgagtgtccaccttggttgtcagatccaaaaatcttrgtaaatattgggttcagtactatccgcagtttcaggcgttccaagactgggggtcttggaatgtatccgagtggatatgaggggactgctgtagatgtgt

SEQ ID NO: 125765 - DNA, 201 bp, Homo sapiens
tgggtctcctatcctgcctgggtctcctggcacagacccagacttagcggtggagggaagcagccaggatgcctggtggtactgggtcccatgctgacacyggcctgtcccctttccttgcttgcaggactacgacctctgcatcaactgctataacacgaagagccatgcccataagatggtgaagtgggggctgggcct

SEQ ID NO: 125766 - DNA, 201 bp, Homo sapiens
actttggtgatttctctttttaagaaacacttatgtggtttttgttttaaaagaaaaaagaagcgtatgtggttttttttttttaaaccatccttataackgcctgagtgttgtgaaaattgattctgtgcatgctctctcaagtggtaaaccacaggttttctactagtcagaatgtaagatattaccaggatgatttta

SEQ ID NO: 125767 - DNA, 201 bp, Homo sapiens; identical to SEQ ID NO: 21291

SEQ ID NO: 125768 - DNA, 201 bp, Homo sapiens
attaattgggtgatttcttttcagttttctgttgcctgtgcgttccatcttattttacttaagagtttatttagcaagttgtaattctgttttcctgtggrtgcttttcctaatgaaccgttgtgggtacatttacagggatgaattcatttaaccccatgtccttggggaacgtccagttgccacaagcacccatgggac

SEQ ID NO: 125769 - DNA, 201 bp, Homo sapiens
ctggcattataatttaggtataattgaaagtgtgacgatttggatagaaaaataacatctcgttgtttttctggtcatagttgcccattgtgcatcttcaygacaaatcatctctcattggaagaactgcacacgacatgactgtcctgtttgcctccctttgaaaaatgccagtgacaagcgaaaccaacaaagtaagtg

SEQ ID NO: 125770 - DNA, 201 bp, Homo sapiens
cccctgtccctgccagtgaatcgcatgcaagtttctcaaggtattgaactgtttgtggtgaatcatattttagttttacattcaacagccataactttcaytgttttttcctctccccctgtatatttctttctaaccctttcttctttccattcctttttgctgataagcagaattcagttctacaggtagtatggatat

SEQ ID NO: 125771 - DNA, 201 bp, Homo sapiens
accttgcttactgaagtcagtgctttcggttttttcacagctttcccaggcagcagccagcattgataacagagtccctaccccctcctcggtggccagcrcagaaaccaattcccagcagccaggacctgacgtacctgtgctggaaatgaagacggagacccaagcagaggacactgagcccgatcctggtgaatccaa

SEQ ID NO: 125772 - DNA, 201 bp, Homo sapiens
ctggacacagggcaataccaagagccctggcagtacgtggacgacgtctggctcatgttcaacaatgcctggctctataatcgcaagacatcccgagtctrtaagttttgcagtaagcttgcagaggtctttgagcaggaaattgaccctgtcatgcagtcccttggatattgctgtggacgcaaggtacagttttaagtt

SEQ ID NO: 125773 - DNA, 201 bp, Homo sapiens
gtcctggctttagtccttgctcctctgctataactccttaaaggcagggccgatttcactggcacgttcatctgacgtgtgtgcgtgggtcctgcaggtawgtgacagggcacatctgggcctgtcctccaagtgaaggagatgattacatcttccattgccacccacctgatcaaaaaatacccaagccaaaacgactgc

SEQ ID NO: 125774 - DNA, 201 bp, Homo sapiens
caggtatgtgacagggcacatctgggcctgtcctccaagtgaaggagatgattacatcttccattgccacccacctgatcaaaaaatacccaagccaaaaygactgcaggagtggtacaaaaagatgctggacaaggcgtttgcagagcggatcatccatgactacaaggtacccggcgctgaaggaaggtggtggctttt

SEQ ID NO: 125775 - DNA, 201 bp, Homo sapiens; identical to SEQ ID NO: 21298

SEQ ID NO: 125776 - DNA, 201 bp, Homo sapiens
agtgagttgagatcacaccactgcactccagcctgggcaacaagagcgaaatctcatctcaaaaaaaaaaagaaagaaatcaaggagtcagagaaattgakccttgggaaagtggctggatgctgtgttggggattggtccaggacttcagcctggataggaagatgctgctggtgtggggtatgatgcccctgctgttta

SEQ ID NO: 125777 - DNA, 201 bp, Homo sapiens
agcctcccgagtagctgggattacaggcacatgccaccatgcctggctactttatgtatttttagcagagatggggtttcaccatgttgtccaggctggtsttgaactcctgacctcaggtgatctccccaccctcatactcccaaagtgctgggattacaggcgtgagccacctgaataaattctagcattgctttttta

SEQ ID NO: 125778 - DNA, 201 bp, Homo sapiens
tgccctgcagaagctgttgatgtggcagtggccctgaccacctgcctcaggctgtgttgggacactgagtttctctcttgggaaggccctttacagggtgygctggcattggaacacacgtgcttttggacctattggctgttttcccttttaagtttgaagtcctaataagaaatttcctattcctgaatcaaggattat

SEQ ID NO: 125779 - DNA, 201 bp, Homo sapiens
ttttctgatattgggggtggagacacagaggtgtgtgtcagtgcagctgagtcactcaggagcgatactaatgaagcagaatgaaagtaagaggctgcatrtgggtcatttataactttttcacttagatagcagctaacctccataaacacaccttactttggttacaaagtagagtggggagggtgtctactgattatt

SEQ ID NO: 125780 - DNA, 201 bp, Homo sapiens
ttgagcaggaaattgaccctgtcatgcagtcccttggatattgctgtggacgcaaggtacagttttaagtttttccggaaagtgaattttcctggttaatmcagccagaggggtgttatactaatatgagaccacgcctgtatactgggagtgcatatgtgcaatctgctgtctggtgacacagttgatgcctgaagcgat

SEQ ID NO: 125781 - DNA, 201 bp, Homo sapiens
tggatattgctgtggacgcaaggtacagttttaagtttttccggaaagtgaattttcctggttaatccagccagaggggtgttatactaatatgagaccaygcctgtatactgggagtgcatatgtgcaatctgctgtctggtgacacagttgatgcctgaagcgatgtgatgggtgatcagagctgggtgtacaggcgct

SEQ ID NO: 125782 - DNA, 201 bp, Homo sapiens
ccctagaagcaagcgtctgaagttgagagtaactctgataaaggttgacatgcctttttcaagatgttcatagagtagaaaatgtggattttactattctrcctgcaaatatttgcctggtaatttggcctgatcagtctcatggaaagacttgcatgagtgctgcttcctataaggcagaggaaaagggtccatgatctt

SEQ ID NO: 125783 - DNA, 201 bp, Homo sapiens; identical to SEQ ID NO: 21274

SEQ ID NO: 125784 - DNA, 201 bp, Homo sapiens; identical to SEQ ID NO: 21275

SEQ ID NO: 125785 - DNA, 201 bp, Homo sapiens; identical to SEQ ID NO: 21276

SEQ ID NO: 125786 - DNA, 201 bp, Homo sapiens
atctgagtgacagtccaacaggagcatggactgagaaccacacaaaactgattctttctaaatgtgtggcagagaaaatagtttaaatggggtggtgaggrgtgaatgctgttttcctttttttctttaattataaatgtagagcagataatagattaaaacatagtttaagttttatttatttacatcacttggctctcc

SEQ ID NO: 125787 - DNA, 201 bp, Homo sapiens
acaaactttttggaaaacagcctgtttgtaagttgaggactgcctatactgtgttatggttacacttgttaccattttcttatggaatctggcattataayttaggtataattgaaagtgtgacgatttggatagaaaaataacatctcgttgtttttctggtcatagttgcccattgtgcatcttcacgacaaatcatct

SEQ ID NO: 125788 - DNA, 201 bp, Homo sapiens; identical to SEQ ID NO: 21281

SEQ ID NO: 125789 - DNA, 201 bp, Homo sapiens
tgaatgaggcagaatataaatactttatgggttttaatttgttaatatataaattttactattaactgaacagttgcctattctctgttctgcttttttarttttatttaaaagagtgtatggaatacaaaaaaaaagaatgaataagactttgtatttgctagcacaacagggtgactattcaaaaataatttaattcta

SEQ ID NO: 125790 - DNA, 201 bp, Homo sapiens
atttgttcttttcctccttcctctgtcacggaagacattggtcacttcttgagcactgtctttgttgtgaatgtctagattgtggttttcttttggggcartgaacatagcacaggcacgtgcaggcacacgcccttcctgcatcccaacatctgtcttggtggcctgcggccttgctcctctgtcctgtgtcttgaggca

SEQ ID NO: 125791 - DNA, 201 bp, Homo sapiens
tggaactcctagtggtagaggtcaggaagaatttgcctttattgttcttacagcagctctctggttcataaggctccggcagcctgagtgctgccttccaytgggtgtggcaagacatgttgcgctcacgttccccacgcgacgacagtcaggtgctccaggaagtcttatctgctgaagagaaaggcgatttggttttct

SEQ ID NO: 125792 - DNA, 201 bp, Homo sapiens
ctcctggataatgggattttaattgttgttaattatttctgtagtagttctctagctttccaaatttcctgcagtgtatatatatacttttataatcaggraaaaataaacataagaggctattttctcttaggagttgagccctgcattcatggtgttctgcttctcagctaggatgctgattttgctttgggtccttct

SEQ ID NO: 125793 - DNA, 201 bp, Homo sapiens
tttttgcggcgccagaatcaccctgaagccggggaggtttttgtccgagtggtggccagctcagacaagacggtggaggtcaagcccgggatgaagtcacsgtcagtgtgcctgctctctacagtgctctgcgagcagtccccacgcccgcttgccagagcctgctctctgcaaagctcttgagtttgaggtcatccttcc

SEQ ID NO: 125794 - DNA, 201 bp, Homo sapiens
acaggcaggaggcatggccaaggtaagtgaactgaagcactttcaatacttcctacctaaccgcgggctttccctccgagtaatgcgtaaaatgggaccaygtggcccactcctgtttttcctcttgggctctccacgtgccactcatgcttggaagagacagatttctttctaggataaagatctctgccccatttctgt

SEQ ID NO: 125795 - DNA, 201 bp, Homo sapiens
accgcacaggcaggaggcatggccaaggtaagtgaactgaagcactttcaatacttcctacctaaccgcgggctttccctccgagtaatgcgtaaaatggraccacgtggcccactcctgtttttcctcttgggctctccacgtgccactcatgcttggaagagacagatttctttctaggataaagatctctgccccatt

SEQ ID NO: 125796 - DNA, 201 bp, Homo sapiens; identical to SEQ ID NO: 21293

SEQ ID NO: 125797 - DNA, 201 bp, Homo sapiens
acacatgcatgggactctgccacaccatggtgaggggcacgcttgcgtgggggtctgtcgcaccatggtggggggcacgcgtgcatggccctcatctcacygttgtgctttgcccactcaggatattttcaaacaagcaactgaagacaggctcaccagtgccaaggaactgccctattttgaaggtgatttctggcccaa

SEQ ID NO: 125798 - DNA, 201 bp, Homo sapiens
ctgttgcacacataggggctccagcactgtggtggggggtgcacatgtgtgggggtctgctgcactgtggtgggggggcacacatgcatgggactctgccrcaccatggtgaggggcacgcttgcgtgggggtctgtcgcaccatggtggggggcacgcgtgcatggccctcatctcactgttgtgctttgcccactcagg

SEQ ID NO: 125799 - DNA, 201 bp, Homo sapiens
ttgatacatcataatccgaagtctgtagtttacactagggttcactcttggtgttgtacattctgtggacttggacaaatgtataatgatgtgcatcattrtagtgtcatgcagagtattttcactgccctaaaagccgtctgtgtttcacctcttcatccctctctccttcccaaaaccctggcaaccactgattgtctc

SEQ ID NO: 125800 - DNA, 201 bp, Homo sapiens
cacttgagttttagaccagcctggccaacgtggtgaaacctgtctctactaaaggtacaaaaaaaattaatagccaggcttggtggtgcgcttctgtagtygcagctgcttgagggggctgagatacaaaaatcgcttcaccccaggaggtagaggttacagtgagctgagatcgcgccactgcacttcagcctgggtacg

SEQ ID NO: 125801 - DNA, 201 bp, Homo sapiens
ctgctccctgaagctcaggccagatagatcaggatgaaggggcatcccttgctgcctaaactttgaaccagagttcaaacagcagggatcattgtaccttkgtggtaccaagagccaaacgtgggatgtctgaggagaaaaagcagaagctgttagagccacgcctggctttttgtgtcctgagtaggtgtcgaccttgtt

SEQ ID NO: 125802 - DNA, 201 bp, Homo sapiens
gtgaccttgacccgtcgtttttgcttatgcattaatgcagactgcaccttggggaaccagcgtctctaactgtagggacctgccaaggtgtaccaatagtrttagggtgccggtttcactgctagaagtttctggagcagttgggtgactaacagtgaggatacaggcctgcatttccactcttcttctaagtcacattct

SEQ ID NO: 125803 - DNA, 201 bp, Homo sapiens
cagattgtcatagggacctctttagatggagccatcagagaaggccacattgaggaaggagatttaaaggcaagattggaaagttgagaagaagccacagwgaccccagggtattgggacagcactggcttgcgtaggaactggtagaagtccagaaaggccaccatgagggaagggagcagggcgtgagtggaagttggg

SEQ ID NO: 125804 - DNA, 201 bp, Homo sapiens
ttagtcaagctggagggcagccaatgggagccactggagtgaacccccagttagccagcaaacagagcatggtcaacagtttgcccaccttccctacagayatcaagaatacttcagtcaccaacgtgccaaatatggtaagttacccttggccctcagtgttatggctctccggtgggtgctgtggtctgtggattttta

SEQ ID NO: 125805 - DNA, 201 bp, Homo sapiens
ggctgttctttggatttgtttagtcccaagtaggggtgagggagaataagagtagaacacagtttccccagaaggttgatgagagcgttgggtgacggatscaaaaccctgtgaatgtcggaaacgagaggatttttttttaacttaagaaatgaagatgaagtaatgctcaatgtttaaattgcatttgtcttttttgaa

SEQ ID NO: 125806 - DNA, 201 bp, Homo sapiens
caattcctgaattgacctgtggaggctggagctgggggtcatcagggaacttggcccacatctgttgatggaaggaattccagttggttgcaggccctcayggaagcatagctgagggttcctctttcccattcctgcctttatctagtatatatttgatttcagtgcactttaattttataaaaaactttattatggaaa

SEQ ID NO: 125807 - DNA, 201 bp, Homo sapiens
cttttcccatcagcagctttcctgtctcctggaagctctcatgctttctcgggtgtgtagagccttcctcaaggcagacagctgctgaccacagttgtgaygtggaatcttccgcatctggttgtggcacagtggaaacagcccccactgccctcatttgttaatttctgaactcgcactctgggtctcttttccccttta

SEQ ID NO: 125808 - DNA, 201 bp, Homo sapiens
cattttctaacttgtatatgaactaacttgtatatgaagtttcttttttgggggaaattttgaatgtagcaattttttaaaaaatgaagttacataaacawgttaccaaaaatagaaaacagcaaaaaggaaatcaaaatccatagacttaccaccccccccacaatgtagcctaagtagtattttaatttttgagacagg

SEQ ID NO: 125809 - DNA, 201 bp, Homo sapiens
gactgtcaagagcaaagaagtgtggcccatcgggggcttctgcaggggctgcgagggtcgagacaggtttcagtttggtaggttgatgcgaggtgtcaccygtgaggcgaatgtgggaagtgctgtcagcaggcatctgccagctgggcatggtggctcacgcctgtcatcccagctctttgtaaggccaaggcgggaaga

SEQ ID NO: 125810 - DNA, 201 bp, Homo sapiens
ttcttgccataggacaaactaataggacaaactacttccctgctctgttggggccctcccaggtgagggaggggcttcctggctttctagaccacccaccygtacacgaacaggtagcgctccttatagctgttccgtcccagtggctcactgaccacgtagtgataggtgtctggtgcatccctggattgaagaaacaaa

SEQ ID NO: 125811 - DNA, 201 bp, Homo sapiens
cccagtgacctccagcttccgcccagatcagccaccgcttcctcttcacctatgtgctcttgcggacttaatttttctatttttaattgtgtgggtttttkttttttttttttttggttttttaattttttggaacagggtctgggtctgacgcccaggctggagtgcagtggtatgatctcggctcgctgcaacctccgc

SEQ ID NO: 125812 - DNA, 201 bp, Homo sapiens
aggatgagtgtccttcattgtctgtgcctcccatttctattcctgtaggtgtttatacgggagctgatctccaatgccagcgatgccttggaaaaactgcrtcacaaactggtgtctgacggccaagcactgccagaaatggagattcacttgcagaccaatgccgagaaaggcaccatcaccatccaggtacctccctca

SEQ ID NO: 125813 - DNA, 201 bp, Homo sapiens
gcctggaggccaccaggtcagcaggcattttccctggttctacctgcacgtagggtgcacaggcagagccgtgaagggccgagccgctgcgggactgggargggggctgcccgccagggctgcgtagcatcgagctcctgctgggactgggaggaagctggcctggctgaggcggacctcctcctccttcctctgcgtggc

SEQ ID NO: 125814 - DNA, 201 bp, Homo sapiens
cagtcccagcagccacggtctcctttctgtccattgtgctgcctgttccagacgtttctcctggatggagtcacacggcatgctgtcctcagtgactgacwtccccctcgcggctcagctgcggtgcagcgtgggtcgtcatcgctctcacggcccacactgtattcgtcagctcgcccctgctgggcagcgtcatcctct

SEQ ID NO: 125815 - DNA, 201 bp, Homo sapiens
gtcagaaatggggcatttgaggtgtgttgtgtgttgtttgggctctgcctatgaaaccctcgggaaccgctggagtcccatgcagggtatgtcccagtgtmacatccacctggcttttcctttccttgcctgccttagttctggagtgtttgaaatcgccgaagcttcgggagttagaaccgggacaaaaatcatcatcca

SEQ ID NO: 125816 - DNA, 201 bp, Homo sapiens
ggctcccatggctcctgcaggctgtcctggagaggaagtctttagaaaggaacttcctagaaggaagttcagaaaactgtttctgagggcctttgtcccarttcatagatgtggaggcttggagtgagctcttttatttaaggtggtctgcacatcatagcagagcaagctggggctgtggctacattatgggcatgttga

SEQ ID NO: 125817 - DNA, 201 bp, Homo sapiens
gttcgagacctcatctctactaaaaatacaaaaactagctgggggtggtggtgggtgcctgtaatcccagttacttgggaggctgaggcaagagaacctcytgaaaccaggaggctgcggtgagccaagatcatgccatttcactctagcttgggtgaaggagtgagagtctatctatctatctatctatctatctatcta

SEQ ID NO: 125818 - DNA, 201 bp, Homo sapiens
gtgacagtttctcagactttccttgtttttgatgaccgggaagatttttttttttgaaatggggttttgctcttgttgcccacgctggagtgcagtggtgygatttcagctcactgcaacctccgcctcccgggttcaagcaattctcttgccttcagtctctcgagtagctgggattacaggtatgtgccaccatgcctg

SEQ ID NO: 125819 - DNA, 201 bp, Homo sapiens
tcccctgcctcagtctcccgagtagctgggattacaggtgcctgccaccatgcccggctaacttttgtatttttagtacagatggggtttctccatgttgrccaggctggtctcgaactcctgacctcatgtgatccgcctacctcagcctcccaaagtgctgggtttacgggcgtgagccaccgcacccctggctgatat

SEQ ID NO: 125820 - DNA, 201 bp, Homo sapiens
aactggtgtctgacggccaagcactgccagaaatggagattcacttgcagaccaatgccgagaaaggcaccatcaccatccaggtacctccctcagtgtcyaggcgtgtggcaggcccggccatgcagcaaggacaggatccgccttctagtgatgtctcgggtcccagggacgtactggccgtccgtaccaccaggataa

SEQ ID NO: 125821 - DNA, 201 bp, Homo sapiens
agctccctggagagcccctgggccacctggggcaggaggtgcttcctaagcccccagagctcccaaaaggggcctgatgggcagagcaaggcctgctctcrgacaacccccgagtccactaccgtccctcgggtcagggccagcctggagtgccaggaggccatgggcatcggagggtttgcgcccagttagttgggcaac

SEQ ID NO: 125822 - DNA, 201 bp, Homo sapiens
cacttcagcctgggcgacagagtgagacccagtcaaaaaaaaaaagaaaaaaaaaattagctaggagtggtaatacacggcctatagtcccagctactcargaggctgaggtgggaggatcacctgagcccgggaaggtcgaggctgcagtgagctgtgattgtgccattgtgatccagcctgggcaacagagtgagaccc

SEQ ID NO: 125823 - DNA, 201 bp, Homo sapiens
agcctggccaacatggtgaaaccatgtctcttttaaaaataaaagccaggcatggtggtgcgtgcctgtaatcccagctactagggaggctgaggcaggasaatcgcctgaacccaggaggcagaggttgcagtgagctgagatcatgcccctgcactccagcctggatgacagagcgagactctgtctcaaaaaaaaaag

SEQ ID NO: 125824 - DNA, 201 bp, Homo sapiens
ttccaaacatgagttccaggccgagacaaagaagcttttggacattgttgcccggtccctgtactcagaaaaagaggtgcgttccctgctaaccatgcccratgctagcaaagtttcttttcacaaagctggtttttatgccattctggagaattgccagataatatattcgctgtgagaaagcattaaactttggacagg

SEQ ID NO: 125825 - DNA, 201 bp, Homo sapiens
aaaaaccccgcaaaactcatttggggtgacaggacaaggaaaaagaaagatgaaggccaccatcgttgacatgctgattattgctggaaggcaaaggagartcctgaagaaagtttgtaaagcagcagatttcaaagctcagagggccttctaggagctgtttccgggtttcgtactgatgagtgctgcattcctgactcc

SEQ ID NO: 125826 - DNA, 201 bp, Homo sapiens
ctgctcttcttagggggcgcctgtccccctggcctttgtttttgcccctgggcatctggcacccgatttggagctgggccagtcccccaccgtgccccagrcctgcttttggggtaagcccagaagcttcttcgaagcccagggtcggtggaggacccccgcccccccgccccccgcccgagggaaccaggagaactctgc

SEQ ID NO: 125827 - DNA, 201 bp, Homo sapiens
agatggttttctgctcttcttagggggcgcctgtccccctggcctttgtttttgcccctgggcatctggcacccgatttggagctgggccagtcccccacmgtgccccagacctgcttttggggtaagcccagaagcttcttcgaagcccagggtcggtggaggacccccgcccccccgccccccgcccgagggaaccagg

SEQ ID NO: 125828 - DNA, 201 bp, Homo sapiens
tggtggtagggtgggagtaggtgccgcgtgcagagctgcgttcccaacacctgcttcctggtgtcctcagtcagatcattctgctggattgagagagccaycagaggggatcactgttccccagaaccacagccagggagaaggcgtgggggccacatcttgatggtgggagagctgtgcttttcctaattgctggtgtaa

SEQ ID NO: 125829 - DNA, 201 bp, Homo sapiens
ccttcccgcaggagaggcgtctgtgcccgctgttcccatggtggtagggtgggagtaggtgccgcgtgcagagctgcgttcccaacacctgcttcctggtstcctcagtcagatcattctgctggattgagagagccaccagaggggatcactgttccccagaaccacagccagggagaaggcgtgggggccacatcttga

SEQ ID NO: 125830 - DNA, 201 bp, Homo sapiens
gacaaagggcaggttaatggggaatgttgggtggtgtggagggccgcagccccgggagaagctgactgccgtgtctcccaggtgtggtggacagtgaggasattcccctgaacctcagccgggagctgctgcaggagagcgcactcatcaggtgagcctcgggccgcggggagaggaccctgctggggacaaggcccctac

SEQ ID NO: 125831 - DNA, 201 bp, Homo sapiens
ttcgagacctcatctctactaaaaatacaaaaactagctgggggtggtggtgggtgcctgtaatcccagttacttgggaggctgaggcaagagaacctctygaaaccaggaggctgcggtgagccaagatcatgccatttcactctagcttgggtgaaggagtgagagtctatctatctatctatctatctatctatctaa

SEQ ID NO: 125832 - DNA, 201 bp, Homo sapiens
ctgctcctttgcccccagagggccctagccgtggcccatggagctgagagcagaggtggtcggggaagcccggcctgcacatgggggccctcaggagcctkccaggtgctggcctggcctctgaagcttgtggtccagaagaaggtgggggtggctggtcatggctgaggctggagtctggatagggggaggggccgcaga

SEQ ID NO: 125833 - DNA, 201 bp, Homo sapiens
gatttgggtgacactggcactcagagcagagcagctgcaacaggataggccagatagaggctccaacgcaagggctctgccttcccgcaggagaggcgtcygtgcccgctgttcccatggtggtagggtgggagtaggtgccgcgtgcagagctgcgttcccaacacctgcttcctggtgtcctcagtcagatcattctgc

SEQ ID NO: 125834 - DNA, 201 bp, Homo sapiens
gtgccatccccttgggacttaggtcttaatatatggatttgggtgacactggcactcagagcagagcagctgcaacaggataggccagatagaggctccawcgcaagggctctgccttcccgcaggagaggcgtctgtgcccgctgttcccatggtggtagggtgggagtaggtgccgcgtgcagagctgcgttcccaaca

SEQ ID NO: 125835 - DNA, 201 bp, Homo sapiens
ccatgcccctcataatgggtttctcctcttgcctttcagatatacgagaacgccatgattgctgctggacttgttgacgaccctagggccatggtgggccrcttgaatgagctgcttgtcaaggccctggagcgacactgacagccagggggccagaaggactgacaccacagatgacagccccacctccttgagctttat

SEQ ID NO: 125836 - DNA, 201 bp, Homo sapiens
aggctgtcccggccacccacagcccaggtcactgttctgggaggtggcaggacgtagaggaagctccggcagtgccgcctccctgcttccctcttagcacrcgtgctgggttgaaggccaggcctgaagacaaagggcaggttaatggggaatgttgggtggtgtggagggccgcagccccgggagaagctgactgccgtg

SEQ ID NO: 125837 - DNA, 201 bp, Homo sapiens
gctcaaagctgagctggagcccttagcatggagtttggaaagggatggactcagaaaacgtacacaggcattttctgggctttttatatgaaatctgactytcccattttggggagttagtgacttttgtggctccaggtggcctatggcacctgtctggtcccatgtggttggtcaccaccactgcgctcgggaaggcag

SEQ ID NO: 125838 - DNA, 201 bp, Homo sapiens
tctggagaattgccagataatatattcgctgtgagaaagcattaaactttggacaggtcctcatcttaagctaccagtgagaggagttttaccagaatctrttttggtttcctggataagtgtatccagatggttctttgggctggatcaactctgggaattaattgaattttgccaataattttaaaagttcccgaaata

SEQ ID NO: 125839 - DNA, 201 bp, Homo sapiens
cgcttctgcggttctgagaagacacagtatcttacactgatgacatctgtgagggctccttgccaaaaccacaccctgacactgtggcatttggtcctgtrgatttctctttcagcaacagcccgacttagagatgtccacgctagcttctgctagacacccttgatgggacgaattaccatattgtttctcgtgtcttcc

SEQ ID NO: 125840 - DNA, 201 bp, Homo sapiens; identical to SEQ ID NO: 21398

SEQ ID NO: 125841 - DNA, 201 bp, Homo sapiens
attcccctgaacctcagccgggagctgctgcaggagagcgcactcatcaggtgagcctcgggccgcggggagaggaccctgctggggacaaggcccctacytgctcctttgcccccagagggccctagccgtggcccatggagctgagagcagaggtggtcggggaagcccggcctgcacatgggggccctcaggagcctt

SEQ ID NO: 125842 - DNA, 201 bp, Homo sapiens
cgtctgtcccaggagcctgtccagggccaggcgctgcactggctcaggcctgcacggtggtggagaagacgtgcgtggtgaacacgacgccctccccgccratctccgtttccaggccatctggatgatggaccccaaggatgtccgtgagtggcaacatgaggagttctaccgctacgtcgcgcaggctcacgacaagcc

SEQ ID NO: 125843 - DNA, 201 bp, Homo sapiens
gctcacgacaagccccgctacaccctgcactataagacggacgcaccgctcaacatccgcagcatcttctacgtgcccgacatggtgaggcactgtggcastcccacggccctcagggtgactctgttgtcccctgtggcatcagctctgcagatgtcacatgattaacatggcagtgtgagggcatgaaaaacataggta

SEQ ID NO: 125844 - DNA, 201 bp, Homo sapiens
tagctgtggtgtcagcgctgtcggggatcagccactggaaggtggggcttgtccacaggcggatggatgaccactgggagggtctcacatagctgcagccygcattgaagtcgcccatcaacatgacgtcctaccaggaaacgctgcctgtggccctgggacatgcggaggccgctggtgcccactgcccctgggagggcc

SEQ ID NO: 125845 - DNA, 201 bp, Homo sapiens
ctgtgatcgcagtgacagagcgagaccccctctgaaaagaaggcagcagcccaccccctccagtttcgcttctgcggttctgagaagacacagtatcttayactgatgacatctgtgagggctccttgccaaaaccacaccctgacactgtggcatttggtcctgtggatttctctttcagcaacagcccgacttagagat

SEQ ID NO: 125846 - DNA, 201 bp, Homo sapiens; identical to SEQ ID NO: 21388

SEQ ID NO: 125847 - DNA, 201 bp, Homo sapiens
aaagttaagtgcagtgaactcataggaagagattattgtgaactgctggggccagggaggcctgaatgggagagagggcctgcagccaggccctgcagcarctcggatgggaaggagtcccagctactgagactgcagctgcagagtggaggagctgcatgggcactggcagtagtgggtagggatgtggggggtggaagg

SEQ ID NO: 125848 - DNA, 201 bp, Homo sapiens
aaaaaaaaaaatgaaaaggtgccccatgcccctcataatgggtttctcctcttgcctttcagatatacgagaacgccatgattgctgctggacttgttgaygaccctagggccatggtgggccgcttgaatgagctgcttgtcaaggccctggagcgacactgacagccagggggccagaaggactgacaccacagatgac

SEQ ID NO: 125849 - DNA, 201 bp, Homo sapiens
tcatgtggctgtgcaagggaggacacataccagttggtcactcaggccataggcagcctggaagttaaagggaagagccgagtcgggaacaacggcgcctyggagcagcatccctgcaaccacgatcctgatgggtgttgggaagagaaagtaggttcccctttcacacatgggcctggctcagcacccgcaggaactaaa

SEQ ID NO: 125850 - DNA, 201 bp, Homo sapiens
ttgtatttttagtagagatggggtttcaccctgttggtcacgctggtcttgaactcctgacctcaggtgatccacccgcctcggcctcccaaagtgctggrattatggtgtgagccactgcgcctggccagtataaaatttttttaaatgggcagcataaaaagttaagtgcagtgaactcataggaagagattattgtga

SEQ ID NO: 125851 - DNA, 201 bp, Homo sapiens
ccagtgctaattttgtatttttagtagagatggggtttcaccctgttggtcacgctggtcttgaactcctgacctcaggtgatccacccgcctcggcctcscaaagtgctgggattatggtgtgagccactgcgcctggccagtataaaatttttttaaatgggcagcataaaaagttaagtgcagtgaactcataggaag

SEQ ID NO: 125852 - DNA, 201 bp, Homo sapiens
aagcgcgaggccctgctcacctgtcataggcacagtgcgtgggtgtagctgtggtgtcagcgctgtcggggatcagccactggaaggtggggcttgtccayaggcggatggatgaccactgggagggtctcacatagctgcagcccgcattgaagtcgcccatcaacatgacgtcctaccaggaaacgctgcctgtggccc

SEQ ID NO: 125853 - DNA, 201 bp, Homo sapiens
gggagagcacagggcacagagacataacagaagtgagacgtcatccctgccacagcactccagccttctggagcccagctggcaggggctggtggagctcraggtcagggggacgcaggcgggggaaaccctttcctacaacgtccagaaagccaaacagctggcaccacgtagaggaccccgagtcactcctccatccac

SEQ ID NO: 125854 - DNA, 201 bp, Homo sapiens
caggcagcacccacctgtgaaccgggagaagaacctgacaatggctggctctcggttgaaggtgtcgttcccgcagggctcgcagccatcatcgtagtagkagctgtccaccgcagacacctggtcaggcctgcgggaaggccgggcaggaggaggtgaccccaggctggaagctgccccactcctgcttcccaggaggca

SEQ ID NO: 125855 - DNA, 201 bp, Homo sapiens
aaagaggtgcgttccctgctaaccatgcccgatgctagcaaagtttcttttcacaaagctggtttttatgccattctggagaattgccagataatatattmgctgtgagaaagcattaaactttggacaggtcctcatcttaagctaccagtgagaggagttttaccagaatctattttggtttcctggataagtgtatcc

SEQ ID NO: 125856 - DNA, 201 bp, Homo sapiens
cccagtccccactcggaggtaacaacagtgaaagtttcggcattgcttcggggctgtacacagtgttatacgtgtaaatataaatgtctgcgtataagtattttttattctaaaaagcctaaaccatgtatgcattgtgctacgttgtacttcagaaaattttaacgctcccagcattctttccacatcttttcatgtcag

SEQ ID NO: 125857 - DNA, 201 bp, Homo sapiens
ctgaggtgggagaattgctcgagcccaggagtttgaggctacattgagctgtgattgtgccactgcacttcagcctggtcaaagagcaagaacctatctcaaaaaaaaaaaaaaaaaaaaaagagtgcaaataggccaggagtggtggtgcgcccttctaatcccacctgcttgggaggctgaggtgggaggatcgcttaa

SEQ ID NO: 125858 - DNA, 201 bp, Homo sapiens
gtagttgccaagagctggtgggagagggaaaagagagtgaacatgagtggctgtagggcttcttttggggtgataaaaatgttctgtagttgtccgggcayggtggctcatgcctgtaatcccagcactttgggaggccgatgcgggcggatcacgaggtcaggagatcgagaccatcctggctaacatggtgaaaccctg

SEQ ID NO: 125859 - DNA, 201 bp, Homo sapiens
agactgcagtgagccatgactgtaccactgcactccagcctgggtgacagagcaatctcttttctaagaaagaaagaaatagtaaatacatgaataaatcttttttttttttttttttttttgagacggagtttcactcttgtcacccaggctgctggagtgcaatggcacaatctcggctcaccgcaacctctgcctcgt

SEQ ID NO: 125860 - DNA, 201 bp, Homo sapiens
tggcacaatctcggctcaccgcaacctctgcctcgtgggttcaagtgattctcctgcctcagcctcccgagtagcggggattacaggcacccagtgctaattttgtatttttagtagagatggggtttcaccctgttggtcacgctggtcttgaactcctgacctcaggtgatccacccgcctcggcctcccaaagtgctg

SEQ ID NO: 125861 - DNA, 201 bp, Homo sapiens
tgactcccagtgacctccagcttccgcccagatcagccaccgcttcctcttcacctatgtgctcttgcggacttaatttttctatttttaattgtgtgggtttttgttttttttttttttggttttttaattttttggaacagggtctgggtctgacgcccaggctggagtgcagtggtatgatctcggctcgctgcaacc

SEQ ID NO: 125862 - DNA, 201 bp, Homo sapiens
ccagtgacctccagcttccgcccagatcagccaccgcttcctcttcacctatgtgctcttgcggacttaatttttctatttttaattgtgtgggtttttgttttttttttttttggttttttaattttttggaacagggtctgggtctgacgcccaggctggagtgcagtggtatgatctcggctcgctgcaacctccgcc

SEQ ID NO: 125863 - DNA, 201 bp, Homo sapiens
gaggcaggagaattgcttgaactcgggaggcggaaggtgcagtgagcggagatcacaccactgcactccagcactctagcctgcgtgacagagcgagaaatttttttttttttttttttgtagaggcagggtcttgctttgtggcccaggctggtgtcaaactcctgggctcaagcaattttcccaccttgaccttccaaa

SEQ ID NO: 125864 - DNA, 201 bp, Homo sapiens
ttggtttgattctgtcagttattgagagaggagtgttaagatctccagctgtgattgtggaattgttttgtctttaattctttccgttttaacttcatatatgttgaagctctgttattaggcaaatacacacttgtgattacattttcctgatgaattgtttgttgtagtattctgaaatatccttcttttttcctaata

SEQ ID NO: 125865 - DNA, 201 bp, Homo sapiens
aagcactggggttacaaacatgagcccctgtgccctgctggaaattaatttaacctttttttgtgtgtgtttactttttgagagttgggggggtctccctrtgttacctaggctggcctcgagctcctgagctcgagggagcctcctcctgcctggatctccctcccaaagtgctgggattacaggtgtgagcagccatgc

SEQ ID NO: 125866 - DNA, 201 bp, Homo sapiens
caccagccctagactccagagctcctctgcttttggggggaggctgccctggcctcacctgcacaatgtagctgacgagggtggcattggacatcttggtstccccaaatgtctggatgttgaaggctgcgatcttcagggacacggccccctgcagtagggccgccagtgccagcagcgcccccagcagcttcatgcccc

SEQ ID NO: 125867 - DNA, 201 bp, Homo sapiens
atgaggagttctaccgctacgtcgcgcaggctcacgacaagccccgctacaccctgcactataagacggacgcaccgctcaacatccgcagcatcttctaygtgcccgacatggtgaggcactgtggcagtcccacggccctcagggtgactctgttgtcccctgtggcatcagctctgcagatgtcacatgattaacatg

SEQ ID NO: 125868 - DNA, 201 bp, Homo sapiens
tttctgtctttctgctcagtctttttcagtttggccaataacggtaccttgttgttttcacttctttgattcttagcggggctgaacattttttcgtaccstctggccatttgtatttcatagaggctgcttgtatgtattaaatgcatttcttttctgtaggaaactccgggacgttttacagcagaggctgatcaaatt

SEQ ID NO: 125869 - DNA, 201 bp, Homo sapiens
atgagactctaagcctccctccctgctccaaaccggccagtcacccagaggcactccacctggtgctcacctgagatgatggtgatgtcctcagagatgaygagaatgctgtcaagaatctggaatatcctttgatgacaattttctccttttgctgcttaaagaaaaaaaagtagtctatgaagaaaggtctctgaagaa

SEQ ID NO: 125870 - DNA, 201 bp, Homo sapiens
gagggctctttgctgatccctgacctgtagcaaggtttggctgtgttcagtgtgttcaggggtacgtgcaaggttcactctcttgtgtcctccttaggggstgggctggggagggcggcagctgccagagaaggccttcagcccctgcagagccacagtgtggggcatcgtggggcccctgcactgggcttcaactcagag

SEQ ID NO: 125871 - DNA, 201 bp, Homo sapiens
aaaaacctaaaaatcgtggctcttgttattctgttccctgtagtggatcaactgaagctcagttgggtgagtgttcaaaggctttgaggcttctgaagccvgacctatgagtcacggctgcccttggaggtgccctcagtctgccctaagcgcgaggccctgctcacctgtcataggcacagtgcgtgggtgtagctgtgg

SEQ ID NO: 125872 - DNA, 201 bp, Homo sapiens
gagggcctcacctccaagccccatttctcttggacatccaggtagacgtcatagagagcgtcgatctcggctactgcgtcccccggggccgcatgcagggsaacaatggcaaactccctgacctctgtggagacagccacgtcgtgtgaggcacactccctgggggcaggttcagtcaccatgtcagctggaactatgtat

SEQ ID NO: 125873 - DNA, 201 bp, Homo sapiens
ctgctgtggatcagtggatgctgtcctgccaggcgctctgggaagggcctgtggtctgcctctccgttggcctctctgtgtgcttcctccacaccctccamctcccctggtttcctttaccacattgaagttcccgcaaatcctgccgtaaggagacctattcggggctgagagccagcccgtcctgcccccaggctcttc

SEQ ID NO: 125874 - DNA, 201 bp, Homo sapiens
ggcatccatcttggaaagagccagccaggtgtggcctccaggggcttgttagagtctcaggccccacccagggctcctgcgtgggagcccacattttaataagatctccccgcattttaaccggatcccccccattttaaccaggtcgccccacattttaaccaggtctcccaacatttgaactagatacccgccgcattt

SEQ ID NO: 125875 - DNA, 201 bp, Homo sapiens
gcatccatcttggaaagagccagccaggtgtggcctccaggggcttgttagagtctcaggccccacccagggctcctgcgtgggagcccacattttaataagatctccccgcattttaaccggatcccccccattttaaccaggtcgccccacattttaaccaggtctcccaacatttgaactagatacccgccgcatttt

SEQ ID NO: 125876 - DNA, 201 bp, Homo sapiens
acaggagggcgggggagccaggcacctgctcaacccattggtccgggacccaggcgacaggagggcgggggagccaggcacctgctcaacccattggtccrggaccttggggtgttttcactccaccctggaccctgctctgaagcctcaggttcttgccataggacaaactaataggacaaactacttccctgctctgtt

SEQ ID NO: 125877 - DNA, 201 bp, Homo sapiens
catccatcttggaaagagccagccaggtgtggcctccaggggcttgttagagtctcaggccccacccagggctcctgcgtgggagcccacattttaataagatctccccgcattttaaccggatcccccccattttaaccaggtcgccccacattttaaccaggtctcccaacatttgaactagatacccgccgcatttta

SEQ ID NO: 125878 - DNA, 201 bp, Homo sapiens
ccaggctggaagctgccccactcctgcttcccaggaggcaggcgtcgcgtcccaggcgacaggagggcgggggagccaggcacctgctcaacccattggtscgggacccaggcgacaggagggcgggggagccaggcacctgctcaacccattggtccgggacccaggcgacaggagggcgggggagccaggcacctgctc

SEQ ID NO: 125879 - DNA, 201 bp, Homo sapiens
gtacataaatcttggtgtgctcacatgtttcctaaggtgcagttcctataattggaacaactggctcaaaggttggaagggttttccgggcgtgggtatcttgtctctgggggcatcggttctcctactgcctccagggggtgtctgccctccaccctgctgcctcctgtccggccactgcccagggtttctgtctttctg

SEQ ID NO: 125880 - DNA, 201 bp, Homo sapiens
ccaccgcagacacctggtcaggcctgcgggaaggccgggcaggaggaggtgaccccaggctggaagctgccccactcctgcttcccaggaggcaggcgtcscgtcccaggcgacaggagggcgggggagccaggcacctgctcaacccattggtccgggacccaggcgacaggagggcgggggagccaggcacctgctcaa

SEQ ID NO: 125881 - DNA, 201 bp, Homo sapiens
aaattttgaatgtagcaattttttaaaaaatgaagttacataaacatgttaccaaaaatagaaaacagcaaaaaggaaatcaaaatccatagacttaccaccccccccacaatgtagcctaagtagtattttaatttttgagacagggtctcactctgtcccccaggttggagtgcagtggggcaatctcagctcactgca

SEQ ID NO: 125882 - DNA, 201 bp, Homo sapiens
atcttggtctccccaaatgtctggatgttgaaggctgcgatcttcagggacacggccccctgcagtagggccgccagtgccagcagcgcccccagcagctwcatgcccctcatcctgggagagcacagggcacagagacataacagaagtgagacgtcatccctgccacagcactccagccttctggagcccagctggcag

SEQ ID NO: 125883 - DNA, 201 bp, Homo sapiens
cggcctgcgctgcctgtgtgtcagtcgcgtttacagaccccgggagctgccccacctccctacgcacatgactgatctggggggagcactggggtgttcasattgaggtctttccatatgtagggatactgagtttcagattgatatgtgagttgtgttacgtttgagtgagattatagtttaagaaagacttcagtattt

SEQ ID NO: 125884 - DNA, 201 bp, Homo sapiens
gttacttgggaggctgaggcaagagaacctcttgaaaccaggaggctgcggtgagccaagatcatgccatttcactctagcttgggtgaaggagtgagagtctatctatctatctatctatctatctatctaaaaaaaaaagtgtttaaagggatgcagttaggaaatggaatggctgagtctcagcatatcatccacatg

SEQ ID NO: 125885 - DNA, 201 bp, Homo sapiens
cgtcccgccccttcccatcgtgtacggtcccgcgtggctgcgcgcggcgctctgggagtacgacatggcgcgcgagctgcgggcgctgctgctgtggggcygccgcctgcggcctttgctgcgggcgccggcgctggcggccgtgccgggaggtgagggcgtcctggctggacgggcagcgggcgggccgggccacggaga

SEQ ID NO: 125886 - DNA, 201 bp, Homo sapiens
ctttgctggaacttcctgtcttggaaatcagagttgtgagagtaggtcccctgccagcaccaggaaggtcgggagagctggtttcctcactttgctcaggrctcaagtactagctagtttgtttcatcttccaaaaagagcctcacctggaccccgctcctgtaggtggtgcctgcctgctgcgccctccccttcagtact

SEQ ID NO: 125887 - DNA, 201 bp, Homo sapiens
ctcctccctctgctctccctttgtttggagcctgtgctgtttgatttccgtgtcttgtgtgctgcacccttcaggagaattcaggtgaatttctggtgctytccggctgttcttttcagagtggaggggagtagtacttgctggtcagttgcgactctgtctgtgaaacagctctttgtgttgctgagatgacgctagagg

SEQ ID NO: 125888 - DNA, 201 bp, Homo sapiens
aggtgtagcgtccatgacatgtttgtcgtctgattaagctgtggtgctggcacttagacggcagaggaaggtgtggcccagctgtccaaggccaccaggargaccttcagcttagttaggaccaagggaactgagttatctgagtgcctgaaaaagaacacatcaggccgggcgcggtggctctcgtctgtaatcccagca

SEQ ID NO: 125889 - DNA, 201 bp, Homo sapiens
tgcgcccgtgggcttccaagggggaacttgctgtgcagtgggtccttgccttgcttttctcccttagggtaactaggtgacctccacattagcatattaaraatgtcctttttttccagctacgtagactagaaatgtgaggatgtgcatttgaagtgtttcctctgttaggttgggtgcggtgcctcacgcctgtaatcc

SEQ ID NO: 125890 - DNA, 201 bp, Homo sapiens
cagcagcgccagtatgcagaatgcctgtgcctctgctggagcagctcagtgaggcggacaccaggtcactttaactagttttggtgccaaactagttttgkgagatagctgcagaagtgctcgtttctgtctgttgccacttcacttttggagacagggtcttgctctgtcacctaggctggagtgtaccagtggcgccat

SEQ ID NO: 125891 - DNA, 201 bp, Homo sapiens
tggctgtcagtgcacagcagcgccagtatgcagaatgcctgtgcctctgctggagcagctcagtgaggcggacaccaggtcactttaactagttttggtgscaaactagttttgtgagatagctgcagaagtgctcgtttctgtctgttgccacttcacttttggagacagggtcttgctctgtcacctaggctggagtgt

SEQ ID NO: 125892 - DNA, 201 bp, Homo sapiens
accatgtcctcgttttgctttatggctttgccacctgtgcgtgtcctggacatgctcagttttgcctgttttgagctttgtacgtggatcttggtgtttgytgaagtctcacgttgctcacttggcatgagggttgcccatgcagaggggctgccacaagttcattttcatagccgaataatgtccgctgcagaaacccac

SEQ ID NO: 125893 - DNA, 201 bp, Homo sapiens
ttaaccgcagcctcatgtttctgcctgggctcctgctgccagccagggacagcacagcagggatgaggaccttggtccacagccaagagcctgttccaccrtgctgggagcagtggtgctcagtaccccacacccgacaccctgtggctccatagggctggccctgcccaccagccctagactccagagctcctctgcttt

SEQ ID NO: 125894 - DNA, 201 bp, Homo sapiens
cgggaccttggggtgttttcactccaccctggaccctgctctgaagcctcaggttcttgccataggacaaactaataggacaaactacttccctgctctgytggggccctcccaggtgagggaggggcttcctggctttctagaccacccacctgtacacgaacaggtagcgctccttatagctgttccgtcccagtggct

SEQ ID NO: 125895 - DNA, 201 bp, Homo sapiens
ttacttgggaggctgaggcaagagaacctcttgaaaccaggaggctgcggtgagccaagatcatgccatttcactctagcttgggtgaaggagtgagagtctatctatctatctatctatctatctatctaaaaaaaaaagtgtttaaagggatgcagttaggaaatggaatggctgagtctcagcatatcatccacatgt

SEQ ID NO: 125896 - DNA, 201 bp, Homo sapiens
caagaaactgcctggtgcagcttccggcggggcacagggacaccaattatagctcacagagcaagtgcccaaccccctacgtgtgctcagcacgtgggacragggttcccctctggtctgtcatcccctcctggctcttgaccaaatgctgccccatctgctttcaggaactcccaggcatagtgcccctgcttcctctac

SEQ ID NO: 125897 - DNA, 201 bp, Homo sapiens
gctgcccttggaggtgccctcagtctgccctaagcgcgaggccctgctcacctgtcataggcacagtgcgtgggtgtagctgtggtgtcagcgctgtcggrgatcagccactggaaggtggggcttgtccacaggcggatggatgaccactgggagggtctcacatagctgcagcccgcattgaagtcgcccatcaacatg

SEQ ID NO: 125898 - DNA, 201 bp, Homo sapiens
tacttgggaggctgaggcaagagaacctcttgaaaccaggaggctgcggtgagccaagatcatgccatttcactctagcttgggtgaaggagtgagagtctatctatctatctatctatctatctatctaaaaaaaaaagtgtttaaagggatgcagttaggaaatggaatggctgagtctcagcatatcatccacatgtg

SEQ ID NO: 125899 - DNA, 201 bp, Homo sapiens
acttgggaggctgaggcaagagaacctcttgaaaccaggaggctgcggtgagccaagatcatgccatttcactctagcttgggtgaaggagtgagagtctatctatctatctatctatctatctatctaaaaaaaaaagtgtttaaagggatgcagttaggaaatggaatggctgagtctcagcatatcatccacatgtgg

SEQ ID NO: 125900 - DNA, 201 bp, Homo sapiens
ggctgttcttttcagagtggaggggagtagtacttgctggtcagttgcgactctgtctgtgaaacagctctttgtgttgctgagatgacgctagaggtgtwgcgtccatgacatgtttgtcgtctgattaagctgtggtgctggcacttagacggcagaggaaggtgtggcccagctgtccaaggccaccaggaggacctt

SEQ ID NO: 125901 - DNA, 201 bp, Homo sapiens
taatcccagcactttgggaggcggggggatcacctgaggttgcagtgagccgagatcgtgcctctgcactccagcctcggcaacagtgagactctgtctcaaaaaaaaaaaaatgaaaaggtgccccatgcccctcataatgggtttctcctcttgcctttcagatatacgagaacgccatgattgctgctggacttgttg

SEQ ID NO: 125902 - DNA, 201 bp, Homo sapiens
gcagtgagccaagattgtgccactgcactccctcctgggcgacagtgcaagactctgtcttggaaacaaacacatcaatccgaatgtaagagattagcaargcgtttattggttactgggtgagtagttggcctaagctaagacaaaagaggaatctccaagtattttgctaccccttggcaggaagagagggaatgcagc

SEQ ID NO: 125903 - DNA, 201 bp, Homo sapiens
ggcctgcgggaaggccgggcaggaggaggtgaccccaggctggaagctgccccactcctgcttcccaggaggcaggcgtcgcgtcccaggcgacaggaggrcgggggagccaggcacctgctcaacccattggtccgggacccaggcgacaggagggcgggggagccaggcacctgctcaacccattggtccgggacccag

SEQ ID NO: 125904 - DNA, 201 bp, Homo sapiens
aggctcccttaagccttgagaagtcgaggctgcagtgagctgtgatcacgccactgcactacagtctgggtgacagagtgacagtgtctcaaaaaaaaaawatatatatatatatatatatatacacacacacatataaaagaaattaattttgagatagctaaattaaatgccatattaagagcaggaggctattcagca

SEQ ID NO: 125905 - DNA, 201 bp, Homo sapiens
ctccggcgtagccaggaccacaggtgcatgctaccatgctcagtttttttttttttttttttttttttttttttttgaggcggaatcttgctctgctgccyagcctggagtgcagtaatactatctcggctcactgcaacctctgcttcctgggttcaagcaattcttctgcctcagcctcccgagtagctgggattacag

SEQ ID NO: 125906 - DNA, 201 bp, Homo sapiens
gcgtgagccatcgcacccagcctattttttaagtttctcacagacacaaggtctccaagtcctgagcccaagcaatcttcccgcaaatgctgggattacargtgtgagccaccgcaccccgccactcatttcttggaatctttgactttccattcgtattcatttcctgagactggtgaaactaccacaagtttggttgct

SEQ ID NO: 125907 - DNA, 201 bp, Homo sapiens
cagagaaggagacggaggagctcatggcctggatgagaaatgtgctggggtcgcgtgtcaccaacgtgaaggtgaggctttcccggggatggaccaccacytggccgcagtgtccctaacaggctggccagctggtggctcccagtacctggcccgttgggtgtccttccagcagcagcagaagcccttggtgtcaggtgg

SEQ ID NO: 125908 - DNA, 201 bp, Homo sapiens
gcccagggagtggcaggaagagggcgtgcacacactgtctcccctcagaggatgttgggggctggggagccacagacaggtgggacaagccaaggactccratcccgtgggtggggaagtgggtggtctcagtgtctgttgagggactattcatcatgtactggatatcagtctccaaatactatgctacaggggccagtc

SEQ ID NO: 125909 - DNA, 201 bp, Homo sapiens
ttttcctcgaatcctgtgagaggaagttgccttctcgatgcctttggggtgcatttccaacaaacaaggatgtccttccctttgtaattaacagatgttayaggtattttgaagctatgtaaatgtcacattcttcatgaaactctcaatacattcatttatttacttaaaatatttatgtgttggccgggcgcggtggct

SEQ ID NO: 125910 - DNA, 201 bp, Homo sapiens
gaaagaatcacaggcttaaaagttggaagcatggtaccaagaacatgtttttcctcgaatcctgtgagaggaagttgccttctcgatgcctttggggtgcrtttccaacaaacaaggatgtccttccctttgtaattaacagatgttataggtattttgaagctatgtaaatgtcacattcttcatgaaactctcaataca

SEQ ID NO: 125911 - DNA, 201 bp, Homo sapiens
tcactcatagttgtggaaactgagtcacagaggggtggtcctgctcagtaagggagctgcattcctggctgtggcaggcatgctggcccactggtagtgcycgaagctgcagagcaggggtcctcatcccagcttgtggttgtcaaaggttgcgttgtcagtctgagaactcatctcgatcagaaaagagtcagccgaaat

SEQ ID NO: 125912 - DNA, 201 bp, Homo sapiens
atcctgtgaggggagccgtgagtcctcactcatagttgtggaaactgagtcacagaggggtggtcctgctcagtaagggagctgcattcctggctgtggcrggcatgctggcccactggtagtgcccgaagctgcagagcaggggtcctcatcccagcttgtggttgtcaaaggttgcgttgtcagtctgagaactcatct

SEQ ID NO: 125913 - DNA, 201 bp, Homo sapiens
aagagatgttatataatcaatgaaaagggggcctcagtgcttgtttccccacacagccgtgctggcttctgacagcaggaccccgacttgctgccgacatraccacagggcagcagttgtgctgacctcaacaggatgcatccccgccccacagcagcgactgttctgtggtcgttagagtcgtgctctttggtgtactga

SEQ ID NO: 125914 - DNA, 201 bp, Homo sapiens
aggcctgcacggtggtggagaagacgtgcgtggtgaacacgacgccctccccgccgatctccgtttccaggccatctggatgatggaccccaaggatgtcsgtgagtggcaacatgaggagttctaccgctacgtcgcgcaggctcacgacaagccccgctacaccctgcactataagacggacgcaccgctcaacatccg

SEQ ID NO: 125915 - DNA, 201 bp, Homo sapiens
ctgaggagctcctgccccagagccttgtgtgtctcccctgcactacccggcatagcccagcggtggggctggagaggggtctacgcctgagaccaccgccygtctgtcccaggagcctgtccagggccaggcgctgcactggctcaggcctgcacggtggtggagaagacgtgcgtggtgaacacgacgccctccccgccg

SEQ ID NO: 125916 - DNA, 201 bp, Homo sapiens
ttggtagagccaccgccttaggtgtgaaatcagaaggtcttggctgtagggagtgctgcgccctccatttctgtcccagcgagggacttctgccagtgtcrggtgtgtcttgccccctctggtggccacccgtgagtttgccgtccggcacctcccctgagtggtgattcatggcacatctgctaataatcatggaagcgg

SEQ ID NO: 125917 - DNA, 201 bp, Homo sapiens
gtctgggagggctttttggttcactgctgtgcgtaaaggggcattttcagggtggaggcagtgattggtagagccaccgccttaggtgtgaaatcagaagstcttggctgtagggagtgctgcgccctccatttctgtcccagcgagggacttctgccagtgtcgggtgtgtcttgccccctctggtggccacccgtgagt

SEQ ID NO: 125918 - DNA, 201 bp, Homo sapiens
ggtctccccaaatgtctggatgttgaaggctgcgatcttcagggacacggccccctgcagtagggccgccagtgccagcagcgcccccagcagcttcatgyccctcatcctgggagagcacagggcacagagacataacagaagtgagacgtcatccctgccacagcactccagccttctggagcccagctggcaggggct

SEQ ID NO: 125919 - DNA, 201 bp, Homo sapiens
gggagctcctggcgtccctgcgggccgaggcggctgcgttcctctccccatcctgaatgtgtttcctgagtatttcttctccactgagaactgtgctgagyctgcataaacacgtgtttcatcctgtgaggggagccgtgagtcctcactcatagttgtggaaactgagtcacagaggggtggtcctgctcagtaagggag

SEQ ID NO: 125920 - DNA, 201 bp, Homo sapiens
cttgtacaaatggcgagtgctgcctgctgtgtggctgccctcaggacgggctttggtgagggcagcacagccctggaggagcctggtctgacatggggccygtctgggatcactgttgggccttcaaccgtctggagcctctatgtcttcctctgatagattcccagaacaatcatttcaccttctaagaagccatcctgc

SEQ ID NO: 125921 - DNA, 201 bp, Homo sapiens
ttttttgcagagatggagtctcactttcttgcccaggctggtcttaaacccctgggctcaagcgattctcctgccttggcctcccaaagtgctgggattayaggtgtgaggttgtgtgcctggctcagaactgtggacctttttgaaactgcctagtttgtggtgctgtgtttcagtagtcctaggaaacaaaatacacag

SEQ ID NO: 125922 - DNA, 201 bp, Homo sapiens
tgcgtgtcttatgtctgtggaatcctctcgcccatgctacgctgcctcagtcacccatgagctcagccctcttaccctttcagacctcactgacccctgayactgccagccctgtcacttgccctcagaatatcttatttgattttttttgagccggagtcttgctctgttgcccaggctggagtgcagtggtgcaacctc

SEQ ID NO: 125923 - DNA, 201 bp, Homo sapiens
ctgtgaggggtgggctaggatatccgcttgtggactttatatttgtcatttttgcccataacagtttattcagcaaatacatttccaatgcccccgagtcktcaaagaaaatgtgaccctgctgtctggagtcataggtggctgctgagcagtgtaccagggccatcttggtggcctggacagcacattagagaaacaaga

SEQ ID NO: 125924 - DNA, 201 bp, Homo sapiens
tttagtgcacctgggggtttggcgcagtcctgtcccaggatgtgggcgtggccttccctctttgtgtcctgctggacactcagggaggccctgagtacccycaggagtcagcccagaaagccatgttccagccacaagctgacattgcagtctcgcagcagccggggcctccacagctctggttctcacgtgggctccgct

SEQ ID NO: 125925 - DNA, 201 bp, Homo sapiens
cgtcagagctccaactgtcagaagtgtcagatgtgccagtagaaggatgaggccgcctcctaaaggagagggaagacctggaaagatcaacagcagacgcrgtctcccaaagcaaacgtgattctgtggtcaggcaggtacggtgacgggttggtcattttgcatgacgaggtgactgccacaatcaccaagggtgccgag

SEQ ID NO: 125926 - DNA, 201 bp, Homo sapiens
actcatagttgtggaaactgagtcacagaggggtggtcctgctcagtaagggagctgcattcctggctgtggcaggcatgctggcccactggtagtgcccraagctgcagagcaggggtcctcatcccagcttgtggttgtcaaaggttgcgttgtcagtctgagaactcatctcgatcagaaaagagtcagccgaaatta

SEQ ID NO: 125927 - DNA, 201 bp, Homo sapiens
tcactctgggatccatgtgtggcctggaggccaccaggtcagcaggcattttccctggttctacctgcacgtagggtgcacaggcagagccgtgaagggcygagccgctgcgggactgggaggggggctgcccgccagggctgcgtagcatcgagctcctgctgggactgggaggaagctggcctggctgaggcggacctc

SEQ ID NO: 125928 - DNA, 201 bp, Homo sapiens
aaatgtgaagaatccttcgtctatgaagtgtccccacatcaaaactgcattgtgagtgtttatatttttggcctctcttactgtggccttaacttgcaggyctgtctggagccctgttctctcctttcctagtttgcagatgtggctgggaaacttgttagcatcaaattgttagaatgagatggatttcatatggggcca

SEQ ID NO: 125929 - DNA, 201 bp, Homo sapiens
aattgtgcttgtcatctttgatccctctggaatttactctggtctaaatggttttctgcatggctcccagtcatcccagtgctgctggatggagtgatctrtctcctccctcttctgtgaaatactgtcctcatcagacactcagtgtccaccctcgttacatggagttgtttgccttccccctttccagacctaaactgt

SEQ ID NO: 125930 - DNA, 201 bp, Homo sapiens
tgttgtgtgttgtttgggctctgcctatgaaaccctcgggaaccgctggagtcccatgcagggtatgtcccagtgtcacatccacctggcttttcctttcyttgcctgccttagttctggagtgtttgaaatcgccgaagcttcgggagttagaaccgggacaaaaatcatcatccacctgaaatccgactgcaaggagtt

SEQ ID NO: 125931 - DNA, 201 bp, Homo sapiens
attattcataataacccgaaaatgaaaacaatctgaaggtccatcagaaggtggaaacgaggctgggtgcggttggtcatgcctgtaattgcagcacttcrggaggccaaggcaggaggattgcttgaggccaagagttgaatgccagcctggacaacatagtgagactccatctcgaaaaaaaatttttaaaaattgctg

SEQ ID NO: 125932 - DNA, 201 bp, Homo sapiens
accagctttcaagtgacctcaacatcgacagcagggaaaacattagcacttttgtgacagcctcatattttcccccgcccgagatggagtctcactgtgtygcccaggctgggattacaggtgcacgccaccacacccagctaatttttgtatttttagtagagacagggttcaccatgttggccacgctggtctcgaact

SEQ ID NO: 125933 - DNA, 201 bp, Homo sapiens; identical to SEQ ID NO: 21401

SEQ ID NO: 125934 - DNA, 201 bp, Homo sapiens
ggagaccatcctggctaacacggtgaaaccccgtctctactaaaaatacaaaaattagctgggcgtggtggtggtacctgtcatcccagctactcgggagrctgaggcgggagaatcacttgaacccgggaggcagaggttgcagtgagctgagatcacgccaccgcactccagcctgcgcgacagagcgacactccatct

SEQ ID NO: 125935 - DNA, 201 bp, Homo sapiens
agctatgcatgcatgtatcacataacatgtatatgcatttgaacaccatggtagtgtgtgcaaaccgctgttctacctctagtgttttttctttgtgttaraggtaattcagcatcagcacacattacacagcattgtcccatttctctataatcccatgctttccaagtgttaccttacgtctgtagtttacttgttagt

SEQ ID NO: 125936 - DNA, 201 bp, Homo sapiens
attctttaaaatgatctgcctcttgaaaaatgaaagtcttttctcaaaaaacttcttcccaggtctgtgaagcagcacagtggccccttctggctctcacsttgtacctcgtccttgtttgcctcgagcataggaccttgtctgtgtttgtgcctcaggccccctccctctgtgtttgctgggtccacttagtctagtcat

SEQ ID NO: 125937 - DNA, 201 bp, Homo sapiens
gaaggccaccatcgttgacatgctgattattgctggaaggcaaaggagagtcctgaagaaagtttgtaaagcagcagatttcaaagctcagagggccttcyaggagctgtttccgggtttcgtactgatgagtgctgcattcctgactcccagtgacctccagcttccgcccagatcagccaccgcttcctcttcacctat

SEQ ID NO: 125938 - DNA, 201 bp, Homo sapiens
cgcgcaggctcacgacaagccccgctacaccctgcactataagacggacgcaccgctcaacatccgcagcatcttctacgtgcccgacatggtgaggcacygtggcagtcccacggccctcagggtgactctgttgtcccctgtggcatcagctctgcagatgtcacatgattaacatggcagtgtgagggcatgaaaaac

SEQ ID NO: 125939 - DNA, 201 bp, Homo sapiens
cctgtaatcccagcagctttgggaggctaaggtaggaagattgcttgagaccaggagcttaagaccagcctggtcaacatggaaacaccctatctctaggraaaaaaaaaaaaaaagaatttagtcctgtgtgatggtgcttacctgcagtcccagctgttcaggagagtaaagcaggaaggtcccttgagcccaggagtt

SEQ ID NO: 125940 - DNA, 201 bp, Homo sapiens
ggggaggagggcaaacccctcccctaagggcccttctccaaatcccactgaaacccactgggcaaagccagtctctgccatagccagctgtgaggagggcsgggaaccgtggacttcacccgtgtccgtgtgcccaccagagactgactctgtcactgagggcagagggaagacgctgggtccaggccgggctctgctgtt

SEQ ID NO: 125941 - DNA, 201 bp, Homo sapiens
gacatgtcttatcaatgcagacccaccatgtgtgcaggggtggcctgggccctgctggttgggtgtccagctccttgcttttccctctttctgttttcccmctgcgtccttccagctgcagctcccatgagctctagaggtcacagctgcgttcagctgatggggaggagggcaaacccctcccctaagggcccttctcca

SEQ ID NO: 125942 - DNA, 201 bp, Homo sapiens
acaggcgtgagccactgcactcagccacatgtggatttctttatgcgtggagtgcttctgccttgaaggcagtcagagccttccttagacccaggtgtcgyagtaactgtcatgcaggcctaggaaccccaactgccccggtgttccccagtgtggcccgcttggctcccccagccctcctgccgccctcatcctttcttc

SEQ ID NO: 125943 - DNA, 201 bp, Homo sapiens
ggctttcagatgggtgagtgacgaatgtcgcctgacaggcagctcaaagctgagctggagcccttagcatggagtttggaaagggatggactcagaaaacrtacacaggcattttctgggctttttatatgaaatctgactctcccattttggggagttagtgacttttgtggctccaggtggcctatggcacctgtctgg

SEQ ID NO: 125944 - DNA, 201 bp, Homo sapiens
accaccagatagtttaacagtaagatcttgtagcctgacattgaggtttgtggtttttcctttagggtgtaggagaaacacaaagacggaaattgtacagytagcgtgtttggtatctggttcaggcagatttattcctctaatggtttattttttttttaatttttaattttttttttgagacagggcctggctgcatct

SEQ ID NO: 125945 - DNA, 201 bp, Homo sapiens
acttagtgcgtctctctcctcaggatactggtatcgggatgacacaggaagagctggtgtccaacctggggacgattgccagatcggggtcaaaggtaagygtggggcccccacacagcctcccccttcccctcagggtgcaaggatccctccagtaggggtggccctgggtgccagattaagtaagaacgttgtcagttg

SEQ ID NO: 125946 - DNA, 201 bp, Homo sapiens
ccaccactacgcctggctaattttttgtatttttagtagagacggggtttcaccgtgttagccaggatggtctcaatctcctgacctcgtgatcctcccgyctcggcctcccaaagtgctgggattacaggtgtgagccaccgctcctggcgactaatttccttaatatataaaaagctcttacaaatcaataagaagaag

SEQ ID NO: 125947 - DNA, 201 bp, Homo sapiens
gataccaacagtcccttaacaaaaaaggaaataggaaatatttaaaaatacgggacagtgctcagttttgcttataataagagaaatgtaagtgaaaactrcagtgaaaattttatctgaccaataggcaaagatccaagagtttcatctcaacactgacttggcaggaatgtaggatgatatgcactttagtacattgct

SEQ ID NO: 125948 - DNA, 201 bp, Homo sapiens
ggcaggaatgtaggatgatatgcactttagtacattgctgtgggaacgtaaactgataggatctctgtggagtgtgacttggcagtatctaccactgcttmaaatacataaccttaggctgggcgtggtgtcttacggctctaatcccagcgcttgggaggcagaggccgggggatcacttgagctcaggagtttgagacc

SEQ ID NO: 125949 - DNA, 201 bp, Homo sapiens
aacagagcagggaagtagtttgtcctattagtttgtcctatggcaagaacctgaggcttcagagcagggtccagggtggagtgaaaacaccccaaggtccyggaccaatgggttgagcaggtgcctggctcccccgccctcctgtcgcctgggtcccggaccaatgggttgagcaggtgcctggctcccccgccctcctgt

SEQ ID NO: 125950 - DNA, 201 bp, Homo sapiens
cctgtctcaaaaattaaaatactacttaggctacattgtggggggggtggtaagtctatggattttgatttcctttttgctgttttctatttttggtaacwtgtttatgtaacttcattttttaaaaaattgctacattcaaaatttcccccaaaaaagaaacttcatatacaagttagttcatatacaagttagaaaatg

SEQ ID NO: 125951 - DNA, 201 bp, Homo sapiens
ggccctcccaggggcagtgggcaccagcggcctccgcatgtcccagggccacaggcagcgtttcctggtaggacgtcatgttgatgggcgacttcaatgcrggctgcagctatgtgagaccctcccagtggtcatccatccgcctgtggacaagccccaccttccagtggctgatccccgacagcgctgacaccacagcta

SEQ ID NO: 125952 - DNA, 201 bp, Homo sapiens
agcccctgccagctgggctccagaaggctggagtgctgtggcagggatgacgtctcacttctgttatgtctctgtgccctgtgctctcccaggatgagggrcatgaagctgctgggggcgctgctggcactggcggccctactgcagggggccgtgtccctgaagatcgcagccttcaacatccagacatttggggagacc

SEQ ID NO: 125953 - DNA, 201 bp, Homo sapiens
gagcaggtgcctggctcccccgccctcctgtcgcctgggtcccggaccaatgggttgagcaggtgcctggctcccccgccctcctgtcgcctgggtcccgsaccaatgggttgagcaggtgcctggctcccccgccctcctgtcgcctgggacgcgacgcctgcctcctgggaagcaggagtggggcagcttccagcctgg

SEQ ID NO: 125954 - DNA, 201 bp, Homo sapiens
aaggcaggagaatcacttgaacccaggagttggaaagcagcctgggcagcacagtgagatccccaccccatctctaccaaaaaagaacaatttttttttttaaattagccaggtgtggctgggtgcagtggctcacacctgtaatcctagcactttggaaggctgaggcgggcggatcacttgaggccaggagtttgggac

SEQ ID NO: 125955 - DNA, 201 bp, Homo sapiens
gcatcttttcatttcaggttttgtttttactgtctctggaagttccatttggatctttctatatcttccgtgttctcatcatgctcatgtttccctttaccttcttaaatatatgccgaactattgtccttgtctgctagttcctttatctctgtcgtttctaggtcagtttctattgactgtgtatggttataggtcata

SEQ ID NO: 125956 - DNA, 201 bp, Homo sapiens
tttgtttcttcaatccagggatgcaccagacacctatcactacgtggtcagtgagccactgggacggaacagctataaggagcgctacctgttcgtgtacrggtgggtggtctagaaagccaggaagcccctccctcacctgggagggccccaacagagcagggaagtagtttgtcctattagtttgtcctatggcaagaa

SEQ ID NO: 125957 - DNA, 201 bp, Homo sapiens
ttgagcaggtgcctggctcccccgccctcctgtcgcctgggtcccggaccaatgggttgagcaggtgcctggctcccccgccctcctgtcgcctgggacgsgacgcctgcctcctgggaagcaggagtggggcagcttccagcctggggtcacctcctcctgcccggccttcccgcaggcctgaccaggtgtctgcggtgg

SEQ ID NO: 125958 - DNA, 201 bp, Homo sapiens
gggtttttcttttttttgaggcggagtctcgctccattgcccaggctggagtacagtggcgcaatcttggctcactgcaagctccgcctccagggttcacrccattctcctgcctcagcctcccgagtagctgggactacaggcgcccgccaccacactcagctaattttttgtattttttagtagagacggtgtttcacc

SEQ ID NO: 125959 - DNA, 201 bp, Homo sapiens
tttgccttcattttttaatgatatttttggtagataaaaataattccagttgaccagtttttgtgagtgtgtgtgtgtgtgtgtgtgtgtgtgtgtgtgtktttttcccagtactttaaagatgttacttctttgtctttccgcttacagcagaagtatcatgtcattcttacctatatttatcagtacataatatgcttt

SEQ ID NO: 125960 - DNA, 201 bp, Homo sapiens
ctgccagctgggctccagaaggctggagtgctgtggcagggatgacgtctcacttctgttatgtctctgtgccctgtgctctcccaggatgaggggcatgwagctgctgggggcgctgctggcactggcggccctactgcagggggccgtgtccctgaagatcgcagccttcaacatccagacatttggggagaccaagat

SEQ ID NO: 125961 - DNA, 201 bp, Homo sapiens
aggctcagcccagaccctgtgcccacttgcctgcaggcccaagccatcagtgaccactatccagtggaggtgatgctgaagtgagcagcccctccccacascagttgaactgcaggaagagaggacccatcctgccacaggacccagaaaaaaagcccaacacacactcgggttaagaaatacctttaaatttaggtaaat

SEQ ID NO: 125962 - DNA, 201 bp, Homo sapiens
gatgattattgacccaatcattgaatacattgttgcgggtttgtttttgtttttgttgtcgagacagggtttttttgtttgtttgtttgttttttgagacrgagtttcgctctgtcacccaggctggagtgcagtggcgcaatctgggctcactggaagctccacctcccaggtttgcaccattctcctgcctcagcctcc

SEQ ID NO: 125963 - DNA, 201 bp, Homo sapiens
gtcatctgtggtgtcagtccttctggccccctggctgtcagtgtcgctccagggccttgacaagcagctcattcaagcggcccaccatggccctagggtcrtcaacaagtccagcagcaatcatggcgttctcgtatatctgaaaggcaagaggagaaacccattatgaggggcatggggcaccttttcattttttttttt

SEQ ID NO: 125964 - DNA, 201 bp, Homo sapiens
tttagttcctgcgggtgctgagccaggcccatgtgtgaaaggggaacctactttctcttcccaacacccatcaggatcgtggttgcagggatgctgctccraggcgccgttgttcccgactcggctcttccctttaacttccaggctgcctatggcctgagtgaccaactggtatgtgtcctcccttgcacagccacatga

SEQ ID NO: 125965 - DNA, 201 bp, Homo sapiens
cctccctttactctaggatgttctgtggatttctcttttgttccctcttagtcaactccctgtaaatagttaataattcttatgctaaacttcccttgttkaagctaccatgtggtttctgtcccctggtgggaccctgactgataggcccggttattttttaaattggatgctgaatattgtgaatttcaaattgttggc

SEQ ID NO: 125966 - DNA, 201 bp, Homo sapiens
gcaggatggcttcttagaaggtgaaatgattgttctgggaatctatcagaggaagacatagaggctccagacggttgaaggcccaacagtgatcccagacrggccccatgtcagaccaggctcctccagggctgtgctgccctcaccaaagcccgtcctgagggcagccacacagcaggcagcactcgccatttgtacaag

SEQ ID NO: 125967 - DNA, 201 bp, Homo sapiens
acaggttgtgtttttatcttgtggcctgggtagtgtcctgggaccctctgccccatctgagtcaagtgttgtgggataaaggaatctctcagggcgaggakcttcttaagttaaatcggtagaaatttaggcatgacatgggccttcaaatgtgtgaggagctgtatcattttatttctcggtgtgttttccccaacttct

SEQ ID NO: 125968 - DNA, 201 bp, Homo sapiens
agttgagttcctagcatccccctaaggtggctgataattattttatgtcaacatgaacttatgtattgaaacacagtgatatgtttaatctgttgcaattwttcttttcagtagcaatttgtagaactgagaatttctttgtgacagaacgttgaagcagtggtgaatgatgaaggatagaaaagaagttatattcagtaa

SEQ ID NO: 125969 - DNA, 201 bp, Homo sapiens
tttgggaagctgaggtgaagagtttgagaccagcctgggcaacacagcaagaccttgtctctactaaaaattttttaaaattaggccgggtgcagtggctsacacctgtaatcgcagcaccttgggaggccaaggcaggcagaccacttgaggtcaggggtccaagaccagcctggccaacatggtaaaaccttctctcta

SEQ ID NO: 125970 - DNA, 201 bp, Homo sapiens
gggccacaggcagcgtttcctggtaggacgtcatgttgatgggcgacttcaatgcgggctgcagctatgtgagaccctcccagtggtcatccatccgcctrtggacaagccccaccttccagtggctgatccccgacagcgctgacaccacagctacacccacgcactgtgcctatgacaggtgagcagggcctcgcgctt

SEQ ID NO: 125971 - DNA, 201 bp, Homo sapiens
aggcctcttttgtatgactccttccctgtgaaatggcttctccatgtagttcagccccacaggtgccctcagaaaacacgaagtgctttctgcacgtgtcscggcccccagagaagaatttggttacagagaaggtgacagctcatggcttcctgagggtggggcagtgggagaagtccccaggggagcttggggcccatg

SEQ ID NO: 125972 - DNA, 201 bp, Homo sapiens
tgcctcctgggaagcaggagtggggcagcttccagcctggggtcacctcctcctgcccggccttcccgcaggcctgaccaggtgtctgcggtggacagctmctactacgatgatggctgcgagccctgcgggaacgacaccttcaaccgagagccagccattgtcaggttcttctcccggttcacaggtgggtgctgcctg

SEQ ID NO: 125973 - DNA, 201 bp, Homo sapiens
gtggatggaggagtgactcggggtcctctacgtggtgccagctgtttggctttctggacgttgtaggaaagggtttcccccgcctgcgtccccctgacctygagctccaccagcccctgccagctgggctccagaaggctggagtgctgtggcagggatgacgtctcacttctgttatgtctctgtgccctgtgctctccc

SEQ ID NO: 125974 - DNA, 201 bp, Homo sapiens
ggattacaggcgtgaggcaccgcacccaacctaacagaggaaacacttcaaatgcacatcctcacatttctagtctacgtagctggaaaaaaaggacattyttaatatgctaatgtggaggtcacctagttaccctaagggagaaaagcaaggcaaggacccactgcacagcaagttcccccttggaagcccacgggcgca

SEQ ID NO: 125975 - DNA, 201 bp, Homo sapiens
acactccagcctaggtgacagagcaagaccctgtctccaaaagtgaagtggcaacagacagaaacgagcacttctgcagctatctcacaaaactagtttgscaccaaaactagttaaagtgacctggtgtccgcctcactgagctgctccagcagaggcacaggcattctgcatactggcgctgctgtgcactgacagcca

SEQ ID NO: 125976 - DNA, 201 bp, Homo sapiens
aaagcagaggagctctggagtctagggctggtgggcagggccagccctatggagccacagggtgtcgggtgtggggtactgagcaccactgctcccagcayggtggaacaggctcttggctgtggaccaaggtcctcatccctgctgtgctgtccctggctggcagcaggagcccaggcagaaacatgaggctgcggttaa

SEQ ID NO: 125977 - DNA, 201 bp, Homo sapiens
agccactgggacggaacagctataaggagcgctacctgttcgtgtacaggtgggtggtctagaaagccaggaagcccctccctcacctgggagggccccarcagagcagggaagtagtttgtcctattagtttgtcctatggcaagaacctgaggcttcagagcagggtccagggtggagtgaaaacaccccaaggtcccg

SEQ ID NO: 125978 - DNA, 201 bp, Homo sapiens
catgttgatgggcgacttcaatgcgggctgcagctatgtgagaccctcccagtggtcatccatccgcctgtggacaagccccaccttccagtggctgatcyccgacagcgctgacaccacagctacacccacgcactgtgcctatgacaggtgagcagggcctcgcgcttagggcagactgagggcacctccaagggcagc

SEQ ID NO: 125979 - DNA, 201 bp, Homo sapiens
gtagaggaagcaggggcactatgcctgggagttcctgaaagcagatggggcagcatttggtcaagagccaggaggggatgacagaccagaggggaaccctygtcccacgtgctgagcacacgtagggggttgggcacttgctctgtgagctataattggtgtccctgtgccccgccggaagctgcaccaggcagtttcttg

SEQ ID NO: 125980 - DNA, 201 bp, Homo sapiens
ctgggtcccggaccaatgggttgagcaggtgcctggctcccccgccctcctgtcgcctgggtcccggaccaatgggttgagcaggtgcctggctcccccgycctcctgtcgcctgggacgcgacgcctgcctcctgggaagcaggagtggggcagcttccagcctggggtcacctcctcctgcccggccttcccgcaggcc

SEQ ID NO: 125981 - DNA, 201 bp, Homo sapiens
ggccccctagccttggacagggagggggccctgctgagaaggcctttgtacttgggagagaccgaggtggcttcggaattgggggattacttttcattgcracccttgttggaaacatcagcacactggagtccagttgcagttcgccttgtggctttgtttaaatcctcattgggaatatgagttctcattgtcctcagg

SEQ ID NO: 125982 - DNA, 201 bp, Homo sapiens
ctgtaatcccagctactcgggaggctgaggcagaagaattgcttgaacccaggaagcagaggttgcagtgagccgagatagtattactgcactccaggctrggcagcagagcaagattccgcctcaaaaaaaaaaaaaaaaaaaaaaaaaaaaaaaaactgagcatggtagcatgcacctgtggtcctggctacgccggag

SEQ ID NO: 125983 - DNA, 201 bp, Homo sapiens
agcaaccaaacttgtggtagtttcaccagtctcaggaaatgaatacgaatggaaagtcaaagattccaagaaatgagtggcggggtgcggtggctcacacytgtaatcccagcatttgcgggaagattgcttgggctcaggacttggagaccttgtgtctgtgagaaacttaaaaaataggctgggtgcgatggctcacgc

SEQ ID NO: 125984 - DNA, 201 bp, Homo sapiens
ggggcatgaagctgctgggggcgctgctggcactggcggccctactgcagggggccgtgtccctgaagatcgcagccttcaacatccagacatttggggasaccaagatgtccaatgccaccctcgtcagctacattgtgcaggtgaggccagggcagcctccccccaaaagcagaggagctctggagtctagggctggtg

SEQ ID NO: 125985 - DNA, 201 bp, Homo sapiens
tcctcctgggtctgtttttccttccttgggtttccgtagagacttcttaaataaagtctgagatatgcaggtttttccgttctattctcttgttattatayaggagccctatttatgtggtgggaaggaggggaagtgtcctaagtcctgtgactaggtctcagtctttttgtgagcctgtgcccctggcctgtgactttt

SEQ ID NO: 125986 - DNA, 201 bp, Homo sapiens
ataaagctcaaggaggtggggctgtcatctgtggtgtcagtccttctggccccctggctgtcagtgtcgctccagggccttgacaagcagctcattcaagyggcccaccatggccctagggtcgtcaacaagtccagcagcaatcatggcgttctcgtatatctgaaaggcaagaggagaaacccattatgaggggcatgg

SEQ ID NO: 125987 - DNA, 201 bp, Homo sapiens
ggcagaggttgcagtgagccaagattgcacccctgcactccagcctgggcaacagagtgacactgggtctcaaaaacataaagattttacaaaattagccrgggatggtggcacatgcctgtggtcccagctacttgagagactgaggagggagtattgctagcacctaggaggtggaggctgcagtgagctatgaatgtg

SEQ ID NO: 125988 - DNA, 201 bp, Homo sapiens
ctggatacagatttttaggttaatagggttttttttttttccttacaacactataaatattccctctactgttttcccttgaataatttctcaaagaagtstgatgtaattcttatccttactcctttataggaaaggaatttatttccctgtggcttctctcaagattttctctttgtctttgattttctgtagtttatt

SEQ ID NO: 125989 - DNA, 201 bp, Homo sapiens
ttcttcagagacctttcttcatagactacttttttttctttaagcagcaaaaggagaaaattgtcatcaaaggatattccagattcttgacagcattctcrtcatctctgaggacatcaccatcatctcaggtgagcaccaggtggagtgcctctgggtgactggccggtttggagcagggagggaggcttagagtctcat

SEQ ID NO: 125990 - DNA, 201 bp, Homo sapiens
ccacagctacacccacgcactgtgcctatgacaggtgagcagggcctcgcgcttagggcagactgagggcacctccaagggcagccgtgactcataggtcbggcttcagaagcctcaaagcctttgaacactcacccaactgagcttcagttgatccactacagggaacagaataacaagagccacgatttttaggttttt

SEQ ID NO: 125991 - DNA, 201 bp, Homo sapiens
atacatagttccagctgacatggtgactgaacctgcccccagggagtgtgcctcacacgacgtggctgtctccacagaggtcagggagtttgccattgttsccctgcatgcggccccgggggacgcagtagccgagatcgacgctctctatgacgtctacctggatgtccaagagaaatggggcttggaggtgaggccctc

SEQ ID NO: 125992 - DNA, 201 bp, Homo sapiens
ttatgcatatttatgcctttctaattgtcccacagttcttggatattctgttccatcttgttcattcttttctctctgagtttcagtttgggaagttgctmctgacattttttttcaagctcattgattctttcctttgactgtatctaatcgatgaatccatcaaaggcattcttcacttttcttagttttttttgtttc

SEQ ID NO: 125993 - DNA, 201 bp, Homo sapiens
ggagtgcaatggcgtgatcatggctcactgaaacctctgcctcctgggtccatgcaattctcctgcctcagcctcccatgtagctgggattacaggcgtgygccaccacacccagctaatttttgtatatttagtagagatggggtttcaccatgttggccaggctgatctccaacttctaacctcaggtgatctgcctgc

SEQ ID NO: 125994 - DNA, 201 bp, Homo sapiens
ttttttgttttttttgagatggagtctcactctgttgctcaggatggagtgcagtggtgcgatctcagcccactgcaacctccgcctcctgggttcaagckattctcctgcttcagcctccggagtagctgggattacaggcacacaccaccacacctggctaatttttgtatttttagtagagatggggttgcaccatgt

SEQ ID NO: 125995 - DNA, 201 bp, Homo sapiens
atgcaatgcaaagtgaaagacgtttttggaatgtttctgaaccagcccaagctgattgcctcttttctgtttattgttttaagtcataagtgacgtaagcytctaggcatttgttatgctatgtggctggctcccaaagtcatgtcttaaaacattctttccttcctgattattcttctctttcttgtttttcttttcttc

SEQ ID NO: 125996 - DNA, 201 bp, Homo sapiens
cgcctcccgggttcacgccattctcctgcctcagcctcccaagtagctgggacttcagtcgcccgccaccacgcccggctaattttttgtatttttagtasagatgaggtttcagcgtgttagtcaggatggtctcgatctcctgacctcgtgatctgcccgcctcggcctcccaaagtgctgggattacaggcgtgagcc

SEQ ID NO: 125997 - DNA, 201 bp, Homo sapiens
gccattctcctgcctcagcctcccaagtagctgggacttcagtcgcccgccaccacgcccggctaattttttgtatttttagtacagatgaggtttcagcrtgttagtcaggatggtctcgatctcctgacctcgtgatctgcccgcctcggcctcccaaagtgctgggattacaggcgtgagccactgcgcccggccgag

SEQ ID NO: 125998 - DNA, 201 bp, Homo sapiens
cttcttgtgggtccagatcgtcactcactgactgtcctcacattcacagctgttctcaggacaagcaccgtctttccctttttcggatgtccctgtttacmtgaatcaactcatttaatcctcacaacagccctgtgctatgatatgaccatcatatcacagcattttctttttctttttcttttttttttttgagacagg

SEQ ID NO: 125999 - DNA, 201 bp, Homo sapiens
cgaggtgggaagatggcttgggcccaggtgatcgaggctttagtgagctgtgattactccaccgtactccagcatgggcaacacggtgaaaccttgtctcaaaaaaaaaaaaaacaaaaaaaatcagataaataaaaacaaaaaattgtttagactcatgaatcatcaactttttctttttctttgcccattttctttttt

SEQ ID NO: 126000 - DNA, 201 bp, Homo sapiens
cctgaggccgcatctctctggagagatcgtggacgtccgtcgtaaactatgacctattcacattttcactttactctcaactttccaggagtgagtcctcyccagagagcaagacggagctgcgtttcaacagacggtgctttcaatctgtgctgactgtaacttttatccatcataggtttgaagacatacctgatatcg

SEQ ID NO: 126001 - DNA, 201 bp, Homo sapiens
ggttgctcacccctaagccctctcgtattagggtcttcatcccatttgagaaggtggagcactcatgacttcttccttacctcctaaagaccccactgcctttttttttttttttgagacagaatcgtactctgtcgcccaagctggagtgcaggggtgcaatcacggctcactgcagcctggacctcctgggctcaggcg

SEQ ID NO: 126002 - DNA, 201 bp, Homo sapiens; identical to SEQ ID NO: 21447

SEQ ID NO: 126003 - DNA, 201 bp, Homo sapiens
aacaaggtcagaaactacactttctgttcacttgaaagatgctgccgtgatgagtgtctttccgtttagggcggtggcactcgctcttgagtctgaaggtstcagtggacggggctgtgggtgtaaccccctgcttgccaccttggcatttttagggcccaggtgttgtgagctctgtccttggagactgtgggacggtgg

SEQ ID NO: 126004 - DNA, 201 bp, Homo sapiens
ccttggcatttttagggcccaggtgttgtgagctctgtccttggagactgtgggacggtggagctgggcggcagtacgttaaattaaatatgttggcccasaggacaatgagaacgttttgtaagctgtactttgtatgctgtattactcgaatttcaaaaatgaagagggtgtaattattaaatatgtttggaaattgcc

SEQ ID NO: 126005 - DNA, 201 bp, Homo sapiens
cgggcactagatggagccccacagaaaggggacgtgcgtgggcctctgccaaggtgagtgggcatgggcagtgtcgcccctgaaattcctacacctggccrggtacagtggctcaggcctgtaatcccagcactttgggaggccgaggcaggcagatcacgaggtcgagatagagaccatcctagccaacttggtgaaatc

SEQ ID NO: 126006 - DNA, 201 bp, Homo sapiens
ttgtagatcaggggtctcagacacagagccaaaaaaaaaaaatgctagagtgagtttgtgtttttttttttttaaacctcaaatagtgtaaatttggtaarttaacttttcttgacatttgtgtacattgtatatttataaaagttttagtactgtagggagtagggaagatagaaggcttagcttagctgctgatttttt

SEQ ID NO: 126007 - DNA, 201 bp, Homo sapiens
gttctggagttacaggcatgagccaccatgcccagcttggaagtcattaagtgaaggaagccagacacaaaagacatattgcatgttcttatatgtgggasctaaaaggtttgatcacatggaggtagagagtggcaagaagggtaacagaggctgggaagggtgagtggcggggaggagaagggtcaagagaagtcggtt

SEQ ID NO: 126008 - DNA, 201 bp, Homo sapiens
ctgagttgggacggagctcgtgtatctacagtgtgctcacacagacttggtgccggtagatggtgaggggataggttggcaggtgggtagggggcctcccraggcagtagggacctggaggaggctggtagaaagtggagattggccaaagtgacctgaattagattctacctggttcatgaatttgcctgaggctaaggc

SEQ ID NO: 126009 - DNA, 201 bp, Homo sapiens
ttctacctggttcatgaatttgcctgaggctaaggcttcagcgcaagggatggtggagtaatacctttcctgaaacacctgctgccggcgtggccttgtckgtctctgccagatcttgttagcactgtggcttcaggcctagttaaacattcaagcccaatgcggttggagagcacccatggcacgcccattgtgcagcag

SEQ ID NO: 126010 - DNA, 201 bp, Homo sapiens
ttgaggccaggggttggaggctgcagtgagccgagattgcaccacggcactccagcctaggcaacagaaccagacgcttctctttaaacaaaaacctaaayaattgtagatttttttaaaatgaggctttttgttttttttatgccaaaacccttcatagacatgaaataacagaagagtaagattggcgggggtgggggg

SEQ ID NO: 126011 - DNA, 201 bp, Homo sapiens
aggcttgtcccccatgacctaattacctcccaaggctttgccccccaatgccatccccttgggaattaggatttcagcgtctgacttttgagggggcacaracattcgaatcgtagcaaaccccacgccccttagcagccactcccccttcctgcccctggtcccgcctggcagccaggaatctgccttctccctccaagg

SEQ ID NO: 126012 - DNA, 201 bp, Homo sapiens
aatttcagaacatttttatcatcccaaagagaaaccctgttgaaataccacaaaccaggtggcttttaaacaacagaaatgtatttctcagggttctggasgctgggaagtccgagatcaaggtcccggaagattcagtgtccagtgaggacccgttcctgcttcacagatggtgccttctcccagggcgaagggacgagg

SEQ ID NO: 126013 - DNA, 201 bp, Homo sapiens
aaaccctgtaaagtcactgatgttgccataatctgtcagactcagaaactgaggcacaaagaggttaagtaattgcttaagccttcacaggaattgggatstgaacccaggcattttggtgtcgagtccatgaactgacgaagaacatagataactgttgtcagcttgtcaaggctcatgcctgtaatcccagcactttgg

SEQ ID NO: 126014 - DNA, 201 bp, Homo sapiens
gcagccacttcccagctcccaagccctagcacctggcagccgctgtgctgcactttgcatctgcaggatttaccgagtctgggcgtttcttatacttggartcgtaggatacgtggctttgtgtgtctggattctctcgctcagcatgtttccaaggttcattcatgttgtggcatggagtagtacctcctttttgttatg

SEQ ID NO: 126015 - DNA, 201 bp, Homo sapiens
gaatgggatataatacagtacacacatatgtatgtgcatatgtgtatgtgtgtgtatctatatttgtcctcttttttctttgctgagccattgaaccgttaactgactaaattgcagacattgtggccctgcacccttaaattcttcagcatgtatctcctatgaacaaggacattctcctgtacagacaaaacaaattat

SEQ ID NO: 126016 - DNA, 201 bp, Homo sapiens
tggtggtgagcagggggcatgagggctaaatgcaacacgggacctagaggagacccgaacagcaaagggacggtggggaaactggggacatcagaataaarccagcagcttagttaacggtatcgcgccagcatgagttgctttggttttgataactgtacggtgagtatgtacggaggatatatgcagagtccttgaact

SEQ ID NO: 126017 - DNA, 201 bp, Homo sapiens
atcctttagagcttttatggtgttcatccaggatccaatcagggatgatcttttcctaaaagaggacactcaagatctagatctagaacagttccgcacatttttttttctttactgctattggcatttttgaagagtttggtttcctgtttcttaaaataaattttgcattgaagtgtaatatgcatgcataaaatgcat

SEQ ID NO: 126018 - DNA, 201 bp, Homo sapiens
gtgtgtatatatatatatatatatatatatatatatatatgtaactccacatgtgagtaccctgttatgtgtgaaaccacaccccaaacatctacacagarcaagcctccaggtagaggaaaggcagtaaccgctttgctggaatgactgagtggttcattaaatagaggctccggagggtcttgataggctctagcaaag

SEQ ID NO: 126019 - DNA, 201 bp, Homo sapiens
tcggcctcccacagtgctgggattacaggcgtgagccaccacgtccagttgatctgatggttttataaagaggagttcccctgcacacactctctctcttycctgccgtcatggaagacgtgacttgctcctccttgccctctgccatgattgtgaggcctccctagccatggggaactgcaagccagttaaacctttcct

SEQ ID NO: 126020 - DNA, 201 bp, Homo sapiens
tcagtagccacatgtgcctggaggccacagaactggacggctacaggatgtacccatcatcacgggaagttcatagaaagttctttttctttttctttttytttttttgagatggagtcttgctgtgttgcccaggctggagtgcagtggcgcgatctcagctcactgcagccttcacccactgggttcaagtgattctta

SEQ ID NO: 126021 - DNA, 201 bp, Homo sapiens
gaaatacatagtccatagtatttcagccaccagtgctgctgaagtgaaattagagatagcagagatatctcaggagaaaatggaggtttttgggtttctcygttagatgactcgagcaagtctgcatgtgctctgtaaacaagaaaacacagtctgggaaactgtcagcctctgccccagccagtgtgcaaaatactcttc

SEQ ID NO: 126022 - DNA, 201 bp, Homo sapiens
tgcatgtgctctgtaaacaagaaaacacagtctgggaaactgtcagcctctgccccagccagtgtgcaaaatactcttcaaaagagagaaaactagaaaayaagttgaaaaccgggtgatctgacaagtgtggaaattcacagcaagcatgtgcctgtgctgcagatacgatctgggagagagccagcagcctggatccac

SEQ ID NO: 126023 - DNA, 201 bp, Homo sapiens
gcatcagccgggcgcggtggctcacgcctgtaattccagcactttgggaggccgaggcgggtggatcacttgaggtcaggagttcaagaccagcctggccmacatggtgaaaccccaactgtactaaaaacacaaaaattagccgggcatggtggcaggtgcctgtaatcccagctactcaggaggctgtggaagagaatt

SEQ ID NO: 126024 - DNA, 201 bp, Homo sapiens; identical to SEQ ID NO: 21460

SEQ ID NO: 126025 - DNA, 201 bp, Homo sapiens
cctgccctgtgcctggcccagagcagcagtgctccgcacgtgttgcctgtttctccatctgaactgcgctcctggccgcccatggcctcccagtcattctsctccactcctgctccacacaggtcataaagaactcccccgtgaagacgtttgctagtcccaccttcagctccctcctggatgtgtttctgtcgaccacag

SEQ ID NO: 126026 - DNA, 201 bp, Homo sapiens
tgggaggccgaggcgggtggatcacttgaggtcaggagttcaagaccagcctggccaacatggtgaaaccccaactgtactaaaaacacaaaaattagccrggcatggtggcaggtgcctgtaatcccagctactcaggaggctgtggaagagaattgcttgaacccgggaggcagaggttgcagtgagccgagatcatgc

SEQ ID NO: 126027 - DNA, 201 bp, Homo sapiens
cgtagctagcggggctgttctgagcttggaagcgccgagcagtaacctctccctttcccgtgtctttgctctccagttccgagaggaacccgtgcaatagytcggtgccgcgtgacctccggcggcccgccagcctcatcggccaggaggtggttctcgtcttctttctcctgctcttgttggtctggttcctgaatcgcg

SEQ ID NO: 126028 - DNA, 201 bp, Homo sapiens
gccttggactccccagtgttaaatggggtagtagagggagacagccctccgagagccttcctgccctgtgcctggcccagagcagcagtgctccgcacgtrttgcctgtttctccatctgaactgcgctcctggccgcccatggcctcccagtcattctgctccactcctgctccacacaggtcataaagaactcccccgt

SEQ ID NO: 126029 - DNA, 201 bp, Homo sapiens; identical to SEQ ID NO: 21462

SEQ ID NO: 126030 - DNA, 201 bp, Homo sapiens
caagctggtcttgaactcccgacctcaagtgatccgcccacctcggcctctcaaagtcctgggattataggcgtgagtcaccgcgccggccagcatttccrttatctagacaagggaactgaggtcaagcattggagtgaaagtcacctaggtggctttttttcttttttaacctatttatttctttcaacccttagccca

SEQ ID NO: 126031 - DNA, 201 bp, Homo sapiens; identical to SEQ ID NO: 21469

SEQ ID NO: 126032 - DNA, 201 bp, Homo sapiens
actgtcaggatgaatgtggttttaatatgtggaagagatttatttctttaatagtcacctgttaagagtcttagatatcactgatgtgtcttgttaagaarccttataacaaacgtatttcttaaacttacatctggagctctgcaaagcattagctgttctgcaggaatgacagagggtctcctgtgcggccagctcctc

SEQ ID NO: 126033 - DNA, 201 bp, Homo sapiens
tgtatgtgcatatgtgtatgtgtgtgtatctatatttgtcctcttttttctttgctgagccattgaaccgttaactgactaaattgcagacattgtggccstgcacccttaaattcttcagcatgtatctcctatgaacaaggacattctcctgtacagacaaaacaaattatcctactcaagaaatataacattgacaga

SEQ ID NO: 126034 - DNA, 201 bp, Homo sapiens
ttggcctcaatccctttttcttgctgcttggaacccacatcaccaccagtgacctcacaaggcagtgcccctccgcacccctcccttctccaagactcccycgccgccccctttcttgctcttacccacacgccactgcagacacagcgccctcctcccctgctgcccccctcttgctcttacccacacgcccctgcagac

SEQ ID NO: 126035 - DNA, 201 bp, Homo sapiens
gtgggaggtggaggtgggcagatcacaaggtcaagagatcgagaccatcctggccaacatggtgaaaccccgtctctactaaaaatacaattagctggtcrtggtggcaggcgcctttaatcccagctacttgggaggctgaggcaggagaatcgcttgaacctgggaggcagaggttgcagtgagctgaggttgcaccac

SEQ ID NO: 126036 - DNA, 201 bp, Homo sapiens
accgtagggcccagccatgccactcctgggtttgtgcctaagaggtgaaaaacacacatccacacaaaaacttataggaatgttcatagcaacattatccmcaattgccaaaaagtggaaacagcccaaatgcctgtctgctgatgaacacataaacaaaacaagtaacacatcaacaaaacgtagcacctctgtaggata

SEQ ID NO: 126037 - DNA, 201 bp, Homo sapiens
tctgcttagaaggacaaagtcttttaaaatgaaatacgtggtgctggacctcacgtacaacagagccccgctgtctggagagtcctgaagccgccagctasaggtgaacatgcacgatgaacatgacagcccagatgcagacggcacgcgtgtgcgggtttggtggtctaagcgccacgagccaggttcagcctgtggtgt

SEQ ID NO: 126038 - DNA, 201 bp, Homo sapiens
agcaaatgaatgacagcgatagcacctggtgggctgttcgctggtgtgctgggtgtgctgggtgtgctgggtgtcgtctctcagagactcatttctacagyctttgtgaaggctcgtgctagtaaaccctaattcaagaggtttcttagaggtgggaggcgaaggtctctgaagtgtgtggactcctggactctccctatg

SEQ ID NO: 126039 - DNA, 201 bp, Homo sapiens
tggaaggaaacccccccacctgccttggaaggggcccccacacctgccctggtaaaggaaccccccccacctgccatggaaggggtcccccacctgccctrgaaaggaacccctccccacctgccctggaaaggaaccccgacacctgccctggaagggaaccccccacacctgccctggaagggaatcccccacacctgc

SEQ ID NO: 126040 - DNA, 201 bp, Homo sapiens
ctgcatcctaaattttgatctgctgtgtttttcttttcatccagtttgaagtatttttaaacttcccttgtgatttcttctttgacctttgaatcctttakatatgttttctaatttctaagtagttggggagtccacaaatttatttctgttcttgatttttaaaaatttcattttggtagagaacatgctttatatgat

SEQ ID NO: 126041 - DNA, 201 bp, Homo sapiens
caggtccagatctggacatttgacaaaatgcctggccgggacttcaaacgcagcagggccagaagagacagagaaagacagaggaacccccataggctggkggtgagcagggggcatgagggctaaatgcaacacgggacctagaggagacccgaacagcaaagggacggtggggaaactggggacatcagaataaagcca

SEQ ID NO: 126042 - DNA, 201 bp, Homo sapiens
tatcaggaagaggtgcgttcatttctccttgcgcttttactaaagaatgtgtttgttgttctcacatggtcattcactgttagttttgtgctttaccaagrgatgggaacacgaaggcgaacattgatttcccacactctgtaaaccctaagtggcaactgtacatgaaatgtctctttgcaaaggaggaaaaaaaccctt

SEQ ID NO: 126043 - DNA, 201 bp, Homo sapiens
ggctccgagtagaccacaggtgcgtcttgggaaagctgggccctcgggaccagcctggctccctgagggggctcgcagcggctctgtattcctgagcaggmaggtggccctgtgtggtccccgtcctgggcaccacaagccccttgggtggtcctgtcaccctcaacaggatggctgccggcctagcagagtcccactagc

SEQ ID NO: 126044 - DNA, 201 bp, Homo sapiens
gggcagaaatgaatggctttgagtctggcgtgaggcgccggaatgctggcttctcccatctggggtgggcaggctgggattcctgccccctccttcccacstgcactgtacccaggaccctttcagcttcctccgaggccgccatgggccatgctgtctgtggcgtgtgctcagtgtttcccagaactccctgtgggctca

SEQ ID NO: 126045 - DNA, 201 bp, Homo sapiens
agtgctccgcacgtgttgcctgtttctccatctgaactgcgctcctggccgcccatggcctcccagtcattctgctccactcctgctccacacaggtcatraagaactcccccgtgaagacgtttgctagtcccaccttcagctccctcctggatgtgtttctgtcgaccacagtgtttctgacgctgtccaccacctgct

SEQ ID NO: 126046 - DNA, 201 bp, Homo sapiens
aatttccaaaataatatctggcctcccataatttatttcaatgttttacacttcttgctgcaaggaaattgcttttgagtccaaaaaaaaaaaaaaatatwtttcttgccacggtttgtcttcttcattggaagctgttagttgctttcttagatggttcctaggttacctggtcacattaataataataataagtttatt

SEQ ID NO: 126047 - DNA, 201 bp, Homo sapiens
atgacctgttctagtaacccccctgcctggtgtcagccacccccgcccctggcctggtttgctattgccgggctgacctcgccccgtctttcagttctccrtgtggagggtgctgatccgtccgtctccatctgcttgtgaagcaataacagaacagcataggctgggtaatctatacagcacggaaatttctgtcctcat

SEQ ID NO: 126048 - DNA, 201 bp, Homo sapiens
gtgtttttttgttttcggaaacggtataattctgcagtggtgtgatcatagttcactgcggcttcaaactcctgggctcaagcaatcctcccacctcagaycccaagtacctgggactacaggcacaaaccactatgcccagctaattattttattttttggtagacggggtctcgctatgttgcccaggctggagtgcag

SEQ ID NO: 126049 - DNA, 201 bp, Homo sapiens
gcccaggaatttaggctgcatgagctatgattttgccactgcactccagcttaggccacagagtgagaccttgtcctgtctccaaaaaaagggaggagggygctcagtggtaaagtaaattcgggaagcttgggatattcaacacagaaagggtttctttactgcaggacttctcggagccttcactaggctagtagacag

SEQ ID NO: 126050 - DNA, 201 bp, Homo sapiens
tgcaccattgcactctagcctgggcactagaatgagaccccatctcaaaaaagaaaggtggggggcggggtaggaataggaacttcacagtggacaaaccrggcagatgccaccttcaccaaatgatccaggtgagcctccctgctcactgccatccggtaccctagtgtggtgtgctgagaagggcatgtcacctctgcg

SEQ ID NO: 126051 - DNA, 201 bp, Homo sapiens
acctttcttgttaatttctacaaaaagcttgctgggtcttgttgaatctgttgatcaatttgggaagaaatgccatcttaacaatactgagtccttcaatscaagaacctggtatctccttacatttatttagatattatttaatgtatcaacaaagttttgtaattttaacttactaattttgatgctattacaaatgga

SEQ ID NO: 126052 - DNA, 201 bp, Homo sapiens
aaagactttgcatgccacgttagagtctctgctctgttctgttagcaggagtttgtagtagtacctattcacagactggtgcgggttaactgtgagggtartgcgtgtaaggtgcttagaacagtgtttgacacataatccgtattctctaaatcttagttgtaggagatgttgttgctattatttttataaaagggcaag

SEQ ID NO: 126053 - DNA, 201 bp, Homo sapiens
tttttgtaagcaaacaaaaaccacgttgctggccaaatgtagtggctcatgcctgtgatcccagcactttgggaggtccaggtgggaggattgcttgagtycaggagtttgagaccagcctgggcaacatggtgagaccctgtctctataaacaaataaattaaaaaaattagctgggcatagtggtacccacctggagtc

SEQ ID NO: 126054 - DNA, 201 bp, Homo sapiens
agtagcagaacacctaaaatggcaaggaaacggcatgagggcgtgtaacacagaaaggggtgggtgtttgagaaacagcaccgcaagtacgtggggaagcrgcaaagatggaggacatgggagatgggggtggaaaggggcttggggcctggtagtgaaagactttgcatgccacgttagagtctctgctctgttctgtta

SEQ ID NO: 126055 - DNA, 201 bp, Homo sapiens
ggatgagctgttagctctctagggacaagaacacggtctgggacccccgtccctgctgcaggtgtgacctgaccccctccctctgccgacgtgacctatcyccctccctcccgtctgtggcatctggtgcatttggtgctgtcatttcacaaataaaaggtgatcagctggtggtctgtttcagttctggtatctttcccc

SEQ ID NO: 126056 - DNA, 201 bp, Homo sapiens
attatgacactgctttttctctaatgtgcctgcccgtgtggctccctgtgagccagctgatagggttgtctcccaaggcagtgaggtgcttccatgcctgsagcttcctggagtcagaaatactcttcccagggagggcttctcagcaggggtggagatgcctgcagctgtgcagggggagacgctgtttagccggctggg

SEQ ID NO: 126057 - DNA, 201 bp, Homo sapiens
acacctgcaatcccagcactttgggaggccaagatgggcggatcacttgagtctaggagttcgagaccagcctggccaacacagtgagacccccatctcaraaaagaaagaaagaaatagttggacatagtggcggacgtttgtagtcccagctactcaggaggctgaggctataggaggtgggggctgtagggagccatg

SEQ ID NO: 126058 - DNA, 201 bp, Homo sapiens
tgttgttgaggtttaaaatcaatggataaccaggaaagaatataagaaatcatattaattattctcctgtttacactacacttaaatcatttagctgtcttttttttttttttttggaccttctgctgcaaaagagccattctaatgaacttggaccccagggtccatgtgtgtggttattcattaaatcatgtcgcctgc

SEQ ID NO: 126059 - DNA, 201 bp, Homo sapiens
gttgttgaggtttaaaatcaatggataaccaggaaagaatataagaaatcatattaattattctcctgtttacactacacttaaatcatttagctgtcttttttttttttttttggaccttctgctgcaaaagagccattctaatgaacttggaccccagggtccatgtgtgtggttattcattaaatcatgtcgcctgca

SEQ ID NO: 126060 - DNA, 201 bp, Homo sapiens
ccttcaagaagggtccctgcgaccgggtgcagtggctcacacctgtcatctttgggaggccaaggtgggcagatcactaggagttctaggccagtctggcygacatggagaaaccctgtctctactaaaaatacaaaaattagccaggcgtggtggtggacacctgcctgctcacaggctgagtcaggagaattgcttgaa

SEQ ID NO: 126061 - DNA, 201 bp, Homo sapiens
tggatctagatgccatatatcaataaaaacagcttttccaacatcttcatgaagaaaaagaaaacccaactgggctcagtggctcatgcctgtaatcccarcactttgggaggccgaggcagagagatcacctgcggtcaggagttcaaggccagcctggccaacatggtgaaaccccatctctactaaaaatacaaaaat

SEQ ID NO: 126062 - DNA, 201 bp, Homo sapiens
agctgttgtaaaactaaagggtagtctccgccaggtgaggtggtcacacctgtaatcccagcactttgggaggccaaggcagatggatcacctgaggtcargagttcgagaccagcctggccaacatggtgaaaccccatgtctactaaaaatttaaaaattagccgggtgtggtggctggtgcctgtagtcccagctact

SEQ ID NO: 126063 - DNA, 201 bp, Homo sapiens
aatatgtttggaaattgccaagtcattgaatacctattttgtgaatttatgagtagttttatttttaagtttgtagatcaggggtctcagacacagagccaaaaaaaaaaaatgctagagtgagtttgtgtttttttttttttaaacctcaaatagtgtaaatttggtaagttaacttttcttgacatttgtgtacattgt

SEQ ID NO: 126064 - DNA, 201 bp, Homo sapiens
agaatctcttgaacctggaggcggaggttgcagtgagctgagatcatgtcactgccctctagcctgggcaacagagtgagattccatctcaaaaaaaaaawaaataaaaaaaaaaaccatctctacaaaaactataaaagttagccaggcatgttggtatccacctgtagtcccagctacctgggaggctgaggtgggagg

SEQ ID NO: 126065 - DNA, 201 bp, Homo sapiens
aagagaaggttgtagtgagccgaggctgcgccactgcacaccagcctgggcgacagagcaactctgtcttaaaaaacaacaacaacaaaaacaaaaaaaaccccaatactgggtgtattagcctttccctcttacccccttttctgatcccagggttaaaaagcagccagtagcggccctgcaggaatgggcatccataga

SEQ ID NO: 126066 - DNA, 201 bp, Homo sapiens
tttgataactgtacggtgagtatgtacggaggatatatgcagagtccttgaactgtctttcccactctctgcaagtctaaaattatttcaaagtaagaaattatatatgtgtgtgtgtgtgtgtgtgtgtgtgtgtgtgtgtgtgtgtgtgtgtagagagagggatggaaatgtatgtgcggaatcattgaactggcattg

SEQ ID NO: 126067 - DNA, 201 bp, Homo sapiens
cacagttcactgcagcctcgacctcctgcactcagatgatccttccatgtcagcctcttcagtagctaggacacaggcgcatgccaccacatccaactaattttttttttttttttttttgagacggagtctcactcttgcccaggctggagagcagtggtgtgatcttaacttactgcaacctctgcctcctgggtgcaa

SEQ ID NO: 126068 - DNA, 201 bp, Homo sapiens
gtagtagtttctttttctttttctgagatggggtcctactctgtcacccaggctggagtgcagtggtgctaccatagctcactccagccttgacctcctgkgctcaagtgatccttctgccttggcctaccaagtagctgggactacaggcatgcaccaccacaccccgctgattttttattttgagtggtagtttcttaa

SEQ ID NO: 126069 - DNA, 201 bp, Homo sapiens
tgataactgtacggtgagtatgtacggaggatatatgcagagtccttgaactgtctttcccactctctgcaagtctaaaattatttcaaagtaagaaattatatatgtgtgtgtgtgtgtgtgtgtgtgtgtgtgtgtgtgtgtgtgtgtgtagagagagggatggaaatgtatgtgcggaatcattgaactggcattgcc

SEQ ID NO: 126070 - DNA, 201 bp, Homo sapiens
atcctaggatcctgggagccgtgtgtgtttagatgcttttatttgcttggttctttccctttctataccatttacagactgagtttgtttttttcttttctttttttttttttttttgagacaagagtctcactcctttgcccaggttggagtgcagtggcataatctcggctcactgtagcttccacctgtatcagacca

SEQ ID NO: 126071 - DNA, 201 bp, Homo sapiens; identical to SEQ ID NO: 21448

SEQ ID NO: 126072 - DNA, 201 bp, Homo sapiens
cggtgagtatgtacggaggatatatgcagagtccttgaactgtctttcccactctctgcaagtctaaaattatttcaaagtaagaaattatatatgtgtgkgtgtgtgtgtgtgtgtgtgtgtgtgtgtgtgtgtgtgtgtagagagagggatggaaatgtatgtgcggaatcattgaactggcattgccagagagtgaaa

SEQ ID NO: 126073 - DNA, 201 bp, Homo sapiens
tcctaggatcctgggagccgtgtgtgtttagatgcttttatttgcttggttctttccctttctataccatttacagactgagtttgtttttttcttttctttttttttttttttttgagacaagagtctcactcctttgcccaggttggagtgcagtggcataatctcggctcactgtagcttccacctgtatcagaccat

SEQ ID NO: 126074 - DNA, 201 bp, Homo sapiens
ctatatatatacttatttcatttaattattatttttttaagacagggtctttctcttttgccccaggctggagtgcagtggcaccatcaaagctcactgcrgccttgacctcccagactcaagcagccctcccacctcagccccacaagtagctgggactacaggcacatgccaccaggccaggctaatttttatgctttt

SEQ ID NO: 126075 - DNA, 201 bp, Homo sapiens
gtagactcccaccccacgcctgctctcacgcccatcccaggggcaacacgggagagagcagagggcggcgctggctgcggcctcgcacctgtctcctggcygatgacccaccccgggccccgtcgctcctgctaacccccatgcctctcgcaggatggtgttcttcctggaggacgtcatggcctgcaccaagcgcctgct

SEQ ID NO: 126076 - DNA, 201 bp, Homo sapiens
gtctgtgaatgtaggtaaatcgtgataaaaaaacaataaaaaggccgggcgtggtggttcacgtctgtaatcccagcactttgggaagctgaggcgggtgkatcacttgaggtcaggagtttgagaccagcctggccaacatggtgaaaccctgtctgtactggaaatacaaaaattagccgggtgtcgtggcgcacacct

SEQ ID NO: 126077 - DNA, 201 bp, Homo sapiens; identical to SEQ ID NO: 21450

SEQ ID NO: 126078 - DNA, 201 bp, Homo sapiens
agaactcctccatccacttgaggcctcagagcccctaatcccatcacggttgctaagcctcagcaggatagagaggatgcgggatggtaaacaaagacgtmaactcagctttaccaagggaactgcccccagcattgggagacacagatgtgaagaaagaggtgggagcaggtggctttatgtggatgtacaaccacgtct

SEQ ID NO: 126079 - DNA, 201 bp, Homo sapiens
ccgggcgtggtggttcacgtctgtaatcccagcactttgggaagctgaggcgggtggatcacttgaggtcaggagtttgagaccagcctggccaacatggkgaaaccctgtctgtactggaaatacaaaaattagccgggtgtcgtggcgcacacctgtaatcccagctactcgggaaactgaggcaggagaattgtttca

SEQ ID NO: 126080 - DNA, 201 bp, Homo sapiens
ttgggaagctgaggcgggtggatcacttgaggtcaggagtttgagaccagcctggccaacatggtgaaaccctgtctgtactggaaatacaaaaattagcygggtgtcgtggcgcacacctgtaatcccagctactcgggaaactgaggcaggagaattgtttcaacctgggaggcagaggttgcagtgagctgagatcac

SEQ ID NO: 126081 - DNA, 201 bp, Homo sapiens
tattaggggctgttcaggtctcccgcctctgcccagcacgtgcctaaattccagacttccagcaggaaagcgggtattcagcgtaaacctccttatttagrcagtgtaggcagtgtgagccgctcttatcaaggaatggcaggaaccctccccaaatcccagctccctggtgccagccaccacctttgcaggcaggtcttt

SEQ ID NO: 126082 - DNA, 201 bp, Homo sapiens
aaccccaccgctgctgaccccctctcccccgacctgaccacctccctaggggcagattttaaatggcactgaaatataccaaagtgtcaaccgaagccacrtttggctggttaggactgcaagtgatgtttgctttctatttttttcagtttttcaatccctcttctccatgataacggattacactgtattttactctaa

SEQ ID NO: 126083 - DNA, 201 bp, Homo sapiens
acggggtgtctttggttattagcaaagcaacagtccagccatgggcagtgtgagcatccgtcctcagtttacttaagaaaagaatcacaatacaaaagacmtttaaattccctgcaaattaagatcaaaaagggaatttaaaataggactgtcattcagtacttgaaaggaaactttaatgaatagattaagcaaaataaa

SEQ ID NO: 126084 - DNA, 201 bp, Homo sapiens
caaagaagcgtctgtcccacctttcctaaccatgcgagaagcatacctggcacacagaattgacttgtgcccgggtcggctgctgctgatcaggaagggamctgtgctaaactccgtggagagggaaccagcacggccgtgggagatgatccttctggtgcaagtgagcatgagcttccgggcgggctgatggtgtttgac

SEQ ID NO: 126085 - DNA, 201 bp, Homo sapiens
ggtctcattttcagatccctgcagtctcagggaccagcatgaaggccccctccaacctcacatctttcccgctgctgactgggaacttggttccctctgtyccccctcctagggcctctgtattctgcatatttgtggttattcttggaagtattccaaagtcttcattatcctttaaatatcaggaagccagggctgtcc

SEQ ID NO: 126086 - DNA, 201 bp, Homo sapiens
tgcagctaaatatataatgtgtctatgagaatgtgctgggtcataatcagttgctctgtgaccctggcagggttttttttgtgtttttttgttttcggaarcggtataattctgcagtggtgtgatcatagttcactgcggcttcaaactcctgggctcaagcaatcctcccacctcagaccccaagtacctgggactaca

SEQ ID NO: 126087 - DNA, 201 bp, Homo sapiens
tgtatgtgcgcatgcatggtgtgtgtgcgtgtgcgtccatgcgtgggtgtgcatgtgtgtgcgtgcgtgcatgcgtgggtgtgcatatatgtgtgcatgcmtgcatgggtgtgcatgggtgtgcatatatgtgtgcgtgcatgcgtgggtgtgcctgcatgtgtgtgtgcgtgcttgcatgggtgtgcctgtgtgcatgca

SEQ ID NO: 126088 - DNA, 201 bp, Homo sapiens
gtggcgtctgttccacaggcgcttttagacgcagctgttgtaatatacctaatgagcagcgttttggtagctaattatgatctgaaaacattggcacagtyatggtgctgggtattgatcgactgcatttgttgtgtcttctagcctgatgaaagattacttttttaagccgcccattaatcagttcagcctgaacttcct

SEQ ID NO: 126089 - DNA, 201 bp, Homo sapiens
gtagagacaaaaaaaaagttgaatgataaaatcttttattacttaataatatactttgattgagatttagccatttcattttcactagtgtccagacgttytcctgaaaggcgtgattccatgagatttaatactgaattataatttgatgtaaatgttttatataatcagttgtttgtttttaaacagtagcctcttttc

SEQ ID NO: 126090 - DNA, 201 bp, Homo sapiens
gctgggcgggattcctctaaaggccaataagggtttaaaatgcgtggattcgagtgccgggaggggatttgtggtactggaagctggactcagtttatgakagaatatagacgggcagagacaagagggggtcttcacggcgagaaaggctgggtgaagagagaggttgggagttagggccggtggcaggaaggctttcag

SEQ ID NO: 126091 - DNA, 201 bp, Homo sapiens
ccattatatgagttttcctagttggcaaaaattcattatatgagttatcctagttggcaaaaaaggcacttaagtgaggaaaggagatgcaaaatcatccwtgactgtaaaggggtgcaggtgggatatgagcttgtctgggtatgagaatatcatgttctatgcattttttatttcctaaactgcttaaattataaatca

SEQ ID NO: 126092 - DNA, 201 bp, Homo sapiens
tgtactaatattttttttgctttgttttttttttgcaacagatatgattttattattagaaaaaccagatttaaaaaaagccattatatgagttttcctasttggcaaaaattcattatatgagttatcctagttggcaaaaaaggcacttaagtgaggaaaggagatgcaaaatcatccttgactgtaaaggggtgcagg

SEQ ID NO: 126093 - DNA, 201 bp, Homo sapiens
gattctatttttatctcttctatcgatttatttcttatatattttttctcacttattttaagtgattgcccgaaatttacaaagtacattttttatcagtmtgcctccaaatattataccatttattatataagaacctcgtaagaattcttcataactgtaagttactacaaggttctatgagaaccttgtaaatgttta

SEQ ID NO: 126094 - DNA, 201 bp, Homo sapiens
tgtcttgagacagcttcagaacaggcaacctgggtgtggccgccttgtcaaccagagataataaaaacacaggtaaacctctgcacctccatcgtcactcygaattataacaacagcacatatttgttgaagtcttactatgcactaggcacagtgctgagtgcccatgatgcagaggggaatttgagagtgtcagtcatt

SEQ ID NO: 126095 - DNA, 201 bp, Homo sapiens
aacttggaccccagggtccatgtgtgtggttattcattaaatcatgtcgcctgcagagtctcctgacttaagactttcgctgggcttgaactcagtaacctgtcctgatgtatttctcaggcgtttgtgattaggcagctgggctctgccttacctgtcagggtgataacccttctggttctgacaaaaggtttcacttta

SEQ ID NO: 126096 - DNA, 201 bp, Homo sapiens
taattattctcctgtttacactacacttaaatcatttagctgtcttttttttttttttttggaccttctgctgcaaaagagccattctaatgaacttggamcccagggtccatgtgtgtggttattcattaaatcatgtcgcctgcagagtctcctgacttaagactttcgctgggcttgaactcagtaacctgtcctgat

SEQ ID NO: 126097 - DNA, 201 bp, Homo sapiens
tgcctttggagcactgttttgaaagagccagcgcccactgtcagctgtccagctggtagcactgtcatctggaagattttagatactttctcatgagtgawtctacaccagcctgaatctcacactacctgacatcctctcaatcgtagccacacccaagggtcctactttgctgtccccactgccaccagaccaaacaca

SEQ ID NO: 126098 - DNA, 201 bp, Homo sapiens
atcccagcactttggaaggccaaggtgggaggatggcttgaagttacgagtttaagaccagccttggcaaccagcaagaccctgtctcttcaaaaaaaaawttttttaattagctaggtgtggtggtacatgcgtgtaatcccagctacttaggaggctgggcaggaggatcgtttgagcccaggagtttaaggctgcagt

SEQ ID NO: 126099 - DNA, 201 bp, Homo sapiens; identical to SEQ ID NO: 21455

SEQ ID NO: 126100 - DNA, 201 bp, Homo sapiens
agtggggcatttattaactcggaatacagaagataagaagccaagccaggcacggtcgctcacgcctgtaatcccagcactttgggaggctgaggtgggcrgatcatgaggtcaggagatcgagaccatcctggctaacacggtgaaaccccatctctactaaaaatacaaaaaaaattagccaggcatagtggtgggtgc

SEQ ID NO: 126101 - DNA, 201 bp, Homo sapiens
catgcctaggtgggagcgccgctaactctccccgttttgctggcaggtactggtgaccccggccggggcaggccccgggactcgacaacatggcttccccrccccaccagcagctgctgcatcaccacagcaccgaggtgagctgcgactccagcggggacagcaacagcgtgcgcgtcaagatcaaccccaagcagctgt

SEQ ID NO: 126102 - DNA, 201 bp, Homo sapiens; identical to SEQ ID NO: 21456

SEQ ID NO: 126103 - DNA, 201 bp, Homo sapiens
ttgtgtttttagtagagatggggtttcaccatgttggccaggctggtctcaaactcatgacctcaagtgatcctcccacctcggcctcccaaattgctggrattacaagcatgagccaccatgcctggttgtatttagtctttaacctgtcctcaggctgtttctctctgggcagggagaagcatggaaagggggatgggc

SEQ ID NO: 126104 - DNA, 201 bp, Homo sapiens
atttccattatctagacaagggaactgaggtcaagcattggagtgaaagtcacctaggtggctttttttcttttttaacctatttatttctttcaaccctyagcccagatcctaaccttcggtaagtactcagtaaacatttagtctgctgggtgcatgaacgagcgaatgagcaaatgaatgacagcgatagcacctggt

SEQ ID NO: 126105 - DNA, 201 bp, Homo sapiens
caggtacgactggggctgtctgggaaaaagcaaaggttgcaggcagaagcctctctgcctttttcttttcttttctttaagactgagtctcgctctgtcayccaggctgcagtgcagtggcgcgatcttggctcactgcagcctctatctcccaggttcaaacgatgctcctgcctcagcctcccaagtagctggggttac

SEQ ID NO: 126106 - DNA, 201 bp, Homo sapiens; identical to SEQ ID NO: 21459

SEQ ID NO: 126107 - DNA, 201 bp, Homo sapiens
atgttggccaggctggtctccatactcctgacctcgggtgatccacctaccccaccctcccagagtgctgggattataggcgtgagccaccacgcctggctttttttttttttttttttttaataaagactaggtcttgctgtgttgcccaggctggagtgcagtggctcaatctcggctcactgcaacctccacctccca

SEQ ID NO: 126108 - DNA, 201 bp, Homo sapiens
gccaccacagctggctaatttttgtagttttagtagagacagggttttgccatgttggccaagctggtcttgaactcccgacctcaagtgatccgcccacytcggcctctcaaagtcctgggattataggcgtgagtcaccgcgccggccagcatttccattatctagacaagggaactgaggtcaagcattggagtgaaa

SEQ ID NO: 126109 - DNA, 201 bp, Homo sapiens
atactcctgacctcgggtgatccacctaccccaccctcccagagtgctgggattataggcgtgagccaccacgcctggctttttttttttttttttttttwataaagactaggtcttgctgtgttgcccaggctggagtgcagtggctcaatctcggctcactgcaacctccacctcccaggttcaagtaattctcctgcc

SEQ ID NO: 126110 - DNA, 201 bp, Homo sapiens
atcccagcactttggaaggccgaggcgggcggatcacctgaggtcgggagtttgagaccaacctggccaacatggtgaaaccccatctctactaaaaatayaaaaattagccgggcttggtggcgtgcacctgtagtcccagctactcgggaaattgagacaggagaatcacttgaacccgggaggcagaggttgctgaga

SEQ ID NO: 126111 - DNA, 201 bp, Homo sapiens
taatatttagtctaaagttagtagcattctgcatttttaacatccttgctttttgacatatgacgcacctccattgcctttccattgcacaaggatgcttmtcatttgaattattagttattttctcttcctgggacctgtggtgccttttgggatttctagaagctggtgataaatgacagtaaaggtggctttccttgg

SEQ ID NO: 126112 - DNA, 201 bp, Homo sapiens
tgcttgaacctgggaggcggagattgcagtgagccaagatcgctgcgccattgcactccagcctgggcgacagagtgagaccttgcctcaaaaaaaaaaamccccaaaaaaccaaggttctgatgatgtgtgttataatcatggtggatggtcattctttaacgaaggtgaaacacaaaatatgattatgctttgaggtgc

SEQ ID NO: 126113 - DNA, 201 bp, Homo sapiens
tttcaacagtgcctcctggagctatgggccagccactctcttttccagcttgcatcatatgtatttgacttaattttgtttataatctgtttccacgccastggaatgcatcttaagagcaggaattttccatgttttacttcctgctgtgttcctagcgctgggaatatagccaggcatataatatatgtgtgataatat

SEQ ID NO: 126114 - DNA, 201 bp, Homo sapiens
tgaacctgggaggcggagattgcagtgagccaagatcgctgcgccattgcactccagcctgggcgacagagtgagaccttgcctcaaaaaaaaaaaacccmaaaaaaccaaggttctgatgatgtgtgttataatcatggtggatggtcattctttaacgaaggtgaaacacaaaatatgattatgctttgaggtgcgaag

SEQ ID NO: 126115 - DNA, 201 bp, Homo sapiens
atgcctgtaatcccagcactttgggaggccaaggcaggcagatcagctgaggtcaggagttcaagaacagcctggccaacgtggagaaatgccatctctaytaaaaatacaaaaatcagctgggcatggtggtgggcacctgtaatcccagctactcgggaagctgaggcaggagaatctcttgaacccaggagatggagg

SEQ ID NO: 126116 - DNA, 201 bp, Homo sapiens
attgcagtgagccaagatcgctgcgccattgcactccagcctgggcgacagagtgagaccttgcctcaaaaaaaaaaaaccccaaaaaaccaaggttctgwtgatgtgtgttataatcatggtggatggtcattctttaacgaaggtgaaacacaaaatatgattatgctttgaggtgcgaaggactttccacagatctgt

SEQ ID NO: 126117 - DNA, 201 bp, Homo sapiens
aatctcttgaacccaggagatggaggttgctgagattgcgcccctgcactccagcctggatgacagagcaagactctgtcttaaaaaaaaaaaaaaaaaawatatatatatatatatatatatatgtacatatgtatttatacatatatatagtgtgtgtgtgtgtatatatatatatatatatatatatatatatatatg

SEQ ID NO: 126118 - DNA, 201 bp, Homo sapiens
cacctgccctggtaaaggaaccccccccacctgccatggaaggggtcccccacctgccctagaaaggaacccctccccacctgccctggaaaggaaccccsacacctgccctggaagggaaccccccacacctgccctggaagggaatcccccacacctgccctggaagggaatcccccacacctgccctggaagggaacc

SEQ ID NO: 126119 - DNA, 201 bp, Homo sapiens
aatacgtaagattgagttctagaagtataatttacacatggtttcctgaggatcacgtttcctgaataaagcagggtatcgttagaggaaccccatttgatttttttttttttttttttttttgagatagagtcttgctctgtcacccagggtagagtgcagtggcgtgatctcagctcactgcaaactccgcctcctggg

SEQ ID NO: 126120 - DNA, 201 bp, Homo sapiens
caagctcttctcaggttgccttgtggaatgccttctttgctctttatgataatatttttctgcattttaatttcagttctgtattaacttcgccccttgaygcagtacagaatttcaggtaagcttttaatattgcacttctgtctgaataaacgagagtgactgtattaccctgcccatttcgaagcttcctgaaaacaa

SEQ ID NO: 126121 - DNA, 201 bp, Homo sapiens
cccccccacctgccatggaaggggtcccccacctgccctagaaaggaacccctccccacctgccctggaaaggaaccccgacacctgccctggaagggaaycccccacacctgccctggaagggaatcccccacacctgccctggaagggaatcccccacacctgccctggaagggaaccccccacctgccctggaaggga

SEQ ID NO: 126122 - DNA, 201 bp, Homo sapiens
ggccgggtatagcaggggtggcggggtggccctgggcggctgtcctaacccttcgcctcttgcagttcccagtgttcacaggctcggccgcgctgattgcygtcgtgcactactgtaacttctgccagctcagctcctggatgaggtcctccctcgccaccgtcgtgggggccgggccgctgctcctgctctacgtctccc

SEQ ID NO: 126123 - DNA, 201 bp, Homo sapiens
catttgattttatgtttctgaaatagataaagcactttcataaaaatggactgtgccaaataagaggtaattttcttgatgactcagttatttttgcctcktatttggcttttactaatatagcaatttctctataaaaataggaatctttgcttttttaaaaaaactgagatcattctgtttttccagttcttacatttt

SEQ ID NO: 126124 - DNA, 201 bp, Homo sapiens
aaggggacgtgcgtgggcctctgccaaggtgagtgggcatgggcagtgtcgcccctgaaattcctacacctggccgggtacagtggctcaggcctgtaatsccagcactttgggaggccgaggcaggcagatcacgaggtcgagatagagaccatcctagccaacttggtgaaatcccatctctactaatcatacaaaaat

SEQ ID NO: 126125 - DNA, 201 bp, Homo sapiens
ttgggctgggtgcagtggctcacgcctgtaatcccaacactttgggaggctgaggcaggaggatcacttgaggtcaggagttcgagaccagcctggccaayagggtgaaaccccgtgtctactaaaaatagaaaaatcagctgcgcatcatggcgcgtgcttataatcccagctactcgggaggctgaggcaggagaatcg

SEQ ID NO: 126126 - DNA, 201 bp, Homo sapiens
tggtggctcatgcctgtaatcccagcactttgggaggccaaggcaggtggatcacctgaggctgggagttcgagaccagcctggacagcatggtgaaaccycatctctactaaaaaataccaaaaaaaaaaaaaatagccattcttggttgtgggcacgtgtaaccccagctactcgggaggctgaggcaggagaatcaac

SEQ ID NO: 126127 - DNA, 201 bp, Homo sapiens
caacatggtgaaaccccgtctctactaaaaatacaattagctggtcatggtggcaggcgcctttaatcccagctacttgggaggctgaggcaggagaatcrcttgaacctgggaggcagaggttgcagtgagctgaggttgcaccaccacactgcagcctgggtgatggagcgagactgcgtcacaaaataaaataaaata

SEQ ID NO: 126128 - DNA, 201 bp, Homo sapiens
ggaggctgaggcaggaggatcacttgaggtcaggagttcgagaccagcctggccaacagggtgaaaccccgtgtctactaaaaatagaaaaatcagctgcrcatcatggcgcgtgcttataatcccagctactcgggaggctgaggcaggagaatcgcttgaacctggaaggcagaggttgcagtgagccgaggtcatgcc

SEQ ID NO: 126129 - DNA, 201 bp, Homo sapiens
ttcaaagtgcagtaaaatgatggctgctgggtccgggtgacacaggtctgtggggccatgccacccagcgcggcctggagtctgcacctggctctcccccmacctcccatactcccacttcccggacaaacctgctgggaatggaataggcagtgagcactgtcccggccctcaggaggcccgagcgtgggtgtctacagc

SEQ ID NO: 126130 - DNA, 201 bp, Homo sapiens
gcacctgtggtcccagcccctcgggaggctgaggcgggaggatcacctgagcccaggaggtggaggttgcagtgagctgagattgcctgggtgacagagcaatctctgtctcaaaacaaaacaaaacaaaaacccaaatgccacgttttatatgattccatttctaggaactctagaactacaggcaaatccatacacaca

SEQ ID NO: 126131 - DNA, 201 bp, Homo sapiens
ccggaagctgccatgacgtctagactgaccgttaggaaggtactcactggactggtattcacagatggaaataaaccaaagcagtgtctagggtcaaccartctgctttgctgccttcacagggaggtcctgggaccctttcatggaggaactttttaatgcttattttaaccctgaaggtaaaacatgaaacatgcagcc

SEQ ID NO: 126132 - DNA, 201 bp, Homo sapiens
gcaaaaaaacaaaaaaaaagaagaagaaaggaagaaagaaacgaaagaaagggagaaagagagggagagagcgagagagacagaaacaaagagaaacaaaraaaagagaaagaaggaaggaaggaagagagagagagaaagaaagaaaataaatagtaacaggattgcttcaggactgtagtatccgagcaaatagtaaca

SEQ ID NO: 126133 - DNA, 201 bp, Homo sapiens
cacgcctgtaattccagcactttgggaggccgaggcgggtggatcacttgaggtcaggagttcaagaccagcctggccaacatggtgaaaccccaactgtrctaaaaacacaaaaattagccgggcatggtggcaggtgcctgtaatcccagctactcaggaggctgtggaagagaattgcttgaacccgggaggcagagg

SEQ ID NO: 126134 - DNA, 201 bp, Homo sapiens
aaagctcatgtgagaattgtgactctgcccattcgtggatctgcacaacatatggtgacgaatataagttcgggggcgtggggggaatgcgcatgtgctawggttcagtgctgggcactgggtgttgtggttcagtgctgggcactgtgtgccgtggttcagtgctgggcactgtgctgattgcttctgcgactccggaca

SEQ ID NO: 126135 - DNA, 201 bp, Homo sapiens
agcgcagtaaaaacccagaatggatgtcggcaataagggaatttctgggatatgatgggggaacgaatattgtcacctccatttgtgtcaggaagtctcastatgcagatgagtcagctgcagggggtggcctcccaggctgctggtggagcccagaagcagggggcaggcgtttggcctctgatactctcctagctctga

SEQ ID NO: 126136 - DNA, 201 bp, Homo sapiens
agtcaggtgatggacgccatgttcacagttttatcaccagcgtctagcgtggcctgcagcgggtgctcccatagaacccataaacaaacaacttcttgttycttattatgtgaagaaagttggtctgtgtaattcaccctccagagaaatgacagcactttcagtactttgttctgcccttccttgatctccacgctgttt

SEQ ID NO: 126137 - DNA, 201 bp, Homo sapiens
cctgaacttcctggatcaggagctggagcgatcctacaggaccagctatcaggaagaggtgcgttcatttctccttgcgcttttactaaagaatgtgtttrttgttctcacatggtcattcactgttagttttgtgctttaccaagggatgggaacacgaaggcgaacattgatttcccacactctgtaaaccctaagtgg

SEQ ID NO: 126138 - DNA, 201 bp, Homo sapiens
cttgtggattctccctgccactggttcctaccactgagtcaggtgatggacgccatgttcacagttttatcaccagcgtctagcgtggcctgcagcgggtrctcccatagaacccataaacaaacaacttcttgtttcttattatgtgaagaaagttggtctgtgtaattcaccctccagagaaatgacagcactttcagt

SEQ ID NO: 126139 - DNA, 201 bp, Homo sapiens
tttcatcatgctagccaggatggtctcgaactccttacctcaagtgatccgcctacctcggcctcccaaagtgctgggattacaggtgtgaatcactgcasctggccaggcagaaacctcttaatggctcccagggcctggcccacctccccagcctcctctcatgccacactttcttccctcagtctgcatcgggaacag

SEQ ID NO: 126140 - DNA, 201 bp, Homo sapiens
tggcctcctaaagtgctgtgattacaggcgtgacccatggtgcctggtctgggaatcctgtttgattttgaaagtctgagaaacacttttgaaatggcttsgagaaaatgtgaagtgaataattattatttttttaatgtgcttcagttcccatgtgaacattattttagagagagattggaaggttagttgccagtaaaa

SEQ ID NO: 126141 - DNA, 201 bp, Homo sapiens; identical to SEQ ID NO: 21505

SEQ ID NO: 126142 - DNA, 201 bp, Homo sapiens; identical to SEQ ID NO: 21472

SEQ ID NO: 126143 - DNA, 201 bp, Homo sapiens
ggattttcatgtcagcgctggtctagctccgttttgcaggattttttgttgttgttatcacagtatattctaaaaataactatatgttcatttccactctytcagataattaatatttataaatcctagtcactaggaaatatagttcaaccaacaattgaatggaatgcaggtcctctgggaacttatctaaaattaaat

SEQ ID NO: 126144 - DNA, 201 bp, Homo sapiens
ttattgaagtataattcacatatgatgcaattcaccctctcaagtgtatgatttggtggtttttagtgtattcatggtgttgtgcaaccatcaccacaacstaattttacattttcgtcaccccaaaaagtaaccctgcatccgttagcagttacaccctctctctcctaaacccatggcagccactcatctgctttctgt

SEQ ID NO: 126145 - DNA, 201 bp, Homo sapiens; identical to SEQ ID NO: 21473

SEQ ID NO: 126146 - DNA, 201 bp, Homo sapiens
tgctcttgtcagtttttggtaaccatttctggtattttcttttcaaatccccagcctcactttgtgctggttatcacaagatccacttagaccttagaggygagagcttgggaatatttcatctgcaagaaaaatcattcgtctgtctttgtgtgggacgagttaggttatgtaagctgatggaacacgaaacagaaaact

SEQ ID NO: 126147 - DNA, 201 bp, Homo sapiens; identical to SEQ ID NO: 21442

SEQ ID NO: 126148 - DNA, 201 bp, Homo sapiens
caagaccttgtctaaaaaaaaaattattgatgccatttggttctctttgaaactaattaatggctccttaatttgtcagtgcatcttctagcgatcacagwtgctgtttgggtgctcttgtcagtttttggtaaccatttctggtattttcttttcaaatccccagcctcactttgtgctggttatcacaagatccactta

SEQ ID NO: 126149 - DNA, 201 bp, Homo sapiens
aaattaaacatatgcatgtacttccctacacgtacacatatgtttgtacatacacacacgggcacacatgcgtttgtagttctttgtatccatctgtcccrctcgtatctatgtatccattcatctcatataaaaatcatgataccatccaagtcaaatggtttgtttcagctttctcccctttccttggctgtgcccctc

SEQ ID NO: 126150 - DNA, 201 bp, Homo sapiens; identical to SEQ ID NO: 21444

SEQ ID NO: 126151 - DNA, 201 bp, Homo sapiens; identical to SEQ ID NO: 21443

SEQ ID NO: 126152 - DNA, 201 bp, Homo sapiens
catacacacatcccttttttccggaataatttgagaatagactgcagagagtgcctctagattctcctgtgtgggtttcctaaaaacaaggacgctgtccyggatagcctgcaccgacctgcccaaatcaggacgtgggcactgtcacaccatgccaccaaatgcagaggccccggagcccgcccaggaccacaggcgccg

SEQ ID NO: 126153 - DNA, 201 bp, Homo sapiens; identical to SEQ ID NO: 21445

SEQ ID NO: 126154 - DNA, 201 bp, Homo sapiens
cggactcctttgaaagtctcatttgtgtaaaaggaaaagcagtagttcatgaggagggggagaagggctcaaggacagcaaggtaaactacccctggggcrggggaacgtggtcgtcggtgggcccagctttggaggctaggcccgtgaaggtcgccccgtgagcaggtccagggcaggccgagtgccccggggcccgcat

SEQ ID NO: 126155 - DNA, 201 bp, Homo sapiens
acaaagcaacgagaaaacgaagcaagggaagcacagatttactgaaatgaaagtacactccacggagtgggagcaggctcgagcaggagcaagtggctgaytagagaattttctggagccttaataccctgtagaggtttcccattggttacttggttacaccctatgtaagtgaaggagtggcctgtgaccagtctgatt

SEQ ID NO: 126156 - DNA, 201 bp, Homo sapiens
tgccgtcatggaagacgtgacttgctcctccttgccctctgccatgattgtgaggcctccctagccatggggaactgcaagccagttaaacctttccttcrtaattacccagtctcggataattataaagtctttatgaacagtgtgaaaacagactaatacaccctttatgggtgttaccagtggagggtcttgactaca

SEQ ID NO: 126157 - DNA, 201 bp, Homo sapiens
tttctgcattttaatttcagttctgtattaacttcgccccttgacgcagtacagaatttcaggtaagcttttaatattgcacttctgtctgaataaacgasagtgactgtattaccctgcccatttcgaagcttcctgaaaacaatgggatcttgaataaaaggaacaatacgtgcattcttagaatagaaagtggaaaat

SEQ ID NO: 126158 - DNA, 201 bp, Homo sapiens
tgcagacggcacgcgtgtgcgggtttggtggtctaagcgccacgagccaggttcagcctgtggtgtgattttctgaaacactgatgatgatgccccaaacrgcagagaccactgtcactcagtttccacaggagctgcgctccaagaaaatccagggtgtgtcagcaccaccacagagcaccctgtttgtagctgggacac

SEQ ID NO: 126159 - DNA, 201 bp, Homo sapiens
tgtaaaacagcctcagtactttttcatgaagtagacaagtttcacagtgctttggaaatgactactaagctactcccagcctgctcattgagaactcacgrtttcctctggatgagtgggaatgttgttggttctgcatttgtcatcagtgcttaggacacacacacacaagcaacgtgtgctggcccatgcagtttttcc

SEQ ID NO: 126160 - DNA, 201 bp, Homo sapiens
gctactcatgaggctgaggtaggagaatcacttgaacccggaaggcagaggttgcagtgagctgagattgcaccactgcactccagcctgggcgacagagygagactcagtcaaaaaaaaaaggaaacatggattagtggcgaatgttttggcggccgggtatagcaggggtggcggggtggccctgggcggctgtcctaa

SEQ ID NO: 126161 - DNA, 201 bp, Homo sapiens
actcccagcctcaagcaatcctcctgcctcggcctcccaaagtgctacaattgcaggtgggagccaccatgcccagctgcgtagtttttcttgaataaacrtttttcaattttttgtatgtctttggttgatttccaaccctgtggtggttgtttttgaccgacttgtctagttttgttgttactttttgaggagaggttt

SEQ ID NO: 126162 - DNA, 201 bp, Homo sapiens
caggcatgggggcgtgcacctgtaatcgcagctacttgggaggctgaggtaggagaaccgcttgtacccgggaggcggaggttgcagtgagctgagattgygccattgcactccagcctgggtgacaagagtgagattccatctcaaaaacaaaaaataataaataggtcaaaacagttccccatatgatgtcatgagacg

SEQ ID NO: 126163 - DNA, 201 bp, Homo sapiens
taaaagtacaaaagagaatgccttaaaagtacacacacacacacacacacacacatacacacacatacatatttttttgagacagagtctcactctgttgycgaggctggagtgcagtagcgcaatcttaactcactgcaacctttgcctcccgggttcaagcaattcttgtgcctcaccctcctgagtggctgggattac

SEQ ID NO: 126164 - DNA, 201 bp, Homo sapiens
tgctgtgatgttgaacatgtgggtgtcaggatgaaaggaagaaatctagatttgatgtggtgggaggtaaaagcactctcgaaggctttcgagctgggctrtgactgtcaggatgaatgtggttttaatatgtggaagagatttatttctttaatagtcacctgttaagagtcttagatatcactgatgtgtcttgttaag

SEQ ID NO: 126165 - DNA, 201 bp, Homo sapiens
tctgaaggtatggccatctagaacgatggtcacgatgagctctttctcgagagtatgaaatccagcaaactgctttttaccttttaaatccatcacaggtccctcatcgggcattcaccgtggcctttagtcatggctgcggggcttttctacctggagctggagagccacagtgatgggggacccctctgccgcctttgt

SEQ ID NO: 126166 - DNA, 201 bp, Homo sapiens
taaaccctttggccaggcatggtggctcacgcctgtaatcccagcactgtgggaggtggaggtgggcagatcacaaggtcaagagatcgagaccatcctgsccaacatggtgaaaccccgtctctactaaaaatacaattagctggtcatggtggcaggcgcctttaatcccagctacttgggaggctgaggcaggagaat

SEQ ID NO: 126167 - DNA, 201 bp, Homo sapiens
cggggccatgtgccacatcctccttagttactggaaaggggagggaagccccattggggtgaacttaccctgctccagctacttactgcgggtgggctgtrtgtgcgcatgcatggtgtgtgtgcgtgtgcgtccatgcgtgggtgtgcatgtgtgtgcgtgcgtgcatgcgtgggtgtgcatatatgtgtgcatgcatgc

SEQ ID NO: 126168 - DNA, 201 bp, Homo sapiens
ccagccaacatggtgaaaccccgtttctaccaaaaaaaaaatacaaaaattagctgggcctggtggcgcacactactcaggaggctgggccgcaagaatcrttgagcccaggaggtggaggttgcagtgagctgagatcacaccactgcatgccagcccgggctagagagtgagactctgtctcaaaaaagaaaaaagaaa

SEQ ID NO: 126169 - DNA, 201 bp, Homo sapiens
agggttgattaattcagaggtgtgatgacatttccaggaccccaggtgcttttcatctttgctctctgctgtctttgccacgtgggagatgtcttcccttrtggcacaaagtggctgcagccattccgaatgacacagtgatatctagtaaagaagaggggcttttccaatcctgcatgtcttattttactagcatggaaa

SEQ ID NO: 126170 - DNA, 201 bp, Homo sapiens; identical to SEQ ID NO: 21451

SEQ ID NO: 126171 - DNA, 201 bp, Homo sapiens
tgtcagcaacttactttcaaaaagttcattcagcaaaaagccgggtgcagtggctcacacctgtaatcccagcactttaaggcaagctgatcactttgagrtcaggagtttgagaccagcctggccaacatgatgaaaccctgtctctactaaaaatacaaaaattagccaggcatggtggcacacacctatagtcccagc

SEQ ID NO: 126172 - DNA, 201 bp, Homo sapiens
tgaggcaggaggatcacttgaactcaggaagcagagggtgcagtgagccaagatcgcaccactgcactctagcctgggcaacagagcaagactcaatcttaaaaaaaaaaaaaaaaaaagatgttaggccaagcacagttcaagcctgtaatcccagcactttggaaggccaaggtgggaggatggcttgaagttacgagt

SEQ ID NO: 126173 - DNA, 201 bp, Homo sapiens
gagcaccgctgagccgggaaccacaggaacagatggtgcctgtccaggtcgcgtgctggagccgccccttaggacaggagcaggtcccgggcctctaggcrtgcatgcctaggtgggagcgccgctaactctccccgttttgctggcaggtactggtgaccccggccggggcaggccccgggactcgacaacatggcttcc

SEQ ID NO: 126174 - DNA, 201 bp, Homo sapiens; identical to SEQ ID NO: 21452

SEQ ID NO: 126175 - DNA, 201 bp, Homo sapiens
aagtgagggaggtagactcccaccccacgcctgctctcacgcccatcccaggggcaacacgggagagagcagagggcggcgctggctgcggcctcgcacckgtctcctggccgatgacccaccccgggccccgtcgctcctgctaacccccatgcctctcgcaggatggtgttcttcctggaggacgtcatggcctgcacc

SEQ ID NO: 126176 - DNA, 201 bp, Homo sapiens
ttcttcacaaaagattgtttcaaagaacagaaaagctgccttcatcttctcctaatcctagacattaggaatgtgttttcaaaaacaagcctcagcagctyacgctgtcatcccagcactttgggaggccgagatgggtggatctcttgagcccaggagttcgagaccagcctgaccaacatggtgaaaccccgcgtctgc

SEQ ID NO: 126177 - DNA, 201 bp, Homo sapiens
gatacagtctcccatttccaccacagagactggaaacaccccctgcacataatggggatgttagaccttggtgacacctgctcctaaaggggactgttctyggtgtcaccactttgagaaaccaaaagaaaggtcaactcctaacccaacgagcggggctcacaaaaccttcccccagtccatattctcttcctgctctat

SEQ ID NO: 126178 - DNA, 201 bp, Homo sapiens
tcaatccctttttcttgctgcttggaacccacatcaccaccagtgacctcacaaggcagtgcccctccgcacccctcccttctccaagactcccccgccgycccctttcttgctcttacccacacgccactgcagacacagcgccctcctcccctgctgcccccctcttgctcttacccacacgcccctgcagacacagca

SEQ ID NO: 126179 - DNA, 201 bp, Homo sapiens
tttgaaatttatggaaaagtaaatctttttgaattatatgtaaatgaaaacgttgggatgaaccaggttatgtttaactgggcagttttgaaattctaatwgctcctacaagcgggaatcttttaaagctaattttgtgatatgaattgtttattattctaaagaataatattcacttttttttcatggatctcatgtaaa

SEQ ID NO: 126180 - DNA, 201 bp, Homo sapiens
cacctttgttctgctggggaattgttcccaaaaggtatctttttttttttttgaaacggatcctcgctctgtcgcccacgctggagtgcagtggcaccatstcggctcactgcaagctctgccttctgggttcatgccgttctcctgcctcagcctcccaagtagctgggactacaggcgcccggcgccacgcctggctaa

SEQ ID NO: 126181 - DNA, 201 bp, Homo sapiens
ccactgcactagagcctgggcaacagagcaagactgtctcaaaaaaaaagtaaagaaaagaaaaattacctctgttaacttctttaaattcttaggtacargtggtaatttttttctttgttaaaattgatgttggtcattttgtgtttgagttttctgttgctatttcatggggattttcctgtgcatctacataatata

SEQ ID NO: 126182 - DNA, 201 bp, Homo sapiens
tcctctggagtcagggagccatggagccactgctggttctgaggatggtgacagcaggaggtggagatggcttcatgatctgctgtgagcaacgtgcaacyttctccctgctgttaagtgactagaattcccaggtgccgcctgctgattagttccagtttgtgttccacgagagcagatgtgtgtgaggtgcagggaatg

SEQ ID NO: 126183 - DNA, 201 bp, Homo sapiens; identical to SEQ ID NO: 21492

SEQ ID NO: 126184 - DNA, 201 bp, Homo sapiens
acaagaagtatggcagttccagggttgattaattcagaggtgtgatgacatttccaggaccccaggtgcttttcatctttgctctctgctgtctttgccaygtgggagatgtcttcccttgtggcacaaagtggctgcagccattccgaatgacacagtgatatctagtaaagaagaggggcttttccaatcctgcatgtc

SEQ ID NO: 126185 - DNA, 201 bp, Homo sapiens
cctaaaacaaacaaacaaaaaaacgcatttactatctcatgtaacaagaagtatggcagttccagggttgattaattcagaggtgtgatgacatttccagkaccccaggtgcttttcatctttgctctctgctgtctttgccacgtgggagatgtcttcccttgtggcacaaagtggctgcagccattccgaatgacacag

SEQ ID NO: 126186 - DNA, 201 bp, Homo sapiens
aacagccaagaaaggcagcctctaatttttgcaatcagccccagaactgatcatttgtggtttctctttcatctgaaatcttgttcacatggttgcttttccccactgtgggaatctatggctgtggccacctggaatagatcccgcgtactgggaaagtgaaactaaccggagaaagccaagaggaagcgattaagaaaa

SEQ ID NO: 126187 - DNA, 201 bp, Homo sapiens
tgactaacttacaaacacataagttaccacaaatgatttagggaggaggaaagaagtgcagacaggcaagctttcagatcgtttcaggaaaccaggaagcrgggagcacagtgttgcagccagcaagggaagacggaagctatgagtcctggctctgagggcctcccatccagttgggctgatggatgagacaggtacagt

SEQ ID NO: 126188 - DNA, 201 bp, Homo sapiens
ggttttgctgtgttggccaggctggtctcgaactcctggtctcaaccagtctgcctgcctcagcctcccaaagtgctgggatgacagacgtgagccaccgygcccggccttccttgttcttaaagaaggagatgttacagaacaaacgaatctccatacaaaacaaaacctcaccataaaagaggaaactccctgcttcat

SEQ ID NO: 126189 - DNA, 201 bp, Homo sapiens
agaaagattttaagtaatctgctacatttcttcccccacttcctcctttttaaacagtccttatgttttactaaaatcttcaggattgaggggaacatctrttgtggaagtatgtagagaaaataacactgattttttttaaaagcctgcttttgtgaagctgtattgtattttgtggtccccacacactgcatacttaaa

SEQ ID NO: 126190 - DNA, 201 bp, Homo sapiens
taaataggacacgttttccataagaccaaaagggcatttcttttgcttatgtactagaaatagaaaatggaaattagatattagattgtataatcgaaagwcaattagaattaatgaacaattctataactagttatactgtaagctaaaatgtgaatgttaaattagggaagtattgatttttatgaaaatttaccagaa

SEQ ID NO: 126191 - DNA, 201 bp, Homo sapiens
tccctcttaaaatccctgatgtggatcatttggttccctgtcatttccattttctttgttcagagtgtctcttctggatctcctgagtttctgtgtgtgtkttcttcctttttgctcaaatgatgagcacacatgaaagcttttcctcctttgcctgggtgaggcggtgttccaggtgtgatctgcagtgcctgattatta

SEQ ID NO: 126192 - DNA, 201 bp, Homo sapiens
aatgtgttttcaaaaacaagcctcagcagctcacgctgtcatcccagcactttgggaggccgagatgggtggatctcttgagcccaggagttcgagaccakcctgaccaacatggtgaaaccccgcgtctgctaaaaaatacaaaaattagctgggtgcggtggcaggcgcctgtaatcccagctactcaggaggctgagg

SEQ ID NO: 126193 - DNA, 201 bp, Homo sapiens
tgtacccgagcccttggcttggaaggtgggaggtgtgggctctcagaaggacggcagcccacgtggaaaccttccggcctcacatgtgggcaaggcagtgrtgtctcagggacatcacatgcatgcacccggccctgactcgaacccctgacgggcactagatggagccccacagaaaggggacgtgcgtgggcctctgcc

SEQ ID NO: 126194 - DNA, 201 bp, Homo sapiens
tgtgggcaaggcagtgatgtctcagggacatcacatgcatgcacccggccctgactcgaacccctgacgggcactagatggagccccacagaaaggggacktgcgtgggcctctgccaaggtgagtgggcatgggcagtgtcgcccctgaaattcctacacctggccgggtacagtggctcaggcctgtaatcccagcact

SEQ ID NO: 126195 - DNA, 201 bp, Homo sapiens
ggcagtgtcgcccctgaaattcctacacctggccgggtacagtggctcaggcctgtaatcccagcactttgggaggccgaggcaggcagatcacgaggtcragatagagaccatcctagccaacttggtgaaatcccatctctactaatcatacaaaaattagctgggcgtggtggcgggtgcctgtcctcccagctactc

SEQ ID NO: 126196 - DNA, 201 bp, Homo sapiens
gcccagaagcagggggcaggcgtttggcctctgatactctcctagctctgagttgggacggagctcgtgtatctacagtgtgctcacacagacttggtgcyggtagatggtgaggggataggttggcaggtgggtagggggcctcccaaggcagtagggacctggaggaggctggtagaaagtggagattggccaaagtga

SEQ ID NO: 126197 - DNA, 201 bp, Homo sapiens
ccagtgacctcacaaggcagtgcccctccgcacccctcccttctccaagactcccccgccgccccctttcttgctcttacccacacgccactgcagacacmgcgccctcctcccctgctgcccccctcttgctcttacccacacgcccctgcagacacagcaccctccccccacccaccgttacaccctctcttgctttta

SEQ ID NO: 126198 - DNA, 201 bp, Homo sapiens
acacgcatgggtggaaggaccacactggttgtccctggaagagtagctcactctcgagcctgcaccgatgtcatctgagtcaaaacacagacgtctgggcyccaccctagagagtctggctcagcgggtccagggtggggcaagaatgtgcattcctgcaagttcccaggtgatactgaggcggctgctggggggatacca

SEQ ID NO: 126199 - DNA, 201 bp, Homo sapiens
ttgcctaggctggtctcaaactcctgggctcaagccatcctcctgccttggcctcccgaagtgttgggattacaggcgtgagccaaggcacccagctgagwtggtttcttaacgtcctccaaaggtgatttttttcaagaatcaatataaactcttggattttagcttatttgatgtatttcattccattacagatacatg

SEQ ID NO: 126200 - DNA, 201 bp, Homo sapiens
gtgtttctttcttcctgcgctcaatctggcgcacatcttgtgtcgttcagtaccgaaacctagaacacactagggactgtgattgtgtcagtttctcgtamtaaaaagggcaagtgtccaaaatacaaaatactgatagctcgccctggttaaactctagctgccgaacttggcagcctctttactgaaaaccctcggggg

SEQ ID NO: 126201 - DNA, 201 bp, Homo sapiens
acctgtggtcccagcccctcgggaggctgaggcgggaggatcacctgagcccaggaggtggaggttgcagtgagctgagattgcctgggtgacagagcaawctctgtctcaaaacaaaacaaaacaaaaacccaaatgccacgttttatatgattccatttctaggaactctagaactacaggcaaatccatacacacaaa

SEQ ID NO: 126202 - DNA, 201 bp, Homo sapiens
gctgcaagatgggaagactgagggttttgtatgtgccacccaaacacgcattctcatgtgtgtgaaacaacgccaattggagttgtcacacccattacatrttgcctgtggaaatagcaagtgaccttagttcatacattgaccttttcttacaaaatccttaaaaatcttttgtgattctggtaaatctttgttgctcat

SEQ ID NO: 126203 - DNA, 201 bp, Homo sapiens
aaggacaagctgagggctagtgcagtttggtttccctgcatcgggacctgctcaggcactagcagtttcacccatggcttcttctgcactgtcactgcaartgtcaacactgaagaaggcaaatgctgtcttagtgtcattgtgcaaatagtttagactccacagatgccttgcaaaggcctcaaggacctctagggatct

SEQ ID NO: 126204 - DNA, 201 bp, Homo sapiens
acaaagagaaacaaagaaaagagaaagaaggaaggaaggaagagagagagagaaagaaagaaaataaatagtaacaggattgcttcaggactgtagtatcygagcaaatagtaacaggattgcttcaggactgtagtatccgagcaaatagtaacaggattgcttcaggactgtagtatctgagcaaaggatctgatttga

SEQ ID NO: 126205 - DNA, 201 bp, Homo sapiens
ggggtatcgctcggcacacatttgtatgagttcacctgaaaagtgcccttgttgggggagcttggaatggcctgtagggcagctgggtcacagtggctgcyggggatgcctgccaagctgttaagcagccctcgggcccacggagtcccagcaagtgtggtttactgtttgttaggatgtaattcaagcctgtgggtaggt

SEQ ID NO: 126206 - DNA, 201 bp, Homo sapiens
ataaaataaaataaacccttgaagaggcacgaactcttttactctcctgagccagcttttttagaagccgacttagcattggcctgcccagatgctcacgsccgggcagtggccgggctggggagtccccggtgggcacgagtccctgccagtgtggcttcttcttcatcaagttccaaatcagttattttccttcacatt

SEQ ID NO: 126207 - DNA, 201 bp, Homo sapiens
gcctccttttctttatagtaatttgaatgtggtgattttaatcctccatggttttcttatccttcctcaacaaacagcaaagaggctgctggaaagccacrtgacatttgctgtgatttgcacggctgatgggaaaacactacttggttctgaaggacagggttgtcattggatacctttgccctctgacccgagtgagaa

SEQ ID NO: 126208 - DNA, 201 bp, Homo sapiens
ggcgggcagatcacctgaggtcaggagttcgagaccagcctggccaacatagtgaaaccccgtctctactaaaaatacaaaacttagccaggtatggtggygggcgcctgtaatcccagctacttgggaagctgagacaggaaaatcgcctgaacccgggaggcggaggttgcagtgagccgagaccatgccgttgcacta

SEQ ID NO: 126209 - DNA, 201 bp, Homo sapiens
gggccgctgctcctgctctacgtctccctgtgcccagacaggtacgcggccagcactgcttgcgggcaccagggtgcgtggccaccttgcccgaggttgcrtagggcctggctgcatttgcacattgcttctcacgccccgatagagatatttcccatcatgacccaaaatagctgtcagcacacatcataccaaagagct

SEQ ID NO: 126210 - DNA, 201 bp, Homo sapiens
tctaagtagaaaaaaaatctgttcatccttaaaggcaaaggaaggggcaaggtccctccttgaacaactgggtgaggttggacgcctccagctgtatttgmtaagttgggcttggaagtatccatagggcgtggggggcctgctccagggctgacctcagctggagtcccctccaagtcaggggtatcgctcggcacacat

SEQ ID NO: 126211 - DNA, 201 bp, Homo sapiens
tgttttggcggccgggtatagcaggggtggcggggtggccctgggcggctgtcctaacccttcgcctcttgcagttcccagtgttcacaggctcggccgcrctgattgccgtcgtgcactactgtaacttctgccagctcagctcctggatgaggtcctccctcgccaccgtcgtgggggccgggccgctgctcctgctct

SEQ ID NO: 126212 - DNA, 201 bp, Homo sapiens
ctattcttgactcggatcgccatcaccagcctggttattgagcccagtggtcctttagggctaagggattgagtgagaggtccagggacttttcgactccsccccgtgtggctctgagattgtgtgtgtgagttttacacgtgtgtgttcatgtggtgacttgtctagtattctcaggccatctgctgtctgttcttactg

SEQ ID NO: 126213 - DNA, 201 bp, Homo sapiens
gaaagacagaggaacccccataggctggtggtgagcagggggcatgagggctaaatgcaacacgggacctagaggagacccgaacagcaaagggacggtgsggaaactggggacatcagaataaagccagcagcttagttaacggtatcgcgccagcatgagttgctttggttttgataactgtacggtgagtatgtacgg

SEQ ID NO: 126214 - DNA, 201 bp, Homo sapiens
ctgagattgcaccactgcactccagcctgggcgacagagtgagactcagtcaaaaaaaaaaggaaacatggattagtggcgaatgttttggcggccgggtrtagcaggggtggcggggtggccctgggcggctgtcctaacccttcgcctcttgcagttcccagtgttcacaggctcggccgcgctgattgccgtcgtgca

SEQ ID NO: 126215 - DNA, 201 bp, Homo sapiens
cactttcttccctcagtctgcatcgggaacagttgccacctttcagccacgtgagcatgctgggaccgtcctttccatgctgatccctgcatccctcgtgscttccccagacctacaccaccgcaattgcctccatctcactgtgatatctccacttcagtctcatttcttcagaaaggacgtccctgactctgtccaaac

SEQ ID NO: 126216 - DNA, 201 bp, Homo sapiens
gggaatgttgttggttctgcatttgtcatcagtgcttaggacacacacacacaagcaacgtgtgctggcccatgcagtttttccttatttacaaagctcaygtgagaattgtgactctgcccattcgtggatctgcacaacatatggtgacgaatataagttcgggggcgtggggggaatgcgcatgtgctatggttcagt

SEQ ID NO: 126217 - DNA, 201 bp, Homo sapiens
caattattgggtgtttgtgttccccagcccaccctcccccaaaaatgacagggaacagaaaccagtgaaaagatctctctttggcgcccttcccagactasgacctgttttgttcagggtgagcacagaggagaactgggtcctcttgtcaggctgaaggggacgtcacagaagccccaagtgggtcacggcagagcgtca

SEQ ID NO: 126218 - DNA, 201 bp, Homo sapiens
cctcaagaccttttccaacaggaactagcatccctggagggaattttgtgaagagatgagagtttttgaaacaggaagggaactggcaagggaagtggccrggcaccggtgctgccgcggaacagaagggaagggactgggctgcatcagagggtggatgtggggccgccatccgtggtgtgggccaagggtagggtggtc

SEQ ID NO: 126219 - DNA, 201 bp, Homo sapiens; identical to SEQ ID NO: 21453

SEQ ID NO: 126220 - DNA, 201 bp, Homo sapiens
tgtcttttcaggtagaatgcctaaggaagggaaacatggagaaggaacaattagagcaagtcaagaagtttcaagatttttgtcttctggccagcttggtkagatagtaattatgtttctgcatattggtcagcgttgcctatgtactttgctgtggaatagtaatcttggaaaaaaaccaaccaaccaacccacattaat

SEQ ID NO: 126221 - DNA, 201 bp, Homo sapiens
ttcaaatttatccgaacaggctttgcagaagggtagtttcatgatttctgcacattccttcactctgaaatctgtgtcgtgcccctggcactgactgtgcmcctggcactgtggatgtggagcaggatccgtgatcgtggagcaggatccgtgatcgtgaggtaggaggtgggactcgactccagaggcggggttcagatg

SEQ ID NO: 126222 - DNA, 201 bp, Homo sapiens
cagggagcctcacgccgggtagggaacctagaggcttgatctgtccttgacactgcccactagcaaaagtaagactgactgcagatagtgagcaattagcyggtatcggtgatatttttaggttacacagaaacatggattaggccgggagcggtggctcatacctgtaatcccaggcactttgagaggccgaggcaggtg

SEQ ID NO: 126223 - DNA, 201 bp, Homo sapiens
ttctcaaacagggaggcctccctttcctttccacgaagacacgtgccatttcccacacctgcagaagagtgtgatgccatgtgaacagggagcctcacgcygggtagggaacctagaggcttgatctgtccttgacactgcccactagcaaaagtaagactgactgcagatagtgagcaattagctggtatcggtgatatt

SEQ ID NO: 126224 - DNA, 201 bp, Homo sapiens
aggtgggcagatcacaaggtcaagagatcgagaccatcctggccaacatggtgaaaccccgtctctactaaaaatacaattagctggtcatggtggcaggygcctttaatcccagctacttgggaggctgaggcaggagaatcgcttgaacctgggaggcagaggttgcagtgagctgaggttgcaccaccacactgcagc

SEQ ID NO: 126225 - DNA, 201 bp, Homo sapiens
accatccttttgtgacagtgaattttgaaaatgaccctaaatgataacttcttttatctacttgttttctatgtgtcaagtcattatgagtaggctcagtyggcccaatttgaggaagtaaggggcttttcattcgttatagaaattgaaaaaatgatttcatattttatagacacatacatatataaatatatatagctt

SEQ ID NO: 126226 - DNA, 201 bp, Homo sapiens
ttccaggacgcctccaaagctgcccccgtcaagacctcctgcctcagaagctgatgggagccggtgacggcaacgtggtggcccccaggagactctcctcrgggcctgtgatactctcacgtgttctgttaggcgagcgaagcatgtgcttttcacaagcatattttatcacaacgcaacatgtgaccctagaatcaggta

SEQ ID NO: 126227 - DNA, 201 bp, Homo sapiens
ccctttaaggccactcacctcaggaaccatccttttgtgacagtgaattttgaaaatgaccctaaatgataacttcttttatctacttgttttctatgtgycaagtcattatgagtaggctcagtcggcccaatttgaggaagtaaggggcttttcattcgttatagaaattgaaaaaatgatttcatattttatagacac

SEQ ID NO: 126228 - DNA, 201 bp, Homo sapiens
cagtggtctcttggatgtgacgccaacagaagaaagaatagacaagcccaacttcctcagaagttaagctgttgcgctacaaagaacaccatcaagaaagmgaaagaacccacagaacgggagggaacacttgcagatcaggcctcggacaaggtctaacatctagaatggataaagagcacacatagcctgataataaaa

SEQ ID NO: 126229 - DNA, 201 bp, Homo sapiens
atctattattcagaaccccgggctgcttggccactgggtgtttctacatggaccagtcagtaatgaagctagtgatgtagatttacccatacggggatgaytcagagaggacctgtcctgctttcaaaaggtttctccttcccctttaaggccactcacctcaggaaccatccttttgtgacagtgaattttgaaaatgac

SEQ ID NO: 126230 - DNA, 201 bp, Homo sapiens
ggagatgggtccccgtgtcctccccgagccctgtgccccagcatcctccctccctgacgttggcccagatgcggggggaccacctcgctggagggggcggkgcctccacagccccaaccgctgccagcttgtccccagatttccaggttcagagactgcaaaggagaaggtgagaagataggaaacaatctggaggaagga

SEQ ID NO: 126231 - DNA, 201 bp, Homo sapiens
ccgttagctccctcttctggctccatggcttatggctgagcggttggactggtccccagccagctgtccctgctggctgatttctggagatgggtccccgygtcctccccgagccctgtgccccagcatcctccctccctgacgttggcccagatgcggggggaccacctcgctggagggggcggtgcctccacagcccca

SEQ ID NO: 126232 - DNA, 201 bp, Homo sapiens
gcagggttttttttgtgtttttttgttttcggaaacggtataattctgcagtggtgtgatcatagttcactgcggcttcaaactcctgggctcaagcaatmctcccacctcagaccccaagtacctgggactacaggcacaaaccactatgcccagctaattattttattttttggtagacggggtctcgctatgttgccc

SEQ ID NO: 126233 - DNA, 201 bp, Homo sapiens
gttgcaaggccaaatggaaagcagctgaactggctacatcccttcctctcccaaccacagcctctgcctttggatcctacaccttcctctaggttagggasacactcaggagtcaaccggtccatgccaagtcctggcctggctccttgttcgctgtgtgccctaggggtagcccctggccttggcctcccaatctgtaca

SEQ ID NO: 126234 - DNA, 201 bp, Homo sapiens
tgggtggagagctagttgataatctgatttcagagaccactttctcaaatacttctacgtctcttgaaatccactattttatgattacttgaaatgatgtyggtgtgggtgaatcctaggacacagctcactgagaggacaggctgccgagaacattgtagtatttcattattggaaccgggatctcctggtagctgccta

SEQ ID NO: 126235 - DNA, 201 bp, Homo sapiens
ttgagtccacataggttgcattttttaactctggcaaagtgaagttacaaagtcagtctggtgtcgcctgggacaggtccgagaaattagtataaagatgscttcactcctgcgtcgtattccagttcacgtttccatttcagtgtatacatgttacagtcgtgattgatcctgtgcataaattgggatgtgggtttttgt

SEQ ID NO: 126236 - DNA, 201 bp, Homo sapiens
ggttgcaaggccaaatggaaagcagctgaactggctacatcccttcctctcccaaccacagcctctgcctttggatcctacaccttcctctaggttagggrcacactcaggagtcaaccggtccatgccaagtcctggcctggctccttgttcgctgtgtgccctaggggtagcccctggccttggcctcccaatctgtac

SEQ ID NO: 126237 - DNA, 201 bp, Homo sapiens
agaatttggaaccaaaccctaacccccaggttgccctggcagggtccagcctggcatcagggctgactggcagccttgctcccaccgtccaagtgcccctsctgccctcccacctagttcctgggagtggtcgaggcacccggagctggtttgtcccaaagaacgcacaccgcacccagggctgccaggagacctttccgc

SEQ ID NO: 126238 - DNA, 201 bp, Homo sapiens
tcccatctcaaaaaaaaaaaaaaaaaaggaaaagaaaagaaaaatgaaaaaaaagaaattcccacaccttctgaggggattccagggctgggacctgactygcccttttgggcactacagagcctccagcttccttggagagaatttggaaccaaaccctaacccccaggttgccctggcagggtccagcctggcatcagg

SEQ ID NO: 126239 - DNA, 201 bp, Homo sapiens
atcccatcgcaggggaggagccctcctggcctcgtcacctcttaaagccctgcttccttaagactctcactccacaacgcctgaactttggaggggacacrttcgagccacagccccttccttcctgaggcttctcaagatgccccctcctgtgcttcctggagcacccgtccttccttgtcctgggacttggcacgcctg

SEQ ID NO: 126240 - DNA, 201 bp, Homo sapiens
tgtgttttattaccgagaaagagtcgtctgggagctctccgaggcaaataacttttgaagttggcatgagcaggatattgtgcaatggggctcactggctkcgtcccaggcctccgcatctgatgtgaaccacagctttgcaatcggtccccgtgccatccaaaaatattttgtgaccttgccggttggcagttttttaaa

SEQ ID NO: 126241 - DNA, 201 bp, Homo sapiens
gtctctactaaaaatacaaaacttagccaggtatggtggcgggcgcctgtaatcccagctacttgggaagctgagacaggaaaatcgcctgaacccgggakgcggaggttgcagtgagccgagaccatgccgttgcactattgcactccggcctgggcaagaagagtgaaactccgtctcaaaaaaagaaaaaaaacaaac

SEQ ID NO: 126242 - DNA, 201 bp, Homo sapiens
aagtttttatttccctcccattagaaaatgtttttaggccgggcacaatggctcatgcctgttattcccagcactttgggaagccgaggtaggtggatcayctgcagtcaggagttcaagaccagcctggccaacatggcaaaaccctgtctctactaaaaatacaaaaattagctggatatggtggtgagagcctgtcat

SEQ ID NO: 126243 - DNA, 201 bp, Homo sapiens
gtctccatctgcttgtgaagcaataacagaacagcataggctgggtaatctatacagcacggaaatttctgtcctcatgcttcaggaggctgggaagtccragatcaaggcaccagcaggttcaggtgtctggggagggctgcatcttctggaagggagaaggaaactggagggcaagcgagagagccccttacagcaagc

SEQ ID NO: 126244 - DNA, 201 bp, Homo sapiens
tagtatttcagccaccagtgctgctgaagtgaaattagagatagcagagatatctcaggagaaaatggaggtttttgggtttctccgttagatgactcgarcaagtctgcatgtgctctgtaaacaagaaaacacagtctgggaaactgtcagcctctgccccagccagtgtgcaaaatactcttcaaaagagagaaaact

SEQ ID NO: 126245 - DNA, 201 bp, Homo sapiens
ctgcctttttcttttcttttctttaagactgagtctcgctctgtcacccaggctgcagtgcagtggcgcgatcttggctcactgcagcctctatctcccargttcaaacgatgctcctgcctcagcctcccaagtagctggggttactggcacccaccaccatgcctggctaggttttgtatttttagtagagatggagtt

SEQ ID NO: 126246 - DNA, 201 bp, Homo sapiens
tgccagcctggcctgtgctcttcgccgcccaaacgcacctctccctggtgtggtcactgacagtctttgcgtggccagtggccaaacccaggctggctttsctagtggcctcatcttctctctgcagcgttcacagtgatccacttctttttttttttttttttggagacagagtcttgctctgttgccctggctggagtg

SEQ ID NO: 126247 - DNA, 201 bp, Homo sapiens
ttagtaggagccttgctctcaacagtgcctcctggaacgatgggccggccactctcttttccatcttgcatcatatgtatttgacttattttgtttataayctgtttccacgccactggaatgtatcttaagagcaggaattttccatgttttacttcctgctgtgttcctagtgctgggaatatagccaggcatataata

SEQ ID NO: 126248 - DNA, 201 bp, Homo sapiens
atggctcacgcctgtaatcccagcactttcggaggctgaggcgggcggatcacttgagctcaggagttcgagaccagcctgtccgacatggcaaaaccccstgtctactaaaaatacaaaaaattagccaggcgtggtggcatacgcctctaatttcagctacttgggaggctgaggcaggagaatcgctggaacctagaa

SEQ ID NO: 126249 - DNA, 201 bp, Homo sapiens
tgcagtggcataatctcggctcactgtagcttccacctgtatcagaccattctaacactgctataaagttgctacctgaggccaggtgcatggctcacgcytgtaatcccagcactttcggaggctgaggcgggcggatcacttgagctcaggagttcgagaccagcctgtccgacatggcaaaaccccgtgtctactaaa

SEQ ID NO: 126250 - DNA, 201 bp, Homo sapiens
taccattggcaaggcgaggactaggttctggagatagaggggtggcccctgccctcttggggcatgacgcctagaaagggaagtagacagtgatcaaatartctgtacaggccaggtgcagtggtcatgtctataatcccagcactttggaaggccaaggtaggaggatcgcttgagtccaggagctcgagaccagtctgg

SEQ ID NO: 126251 - DNA, 201 bp, Homo sapiens
tttgggcaagctacctaggggcgctgcaatttataggaatgatggtgtctctgtcagagggtcgttgggagaatcaactgggataatgcaagaaaagcacktatttgcatagtgactcgatggtggacagccattccatcaataactaacgctccccgctggctgagtcacatttcgtattgcactaaagggtgtttcttt

SEQ ID NO: 126252 - DNA, 201 bp, Homo sapiens
caaccatcaactttgtttctgtaaattttttttggaagggctcacccttgaatggttgggtgcttggattttgatttctgatacattcgggcttaattctsggttgtatggtttcctaactgtgggactttgggcaagctacctaggggcgctgcaatttataggaatgatggtgtctctgtcagagggtcgttgggagaa

SEQ ID NO: 126253 - DNA, 201 bp, Homo sapiens
cctgggaggcggaggctgcagtgagccgagatggcaccactgcattccagcctgggcgacagagcgagactctgcctcaaaaaacaaacacatggctgggygcagtgagtcacgcctgtaatcccagtactttgggaggccgaggcgggcggatcacctgaggtcgggagttcgagaccagcctgaccaacatggagaaac

SEQ ID NO: 126254 - DNA, 201 bp, Homo sapiens
tgtatttttagtagaaatggtgtttgaccatgttggccaggctggtgtcaaaatcttggcctcaagtgatctgcccgcctcagcctctcaaagtgctgggrttataggtgtgagccaccatgcccggcctaattttaaaaattatttgtagagatgacgtctccctatgtttcccaggcttatgtgcattatttatatagg

SEQ ID NO: 126255 - DNA, 201 bp, Homo sapiens
cgcttttttctttttaaagagaaaggatctctctatgttgcccaggctggacttgaactcctggactcaagcgatcctcctgccttggtcttcgaaagcastgggattacaggtgtgagccaccaggcccagccagttttaatttctgttaggtggaatgacattccaggtttctaaaaataacttctacttggttatttt

SEQ ID NO: 126256 - DNA, 201 bp, Homo sapiens
gaagccttgaccttctgggctcaaagtaatcctcccatctcagactcctgagtagctaggactacatgcatgcatcatcacacccagctcatttttatgtrtttttgtgtgtagatggggtcttatgttactcaggctggtctggaactcctggggtcaagtagtcctcctgcctcggcctcccaaagtgataggattaca

SEQ ID NO: 126257 - DNA, 201 bp, Homo sapiens; identical to SEQ ID NO: 21457

SEQ ID NO: 126258 - DNA, 201 bp, Homo sapiens
tttattttttgagacggagactctctctgttgccaagactggagtgcagtggtctgatcatggctcactgaagccttgaccttctgggctcaaagtaatcytcccatctcagactcctgagtagctaggactacatgcatgcatcatcacacccagctcatttttatgtatttttgtgtgtagatggggtcttatgttact

SEQ ID NO: 126259 - DNA, 201 bp, Homo sapiens
aatgtttatgatgctaatagtgtcataataatgtattttatatatattataaacctcataacatgttatttttacagaaaattaccttttagagcaatgcygtttgatgaaacttcctgcaatgatggaaatgttttatatctagactatacaatatggtagctactatccatgtgtgaccattgagtacctgaaaacaac

SEQ ID NO: 126260 - DNA, 201 bp, Homo sapiens
gcagtcagggctgggattggagcaggtctgtaggcgcaggggggtgggggttcctcgcaggtcagaaagtcccacgcccagtgcagcagcgccccgcagcrgaggtcggggtgggacaggcgtgtgtgcccagtgcccggtgccacttcacttcccgtgtctgcgtcctctttgtctcgaggcaggcttctggaggaccta

SEQ ID NO: 126261 - DNA, 201 bp, Homo sapiens
gtaacaggaaggagcagacgggcagtcagggctgggattggagcaggtctgtaggcgcaggggggtgggggttcctcgcaggtcagaaagtcccacgcccrgtgcagcagcgccccgcagcggaggtcggggtgggacaggcgtgtgtgcccagtgcccggtgccacttcacttcccgtgtctgcgtcctctttgtctcga

SEQ ID NO: 126262 - DNA, 201 bp, Homo sapiens
ggtaacaggaaggagcagacgggcagtcagggctgggattggagcaggtctgtaggcgcaggggggtgggggttcctcgcaggtcagaaagtcccacgccyagtgcagcagcgccccgcagcggaggtcggggtgggacaggcgtgtgtgcccagtgcccggtgccacttcacttcccgtgtctgcgtcctctttgtctcg

SEQ ID NO: 126263 - DNA, 201 bp, Homo sapiens
gctgttgttcctgtcagttcctctcctggcgcatccacccaaggtgacattcctgtcttgtcgacttcttagttctgagagtaactcctcttgggtaacascactccgcacccgcgggtcctccgggtgttgaagagaccggcagggagctcgagggagggtcagcagcaacccacgtggaaaccagcgctcaggggctga

SEQ ID NO: 126264 - DNA, 201 bp, Homo sapiens
aggcatgagccactgtgcccagccagatttttgtcatgattctatttttatctcttctatcgatttatttcttatatattttttctcacttattttaagtsattgcccgaaatttacaaagtacattttttatcagtatgcctccaaatattataccatttattatataagaacctcgtaagaattcttcataactgtaag

SEQ ID NO: 126265 - DNA, 201 bp, Homo sapiens
tgagtaatatcccattgttcgaatagaccacagtttgttgatccattgttcagtcagtgaacattcccggttccatttttgggtcctgttgcgttcgtgcscgggtttctgtgtgtttccactgtcactttgcccgttggctttcagctcatccccgagcggttctgtgtgccttccccttgctcaccaccatgctgcgtg

SEQ ID NO: 126266 - DNA, 201 bp, Homo sapiens
ttttttttttgagacagaatcgtactctgtcgcccaagctggagtgcaggggtgcaatcacggctcactgcagcctggacctcctgggctcaggcgatccycccacctcagcctcccttgtagctgagaccacaggcgtgtgccaccacgtctggctcattaaaaacaattttgtttttgtagagacggagtcttcgctgt

SEQ ID NO: 126267 - DNA, 201 bp, Homo sapiens
actggggtacaatggcatgatcgtagctcactgaagcctcgacctcctgggctcaagcgacccacccgcctctgtcgcccaagtagctgggaatataggcrtacaccaccatgcccggctaattgtttttttaatttaaattttgtttttttttttttgcggaggcagatcctcactatgttgcccagcgtggtcttgaac

SEQ ID NO: 126268 - DNA, 201 bp, Homo sapiens
tcttgttagcttttctaacagagatgtcacagattagcaactaggcataaacctgagaaattgggcactaattttgttttgcatttttgttttgtaagacrggggtcttgctgtgttgcacaggctgcagtacagtggctgttcacaggtgtgatggtagcgcactgcagcctcgaactcgtgggctcaagtgatcctccc

SEQ ID NO: 126269 - DNA, 201 bp, Homo sapiens
ttcttgccacggtttgtcttcttcattggaagctgttagttgctttcttagatggttcctaggttacctggtcacattaataataataataagtttattaygggtatactgtatgccaggaactgtgctaggctatatatatacttatttcatttaattattatttttttaagacagggtctttctcttttgccccaggct

SEQ ID NO: 126270 - DNA, 201 bp, Homo sapiens
ctttaaatttccaaaataatatctggcctcccataatttatttcaatgttttacacttcttgctgcaaggaaattgcttttgagtccaaaaaaaaaaaaawatatatttcttgccacggtttgtcttcttcattggaagctgttagttgctttcttagatggttcctaggttacctggtcacattaataataataataagt

SEQ ID NO: 126271 - DNA, 201 bp, Homo sapiens
ctgggggcaaaagaggcggggtggagagtccctccgcctgcctggagtgctgatgtggcctcagagctaggtcctgaaaaattgctgggatttagatgcasgctctacatgtagagagattgtttaaatgtataatggttcagaagtgacactctcttgctatgtttctctgaaaatagatcagccttctctgttgggatc

SEQ ID NO: 126272 - DNA, 201 bp, Homo sapiens
cccgtcttggcctctgaaagtgctgggattacaggcgtgaaccaccgtgcccagccgcgtttggctccttcctaactaaacagagattaaactgtttattsttacctgggctttcattttttcatagcagtcactttattttcatctctttgtcctcagcttcccctcaaatatttgtcaagtgtctaccaaggctgggaa

SEQ ID NO: 126273 - DNA, 201 bp, Homo sapiens
cgtggaaatacagcctctcagatagcaaatggcagagatgagatgaggcacacagttcccctccacagctggggtgggagacagaaaacagcagtagagtygacactcaagctgcccccagtgaccatttgttcaggctctttgagacctggcttacagtgacaaggacacagctgttaattctgaagacaagctttcgag

SEQ ID NO: 126274 - DNA, 201 bp, Homo sapiens
atctgggcgccccattaaccctgagcacgggcctgccagctgacagaaccctagccaggtgttggtttggggttcagttgcatgctcaggtgttccccttycttcccccgttagcttgtccccacctaagcctgcaacccttgccactgggatgctaacccgttagcagagctcagtctccttgcttggaaattctgtgtt

SEQ ID NO: 126275 - DNA, 201 bp, Homo sapiens
ctttgtaattggctatccctgctattaatatacagggtactctccctctcgtatttgcgtctaaatgtcatctataataaataacagtgaatacttactgrtttcatatttagttttacttttatcccacccattttcttttagtagttcttatgacttcacgtttatttaataaaggtaaaaaagaactttctgtttcca

SEQ ID NO: 126276 - DNA, 201 bp, Homo sapiens
cttttaaaaaaaattgctgcagatatacacatatgcacggatatacacatacaaatatgtaccttatacatatatgtatataataaatacatgcatatgcrgaattgtggcatagtcttagtcttttttttttttttttttttttttgagacggagtctcgctctggtgcccaggctggagtgcagtggtgcaatctcggc

SEQ ID NO: 126277 - DNA, 201 bp, Homo sapiens
cgccctggcggtcttcagtgcagccctgctgctggaggtgctgtccctcgcggtgtccatcaggtaagcgccgcgtggactgggtctccagctctgagccrttagctccctcttctggctccatggcttatggctgagcggttggactggtccccagccagctgtccctgctggctgatttctggagatgggtccccgtgt

SEQ ID NO: 126278 - DNA, 201 bp, Homo sapiens
tatgtgttgaaagaatgaataggataaaagttgttaagaaattttctccgtttaatttttatttattaatttatattttagagacagggtcttactctgayacccaggctggagtgcaatggtgcagtcacagctcactgaggctttgaattcctgggttcaagcaatccttctgcttcagcctcccaaattgcggggatt

SEQ ID NO: 126279 - DNA, 201 bp, Homo sapiens
gcttttaatattgcacttctgtctgaataaacgagagtgactgtattaccctgcccatttcgaagcttcctgaaaacaatgggatcttgaataaaaggaamaatacgtgcattcttagaatagaaagtggaaaatatctcctcgttgaactgtatcatagttataatgtctaatggggaaaataaaattagttttattatt

SEQ ID NO: 126280 - DNA, 201 bp, Homo sapiens
actttatgtttctttgcatgtcttatattttatttttttaagctctgtattttagttaatacgttgtagcaactctggattatgatcacctttggcaaaaygcaggtttgttgtttatttctttttgtttgtgacttgcctggattaattctgtgaagtctgtctctgtagcagctgctgatgatcctgctcatttttttt

SEQ ID NO: 126281 - DNA, 201 bp, Homo sapiens
ctcttgttagcttttctaacagagatgtcacagattagcaactaggcataaacctgagaaattgggcactaattttgttttgcatttttgttttgtaagaygggggtcttgctgtgttgcacaggctgcagtacagtggctgttcacaggtgtgatggtagcgcactgcagcctcgaactcgtgggctcaagtgatcctcc

SEQ ID NO: 126282 - DNA, 201 bp, Homo sapiens
tagaccttagaggtgagagcttgggaatatttcatctgcaagaaaaatcattcgtctgtctttgtgtgggacgagttaggttatgtaagctgatggaacaygaaacagaaaactggagcctttttctttgggcacacaaaaatgcaaaaatctaaatctcttattttgttgaatttttaagtggaaggagttgtagatttg

SEQ ID NO: 126283 - DNA, 201 bp, Homo sapiens
tcttcccttgtggcacaaagtggctgcagccattccgaatgacacagtgatatctagtaaagaagaggggcttttccaatcctgcatgtcttattttactrgcatggaaactaagcagacatctctcagctccctttggccaaggcggggccatgtgccacatcctccttagttactggaaaggggagggaagccccattg

SEQ ID NO: 126284 - DNA, 201 bp, Homo sapiens
gtcactctagggaaacaaggcccaggagagcaaggtgccaggattattcctgggtcctccttgtgccaggaaagggggccagagccatatgacggtggtcygggtcccagggccctggagtctgtggccgtctgcggaatgatcattgctgcctcacagtgtggctgcaaaggacgagatcatacagtcgagactgcagat

SEQ ID NO: 126285 - DNA, 201 bp, Homo sapiens
gttggcttagaaatgatttatcttgtgatgagaaataaccttgaagaaaaaacgattttatagctttgtgccatatattttgaccggaatgtagggtgcaygtcctgaaatgtgttaaaaacaaatgcaaatgtgcccaagtgtgttagagaaatggctacactcttccctccaaagcccacgtccacatgggggaaggag

SEQ ID NO: 126286 - DNA, 201 bp, Homo sapiens
aagggaatcccccacacctgccctggaagggaaccccccacctgccctggaagggaactccccaccgacctgccctggaagagcccccgtcccacctgtcytggagtcttgggtgagactcttctctgttgccctccctgctttcttcccctgagaagggcccaggaggccttcacctctctctctaactccggctccatg

SEQ ID NO: 126287 - DNA, 201 bp, Homo sapiens
ggtgtgtttgatctctctacagccagaaagaccacctgaaaaccctcctgggcctcgtgaatctgctcatctctccagatgtcacaggaagtgtcctcggrgggggacaaggctgtgctgttccatgcaggcatggtctcaggctgttcccaattgtgagtgagttttgaacaaaactgtaacttccctgtatagggctta

SEQ ID NO: 126288 - DNA, 201 bp, Homo sapiens
tttagataaacttattttgaaatagttttagacttgaagagttgcagaaatactagcgagtttccctgtatcctacatccagcttcccctaattttttttyccccaagatggagtcttgctctgttgcccaggctggagtgcagtggcatgatctcggttcactgcaaactccgtctcctgaattcaagtgattcttgtgc

SEQ ID NO: 126289 - DNA, 201 bp, Homo sapiens
tatgtggaaatttaaaatctttatgttggtcttatctatcaatcattgtttatggtttctacctttagtatcatggttagaaaagccttccccacctgagractatgtaaaatattaacctatattttcttctaatacttttatggttttttttttttttttttttctttttttgagacagggtctcactctaggcaggct

SEQ ID NO: 126290 - DNA, 201 bp, Homo sapiens
cccacgataattagtagtggggccaaatctctttttcatatgtgtgttgcccttttgtatttcttcatgagttgcttgtgaattggttgtcttttccttaytgatttgtgaaagttctttatttatgtaagtatcttaaatctttgtcttccatatatgttgtaaaatgcctcccattttctaatttgtctttcaatcgtg

SEQ ID NO: 126291 - DNA, 201 bp, Homo sapiens
cgcgcggcctctgggacgccgagggaggccgggcccacagcgcccggagcgcggacagcggccacagcccgccgcctagaagcggcgccgcccggggcggrgggcggagccgagcgcgcgccccgccccgccccgccccgccccgcagccccagcccagcgcgcgcaccaaggcggggcggcgcgcgggcccgtgcgcgtg

SEQ ID NO: 126292 - DNA, 201 bp, Homo sapiens
gttgtctttgcccacgataattagtagtggggccaaatctctttttcatatgtgtgttgcccttttgtatttcttcatgagttgcttgtgaattggttgtsttttccttattgatttgtgaaagttctttatttatgtaagtatcttaaatctttgtcttccatatatgttgtaaaatgcctcccattttctaatttgtct

SEQ ID NO: 126293 - DNA, 201 bp, Homo sapiens
ccctgggtttggagcccatggggagagagggcgaaagagtgtcatgatgtgggggagcgtcgttctcagtgggactgggacaggtggcactcccgggatgyacaggggtggggcagatgggcctgggagcctctggcatcagggccaggggtggcccagagggggaggctgtggcagggacaggtgtctctggcaagtagc

SEQ ID NO: 126294 - DNA, 201 bp, Homo sapiens
tccattttctcatgaaccctgtgggtgatgagtggatctagatgccatatatcaataaaaacagcttttccaacatcttcatgaagaaaaagaaaacccarctgggctcagtggctcatgcctgtaatcccagcactttgggaggccgaggcagagagatcacctgcggtcaggagttcaaggccagcctggccaacatgg

SEQ ID NO: 126295 - DNA, 201 bp, Homo sapiens
ggacgcgtgggtatcatagctaatcatggtggagtggccttgagcccagacagcccggctgcagagcctgtgctctgatgatggtgggacggccgcacccrgaggccctgggatgtgggtagtgagcagggcggagcctggcccacggtgccctggcagccagtggcactgtccctgggtttggagcccatggggagagag

SEQ ID NO: 126296 - DNA, 201 bp, Homo sapiens
cacaggcatgtgccactatgcctagctaatttttaaatttttttttttttgctatattgcccaggatggttgccaactcctggggttataccatcctcctrccttggcctcttaaaatgctgggattacagtcatgagccactgtgcctggccttgggttcttgaaatgaccagcagtgagaggtcctcatcctaagggcc

SEQ ID NO: 126297 - DNA, 201 bp, Homo sapiens
gtggggccagcacccacaaacgttagagataccaaagagcctggttcgtccagggagttgcaggcgcatccggggcagggtggggcaggagtggcaggacstggcaggggccaggtcacggctcccatgccatggactttatgccacaggccatggggagctgttgaaggatctggaacaggttgtgttacaaagatcaca

SEQ ID NO: 126298 - DNA, 201 bp, Homo sapiens
tgtaacataacctgtgtactgtaacgacctaccaggaaatgatagtgatgtcaaaggccagggctttggtcctgaagtcatagctcaaagggaaccctttstacacccaagtgttggcttcttttttttttttttttttttttttaaagagatgggatctcgctctgttgcccaggctagagtaccagtggtatgatctta

SEQ ID NO: 126299 - DNA, 201 bp, Homo sapiens
caaagagctgacgctgagcaaggctgaacaggtggctgtggtcccatagccggggtcggacacgagtggtctggctgccaaaccaggcgtccgggccgctyctcgccctgcactgctgagcctcccaaacagcagacacctttgccatgccttcctccaggcaccaaatgtacgctcagcctctgctctgccagggactgt

SEQ ID NO: 126300 - DNA, 201 bp, Homo sapiens
acacactctctctcttccctgccgtcatggaagacgtgacttgctcctccttgccctctgccatgattgtgaggcctccctagccatggggaactgcaagycagttaaacctttccttcataattacccagtctcggataattataaagtctttatgaacagtgtgaaaacagactaatacaccctttatgggtgttacca

SEQ ID NO: 126301 - DNA, 201 bp, Homo sapiens
ctgggattacagggatgagccactgcgcccagccaaaatccgcattttcaaagtgcagtaaaatgatggctgctgggtccgggtgacacaggtctgtgggrccatgccacccagcgcggcctggagtctgcacctggctctccccccacctcccatactcccacttcccggacaaacctgctgggaatggaataggcagtg

SEQ ID NO: 126302 - DNA, 201 bp, Homo sapiens
catcaaagttgtttgacctaaggtcaggctttatggtaagttcttggtcttacacgaggaacagcgcataagctggaaatctcagagggtttcctggaacwggggttaatcagaagccacatggcggagtagcatccacgatggagctacttcagcctccacagtccactcttgtaatccagctcttgtaatctcacatgc

SEQ ID NO: 126303 - DNA, 201 bp, Homo sapiens
tactcttcccagggagggcttctcagcaggggtggagatgcctgcagctgtgcagggggagacgctgtttagccggctgggaaacatttcacagaggcatstgtacttggcaaaaaacatgttgtgaaatgtcttaatccagattaaaattaagctaatgaatcgctcaaggaaaattgccatgggggttggggggtagga

SEQ ID NO: 126304 - DNA, 201 bp, Homo sapiens
actgaaatgaaagtacactccacggagtgggagcaggctcgagcaggagcaagtggctgattagagaattttctggagccttaataccctgtagaggtttmccattggttacttggttacaccctatgtaagtgaaggagtggcctgtgaccagtctgattggttgcaggaggcgaccaatcagaggttgaagtgaagttg

SEQ ID NO: 126305 - DNA, 201 bp, Homo sapiens
ggtttcaggcaatacctgcttccagtcccaaaccacaaatctactttctgtgtctatagatttgctttttctagacatttcatataattggaatcatgcaytattgtagtcttttgtagctgacttctcaattagcttattgtttttgaggttcttctgtattgtagcacagatcaagtatttaggtcctttttcgtgagt

SEQ ID NO: 126306 - DNA, 201 bp, Homo sapiens
cactgcactctagcttgggtgacagagcaagactccatctcaaagaaaaaaaaaagaaaaaaagaaaatagataacgaattgagcactttttattaaagamagttttactaaggtatcatttgcacactatgaagctcagctgtgaaaagtatacaattttatttttagaaaatttagggtatcatctggttttagaacat

SEQ ID NO: 126307 - DNA, 201 bp, Homo sapiens
cactgtcttgagacagcttcagaacaggcaacctgggtgtggccgccttgtcaaccagagataataaaaacacaggtaaacctctgcacctccatcgtcaytccgaattataacaacagcacatatttgttgaagtcttactatgcactaggcacagtgctgagtgcccatgatgcagaggggaatttgagagtgtcagtc

SEQ ID NO: 126308 - DNA, 201 bp, Homo sapiens
cgcagacctctccctcttcgacgaggtcctgttcacttccatgtaaccagtcagggttggaatcccacatggagttcccctcctttggtgaccctctgctrcagctcttgggagcctcccctttagatgagttcctccctgctctgaccaggagttgctttttctataccacctcagctgatggtgttcacacacacattc

SEQ ID NO: 126309 - DNA, 201 bp, Homo sapiens
gggcacagtagatactcagcgagtgttgttttttttttaataattatgcaataaatgaatggatgtccgcacaccaccctgaacaccagcacccactggtyatccctggacacgcatgggtggaaggaccacactggttgtccctggaagagtagctcactctcgagcctgcaccgatgtcatctgagtcaaaacacagac

SEQ ID NO: 126310 - DNA, 201 bp, Homo sapiens
tgtctcttctcctcctgtgttgccctcctccccctcgatagatgtgacctcccttccagctttgtgccagtgtctggcagcacttgattttttttctcctygtccttcatctgttttcattgcgtcgccaccttccccacccccaagcagcatccttctgccccttggtgctctccgcgcggccgtctgcctacctgtgag

SEQ ID NO: 126311 - DNA, 201 bp, Homo sapiens
gccctctttggacactgacgtctcctcacgtccatgatccctcctgggtccgtgccagctgcgcgtgtcatcagagcggagcgtgcgcttgtccttcatcrcaggcctgggtgatgtgtggctgacatgcgtcacatgggataggctctccgatctcagggctcgggctgccacccctgccacgtagtacatggcatgtgg

SEQ ID NO: 126312 - DNA, 201 bp, Homo sapiens
cacaccgtctaaatacagcgtgataaaattaggcttccctctggtttccgtggggtcgagtgagccctgagcgtctcgtgcccagccaggactctgcctgytggctggcttcggagcacagggaggtgggacggtttccacggccagcagtgttcccacagcacttccttaatatagaacgtttttaaaagcagcgttggc

SEQ ID NO: 126313 - DNA, 201 bp, Homo sapiens
atgaaaccaacctcatttgccatgttgttagatataaatgtcagtgatagcactttctggatggttgagttttctgaagagcagaggattttctcttttartcaatcagataattttctgttttaaccaattcaaacatttgattttatgtttctgaaatagataaagcactttcataaaaatggactgtgccaaataaga

SEQ ID NO: 126314 - DNA, 201 bp, Homo sapiens
taatagaacaaaaagtaatgaaacatcatcattggcatcttagactcgatgaaatataatattgtcaattataacagtgtgatgaatatccttatttgccrttgtctttgcccacgataattagtagtggggccaaatctctttttcatatgtgtgttgcccttttgtatttcttcatgagttgcttgtgaattggttgtc

SEQ ID NO: 126315 - DNA, 201 bp, Homo sapiens
gagaaaggaagaaaccccacatgcgtgtgatttatttccttgtgtatggatattaaatgcaatataccattaaggctatgacactttaagtgaaagtgttyattgcatgttgattcagttagttcgtaccctattgtgttactatttaaagtgtggattgcatcgcattctggaacttcataaatgagttctttttcccat

SEQ ID NO: 126316 - DNA, 201 bp, Homo sapiens
gctgggactacaggcgtccgccaccacacccagctaatttttgtatttttagtagagacggggtttcaacatgttggccaggatggtctccaactcctgasctcaggtgatccacccaccttggcctcccaaagtgctgggattacatgcgtgagccaccatgcctggccaagtctgtacatacatctgtatcatcatttt

SEQ ID NO: 126317 - DNA, 201 bp, Homo sapiens
actgcagctttaaggaatgtgtgacttttgaagctctctgtttaggcagatggcaaagggggtgaccatcttatttttattaattttttattataaaagtraaacatgtttttggtgttttagaaaagacagataagcaaaaagaagattaaaaaaacatttaccaactagagatagccattttgaatgtttcaacatgag

SEQ ID NO: 126318 - DNA, 201 bp, Homo sapiens
atcacttgaacccgggaggcagaggttgctgagattgcaccactacattccagcctgggtgacagagtgagattctgtctcaaaaaaaaaaaccaaaaacmaaaacaaaacaaaacaaaaaatcccaaaccaaaacgtagatgacatgtttgcagactgaggagtcctcccccagcccagcaaaccccatccctcaggacc

SEQ ID NO: 126319 - DNA, 201 bp, Homo sapiens
atcatttcctgtttgagctttttagattgcttgaaggtttttctttcctttgtaaatactgcagctttaaggaatgtgtgacttttgaagctctctgtttwggcagatggcaaagggggtgaccatcttatttttattaattttttattataaaagtaaaacatgtttttggtgttttagaaaagacagataagcaaaaag

SEQ ID NO: 126320 - DNA, 201 bp, Homo sapiens
aaggccgggcatggtggctcacgcctgtaatcctggtgctgtgggcggccgaggtgggagggatgcctgaggctaggatttccagaccagcctggtcatcrtagcaagacatcatctctacaaaaaaattttaaaaattaactgggcttggtggcctgtgcctgcggtcccagctacttgggaggctgagccaagaggatc

SEQ ID NO: 126321 - DNA, 201 bp, Homo sapiens
gtaaagaaaagaaaaattacctctgttaacttctttaaattcttaggtacaggtggtaatttttttctttgttaaaattgatgttggtcattttgtgtttsagttttctgttgctatttcatggggattttcctgtgcatctacataatatagtatttctttgaattaatatgccatagtttaatcatttcctgtttgagc

SEQ ID NO: 126322 - DNA, 201 bp, Homo sapiens
ccactcatctgcagccccctgaccatggctgtctccatcagtgccactgaagtggagacagccccgctgaaagcaggctcagttatcaaagggagcagagrctgggcgcggtggctcacgcctgtgatcccagcactttgggaggccgaggcgggtggatcacgaggtcacgagtttgagaccaacctgtctctagtaaaa

SEQ ID NO: 126323 - DNA, 201 bp, Homo sapiens
ggtataagccctggcagctcattgtcctctcttgagtccacataggttgcattttttaactctggcaaagtgaagttacaaagtcagtctggtgtcgcctrggacaggtccgagaaattagtataaagatggcttcactcctgcgtcgtattccagttcacgtttccatttcagtgtatacatgttacagtcgtgattgat

SEQ ID NO: 126324 - DNA, 201 bp, Homo sapiens
ccgtggactgccgtgctgagcgctgtgaatgtgctggctgtcccgtcgtgctccagctcttcaggcctccctgctcagcctctctcagcttcagttgccaygcacttctaggagaggccatcttgactttctcttgcagtcccggagccacacagggagcaggtgcgcagtcacctgggtgagggccccttcctgggtttc

SEQ ID NO: 126325 - DNA, 201 bp, Homo sapiens
gtgagcagaggccgccgctgccactccgtgctccccgtggactgccgtgctgagcgctgtgaatgtgctggctgtcccgtcgtgctccagctcttcaggcytccctgctcagcctctctcagcttcagttgccacgcacttctaggagaggccatcttgactttctcttgcagtcccggagccacacagggagcaggtgcg

SEQ ID NO: 126326 - DNA, 201 bp, Homo sapiens
aaatgtttatgatgctaatagtgtcataataatgtattttatatatattataaacctcataacatgttatttttacagaaaattaccttttagagcaatgmcgtttgatgaaacttcctgcaatgatggaaatgttttatatctagactatacaatatggtagctactatccatgtgtgaccattgagtacctgaaaacaa

SEQ ID NO: 126327 - DNA, 201 bp, Homo sapiens
ctgacctcgccccgtctttcagttctccgtgtggagggtgctgatccgtccgtctccatctgcttgtgaagcaataacagaacagcataggctgggtaatstatacagcacggaaatttctgtcctcatgcttcaggaggctgggaagtccaagatcaaggcaccagcaggttcaggtgtctggggagggctgcatcttct

SEQ ID NO: 126328 - DNA, 201 bp, Homo sapiens
ttcttgatatgtggaaatttaaaatctttatgttggtcttatctatcaatcattgtttatggtttctacctttagtatcatggttagaaaagccttccccmcctgagaactatgtaaaatattaacctatattttcttctaatacttttatggttttttttttttttttttttctttttttgagacagggtctcactctag

SEQ ID NO: 126329 - DNA, 201 bp, Homo sapiens
tcactagctctgctcctgccctccccttagagatgaggaaactgagaggcagagatgaagcagctcacttagatcacgggattagggggcggacctggacycgactccgaggccccctccagcagccaggccctcgcccatcacgcttggttgcttgtaatgggagccttgcctctcgccagcagtttgtggggagtaggt

SEQ ID NO: 126330 - DNA, 201 bp, Homo sapiens
cctcctaaagtgctgtgattacaggcgtgacccatggtgcctggtctgggaatcctgtttgattttgaaagtctgagaaacacttttgaaatggcttggasaaaatgtgaagtgaataattattatttttttaatgtgcttcagttcccatgtgaacattattttagagagagattggaaggttagttgccagtaaaatga

SEQ ID NO: 126331 - DNA, 201 bp, Homo sapiens
agcaagactctgtcttaaaaaaaaaaaaaaaaaatatatatatatatatatatatatatgtacatatgtatttatacatatatatagtgtgtgtgtgtgtrtatatatatatatatatatatatatatatatatgtaactccacatgtgagtaccctgttatgtgtgaaaccacaccccaaacatctacacagaacaagcc

SEQ ID NO: 126332 - DNA, 201 bp, Homo sapiens
cgcacacagccatagacaaattcccccgtcagacaggagcccattaggaaatgcccacccctctctgtagcctttgtaaaattaagctgataaaagacatygctgttgttgaggtttaaaatcaatggataaccaggaaagaatataagaaatcatattaattattctcctgtttacactacacttaaatcatttagctgt

SEQ ID NO: 126333 - DNA, 201 bp, Homo sapiens
tctcttgaacccaggagatggaggttgctgagattgcgcccctgcactccagcctggatgacagagcaagactctgtcttaaaaaaaaaaaaaaaaaatawatatatatatatatatatatatgtacatatgtatttatacatatatatagtgtgtgtgtgtgtatatatatatatatatatatatatatatatatatgta

SEQ ID NO: 126334 - DNA, 201 bp, Homo sapiens
accacgcccggttaatttttgtatttttagtggagacagggtttcaccatgttggccaggctggtctcaaactcttgacctcacgtgatccttccaccttkgcctcccaaagtgctgggattataggcatgagctaccatgcctggcatgtatctcttcttctctaagtactcagctgtcttgtttgaggctagtacctcc

SEQ ID NO: 126335 - DNA, 201 bp, Homo sapiens
tctattttgtacttatgcccgtacctaacctgttagcttaaacagcaatgccagggacatagagttagccccatggctctgccgcactgacaggctgcccygttcacctggagatcgttggggccaggagctctgctgcctgggctcaccgcctctttacgcggttccgaccgtaccgtgtggctctgggccagtgcttgc

SEQ ID NO: 126336 - DNA, 201 bp, Homo sapiens
acatcaaagttgtttgacctaaggtcaggctttatggtaagttcttggtcttacacgaggaacagcgcataagctggaaatctcagagggtttcctggaamtggggttaatcagaagccacatggcggagtagcatccacgatggagctacttcagcctccacagtccactcttgtaatccagctcttgtaatctcacatg

SEQ ID NO: 126337 - DNA, 201 bp, Homo sapiens
ataacatcaaagttgtttgacctaaggtcaggctttatggtaagttcttggtcttacacgaggaacagcgcataagctggaaatctcagagggtttcctgsaactggggttaatcagaagccacatggcggagtagcatccacgatggagctacttcagcctccacagtccactcttgtaatccagctcttgtaatctcac

SEQ ID NO: 126338 - DNA, 201 bp, Homo sapiens
tgtggaaattcacagcaagcatgtgcctgtgctgcagatacgatctgggagagagccagcagcctggatccacatttcccagaagcaacaggtggtgaagkcagcggcatgactgctcccgcggaaggttagtcacgcatgttcagcatcagccgggcgcggtggctcacgcctgtaattccagcactttgggaggccgag

SEQ ID NO: 126339 - DNA, 201 bp, Homo sapiens
ttcaagcaatccttctgcttcagcctcccaaattgcggggattacaagcatgagccactggctctggcctattttctccttttaaaaaaaattgctgcagrtatacacatatgcacggatatacacatacaaatatgtaccttatacatatatgtatataataaatacatgcatatgcagaattgtggcatagtcttagtc

SEQ ID NO: 126340 - DNA, 201 bp, Homo sapiens
tggcctctgctggtcatgccccaaaccttctggagctgcgggttctgccttctctgcagctgccttcccgtgggctgccctggtcagtgcaggacatggcrcaggacctccgccctgccacacccccgggccatttcctcggcaggcctcgtgccagacttctccaaaggactgaccgcgtgtgccttctccaccttgcac

SEQ ID NO: 126341 - DNA, 201 bp, Homo sapiens
attacaggcacgcaccaccacacccggctaattttttgtatttttagtagaaacagggtttcagcatgttagccactgcgcccgacccacggctgaggttytttgagtgataaaatgtacacaacagaaatctaccgtgttaaaacacttttaagtgtgttcgctgaattttcttaaccgctttggcattcaatttgttgc

SEQ ID NO: 126342 - DNA, 201 bp, Homo sapiens
acatgagcgggggtagtgggcctgggacagcaggcgcctcttcagagtaccggagccaaacagcatctccacgcacttgcctcaggcagtggtctcttggmtgtgacgccaacagaagaaagaatagacaagcccaacttcctcagaagttaagctgttgcgctacaaagaacaccatcaagaaagagaaagaacccacag

SEQ ID NO: 126343 - DNA, 201 bp, Homo sapiens
aattatgaatagtgccgctacaaacatttgcgtacagcgttttttgtaaacataaggtttgatttctctagggtaaatatccatgattggggtttctgggygtatggtcattgcaggattaacttttttttttttttttttttttgagacggagtcttgctgttgttggctcaggctggagtgcaatggcgtgatctcagc

SEQ ID NO: 126344 - DNA, 201 bp, Homo sapiens
aaagtctttatgaacagtgtgaaaacagactaatacaccctttatgggtgttaccagtggagggtcttgactacaagttgtctgggttcttaaccagattyttggcattttgaacaaagaattggacaaaatgcacaaacaaagcaacgagaaaacgaagcaagggaagcacagatttactgaaatgaaagtacactccac

SEQ ID NO: 126345 - DNA, 201 bp, Homo sapiens
ttcgtttgaagcctccaaatccatgtaagtactctcagcacagtgatctgcgtgttcttcacaaaagattgtttcaaagaacagaaaagctgccttcatcktctcctaatcctagacattaggaatgtgttttcaaaaacaagcctcagcagctcacgctgtcatcccagcactttgggaggccgagatgggtggatctct

SEQ ID NO: 126346 - DNA, 201 bp, Homo sapiens
tgttttattaccgagaaagagtcgtctgggagctctccgaggcaaataacttttgaagttggcatgagcaggatattgtgcaatggggctcactggctgcktcccaggcctccgcatctgatgtgaaccacagctttgcaatcggtccccgtgccatccaaaaatattttgtgaccttgccggttggcagttttttaaaaa

SEQ ID NO: 126347 - DNA, 201 bp, Homo sapiens
acagtatcctttagagcttttatggtgttcatccaggatccaatcagggatgatcttttcctaaaagaggacactcaagatctagatctagaacagttccrcacatttttttttctttactgctattggcatttttgaagagtttggtttcctgtttcttaaaataaattttgcattgaagtgtaatatgcatgcataaaa

SEQ ID NO: 126348 - DNA, 201 bp, Homo sapiens
atactcttataaaatatatagttcatgttcaaatttccccagcatctaacagtatcctttagagcttttatggtgttcatccaggatccaatcagggatgwtcttttcctaaaagaggacactcaagatctagatctagaacagttccgcacatttttttttctttactgctattggcatttttgaagagtttggtttcct

SEQ ID NO: 126349 - DNA, 201 bp, Homo sapiens
ttgccctcctccccctcgatagatgtgacctcccttccagctttgtgccagtgtctggcagcacttgattttttttctccttgtccttcatctgttttcaktgcgtcgccaccttccccacccccaagcagcatccttctgccccttggtgctctccgcgcggccgtctgcctacctgtgagtacgctgaccagggctggt

SEQ ID NO: 126350 - DNA, 201 bp, Homo sapiens
cattctcctgtacagacaaaacaaattatcctactcaagaaatataacattgacagaatactcttataaaatatatagttcatgttcaaatttccccagcrtctaacagtatcctttagagcttttatggtgttcatccaggatccaatcagggatgatcttttcctaaaagaggacactcaagatctagatctagaacag

SEQ ID NO: 126351 - DNA, 201 bp, Homo sapiens
cagcacatcccacgagggactgagtgtttatgcccacagactcagtgccctccctgaactgtgcagagtaaactctgccaaactcttagctgttgttgttsttctttttttttttttttttttatctttttgagatggaatctcgctctgttgcccaggctggagtgcagcaatgtgatcatagctcactacagcatccac

SEQ ID NO: 126352 - DNA, 201 bp, Homo sapiens
gtttcatatttagttttacttttatcccacccattttcttttagtagttcttatgacttcacgtttatttaataaaggtaaaaaagaactttctgtttccrattcattcctttcaccaataaggaaggatgtggatcttcactgcttcctacatagctgccagcctcatgtagctgtttaaaatttaaattataattgaaa

SEQ ID NO: 126353 - DNA, 201 bp, Homo sapiens
acatcccacgagggactgagtgtttatgcccacagactcagtgccctccctgaactgtgcagagtaaactctgccaaactcttagctgttgttgttcttctttttttttttttttttttatctttttgagatggaatctcgctctgttgcccaggctggagtgcagcaatgtgatcatagctcactacagcatccacctct

SEQ ID NO: 126354 - DNA, 201 bp, Homo sapiens
gaacctggtgccttctctctctccttcatttttgaggcagagtcttgctctgtcgcccaggctggagtgcagtggtgcgatctcggctcatggcaatctcygcgtcccaggcttaagtgattcttccacctcagcttcccaagtagctgggattataggtatgcgccaccatgccccgctaatttttgtatttttagtaga

SEQ ID NO: 126355 - DNA, 201 bp, Homo sapiens
ggcagagtcttgctctgtcgcccaggctggagtgcagtggtgcgatctcggctcatggcaatctccgcgtcccaggcttaagtgattcttccacctcagcytcccaagtagctgggattataggtatgcgccaccatgccccgctaatttttgtatttttagtagagacagggtttggccatgttggccaggctggtctcg

SEQ ID NO: 126356 - DNA, 201 bp, Homo sapiens
acacccatctctctcctccagcccctcctcacagcctccagcagagtcccagcgctcacaagtgctccttagggggttgctggaaggaataatacaagaayctagagcctggtttgaatcctggcggcttccagactgcattctctcctctgggcccaaacctaacctctgagtgttcccaagtcaagagtggatgccctc

SEQ ID NO: 126357 - DNA, 201 bp, Homo sapiens; identical to SEQ ID NO: 21454

SEQ ID NO: 126358 - DNA, 201 bp, Homo sapiens
ggggtgaacttaccctgctccagctacttactgcgggtgggctgtatgtgcgcatgcatggtgtgtgtgcgtgtgcgtccatgcgtgggtgtgcatgtgtgtgcgtgcgtgcatgcgtgggtgtgcatatatgtgtgcatgcatgcatgggtgtgcatgggtgtgcatatatgtgtgcgtgcatgcgtgggtgtgcctgca

SEQ ID NO: 126359 - DNA, 201 bp, Homo sapiens
ttggaatctttccgtgtgtggttctggattcgtgttcctccctccctagatgctcagctctgtgaggtaggacccccgtctctctcctccagcccctcctkacagcctccagcacagtcccaacacccatctctctcctccagcccctcctcacagcctccagcagagtcccagcgctcacaagtgctccttagggggttg

SEQ ID NO: 126360 - DNA, 201 bp, Homo sapiens
gggtgaacttaccctgctccagctacttactgcgggtgggctgtatgtgcgcatgcatggtgtgtgtgcgtgtgcgtccatgcgtgggtgtgcatgtgtgtgcgtgcgtgcatgcgtgggtgtgcatatatgtgtgcatgcatgcatgggtgtgcatgggtgtgcatatatgtgtgcgtgcatgcgtgggtgtgcctgcat

SEQ ID NO: 126361 - DNA, 201 bp, Homo sapiens
ggtgaacttaccctgctccagctacttactgcgggtgggctgtatgtgcgcatgcatggtgtgtgtgcgtgtgcgtccatgcgtgggtgtgcatgtgtgtgcgtgcgtgcatgcgtgggtgtgcatatatgtgtgcatgcatgcatgggtgtgcatgggtgtgcatatatgtgtgcgtgcatgcgtgggtgtgcctgcatg

SEQ ID NO: 126362 - DNA, 201 bp, Homo sapiens
gtgaacttaccctgctccagctacttactgcgggtgggctgtatgtgcgcatgcatggtgtgtgtgcgtgtgcgtccatgcgtgggtgtgcatgtgtgtgcgtgcgtgcatgcgtgggtgtgcatatatgtgtgcatgcatgcatgggtgtgcatgggtgtgcatatatgtgtgcgtgcatgcgtgggtgtgcctgcatgt

SEQ ID NO: 126363 - DNA, 201 bp, Homo sapiens
gttttccttaaccagaaaacagaaaaaagcaatcccagagacaagggaaatttcttgctccatttccctgtagtaaaggcatttctatgtgagattttctktttatcctgagcaggttatcagaaaccaaaattttgaattaggagtttaaagaagaggcaagggggaaaaagtgctctctacgggaccttggttgccatg

SEQ ID NO: 126364 - DNA, 201 bp, Homo sapiens
gtcatgcctgaaatcccagcactttgggaggttgaggcgggaggatcactcttgaggccaagagtttgagactagcctggccaacgtggcaaaaccccatytctatcaaaaaatgtatatatatatacaaaaattaatcgggtgtggtggcgcacgcctgtagtctcagctactcgggaggctaaggcaggagaatcactt

SEQ ID NO: 126365 - DNA, 201 bp, Homo sapiens
attaacctatattttcttctaatacttttatggttttttttttttttttttttctttttttgagacagggtctcactctaggcaggctggagtgcagtggygtgatctcactgcagctttgacctcctaggcttaggtgatcttcccacctcagcctcccaagtagctgggactacaggtgtacaccaccacacctggcta

SEQ ID NO: 126366 - DNA, 201 bp, Homo sapiens
ttgtatgatgagtgtgtttaactttataagaaactatgaagctgaacatgttatttttctttgtaactggacacttaattgaatgcttattgtgtctgaatttttttttttttttctgaagcagagtctcactttattgcccaggctggagtgcagtggcaccatcttggctcactaccacctctgcctcctgggttcaag

SEQ ID NO: 126367 - DNA, 201 bp, Homo sapiens
tactgggcacaatggctattattaatcccactactagatatctacccagaggaaaagaaatcgatctatcaaagggatacctgcacttgtatgttcatcayagcaatgttggcaatagcaaaggtatggaatcaatgtggccatcatcgaatggatgggtaaagaaactgtggtatatgtatatgcagtgggatactgtcc

SEQ ID NO: 126368 - DNA, 201 bp, Homo sapiens
tcttggactcctggactcaagtgattcttccacctcagcctcccaaactgttgggattacaggtgttgagccactgtgccagtaagaccccacttaatacyatcccttcgtgatgaagtttaaacacgtcaattttgggggacatttagaccatagcacataggtttcaaaaatgagtcaaagccttaaatggattgtctc

SEQ ID NO: 126369 - DNA, 201 bp, Homo sapiens
gccaagatcgctgcgccattgcactccagcctgggcgacagagtgagaccttgcctcaaaaaaaaaaaaccccaaaaaaccaaggttctgatgatgtgtgytataatcatggtggatggtcattctttaacgaaggtgaaacacaaaatatgattatgctttgaggtgcgaaggactttccacagatctgttttaacaagg

SEQ ID NO: 126370 - DNA, 201 bp, Homo sapiens
agaatttaaaaacagctgagtcagctgggcgccgtggctcacgcttgtaatcccagcactttcggaggctgaggtggatggatcataaggtcaggagttcragaccagcctggccaacatggtgaaacccccgtctctgctaaaaaaacaaaaattagccaggagtggtggcggacgcctgtagtcccagctactcaggag

SEQ ID NO: 126371 - DNA, 201 bp, Homo sapiens
ccacattgtgaaaaaacgagggaaccgcttctgattttgctccagtggtgtattcctctgtcttgttataatgctttatgtttacatataacacattataygatttttaaagcaaccccacagggaagagttttaattttttgtttgtttgtttttgagacagagtcttgctctgtcgcccaggctggagtgcagtggcgc

SEQ ID NO: 126372 - DNA, 201 bp, Homo sapiens
taactgtacttttcttaattaactttggaatgaattctggatatactcattccagcaatgcacagaaaattctaggcaaagaataaaagactccacattgkttattattattatttttgagatgtagtcttgctctgttgctcaggttggaatgcagtggcggaatcttggttcactgcaacctctgcctctcatgttcaa

SEQ ID NO: 126373 - DNA, 201 bp, Homo sapiens
ctctggtaactagattttaaatgatttgattccataggtttataatggagaaatccagatctccaaaatgtaagttttactatatgggaagcctttttttkatttcctttgctgtgtttggtaaatagcctggaagaaaatggctccgtcctatcacagaattttattatttacttcataaacctagtgttttagaatttt

SEQ ID NO: 126374 - DNA, 201 bp, Homo sapiens
taagttccctgcctccaggcccctgccgacccagcaacaactatccattccctgtagttttgcctttgggagcctgtcattaaaatggaaccacacagcaygtaccctttgaagactggtttcttccacttagtctagagctattgagattcgtcctggatgctgcatgggtctctagttcattccttgtgatgctgagta

SEQ ID NO: 126375 - DNA, 201 bp, Homo sapiens
gattgttggtctggggaaagatttattttctgggggcaaaagaggcggggtggagagtccctccgcctgcctggagtgctgatgtggcctcagagctaggycctgaaaaattgctgggatttagatgcaggctctacatgtagagagattgtttaaatgtataatggttcagaagtgacactctcttgctatgtttctctg

SEQ ID NO: 126376 - DNA, 201 bp, Homo sapiens
aatcccagcactttggaaggccaaggtgggaggatggcttgaagttacgagtttaagaccagccttggcaaccagcaagaccctgtctcttcaaaaaaaawtttttttaattagctaggtgtggtggtacatgcgtgtaatcccagctacttaggaggctgggcaggaggatcgtttgagcccaggagtttaaggctgcag

SEQ ID NO: 126377 - DNA, 201 bp, Homo sapiens
ttgagcccaggagtttaaggctgcagtgagccatgattgtgccattgcactccagcctggacaacaaccatgtctctaaaaaaacaaaggagagagagaawagaaaagatttttgaaagaagctaaagacttctaaaaaaaaagaaaaagaaaaagaaaagaaaaacgattaccaagcacttactaaagatgttagttaca

SEQ ID NO: 126378 - DNA, 201 bp, Homo sapiens
gcagtaaatatggaaaacatttaagattttcatttactaggtgaaactatatatgtactataggtacaactaggtatttatatatagtaaaaatatgtacragatttatacttaggatataatgaatgagtgatgattacagctttagtacttaaaagtaaagcacctagcatctttttttaaccttttattgatgtgtat

SEQ ID NO: 126379 - DNA, 201 bp, Homo sapiens
tcatgggcagtcactcccccaggtctgccttccctggtccacccccaggttttcctctaatgtgggtagctgtagcgtcttgagggctctgaggccagcaytgtctccattcctttttactttcaccctttagctattattccctgctccttcagacccaattctaaagcattgagggcaaccccggtgtagactgccgag

SEQ ID NO: 126380 - DNA, 201 bp, Homo sapiens
taaaatgcagtaaatatggaaaacatttaagattttcatttactaggtgaaactatatatgtactataggtacaactaggtatttatatatagtaaaaatwtgtacgagatttatacttaggatataatgaatgagtgatgattacagctttagtacttaaaagtaaagcacctagcatctttttttaaccttttattgat

SEQ ID NO: 126381 - DNA, 201 bp, Homo sapiens
tttttttttctgaagcagagtctcactttattgcccaggctggagtgcagtggcaccatcttggctcactaccacctctgcctcctgggttcaagcaattytgccgaagactcccaagtactaggattacaggtgtgcaccaccacgcctggctaatttcttttgtatttttagtagagatggcgttttgccatgctggcc

SEQ ID NO: 126382 - DNA, 201 bp, Homo sapiens
ctacgctggtctcagactcctgacctcaggtgatccacctgccttgacctcccaaagtgctgggattataggcgtgatccaccgcgcccagcctctacttyagtttcataatgggctttaatttgtgaattaacttcttgatgtatctgctcatccatccattcattcattcatttctatattcacccaacaaatagttaa

SEQ ID NO: 126383 - DNA, 201 bp, Homo sapiens
gacgaagtctcaaccttgtcccccaggctggaatgcaatggcgtgatctcggctcactgcaacgtccacctctgaggttcaagcgattctccttcttcagycccctgagtagctgggattacaggtgcctgccaccatgcccggctaatttttgtatttttagtagagacggggtttcaccatgttggccaagctggtctc

SEQ ID NO: 126384 - DNA, 201 bp, Homo sapiens
attaacattagtttgaattaaaaagttttaaaaaattggatgggtgcagtggctcatgcctataatcccggcactttgggaggctgaggtggccggatcaygaggtcaggactttgagaccagcctgaccaacatggtgaaaccccgtctctactaaaaatacaaaaattagccaggcatggtggttggtgcctgtaatcc

SEQ ID NO: 126385 - DNA, 201 bp, Homo sapiens
ttttgaattgtctatgtaaagaaataccgaactgcttttttttcccctcgatcactttttaaccttccactttgtagacaatttgctagtgtgttttctatttttttttttttttttttttgccactgggtattgccctgtcatccagactggggtacaatggcatgatcgtagctcactgaagcctcgacctcctgggct

SEQ ID NO: 126386 - DNA, 201 bp, Homo sapiens
aggtatggtggtatgcacctgtagtcccagctactcgggaagctaaggtgggcttgaggccgggaatttgaggctgcattgagctgtgatggtgtccttgyaccccagcctggttgtcacagcaagactctgtctcagaaaaaaaaggccaggcacgttggctcatgcctgtaattccagcactttgggaggccaaggcag

SEQ ID NO: 126387 - DNA, 201 bp, Homo sapiens
ctcagtgattaaaggttatgttgtccatgaatttaattttatttcatgatggaaaagaggacattgcaaattaagtatgtcacagaaatgtaaggagccayggggtctgatagggctgagggtgagtggcttgccgtcgagtttccagaaggcgttattatggaccctaaaggggatttcatgcgtttcaaagactctaac

SEQ ID NO: 126388 - DNA, 201 bp, Homo sapiens
ggaggctgaggcaggagagtcatttgaacccaggaggtggaggttgcagtgagctgagatcgcgccattgcattccagtctgggcaactgagtgagacttytgtctcaaaaaaaaaaaaaagtttttaaagagggctgggtgcggtgactcatgcttgtaattccagcactttgggaggctgaggagagttgatcacctga

SEQ ID NO: 126389 - DNA, 201 bp, Homo sapiens
gcccagagggggaggctgtggcagggacaggtgtctctggcaagtagcagggcaggcaggagagactgcaagggaggtggagggaggagcggggcctctgrcagcgtccatggatggggcagttctacagaggagatggcagccccaatcaggaaaggccctgtacccgagcccttggcttggaaggtgggaggtgtgggc

SEQ ID NO: 126390 - DNA, 201 bp, Homo sapiens
cgtgtcctcctcagggtgtcctctccagggacacgcagtgcccgtctgttcctcattagtgatactaattttgattaattaggcaaggtggtgccgggttstctcatctagggttattatattcctcttatgactaataagcaatctgtgagaaaatacttgaagatcttgtacatatttcattccccatcagaattccct

SEQ ID NO: 126391 - DNA, 201 bp, Homo sapiens
cttctgtctcaaaaaaaaaaaaaagtttttaaagagggctgggtgcggtgactcatgcttgtaattccagcactttgggaggctgaggagagttgatcacytgaggccaggagttggagacctgcctggctgacaaggcgaaaccccgtctctaccaaaaattagctgggcatggtggcgcatgcctgtagttccagctac

SEQ ID NO: 126392 - DNA, 201 bp, Homo sapiens
tagactgaccgttaggaaggtactcactggactggtattcacagatggaaataaaccaaagcagtgtctagggtcaaccaatctgctttgctgccttcacrgggaggtcctgggaccctttcatggaggaactttttaatgcttattttaaccctgaaggtaaaacatgaaacatgcagccattactccaagaaaacgtaa

SEQ ID NO: 126393 - DNA, 201 bp, Homo sapiens
tgtttgtttcttttttttttttttttttcttttaggatatgaaggtttgtgttgaaaaattttttttgcaacttattcttttagtactttaaagatatcayaccactgccttctggcttttgttgttttggtgagaagtctgctataattcttttctttgttcctctgaatgtaatatgtttcccaattcccactgtcacc

SEQ ID NO: 126394 - DNA, 201 bp, Homo sapiens
acagtggatccctgcaccattatcccctggtcccagggcttgtataccgtagggaaggggtgattcagagggatgtgtaggtcagtgtgagtacaataacwtcaaagttgtttgacctaaggtcaggctttatggtaagttcttggtcttacacgaggaacagcgcataagctggaaatctcagagggtttcctggaactg

SEQ ID NO: 126395 - DNA, 201 bp, Homo sapiens
ctaaacaaaatacaaaaaattagctgggcatggtggcgggcgcctgtagtcccagctactcaggaggctgaggcgggagaatggcgtgaacccgggaggcrgagcttgcagtgagccaagattgtgccactgcactccagcctgggtgacagaatgagactgtgtctcaaaaagtaataaaataactgacttgaaatccaa

SEQ ID NO: 126396 - DNA, 201 bp, Homo sapiens
tggggttaatcagaagccacatggcggagtagcatccacgatggagctacttcagcctccacagtccactcttgtaatccagctcttgtaatctcacatgycctcttcttccttcatggtccctgagcctttaaggagggtgcttgatactgtatagctttagcagcagtgccttggtcatggaaaacagatcgggcccag

SEQ ID NO: 126397 - DNA, 201 bp, Homo sapiens
tcacatgccctcttcttccttcatggtccctgagcctttaaggagggtgcttgatactgtatagctttagcagcagtgccttggtcatggaaaacagatcsggcccagtgggattccaaacaagggagattcacaggcttttaaatcgtcttcagtcttcagaatgcagtggctttggttctgtcagaataggcaaaacaa

SEQ ID NO: 126398 - DNA, 201 bp, Homo sapiens
atataacatcgatcactcggatagtagaattctgtgcacacagagattgcaatagaaagagaatcgcctgtaatcccagctactcaggaggctgaggcgcragaatcgcttgaacccgggaggtggaggttgcagggagccgagaccgcaccaccgcactcccgcctggatgacagtgagactctgtctcaaaaaccaaac

SEQ ID NO: 126399 - DNA, 201 bp, Homo sapiens
cccttaaagatagccactgttaataagttagtgacttgctttccaagctttaatcatctttctttaatcatcatatttttgattatatcctcttaccaaarttcctttacccctcaccacaaaggtttctaattcagagacttcctttagctcccttgattcaaggagataaagttaattagcaatcaggagatgaggagc

SEQ ID NO: 126400 - DNA, 201 bp, Homo sapiens; identical to SEQ ID NO: 21449

SEQ ID NO: 126401 - DNA, 201 bp, Homo sapiens
ttttttgtagacacagggtctcactatattaccaaggctcttcttcaactcctgggcttgagcgatcgtcccagcttggccttccaaagtgttgagattasaggtgtgagccactgttccctgctgatgctcagtttattaacttgagacttttcttttttttttcctgatacaggcttttaacattataaatttctccct

SEQ ID NO: 126402 - DNA, 201 bp, Homo sapiens
tatttcttgatatgtggaaatttaaaatctttatgttggtcttatctatcaatcattgtttatggtttctacctttagtatcatggttagaaaagccttcyccacctgagaactatgtaaaatattaacctatattttcttctaatacttttatggttttttttttttttttttttctttttttgagacagggtctcactc

SEQ ID NO: 126403 - DNA, 201 bp, Homo sapiens
tgcttcgatacccagattgtcccagatttggccaaaagcagcgcctccaagctggcccctgtgttcttttgatgtgttcatgtcattctttgagcacatcyttacttcttcttcttttttttttttttttagatggagtcttgctctgttgcccaggtgggagttcagtggcgtgatctctgctcattgcaagctccgcct

SEQ ID NO: 126404 - DNA, 201 bp, Homo sapiens
gtggggcggggcaagggtggcaagaggcctggggctgctggttgcaactgtaaccagagtggccagggaaatccttgctcctctgggtaatgccctatccrgaagacccttgcaaatttctaaaatgctgtgttttattaccgagaaagagtcgtctgggagctctccgaggcaaataacttttgaagttggcatgagcag

SEQ ID NO: 126405 - DNA, 201 bp, Homo sapiens
gctatttaaattaattaattccacaagtatgcactcagtaaatattgtgagccaggcactattctcggctctgtggttgcatcagtgaacaaaacagacgstaatcctgctttcgtgagccatctataatagaatgggcgagtcaagaaattgacacatgcattagaaaaatatgtagcgtgtcgctggtaagtgcttgag

SEQ ID NO: 126406 - DNA, 201 bp, Homo sapiens
atccaccacagtttgggaaaatcgggaattttgtttagtccatttctatttttgtgcaccacaaatatgtaaacaaagctgggatcttcgtcgggggcggrgggaagggcgacagaaccctgacatctaatactggtcatcggtatttccatgtgtttcctgatcccattgtctctgctatttaaattaattaattccaca

SEQ ID NO: 126407 - DNA, 201 bp, Homo sapiens
atgggcagagagtaataggaagagtttcaggaagatggtttgagtgaaaatcatttcagaaccgagccctgcgaagtcttggtttctgcaatccaccacastttgggaaaatcgggaattttgtttagtccatttctatttttgtgcaccacaaatatgtaaacaaagctgggatcttcgtcgggggcggggggaagggcg

SEQ ID NO: 126408 - DNA, 201 bp, Homo sapiens
aaaatccatttaatcagagccatacttgttgattactacaggtgcttcccgtatctaatacctccagcaagaaggtttgcgaaatgggcagagagtaatargaagagtttcaggaagatggtttgagtgaaaatcatttcagaaccgagccctgcgaagtcttggtttctgcaatccaccacagtttgggaaaatcgggaa

SEQ ID NO: 126409 - DNA, 201 bp, Homo sapiens
tctgttacaggattcttaatagttattgcagaccttcatttccattttgttgtctgcaactcattgttgaagtgccatttgttgcttctgaacagcccatrgacacttggacttgaatgcatatgactctcttcttgtgggtccagatcgtcactcactgactgtcctcacattcacagctgttctcaggacaagcaccgt

SEQ ID NO: 126410 - DNA, 201 bp, Homo sapiens
tcacgagatctgatgggttttttttcttttttttttttttgaaacggaattttgctcttgtcacccaggctggagtgcaatggcatgatcttggctcaccrcaacctctgcctcctgggttcaagcgattctcctgcctcagcctcccaagtagctgggattacaggcatggaccaccacacccagctaatttttgtttta

SEQ ID NO: 126411 - DNA, 201 bp, Homo sapiens
tttttatctcttcctttctctcttttctttctttctttgatggagtctcaaaaaaaggagaagggtgtccaaacatcctggatgaaaatggctccatgctrtcatagaattttatttactttataaatcctaatattttagaacttaaaaaagatactttgtagtttagatggttatagttaagctatttcatttttttta

SEQ ID NO: 126412 - DNA, 201 bp, Homo sapiens
tattgtagcacagatcaagtatttaggtcctttttcgtgagttaaattcggtggtgtggatatatcacagtgtgtccatccattcaccagctgctggacaygtggattattcccacgtcttggctgtaataaacagagctgctctgaacatcgcttgcaagtcttagttgtttccatttctcgtgagtagaggcttggatt

SEQ ID NO: 126413 - DNA, 201 bp, Homo sapiens
gtgttgcactaactgaataattcttgatttgttaaaaataagtcccagccggtcttggtgctcacgcctgtaatcctaccacttttgggaggctgaagcgrgtggattgtctgagctcaggagttcaagacagcctgggcaacacggtgaaaccctgtctctactaaaaatacaaaaaattagccaggcatggcggtgtgc

SEQ ID NO: 126414 - DNA, 201 bp, Homo sapiens
atcgatcactcggatagtagaattctgtgcacacagagattgcaatagaaagagaatcgcctgtaatcccagctactcaggaggctgaggcgcgagaatcscttgaacccgggaggtggaggttgcagggagccgagaccgcaccaccgcactcccgcctggatgacagtgagactctgtctcaaaaaccaaacaaaaaaa

SEQ ID NO: 126415 - DNA, 201 bp, Homo sapiens
cttgaacccgggaggtggaggttgcagggagccgagaccgcaccaccgcactcccgcctggatgacagtgagactctgtctcaaaaaccaaacaaaaaaacccagaattcgtgggccagaacaacaatgaaaaaagaacgtattctgttaagaagccaactaaaatgcatcatgatgaaaattaaaactcggttcttcttt

SEQ ID NO: 126416 - DNA, 201 bp, Homo sapiens
gtcctccgggtgttgaagagaccggcagggagctcgagggagggtcagcagcaacccacgtggaaaccagcgctcaggggctgagctgggcgggattcctytaaaggccaataagggtttaaaatgcgtggattcgagtgccgggaggggatttgtggtactggaagctggactcagtttatgatagaatatagacgggca

SEQ ID NO: 126417 - DNA, 201 bp, Homo sapiens
catgtgtgtttgtcttttataaatatatgttacccagttttccagttactagctgcaagttttttttccaggtcataatttggagaaaaatatatgcgtgaaaattataacgataaagcttattttctatacaacaaacagtgagtgatatggaaatgtatgtccttactagtaattttaaaagtacaaaagagaatgcct

SEQ ID NO: 126418 - DNA, 201 bp, Homo sapiens
aacgataaagcttattttctatacaacaaacagtgagtgatatggaaatgtatgtccttactagtaattttaaaagtacaaaagagaatgccttaaaagtacacacacacacacacacacacacatacacacacatacatatttttttgagacagagtctcactctgttgccgaggctggagtgcagtagcgcaatcttaa

SEQ ID NO: 126419 - DNA, 201 bp, Homo sapiens
acgataaagcttattttctatacaacaaacagtgagtgatatggaaatgtatgtccttactagtaattttaaaagtacaaaagagaatgccttaaaagtacacacacacacacacacacacacatacacacacatacatatttttttgagacagagtctcactctgttgccgaggctggagtgcagtagcgcaatcttaac

SEQ ID NO: 126420 - DNA, 201 bp, Homo sapiens
ttgggaattaggatttcagcgtctgacttttgagggggcacaaacattcgaatcgtagcaaaccccacgccccttagcagccactcccccttcctgccccyggtcccgcctggcagccaggaatctgccttctccctccaaggattcaccttttctgaatatttcacatagacgggatcacgtaatatctgtgctgtgtct

SEQ ID NO: 126421 - DNA, 201 bp, Homo sapiens
ttgagttggagttttttgagcttactttgagtttgttggatgtgaacattaattttttaaaatcaaatgtgagaagtttatgccattagtttttcaaaaawttttttctgcttccttttgcttcgttttcttttgaaacttcctttatatatatgttggcatgcttgatggtatccctgtgtttctgaggttctttttatt

SEQ ID NO: 126422 - DNA, 201 bp, Homo sapiens
actcaagccatcctcccaccccagcttcccaaagtgctgggattacagccgccacacccagccaatttcatttaattcttagcaacatatcttcactcttkgtttatagatgagggaactgaggtaaagtgatttgaacagagtctccaaactagtaagtacttgactagggtttgaatcctagtttatgagaaataaagg

SEQ ID NO: 126423 - DNA, 201 bp, Homo sapiens
actgtcttgagacagcttcagaacaggcaacctgggtgtggccgccttgtcaaccagagataataaaaacacaggtaaacctctgcacctccatcgtcackccgaattataacaacagcacatatttgttgaagtcttactatgcactaggcacagtgctgagtgcccatgatgcagaggggaatttgagagtgtcagtca

SEQ ID NO: 126424 - DNA, 201 bp, Homo sapiens
tcccagacatggctcccggagtggacttgcaagttggcagttggctggttggtggcccgtaaggcaaaatatcgtctcatttaatgctcatagcaatgctrtagggaagctgatgattatcctccttttaccaaagagctgacgctgagcaaggctgaacaggtggctgtggtcccatagccggggtcggacacgagtggt

SEQ ID NO: 126425 - DNA, 201 bp, Homo sapiens
gtctttccctttttcggatgtccctgtttacctgaatcaactcatttaatcctcacaacagccctgtgctatgatatgaccatcatatcacagcattttckttttctttttcttttttttttttgagacagggtctcattctgtcacccaggctagagtgcagtggcgtgatctcggctatctgcaacctctgcctcccgg

SEQ ID NO: 126426 - DNA, 201 bp, Homo sapiens
tctactaacaatacaaaattagccgggcatggtggcgggcacctgtagtcccagctactcgggaggctgaagcaggagaattgcttgaacccgggaggcgkagcttgcagtgagccgagattgtgccactgcactccagcctgggtgacagagcgagagtccgtctcaaaaaaaaaaaaagaaaaaaatccatttaatcag

SEQ ID NO: 126427 - DNA, 201 bp, Homo sapiens
gcatggtggcgggcacctgtagtcccagctactcgggaggctgaagcaggagaattgcttgaacccgggaggcggagcttgcagtgagccgagattgtgcyactgcactccagcctgggtgacagagcgagagtccgtctcaaaaaaaaaaaaagaaaaaaatccatttaatcagagccatacttgttgattactacaggt

SEQ ID NO: 126428 - DNA, 201 bp, Homo sapiens
gtccgtcgtaaactatgacctattcacattttcactttactctcaactttccaggagtgagtcctctccagagagcaagacggagctgcgtttcaacagayggtgctttcaatctgtgctgactgtaacttttatccatcataggtttgaagacatacctgatatcgggtcagagagccaaggagtctcgctgcagctgtg

SEQ ID NO: 126429 - DNA, 201 bp, Homo sapiens
actttactctcaactttccaggagtgagtcctctccagagagcaagacggagctgcgtttcaacagacggtgctttcaatctgtgctgactgtaacttttrtccatcataggtttgaagacatacctgatatcgggtcagagagccaaggagtctcgctgcagctgtgcagaggccttgctttctggctttgaggtcattg

SEQ ID NO: 126430 - DNA, 201 bp, Homo sapiens
aaaacaagaaatagcatgtaaacatgtctgcattaccgaacatcagtagtgtttaggatagaagaggaacacattgagtttctaagtagaaaaaaaatctkttcatccttaaaggcaaaggaaggggcaaggtccctccttgaacaactgggtgaggttggacgcctccagctgtatttgctaagttgggcttggaagtat

SEQ ID NO: 126431 - DNA, 201 bp, Homo sapiens
ggccagacacagtggctcatgcctgtaatcccagcactttggaaggccgaggcgggcggatcacctgaggtcgggagtttgagaccaacctggccaacatrgtgaaaccccatctctactaaaaatacaaaaattagccgggcttggtggcgtgcacctgtagtcccagctactcgggaaattgagacaggagaatcactt

SEQ ID NO: 126432 - DNA, 201 bp, Homo sapiens
aatattggctgaatgaatgaatgaataaatgaatgaatattacaggccagacacagtggctcatgcctgtaatcccagcactttggaaggccgaggcgggyggatcacctgaggtcgggagtttgagaccaacctggccaacatggtgaaaccccatctctactaaaaatacaaaaattagccgggcttggtggcgtgcac

SEQ ID NO: 126433 - DNA, 201 bp, Homo sapiens; identical to SEQ ID NO: 21463

SEQ ID NO: 126434 - DNA, 201 bp, Homo sapiens; identical to SEQ ID NO: 21464

SEQ ID NO: 126435 - DNA, 201 bp, Homo sapiens; identical to SEQ ID NO: 21466

SEQ ID NO: 126436 - DNA, 201 bp, Homo sapiens
gctgggattactcaactctccttcttagagtcctttgtgaccttgggttccctgggccttggttttctcatctctgaagtggggctgggagcaactcttgsagcactgggttggaacgtgctggccacagtgctcacacatcgagaacacgccgtaaatgctccccgggcctccgcttcctggtgtcgtcatccttattca

SEQ ID NO: 126437 - DNA, 201 bp, Homo sapiens
tccagcctggatgacagagtgagactcgtctcaaaaacaaaacaaaacacaacaaaacattactttgaagccacagcattttgcacaggtaggaaaactgstgggcctggagatcttctataaatatgttgagagctgatgttgaagagattattgaagaatcctgatgtcacagaattttctatagacaacctccttgcg

SEQ ID NO: 126438 - DNA, 201 bp, Homo sapiens
cctcctgggttcaagcgattcttctgcctcgacctcccaagtagctgggattacaggtgcccaccaccacgcctggctaatttttgtatttttagtagagrtggggtttcactatgttggccaggctggtctcgaactcttgacctgaagcgatctgcccaccttggcctcccaaagtgctgggattactcaactctcctt

SEQ ID NO: 126439 - DNA, 201 bp, Homo sapiens; identical to SEQ ID NO: 21468

SEQ ID NO: 126440 - DNA, 201 bp, Homo sapiens
tggatcagtcacttccccctgcaacgtcattgtaggcatgattacatcttggagtgttctctcaacaagagtcagtgtagcatggggttccgggcctgagmtctggtgtcacattgcttggagttcaaatttcaattcttcttcttttttttttttttttcttggagacaagagtttctctgtttcccaggctggagtgca

SEQ ID NO: 126441 - DNA, 201 bp, Homo sapiens
gagccaccatgcccagctgcgtagtttttcttgaataaacatttttcaattttttgtatgtctttggttgatttccaaccctgtggtggttgtttttgacmgacttgtctagttttgttgttactttttgaggagaggttttgccaagcttctcacttcattattccagaagttcttcccctctccccaggtcatcttttt

SEQ ID NO: 126442 - DNA, 201 bp, Homo sapiens; identical to SEQ ID NO: 21470

SEQ ID NO: 126443 - DNA, 201 bp, Homo sapiens
acaggaaatcaccgtggtttatgtcagtgcctttgggcatgtgctctcctccaaatcaagtcaacccctccagcagtggagccaccaattttcacagctcrtcccaccctggtagatgtagcagcatgggtgagctgaggggaaggaggggagcccctcaagccaaagcatcacagaacaccaccgctctaactcaagatt

SEQ ID NO: 126444 - DNA, 201 bp, Homo sapiens
gacttcagggactttaccactgcccgtgatagctcccttattctctgtatcttccggctaggtttttggctggtctcctgatctgttggttgccacaaccrgcattgcaggctcagggtggctgagatgttgaccttctgtacatttcctgttgtttacaggaaatcaccgtggtttatgtcagtgcctttgggcatgtgc

SEQ ID NO: 126445 - DNA, 201 bp, Homo sapiens
ctcaataaataaataaatacataaaaataaagccatgggcctcgatgggaggctgtacattgacgtgcgacattcgacttctgccattatttcagatttcrcacctgcccttctggcaacatggtgttgctgtgaggatcttgagaggagatgaatgatgctttccaagtagtaagtattattccattagggaaaatagga

SEQ ID NO: 126446 - DNA, 201 bp, Homo sapiens
agttcgagatcagcctggccaacatggcgaaaccccgcctctactaaaaatacaaaaattagccaggtgtggtggctcatgcctgtaatcccagctgttcrggaggctgaggcagaattgcttaaatccgggaggtggaggttgcagtgagccaaaatagcgccattgccctgcagcctgggtgacagagtgagactccgt

SEQ ID NO: 126447 - DNA, 201 bp, Homo sapiens
aaaaaaaaaaccaaaaaccaaaacaaaacaaaacaaaaaatcccaaaccaaaacgtagatgacatgtttgcagactgaggagtcctcccccagcccagcawaccccatccctcaggaccgctgtggaacattccagaaggcccaactccaggaattcccttagtaggagccttgctttcaacagtgcctcctggagctatg

SEQ ID NO: 126448 - DNA, 201 bp, Homo sapiens
gatcaggcctcggacaaggtctaacatctagaatggataaagagcacacatagcctgataataaaaagacagctcattttaaaggggacagaggctccgartagaccacaggtgcgtcttgggaaagctgggccctcgggaccagcctggctccctgagggggctcgcagcggctctgtattcctgagcaggcaggtggcc

SEQ ID NO: 126449 - DNA, 201 bp, Homo sapiens
accagtgggacctcctcttctgggtgagcttggcaaccactcttttaggaattccagtttgtaatgccttccgggtgagccctgtgagtcgcttgctcttagtagtgtcctttgctgccccagccttctgcttccctgtatttaaaacctttctgagccaggattacgatttcctgataccatgactgacccttggtcgtt

SEQ ID NO: 126450 - DNA, 201 bp, Homo sapiens
atgcatgtttctatgaggaaataatgccacccaagaaacggtttgtgcatcttcgagttccttggaagctttaatttgcattcctacaattgagagcaatrtagaatttctttctgtatcttcccactaatgcctgttgaggggcaggtgtctgtgaatgtaggtaaatcgtgataaaaaaacaataaaaaggccgggcgt

SEQ ID NO: 126451 - DNA, 201 bp, Homo sapiens
cattcgagccacagccccttccttcctgaggcttctcaagatgccccctcctgtgcttcctggagcacccgtccttccttgtcctgggacttggcacgccygaccatagtcatacctgcttgtcctcttggcccctcttcaggtaatgggctccacacaggtcacgatctcggccaaaatagtcacacatcgtccctgcac

SEQ ID NO: 126452 - DNA, 201 bp, Homo sapiens
acctgctggaggttgaagatgtgagcacgaagaaaccatggtcttgtctcgggagcctcccagactttcccctttacggctggtgagaacgtgaaatggtwcacttgctgcagaagacagtctggcaggtccccaaaaggttaagcacggagctaccgtagggcccagccatgccactcctgggtttgtgcctaagaggtg

SEQ ID NO: 126453 - DNA, 201 bp, Homo sapiens
agcaggagaattgcttgaacccgggaggcggagcttgcagtgagccgagattgtgccactgcactccagcctgggtgacagagcgagagtccgtctcaaamaaaaaaaaagaaaaaaatccatttaatcagagccatacttgttgattactacaggtgcttcccgtatctaatacctccagcaagaaggtttgcgaaatgg

SEQ ID NO: 126454 - DNA, 201 bp, Homo sapiens
tccagtgatacgcagatcaaacactgcgtcgataatcacagctaatgtcgagtgcttgctgcgtgcgtgttgatcatttaagcctcacatgcgagccgtgyggtaagccctcctcctgccctcgccttagagatgaggaaactgagaggcagcgatgaagcagctcactagccctgctcctgtcctccccttagagatgag

SEQ ID NO: 126455 - DNA, 201 bp, Homo sapiens
gtggcgtgatctctgctcattgcaagctccgcctcccgggttcacgccattctcccgcctcagtctcccgagtagctgggactacaggcgcccgccaccaygcccggctaatttttgtatttttagtagagacggggtttcactgtgttaaccaggatggtctcaatcccctgacctcgtgatctgcctgcctcagcctcc

SEQ ID NO: 126456 - DNA, 201 bp, Homo sapiens
agattccagtgatacgcagatcaaacactgcgtcgataatcacagctaatgtcgagtgcttgctgcgtgcgtgttgatcatttaagcctcacatgcgagcygtgcggtaagccctcctcctgccctcgccttagagatgaggaaactgagaggcagcgatgaagcagctcactagccctgctcctgtcctccccttagaga

SEQ ID NO: 126457 - DNA, 201 bp, Homo sapiens
ggcgcccgccaccacgcccggctaatttttgtatttttagtagagacggggtttcactgtgttaaccaggatggtctcaatcccctgacctcgtgatctgyctgcctcagcctcccaaagtgttgggattacaggtgagagccaccatgcctggccaggttttttcgtttttgtttttgttttttttgagatggaatctca

SEQ ID NO: 126458 - DNA, 201 bp, Homo sapiens
tgtgttaaccaggatggtctcaatcccctgacctcgtgatctgcctgcctcagcctcccaaagtgttgggattacaggtgagagccaccatgcctggccargttttttcgtttttgtttttgttttttttgagatggaatctcactctgttgccccggctggagtgcaatggcgtgatcatggctcactgaaacctctgcc

SEQ ID NO: 126459 - DNA, 201 bp, Homo sapiens
attgcaagggcttacaatagtccaccctcaactgatgccaccacacccccaccccacacacaaatacaggaacatcctgggaagaaacactgcacactgtktccagacagacagagtaagcacttgtatacttcatatgtttgaaacccagagcagatcatcttaacagcctcttcctctgtatgatgaaattatttttaa

SEQ ID NO: 126460 - DNA, 201 bp, Homo sapiens
gaaacccagagcagatcatcttaacagcctcttcctctgtatgatgaaattatttttaagtactagttactgaatgaggcaaacaattatgctagaataaraatacagacaatgaaaatagtcttttatgggccagatgccgtggcttgtgcctgtaatcccagcatttgaggtcaggatctcaagaccagcctggccaac

SEQ ID NO: 126461 - DNA, 201 bp, Homo sapiens
ctttagttggatcccttccaccaactgcatacttggcagcaattgagaataagtcacttacaagggaaaaatacttgactgccatagggctcattttaggrctactggaagaaaaagactgcaacccctgcattcttacaaagctaagatatttacctggtagagcaaatgaagatcttcaaggacatacttagcaatata

SEQ ID NO: 126462 - DNA, 201 bp, Homo sapiens
ccaccaactgcatacttggcagcaattgagaataagtcacttacaagggaaaaatacttgactgccatagggctcattttagggctactggaagaaaaagrctgcaacccctgcattcttacaaagctaagatatttacctggtagagcaaatgaagatcttcaaggacatacttagcaatatatcacctatatactcctt

SEQ ID NO: 126463 - DNA, 201 bp, Homo sapiens
tgccttgggagaggggcagtaacgtgctgtgcagaacgagagatgatttacagcaaaaggaagtgagacagaattggaggaaggatagttgaacagggacmgtaaaagaagggcaggaccagggaggaaaagatgagtaaataagtttggctaaaggttggttaatgtaaagggaaacggtgcggaaaggttaaggccaaa

SEQ ID NO: 126464 - DNA, 201 bp, Homo sapiens
caggtttttgtgtggatgtcagttttcattttaattgggtaaatatctaggagcatgagtacaggatcatgctgtaaaagtatgtatagtttgtaagaaastgccaaaatgtcttccaaagcacctgtaccactttccatttttgttagaaatgaatcagagttcctgttgctctacaaccttgccaggatttggtattgt

SEQ ID NO: 126465 - DNA, 201 bp, Homo sapiens
attaataggtaaataatattaccttagtgttgtccttgtttacaattccctaatgacatattatgcagagcttcttttcatatgcttactaatcatctctrtatcttctttgatgatgtgttgtctctttatactttttgcccatttcttaattgagttgttcattttcctcattgttgagtagaaaggttttttttttgt

SEQ ID NO: 126466 - DNA, 201 bp, Homo sapiens
tagataatatcatgtaagtaatttttgtagtgggctcaataaaaagttgaattaagtatcatattcttggatataatagggagatgcaatttatctttacwtgacatttaatttttgttttattaaacttctagtaatttctgaacatatcagatttaatttgttggcatggttataaacctcagtttataataatcttaa

SEQ ID NO: 126467 - DNA, 201 bp, Homo sapiens
acatatcagatttaatttgttggcatggttataaacctcagtttataataatcttaaattatattttggattttgacagtttacaagaatatctggaaagrcaacatttagctcagctctgtgacattgaagaggatgcagctaatgttgctaagttcatggatgctttcttccccgattttaaaaaaatgaaaagcatga

SEQ ID NO: 126468 - DNA, 201 bp, Homo sapiens
caaaggttcataaccagaatgtaataggaaagtactgggccatccaatagtttgaaaccatccaaaatgaagggaagtctacaaacaactgtcctggactmttcaacatatcaatatcatgaaagacaaaagaggttgagtcgctgttggagataaaagcaaattaaggagatgggacaactacatgcaatatataatcct

SEQ ID NO: 126469 - DNA, 201 bp, Homo sapiens
gtatgccctcatgatagtatattatgtattgtgtacataaccagtaatctaccagtttaaaacttattatgtaactgtttttatttagatgatgttttgcrtattattaaagatgaagacttcaaaatactggagcaaagacaagtagtattatcggaaaaagaagcacaagcactgtgcaaggaatatgaaaatgaagac

SEQ ID NO: 126470 - DNA, 201 bp, Homo sapiens
acacctcctatgtgatggagcaagtaacggaccaagaaggacgcaggctcatgaagatagttttcctgccaaaggttcataaccagaatgtaataggaaastactgggccatccaatagtttgaaaccatccaaaatgaagggaagtctacaaacaactgtcctggactattcaacatatcaatatcatgaaagacaaaag

SEQ ID NO: 126471 - DNA, 201 bp, Homo sapiens
ccagacttttaattggttttattactgatttaaaattgcacttgcactttagttggatcccttccaccaactgcatacttggcagcaattgagaataagtyacttacaagggaaaaatacttgactgccatagggctcattttagggctactggaagaaaaagactgcaacccctgcattcttacaaagctaagatattta

SEQ ID NO: 126472 - DNA, 201 bp, Homo sapiens
cactaatgttgattaggagtgctggtacatggcgctgataaaaagcaaccagacttttaattggttttattactgatttaaaattgcacttgcactttagktggatcccttccaccaactgcatacttggcagcaattgagaataagtcacttacaagggaaaaatacttgactgccatagggctcattttagggctactg

SEQ ID NO: 126473 - DNA, 201 bp, Homo sapiens
aatcatagtggcttttcttgggtgcctacctctgttggctcctagtgatgccatatttttaggaagtgggagatcctaatatcattaattccaagttgtaygcaggataaaggaactcataaggtaaatcctgctggcaaggagctttttaaacagtagcagttactttcagggttttaagggaaaataataatgagtggg

SEQ ID NO: 126474 - DNA, 201 bp, Homo sapiens
cctcatgatagtatattatgtattgtgtacataaccagtaatctaccagtttaaaacttattatgtaactgtttttatttagatgatgttttgcgtattaytaaagatgaagacttcaaaatactggagcaaagacaagtagtattatcggaaaaagaagcacaagcactgtgcaaggaatatgaaaatgaagactatttt

SEQ ID NO: 126475 - DNA, 201 bp, Homo sapiens
tatgctcttgaaaacatatcaacggaaaaaaatcacagacctctgttaaaagattattttacatgttacatgtttttgatctatttaacaatatgcatttrtattgcctatacataattagctactgagctacacttcttattacctcttctttgttttctgttctaatagtggtccatctctagcccttgttttattgag

SEQ ID NO: 126476 - DNA, 201 bp, Homo sapiens
tgcaatactggaaacaattactgggaccaagaactgttgaagaagccattgaatattttccagagaggtaggattcataccatgggtcactatctgttttygtgggctccattttaaacacctttttagatgtagagtattggaaccacagctctagtccaagggagcttctcaggaaagctacctttcctggggacggag

SEQ ID NO: 126477 - DNA, 201 bp, Homo sapiens
ggtgtggttccattagctacattgctcagagtcacacaggtagtaactggcagagtcttctcattcattcacttattctgttatgtgttgattcattcatstagtatttattaaagacctactatatgccaaatcctagagatacaaagatggggaagaattagatgatgacctctgagctcactttcagtttaagtcttt

SEQ ID NO: 126478 - DNA, 201 bp, Homo sapiens
acagaggggaagctttcccctgacttctataatgcttgttcttattttcacagctcttgctctggagggagggcctgataggcactgtcacttccatgtgrcatctttcaagtaggtccagaatctaaaggaataaggacaaaaaactctcatgcgtaatttattcagttgttcactttcactctttattgccccctctcc

SEQ ID NO: 126479 - DNA, 201 bp, Homo sapiens
acaaaaatagtgaaataaggaagaatgatttctcagacaagcacaaaaagctcttgcaagagaactcttcaaaacccattccaaaatgatacaaaattaarttagtgttacatttttaaaagaaaattcatgtaatcctaacacagaaacccttaattaaaagtaagcctttatgttgggagtgtaaattagttcaaccat

SEQ ID NO: 126480 - DNA, 201 bp, Homo sapiens
tgtaagttattccttaatgggtgcagagttttcctttaagttgacaaaatattttggaaattgtttgtggtgataattgcaaaccatgcaaatgtcattartaacattgatttgtatactcaaatggttgcaatggcaaatttaatacacacaacccctgacatattgccaggataaaaaaaatagtaacaaaaatagtga

SEQ ID NO: 126481 - DNA, 201 bp, Homo sapiens
aggaacctttgtccttctggtactttgctctttttttttgtttttaaattgactttataagtgtaagtatatagcaattatttatttgaaatttgtaagarcataaaagctatttggatgaattaaaaaatctggtactttgctctttaataggatattgattattggtttgagaaatatttttttttttagttaaggaaa

SEQ ID NO: 126482 - DNA, 201 bp, Homo sapiens
tgggttggacaaaacattgccccccttcttcttcccagacaggcagggaatccctcttcttccttttgctgaatcagctggagaagaaagcccagcaggakgcctgctagcctcagcctcgggccctaccagggtcctaggtactggaatggaacttcgccgaggtcaccgctcaaacggccacaacgagggagccgattt

SEQ ID NO: 126483 - DNA, 201 bp, Homo sapiens
cttgaacccaggagacggaggttgcagtgagcccagattgtgccactgcactccagtctggcaacagagtgagactatgtctcaaaaaaaaaaacaaaaamaaaagaacaatgaataagacctagtatttgctagcacaaacaggtgactgcagtcaaaaaatctaaattgtacattttaaaataactaaaagagtataat

SEQ ID NO: 126484 - DNA, 201 bp, Homo sapiens
atgacctctgagctcactttcagtttaagtctttatgacagagtgaaggtgacatttccaaccacctctactatattgtattcctctgtccatagaaaatrtctattctcttctcagtagcctctctatttgtccctatacatgtcatagctatagggagcttaattttttcctttatgatattctcatttaaattaaaca

SEQ ID NO: 126485 - DNA, 201 bp, Homo sapiens
aaagcccagcaggatgcctgctagcctcagcctcgggccctaccagggtcctaggtactggaatggaacttcgccgaggtcaccgctcaaacggccacaaygagggagccgatttagatcctctgggcctgttccttccttttctttaaacgtcccagtctagcttagaggaggacctgttttgtgtaaggcttgccggag

SEQ ID NO: 126486 - DNA, 201 bp, Homo sapiens
aaacttttaaaatctgggataacttgagtatgtgaatctactacttaactgtaaatgttattaaagctaattaaggattaattatttctgattacatttarcatatgaattaagacgtactcttaagtgtaagagacacattagattttaaaaatttaatatggaaaaagaaagtgaaatatgccatcaataattttatac

SEQ ID NO: 126487 - DNA, 201 bp, Homo sapiens
tatttattattatattcatcatggaatttagagtgaagcaaagaaactcaatgccgtcttgcaaataaggcatactcaccaatattttttcaatttatccrttggacggtgaggaccctctctacacctggtttataattcctttgtgatcacctaatgagagagtgcaaattagggaaggcaatctccaggattctcaag

SEQ ID NO: 126488 - DNA, 201 bp, Homo sapiens
ttgtaaaattaccatgaaattgtttgccaatgacagtaattacacaatgtttgccttatcttttcttgactatttataaattttataatttggctgctagsagcttattatggattgaagggattagatgatgacacactggattcatcagggaaaggaaaagtaagatggcgtttatctttactaaggaaatgatcggag

SEQ ID NO: 126489 - DNA, 201 bp, Homo sapiens
cagtaaagattaataagggtttgggttagctcatttcatttctcagctcagattttctcttggttttgtattaatataattaggtagtttcttaataggtmgggcctttgcagggggtgaatctgtctcactacctacagtactctctgtttgtcttgaacgttaacctgagccacttgctgtctttatctaagaactgta

SEQ ID NO: 126490 - DNA, 201 bp, Homo sapiens
tttgtgttcatatatgtttagatacacaaataacactgtattacagttgtctacagtattcagtatagtaacatgctatacaggtttatagcccaggagcyataggctgaaccagatagcctaggtgtgtaagaggctattctatctaggtttctgtaagtatattctaggatgtttgcactacaatgaagtaacctaatg

SEQ ID NO: 126491 - DNA, 201 bp, Homo sapiens
tctgatacataattatttgcattataaaagtggtaaatgttcattatagaaactttgaaaaatgcaaaaattaattaaaacatttcatctaatctcattcmtgaaaagacattctgctaacattcatggttcatcttttttctatttccttacctccctccctatcttcttttctctctctccttctgtctctcctcgctc

SEQ ID NO: 126492 - DNA, 201 bp, Homo sapiens
ggctgagggaaggtttgttgggtagggtgtgttaagtttaaaaagataccagattttatcctagaaattttgagccattcaaaaaacaaaaagcgttctaygaagcactcattaatgtgacgagtgaagtcatcattccatggggctattgtttaggtagtaaacctccattacaaccaactttgagaagctccaattgtc

SEQ ID NO: 126493 - DNA, 201 bp, Homo sapiens
ttatacaaattgtgatttgaattataagttcagtggggaattggtatgatcatcatttgagactcaaattaatgacatggaaagtcagatgcaagaaatakctgaaagtacacacaaaaaattagacaggatgagagcaaaagtctgcaatctggataatatgctgaggggatcaattgctaatgagaaactgcacagaga

SEQ ID NO: 126494 - DNA, 201 bp, Homo sapiens
attttctggctgagactatccagaatgtcccttgttggtccttcttgacttattaatgaatcatagtggcttttcttgggtgcctacctctgttggctccyagtgatgccatatttttaggaagtgggagatcctaatatcattaattccaagttgtacgcaggataaaggaactcataaggtaaatcctgctggcaagga

SEQ ID NO: 126495 - DNA, 201 bp, Homo sapiens
ggatgctgcatccaggctggagggatggagacaacagggcaagcaacgcacccattggttcacacagcttggtcttgagctgtggtgtcttctaccatgayataaaaagcctcatgcagtccctctactcagctcctttccacttctctgctttgaatggccaaagtttctttctttttatctttatttgttctaaacaaa

SEQ ID NO: 126496 - DNA, 201 bp, Homo sapiens
ttttctatttccttacctccctccctatcttcttttctctctctccttctgtctctcctcgctccctttctttcattctttcttccttcctactttccttyctccctttccttcccttcccttccctttcctttcctttcttttcctttcctttccttccttccttcctgtttctctaggtcttcacattagatatagagg

SEQ ID NO: 126497 - DNA, 201 bp, Homo sapiens
ttccttacctccctccctatcttcttttctctctctccttctgtctctcctcgctccctttctttcattctttcttccttcctactttcctttctcccttyccttcccttcccttccctttcctttcctttcttttcctttcctttccttccttccttcctgtttctctaggtcttcacattagatatagaggctgcctca

SEQ ID NO: 126498 - DNA, 201 bp, Homo sapiens
cacacacacatgcacacacacacacgtgtgtataaaatacgtataagaaacctctttaattgcatatcttctcttttttcagttcctgacaatttgtcaakgagtttaggaaggcagaatttataaagttaacaaaatttaatggaatatatgtgctatttagatataaataataagcagaagcctaggactgtaccatga

SEQ ID NO: 126499 - DNA, 201 bp, Homo sapiens
cttcctggagaggtgggacaacttgaagcagggttgcttccaggtcttaggtagataagagacaatcaatagcattcttctgagtctctgatgaggctttyactgaatacacgatttacatgtgagatgacatagaggaatagtcacttatgccttagtcttgcttagtgaatctgcgtttttacataaacaactgagcag

SEQ ID NO: 126500 - DNA, 201 bp, Homo sapiens
ctagaatttccactttgattttgagagaacataggaccagggctagaagttgtccgcagtcacaaaactagtgtttcgctgggtcctgaacccagggagtmtctgcttttaactgctgctttccaaaactctcttttacacagagttcataattatgtgaacatcattatcgatttactatgagttacatgtcttttctat

SEQ ID NO: 126501 - DNA, 201 bp, Homo sapiens
atcaaatatttgtttttcttagagcagatcctgaagatagttaaggaggctggatttgatctgacacaggtgaagaaaatgttcctaactcctgagcaaayagagaaaatttatccaaaagtaacaggaaaagacttttataaagatttattggaaatgttatctgtgtaagtttctgatacataattatttgcattataa

SEQ ID NO: 126502 - DNA, 201 bp, Homo sapiens
tcccagtttctcagttggttcacctttgtctctagaatgtagccctcaaaacttaggctgttggtgagattttgacaacatttgctttgtttaattccctygatggtactctgattcttcagggagaagagttcagattggctttatccttcaatccatatctagcaagaaattccttggcatttgtagtatgaaggtgaa

SEQ ID NO: 126503 - DNA, 201 bp, Homo sapiens
acaacacatacttttataaccaccacatagaaattacaggctaacatttattgtttccttaattccaggccttgtgatgagctgtacacactttatttcakttgactcttataataataactctgtgaagtagttttactagaatttccactttgattttgagagaacataggaccagggctagaagttgtccgcagtcac

SEQ ID NO: 126504 - DNA, 201 bp, Homo sapiens
tttctattgatttttattctgggttgaaggctctgtcaccagcttcacaagaatgctttaatcttttctttacctaagggcctttctctcaggctgccccsaccccaactgccccactcctgccacctccctaccccaccaactcttttttgtctggggatataatataataaaggcagtgctgtgtattagaaagtgtac

SEQ ID NO: 126505 - DNA, 201 bp, Homo sapiens
ccgctgcttcgccaacatacttaattgttgcctgagtttccttatctgttgaatgggaataataatagtatctatctaataggcttgttggcagggctacrtaattgatgtgttgaaagtacctagaacagtgcatgacagatattaaacacttgataaatgttagctatgattattcacatctttttttacatgtgttga

SEQ ID NO: 126506 - DNA, 201 bp, Homo sapiens
caactaaaataagctcctggtgtccctgttggtgtccatatcatggagatgccaatgatagtggctctgaaaaaaatcttcggtagaaatagtggctaccragcaaaactggatggtctgattgtgttttgttgacatgaagacctctttatgtcaggccctccaagagcccctgcatcagtcctctggaagtgaatatcc

SEQ ID NO: 126507 - DNA, 201 bp, Homo sapiens
ctttcctttcctttcttttcctttcctttccttccttccttcctgtttctctaggtcttcacattagatatagaggctgcctcagttcaaaccgctgcttygccaacatacttaattgttgcctgagtttccttatctgttgaatgggaataataatagtatctatctaataggcttgttggcagggctacataattgatg

SEQ ID NO: 126508 - DNA, 201 bp, Homo sapiens
tttatgtctttacaaggctcgatctattcatgcatccttctgtaaatgatcctactctaccagcatcctatgtaaattttaaaaaattatagttcttatamtagattgtatattagtctgtcttcatgctgctgataaagatgtatctgagactgggcaatttacaaaagagagaggtttattggacttacagttccacat

SEQ ID NO: 126509 - DNA, 201 bp, Homo sapiens
ctcctgagcaaatagagaaaatttatccaaaagtaacaggaaaagacttttataaagatttattggaaatgttatctgtgtaagtttctgatacataattrtttgcattataaaagtggtaaatgttcattatagaaactttgaaaaatgcaaaaattaattaaaacatttcatctaatctcattcatgaaaagacattct

SEQ ID NO: 126510 - DNA, 201 bp, Homo sapiens
tcaaatatttgtttttcttagagcagatcctgaagatagttaaggaggctggatttgatctgacacaggtgaagaaaatgttcctaactcctgagcaaatwgagaaaatttatccaaaagtaacaggaaaagacttttataaagatttattggaaatgttatctgtgtaagtttctgatacataattatttgcattataaa

SEQ ID NO: 126511 - DNA, 201 bp, Homo sapiens
tgaaatgccgtagtaagatacacagctatcaatgggcaacaattaactgatcattagaaatttacattgctaattgccagatccttcattatccagacttygtgccaagaaaatgaaattctgtctttttctaaatttttttccagaggaattatacagtattgctattatcaaaccggatgctgtgattagtaaaaaagt

SEQ ID NO: 126512 - DNA, 201 bp, Homo sapiens
taacatactgaagttctgaatgtcaatttggtgctttggaattttaatttcgtttggcagagttttgccatgttaaaccacaatatgcaaattaaactatsattttccttagttatttcagtctacttgagtatggaggaaaagtgaagcaatctgcaatattatcaaatatttgtttttcttagagcagatcctgaagat

SEQ ID NO: 126513 - DNA, 201 bp, Homo sapiens
aaagaagaggccgttttaccagaaagctcccagtttctcagttggttcacctttgtctctagaatgtagccctcaaaacttaggctgttggtgagattttsacaacatttgctttgtttaattccctcgatggtactctgattcttcagggagaagagttcagattggctttatccttcaatccatatctagcaagaaatt

SEQ ID NO: 126514 - DNA, 201 bp, Homo sapiens
tccttcttctacttacttggccaacttcatctccagtatattttcacccagtcacttcttcctgccctctgcacttggcatacattactcactctgcctgmaatgtcctttccctacttgtccacttggtgatcacaccttatttttaccatgcttaacacaaaggtcagtgtctctgtgaagtcatccctgacctctcca

SEQ ID NO: 126515 - DNA, 201 bp, Homo sapiens
tttcatctaatctcattcatgaaaagacattctgctaacattcatggttcatcttttttctatttccttacctccctccctatcttcttttctctctctcmttctgtctctcctcgctccctttctttcattctttcttccttcctactttcctttctccctttccttcccttcccttccctttcctttcctttcttttcc

SEQ ID NO: 126516 - DNA, 201 bp, Homo sapiens
tatttaattctactagatctgagaatgaatatgatttttatcccattcttataacgtcgaggctatttaccatgactgtgaaagtcagaaaagtgtaatartggacacatctattgttctgtttcctttcacctgaccacatgttcagtgtgtgtcctttagaataagggctacaaaagctgtttactgggtatcattgag

SEQ ID NO: 126517 - DNA, 201 bp, Homo sapiens
tctactagatctgagaatgaatatgatttttatcccattcttataacgtcgaggctatttaccatgactgtgaaagtcagaaaagtgtaataatggacacrtctattgttctgtttcctttcacctgaccacatgttcagtgtgtgtcctttagaataagggctacaaaagctgtttactgggtatcattgagtagtgccc

SEQ ID NO: 126518 - DNA, 201 bp, Homo sapiens
tttgactacctccatagttttcccttttccagaatgtcatatagttagaatcacatagtgtggagccttttcagattggcttcttttacttagtgatatgygccatgtcttttaatgatttgatagctcatttctttttagtgtcaaataatacttcattatctggatataccagggtttatttatccattcacctgctga

SEQ ID NO: 126519 - DNA, 201 bp, Homo sapiens
ccttaaattaaaacctaagaaggtatttctgcaaactttcaaaatttcgtatgagaataaagtgcattgtatgccctcatgatagtatattatgtattgtrtacataaccagtaatctaccagtttaaaacttattatgtaactgtttttatttagatgatgttttgcgtattattaaagatgaagacttcaaaatactgg

SEQ ID NO: 126520 - DNA, 201 bp, Homo sapiens
gccaaatcctagagatacaaagatggggaagaattagatgatgacctctgagctcactttcagtttaagtctttatgacagagtgaaggtgacatttccarccacctctactatattgtattcctctgtccatagaaaatatctattctcttctcagtagcctctctatttgtccctatacatgtcatagctatagggagc

SEQ ID NO: 126521 - DNA, 201 bp, Homo sapiens
gtttaaagcctagacactcacctcttattatttttctattcaagagagtaagtggctgtctacagtagttaaatcctgttgtcctggtgaaggaattgactttttttttttgtcttctgaaataaggactttgtaaggttttcattcctttaattttttaaaaaatgtctttatatagatgttatttttagagcagtttta

SEQ ID NO: 126522 - DNA, 201 bp, Homo sapiens
tttcctattaaaattgccctgagctgaatggtcagtatacaatttttttctgctgtgtgcctttttaaaagaggaacattaaatattttatatatatatakagaggcatataaaaatttagttaatagtgtttattatagttactgttatattattattaaattatttaatccttaataatttatgtattataatataaac

SEQ ID NO: 126523 - DNA, 201 bp, Homo sapiens
ttagttaatagtgtttattatagttactgttatattattattaaattatttaatccttaataatttatgtattataatataaacattataattataatacmtgaattacttctaaatagagttgacccttaccaatgctggagttaggggtgctaaccccccacgtagtaaaaaattcatatatgacttttgactccacca

SEQ ID NO: 126524 - DNA, 201 bp, Homo sapiens
cataaacccaactgcaatgcataaaatggttgagttagcctatctcttcttccttaagtcttggtgctcacttctcttctttactaaataacgaactttgyggcattcccctccccccaccaaatcccaagtttagggcactttcatctgcattaaaaacctgttcaggtagacatcttttctccttaattattttcttaa

SEQ ID NO: 126525 - DNA, 201 bp, Homo sapiens
ctctgtgatttgtgtgcaaaacttcaatatggaaactgataaatgctgaaagattagtgtatagcactgtcatttattttattaagtgcattctttctttycctagaactttgagaagataatacatatgttcacgtcaatatacaaccatttggcacagcttcctgggaggaataataagaaaaacatgctttggaggaa

SEQ ID NO: 126526 - DNA, 201 bp, Homo sapiens
gagttagcctatctcttcttccttaagtcttggtgctcacttctcttctttactaaataacgaactttgcggcattcccctccccccaccaaatcccaagtttagggcactttcatctgcattaaaaacctgttcaggtagacatcttttctccttaattattttcttaaaggcatctggaaacttttctgctgtctcttg

SEQ ID NO: 126527 - DNA, 201 bp, Homo sapiens
gtcttggtgctcacttctcttctttactaaataacgaactttgcggcattcccctccccccaccaaatcccaagtttagggcactttcatctgcattaaaracctgttcaggtagacatcttttctccttaattattttcttaaaggcatctggaaacttttctgctgtctcttggtcagcagcagctgcttctcctgata

SEQ ID NO: 126528 - DNA, 201 bp, Homo sapiens
ttttcagtaggctgggtcttctgaaagcaccgttctttgcaggggtccatctatggtcatgattctgaccaagtggaatgctgttgcagaatggagacgaytgatgggcccaacagacccagaagaagcaaaattactttcccctgactccatccgagcccagtttggaataagtaaattgaaaaacattgtccatggagc

SEQ ID NO: 126529 - DNA, 201 bp, Homo sapiens
atgcaaatataggaactgccatttgattctaagtaggaaccctctggtagttgaaatgccgtagtaagatacacagctatcaatgggcaacaattaactgwtcattagaaatttacattgctaattgccagatccttcattatccagacttcgtgccaagaaaatgaaattctgtctttttctaaatttttttccagagga

SEQ ID NO: 126530 - DNA, 201 bp, Homo sapiens
tctgctttgttcttattttatctcccatgctcttattaaattttaaggtttggctgggtgcggtagctcacgcctgtaatcccagcacttcgggaggccarggagggcagatcacttgaggtcaggagatggagaccagcctggccaacatggtgaaacaccgtctctactaaaaatacaaaaattagccgggcatggtgg

SEQ ID NO: 126531 - DNA, 201 bp, Homo sapiens
atgagagtagggtagaagggagggatgacttagtccagtttaagtgttagttcttgatgtgttctccaaatgaaagttcccctcctgttttcatttccctyatagaatggcaaaattatcgaaaagattcagggtgcaaatgcaccgcttgttaataaaaaagttattaatttgatcgatgaggagagaaaaattgcagca

SEQ ID NO: 126532 - DNA, 201 bp, Homo sapiens
cttcgttgttccttcattgtgtgggcagaagaggtggaggattttaggcgccacctggtcttgtccccactgcccaggtatagctgctgtctggagcaggrgcctcgagacgccgctcaagtctcacgggcagatgggttggacaaaacattgccccccttcttcttcccagacaggcagggaatccctcttcttcctttt

SEQ ID NO: 126533 - DNA, 201 bp, Homo sapiens
ctactcaatttttgtttcctctggattaaaaactcttgtaaatgtttcccctgcatgcaaatataggaactgccatttgattctaagtaggaaccctctgrtagttgaaatgccgtagtaagatacacagctatcaatgggcaacaattaactgatcattagaaatttacattgctaattgccagatccttcattatccag

SEQ ID NO: 126534 - DNA, 201 bp, Homo sapiens
aatcgcttgaacccaggaggcagagattgcagtgagccaaaatagcaccactgcactccagcctgggtgacagagcaagactcctactcaaaaaaaatttwaaaaaaatttaaaaaattaaggtttgctacccttttcatactgcacatatgcattattcctgccccttccattttaaaacatcccttattttatttaagt

SEQ ID NO: 126535 - DNA, 201 bp, Homo sapiens
ggtactggaatggaacttcgccgaggtcaccgctcaaacggccacaacgagggagccgatttagatcctctgggcctgttccttccttttctttaaacgtyccagtctagcttagaggaggacctgttttgtgtaaggcttgccggagcaaccagcacctttcctggaatacagtcttgtttgtggcttttcctttgttgt

SEQ ID NO: 126536 - DNA, 201 bp, Homo sapiens
gtatattagtctgtcttcatgctgctgataaagatgtatctgagactgggcaatttacaaaagagagaggtttattggacttacagttccacatggctggrgaggcatcacaatcatggcagaaggcaaggaggagcaagtcacatcttacgtggatggcagcaggcaaagagaacttgtgcaagaaatcttccattttta

SEQ ID NO: 126537 - DNA, 201 bp, Homo sapiens
tgtcttctctagtcttcctggaatgttactggaatagtaggaaggtctcagaggaagttactggagtcccattgagttgaacaccagaagtccagggtgtrcaatactatgaagtttaagcagagaactgactgactctcaagagcttttgtaatcttatagttaactagttctaggaaagaatgagttgctagaaatgtg

SEQ ID NO: 126538 - DNA, 201 bp, Homo sapiens
ccaggtgtgtaaatggtgcaacttttctgggaagcattttggcaatgcatgtgtatatatatttatatacataaaaatgaaacctttcggatagttcacaraatcacagaagcatattcatggcttccctgaaagttaggaacctttgtccttctggtactttgctctttttttttgtttttaaattgactttataagtgt

SEQ ID NO: 126539 - DNA, 201 bp, Homo sapiens
ctaagaactgtaagagacttttcttttccaaggtgcctcgttttaccaggaagtattgattttccaaaaactgcattagtcttcaaataccttgcttgcartgccacaatcacccactcctaccctaattcattcttcatggtgcaaaggaaattatcgttttagagcacagatctgaatatgttcttgcttagaatgctt

SEQ ID NO: 126540 - DNA, 201 bp, Homo sapiens
actgtaaaacgttaattaccatagctaaaagaggattcatgaggatgagagtagggtagaagggagggatgacttagtccagtttaagtgttagttcttgrtgtgttctccaaatgaaagttcccctcctgttttcatttcccttatagaatggcaaaattatcgaaaagattcagggtgcaaatgcaccgcttgttaata

SEQ ID NO: 126541 - DNA, 201 bp, Homo sapiens
cagtccataattctgggttttataatataacagctgatgaaggactctagaaatagaagaaaattcttctagattctaaattatctcaacaaaacctagargtttctgggtgtatgtggcaaaatggttcaaagatcaagaaggcagtattttgacagttgtattttgaggttcttatttgcagaaagggcataaatggag

SEQ ID NO: 126542 - DNA, 201 bp, Homo sapiens
ttgttgcctgtgcttttgaggtcttaccaaaaaaaatcactgccgagaccaatgctatgaagcatttcacctatattttcttctagtagttttgttgtttyaggtcttacaggaaaaaaatttagtagatgagataaactcacataatatgtttattttatgttaataatatgtttagtttaaaacatcttattattttaa

SEQ ID NO: 126543 - DNA, 201 bp, Homo sapiens
tgttcctttggcaaattcacccttctttattccacgattaaatattgactttatcaggctgtacgctctccttagaaaatttcctctacacacagtttcartcaccaccatctgtatatcaataaatcacgtttacatcttcagctgaatgctatgctttccactcgcagcatttccagttggggtctaggcatctcctat

SEQ ID NO: 126544 - DNA, 201 bp, Homo sapiens
cataattctgggttttataatataacagctgatgaaggactctagaaatagaagaaaattcttctagattctaaattatctcaacaaaacctagaagtttstgggtgtatgtggcaaaatggttcaaagatcaagaaggcagtattttgacagttgtattttgaggttcttatttgcagaaagggcataaatggagtatta

SEQ ID NO: 126545 - DNA, 201 bp, Homo sapiens
taccctactatgcattagaacaccagaggttatacccatagacttatctctccctatttctccctgccccatagcctccccacctctagtgagcaccattmtgctctctacttctaggagatcaacttctttaggttccacatatgagtgagatcatgcagtattttgtcttttctgtgcctgacttatttcacttaagat

SEQ ID NO: 126546 - DNA, 201 bp, Homo sapiens
agctaaaagaggattcatgaggatgagagtagggtagaagggagggatgacttagtccagtttaagtgttagttcttgatgtgttctccaaatgaaagttyccctcctgttttcatttcccttatagaatggcaaaattatcgaaaagattcagggtgcaaatgcaccgcttgttaataaaaaagttattaatttgatcga

SEQ ID NO: 126547 - DNA, 201 bp, Homo sapiens
atgtcattacactcatgaggggaccagaatgaataacaacacagaggcagaatgggcttggggggctcatggaacaatgaggaggctttagctgcacgtartgggtaggtgcatgggaatgagagaaaagattgggcaggtgggtcacattgtagaggctggagctctgggatagtcgataatatagtttggatatttgtt

SEQ ID NO: 126548 - DNA, 201 bp, Homo sapiens
tctgtcttgaatttgggggatctgtcagaaactagaggtatgagtcacctgttttcagtatattgttggctatatttcctgtattttctgatttataatgktggtggccatgttatttggtacatagatatttaaaactattcatggtaaatttagtttttagcattacacaaagttcttatttgtctcatttaatgcctt

SEQ ID NO: 126549 - DNA, 201 bp, Homo sapiens
ttcatgaggatgagagtagggtagaagggagggatgacttagtccagtttaagtgttagttcttgatgtgttctccaaatgaaagttcccctcctgttttyatttcccttatagaatggcaaaattatcgaaaagattcagggtgcaaatgcaccgcttgttaataaaaaagttattaatttgatcgatgaggagagaaaa

SEQ ID NO: 126550 - DNA, 201 bp, Homo sapiens
tttatttttgatattagaaatactcattaaaaacacatcttggatataacttttttctgctattaaacaatattcttgcaaccctttcaaagagttgaatygctgggttaatgattaaaaaatgcattgaatggtaaaaaatgcattgtagatctcctctaagttggatgtttagaattcaacgatttaggtgaggggtca

SEQ ID NO: 126551 - DNA, 201 bp, Homo sapiens
cacatcctttcttcctaatgaccgttatccttgaaaagaagtagcatgccctaagccgccatgtacttacttccttttgcacagtgtcaagatctggaatkatttgctgttatttgataacttttgaacaacttatagaaattgtgttatattattctgttctgttctaatagcttttaaacctgacttctttttcaaagt

SEQ ID NO: 126552 - DNA, 201 bp, Homo sapiens
cccctgcatgcaaatataggaactgccatttgattctaagtaggaaccctctggtagttgaaatgccgtagtaagatacacagctatcaatgggcaacaaytaactgatcattagaaatttacattgctaattgccagatccttcattatccagacttcgtgccaagaaaatgaaattctgtctttttctaaatttttttc

SEQ ID NO: 126553 - DNA, 201 bp, Homo sapiens
taggagcttattatggattgaagggattagatgatgacacactggattcatcagggaaaggaaaagtaagatggcgtttatctttactaaggaaatgatcrgagatttgcacaataaattttttacaggagtaaaaccttggaaatttcatagatacctagcaagagagaactggttataaacattcatgcatatccatac

SEQ ID NO: 126554 - DNA, 201 bp, Homo sapiens
aaagccaaaccatatcagcattcattcctctttcatagttatctgttaatattcatcgccttgatgatttaaatgatcacatcctttcttcctaatgaccrttatccttgaaaagaagtagcatgccctaagccgccatgtacttacttccttttgcacagtgtcaagatctggaattatttgctgttatttgataacttt

SEQ ID NO: 126555 - DNA, 201 bp, Homo sapiens
aatttggctgctaggagcttattatggattgaagggattagatgatgacacactggattcatcagggaaaggaaaagtaagatggcgtttatctttactamggaaatgatcggagatttgcacaataaattttttacaggagtaaaaccttggaaatttcatagatacctagcaagagagaactggttataaacattcatg

SEQ ID NO: 126556 - DNA, 201 bp, Homo sapiens
taaaaccatcagatcttctgagaactcactcactagcacaagaacagcatgggagaaactgcccccatgattcagttagctcccactaggtcctgcccatsatttgtggggattttggggattacaattcaacatgagaattgggtgggaacaaagccaaaccatatcagcattcattcctctttcatagttatctgttaa

SEQ ID NO: 126557 - DNA, 201 bp, Homo sapiens
agggaaaaaagtgaaatgagcagtgagcattatttgctactgaaatatgcatagatagatagaaaaacagataaaaaggacaactgaaaaaataccaaagmgcaacaactgattcaagagatgcatgcttatttataggaaagaaagcataacaataaactgtctaatgtggatggtctggtattatcagcatcactcctg

SEQ ID NO: 126558 - DNA, 201 bp, Homo sapiens
gcttcctgaggcctcaccagaagcagatgctggtgccatgtttgtacagtctgcaaaagtttgagccaaataaatttttctttacgaagttcccagcttcrtgtactccttgataacaacacaaaacagactaatcgggccatcaccccgaccgctagtccagtctgaccagtagacccagccccactctccttaagtgta

SEQ ID NO: 126559 - DNA, 201 bp, Homo sapiens
gaggtgtgggaacagccaagggcagaatggaaaggtcaaggtgataaggcaaaaaaaaaacaaaaacaaacaaacaaaaccctgaatgagtcattgagacyagagagaaaagaagaggatctggaagctggggacagaaaaccaagtttccagtgatgtggagaatccacatcagtgttagcaggaaggaacattattcac

SEQ ID NO: 126560 - DNA, 201 bp, Homo sapiens
aaaatttaacattgaagaaaacgcaccttaagaaattaatgtattaacttactaatatcttaatagtgaataaaacatatttgtagctgaagagtttacarggtattttctaatctgtgaatttgttagagtagattttaacattgcaggaattattacataataaagatttaaagcttctatgtctgaaatgccccaatt

SEQ ID NO: 126561 - DNA, 201 bp, Homo sapiens
ttactccctctatcccacaattcctccccggacattttccaataatcatgtttaacagcataacaggggttgggagaatgctctgcattgagtagagtaartgctcaggatgactcaggctgtttcattcaatcattgtccaaatccctaacccctggcaatcacagagtccaagggactagggctgaaggtatctccaaa

SEQ ID NO: 126562 - DNA, 201 bp, Homo sapiens
tcaaaaaaaatttaaaaaaaatttaaaaaattaaggtttgctacccttttcatactgcacatatgcattattcctgccccttccattttaaaacatccctkattttatttaagtggaaagctggagacagtaatgttagataagttcaggaactcttccactttactttctatttcttagactataaatatttactagata

SEQ ID NO: 126563 - DNA, 201 bp, Homo sapiens
gtagttctgaagcaaattatttcttaaactgtattaacatgcatgatactttgttttattctttccttacaattgtttgcttagttctactttattcactytatttcctgttttttggcctcgataaggagcttaaggctgttcaagatcttagtcaatatttgtgcttttgacttatccttctttgtcacaagatgacct

SEQ ID NO: 126564 - DNA, 201 bp, Homo sapiens
cctcatggaatgagttagaaagtgttccctctgcttctatttgctgaaaaaaataaattgtttccagagaattggtgtcatttattccttaaacgttttgyagaattcactagcaaaataatctagtcctggtgctgtatttttcagaatgttattaagaattaattcaatttatctaatagatatagggctaatcatatt

SEQ ID NO: 126565 - DNA, 201 bp, Homo sapiens
tccttctttgtcacaagatgacctgcacagctccaaagatcatgtccctcaaacattcaaaagcaggaagcagaagatggtgtaggacagaggttctcccygagtgcctctctcagaagagtccccagtgtatttcctataaatatcattgaccatagctggatcacactgccacactttctgtaaggaaggatggaggtg

SEQ ID NO: 126566 - DNA, 201 bp, Homo sapiens
ttaggttccacatatgagtgagatcatgcagtattttgtcttttctgtgcctgacttatttcacttaagataatgtcctctaggttcttctatgttgccasaaatgacaggatttcattactttttatagctgaataatattccattatgtatatgcatcacactttcattatccattcatccatcaatttttgttgataa

SEQ ID NO: 126567 - DNA, 201 bp, Homo sapiens
atatactatattcttgcaataaagtaagctagaggaaagaaaatagtattaagaaaattataaggaaaacaaaatatatttactatgcattaagtggaagkggattaccataaaattcttcatcctcatcatcttaacattgagtaggttgaggaggagaagaaggaagaggagttggtattgacgtctcaggggtggcag

SEQ ID NO: 126568 - DNA, 201 bp, Homo sapiens
cagttgtgtgtatatgtgactaaagttgtgcaaagatttcatacacaagacatagagaaaggccatttctttctaattgaagtagctagaaatctaataaycaatgtctaaagagatctatccaattaagctttaagttgagttcatcttggtctcgaggggattgtatttagtgggtggaacacagcagcaagaggtagg

SEQ ID NO: 126569 - DNA, 201 bp, Homo sapiens
ataatttggctgctaggagcttattatggattgaagggattagatgatgacacactggattcatcagggaaaggaaaagtaagatggcgtttatctttacyaaggaaatgatcggagatttgcacaataaattttttacaggagtaaaaccttggaaatttcatagatacctagcaagagagaactggttataaacattca

SEQ ID NO: 126570 - DNA, 201 bp, Homo sapiens
atttataaattttataatttggctgctaggagcttattatggattgaagggattagatgatgacacactggattcatcagggaaaggaaaagtaagatggygtttatctttactaaggaaatgatcggagatttgcacaataaattttttacaggagtaaaaccttggaaatttcatagatacctagcaagagagaactgg

SEQ ID NO: 126571 - DNA, 201 bp, Homo sapiens
  misc_feature (1)...(201): n = A,T,C or G
aaaagttctagaaattaaaagaaaagtaagtaatattttccaactatgattaaattaattgcaaaataacaacctcttaatcgtcagttcaaagacaagcntaccatttagagtgaaatagaacaaaatgcactactggtgctaggtacctctagaggctttgagtactttatgtctttacaaggctcgatctattcatgc

SEQ ID NO: 126572 - DNA, 201 bp, Homo sapiens
gaaggaaggaaggagggagagagggaggaagggaaagaaagaaagaaagaaagaaagaaagaaagaaagaaagaaagaaagaaagaaagaaagaaagaaaragaaagaaagaaagaaagagaaagaaagaaagaaaggtcaacaaggtgttcggggctttgaagtatgatttttttatgcatcaggttattccatgaaact

SEQ ID NO: 126573 - DNA, 201 bp, Homo sapiens
ctgcattgtttcaacatagtgtatcaaattacttgaatatagttttatttattattatatgaaatgtttactttttccaggcagaagctgacaacattgtractttgcagccatttagagataaatgtgaacctgtttttctctttagtgttgtaagtatatttactttctcaattgcattatcagattccagtttgcagt

SEQ ID NO: 126574 - DNA, 201 bp, Homo sapiens
gagaaattcctttgagaaggttatggtggcagctgtagcttctttaactgatcatgagttttaagacaatgatgactaattgaatatgtactctacaattyagggggaacatttattgacttagcttactgattaatcttagaagtcagctaaactttgtaatcaacttgacccctggcatattacctggcacataggggg

SEQ ID NO: 126575 - DNA, 201 bp, Homo sapiens
catggagagggaagatttcatttgacttgggtagtgaccaccattttagtccatccatttcaggagcctgaaggaaacagtttatcattttattttgtagygtgacttcgaagagtttgtctcttttatgacaagtggcttaagctatattctagttgtatctcaaggaagtaaacacaatcctccctctgaagaaaccga

SEQ ID NO: 126576 - DNA, 201 bp, Homo sapiens
acctcttttaatgtatggccctatgactgacagagggagatgagatacaaacgtggataggaaacatactatctctgtgcacacaactctccttctaacasagcaggtgtaacaggcccacacgtgcctgtagtagaatattgaaagggacataggtgccttgggagaggggcagtaacgtgctgtgcagaacgagagatg

SEQ ID NO: 126577 - DNA, 201 bp, Homo sapiens
aacgaacgatctgaggatcaacctgaggtcgaagcccaggttacacctggaatgatgaagaacaaacaagacaggtatagctcaagaccaggaattgtgtyacttgcaatgtgttattgggtaatgaagcgtagtgtaggcacctcagtacctaagggcaaatgtttttatgttaaaggcataagtatttcttccagtcaa

SEQ ID NO: 126578 - DNA, 201 bp, Homo sapiens
acaatggcttgcaatactggaaacaattactgggaccaagaactgttgaagaagccattgaatattttccagagaggtaggattcataccatgggtcactrtctgttttcgtgggctccattttaaacacctttttagatgtagagtattggaaccacagctctagtccaagggagcttctcaggaaagctacctttcctg

SEQ ID NO: 126579 - DNA, 201 bp, Homo sapiens
attctggcagctggaccaatggatactatgttaatatggaagaagacactattattgaatgtatagttgttcataattaatttggaacaacttgaaatttrtgagaaaatattaagaaaattacagacataaaattcaaaatctttaaaagttgactactaatttattcaaggaatgtttagtaaacctcttttaatgtat

SEQ ID NO: 126580 - DNA, 201 bp, Homo sapiens
catgttacatgtttttgatctatttaacaatatgcatttgtattgcctatacataattagctactgagctacacttcttattacctcttctttgttttctkttctaatagtggtccatctctagcccttgttttattgagagacaatggcttgcaatactggaaacaattactgggaccaagaactgttgaagaagccatt

SEQ ID NO: 126581 - DNA, 201 bp, Homo sapiens
actatgagaaataaatgattgttgttcagccacccagtcaatagcaatttgctattgcagcccaaactgactaagacaccaactcttacagaagaccctamcaaacgatctcattctggcagctggaccaatggatactatgttaatatggaagaagacactattattgaatgtatagttgttcataattaatttggaaca

SEQ ID NO: 126582 - DNA, 201 bp, Homo sapiens
gtattgcactgaacacaatgaaaattccactttgaaaagcattgccttagattacaaaaaccaactgttataaactgaatgtttgccatcaaatttcataygttaaaatcctaatctccaatgtggtgatatttggagatggagactttagaaggtaattagagtaaaatcaaagcttttatttaaataaaggaagagaca

SEQ ID NO: 126583 - DNA, 201 bp, Homo sapiens
gcctcaggaggccctgatgacatgtttccaaggtggtcggggcacagcttgattttatacattttagggagacatgagacatcaatcaatatgtgtaataygtacattggttcttcctggagaggtgggacaacttgaagcagggttgcttccaggtcttaggtagataagagacaatcaatagcattcttctgagtctct

SEQ ID NO: 126584 - DNA, 201 bp, Homo sapiens
ggttgtcactttttaaactgtggtcatcaggtaccctcatttgagaaatctttttacaaaattagtaatttaaaaaaaacttcagtgtcttctaagaattwatatgattccactttttcaactttcaagagctatatatcctgtgttttcctttcttttctgtgaggtagttctgaagcaaattatttcttaaactgtatt

SEQ ID NO: 126585 - DNA, 201 bp, Homo sapiens
tcttctgccagatgttctaatgtcagtttgttttctggcactggctcttctacatcttctccctcatcgtctggcactgctttagaggcactcatctctaycaatttgtcttctgttaattcctctggtgtggtgtctctcagctcttggatttctccaacatccatatcttgaaacctttcaccccccacctttttgcca

SEQ ID NO: 126586 - DNA, 201 bp, Homo sapiens
tagtcacttatgccttagtcttgcttagtgaatctgcgtttttacataaacaactgagcagaggaagccatcagatgtgcatttgtgtctggtgagcagckggatgacttttggctctgtctgtcctctgtcccctaccagtgaagataagctatcaattatcaatttacattgccagggtgaaatccaacagaactgttt

SEQ ID NO: 126587 - DNA, 201 bp, Homo sapiens
taaggaaaacaaaatatatttactatgcattaagtggaaggggattaccataaaattcttcatcctcatcatcttaacattgagtaggttgaggaggagamgaaggaagaggagttggtattgacgtctcaggggtggcagaagcagaagaggtggaggaagtggaaggggaggcaggagaagcaggcatagtggatgtaa

SEQ ID NO: 126588 - DNA, 201 bp, Homo sapiens
gacctactctcccattaaatctactttctttagctttatgcagatttaccttccctgaatatttttcctgagcttttatcgtgagtcatttcaagaagctrttaacattatatggcaattgcttggggattggttgtcactttttaaactgtggtcatcaggtaccctcatttgagaaatctttttacaaaattagtaatt

SEQ ID NO: 126589 - DNA, 201 bp, Homo sapiens
gaatgaggcaaacaattatgctagaataagaatacagacaatgaaaatagtcttttatgggccagatgccgtggcttgtgcctgtaatcccagcatttgargtcaggatctcaagaccagcctggccaacatggtgaaaccccgtctctactaaacatgcaaaaattggccaggcgtggtggcccatgcctatagtcccag

SEQ ID NO: 126590 - DNA, 201 bp, Homo sapiens
caaacaattatgctagaataagaatacagacaatgaaaatagtcttttatgggccagatgccgtggcttgtgcctgtaatcccagcatttgaggtcaggakctcaagaccagcctggccaacatggtgaaaccccgtctctactaaacatgcaaaaattggccaggcgtggtggcccatgcctatagtcccagctacttgg

SEQ ID NO: 126591 - DNA, 201 bp, Homo sapiens
gagacgggctgatcacaaggtcaggagatcgagaccatcctgggcaacatggtgaaactccatctctacgaaaatacaaaaaaaatattagctgggctggkggtgtgcgcctgtagtcccagctactcgggaggctgaggcaggggaatagcttgaacttgggaggcagaggtagcagtgagccaagattgcaccactgca

SEQ ID NO: 126592 - DNA, 201 bp, Homo sapiens
aggggaatagcttgaacttgggaggcagaggtagcagtgagccaagattgcaccactgcactccagtctggtgacagagcgagactccatctcaaaaaaamactatatatatatatatagatagatagatagatagatagatagataataaattatctataatatatgaaacataaacatatatacaaccttacacattac

SEQ ID NO: 126593 - DNA, 201 bp, Homo sapiens
acttgggaggcagaggtagcagtgagccaagattgcaccactgcactccagtctggtgacagagcgagactccatctcaaaaaaacactatatatatatakatagatagatagatagatagatagatagataataaattatctataatatatgaaacataaacatatatacaaccttacacattacaaataattttttctt

SEQ ID NO: 126594 - DNA, 201 bp, Homo sapiens
tttctctctcctaacccctggcaaccactgatccttttgttatttgatatgttatgggatgtcttagagttgatatcatacagtatatagccttttcattwtatatatatatatttgtttttatttatttttattttttgagatggagtcttgctctgtcacccaggctggagtgcaatggggtgacctcagatccctgca

SEQ ID NO: 126595 - DNA, 201 bp, Homo sapiens
tatatagccttttcattatatatatatatatttgtttttatttatttttattttttgagatggagtcttgctctgtcacccaggctggagtgcaatggggygacctcagatccctgcaacctccgcctcccaggttcaagagattctcctgcctcagtctcccaagtagctgggattacaggtgtgccaccatgcccggct

SEQ ID NO: 126596 - DNA, 201 bp, Homo sapiens
gagagaagaaggttgagaaataccttcaggtattcaatcaccttgtttatccccaaatgggacaaatcaaatcatggttattgaacataaaaattatttgyaatgacttccataattgtgttggttgattatttaggttactgtctacacacacacacacacacacacacccacacaatcactcacattcacatgcataca

SEQ ID NO: 126597 - DNA, 201 bp, Homo sapiens
aatatggaatatctctctatttatttagatctttgatttttttcgccagagttttgtagttttcttcatttagattctttacatattttgatagatttttrcccatgtattttcttttttagtgctagtataaattgttttgctttaaatttcaaattccaattgctcatttctggtatatagaaaaaaattgacttttgt

SEQ ID NO: 126598 - DNA, 201 bp, Homo sapiens
atcatggttattgaacataaaaattatttgcaatgacttccataattgtgttggttgattatttaggttactgtctacacacacacacacacacacacacmcacacaatcactcacattcacatgcatacacccaagaaaaagatttaatgagatacctgtgtgtgtgtgttgtatatgtgtatgtgtgtgcatgcatgat

SEQ ID NO: 126599 - DNA, 201 bp, Homo sapiens
tacctggcacatagggggaactctttcaatattttctgagcttacctgctaggcttagtatcatctgcaggatagaaatagtatctcacgcatctccatayttggcatgaagctgatggaaacaaattgaatttcaattcccttgaattcttcttgctgattttagggtaggattcaattcaaaggaagaaaggacacccc

SEQ ID NO: 126600 - DNA, 201 bp, Homo sapiens
atgttcacaattaatcttaatctttatttctaattgatccccacttttccactttccttggctccacccaccacttacggttgctttaggaataactcttyaaatggaacttcacccctttcctgtgcctgaatatcagattctatgctggcattgttttacccaaaatatgataatttgcatagaagagaagcacagcaa

SEQ ID NO: 126601 - DNA, 201 bp, Homo sapiens
tgggcttttggttgggattgtgtttaatctacagaccaagttgggaaaaactgacatcttcatattaagtcttgttatctatgaatatggaatatctctcyatttatttagatctttgatttttttcgccagagttttgtagttttcttcatttagattctttacatattttgatagatttttacccatgtattttctttt

SEQ ID NO: 126602 - DNA, 201 bp, Homo sapiens
tatttcctattaaaattgccctgagctgaatggtcagtatacaatttttttctgctgtgtgcctttttaaaagaggaacattaaatattttatatatatakagagaggcatataaaaatttagttaatagtgtttattatagttactgttatattattattaaattatttaatccttaataatttatgtattataatataa

SEQ ID NO: 126603 - DNA, 201 bp, Homo sapiens
cagatggatcacagggaattgaggatcaggaaattcttgtgaatcctggcagttggcattaggaaagtggcagtagacgttcacatagactaggggttccrgattctggtgacctgcccataaaggtgaaagaaaattatatctccaaacctccattgtgagcagcaatggagggatgccctctgccggacatattgtttt

SEQ ID NO: 126604 - DNA, 201 bp, Homo sapiens
ttgaataacagtcttttatcaggtattacttttgcaaatagtttatcccagtctgtggctggttttttcattctcttgtcattgtagtttttttaaagacragattctgtaacaacctgtttcactctggagaatcacaaccaccagaaaggagctaggaaattattctagacttgattcttcacagagaagaaaaatcaa

SEQ ID NO: 126605 - DNA, 201 bp, Homo sapiens
ttgttctcttattgttgagtttcaagtattctgtgtattttgaataacagtcttttatcaggtattacttttgcaaatagtttatcccagtctgtggctgsttttttcattctcttgtcattgtagtttttttaaagacaagattctgtaacaacctgtttcactctggagaatcacaaccaccagaaaggagctaggaaa

SEQ ID NO: 126606 - DNA, 201 bp, Homo sapiens
atatcttctttgaggaggtgtctgctaaggattttggcttatttttttaattgggttgtttgttctcttattgttgagtttcaagtattctgtgtattttraataacagtcttttatcaggtattacttttgcaaatagtttatcccagtctgtggctggttttttcattctcttgtcattgtagtttttttaaagacaag

SEQ ID NO: 126607 - DNA, 201 bp, Homo sapiens
ctgtcacccaggctggagtgcaatggggtgacctcagatccctgcaacctccgcctcccaggttcaagagattctcctgcctcagtctcccaagtagctgkgattacaggtgtgccaccatgcccggctaatttttgtatttttagtagagagggggtttccccatgttggccagggtagtctaaaactcctgacctcaag

SEQ ID NO: 126608 - DNA, 201 bp, Homo sapiens
gtcctggtgaaggaattgactttttttttttgtcttctgaaataaggactttgtaaggttttcattcctttaattttttaaaaaatgtctttatatagatkttatttttagagcagttttaggctcatagcaaaatttaccaggaagtaaagagttctcatatatcccctatccccacactctcatagccttttccaccat

SEQ ID NO: 126609 - DNA, 201 bp, Homo sapiens
ggattaaaatattatagccaaacacattttactgaattgtactgttttttcaatctattcacataaaatgatcaactaattagaatttcgttgtccaacayggtagctactaggcataagtgactatggagctcttgcaatgtagctggtccaactgaggagctcaatttttaattttaatgaatttaaatctggattttc

SEQ ID NO: 126610 - DNA, 201 bp, Homo sapiens
ttcttctttatcctattagtggcgattatgttaattgactttcaaatgttgatccaccctggcatacttggaataaatccagcttggtcatggtttgtaayttttttatacattgttaaatttgaatggttaatattttgttaagaatttctgctcctatgttcatgagagctattggtctttagttttctttccttgtaa

SEQ ID NO: 126611 - DNA, 201 bp, Homo sapiens
atcatcatcttctagtgattgatgtttaccaagcctggtgtggaccttgcaaagcaatgcaacctttattcagaaaattgaaaaatgaactgaacgaagaygaaattctgcattttgctgtcgtaagaattttgttttcattaaaccactgttttcacattatattaagtttttaagtatcctctaatactttaagtattg

SEQ ID NO: 126612 - DNA, 201 bp, Homo sapiens
atggttaatattttgttaagaatttctgctcctatgttcatgagagctattggtctttagttttctttccttgtaatatctttttgaatattatggtaagyctggcctcatggaatgagttagaaagtgttccctctgcttctatttgctgaaaaaaataaattgtttccagagaattggtgtcatttattccttaaacgt

SEQ ID NO: 126613 - DNA, 201 bp, Homo sapiens
gtgctactgcaccccagcctgggcgacagagtgagaccctgtcaaaaaaaagaaaaaaagaaaagaaataaaggaaggaaggaaggagggagagagggagraagggaaagaaagaaagaaagaaagaaagaaagaaagaaagaaagaaagaaagaaagaaagaaagaaagaaaaagaaagaaagaaagaaagagaaagaaa

SEQ ID NO: 126614 - DNA, 201 bp, Homo sapiens
aaaaaaagaaaaaaagaaaagaaataaaggaaggaaggaaggagggagagagggaggaagggaaagaaagaaagaaagaaagaaagaaagaaagaaagaaagaaagaaagaaagaaagaaagaaagaaaaagaaagaaagaaagaaagagaaagaaagaaagaaaggtcaacaaggtgttcggggctttgaagtatgattt

SEQ ID NO: 126615 - DNA, 201 bp, Homo sapiens
aaaaaaagaaaagaaataaaggaaggaaggaaggagggagagagggaggaagggaaagaaagaaagaaagaaagaaagaaagaaagaaagaaagaaagaargaaagaaagaaagaaagaaaaagaaagaaagaaagaaagagaaagaaagaaagaaaggtcaacaaggtgttcggggctttgaagtatgatttttttatgc

SEQ ID NO: 126616 - DNA, 201 bp, Homo sapiens
ggaaggaaggaaggagggagagagggaggaagggaaagaaagaaagaaagaaagaaagaaagaaagaaagaaagaaagaaagaaagaaagaaagaaagaaraagaaagaaagaaagaaagagaaagaaagaaagaaaggtcaacaaggtgttcggggctttgaagtatgatttttttatgcatcaggttattccatgaaac

SEQ ID NO: 126617 - DNA, 201 bp, Homo sapiens
aggaaggagggagagagggaggaagggaaagaaagaaagaaagaaagaaagaaagaaagaaagaaagaaagaaagaaagaaagaaagaaagaaaaagaaaraaagaaagaaagagaaagaaagaaagaaaggtcaacaaggtgttcggggctttgaagtatgatttttttatgcatcaggttattccatgaaacttctatg

SEQ ID NO: 126618 - DNA, 201 bp, Homo sapiens
actgccacactttctgtaaggaaggatggaggtgtgagtattggattttctaggcttctgtagtgggaagtaggcaagagagaagaaggttgagaaatacyttcaggtattcaatcaccttgtttatccccaaatgggacaaatcaaatcatggttattgaacataaaaattatttgcaatgacttccataattgtgttgg

SEQ ID NO: 126619 - DNA, 201 bp, Homo sapiens
aggaaggatggaggtgtgagtattggattttctaggcttctgtagtgggaagtaggcaagagagaagaaggttgagaaataccttcaggtattcaatcacyttgtttatccccaaatgggacaaatcaaatcatggttattgaacataaaaattatttgcaatgacttccataattgtgttggttgattatttaggttact

SEQ ID NO: 126620 - DNA, 201 bp, Homo sapiens
aagaaagtgttaatttttgtttgtttctcaagtctagtagttttactaacatatgtctgagatttgaccactcttgatttctttttctagatacatgttaktctttttcactgtctagattcttatcttctcttatttcaagatggttttcctgccttatagttttaaatattagttctgttccattgttctttttttttt

SEQ ID NO: 126621 - DNA, 201 bp, Homo sapiens
tttctttagctaagatttccagtatgaatttgaagaggagtagtgagagggagtagctttgcttttttttccgatcttagaggcaaagcatctagtttctytccattaaggacagtgttaactgtaggatttttgaagatgttctctagtaagttgagaaagtttccctttattcctcctctggtaataatttttatcatg

SEQ ID NO: 126622 - DNA, 201 bp, Homo sapiens
gcccaggagctataggctgaaccagatagcctaggtgtgtaagaggctattctatctaggtttctgtaagtatattctaggatgtttgcactacaatgaartaacctaatgtcacatttctcagaaagtatctgcattattaagaggtacatgactgtacatacacacacacatgcacacacacacacgtgtgtataaaat

SEQ ID NO: 126623 - DNA, 201 bp, Homo sapiens
tatctgcattattaagaggtacatgactgtacatacacacacacatgcacacacacacacgtgtgtataaaatacgtataagaaacctctttaattgcatrtcttctcttttttcagttcctgacaatttgtcaatgagtttaggaaggcagaatttataaagttaacaaaatttaatggaatatatgtgctatttagata

SEQ ID NO: 126624 - DNA, 201 bp, Homo sapiens; identical to SEQ ID NO: 21515

SEQ ID NO: 126625 - DNA, 201 bp, Homo sapiens; identical to SEQ ID NO: 21516

SEQ ID NO: 126626 - DNA, 201 bp, Homo sapiens
acctgaacctttgctataatagtctcttatcagtgcccgaagttttgtgttgttgttattgacaatgatgatgatgattctttgggattttctacatagasagtcatgccctctgtgaagaacaacaatagtttcatttcctcattctgaatcagtataccttttatttccttttcttgtgttatttctttagctaagatt

SEQ ID NO: 126627 - DNA, 201 bp, Homo sapiens
tttttggttttatcttcatgattttctttcttctattttctagtagttttttcttatgttcttctagctttttgagttgaatattaagtttatttattttmaacttttaatttttattgataagaatttttaaggttatacattttcctttgattactgctttaattatagcccacaggttctaatgcatcgtgttttcat

SEQ ID NO: 126628 - DNA, 201 bp, Homo sapiens
tgcagtgagccaaaattgcgccactgcactccagcctgggcgactgagtgagactctgtctcaaaaaaaaaaaaaaaaaagaaaagaaaatagtctttatrtacctttgaatatataaacatatgagtataaaataaaaataaatgttacagtgtcccaaaggaaacaagtgatagatgaattgtttaattaatattttta

SEQ ID NO: 126629 - DNA, 201 bp, Homo sapiens
tgcatatcttctcttttttcagttcctgacaatttgtcaatgagtttaggaaggcagaatttataaagttaacaaaatttaatggaatatatgtgctattkagatataaataataagcagaagcctaggactgtaccatgacagcttagaaaactaactttcatacttattgcaggttgcattttctgggaagctggaagt

SEQ ID NO: 126630 - DNA, 201 bp, Homo sapiens
cattcttacaaagctaagatatttacctggtagagcaaatgaagatcttcaaggacatacttagcaatatatcacctatatactccttctgtggaaaatawgtgaggatatactcaaccaaatcaaaaatatgggaggaaaaaaaagaaaaacagttcttaacagtgaaccttggaatctctgaacacacacacagacaca

SEQ ID NO: 126631 - DNA, 201 bp, Homo sapiens
acttagcaatatatcacctatatactccttctgtggaaaataagtgaggatatactcaaccaaatcaaaaatatgggaggaaaaaaaagaaaaacagttcktaacagtgaaccttggaatctctgaacacacacacagacacatacagtccataattctgggttttataatataacagctgatgaaggactctagaaatag

SEQ ID NO: 126632 - DNA, 201 bp, Homo sapiens
gaaagggcataaatggagtattaaagttgggagatagtgtgtcagaatgcaagaaatatttgggacatacgcatctgacaacaggggcaggaaaaagacartaaacattaatgcagtggataagtatagtaaaacttccacattaacaagggaaaaacatggaatgaagagcagtttgctcagaccagcaaaataagggga

SEQ ID NO: 126633 - DNA, 201 bp, Homo sapiens
  misc_feature (1)...(201): n = A,T,C or G
attgggataactgctatcctagattggtagactttgttatttcataaatatcatcatcttctagtgattgatgtttaccaagcctggtgtggaccttgcanagcaatgcaacctttattcagaaaattgaaaaatgaactgaacgaagacgaaattctgcattttgctgtcgtaagaattttgttttcattaaaccactgt

SEQ ID NO: 126634 - DNA, 201 bp, Homo sapiens
cagtcatcaataatcaaagcctgtgggatgagatgttgcagaacaaaggcttaacaggtataaggactccccggctgtctggccacctggggtttgacccrgagctcctcctggcaccctgtccctctagagtccccactttgaccaagaaatcctgcagtgcctttgccctggccatggctccagattgggataactgct

SEQ ID NO: 126635 - DNA, 201 bp, Homo sapiens
agtggggaaatttttcactagtacattaagatgttatttgcagttagaaagaatgaatactgtaatcccagcactctgggaggctgaggtgggaggatcaygggtcaggaggttgagaccatcctggttaacacggtgaaattctgtatctactaaaaatacaaaaaaaattagcccgccgtggtggcgggtgcctgtagt

SEQ ID NO: 126636 - DNA, 201 bp, Homo sapiens
gtgccccagaaaacactagtggccttgttctcaagattaaatatccttagagcagccagatctgaagagggaccccagaaagatccacgggcatgttcatwtgtttgcaattgataatataggaaacactttctaatatttcaggaaaacaaaacctttaaaaaaaccagacgacgtgtaactcctaacattcttaccttg

SEQ ID NO: 126637 - DNA, 201 bp, Homo sapiens
attatcaaatttgtgagcacaaagttgtattgcagagaaaaagtctgctgtcagcttggtttttgttcctttgtagataattcagtttttgttgttggtgrttgtggcttgatttatttagatacttgcaaaatattttccctttatttttgctcaattgtttttcaagattgtatagatatctaagaatgaactgatctt

SEQ ID NO: 126638 - DNA, 201 bp, Homo sapiens
gtattgcctttgcaactttatcacaaaccaattgactatgtttgtgtgggtctttttctgggctctctgctctgttccattaatcaatgtggctaggtctrgtagtatcacttctctaactttgttcttctccttcaatactgtgttacatctttggccttttcatataaacttgagatcagtttgtcaatttccatatcc

SEQ ID NO: 126639 - DNA, 201 bp, Homo sapiens
ttgtggcttttcctttgttgtacgctagcgtgcactatcgcccgcacgctgactgacccctgttctacaccgcccctgataccactgaatagggagtttgrgaagtttatgtcgtgccccagaaaacactagtggccttgttctcaagattaaatatccttagagcagccagatctgaagagggaccccagaaagatccac

SEQ ID NO: 126640 - DNA, 201 bp, Homo sapiens
ctagaaagtttatagttttgtgttttacatataggtctatcatccattttgagttatttttatgaatagtataaggtctgtgtctagacttattgttttgrgagggtatttctaattatttcagcaccatttgttgacaagactgtccttcctccattgtattgcctttgcaactttatcacaaaccaattgactatgttt

SEQ ID NO: 126641 - DNA, 201 bp, Homo sapiens
agctgcattttcagtgtgagataaaaaggtatttcagaaaaagtgcaagatctatatgcctgctggcacagctgcagcaatggctcaatgaacttcctttaaaaaaaaaaacccaattactcttagactggattcttttatcttgaaatggtgggcaacttcagctgcagacctcaatctagggtacctatcaggcaagtc

SEQ ID NO: 126642 - DNA, 201 bp, Homo sapiens
gttactctctagaaagtttatagttttgtgttttacatataggtctatcatccattttgagttatttttatgaatagtataaggtctgtgtctagacttaytgttttgggagggtatttctaattatttcagcaccatttgttgacaagactgtccttcctccattgtattgcctttgcaactttatcacaaaccaattga

SEQ ID NO: 126643 - DNA, 201 bp, Homo sapiens
agtccagcttattagttatttctttttggattgcggttttagtgttgtatctaaaaactcattgctaaccacaaggtcacctagattttcttctgtgttaytctctagaaagtttatagttttgtgttttacatataggtctatcatccattttgagttatttttatgaatagtataaggtctgtgtctagacttattgtt

SEQ ID NO: 126644 - DNA, 201 bp, Homo sapiens
ttaaatgcattttccataggacttattttccttagttcaagatgatgaataagcagtttaaagcctagacactcacctcttattatttttctattcaagasagtaagtggctgtctacagtagttaaatcctgttgtcctggtgaaggaattgactttttttttttgtcttctgaaataaggactttgtaaggttttcatt

SEQ ID NO: 126645 - DNA, 201 bp, Homo sapiens
attttgtcttttctgtgcctgacttatttcacttaagataatgtcctctaggttcttctatgttgccacaaatgacaggatttcattactttttatagctraataatattccattatgtatatgcatcacactttcattatccattcatccatcaatttttgttgataataaataggttgattttatttaggttgattcca

SEQ ID NO: 126646 - DNA, 201 bp, Homo sapiens
ctgtgttggaaagggcagaagagcatgtacgtcatcacataccattctactggacatcactttgtggaactgactgcaccactcatgccatctctgttggycccggcttccatgtgtgtagaaagaaagggttatgccaactgtattcgcattaactgtaaacttctgagaaaatccaattcctgggccccacctcagact

SEQ ID NO: 126647 - DNA, 201 bp, Homo sapiens
gttttacctactaatctctttctctctcctaacccctggcaaccactgatccttttgttatttgatatgttatgggatgtcttagagttgatatcatacartatatagccttttcattatatatatatatatttgtttttatttatttttattttttgagatggagtcttgctctgtcacccaggctggagtgcaatgggg

SEQ ID NO: 126648 - DNA, 201 bp, Homo sapiens
ctcttggtagcacctactaaggttgctgtttcacatgtttgtgtttttatgtagggctttttaaaaaaaacctaattaggtcaggtaccagatccattatkttataccattgtgcctggtacggcaccagtaaacagatgcttagtaaacaggtgttaaaagatgagtgagtgaaaggggcatggtgtcaaaaataactag

SEQ ID NO: 126649 - DNA, 201 bp, Homo sapiens
agtcatgggttcttagtttctgtttctgattgggccagtaaagccccttcctcatccttcttttctgcttatcactagagacagaaactaaaaaccatggytttgggctgctaaaagcctaaaacaaaacacaacaacaaaaaaagttgggatggataggcttgaaagttcactcttcttgactgagtgcctattatttgt

SEQ ID NO: 126650 - DNA, 201 bp, Homo sapiens
aagtgagatgagaagcagtcactcctattttatggacgagatagtgtagaatttgagttatatcttaaatgtttactggaatttgtgagtaaaatgatttwgacatggggttctcttttttggaagattttgttttatttttgtctttttgccattttcaatgtcttttaatatttaaaaaagacaatattttcaaataca

SEQ ID NO: 126651 - DNA, 201 bp, Homo sapiens
actgagtgcctattatttgttttctctgctttaaatgatatcctattacctttgtgacagttaggtacttaatctactttcttatttcttgagctattctcctattttttgaacttgtgttaaatgttaaatgtactttgtcagaaaatatattatttacatatatgctggatagaaataatcctaggctcacattttttt

SEQ ID NO: 126652 - DNA, 201 bp, Homo sapiens
gaaaaatcccacttggctgtcatgtattatcctttttacacactgcaggttttgatttgctaatattttgttgagaatttttgtgtctatattcaggaggsatatgtgttgatttcttttcttgtaatgtttttatctggttttggtgtcagagtaatgcaggttcataaagtgagatgagaagcagtcactcctatttta

SEQ ID NO: 126653 - DNA, 201 bp, Homo sapiens
gatttatgatttatgatttttttaatgttcaaactgcttaattcacattagggtgtcgtgttacagtttgggggggtatttgtcatccttctgctggcttkctttcttcctacctcccttcctctttctctttcttttatttatttctttaacaggggaataaattttttaattagcatagtaattttaattttattttta

SEQ ID NO: 126654 - DNA, 201 bp, Homo sapiens
gtctcactacctacagtactctctgtttgtcttgaacgttaacctgagccacttgctgtctttatctaagaactgtaagagacttttcttttccaaggtgsctcgttttaccaggaagtattgattttccaaaaactgcattagtcttcaaataccttgcttgcaatgccacaatcacccactcctaccctaattcattct

SEQ ID NO: 126655 - DNA, 201 bp, Homo sapiens
atttatttgaaatttgtaagaacataaaagctatttggatgaattaaaaaatctggtactttgctctttaataggatattgattattggtttgagaaatatttttttttttagttaaggaaatatcgttttgttccaaatttgctgagagtaatggttaagaacagatcttcacacttatcaaatgcccttttgatattta

SEQ ID NO: 126656 - DNA, 201 bp, Homo sapiens
ttgcataggtatatgtgtgccatggtggtttactgcacctattgacctgtcctttaggatccttcccctcaccccccaccccccaacaggccctgatgtaygttgttcccctctctgtgtccatgtgttctcaatgttcgactcccacttatgagtgagaacatgtaatgtttggttttctgttctggtgttagtttgctg

SEQ ID NO: 126657 - DNA, 201 bp, Homo sapiens
gaatatgatttttatcccattcttataacgtcgaggctatttaccatgactgtgaaagtcagaaaagtgtaataatggacacatctattgttctgtttccyttcacctgaccacatgttcagtgtgtgtcctttagaataagggctacaaaagctgtttactgggtatcattgagtagtgccctggcattaacccagttac

SEQ ID NO: 126658 - DNA, 201 bp, Homo sapiens
agtaagcctttatgttgggagtgtaaattagttcaaccattgtggaggacagtgtgctgattcctcgaagacctggaaccagaaataccatttgacccagmaatcccattactggatatatacccaaaggaatataaatccttctataaagatacatgcacggatatattcatggcagaactatttacaatagcaaagata

SEQ ID NO: 126659 - DNA, 201 bp, Homo sapiens
aagccactatcctcagcaaactaatgaaggaacagaaaaccaaacaccgcatgttctcacttataagtgggagctgaatgatgagaacacatggacacatggggggaacaacacacactagagcctgtcggtgggggctgggggagggagagcatcaggaagaatagctaatggatgctggtcttaatacctaggtgatgg

SEQ ID NO: 126660 - DNA, 201 bp, Homo sapiens
aaaacacaacaacaaaaaaagttgggatggataggcttgaaagttcactcttcttgactgagtgcctattatttgttttctctgctttaaatgatatcctrttacctttgtgacagttaggtacttaatctactttcttatttcttgagctattctcctattttttgaacttgtgttaaatgttaaatgtactttgtcaga

SEQ ID NO: 126661 - DNA, 201 bp, Homo sapiens
caagtcttgaatccatgacaatgtctctatttacagacctcaaagtagcaaaataataagacttcattgacaaatattctctagaattaaattatagcacycatctagcatataaacctattagaagagggagaaatgaaaaaaagaaagtacatgattgcactgataaggacaaagaataaaaaggagctccctggccca

SEQ ID NO: 126662 - DNA, 201 bp, Homo sapiens
gtcttgaatccatgacaatgtctctatttacagacctcaaagtagcaaaataataagacttcattgacaaatattctctagaattaaattatagcactcayctagcatataaacctattagaagagggagaaatgaaaaaaagaaagtacatgattgcactgataaggacaaagaataaaaaggagctccctggcccaggc

SEQ ID NO: 126663 - DNA, 201 bp, Homo sapiens
actcatctagcatataaacctattagaagagggagaaatgaaaaaaagaaagtacatgattgcactgataaggacaaagaataaaaaggagctccctggcycaggctgcagtgttctgtctttagccttgtttgcagtgtcaacagttttcagtaggctgggtcttctgaaagcaccgttctttgcaggggtccatctatg

SEQ ID NO: 126664 - DNA, 201 bp, Homo sapiens
gataagatggtattagaaaattggtgaaaattgaatacggactgtttatgaggtaataattttgtattaatgtaatatttcctgaagtatttagaggtgawtggttaaaatatctgcagcttactctcaaatggatctgccaagacacacacacacacacacccacacagccccccatagcccccacacacattgggggat

SEQ ID NO: 126665 - DNA, 201 bp, Homo sapiens
ttaaacaacctgtcagttcttcaaaatagatagtctttacttggcagttttactatatatttaattctactagatctgagaatgaatatgatttttatccsattcttataacgtcgaggctatttaccatgactgtgaaagtcagaaaagtgtaataatggacacatctattgttctgtttcctttcacctgaccacatgt

SEQ ID NO: 126666 - DNA, 201 bp, Homo sapiens
tctatttcctgttttttggcctcgataaggagcttaaggctgttcaagatcttagtcaatatttgtgcttttgacttatccttctttgtcacaagatgacytgcacagctccaaagatcatgtccctcaaacattcaaaagcaggaagcagaagatggtgtaggacagaggttctccctgagtgcctctctcagaagagtc

SEQ ID NO: 126667 - DNA, 201 bp, Homo sapiens
acatggtggattattttgattattgatgttgaaacagccttgcattctccagaaaaatcccacttggctgtcatgtattatcctttttacacactgcaggwtttgatttgctaatattttgttgagaatttttgtgtctatattcaggagggatatgtgttgatttcttttcttgtaatgtttttatctggttttggtgtc

SEQ ID NO: 126668 - DNA, 201 bp, Homo sapiens
ttttctcaatttttttgtatctattgatgtgattatgttttttccttcattttgataacatggtggattattttgattattgatgttgaaacagccttgcrttctccagaaaaatcccacttggctgtcatgtattatcctttttacacactgcaggttttgatttgctaatattttgttgagaatttttgtgtctatatt

SEQ ID NO: 126669 - DNA, 201 bp, Homo sapiens
cagattaagaaaattaccacctcttcctagtttggagagaatttttatcaggaaaggatgttgtgtttttctcaatttttttgtatctattgatgtgattrtgttttttccttcattttgataacatggtggattattttgattattgatgttgaaacagccttgcattctccagaaaaatcccacttggctgtcatgtat

SEQ ID NO: 126670 - DNA, 201 bp, Homo sapiens
tacacagtaatagggtttgcaaagtgagatacttgttcctcttcatttccatctgtatgccttttatttctttttctttcctcattgagctagctagcacrtcctgtatgacgctgaattggagtgatgagaggagacatctttgccttgtacctgatcttatagcaaaagcatttggtcttttaccactaagtatgttag

SEQ ID NO: 126671 - DNA, 201 bp, Homo sapiens
ctctactcactaaaagtcagtatcataccccccttcccctctgccccacctctcaaattgtgacaacgtcaaaaatgtctctggaggttgccaaatgcccyttgtagggcaaaatctctccggctgagaatcattgatatacacagtaatagggtttgcaaagtgagatacttgttcctcttcatttccatctgtatgcct

SEQ ID NO: 126672 - DNA, 201 bp, Homo sapiens
tgagaaaacacaaataaagtacctggcacataaagagttagttctttttaatctcatcccatattcttatagcagagtgaatatggcagaacaagaacacragtcataaattaacactattcattctttttttatatctaatatatggaaacataattaccattaatatttatatattggccttttattctctgacttgtc

SEQ ID NO: 126673 - DNA, 201 bp, Homo sapiens
gtaggcaagagagaagaaggttgagaaataccttcaggtattcaatcaccttgtttatccccaaatgggacaaatcaaatcatggttattgaacataaaawttatttgcaatgacttccataattgtgttggttgattatttaggttactgtctacacacacacacacacacacacacccacacaatcactcacattcaca

SEQ ID NO: 126674 - DNA, 201 bp, Homo sapiens
ggtgtccaatcttttggcttccctggggcacactggaagaagaagaattgtcttgggccacacataaaatacactaacactaatgatagctgatgaacttaaaaaaaaaaaaaagaactcgcaaaaaatatatatcataatgtttttaaaagtttaccaatttgagccgggtgcggtggctcatgcttgtaatcccagcac

SEQ ID NO: 126675 - DNA, 201 bp, Homo sapiens
catggtgaaacccagtctcgactaaaaacacaaaaattagctgggtgtggtggtgcatgcctgtagttccagctacttgggagactgagacaggagaatcrcttgaacctgggaggtagagattgcagtgagtcaagatcgagccactgcactccagcctgggtgacagagtgagactccatctcaaaaaaaaaaaaaaaa

SEQ ID NO: 126676 - DNA, 201 bp, Homo sapiens
cttcaggtgtgcaagaatatagatgctctttaaggtactgcaaacatgacatacatgttgacacaataaataacaatagttatgaagcctcacttacatgraagctgaagtgctttcttttgggtgggatacacttaaatctgacttgtgttgcattaacatgtattgccccttagttagccctactcaattatgtctttg

SEQ ID NO: 126677 - DNA, 201 bp, Homo sapiens
ccagaatgtaataggaaagtactgggccatccaatagtttgaaaccatccaaaatgaagggaagtctacaaacaactgtcctggactattcaacatatcartatcatgaaagacaaaagaggttgagtcgctgttggagataaaagcaaattaaggagatgggacaactacatgcaatatataatcctggattaatataaa

SEQ ID NO: 126678 - DNA, 201 bp, Homo sapiens
caataaaaaaaggacttgagattcaattgctaggtatacatttaaaaagcctttcaaacttgaattatacaaattgtgatttgaattataagttcagtggrgaattggtatgatcatcatttgagactcaaattaatgacatggaaagtcagatgcaagaaatagctgaaagtacacacaaaaaattagacaggatgagag

SEQ ID NO: 126679 - DNA, 201 bp, Homo sapiens
gatatttaaaactattcatggtaaatttagtttttagcattacacaaagttcttatttgtctcatttaatgccttggggcctgaattctgtattgtttgckatcaggaccacacaccctgctttcttattatttgcatttgccttgtacatttttgcccatttatttatttttagcctttttgaatcactttttttaggct

SEQ ID NO: 126680 - DNA, 201 bp, Homo sapiens
attggtatgatcatcatttgagactcaaattaatgacatggaaagtcagatgcaagaaatagctgaaagtacacacaaaaaattagacaggatgagagcaraagtctgcaatctggataatatgctgaggggatcaattgctaatgagaaactgcacagagaaagaacagatggacaaactaaacaaataatgggggaatt

SEQ ID NO: 126681 - DNA, 201 bp, Homo sapiens
atatacacctactatgtacccacaaaaattaaaaattgttttaaaagatgttatttgcatgcataaagaaaatgttatttaaatttcctacttaaaaattyttctttttcctatgatagtagataaatggcaagcaaaaaacgagaagtccagttacaggtgggtctgacatatcaacaattctttatctggtgcactagt

SEQ ID NO: 126682 - DNA, 201 bp, Homo sapiens
gatgcctatctgaactgtgtctgaacctgctcaaccattggaagctactttggatgacctccaaagccaaacattttatgcattccaaaaagggagaaagwtgactcagcaattgtctgcctaattttcagctgctgaactatttcaatgacataatgaatattttaaatgattataattattcttaaaatgttagtgaat

SEQ ID NO: 126683 - DNA, 201 bp, Homo sapiens
ccagactgggtggcataaacaacagacatttctcatggttctggaggctgggaagttcaaggtcaagatgctggccaatttggttcctggttcatagaccygtcttttcactggacctttcctggcaaacagaaagagtgatttctctctctgcctcttcatagaaagccactaataaaataaaatcctgagggcccttcc

SEQ ID NO: 126684 - DNA, 201 bp, Homo sapiens
agcgggtgatggaaagggcaagttagtcatgtaacctggtctcatggaatgcttctccctcccagactgaatttccttctttgctgaatacacaggactgycctgcatagccttcttcattagagaaagctatgagaagctttgagctcctccaagtaaactgtttcatactctcaaacaggctgttaatgatgatgatta

SEQ ID NO: 126685 - DNA, 201 bp, Homo sapiens
ggggaggacgtggcctgcccccagggcggagtgcagtacggggccggagttgcctgctcagaaagtgagagctcctcccctccctccccaccgggctcccraggggaccagagtcccaccagttattcctcaagagactctgaagccttgccatgagccaagcaatagaggaaggtagaatgaaatcctaagggagaaaaa

SEQ ID NO: 126686 - DNA, 201 bp, Homo sapiens
acgcatacatgcagcatgcatgcaggtgagcttacacacacacgtgccacacatgcagagaaacagatgcaaacctgggtatgtggacagctggagtcaartgacccagctcccatcttgtaagacatgatgcactgtggccaagacgtagagagtcttactcctgtctaactcagtaaagcccacaaggagattaaagct

SEQ ID NO: 126687 - DNA, 201 bp, Homo sapiens
actcccaccccacaaaacacaaacacaaacacacacacacacacacacacacacacacatcgtagacagggaggtatgatggcattctagatgcttggtgraaaacaatttggagaatgaaaagacaagccacgaacttggagaaaattttgcaaaacacattatctgataaaagacttctgtccaaaagatacaaagaac

SEQ ID NO: 126688 - DNA, 201 bp, Homo sapiens
gccacgacggggaggacgtggcctgcccccagggcggagtgcagtacggggccggagttgcctgctcagaaagtgagagctcctcccctccctccccaccrggctcccgaggggaccagagtcccaccagttattcctcaagagactctgaagccttgccatgagccaagcaatagaggaaggtagaatgaaatcctaagg

SEQ ID NO: 126689 - DNA, 201 bp, Homo sapiens
gccagcaacgccttccaggtgagaagccccggcctcagaccccgcattcaccccccatgcagtctgaccacactgtcttcagtcagcccccctctcccacrtaccctccctagccgtgcaggcaggacagagcaagttgccctggacccagaggcagggagcctcgctctggccacagcgctgctccttacaggcctgagt

SEQ ID NO: 126690 - DNA, 201 bp, Homo sapiens; identical to SEQ ID NO: 21553

SEQ ID NO: 126691 - DNA, 201 bp, Homo sapiens
atgcactcatcccacatagtgtgtgcccagctggatattgacatcgcgcaccatgtgtaaactggcatcacatgtgtgtgagaacacacacacacacacasagagaagggatgccaaccagcatgtgtattgtgtgcttgggttctctctttgccttttctccagcccctgatggccttgactttgaaaccaggtgcagac

SEQ ID NO: 126692 - DNA, 201 bp, Homo sapiens
tctcttccagaaagctcctgctgcttctgtaccccgcctgtccctcccagctgcgcagggccccttcgtgggatcatcagcccgaagacagggatggagargcctctgtgctcccacctctgcagctgcctggctatgctggccctcctgtcccccctgagcctggcacagtatgacagctggccccattaccccgagtac

SEQ ID NO: 126693 - DNA, 201 bp, Homo sapiens
ttcaagcacgaactggacaacatcctgccaggagtattgtggtcagatgcctacatggggagggaagtgggattaagtgattgccaagtttcaagaccctkgttattcagtgtctgggaaaatgcactcatcccacatagtgtgtgcccagctggatattgacatcgcgcaccatgtgtaaactggcatcacatgtgtgtg

SEQ ID NO: 126694 - DNA, 201 bp, Homo sapiens
ccccacgttcccatcctaacgcatctctcctctcttccagaaagctcctgctgcttctgtaccccgcctgtccctcccagctgcgcagggccccttcgtgrgatcatcagcccgaagacagggatggagaggcctctgtgctcccacctctgcagctgcctggctatgctggccctcctgtcccccctgagcctggcacag

SEQ ID NO: 126695 - DNA, 201 bp, Homo sapiens
gatcctcccatctcagccccccgagtagctgggattacaggtgtgcgccactaggcccagctgatttttttaattctatttttagtagagacggggttttsccacgttggccaggctgatctcaaactcctggcctcaagtgatctgcccaccttggcctcccacagtgctaggattacaggcgtgacccactgcacccat

SEQ ID NO: 126696 - DNA, 201 bp, Homo sapiens
gtgacatgtcctattctgttctcttgtgcttcctacaatctgaatgtaaccagcttagttgacagttcagcccactcattggcctggacccatggaagccrtaacactgctctatgatgttagacgcggcttttccactgtgccctaattctgcctcacgccttgtggtcacctaggccagggtttgtatgtggagaagaa

SEQ ID NO: 126697 - DNA, 201 bp, Homo sapiens
accttatgcccctcagaattgccagacttcaagtgctggcagtgatgcggggcctggacttcaatattgctggtggtggtgcaaactgcaatgcgtacccsagaagggaagctggcagcttaaaagttagcagcgtgtgtgccctttgattcagagagccacttgcgcgtggctctccggagagatttctacctgggtcca

SEQ ID NO: 126698 - DNA, 201 bp, Homo sapiens
tttagggtgacctcacatcccagtgagcccctcaattcagggccagggaggttgattggttaccccaccccaacccaacccaggctgttttcagcacggcrgcctgataagctgtgattcagaccttgaagttgttaggcaaaagctctccactcggctctgtatttgactcaggaagaactgaagtctttataatggcct

SEQ ID NO: 126699 - DNA, 201 bp, Homo sapiens
cagctaatttttgtatttttagtagagatggagtttcaccatgttggccaggatggtctcgatctcttgacctcgtgatccgcctgccttgtcctcccaargtgctgggattacaggcgtaagccagcacgcctggcctaagatgtcttttaaaacgttgcgagggggcaattccaagatggccaaataggaacagcttca

SEQ ID NO: 126700 - DNA, 201 bp, Homo sapiens
gtacctggtgagggccttcttgctggtggggacttggcagtatcccaaggtgatgcaggaccatcgtgagggggctgagcatgataacatgctagctcaaktctcttttcctcttgtaaagccaccaattcccttcccatgataaccgattcatctattaattggtgaatggattcatcagtttatgagggcagagcactc

SEQ ID NO: 126701 - DNA, 201 bp, Homo sapiens
cctgtcatattggatagggacctgccctgatgacttcatcttaaatttactgcgtttgcaaagactcagtttcaaacaacgtcacattcagagctcccagrgttaggacttcaacataacttttgggggaacacacgtcaacccccaactggaagtcttgcttgactgagttcaggtccttctctctgctcgcatggcatc

SEQ ID NO: 126702 - DNA, 201 bp, Homo sapiens
aaaaggaatttagttcttacagttatggagactgagaagtccaaagtccaggagctgtacctggtgagggccttcttgctggtggggacttggcagtatcycaaggtgatgcaggaccatcgtgagggggctgagcatgataacatgctagctcaagtctcttttcctcttgtaaagccaccaattcccttcccatgataa

SEQ ID NO: 126703 - DNA, 201 bp, Homo sapiens
accaatcagtttgtctgctttctcattacctagagataggggtccaggaagttgtgtgtgagagcaaatatgagaaatatgaaaaggagctgcatgagaaygaataacttgttgaagtcttaaaaataaattaagcggctgggcatggtggctcacacctgtaatcccagcactttgggaggccgaggcaggtggatcatg

SEQ ID NO: 126704 - DNA, 201 bp, Homo sapiens
gggaaagcagagacaaaagtgagcctcacctcaatgcccttcccatctctctggattcttggttccttcagtccttggtgcctcggtagctttctcgtgtyttcgaacatatgtttttaatattttaccttccttttctagttgttcttggcaggtagctttatctactgcaaggtagcctgatacatccagaggcagatg

SEQ ID NO: 126705 - DNA, 201 bp, Homo sapiens
ctctggccctgggagtggccgctctcgaattacaacaaaagaggccggaggccgggcctgctgcggcggccgccttcggggaagggggtgggtccggggargggtttgccatcctcctctagttaaaagtaagggggaaaagagtaaacgcgcgactccagcgcgcggctacctacgcttggtgcttgctttctccagcca

SEQ ID NO: 126706 - DNA, 201 bp, Homo sapiens
actcccagtggtccccaaccatacttctagaacaaccgctggcccagagcaggaaggtaaactgtggagggggtgaacagagaagcaaagtctccagtgtyccagtgttggtcacagccagctgtggctggaaggctgggaagggaacaccactcatatgtttgtctcagtcagctcagctgctatgacaaaacaccagac

SEQ ID NO: 126707 - DNA, 201 bp, Homo sapiens
cctttgtgtctgcagctgcgcctgaacggcggccgcaatccctacgagggccgagtggaggtgctggtggagagaaacgggtcccttgtgtgggggatggwgtgtggccaaaactggggcatcgtggaggccatggtggtctgccgccagctgggcctgggattcgccagcaacgccttccaggtgagaagccccggcctc

SEQ ID NO: 126708 - DNA, 201 bp, Homo sapiens
ttggtgaccgtggcctgcctttgtgtctgcagctgcgcctgaacggcggccgcaatccctacgagggccgagtggaggtgctggtggagagaaacgggtcycttgtgtgggggatggtgtgtggccaaaactggggcatcgtggaggccatggtggtctgccgccagctgggcctgggattcgccagcaacgccttccagg

SEQ ID NO: 126709 - DNA, 201 bp, Homo sapiens
ccgctgaacgtgcatcagcgtctgtactcagcaggaccgtgtgtctcttcagcaacccctggtgcgactgagaggcggtgcctacatcggggagggccgcrtggaggtgctcaaaaatggagaatgggggaccgtctgcgacgacaagtgggacctggtgtcggccagtgtggtctgcagagagctgggctttgggagtgc

SEQ ID NO: 126710 - DNA, 201 bp, Homo sapiens
ttggagtgtgttctgttccctgccaggaactctactggaaaaagcattctagagagatgacaaggcagtaggtaaaggaggtgggacctcccagccctgcrtggtggaaatgtaggagtggggctggattggcgtcgagaatggacgagctttccatattaagccaaggggtatgaaatcactggttctctatgtaggtct

SEQ ID NO: 126711 - DNA, 201 bp, Homo sapiens
gtgtcaaaagctgaagctggtataggctgatatgatgggacgtgtgccatgggcagggctggggtgagagaagggagacaccgtcgtgggaaccgaagcasggaaggtaggcacgtgccacacataaaggcttttgtatccaagctgaaccaggactttttatatgggatggcacattgggagtgacccattctggctttg

SEQ ID NO: 126712 - DNA, 201 bp, Homo sapiens
aaaagagttctgggtatagtgagcacagaaagtggccagcgcccagggcttgctccggtggggcttaggggcttaacgtgccggtcagaccgtggataagrctgcccctccaggacccctcaagctcctctgaacttcaggctggagcagtgaaaccagggagggcaccagggacgttctgggttttctagcctggcctgt

SEQ ID NO: 126713 - DNA, 201 bp, Homo sapiens
ggaaatacaaatttaatcttgtatatcgttgggagagtttagcaatcagcttgtactgctcattgacaaagaaaaataaagctaaagaatgacaacaggcygggcacagtggcccatgcctataatcccagcactttgggaggccgaggcaggcagatcatttgagatcaggagtttgagaccatcctggccaacatggcg

SEQ ID NO: 126714 - DNA, 201 bp, Homo sapiens
ctgaaggcagcacctccccagccaccactcactggaactcagaaaacgttgccagcaggtcctccgtcttgagcgctggttcaaagtcatagatctctacmacgtgggcaaggtccttctctccaggcagctcctccacgaaggaggatgtgtccaaatggatcttctctatctgaatctccttcttcgtcaggttgtctg

SEQ ID NO: 126715 - DNA, 201 bp, Homo sapiens
taagttggctttacctgtcctgtccagtcttgagctgtagtcttagcaatccacaaacactgtttgagtgcttttcagcctggatcctggaatgaagaatycatttattccacaaatgctccgctctccaggagttcatgtcaagtggcagaaataagaaataaccttaatcaggccaggcatggtggcttgcatctgtaa

SEQ ID NO: 126716 - DNA, 201 bp, Homo sapiens
gtacctttgagattcataaatgcatggaatattaaagtcgggaaggaaacttatacaacttctagtccaattcctttggactagaaaaaggatgagagaaractggtattcagagaggctgagtgattggccaaggtcacacagcaaatcagtagcaaactttatttgctcttgggggataagtgaatcccaagagaatta

SEQ ID NO: 126717 - DNA, 201 bp, Homo sapiens
aatattaaagtcgggaaggaaacttatacaacttctagtccaattcctttggactagaaaaaggatgagagaagactggtattcagagaggctgagtgatyggccaaggtcacacagcaaatcagtagcaaactttatttgctcttgggggataagtgaatcccaagagaattagcactgttctctctggggagaagaggc

SEQ ID NO: 126718 - DNA, 201 bp, Homo sapiens
ctgggtgggtcccaggttgctccaatgggaggtcctgagccctgagcagaagctgcctgggatcccctgccctgtggctcctcattccggcatccagaagrgacaggcctttaaaatagctgcttacgccctctgggagcttggcctccccaggcaatgcagtgtttctgctaatattgtttatgacaagccagggcactc

SEQ ID NO: 126719 - DNA, 201 bp, Homo sapiens
ttatttatatttgcaatatcccatcttttccagaaggaaatgaagataatacaaacctaaatacaattcaagatagcataaaataaaaacagatgaaagayagacaggtgctggcaaaatggtagtggcttaaaatggagccagggaggggttaattttacaaatgtgtactagggggttctatgcatttattatgagtag

SEQ ID NO: 126720 - DNA, 201 bp, Homo sapiens
ataactaacagtacctgtgagatagaaatatggctgtgagtcaagagaagcccaccactctagagattaaagggaatttctctctgaggactgagatttaygagatgagccatgccgtcagatcctcatgggagatccaaaaatgagtttcatggggcgatttctcagaatgctccacagcttaggctgaagcatcactgg

SEQ ID NO: 126721 - DNA, 201 bp, Homo sapiens
tttatccatttcttctagatttctagtttatttgtgtagaggtgtttgtagtattctctgatggtagtttgtatttcggcacaggctatttgttttgcccyagcctcatccttagtgttatttcctcgaatccccactcctccttcagagaaaaactaaaacacaacttctcccaaagcagcctcctgaccacccacccga

SEQ ID NO: 126722 - DNA, 201 bp, Homo sapiens
gtagctaagcttaccaaaggttgctatgtgtgcaacatccatttgccaaatttcatttggagccaaacttcgtgggttacagccttctacaggtatagttycagggacatgctggcaagtaggacaggcttgtattatagccctagcttggctatgagataaatggaacatgcgagtaagggtggaagtattttggtgcag

SEQ ID NO: 126723 - DNA, 201 bp, Homo sapiens
gcacgatgagtcagctgagttagaagtttcacaaaatgcaaagcaggtgtggcagcccaaggctcagacagattaacaggaatccctagcccagggatacsacctaaaatcatcacagtagagatattatgtgtttgcaatgtgctatgattagtgcagtgatataactggcaagatttacaggtcaattgggtattgttt

SEQ ID NO: 126724 - DNA, 201 bp, Homo sapiens
cttggtcagctgtgcgcgtccagttctccacgtactgagctatttgaatagaattatgcaaagctacagaagatatcacaacagaagttactagcatgacmaagtaaacagtagcaaaaattatcatgcctaaggctctacgggcacgatgagtcagctgagttagaagtttcacaaaatgcaaagcaggtgtggcagccc

SEQ ID NO: 126725 - DNA, 201 bp, Homo sapiens
ttccccctacaggaaaagggaggtgaaacccaggcgagatgggtgcaagtttctgaacactttcattcggcagctttaattgagcgtgtattatgtgccarggagggccagggttttcgggataggaggtggacaaggcacgggccctaaggctggtggataaggacatcgaagggttaaattctgggacggctgcaggga

SEQ ID NO: 126726 - DNA, 201 bp, Homo sapiens
gagcctcagagccaggcacaggaggtccttctgcacaatggccacgcattagctgtgtcctgttcagtccccaagcacagggcttgttaatcccagccctrccattccaggaaggaccccagaggtcacggaatccaaagcgttgaatttacaaagaagaaaactagtcctcggagaagaggcttggccaaggccatagac

SEQ ID NO: 126727 - DNA, 201 bp, Homo sapiens
aaggagccgcctttcaggtgacagtctacttctgcacaggggtcccttgttttgcagctcgctgcctccttgggactggcaaagccctgctcttgcttaargagccctctctgtgcagagggctctcccagcatgcccatcccccacccggagcctcagagccaggcacaggaggtccttctgcacaatggccacgcatta

SEQ ID NO: 126728 - DNA, 201 bp, Homo sapiens
caccacatccctgcttctcaaagtgaggtccttggaccagaggtatctgccaccacctgagagcctgggacctgctcaatcccagggcccgtggcagacckacacatcagcatctgcatttggcaggattctcaggtgaccgtgtgcacactgcagtgtgagaagccgttgtctagatgatgttgaggctccgctgcagct

SEQ ID NO: 126729 - DNA, 201 bp, Homo sapiens
agacatacagaaacctaaagccacttcccgcaggccctcgtgagatgtcggtctgcagtagatgagtggggtgaaacagtgggggacacacatttccagcyccgcctccaccccacacgtaacactggccctcgtgtccccaacacgagcccttgctgcatccagccgccctcacggctgcactgtcgagacgcctgggcg

SEQ ID NO: 126730 - DNA, 201 bp, Homo sapiens
gtccagtttgaaggaatgagtgcgaatggtgtcctgactgttttcctaaggccttgcaaggaacacgatcctttcagaatttcctccaccacaagacacayaaacagatgcacactttatacatacagagacccatgtgacatagacacatacagggagagtgcacagagatccacatgacacaccggcacacacacacaa

SEQ ID NO: 126731 - DNA, 201 bp, Homo sapiens
tggacaagggccctgagctttatacagccctccttatttattaggcaaaagagatagtgagaagcggggtggaagaaggggtcagctgctcagtctagagyaggcttgcaagactgcattcctcgaacaacaggctaaatgttgcagtagataacctcagcgccagggagtgattgcctccagcaaaccttctgtcggcag

SEQ ID NO: 126732 - DNA, 201 bp, Homo sapiens
agtaaaaaaaatcagaggccaggtgaagtggctcacgtctgtaatcccagcactttgggaggcagaggtgggtggatcacttgaaaccaggagttcaaggmcagcccggccagcatggtgaaaccctgtctctactaaaaatacaaaaattagccacacgtgatggcacatgcctgtaatcccagctactcgggaggctga

SEQ ID NO: 126733 - DNA, 201 bp, Homo sapiens
tgctagacccactgtttacagcagtgtccaggcatggcagcttctcagtaaatgtgtgtttaatttgttattcattgaagcggcccgccactgacttgccrtgaaatcacacagcagacaggtgttgacctcttaccatgtgcagataacatgtaagtgtcagagagacatgggcctacactctaattgccgatcctccag

SEQ ID NO: 126734 - DNA, 201 bp, Homo sapiens
tctcctgcctcagcctcctgagtagctgggactacaggtgcccgccaccatgcccagctaaatttttgtatttttagtagagacggggtttcaccgtggtwgcagggatggtctcgatctcctggcctcgtgatccacccgcctcggcctcccaaagtgctaggattacaggcgtgagccaccgcacccggccgaggccac

SEQ ID NO: 126735 - DNA, 201 bp, Homo sapiens
taaatttttgtatttttagtagagacggggtttcaccgtggtagcagggatggtctcgatctcctggcctcgtgatccacccgcctcggcctcccaaagtrctaggattacaggcgtgagccaccgcacccggccgaggccactgttttgttttgttttgtttcttagaagatctcgctctgtcacccaggctggagtaca

SEQ ID NO: 126736 - DNA, 201 bp, Homo sapiens
aagaaagtgcatcaaacaggaaggggctgtgagagccagttgcacgcttattaaaaacaatagctggagttctgtgcttatcatatgcagtgctggctaakctgctcacctccctggtacccacagcaccccatgcattacgatgatcattcccattcagcagaggagaggacggaggcttagcaaggtgagcagtggtct

SEQ ID NO: 126737 - DNA, 201 bp, Homo sapiens
ctcgcacgcacacacacacacacagcctccctattcagggacatgcgctttccttacttggcctctgcaaggctttgagctttgactgcttggttccctgygtgaggggccggatcttgagcaccgagaactcccgggtcagggcttccgcagctgtggaaagaaagcaggcgtggagccactccctcctcctcaggaccc

SEQ ID NO: 126738 - DNA, 201 bp, Homo sapiens
ccagaaggtggcggtaggcaggagagggggtttgtcccagctcaagaatcagaagtagaagccctggggaggggtctcttgccttgttgaccagcatgccrtcctccgcagccgcccctgacctggtcctcaatgcggagatggtgcagcagaccacctacctggaggaccggcccatgttcctgctgcagtgtgccatgg

SEQ ID NO: 126739 - DNA, 201 bp, Homo sapiens
tagatctattaaggttgactgagacctgctgcaggggacgctaggggcactttggccttcgatctttgcctttcacccttgacactgtttggcaggtgaaygacatccgggctccagacttcatggccacttcaacatttctgtcaacagcctgtgtctgtttcatgtaagaggcccaaacaagaaaatcaaggcttaaga

SEQ ID NO: 126740 - DNA, 201 bp, Homo sapiens
ataccaccacgcctggctaatttttatattttttgtagagacagggttttgccatgttgcccaggctggtctcaaactcctggactcaagcaacccacccrccttggcctcccacagtgctgagattacaagcttaagccactccactcaacctcttaggagcattttgaggcgcttcttacagatgaagcatgtgaagga

SEQ ID NO: 126741 - DNA, 201 bp, Homo sapiens
atgcggcacgtgacaatatttccaaatcaccttcccagatggctggatcaatgtttgtttggttggttgattggttccccatttaattcaacaaatagacyatatggagcctcttctgcagttctataaatttaactactcgtttctgcatttttattcatctaagtaatcattactaatacctactaaaattattcctac

SEQ ID NO: 126742 - DNA, 201 bp, Homo sapiens
ttactttataaactttttagtttttaaaacattttttgactcttgtaataacacttagcttcaaacacaaacactttgtacagctgtaccaaatttttaartttctttagtattctgtaagctttttttctattttaaaaattatttacttttgtctgtgttgtaaacttttttgttaaagacgaagacacaaacacgcac

SEQ ID NO: 126743 - DNA, 201 bp, Homo sapiens
tggatgtaataaaaatcctgccaccgtgactgctatgatgggagtgtcacgaggaaggggacaggtatgtcaagtgctgactaatgtgctaccacttcgcrttagttatttgacgccgttcatcttattcaatcttgcggccccgagagcgggcaaagccaccctcccctctttgccgaagaggaagctcagatcctgcag

SEQ ID NO: 126744 - DNA, 201 bp, Homo sapiens
gtgtcacgaggaaggggacaggtatgtcaagtgctgactaatgtgctaccacttcgcattagttatttgacgccgttcatcttattcaatcttgcggcccygagagcgggcaaagccaccctcccctctttgccgaagaggaagctcagatcctgcagcaacaaaacaggggactctgctcccatgacttggcaccttgtt

SEQ ID NO: 126745 - DNA, 201 bp, Homo sapiens
tcctgcagcaacaaaacaggggactctgctcccatgacttggcaccttgttcctcagtttccctcattttccaaatgtccctgtaatggcagagacaagcrtatagaatagttgcagacacttgcgacatgctcgttgcaggttgggatcgggctaagacaacctccttccttcagccccgggcctgggcagtgcaggctt

SEQ ID NO: 126746 - DNA, 201 bp, Homo sapiens
tctgctcccatgacttggcaccttgttcctcagtttccctcattttccaaatgtccctgtaatggcagagacaagcatatagaatagttgcagacacttgygacatgctcgttgcaggttgggatcgggctaagacaacctccttccttcagccccgggcctgggcagtgcaggcttcgggaaggccctgcagcaacaggc

SEQ ID NO: 126747 - DNA, 201 bp, Homo sapiens
tcctcagtttccctcattttccaaatgtccctgtaatggcagagacaagcatatagaatagttgcagacacttgcgacatgctcgttgcaggttgggatcrggctaagacaacctccttccttcagccccgggcctgggcagtgcaggcttcgggaaggccctgcagcaacaggcgacagccccgtttcccttgtttattc

SEQ ID NO: 126748 - DNA, 201 bp, Homo sapiens
ttgcagcctgcttgcacaagctctcctgcagaactcttttctggaacccccggggacgtgcctccctttgccgctgctgtgtgcccctgaggatgagtcartgtctccctcccagagggcctcccagctgtctttctgctcctccctgctttatttgcacaatgcgaggagcacagacttgctgctcacctcccagggcca

SEQ ID NO: 126749 - DNA, 201 bp, Homo sapiens
atgacctgctgaacctcaatggcaccaaggtggcagagggccacaaggccagcttctgcttggaggacacagaatgtgaaggaggtatctgagcggagtgsggggatgggaggcctcagagggactcgaatgcctctgcctccacgatcacctggctggagcccaggcctggcactgaccctgtgtcactctgaccactgc

SEQ ID NO: 126750 - DNA, 201 bp, Homo sapiens
tctggggaccctgctccatctgggcttagcagcctagaccctgatgcgtatgcccctcccactctggctgccaccaaccttttttctggtgtcccaatgcyaagtgtccctaccacaccaggtgtcacccttcaattatatctcaaatgccctcctctgaagcgcccccccgtcccggcaggtgtggcactctgctcacac

SEQ ID NO: 126751 - DNA, 201 bp, Homo sapiens
cgttgcaggttgggatcgggctaagacaacctccttccttcagccccgggcctgggcagtgcaggcttcgggaaggccctgcagcaacaggcgacagcccygtttcccttgtttattctgaaacaagggctattctaaaccaagcgcatgtgttccaagactctgcatctgttctcaattcctcccgagggaagagaggga

SEQ ID NO: 126752 - DNA, 201 bp, Homo sapiens
agtaagaggactgcaccaaaggggtggctttgagggtatccgccctgcctaaaagagttaaaagtgtccgccctggtggtggcctttccttggccaggcayggccaggcaagctggtgtccctgcaggcagcctgcacagagcccctgggccgggccaggcgccaagttcaagggtgccccgtggcatccttacccttaag

SEQ ID NO: 126753 - DNA, 201 bp, Homo sapiens
gcaggatcccccaggagagtgaggaagggtggcctcagcggagatcaccattgtggctgctttactctgagacctgagcgccctctgcagagaaggaccayctgggggagaagaataccccagcatcagttgtcacaggctgttggtgcgctgtccgcttacccagcaggagcagacgatgaagggttgtgcgacagggac

SEQ ID NO: 126754 - DNA, 201 bp, Homo sapiens
ggtgttgagggagtaggcaggatcccccaggagagtgaggaagggtggcctcagcggagatcaccattgtggctgctttactctgagacctgagcgccctmtgcagagaaggaccacctgggggagaagaataccccagcatcagttgtcacaggctgttggtgcgctgtccgcttacccagcaggagcagacgatgaagg

SEQ ID NO: 126755 - DNA, 201 bp, Homo sapiens
aaactggttttgtactccctccagcccaggattcccaccatctttcacccagtacactcatcttatttccaaccacccaaacccctcctgacctcagtgtytgtgcctaggccaaatctcagcactccccctccaggaattttcatgccacgggccccatccctataatccctggacttgcttgcagtgatttcatttcct

SEQ ID NO: 126756 - DNA, 201 bp, Homo sapiens
gtgaggggccggatcttgagcaccgagaactcccgggtcagggcttccgcagctgtggaaagaaagcaggcgtggagccactccctcctcctcaggacccmgcggcacacccaccaccccgaacccctgcagccgtgttgtgcacctattcaaagctcagggcagggctgctccgacaccgccctggatgggcaagagacg

SEQ ID NO: 126757 - DNA, 201 bp, Homo sapiens
aggctgaagcaggagaattccttgaacctgggaggtggaggttgcagtgagttaagatcgcgccaaagcactccagcctgggcaacagagtgagactccayctcaaaaaaaaaaaaacaacaacaaataaataaactgtcacaataatctagtgaagcagatactattactacttctgattttggacatgagaaactgagg

SEQ ID NO: 126758 - DNA, 201 bp, Homo sapiens
cttcccattggtgtccacacaggggcatggaagtcaggctgtctaaagggcaaggtgctacccccagaggccatcacggtccatcagttaacccaaagatrtcaggcatgggggcctgagaaatagggcgtgcacaggaccagagacaccacaggcattcacatttgattgagttaacacctggtgcatgcaaatcaaaac

SEQ ID NO: 126759 - DNA, 201 bp, Homo sapiens
aaggccagccctgaggaggaacaagggggccttggcttccctccttcctgaaaacagcggcatgttctggccagggctctaactgggggagaaaaggggcrttgtgtccctagtgtctctcccagtgcacgggtacacgtagcctgcagaagctttatctcaccctctcactctctcctacgtcctcacccatctcgtttt

SEQ ID NO: 126760 - DNA, 201 bp, Homo sapiens
cgtctgtggctttgccttttcaaggacggggaggataaggcttccaaggctgagagcgatccaaggagggggtggtgggtggtgctgtctgcaggatgggwgatgaagaacagaagctgctggaaaccagcccctcctgcagccttctagctggagaggtggggctgccttcctagcagaggagtgggaagggaagcacga

SEQ ID NO: 126761 - DNA, 201 bp, Homo sapiens
tccctccttcctgaaaacagcggcatgttctggccagggctctaactgggggagaaaaggggcattgtgtccctagtgtctctcccagtgcacgggtacaygtagcctgcagaagctttatctcaccctctcactctctcctacgtcctcacccatctcgttttccagcttgccctgttggctagcaaagtggatgaccag

SEQ ID NO: 126762 - DNA, 201 bp, Homo sapiens
acaggcaggcccgcggcaggcctggcccatagtcgctaaagaagtactggttgcctggtgtctctgcagccaggccagtagggtaaccctctccttccackcctctttcttcccagaacctgaatatccaggtggaggacattcggattcgagccatcctctcaacctaccgcaagcgcaccccagtgatggagggctacg

SEQ ID NO: 126763 - DNA, 201 bp, Homo sapiens
aagcccagaaccacagacttggagaggcctaaccagagagttatttattttaaaagatgaatagccgtggccatgtgcacgtatacagtgcctggtggttkctgtttgaggtttgctatcattttgctgggtgagtgtgtatctccctgtattctggccagtgccatccacttaataactactatcaattgcctaagcctg

SEQ ID NO: 126764 - DNA, 201 bp, Homo sapiens
agggacctgtgcagagctcagaggcaggggtgaaggggcctcctggctcctggtggccccgctttatccgctttctcatcatttcctagattcacagacayacagaaacctaaagccacttcccgcaggccctcgtgagatgtcggtctgcagtagatgagtggggtgaaacagtgggggacacacatttccagccccgcc

SEQ ID NO: 126765 - DNA, 201 bp, Homo sapiens
tgagatgtcggtctgcagtagatgagtggggtgaaacagtgggggacacacatttccagccccgcctccaccccacacgtaacactggccctcgtgtcccsaacacgagcccttgctgcatccagccgccctcacggctgcactgtcgagacgcctgggcggccaaggagctgcctaggcctgcacagctggaggccttgg

SEQ ID NO: 126766 - DNA, 201 bp, Homo sapiens
gggtgaaacagtgggggacacacatttccagccccgcctccaccccacacgtaacactggccctcgtgtccccaacacgagcccttgctgcatccagccgycctcacggctgcactgtcgagacgcctgggcggccaaggagctgcctaggcctgcacagctggaggccttggcatgtggagctgtgtttgccccatgcca

SEQ ID NO: 126767 - DNA, 201 bp, Homo sapiens
gccagcagagcagacagggacatggatccccaagtcccacctgtcactttacagagagaggaagggacatgtccacagtcacacgcctgtgacgagtgtcycatctccaacgcccaggcagccctcttccaggttcccacaccgccaggtcctccctgcacccttctgcttctcttcagcatcttctttttggggcctccc

SEQ ID NO: 126768 - DNA, 201 bp, Homo sapiens
tgggagggtgttgagggagtaggcaggatcccccaggagagtgaggaagggtggcctcagcggagatcaccattgtggctgctttactctgagacctgagygccctctgcagagaaggaccacctgggggagaagaataccccagcatcagttgtcacaggctgttggtgcgctgtccgcttacccagcaggagcagacga

SEQ ID NO: 126769 - DNA, 201 bp, Homo sapiens
atacatccagaggcagatgtgttgctgagcagaaatgacaaagaggtggtttctgtcccttgggcctgagggtccggtggcagagccagacatgacaacartgtaaagcaccagcaaaatgtgatgtcaaagggaagcagaaatacattcaatctgataggaggacctaggaaggtctctgtgaagaacaggaaggattgc

SEQ ID NO: 126770 - DNA, 201 bp, Homo sapiens; identical to SEQ ID NO: 21564

SEQ ID NO: 126771 - DNA, 201 bp, Homo sapiens; identical to SEQ ID NO: 21541

SEQ ID NO: 126772 - DNA, 201 bp, Homo sapiens; identical to SEQ ID NO: 21542

SEQ ID NO: 126773 - DNA, 201 bp, Homo sapiens
gaagccctggcgccagtaagttcctcaaggaggagggttgtggagaggcaagagggcccacacgatggaagacgggaaggccacaggtcccactctactasccctttgacctaggcttatagggtcgagtttgtttaaaaccgctacggagaggcatgttaggtaccagaggaccaccaggtcagatcagctgggtgtggg

SEQ ID NO: 126774 - DNA, 201 bp, Homo sapiens
cagcatgcctcatactgtgtgcagataatacacacttagccaagccatctaactgcgtgctgaggatcagacggcttttaattcagttcagtaactatgtrttggtgtcagatctcaagggaaaaggggagagggtgttagggagctcaggtgacaaaaggatgcctggacaaagcacagatgttctcctgtctatccata

SEQ ID NO: 126775 - DNA, 201 bp, Homo sapiens; identical to SEQ ID NO: 21545

SEQ ID NO: 126776 - DNA, 201 bp, Homo sapiens
catctaactgcgtgctgaggatcagacggcttttaattcagttcagtaactatgtgttggtgtcagatctcaagggaaaaggggagagggtgttagggagytcaggtgacaaaaggatgcctggacaaagcacagatgttctcctgtctatccataagtcacacaagtcgtgcttatgttaggaagagagatgaggactgc

SEQ ID NO: 126777 - DNA, 201 bp, Homo sapiens; identical to SEQ ID NO: 21547

SEQ ID NO: 126778 - DNA, 201 bp, Homo sapiens
ccctgacgttggaaggaagcccgcattccagtggcctcgagagagtcctgaaatgatggacagtactgctggagagacctcaggtcctctagtccaagagwtgaggagaacaagtctgaggtcaccccattcattgctggcagagaaagactgaaagccaagtcttctaactctcagacaagggcttcttccttatgccca

SEQ ID NO: 126779 - DNA, 201 bp, Homo sapiens
gtgtcagatctcaagggaaaaggggagagggtgttagggagctcaggtgacaaaaggatgcctggacaaagcacagatgttctcctgtctatccataagtyacacaagtcgtgcttatgttaggaagagagatgaggactgcataactttattttgcattaaacaaagaataaaaagagtctttattaaaatgttggactt

SEQ ID NO: 126780 - DNA, 201 bp, Homo sapiens
ctcaagggaaaaggggagagggtgttagggagctcaggtgacaaaaggatgcctggacaaagcacagatgttctcctgtctatccataagtcacacaagtygtgcttatgttaggaagagagatgaggactgcataactttattttgcattaaacaaagaataaaaagagtctttattaaaatgttggacttgggcactca

SEQ ID NO: 126781 - DNA, 201 bp, Homo sapiens
gaaatcaaacgtgtggacgtcctatttgggggcaggggagggggcttcacagagatgctggtgctgcctctcctcctctagattagggaccacatgacagygaggaccatgcctatctgtccttttagggtctcacacagcacttgggacatggtggcactggacaaatatttttgaatggatgaataacattttccctga

SEQ ID NO: 126782 - DNA, 201 bp, Homo sapiens
gaaaaccagacctggaggaaagtgcccccggagttattctgtctcatgtgcactgtgccctggccgatggtctccatgcctctctctcctgcctcttgtgrggccaccgctgctcaactggcacgatgtgccacgctctgacaggacaaagcatggggcacagatgcacaacaggctccacaggccaaggggcttggctct

SEQ ID NO: 126783 - DNA, 201 bp, Homo sapiens
ttttagggtctcacacagcacttgggacatggtggcactggacaaatatttttgaatggatgaataacattttccctgaggattggcaggattctgatagrtagaaagaagggacagagaatggcagggtatgggcctaacgcggaggcaccaccaggaagatctgagcgagacccttgaatgcactgtggtcaaagagga

SEQ ID NO: 126784 - DNA, 201 bp, Homo sapiens
aggtgtggtctttatagagaagcaggccagtcttcttcaggttgtaagtcagtagagttaaagtcatgacggttttggtgcttggctcccttcggggaacrtgtgggtggaagccctgggcggcgggggctgacgctgcctatgggtctataagcagaagataattgcatcccagccctgcatatggcagcccacccacag

SEQ ID NO: 126785 - DNA, 201 bp, Homo sapiens
ttttccctgaggattggcaggattctgatagatagaaagaagggacagagaatggcagggtatgggcctaacgcggaggcaccaccaggaagatctgagcragacccttgaatgcactgtggtcaaagaggatgaacggatgggagaagaaaccagaggcgaggagacagcacaggcctaggtgagatgacgacattatca

SEQ ID NO: 126786 - DNA, 201 bp, Homo sapiens
tggatcatatagcctccagtggaatgctgcgttggtcacatcccatgggccttcggctccctgcatatccccctttctgtttatgaattaattgaaaaaaygtaaggccaggctgggcagctctcattctccgattggcagtccatccgattttacagactataaacagaagacagagacgaaacaacattattccaagaa

SEQ ID NO: 126787 - DNA, 201 bp, Homo sapiens
tatggtagaattcaggggtgctgattttccattcaaacaattgaatattctgaacgtcctaattagcccaagaaggtgtggtctttatagagaagcaggcyagtcttcttcaggttgtaagtcagtagagttaaagtcatgacggttttggtgcttggctcccttcggggaacgtgtgggtggaagccctgggcggcgggg

SEQ ID NO: 126788 - DNA, 201 bp, Homo sapiens
tatgggcctaacgcggaggcaccaccaggaagatctgagcgagacccttgaatgcactgtggtcaaagaggatgaacggatgggagaagaaaccagaggcraggagacagcacaggcctaggtgagatgacgacattatcacgcccttcttatgttcccatgattctccttgcacagctgactgggaattgggagtgggaa

SEQ ID NO: 126789 - DNA, 201 bp, Homo sapiens
cgtaccataatctgtgcttcgctcgtagcctaggaccaggtgtgtgagattttaacatctcgctcatctgcaccgataactgaagagttgtcaaagaggastcacagcagaggaaaagaggaattcagggtcttgctaaacaagaaggtgaccttgaggagcccttgagtcattccagaaggtggcggtaggcaggagagg

SEQ ID NO: 126790 - DNA, 201 bp, Homo sapiens
ctcctcccgctggcctgaagacaagaatgctgggagcccagctctcccctcacgtacacaatccagtctgactcactgcccctcgacatggggtgctgggyttccaatgtgcacagcaccagcacccttcagctggttgaaggggacacccagaattctgagctccaggccctgccctgggtgagtcaccctcagtaccag

SEQ ID NO: 126791 - DNA, 201 bp, Homo sapiens
tgtgggcgtgttttctaagaggtctaactcagtctccatgagctggttagctagtgtgagcaccgaatgtgtgccccagagggcttccctgcctcctcccrctggcctgaagacaagaatgctgggagcccagctctcccctcacgtacacaatccagtctgactcactgcccctcgacatggggtgctgggcttccaatg

SEQ ID NO: 126792 - DNA, 201 bp, Homo sapiens
gcatctgatgaaaggagcttgcactcagaaagccctggctgtggcctggagtcagaaggcccagccaagccctgcctctgtcacttcaaatgtggccttcrgcaagccatgtcacttctctggacttcagtttccaatcctataaaatgtgagtaagaactcctgtcatacctgcctcacagagaggtcgaggggctccaa

SEQ ID NO: 126793 - DNA, 201 bp, Homo sapiens
catcaggtgccagtgaactcacagggtttactgagaacccgctggactctgctgcagcctgtaagcctggagggggagggggagaagggagacagagctcmctccacgtgctggtgaacttgagggaagcaaaactcacagactctgcttgcttaaaatttataagcaattctgcaaagcagtctagggggaaaaaaattt

SEQ ID NO: 126794 - DNA, 201 bp, Homo sapiens
atcctaacacttgtggttatggaagggattccacagcagtgaagtaaagagagaggttatgtgtgtgggcgtgttttctaagaggtctaactcagtctccrtgagctggttagctagtgtgagcaccgaatgtgtgccccagagggcttccctgcctcctcccgctggcctgaagacaagaatgctgggagcccagctctc

SEQ ID NO: 126795 - DNA, 201 bp, Homo sapiens
tgtttggtctcaggtgctgaggaaggtgtcaagctggcagttgggacatgggtctgtatctgggaggccactgttgttgtttttttgtttgtttgttttgttttttttgagacggagtcttgctctgtcgcccaggctggggtgcagtgtcgtgatctcagctcactgcaagctccgcctcccgggttcatgccattctcc

SEQ ID NO: 126796 - DNA, 201 bp, Homo sapiens
tgcctgctggatgcaggggaggccaagtccccaacccatggcagctgttgagattgcacatctcaggctaccagctaagcacagaccatggtacattaacratccctcgccttgcgagctggcgggagagcccaagtggagacctccatgctcagctcagaggtattcagaggggctgtcaactaataagaggctcacatg

SEQ ID NO: 126797 - DNA, 201 bp, Homo sapiens
ctgccctgggtgagtcaccctcagtaccaggcaatgtattggacacaggcatgagatgaggactgctcagagaccagtggtcattatgagcctggagcacrggtttgggggtcagaactcaatttgcatacttgtttacctacttactggctgtgtgaacttggataacttccaaaagcttgccaagatttatcatgtttt

SEQ ID NO: 126798 - DNA, 201 bp, Homo sapiens
gtatcctaacacttgtggttatggaagggattccacagcagtgaagtaaagagagaggttatgtgtgtgggcgtgttttctaagaggtctaactcagtctscatgagctggttagctagtgtgagcaccgaatgtgtgccccagagggcttccctgcctcctcccgctggcctgaagacaagaatgctgggagcccagctc

SEQ ID NO: 126799 - DNA, 201 bp, Homo sapiens
ttgtttttttgtttgtttgttttgttttttttgagacggagtcttgctctgtcgcccaggctggggtgcagtgtcgtgatctcagctcactgcaagctccrcctcccgggttcatgccattctcctgcctcagcctcctgagtagctgggactacaggtgcccgccaccatgcccagctaaatttttgtatttttagtaga

SEQ ID NO: 126800 - DNA, 201 bp, Homo sapiens
agatcccagggtccctcactctcacacaggcaggttttagcccatgttggtgaggcgtgagtcacaggctggagaggaattcacttcaagtcagtggtttgggatggcagggatattcatttcctgattctccttgcattgcgcctctcttaataattacacctaataatgacggaacaatgttctcttgttagagaacat

SEQ ID NO: 126801 - DNA, 201 bp, Homo sapiens
tgtaccttctggtctccccctcctggtccacagctgagaaacaatgaccataagatcctagggaccttaagaggagtacctcgagctccaggtgacttctscaggtgctgtgggaggaacaggatcctggcctcaaacatctgttgggttccttttggaagctgatgagagctggcccttcctctcctcaaaacaaatatt

SEQ ID NO: 126802 - DNA, 201 bp, Homo sapiens
ccacctaggagttctgctgcctgctggatgcaggggaggccaagtccccaacccatggcagctgttgagattgcacatctcaggctaccagctaagcacaraccatggtacattaacgatccctcgccttgcgagctggcgggagagcccaagtggagacctccatgctcagctcagaggtattcagaggggctgtcaact

SEQ ID NO: 126803 - DNA, 201 bp, Homo sapiens
tcaatttatacataatacttattttttcaataataaattagcctgagcttactgtaactcttttactttataaactttttagtttttaaaacattttttgrctcttgtaataacacttagcttcaaacacaaacactttgtacagctgtaccaaatttttaaatttctttagtattctgtaagctttttttctattttaaa

SEQ ID NO: 126804 - DNA, 201 bp, Homo sapiens
gagacagacttgggaagctgaacctgggagggggaggttgcagtgagccgagactgcgccactgaactccagcttgggagtcagagctagagtctgtctcaaaaaaaaaaaaaaaaaaaaatcaggatacaaaaactgtaactacaatttggttgaacaaatattctgaaggaaagactccaaacagtaggtgtttatggg

SEQ ID NO: 126805 - DNA, 201 bp, Homo sapiens
agacagacttgggaagctgaacctgggagggggaggttgcagtgagccgagactgcgccactgaactccagcttgggagtcagagctagagtctgtctcaaaaaaaaaaaaaaaaaaaaatcaggatacaaaaactgtaactacaatttggttgaacaaatattctgaaggaaagactccaaacagtaggtgtttatgggt

SEQ ID NO: 126806 - DNA, 201 bp, Homo sapiens
caagattccggaaagcgtacaagccagaggtgaggacggggcacgaggtgtggccacttggcacctggaggggatgggagggtgttgagggagtaggcagkatcccccaggagagtgaggaagggtggcctcagcggagatcaccattgtggctgctttactctgagacctgagcgccctctgcagagaaggaccacctgg

SEQ ID NO: 126807 - DNA, 201 bp, Homo sapiens
cccaggagatggtggcctctacccagggaaccaagggtcctccctctcaacagggatccgagcaagggctgggcccactgggggtgccttacctgaggccmggcagggaaagatgccgagtgcgtgagtatcatccacccactgaatcctgaaccccttctctctgtgcggcgagagaggagacagcacattcaggaaagc

SEQ ID NO: 126808 - DNA, 201 bp, Homo sapiens
ccatgaagaatgtcacctgcgagaatgggctaccggccgtggtgagttgtgtgcctgggcaggtcttcagccctgacggaccctcaagattccggaaagcrtacaagccagaggtgaggacggggcacgaggtgtggccacttggcacctggaggggatgggagggtgttgagggagtaggcaggatcccccaggagagtg

SEQ ID NO: 126809 - DNA, 201 bp, Homo sapiens
ccatggactgcaccggcacagaggcccacatctccagctgcaagctgggcccccaggtgtcactggaccccatgaagaatgtcacctgcgagaatgggctrccggccgtggtgagttgtgtgcctgggcaggtcttcagccctgacggaccctcaagattccggaaagcgtacaagccagaggtgaggacggggcacgagg

SEQ ID NO: 126810 - DNA, 201 bp, Homo sapiens
agggccgggtggaggtgtactatgatggccagtggggcaccgtgtgcgatgacgacttctccatccacgctgcccacgtcgtctgccgggagctgggctaygtggaggccaagtcctggactgccagctcctcctacggcaagggagaaggtaaacgctctgtgctttggatctgagtgctgtcacctggcaaggcccgga

SEQ ID NO: 126811 - DNA, 201 bp, Homo sapiens
tcactttacagagagaggaagggacatgtccacagtcacacgcctgtgacgagtgtcccatctccaacgcccaggcagccctcttccaggttcccacaccrccaggtcctccctgcacccttctgcttctcttcagcatcttctttttggggcctccccagaccccaacttctgccttccccagaactcccaggagtgggt

SEQ ID NO: 126812 - DNA, 201 bp, Homo sapiens
aacctgctattgtgggcttggtcacaataggcacacagatgctttgggtttttcaccgttggttagcctattctttcctcccttgtgaggttcaaatttaktagtttatttttaaaaattgttttaagagctggccaggcgcagtggctcatacctgtaatcccagcactttgggagacggaggcgggatgatcacttgag

SEQ ID NO: 126813 - DNA, 201 bp, Homo sapiens
gtcactttacagagagaggaagggacatgtccacagtcacacgcctgtgacgagtgtcccatctccaacgcccaggcagccctcttccaggttcccacacygccaggtcctccctgcacccttctgcttctcttcagcatcttctttttggggcctccccagaccccaacttctgccttccccagaactcccaggagtggg

SEQ ID NO: 126814 - DNA, 201 bp, Homo sapiens
tgagctgcagcccagacctcagcacaagtctggctactggactaaagcagagctgcctatactcctgtcctggactaaagggctaatgccatgctgactgygtaagaatcgcccaagggagcttaaaagtacagaatagcgcagacctcaacccaccataatctagtttaaaaggtctgggctggagcccaggactctgtc

SEQ ID NO: 126815 - DNA, 201 bp, Homo sapiens
acctcaatttaaaacacctgttgtcagacaagggggttgtggtttttccctatcaggagcaggcacggggtagtaggagacaggtttttacccaggtgggmctttgccatccaagcgtggtgaagagtgaaaagttccaaggagtggagggaatatgaaagggaaggattaaactcatggtccaaggagactgtgctgggt

SEQ ID NO: 126816 - DNA, 201 bp, Homo sapiens
tgtggtttttccctatcaggagcaggcacggggtagtaggagacaggtttttacccaggtgggactttgccatccaagcgtggtgaagagtgaaaagttcyaaggagtggagggaatatgaaagggaaggattaaactcatggtccaaggagactgtgctgggtaaggagggttgtaataagtggagaagttgaaggattg

SEQ ID NO: 126817 - DNA, 201 bp, Homo sapiens
gctttacgagttaagctgcttacgtgaagtggtgcttcgtttatgacatgagagacctttttacatctaaatttatttgaatttcaccagcatcagtccaratctttatcactgggtacatggtgggcactcagtgaatattagctaattgattcattttgatttggcagaataggaaaaagagttggcaaaagagttctg

SEQ ID NO: 126818 - DNA, 201 bp, Homo sapiens
gtgctacccccagaggccatcacggtccatcagttaacccaaagatatcaggcatgggggcctgagaaatagggcgtgcacaggaccagagacaccacagrcattcacatttgattgagttaacacctggtgcatgcaaatcaaaactcatcagcaggctagatttgctcctccggccagtttattccatacatgctcagg

SEQ ID NO: 126819 - DNA, 201 bp, Homo sapiens
gatatgagaaagtgacagtttgagatgatgtacccaccatttgttttgttggttcttccaggagacctggtattggcacggagatgtcaacagcaacaaaktggtcatgagtggagtgaagtgctcgggaacggagctgtccctggcgcactgccgccacgacggggaggacgtggcctgcccccagggcggagtgcagta

SEQ ID NO: 126820 - DNA, 201 bp, Homo sapiens
ctcaagtgggtccctgacccccgagtagcctaactgggaggcaccccccagtaggggcagattgacacctcacacggctgggtacccctctgagacgaagyttccagaggaacaatcaggcaggaacatttgctgttcagcaatattcgctgttctgcagcctctgctgctgatacccaggcaaacagggtctggagtgga

SEQ ID NO: 126821 - DNA, 201 bp, Homo sapiens
gggtttcaccgtggtagcagggatggtctcgatctcctggcctcgtgatccacccgcctcggcctcccaaagtgctaggattacaggcgtgagccaccgcrcccggccgaggccactgttttgttttgttttgtttcttagaagatctcgctctgtcacccaggctggagtacagtggcacaatcctagttcactgcagcc

SEQ ID NO: 126822 - DNA, 201 bp, Homo sapiens
tcacccaggctggagtacagtggcacaatcctagttcactgcagcctcaaactcctgggctcaagtgattctcccacctcagcctcctgggagctaggactatgggcaggtgccaccgtgcccagctaatttttttttttgttattatactttaagttctagggtacgtgtgcacaatgtgcaggcccgttacataggtat

SEQ ID NO: 126823 - DNA, 201 bp, Homo sapiens
acccatcatttacattaggtatttctcccagtgctatccctcccccctccccccaccccacgacaggccccggtgtgtgatgttcccctccctgtgtccarctgttctcattgttcaattcccacctacgcgtgagaacatgcggtgtttggttttctgtccttgtgatagtttgctcagaatgatggtttccagcttcat

SEQ ID NO: 126824 - DNA, 201 bp, Homo sapiens
tttaaactagcaagtctagactgcctttcatttaaaaaagaaaaaaaagtgtgtgtatattttaatatttcacactttcttttcacttttggggctgaactcctggggcaaaatgtatcctaacacttgtggttatggaagggattccacagcagtgaagtaaagagagaggttatgtgtgtgggcgtgttttctaagagg

SEQ ID NO: 126825 - DNA, 201 bp, Homo sapiens
tgtgtgcacgcgcgcacgtttgtgtatgcatgtgtgcacgtgtatgtgtgggcacatgtatgtgtgcatgtgtgtgtctccacacgagtgtgtttgtgtatgtgtgtgcaccggtgtgtgtttatatgcgcacacaggtgtgtgtgcgcgggcacgtgtgtgtgcacgcaatgtgtgtgcatatgtattcctgtgtgcatg

SEQ ID NO: 126826 - DNA, 201 bp, Homo sapiens
cccagctaattttttaactttttttttttagaaatgaggtctcattctgttgcctaggctggtcttggactcctggcctcaagctatcctcctgcttcagyttctcaaagcacgaggattatagatgtgagccaccacacccagcctgttttgtttttattatttatttatttatatttttttgaaacggagtctcagtct

SEQ ID NO: 126827 - DNA, 201 bp, Homo sapiens
gtgtgcacgcgcgcacgtttgtgtatgcatgtgtgcacgtgtatgtgtgggcacatgtatgtgtgcatgtgtgtgtctccacacgagtgtgtttgtgtatgtgtgtgcaccggtgtgtgtttatatgcgcacacaggtgtgtgtgcgcgggcacgtgtgtgtgcacgcaatgtgtgtgcatatgtattcctgtgtgcatgt

SEQ ID NO: 126828 - DNA, 201 bp, Homo sapiens
ctgggagctaggactatgggcaggtgccaccgtgcccagctaatttttttttttgttattatactttaagttctagggtacgtgtgcacaatgtgcaggcycgttacataggtatacatgtgccatgctggcccgctgcacccatcaacccatcatttacattaggtatttctcccagtgctatccctcccccctcccccc

SEQ ID NO: 126829 - DNA, 201 bp, Homo sapiens
tttaactttttttttttagaaatgaggtctcattctgttgcctaggctggtcttggactcctggcctcaagctatcctcctgcttcagtttctcaaagcaygaggattatagatgtgagccaccacacccagcctgttttgtttttattatttatttatttatatttttttgaaacggagtctcagtctttcgcccaggct

SEQ ID NO: 126830 - DNA, 201 bp, Homo sapiens
tgtgcacgcgcgcacgtttgtgtatgcatgtgtgcacgtgtatgtgtgggcacatgtatgtgtgcatgtgtgtgtctccacacgagtgtgtttgtgtatgtgtgtgcaccggtgtgtgtttatatgcgcacacaggtgtgtgtgcgcgggcacgtgtgtgtgcacgcaatgtgtgtgcatatgtattcctgtgtgcatgtg

SEQ ID NO: 126831 - DNA, 201 bp, Homo sapiens
ttgtttttattatttatttatttatatttttttgaaacggagtctcagtctttcgcccaggctggagtgcagtggtgcaatctttgctcactgcaaactcygcctcctgggttcaagcgattttcctgcctcagcctcccaagtagctgggattacagatgtctggctaatttttttttgtatttttagtagagacgaggt

SEQ ID NO: 126832 - DNA, 201 bp, Homo sapiens
gtgtgtagaggacagaattcaaaagcttagggaggttggatgttagagtggatcttacctttaagacctcctcacccacgctgggaagctcctgaagacaygcctttcaccttgatggtgagaagtaaatatatgaaaggagctccagcctccttgaggagctgtgatcactcttctctgaaggccagacctcacagcagg

SEQ ID NO: 126833 - DNA, 201 bp, Homo sapiens
gtgcacgcgcgcacgtttgtgtatgcatgtgtgcacgtgtatgtgtgggcacatgtatgtgtgcatgtgtgtgtctccacacgagtgtgtttgtgtatgtgtgtgcaccggtgtgtgtttatatgcgcacacaggtgtgtgtgcgcgggcacgtgtgtgtgcacgcaatgtgtgtgcatatgtattcctgtgtgcatgtgt

SEQ ID NO: 126834 - DNA, 201 bp, Homo sapiens
atttatatttttttgaaacggagtctcagtctttcgcccaggctggagtgcagtggtgcaatctttgctcactgcaaactccgcctcctgggttcaagcgwttttcctgcctcagcctcccaagtagctgggattacagatgtctggctaatttttttttgtatttttagtagagacgaggtttcaccatgttagtcaggc

SEQ ID NO: 126835 - DNA, 201 bp, Homo sapiens
ccgagaccctggggagggtaagctgatcccacctgatgtttataaggaatacctcgatccccgagtccctctaatgtgaaggaattctttcctgatctctstctgataccccccgaggacacagtgcctcttgttggcaaagcttatactagaatcatctgtgtgaatgttgtaaccttgaatggactgcattgaatgtaa

SEQ ID NO: 126836 - DNA, 201 bp, Homo sapiens
ctttcgcccaggctggagtgcagtggtgcaatctttgctcactgcaaactccgcctcctgggttcaagcgattttcctgcctcagcctcccaagtagctgkgattacagatgtctggctaatttttttttgtatttttagtagagacgaggtttcaccatgttagtcaggctggtctcgaactcctgagctcaaataatct

SEQ ID NO: 126837 - DNA, 201 bp, Homo sapiens
ctttcttctcatcttaaccacagagactgaggctgctgtgaattttttaaatgccttgggtccaggtttttattagtcacagttagctgccaaatgtttcrgcattgccctcccagcagcagctctgtctgtctgggggcggcagagggtggagggcttcagcctaaaagggaaaggtctctagaaggacttctgaaaagt

SEQ ID NO: 126838 - DNA, 201 bp, Homo sapiens
ccaagcgtattggcagcccttctaccgtgaccagcgtcagggacgtctctaggcgccttttcagaatagctggcaacatagggagacccagtctctaccaraaaaaaaaaattagccaggcatggtatagtcccagctactcaggaggctgaggcaggaagattgcttgagcccaggaggtcaaggctatagtgcattcca

SEQ ID NO: 126839 - DNA, 201 bp, Homo sapiens
gggttaactgaagctggaaagatgggcatgaaacacctccggtgccatgctcaggagcttgccctttgggtgggaaaatgtattagttatcaattgctgcrtaacaaattgcccccaggttttgcagctgaaaagagtgaatctttattatcttgcacagtttgtgagagtcaggaattgaggaagggcttagctacttga

SEQ ID NO: 126840 - DNA, 201 bp, Homo sapiens
ggtttcaccatgttagtcaggctggtctcgaactcctgagctcaaataatctgcccaccttggcctcccaaagtgctgggttcacaggcatgagccaccgygccccacctatttatttatttatttttgagatagagtcttgctctgtcacctcagctggagtgtagtggcgcaatctcggctcactgcaacccccacctc

SEQ ID NO: 126841 - DNA, 201 bp, Homo sapiens
ttctagtttatttgtgtagaggtgtttgtagtattctctgatggtagtttgtatttcggcacaggctatttgttttgccccagcctcatccttagtgttayttcctcgaatccccactcctccttcagagaaaaactaaaacacaacttctcccaaagcagcctcctgaccacccacccgacaggttcctcccgttacaat

SEQ ID NO: 126842 - DNA, 201 bp, Homo sapiens
tttgcagtttctttataatatctttctggaacttggatccatgaacttcttttgcccccaggcttgtcctgatataccactggggtaccaaggtaaacacrgtatagctcttcagagtgcctgcatgactcgaagatgtagtgagaaagatacttttctaaatatctttctaaaacaattacaaatataaaattgagtaaa

SEQ ID NO: 126843 - DNA, 201 bp, Homo sapiens
ccaccacaagacacataaacagatgcacactttatacatacagagacccatgtgacatagacacatacagggagagtgcacagagatccacatgacacacmggcacacacacacaaccctgtcatgcatacatcatcatgcacacagacacacaatcccagagacacacaatcccagagacacacacacagagacatatac

SEQ ID NO: 126844 - DNA, 201 bp, Homo sapiens
cactatgcccagctaatttttgtatttttggtagagatagggtttcaccatgttggccaggctggtctcgaactcctgacctccagtgatccacctgcctyagcctcccaaagtgctgggattacaggcatgagccaccgtgcctggcctaaaaagttgtttttaagtacatattgtttccatttggtagatgaaatcctg

SEQ ID NO: 126845 - DNA, 201 bp, Homo sapiens
ctgagaccactctcagatgctggccatgtttttccaattgttatgtgttatcttatagtcaaaccatgtctcttgttttgttgttgtttgtttgttaaggktgtagggatcgggtaatatgaacccaacaggcattgatatgatttggctgtatccgcacccaaatcttatcttaaattgtagctcccataattcccacat

SEQ ID NO: 126846 - DNA, 201 bp, Homo sapiens
gctcagccttggcagctcacagttccccaaataacacctggggaagctgaagatcaaaattaaatgtaagcaactgcattatgcagcttagtatcactcaraactgtagttggtgcctgaataacctgactcgaatctagcaggcagcacctgtttgaaccaagatatattagctgctatttttattggccacctgctatg

SEQ ID NO: 126847 - DNA, 201 bp, Homo sapiens
cagcctcaacctcctgggctcaagtgatcctcttgcctcagcctcccaagtagctggaacaataggcatttgctaccatgcccagccaattaaaaaaaaawatttttttgtagagacaggatctccctatgttgctcaagctggtctcaaacccctgagctgaagcaatcatcccaccttggcctcccaaagtgccaggat

SEQ ID NO: 126848 - DNA, 201 bp, Homo sapiens
ccaagtagctggaacaataggcatttgctaccatgcccagccaattaaaaaaaaaaatttttttgtagagacaggatctccctatgttgctcaagctggtstcaaacccctgagctgaagcaatcatcccaccttggcctcccaaagtgccaggattacaggcatgagcacccagcccatttctaaattttaagttgttgc

SEQ ID NO: 126849 - DNA, 201 bp, Homo sapiens
agcctcaacctcctgggctcaagtgatcctcttgcctcagcctcccaagtagctggaacaataggcatttgctaccatgcccagccaattaaaaaaaaaawtttttttgtagagacaggatctccctatgttgctcaagctggtctcaaacccctgagctgaagcaatcatcccaccttggcctcccaaagtgccaggatt

SEQ ID NO: 126850 - DNA, 201 bp, Homo sapiens
agccttgtccccagatgtctgagacagccacgcaagtttacatagacgttcagccacaaggagactgaccccagatggctgagacagccacgcaagtttayacagaagttcagccagaaggagaccaaccagttgagtctgaagcatgctaggctcttaagttggctttacctgtcctgtccagtcttgagctgtagtctt

SEQ ID NO: 126851 - DNA, 201 bp, Homo sapiens
ccactgtactggcaacgaggcgacccttgcagcatgcacctccaatggctggggcgtcactgactgcaagcacacggaggatgtcggtgtggtgtgcagcracaaaaggattcctgggttcaaatttgacaattcgttgatcaaccagatagaggcaagtcatgtgctcttgatgtttccttcatgcaaacatttttcctc

SEQ ID NO: 126852 - DNA, 201 bp, Homo sapiens
tggggcaggaagagagtgagccacactgggcctctttctctgtgcccttccttggacgcaccatgggtatgtgtgcttcaggagggaggccctgccccccrgagccttgtccccagatgtctgagacagccacgcaagtttacatagacgttcagccacaaggagactgaccccagatggctgagacagccacgcaagttt

SEQ ID NO: 126853 - DNA, 201 bp, Homo sapiens
taactttgcattttctagtagccacaattttaaaaagatgacgttagctttaataatgtattttctttaaaccagtgtatccaaaatattatttcaacatrtaatcaatatgaatgctattaatgagatcatttgcatatttggtgctaagtctttgaaatccagtatgtattttacacttaacagacctctcagtttgtc

SEQ ID NO: 126854 - DNA, 201 bp, Homo sapiens
ggacgcacagcacctgcagctctgactggctccagcctcaccagcatagacatgaggtcctggtcaggctctctgctctgtgccttaggacccctgcccayatcgggaccccaactgcctgttggtgcctccatgtccctgcaaggctgcgtgccacatgaggggagcacctgtgtctttatctctgtgtgcttagtgccg

SEQ ID NO: 126855 - DNA, 201 bp, Homo sapiens
ccacaccacaaaaccccatctgtatgtcaccatcatcaaggaccgaaggtagataaaaccacaaagatggggaaaaaacagagcagaaaagctgaaaattytaaaaaccagagcacctctccccctccaaaggaacacagctcctcgccagcaatggaacaaagctggacagagaatgactgacaagttgagagaagaagg

SEQ ID NO: 126856 - DNA, 201 bp, Homo sapiens
attggcgtcgagaatggacgagctttccatattaagccaaggggtatgaaatcactggttctctatgtaggtctccgtagccccacgttcccatcctaacrcatctctcctctcttccagaaagctcctgctgcttctgtaccccgcctgtccctcccagctgcgcagggccccttcgtgggatcatcagcccgaagacag

SEQ ID NO: 126857 - DNA, 201 bp, Homo sapiens
atttttatattttttgtagagacagggttttgccatgttgcccaggctggtctcaaactcctggactcaagcaacccacccgccttggcctcccacagtgstgagattacaagcttaagccactccactcaacctcttaggagcattttgaggcgcttcttacagatgaagcatgtgaaggaaaagggagttcacatcagt

SEQ ID NO: 126858 - DNA, 201 bp, Homo sapiens
atcagtctgactgctgcagacctgtggtgttggctggttgatcatgatgttcctcgaagtgaaatagacaggaagcctactaagttcgtacttaatctgtrtaagcagaaaacttctaggtcaagcaaacaaaagtctatcccaaatcataaaagcagagtagagtcatgacccctcaatccattcccgtacttgagccag

SEQ ID NO: 126859 - DNA, 201 bp, Homo sapiens
accactgcactccagcctgggcaacagagtgagaccctgcctcaaaaaagaataaaaattaattaattaaaagaaaaaaaaggccgggcacggtggctcabgcctgtaatcccagcactttgtgaggccaaggcgggctgatcatgaggtcaggaaatcgagaccatcctggctaacatggtgaaaccctgtctctactaa

SEQ ID NO: 126860 - DNA, 201 bp, Homo sapiens
tcaacagtgcacaagggttccagtttccatacccttgccagcactgtcattttctgttttttttgtttgttttgttttgttttgttttgtttttgagacgsagtcttgctctgtcaccaggctggagtgcagtggtgtgatctcagctcactgcaacctctgtctcccgggttcaagcgattctctgcctcagcctcccga

SEQ ID NO: 126861 - DNA, 201 bp, Homo sapiens
ccctgtctctactaaaaatacaaacaattggccgggtgtggtggcgtgcgcctgtagtcccagctacttgggaggctgaggcaggagaatggcgtgaaccygggaggcggagcttgcagtgagccgagatcgcgccactgtactccagcctgggcgacagagcgagactccgtctcaaaaaaaaaaaaaaaagaaaaagaa

SEQ ID NO: 126862 - DNA, 201 bp, Homo sapiens
agcctctgtcctttactccacagatagatgggtggggtgggtgtgggaagggaaccctctaaggggctcaaagtgtctcctttccttgctgtgtctccttkccttgctgcagccaaatagttgtccccaaccctacctccctgatccctgccaggcaggtgtgagtctctgcacacagcacgctcaacaccaggaatatct

SEQ ID NO: 126863 - DNA, 201 bp, Homo sapiens
gtggtggcctttccttggccaggcatggccaggcaagctggtgtccctgcaggcagcctgcacagagcccctgggccgggccaggcgccaagttcaagggygccccgtggcatccttacccttaaggaactcacacatctacaggagatagaccctaatccctagagtagcttgtgggaaggcgtattgcagaagtgagat

SEQ ID NO: 126864 - DNA, 201 bp, Homo sapiens
cagtgctcatccagacgagaggatgaaatacctgtcttagcacttctcacatgctgattgatactgatcaaaatcagattgatactgattaatgattaataaatataagttctgttttacttttaaacatccaactttggctgggtgtagtggctcatgcctgtaatcccagcactttgggaggctgagccgggcggatca

SEQ ID NO: 126865 - DNA, 201 bp, Homo sapiens
gcttttcttaccagtcggagccaagaaaagcaaaccccctccctggcaggcttcctacctggctggccctaccagtgcccccagcctggctgctgttctamgctggacagcacgcgccttgttcagatggcgtttggaagccatctcccaaccgtggccagtccagagtccttctcggcttttgaggagttgatctcaggc

SEQ ID NO: 126866 - DNA, 201 bp, Homo sapiens
cccagcactttgggaggctgagccgggcggatcacttaaggtcaggagttcaagaccagtctagccaacatggtgaaaccccttctctactgaaaataccaaaaaaaaaaaaaaaaattagctgggtgtggtggtgtgtgcctgtaatcccagctacttgggaggctgaggcaggagaattgcttgaacctgggacgcaga

SEQ ID NO: 126867 - DNA, 201 bp, Homo sapiens
ccacctcttggctattgcgaataatactgttatgaacacaggtgtgtagatatctcttagagacactgttttcaattcttttgctggatcatatggtaatkttatttttaattttttaaggaaacaccgtactgttttctatagtagctgcaccattttgtgttcccatcaacagtgcacaagggttccagtttccatacc

SEQ ID NO: 126868 - DNA, 201 bp, Homo sapiens
tgtgtgtgtgtgtgtgtgtgtgtgtgtgtgtgagtatattttttgctttttgtttttgtttttcttggagacaagtcccagctctgtcgcccaggctggamtggagtgcagtggcacagtcactgctcactgcagcctcaacctcctgggctcaagtgatcctcttgcctcagcctcccaagtagctggaacaataggcat

SEQ ID NO: 126869 - DNA, 201 bp, Homo sapiens
ccagcactttgggaggctgagccgggcggatcacttaaggtcaggagttcaagaccagtctagccaacatggtgaaaccccttctctactgaaaataccaaaaaaaaaaaaaaaaattagctgggtgtggtggtgtgtgcctgtaatcccagctacttgggaggctgaggcaggagaattgcttgaacctgggacgcagag

SEQ ID NO: 126870 - DNA, 201 bp, Homo sapiens
tatggatagaccacattttgttaatggagacttgggttgcttccacctcttggctattgcgaataatactgttatgaacacaggtgtgtagatatctcttrgagacactgttttcaattcttttgctggatcatatggtaatgttatttttaattttttaaggaaacaccgtactgttttctatagtagctgcaccatttt

SEQ ID NO: 126871 - DNA, 201 bp, Homo sapiens
gtttcagagtttcctcccttctgaaggctgactaatattccatcgtatggatagaccacattttgttaatggagacttgggttgcttccacctcttggctrttgcgaataatactgttatgaacacaggtgtgtagatatctcttagagacactgttttcaattcttttgctggatcatatggtaatgttatttttaattt

SEQ ID NO: 126872 - DNA, 201 bp, Homo sapiens
acgcctttcaccttgatggtgagaagtaaatatatgaaaggagctccagcctccttgaggagctgtgatcactcttctctgaaggccagacctcacagcaggaacagcagccactgaaccagtaacctgaatgcgaccggagtaattggctccagggtggcgggggccccgtggctgtagtactaccaaaggcaaggtgga

SEQ ID NO: 126873 - DNA, 201 bp, Homo sapiens
tcaggctgtgcgttggtccgttggtcaggagctatcacaggaaccctccatcactttctggccttgtttgttagtcacaggatgagcatggctggctctcyggtgacatcagaaagctttccaaaatcctcagttctgactgtcccccaggctctaacatctccaccccagcatcctcttcggggcactgagcactgctgg

SEQ ID NO: 126874 - DNA, 201 bp, Homo sapiens
agcaccctcgtagcctgccagaaatctatactgtattctttctcccagttctccaaagacacctttcaccaggatgagcgtgcattggagaaaaggaaataatcagatcttttggactactggccactggttctgagctgacagtaattctaggagacccagaacatcaaagtgggggcttatgggtttttagcttacgtc

SEQ ID NO: 126875 - DNA, 201 bp, Homo sapiens
ttgatctcctgaccttgtgatccgcccgcctcagcctcccaaagtgctgggattacaggcgtgagccactgcacccagccagttgccatgcattttaatcrtacatgtattttaaaccccacaggacattcttcctgttttacacactcgatcttcattgagatttacctacatcatttcctacttcatactcttcattcc

SEQ ID NO: 126876 - DNA, 201 bp, Homo sapiens
agatggggtttcaccatgttggccaggctagtcttgaactcctgacctcagatggcccacccgcctcagcctcccaaagtgctgggattacagatgtgagccactggccgatttcctagaacaagtaaagtagtccaaccacagcaggcttgacccagcctctgacaaagagcaaatgccctatctgtctcttcttgattc

SEQ ID NO: 126877 - DNA, 201 bp, Homo sapiens
tctgagtcacatcatgccacctggcagcttccattgggccatataacagtgctccttccctgggcatggtgagctccacaggatcccctggatcttttttkgagacagagtctcactcagtcacccagcacagtggcgcgatctcggctcactgcaacctctgcctccccggttcaagcaattatcctgcctcagcctccc

SEQ ID NO: 126878 - DNA, 201 bp, Homo sapiens
tgccttgtcctcccaaggtgctgggattacaggcgtaagccagcacgcctggcctaagatgtcttttaaaacgttgcgagggggcaattccaagatggccmaataggaacagcttcagtctacgtctgccagtgtgagcaacgcagaagatgggtgatttctgcatttccaactgaggtacttggttcatctcactggggc

SEQ ID NO: 126879 - DNA, 201 bp, Homo sapiens
catagtgtcagatgttgggccatcaccccacagaaaggaatgtggtgaggtcactgatcacagcctggaagaaatgatagccctcactagcccagggcctsacaccacatccagtggttttctgtgtgagactgtagaatcctgcattgaacttaacctccagctgagtcaaagaccgtagagctttcctccttctagaag

SEQ ID NO: 126880 - DNA, 201 bp, Homo sapiens
tcaaaacacggtgcagcctggctgtgctctgctggctggaggcgttctgtttcctctattcatgttcagaaaaaaactgggctgccacacacttcgctccyttctttaaaaccctgtgctgctgccactgagaaccaaaggaacaggaaaagggaaatgcctgggctgttttaagagacttggaaagggcttgaccttccc

SEQ ID NO: 126881 - DNA, 201 bp, Homo sapiens
acagcaacaaagtggtcatgagtggagtgaagtgctcgggaacggagctgtccctggcgcactgccgccacgacggggaggacgtggcctgcccccagggyggagtgcagtacggggccggagttgcctgctcagaaagtgagagctcctcccctccctccccaccgggctcccgaggggaccagagtcccaccagttatt

SEQ ID NO: 126882 - DNA, 201 bp, Homo sapiens
aaacactcatccattatcaggacaatactactactgggataagaaaaatcagggattctggagtgtagcagaaagttcttagggtgacaggtgcttcaagrgctaacaatgtcttccaatgaatgatgcttgttggacaattgtaacagtactgcttatgaccaactcagaaccttgagtaagttcaaggttctgaacctc

SEQ ID NO: 126883 - DNA, 201 bp, Homo sapiens
cgttgcgagggggcaattccaagatggccaaataggaacagcttcagtctacgtctgccagtgtgagcaacgcagaagatgggtgatttctgcatttccarctgaggtacttggttcatctcactggggctcgtaggacagtggggtcaggacagtgggtgcagcccgcagagtgtgagccgaagcaaggcgaggcatccc

SEQ ID NO: 126884 - DNA, 201 bp, Homo sapiens
agaccccgctcaccagaaagccacacggtttccaggatgctgacgctctacatggggctctgggaatggcaagctgtgtcctttgctgagttagaactgcwtgccagctacactgtgcgccccagtcttctgtagaaaatgagaaaagccccccagtgcatgaagtgtccagattccttccggaacagtcaaaccttctct

SEQ ID NO: 126885 - DNA, 201 bp, Homo sapiens
gaagtgtgtgtgagcaggaaggagggtacctcacccaatgggattagatacaagggcagtttagggaaggatttctggagaagggaatcccatccatgggsaaagggcattccaggcacaaggaacagcatgggcagaggcacagaggtgtgaaggttgggctggggtaagcagagcgtgatctcagggagagtgcatctg

SEQ ID NO: 126886 - DNA, 201 bp, Homo sapiens
tatcagtgattgaagatcaaatgaatgaaatgaagcgagaagagaagtttagagaaaaaagagtaaaaagaaacgaacaaagcctccaagaaatatgggaytatgtgaaaagaccaaagctacatctgattggtgtacctgaaagtgacagggagaatggaaccaagttggaaaacactctgcaggatattatccaggaga

SEQ ID NO: 126887 - DNA, 201 bp, Homo sapiens
tttccaggatgctgacgctctacatggggctctgggaatggcaagctgtgtcctttgctgagttagaactgcttgccagctacactgtgcgccccagtctyctgtagaaaatgagaaaagccccccagtgcatgaagtgtccagattccttccggaacagtcaaaccttctctctgtcctagaggccatcccaggcctggt

SEQ ID NO: 126888 - DNA, 201 bp, Homo sapiens
tgcattgacgcagcacttggtttctctcctctctgcctccttcagggcccatctggttagacaatctccactgtactggcaacgaggcgacccttgcagcmtgcacctccaatggctggggcgtcactgactgcaagcacacggaggatgtcggtgtggtgtgcagcgacaaaaggattcctgggttcaaatttgacaatt

SEQ ID NO: 126889 - DNA, 201 bp, Homo sapiens
cccccgagggccccccaccttgggcccccccaccccgctgctgccttactggactggctccctctgtgaacctgctgggctggtggccactcggaagcctkagagctgccccctggccaccaactgcagctcttcctcagcacctctgcttcccctagtgatacggtttggctgtgtccccacccaaatctcatcttgaat

SEQ ID NO: 126890 - DNA, 201 bp, Homo sapiens
cccagtcttctgtagaaaatgagaaaagccccccagtgcatgaagtgtccagattccttccggaacagtcaaaccttctctctgtcctagaggccatcccrggcctggtaagccttaacgccttggagccttggcaggtgcccttggtgaccatgtgttttcctggccccagaggcaacgaggcagccacattccgcagcc

SEQ ID NO: 126891 - DNA, 201 bp, Homo sapiens
ctgtggctgctgttgctggcagcacacctctgaggcccaagaagggacccccttccctcccgccatgcagcactgcccactctgcaggaaattattttcaragtaattcccagtctggggtggagttagtaatctccatgtatccaccaaggcccgtgaaggaccttatagcctcggaagctcacctgcttaacccccgag

SEQ ID NO: 126892 - DNA, 201 bp, Homo sapiens
gtctggaaggcagactgaggaccaccaccctgcccggcccttgaagcagtggcttgcagttgcatctttcccatgtccctttccctcttcctacagcctgyggctgctgttgctggcagcacacctctgaggcccaagaagggacccccttccctcccgccatgcagcactgcccactctgcaggaaattattttcaaagt

SEQ ID NO: 126893 - DNA, 201 bp, Homo sapiens
tgagaactgagagagcatgctaaactccacagtctggccccagggatgggggcaggaaagatggcaccacctccttgctttattagagggaaagaaggtgyttcttgtgcagaaccgtcatcataacagaaagatagcttattacacgccaggcactgttctagctctttgttagcttacataatccctgtattagttcgt

SEQ ID NO: 126894 - DNA, 201 bp, Homo sapiens; identical to SEQ ID NO: 21538

SEQ ID NO: 126895 - DNA, 201 bp, Homo sapiens
agctccctctgccagtctccagttctcacccccgcaggctcccttcaagcctagggtggtcacagccccctctgagtcgccagccctagggtgtgacaccrgcctttgttagttctgcagaactctgccggcatgtccgtagtcttaaaaaactctccttaaattaagttggagtgtgttctgttccctgccaggaactct

SEQ ID NO: 126896 - DNA, 201 bp, Homo sapiens
gtgggacctcccagccctgcgtggtggaaatgtaggagtggggctggattggcgtcgagaatggacgagctttccatattaagccaaggggtatgaaatcrctggttctctatgtaggtctccgtagccccacgttcccatcctaacgcatctctcctctcttccagaaagctcctgctgcttctgtaccccgcctgtccc

SEQ ID NO: 126897 - DNA, 201 bp, Homo sapiens
cttgttgaccagcatgccatcctccgcagccgcccctgacctggtcctcaatgcggagatggtgcagcagaccacctacctggaggaccggcccatgttcmtgctgcagtgtgccatggaggagaactgcctctcggcctcagccgcgcagaccgaccccaccacgggctaccgccggctcctgcgcttctcctcccagat

SEQ ID NO: 126898 - DNA, 201 bp, Homo sapiens
gcgcgatctcggctcactgcaacctctgcctccccggttcaagcaattatcctgcctcagcctcccaggtagcttggattatgggtgtgcaccaccacacycagctaatttttgtatttttagtaaagacggggtttcaccatgttggccaggctggtcttgaactcctgacctcaagtgatccacccacctcggtctacc

SEQ ID NO: 126899 - DNA, 201 bp, Homo sapiens
tgttttagggtgacctcacatcccagtgagcccctcaattcagggccagggaggttgattggttaccccaccccaacccaacccaggctgttttcagcacrgcagcctgataagctgtgattcagaccttgaagttgttaggcaaaagctctccactcggctctgtatttgactcaggaagaactgaagtctttataatgg

SEQ ID NO: 126900 - DNA, 201 bp, Homo sapiens; identical to SEQ ID NO: 21552

SEQ ID NO: 126901 - DNA, 201 bp, Homo sapiens
actcagctaatttttgtatttttagtaaagacggggtttcaccatgttggccaggctggtcttgaactcctgacctcaagtgatccacccacctcggtctmccaaagtgctgggattatagacacgagccactgcacctggcctccctggatcttgactatccctgcagtcatttactgattggccgatgtgtgggtttgt

SEQ ID NO: 126902 - DNA, 201 bp, Homo sapiens
tatccctgcagtcatttactgattggccgatgtgtgggtttgtgctctccaagggcctacaggacaaagaccactcattctgaggaataaacaggccctcratgacataaactttccatttatcatgggtgtgtgctatgtgacctaatcatttcactgcccagagcagccagaggtttccaggggcctgcagaactctgg

SEQ ID NO: 126903 - DNA, 201 bp, Homo sapiens
tagagaaaaaagagtaaaaagaaacgaacaaagcctccaagaaatatgggattatgtgaaaagaccaaagctacatctgattggtgtacctgaaagtgacrgggagaatggaaccaagttggaaaacactctgcaggatattatccaggagaacttccccaacctagcagggcaggccaacgttcaaatttgggaaataca

SEQ ID NO: 126904 - DNA, 201 bp, Homo sapiens
catttactgattggccgatgtgtgggtttgtgctctccaagggcctacaggacaaagaccactcattctgaggaataaacaggccctcaatgacataaacwttccatttatcatgggtgtgtgctatgtgacctaatcatttcactgcccagagcagccagaggtttccaggggcctgcagaactctgggagaaagaggca

SEQ ID NO: 126905 - DNA, 201 bp, Homo sapiens
tgaaagtgacagggagaatggaaccaagttggaaaacactctgcaggatattatccaggagaacttccccaacctagcagggcaggccaacgttcaaattygggaaatacagagaatgccacaaagatactccttgagaagagcaactccaagacacataattgtcagattcaccaaagttgaaatgaaggaaaaaatgtt

SEQ ID NO: 126906 - DNA, 201 bp, Homo sapiens
actcctcagtgaatgtgaaagaacagaaattataacaaactgtctctcagaccacagtgcaatcaaactagaactcaggattaagaaacccactcaaaacygctcaactacatggaaactgaacaacctgctcctgaatgactactgggtacataacaaaatgaaggcagaaataaagatgttctttgaaaccaatgagaa

SEQ ID NO: 126907 - DNA, 201 bp, Homo sapiens
ctttgggaggccgaggcgggcagatcacaaggtcaagagatcgagaccatcctggccaacatggtgaaaccccatgtctactaaaaacacaaaaattagcygggcatggtggcatgtgcctgtatttccagctactcaggaggccaaggcagaagaatcgcttgaacctgggaggtggaggttgcagtgagccgagatggc
